United States Patent Application Publication US 2005/0228172 A9 - sequence listing, part 108

SEQ ID NO: 500655 - DNA, 574 bp, Homo sapiens
ctgagaaagaaatcactcatcctttatttcattcattttcttagctgattccccatccctcaggatctgtagaggtatttgtcgactattcactggggtggcctacaaaaatyctccagcttttggttggtcatgaagttctgtggattttctgccttttgaatccatcccctcctttctattccactgccaccgactgccctagtgcagagcctctttacgtcatggccacacttccagtgcactccaaagtacttgccttccaggctctgtctgccatccttactcctttctttgctgcctgccatctttcttcatacaaatctgatcatatcactgcactaattgcaaaactttaagagctcataatctgctattaagtctcaattttattcaagtccatttgcaatctaaccccaccctacttgtctctggccattccctcctgccctgaagttcaagcagaactggctaacatgcatttcccacatcccccgacccactatttcttccagctcctctgtctggaatgcgcttaccttttcctcctcattcttcgtgtccaacaactcct

SEQ ID NO: 500656 - DNA, 574 bp, Homo sapiens
ctgagaaagaaatcactcatcctttatttcattcattttcttagctgattccccatccctcaggatctgtagaggtatttgtcgactattcactggggtggcctacaaaaatcctccagcttttggttggtcatgaagttctgtggattttctgccttttgaatccatcccctcctttctattccactgccaccgactgccctagtgcagagcctctttacgtcatggccacacttccagtgcactccaaagtacttgccttccaggctctgtctgccatccttactcctttctttgctgcctgccatctttcttcatacaaatctgatcatatcactgcactaattgcaaaactttaagagctcataatctgctattargtctcaattttattcaagtccatttgcaatctaaccccaccctacttgtctctggccattccctcctgccctgaagttcaagcagaactggctaacatgcatttcccacatcccccgacccactatttcttccagctcctctgtctggaatgcgcttaccttttcctcctcattcttcgtgtccaacaactcct

SEQ ID NO: 500657 - DNA, 574 bp, Homo sapiens
ctgagaaagaaatcactcatcctttatttcattcattttcttagctgattccccatccctcaggatctgtagaggtatttgtcgactattcactggggtggcctacaaaaatcctccagcttttggttggtcatgaagttctgtggattttctgccttttgaatccatcccctcctttctattccactgccaccgactgccctagtgcagagcctctttacgtcatggccacacttccagtgcactccaaagtacttgccttccaggctctgtctgccatccttactcctttctttgctgcctgccatctttcttcatacaaatctgatcatatcactgcactaattgcaaaactttaagagctcataatctgctattaagtctcaattttattcaagtccatttgcaatctaaccccaccctacttgtctctggccattccctcctgccctgaagttcaagcwgaactggctaacatgcatttcccacatcccccgacccactatttcttccagctcctctgtctggaatgcgcttaccttttcctcctcattcttcgtgtccaacaactcct

SEQ ID NO: 500658 - DNA, 561 bp, Homo sapiens
ttgtaattccagctgacttggaagactgaggcaggagaatcacttgaaccagggaggtggaggttgcagtgagccacgatcacgccactacactgcagcctgggtgacagagtgagactccatctaaaaaaaaaagtgctttttttttttttttttttttttttgkgaatacatggcaagaatctctgtgtaaaggcagttgaaaagttagcaggacagcagaattacctttatggaatttgggtttctgtgctgtgggattgtcgaggtacctgggtcagccctagggaaaactgagagaaggtcagtttgtctgaagtctcagtccttgatcttggattttttcttacttctgtcccttccatgttgtggaggcacctactctgtccccctgcatctaaacatagcctgcagtatggggaggtgcttaatgtcagacagaatcacagagccaggcttgaatgtaggtgtgtgtccataagcaagttgcctaacgtctctgaacttcagttttctcagctatgaagtggaaaggacagaaaggacaattgctgtgtcata

SEQ ID NO: 500659 - DNA, 561 bp, Homo sapiens
ttgtaattccagctgacttggaagactgaggcaggagaatcacttgaaccagggaggtggaggttgcagtgagccacgatcacgccactacactgcagcctgggtgacagagtgagactccatctaaaaaaaaaagtgctttttttttttttttttttttttttgtgaatacatggcaagaatctctgtgtaaaggcagttgaaaagttagcaggacagcagaattacctttatggaatttgggtttctgtgctgtgggattgtcgaggtacctgggtcagccctagggaaaactgagagaaggycagtttgtctgaagtctcagtccttgatcttggattttttcttacttctgtcccttccatgttgtggaggcacctactctgtccccctgcatctaaacatagcctgcagtatggggaggtgcttaatgtcagacagaatcacagagccaggcttgaatgtaggtgtgtgtccataagcaagttgcctaacgtctctgaacttcagttttctcagctatgaagtggaaaggacagaaaggacaattgctgtgtcata

SEQ ID NO: 500660 - DNA, 561 bp, Homo sapiens
ttgtaattccagctgacttggaagactgaggcaggagaatcacttgaaccagggaggtggaggttgcagtgagccacgatcacgccactacactgcagcctgggtgacagagtgagactccatctaaaaaaaaaagtgctttttttttttttttttttttttttgtgaatacatggcaagaatctctgtgtaaaggcagttgaaaagttagcaggacagcagaattacctttatggaatttgggtttctgtgctgtgggattgtcgaggtacctgggtcagccctagggaaaactgagagaaggtcagtttgtctgaagtctcagtccttgatcttggattttttcttacttctgtcccttccatgttgtggaggcacctactctgtccccctgcatytaaacatagcctgcagtatggggaggtgcttaatgtcagacagaatcacagagccaggcttgaatgtaggtgtgtgtccataagcaagttgcctaacgtctctgaacttcagttttctcagctatgaagtggaaaggacagaaaggacaattgctgtgtcata

SEQ ID NO: 500661 - DNA, 418 bp, Homo sapiens
ctcatggaaagcacatagctggtgtctggcatagactgagcactcagaaaatctagtgatgcctgcctaggcagagagccctgtcctcagggggtgcaaccagcaacttacctgcggcaatgtggggagttaggcttattgtccagttccccaggcatagcctggcatgggatgggctgagaggtggagamggggtgttggccatagagggagagaagaagtggggagcaggaggagggtaagggaaaagggtgttgtctgattttcccccagaagtcaaggtacaatttgccagcaaaagggatggggttggggcaagaggtgacctctaggagccatccgagagctgcacaggagccagagggttattggaggcccctagatggggaggaaagaggaaagggactggcagctaagg

SEQ ID NO: 500662 - DNA, 568 bp, Homo sapiens
gacagttagaggaggcccttgtgcacgccagaaaggaagaaaaagaagctgtgtcagccagaagggccctggagaatgaactggaggctgctcaggtaaacaccaagggctgttgtcattactccctcaagaagaatgcatagagacgcaacaccagagggatgtgtggagattgtccttggccctctctttccatgtagctccctttcacccataataaccactcagttatttgaactatccgtctagaccagcgattctcaactgggggggatttggtaatgcctgaagacaattttggttgtcacaactggagagatgctactggcgcctcgtgggtggaaaacagggatagggatgctgttaaacatsctatgaagcacaggacagcccccactgcaaagaatgatcaggccccaaatgtcagtaatgcgaaggcggagagccctccgtttagacgttaaagagcttgacagctttccaaagataaaatatgagtggtgtgagaaggccggcaggactggcctccgaggcggtgtggagtctgctttctggcagaagccaattt

SEQ ID NO: 500663 - DNA, 568 bp, Homo sapiens
gacagttagaggaggcccttgtgcacgccagaaaggaagaaaaagaagctgtgtcagccagaagggccctggagaatgaactggaggctgctcaggtaaacaccaagggctgttgtcattactccctcaagaagaatgcatagagacgcaacaccagagggatgtgtggagattgtccttggccctctctttccatgtagctccctttcacccataataaccactcagttatttgaactatccgtctagaccagcgattctcaactgggggggatttggtaatgcctgaagacaattttggttgtcacaactggagagatgctactggcgcctcgtgggtggaaaacagggatagggatgctgttaaacatcctatgaagcacaggacagcccccactgcaaagaatgatcaggccccaaatgtcagtaatgcgaaggcggagagccctscgtttagacgttaaagagcttgacagctttccaaagataaaatatgagtggtgtgagaaggccggcaggactggcctccgaggcggtgtggagtctgctttctggcagaagccaattt

SEQ ID NO: 500664 - DNA, 655 bp, Homo sapiens
cgcttgagaaattagttccgtcatctataacacgagcataactctccccgattgtctcacagtgttgtcataaggatcaaatgtaagtgaaactccttccaaaactgcaaaaagcattcacttggaaagtactgttattgaacgtgaatgcttcataggtgtgtgtactgctaattaacttgtcaaggaaaaggctgcrtcgtagagcctactttctgttgcacctaacatggtgctggctaccacattccacacacttgcttgttgaactaatgacccttagagcctcagccctaaaaggcacttttccctctatggccaatagattgttattcataaccacttgggaaacttccactttctgccttatgtttttgtcttctttttcaaatcttccctattccaaagggcactttcctctggtctcttctgcttattcacatggacttccctttcctcggttcagggtgaccaagaattggaagttccagagcttggggatagcaccttatgagcaggcagccctgctcaaagtagaacgtgaatccctggctgcttttccgtattcttttaggtccctgttgatagatttctttgcaaacaagtgggatactcatgctcctttgctcctgagagtgaagaaagttgcaaccca

SEQ ID NO: 500665 - DNA, 370 bp, Homo sapiens
tatccatgagatagtaaaccacagtgcctaagagttcgggatctgcaatcagatccctggattcataccctggatctgtcttttaaatgctgtgtgactttgggcaagctatttgatctcttaagtctcagtttttaacagtaaagtgtggataataacatctagstcatagggttgtaatcaatatagtatattcaagtacttaatatagctcctagcaaataatgtgtccagtgaatgttagctgtgttctgatttatttgtatttatccttttttctcctttgacaagataaattccttggagacatagccatgtcttctctttccttgataatgattcattctagccaatgaaatatcctgaaaaa

SEQ ID NO: 500666 - DNA, 685 bp, Homo sapiens
ctgagtcctgtcctagaaggtcataatgcaattcttcaaagatgatactgtcagtagatttctgaaaaatcaccagaatgtgcttcttacaatttttgcctgcataagcataacacagtctgtactttttcatagactaaagaacgttagagatacaaacctataaataaccacttccaattaacctcctctaccctccctgtctttcagtttggtccaagttaacgctcctacggaagccaattacaattgtcacttgtttttcagatatatctcttttcttgtttataatgtttctggtatcttcttgtagttaattcccataagctccctggataaattcattagccaggacggtttccactttaactaaattgcatttgtacttctttgcatctcttcaaaacattcgttcttcagtttaagacacaggaaagacatccatcaagacttagatttggatttaagagttagaattggaacaagcccaaattctgaatttaagtttgtttttggcatgctgcactttctgtctttagtttctataacttctcactattcagaccttttaatctgctactttccctattaaaatataactattccatactaaagcccycttggttctctgctaaatgataataatctcctcttttctaccttatcattttacccctctcaaatg

SEQ ID NO: 500667 - DNA, 657 bp, Homo sapiens
aaatctaccgcttagatttaaccaaggtttcgtggggtgacacagctggaacccagcagaggaaagagaaaccaggcccaagagaaacagctcattaggaaagattatgtagtaaacttcattatcaagaaaatacacacctacaagaaatacatataaattgaagaatgaaaggatggcacagaatatttggctttagaaaaaatggagggggtgagaggagtgaattattgcaaaactgtgcaacagacaacatcccagactaagaagatatttgattaacaagcaatatgccagactaaaaaaatatatgatttattaaactttgatacagatataaaccttataagtacaatttatacatgtgatctaagagatcaacaatcaggacatctcatttgggcaaatcccacctgagaaattctaaactttctctccaaaatgtatttctctctgaaactacagaaaataccctgcraaactacttctctaatggggaataaagagttggctagatgaaaatgttaaaaccttatgagaagcacataaacttggattttgcaataactagaaaaggggaatttagccaagtcaagaatatacatgatctggacagccatattctaagactttcaaaagaaaagtaagatcaagtcc

SEQ ID NO: 500668 - DNA, 471 bp, Homo sapiens
  misc_feature (1)...(471): n = A,T,C or G
ccccaaccagtctcacaggactgtcaggaaaatctacaaaacactgaatgtgaatggasccatgtgcatgaacttaagtattaaatgcttatcagtaaacagtgtaaagtaacttgttaaacaggataggcttttaccaagtgatattcatacaatttttgcatcaaattaaacagaactgcttccagccaagatggaataacaagaactgaatttactctataccctggacagctaaaaacctggacaaagtatatgaagcaactctcaagacattggatatcagaaagcanaacactgtaaattccaaagagacagataacaagtgtggtcaggccttctattaccccaacttactacttggagaacatttccaatccatggcacagggagggagggacttactcagagctcacatttctcccttaaatgaagagccaaatctggaaaatctggggtagtcagagaagg

SEQ ID NO: 500669 - DNA, 471 bp, Homo sapiens
  misc_feature (1)...(471): n = A,T,C or G
ccccaaccagtctcacaggactgtcaggaaaatctacaaaacactgaatgtgaatggagmcatgtgcatgaacttaagtattaaatgcttatcagtaaacagtgtaaagtaacttgttaaacaggataggcttttaccaagtgatattcatacaatttttgcatcaaattaaacagaactgcttccagccaagatggaataacaagaactgaatttactctataccctggacagctaaaaacctggacaaagtatatgaagcaactctcaagacattggatatcagaaagcanaacactgtaaattccaaagagacagataacaagtgtggtcaggccttctattaccccaacttactacttggagaacatttccaatccatggcacagggagggagggacttactcagagctcacatttctcccttaaatgaagagccaaatctggaaaatctggggtagtcagagaagg

SEQ ID NO: 500670 - DNA, 449 bp, Homo sapiens
ggttccaccacaggcaatgcctcccccgactgtctgccgtccacctttcatttcctccttggaggggctccgaaagggagaggcgagcaacaggtcattctgtccatcctctggtccaaaccagaggggagattcccaggctcccttgggaaagcaggggaagagagtttctctggagttggggctcaggctctctggtttggccatgagttatgaaaaagaactttctggccgggcgtggtggctcacgcctgtaatcctagcactttggaaggctgaggygggaggaccgcttgaggccaggagtttgagaccaggttgggcaacatggtgagaccctcatctctacaaaaaatacaaaaattagccaggtgtggtggtgcatgcctgcagttccagttacttgggaggctgaggtgggaggatcgcttgagcccaggagttcgagg

SEQ ID NO: 500671 - DNA, 449 bp, Homo sapiens
ggttccaccacaggcaatgcctcccccgactgtctgccgtccacctttcatttcctccttggaggggctccgaaagggagaggcgagcaacaggtcattctgtccatcctctggtccaaaccagaggggagattcccaggctcccttgggaaagcaggggaagagagtttctctggagttggggctcaggctctctggtttggccatgagttatgaaaaagaactttctggccgggcgtggtggctcacgcctgtaatcctagcactttggaaggctgaggcgggaggaccgcttgaggccaggagtttgagaccaggttgggcaacatggtgagaccctcatctctacaaaaaatacaaaaattagccaggtgtggtggtgcatgcctgcagtyccagttacttgggaggctgaggtgggaggatcgcttgagcccaggagttcgagg

SEQ ID NO: 500672 - DNA, 628 bp, Homo sapiens
ttcatctcttcagcactgctgaataaatttagccagatgattggtgttttgggagacagaagctccctaaagacagragcaagccaccatacttacatttcaagtccctggtggcagatggagaaaaaggacctaccccttcatttttcacccctcacgcctctttcaggtgttggtagaaattgaccaagtgaagtccagaatgcaacttgctgccgaatctcttcaggaagcagataagtggagcacgttgagcgccgatattgaggagacatttaagactcaggtaggtttcttgtttaggggatgttatgaaaggtatttaagcaagaacttgaggtttggagaaagcaaaagagatacaaagttgatagccaatagcagcattcagaaaccttcagactcagggtggggaagatctgaagctgctcggtgtgtttccagcctctttagcttgcaccctctgtgtgactgaagcctcttagtcacagaatgagttcaagagaagccttgataaagatgtacaggcaccaggcactgtggctcatacctgaaatcccagctctttgggatgctgaggtgggaggatcacttgaggccaggagtttgagaccagcctgggcaaaat

SEQ ID NO: 500673 - DNA, 569 bp, Homo sapiens
ctgcaataaacaaacccaaagtaacagtcgaaatgtttatttttctctgtattagttccttagaactgctatgacaacgtgccgcaagctgggtggtttaagtcaacagatgtgttgtctgagttctgtggggtgggagtctaatattggagccatggtgctccctccctcttggtggttgctggcttccaccatctttgacttccttagcctgtagctgcataactccagcctttgccttcattgtcacgtggtgttctccttgtgccttctttacagaccatttttttctttttttttaagagacatgctggagtgcagtggcatggtcatagctcactgcagcctcaaactcctgggctctagggatcctcccaatttggcctcccargtagctaggattacagatgcgtgctgccacacctgactaagttttagatttttgtagagatgagggcctcaccgtgttgcccaggctagtcttggactcctggcctcccaaagtgctgggattacaggcatgagccaccatgcctagcctgaccctactgcatctctaatcatattta

SEQ ID NO: 500674 - DNA, 605 bp, Homo sapiens
tcccacccccatactcactgctggtattagrttatagctgggcccctccatggcttttgtcaggtatccactctgtccaggtgagagtggaaataacttgactgagtttcccaccaagacagtgtgggaggagtggtttcctggtgtagccatggatgtcgggtgaggacggaagaccacccggacaacaacaatgatgtcatgcacaaaaagattttatgctaagaagaaacctgaagactgctggtctgagtagttatgccagatatttaaggctaaccaatggtctagaagagcggttcttaaagtgtggcccctgaatcagcagcatcagcataacctggaaagttgttagaagtgcatattcctgggccccacacaaacctttctagttgaaaaccctgggagtggggccccaaactctgtgttaataaaacctccatgtgatttcgatgcacattggcatctgagaaactttgatccagtcaatcatgcagaatgctaagcacatattcagaaactcctttattcctctacttctaaccctatatttgcattttcttagttccccccactagttctgcattcttcgcttcaaaaaacag

SEQ ID NO: 500675 - DNA, 216 bp, Homo sapiens
tggtttgcttctcctcctttttctgacttgaaagtcacttcctgtgttaactggattcttcatgggttattctgtggtttctagtcwtgttggataaactgtatccgtagctacttagtagtaaatgattaagtctcaggactcatagtagggtttagctgggcaaaagattgataagctcaattttttttttttattggtaagatgccaaacaaa

SEQ ID NO: 500676 - DNA, 606 bp, Homo sapiens
agtagatgcttagaaaatattaacggaaggatgagagaataagccaattaatgagaggcattgggttgcattttcactcttgggctygataacttaggtcttaggatgatgaaagtgatcttgcggattggggccagactatgccaatggcggtcaatggaatagcagcatggggagatggtgggaaatgcagaatcccaggctcctccccagtcctattgagtcagagtctgccttttaacaagatcacagtgatttgtgtgtgctttaaagctggaacatctctggattagagcgcttgattgagatggagagtgtgagctggtttcccacatcagccaatttgattggctctgctgactgcacatcaacttcaccttgcatttggtctttcaggaagctctgtgtgttaacatggataaatcagggcaaacaaattccttttcactgtgagatgggagaaacaaccctgttcatggcagggcagtactgccatgtgtctaccttcacctactgtatagtaacatcctcttaagtggaacatcgacatccagatctagtaataaccactttttatatgtagcccttgcagcaacccatttggca

SEQ ID NO: 500677 - DNA, 582 bp, Homo sapiens
cctggttgttgattaatgatggtatcagtgtrttctaaccagaatctctcacattttcctaagtctgtatacaaacatgcaatctggggagattctcccttatttgggtaatgtcagccctggcctacgcatccagggtggatggaggcgagaacggagccgccaactccagcggctcctgaaataatcgcctggctctgctggcgtgcacacaggtatctcgctccactgaacagctggcctttatttctgtccatgtgcctctcttttcattttgaagggaagacaacctgtcaaaccaaacccggagagcctggctggctgcaaggatctgaaagggcagagtttttatttttctttgctttctcatggttttctgaggaaacacaaaactatcttagtgtttggaaagaggcaatatagcatagtgattaagtagtttggaggcagacacacctggtttgaaacccaaatctgtgacttatagctatgcaatgctgggtgagagacagaaactctatgaggctcgggttttgttttttcttagttttttgtttcttttcctaaaccataaaatggttc

SEQ ID NO: 500678 - DNA, 582 bp, Homo sapiens
cctggttgttgattaatgatggtatcagtgtgttctaaccagaatctctcacattttcctaagtctgtatacaaacatgcaatctggggagattctcccttatttgggtaatgtcagccctggcctacgcatccagggtggatggaggcgagaacggagccgccaactccagcggctcctgaaataatcgcctggctctgctggcgtgcacacaggtatctcgctccactgaacagctggcctttatttctgtccatgtgcctctcttttcattttgaagggaagacaacctgtcaaaccaaacccggagagcctggctggctgcaaggatctgaaagggcagagtttttatttttctttgctttctyatggttttctgaggaaacacaaaactatcttagtgtttggaaagaggcaatatagcatagtgattaagtagtttggaggcagacacacctggtttgaaacccaaatctgtgacttatagctatgcaatgctgggtgagagacagaaactctatgaggctcgggttttgttttttcttagttttttgtttcttttcctaaaccataaaatggttc

SEQ ID NO: 500679 - DNA, 529 bp, Homo sapiens
ctgggactaggacctgtgcctccagtctttgatgttgcgttgcccttaataactgccttcttaggccctgaacagcagcacaagtaggaacagcagtgataatagataatcacaataatgcctggcgacacccccaccctacattaatgataacagggacacacatagtgccttgtagaatgtcaggcccagacttaaacgtttaatatagagtaatgcactcagtctttaccccgctctatgactgatttttgagacacggtctcactcttgcccgggttggagtgtagtgcgatctcattcgctgcctcccaggctcargtgattctcctacctctgcctcctgagtgtctgggaccacgggcatatgccatcacaccggactgatttttgtatttttagtagagacgggattttgcccagactcatcttgatctcctgagctctagtgatctgcctgccttggcctcccaaagtgctgggattacaagcgggagccaccatgcccagcccagccctataatttaga

SEQ ID NO: 500680 - DNA, 525 bp, Homo sapiens
cctggaaggctgaggtgggaggattgcttgagcctggtaggtagaggccgcagtgagccatgatcacgccactgcactccagcctgggtgagagagtgagactctgtcttaaagcaaaaacagagtcatatatttcctattaaggtgaaatttaaaaaataaattcctatattccatcatccccagcttctgccattctaaagcattttcctaagcagctccactgtggatgtagcgggtatttcagaaaggcattagaaatgccctrggagggcagaacccggggcttcactggaggtgctgttgggctcagtctgatgtcaaggcagggacatggcaagggtattgagatgtgaacaagcattactcagcaaggtgacatgtgttcatgccttgatacacttgtttccccaccagctctatttttgttgcctgctctattggtttctttttcttttttttttcttttgagactgagttttgcttttgttgcccaggctggagtgcaatggcaccatctcggct

SEQ ID NO: 500681 - DNA, 525 bp, Homo sapiens
cctggaaggctgaggtgggaggattgcttgagcctggtaggtagaggccgcagtgagccatgatcacgccactgcactccagcctgggtgagagagtgagactctgtcttaaagcaaaaacagagtcatatatttcctattaaggtgaaatttaaaaaataaattcctatattccatcatccccagcttctgccattctaaagcattttcctaagcagctccactgtggatgtagcgggtatttcagaaaggcattagaaatgccctgggagggcagaacccggggcttcactggaggtgctgttgggctcagtctgatgtcaaggcagggacatggcaagggtattgagaygtgaacaagcattactcagcaaggtgacatgtgttcatgccttgatacacttgtttccccaccagctctatttttgttgcctgctctattggtttctttttcttttttttttcttttgagactgagttttgcttttgttgcccaggctggagtgcaatggcaccatctcggct

SEQ ID NO: 500682 - DNA, 261 bp, Homo sapiens
ggaagacccattctaattctcttttataattctactgtgcaataccttttaggcttcttagaggggaattaggatgggctgcrgaattattagggaaagactcaacttgagggtgactagaagaagggatgtaagcagggtgtattttctcccatatctctttcaatgacatcttttctttcacagagaacaatagtcaagggacgacacagtcaaacgtggatatttgggtgagtggggtgaagcctggatttgggaaac

SEQ ID NO: 500683 - DNA, 261 bp, Homo sapiens
ggaagacccattctaattctcttttataattctactgtgcaataccttttaggcttcttagaggggaattaggatgggctgcagaattattagggaaagactcaacttgagggtgactrgaagaagggatgtaagcagggtgtattttctcccatatctctttcaatgacatcttttctttcacagagaacaatagtcaagggacgacacagtcaaacgtggatatttgggtgagtggggtgaagcctggatttgggaaac

SEQ ID NO: 500684 - DNA, 612 bp, Homo sapiens
gtgtttattttaggtttacagtacctctcaacctggcttatacaaatttcaactgctcaacagcagaatgtgaccagcacatatcatataggccagtgaaggtctcagtactccagtattataaggttatttaatgtttgacttccctagcacatggaaaactctctgagagcatggaccatttytaccctcattggttctcaactatctggcactggtcttggcacctagaaagggatcgataaatacttattgatggaatacaccataacctgcattctcaggagaggacctgtacctgtggattcagattcctcaattgtggaacacccgatcttcatcttatcccccttggctaccaagtccaacgtcacattctcttcactgcattctttgttgataactttgctctcaatgtctaaaaagagaaagggagagttcgtatgaggtcacccagaaagtcagtcctgaatttggtttctgtccaaaaaaaggtacacctccatcatggcgagcaaaggaaaagaatagaaagttcaattcatcataggaaagatcttgaggcccatgatgaatgatagggggaccatagcaccaaataaatgagtaacc

SEQ ID NO: 500685 - DNA, 610 bp, Homo sapiens
aagtcacccctggaggaggagggagctgaagcagccggtgactcactcacacgagacagtgggcggtggccagggcagagcgggactccccattgctggctaaaatccagacagcgccttggcccgaggtgtccctgacaggacgagggtggagtggcagctgctgaaacctgaactcctctgccctgcccccgtcccttgacctcacgcatctagtaggtcagcgccagaggaaatcctcgaagaaaatgggcgtctcccttgctgagcacagaaccgcagtcagtcctgtgtgcccgctccctggatgaggacaggaaggacgtgggggagaggccacagtcaccctcaggagcccccagacccactggaaagcagcccagtgagcatctgagaagtactgcctgtgcctggtgtgagggtgcaaggcggggggccgtgtggccaggcagcctagggttgcgccaaagcccagcaggtatgggacgagcaggaccagactgggaggggctcgggggagcggsgacctgtgctgagcttgagttgtggctgggctgggaggccggacaaaggtgtgtttcctctggccatgcaggggtcaggcggtggt

SEQ ID NO: 500686 - DNA, 410 bp, Homo sapiens
aatgaaacgtgctcctccactgagagggagcccagccccactcaagtgggtcagagctcgtccgtaggaggctgtgtgggggtcacgccaccacaggacgcagatctgccagaagcctgttttattgcacttaactaattcccaagataaaccactgggaatttccatgtaagcacttaggcctctgtttatgagaatctttgatccactgagaatgtttagaactcactgaagcatccctggccctgcccagcaccaagccttccragatgcgtgagggcagggaaattgtcggcctgtgcttggtctgtggggatccaggaccccaggaggggaccccaatagggagcctctgccccccaggtggtggggtctctgctgggactctgcaggctcctgcccgtggccaa

SEQ ID NO: 500687 - DNA, 401 bp, Homo sapiens
ggggcaagcgcccacttctgggcagccctcggggctcggattcctttaccttttctgacagcactgagcagccgcacttaacagggagygggaaaaatcctatcatgatgggatcaaaagatcaccttgaatttaactgccattttccactttaagcatttgatctcatgttatttgatggactttttttaaaaagcctcatgaagtaggaatgtcactactctcatcactttggttttgaggcaaaagccagaaaaaggagaagtgatgtgtccaagtccaattactagttaggagtgaacaccggccttaaagtgcaagcttcctgggcccaccaggtggagaagcagcggccctcactggatcctaggaacccatgagaggtgctcagggagacggga

SEQ ID NO: 500688 - DNA, 401 bp, Homo sapiens
ggggcaagcgcccacttctgggcagccctcggggctcggattcctttaccttttctgacagcactgagcagccgcacttaacagggagtgggaaaaatcctatcatgatgggatcaaaagatcaccttgaatttaactgccattttccactttaagcatttgatctcatgttatttgatggactttttttaaaaagcctcatgaagtaggaatgtcactactctcatcactttggttttgaggcaaaagccagaaaaaggagaagtgatgtgtccaagtccaattactagttaggagtgaacaccggccttaaagtgcaagcttcctgggcccaccaggtgragaagcagcggccctcactggatcctaggaacccatgagaggtgctcagggagacggga

SEQ ID NO: 500689 - DNA, 561 bp, Homo sapiens
cagtttgtgctggcctgtgtttgtggctcacagctccacaccctgtgcttcctgctcagcacagccacattatgagtgctgacccaccccagtctactggttcccatccacacctgtgtccatggatttcctgttgacaacatcactcccacctcactcctctaagtactagagattttcaggcatgttctcagaccagcagcatcagcagtggcagggaacttcctgaaaatgctcattctcgggcccaaccaatcagaggctgtggggtgggccctgcttagcaaggaggttctgaggcaagggggttctgacctgtgcaaggagggccccatgtgtagagaccatgaaggacaccactcctggcacctcctgcaccaggagagcacaaaggcctgctgagctctgacgggtgcgggcagcagtctaaggactaggcatggggcaggcccacgtcacactgcactgagggagggcccgtcctgtygggcaggctcctgattccacacctccgtctcttcagaggcctcatttcctcagtccccacagtaaccccagcag

SEQ ID NO: 500690 - DNA, 307 bp, Homo sapiens
ttcagcctttcaataacagctagtcaagtatttttttagttggttcctattgatcatcatcttattttagtggaatccattatattgaagatgtcaagttcctcatttcccatacaaagaatgtgagattcatctttcttgaatcttagctgctaagtgtttaaggggacttttggcatcttttcaggaggactataattgggccctctaactaaaaagtctcctatgccccttasataaatgagattttttttttttgaccttgtacccaccaacattggtgggaggctcagaagggactgtgttt

SEQ ID NO: 500691 - DNA, 307 bp, Homo sapiens
ttcagcctttcaataacagctagtcaagtatttttttagttggttcctattgatcatcatcttattttagtggaatccattatattgaagatgtcaagttcctcatttcccatacaaagaatgtgagattcatctttcttgaatcttagctgctaagtgtttaaggggacttttggcatcttttcaggaggactataattgggccctctaactaaaaagtctcctatgccccttacataratgagattttttttttttgaccttgtacccaccaacattggtgggaggctcagaagggactgtgttt

SEQ ID NO: 500692 - DNA, 388 bp, Homo sapiens
agcctttcaataacagctagtcaagtatttttttagttggttcctattgatcatcatcttattttagtggaatccattatattgaagatgtcaagttcctcatttcccatacaaagaatgtgagattcatctttcttgaatcttagctgctaagtgtttaaggggacttttggcatcttttcaggaggactataattgggccctctaactaaaaagtctcctatgccccttacataaatgagattttttttttttgaccttgtacccaccaacattggtgggaggctcagaagggactgtgtttgtaactttgtagcactttctaaacagtgacctgttgtrtgggcgttataggacagaccgtggggtggggcgggggatgggggag

SEQ ID NO: 500693 - DNA, 388 bp, Homo sapiens
agcctttcaataacagctagtcaagtatttttttagttggttcctattgatcatcatcttattttagtggaatccattatattgaagatgtcaagttcctcatttcccatacaaagaatgtgagattcatctttcttgaatcttagctgctaagtgtttaaggggacttttggcatcttttcaggaggactataattgggccctctaactaaaaagtctcctatgccccttacataaatgagattttttttttttgaccttgtacccaccaacattggtgggaggctcagaagggactgtgtttgtaactttgtagcactttctaaacagtgacctgttgtgtgggcrttataggacagaccgtggggtggggcgggggatgggggag

SEQ ID NO: 500694 - DNA, 388 bp, Homo sapiens
agcctttcaataacagctagtcaagtatttttttagttggttcctattgatcatcatcttattttagtggaatccattatattgaagatgtcaagttcctcatttcccatacaaagaatgtgagattcatctttcttgaatcttagctgctaagtgtttaaggggacttttggcatcttttcaggaggactataattgggccctctaactaaaaagtctcctatgccccttacataaatgagattttttttttttgaccttgtacccaccaacattggtgggaggctcagaagggactgtgtttgtaactttgtagcactttctaaacagtgacctgttgtgtgggcgttataggacagwccgtggggtggggcgggggatgggggag

SEQ ID NO: 500695 - DNA, 643 bp, Homo sapiens
tctcaactcaaggcaggctctgtgtctggcggcttcaaggaagtgtcccttggccatggctcttccactacgggagcaagcaggaggcacccaggtctccctgcccacccagagtccctgcaggaggccctccagatctctcagtaacgggccctctttcttctttttttcagcctggggactcctcgggatggaaaggccttccggatctttgctgtcaggcagtgaatttccagcaccaggggagaaggggcgtcttcaggagggcttcggggttttgcttttatttttattttgtcattgcggggtatatggagagtcaggaaacttcctttgactgatgttcagtgtccatcactttgtggcctgtgggtgaggtgacatctcatcccctcactgaagcaacagcatcccaaggtgctcagccggactccctggtgcctgatcctgctggggccygggggtctccatctggacgtcctctctcctttagagatctgagctgtctcttaaaggggacagttgcccaaaatgttccttgctatgtgttcttctgttggtggaggaagttgatttcaacctccctgccaaaagaacaaaccatttgaagctcacaattgtgaagcattcacggcgtcggaag

SEQ ID NO: 500696 - DNA, 534 bp, Homo sapiens
caaaaagtgctccattcactcaatggaacattatttggccatgaagaaggaatggtgttcaggtatgtgtgacaatgttcacgaccttgaagacgtggtgctgagtgaaagaagccagacacaaagaaccacagactgcatgaygccatttataggaaacgtccagaacaggcaaatccagagagactgaaagtggattcatggttagcaggggctggaggaagttggggaattggggatgatggttaaggtacaggggtttttttggggggaaataaaatattctaaagaggattgtagtgatggctgcacacctctgtggatacactaaaaaccactgtactgtgggcttttaacaggtgaattgtgtggtatgtgaattatacctcaaaaaaaagctgttaaaaaaaaaaaaatccatgcttctcccatgagattctctagagctattttaattgttaatgagagaaaacaggtgcaccccatgaacattataatttttcccaaactgatccctaagcaaaagagtttaga

SEQ ID NO: 500697 - DNA, 534 bp, Homo sapiens
caaaaagtgctccattcactcaatggaacattatttggccatgaagaaggaatggtgttcaggtatgtgtgacaatgttcacgaccttgaagacgtggtgctgagtgaaagaagccagacacaaagaaccacagactgcatgacgccatttataggaaacgtccagaacaggcaaatccagagagactgaaagtggattcayggttagcaggggctggaggaagttggggaattggggatgatggttaaggtacaggggtttttttggggggaaataaaatattctaaagaggattgtagtgatggctgcacacctctgtggatacactaaaaaccactgtactgtgggcttttaacaggtgaattgtgtggtatgtgaattatacctcaaaaaaaagctgttaaaaaaaaaaaaatccatgcttctcccatgagattctctagagctattttaattgttaatgagagaaaacaggtgcaccccatgaacattataatttttcccaaactgatccctaagcaaaagagtttaga

SEQ ID NO: 500698 - DNA, 604 bp, Homo sapiens
agggcaatcaggatgttgaaaggaggttgtgtagtctaggaaatgttgggcacagtgccagacacataagtagtcctcgaagaacgtcacttatttttaaaaagcttgcttattggtaaaattcaccagaaatcctccagggagaggcagagtgagaaaaaactacattgccagagtagggggttatgggggawccctcggtgagggaggagcaggagaagtggatgctgcgatgccgccggatgctgcggatgctgtggccatgagcgagggtgggacccccagcagccagcaggacggggaggtggtgcctggcacggggaggggcatggagaggaggaaggggagaagggccaagtgagcctccaatctgagtgatctggggccatgtaagaggtttttagggggttggggggtagtcagtgggcctgagtaactctgacacgatcccatcagagagcaggagcaggggaagcggtgttcaagagctgttgtcgtggcgggaggttggtctcacttggatgttctttcaaagtcccttggcagttgcaaagcagagattgaaactttcttcaacatctgcccgggttgcacatttctgtcc

SEQ ID NO: 500699 - DNA, 604 bp, Homo sapiens
agggcaatcaggatgttgaaaggaggttgtgtagtctaggaaatgttgggcacagtgccagacacataagtagtcctcgaagaacgtcacttatttttaaaaagcttgcttattggtaaaattcaccagaaatcctccagggagaggcagagtgagaaaaaactacattgccagagtagggggttatgggggaaccctcggtgagggaggagcaggagaagtggatgctgcgatgccgccggatgctgcggatgctgtggccatgagcgagggtgggacccccagcagccagcaggacggggaggtggtgcctggcacggggaggggcatggagaggaggaaggggagaagggccaagtgagcctccaatctgagtgatctggggccatgtaagaggtttttagggggttkgggggtagtcagtgggcctgagtaactctgacacgatcccatcagagagcaggagcaggggaagcggtgttcaagagctgttgtcgtggcgggaggttggtctcacttggatgttctttcaaagtcccttggcagttgcaaagcagagattgaaactttcttcaacatctgcccgggttgcacatttctgtcc

SEQ ID NO: 500700 - DNA, 430 bp, Homo sapiens
gacatttacatgatgcttagtacagaccagacatgcccagggtttccacggatgagctcactgcctgctctatkagctgggcactttttacaaggagttagttgaggctcagaattattaaggtgtgtgcccaacatgacacagccagggcggggtagagctgccgtccaggctgggccctgccccagattctgggggaaggtgcccatctaatgaccagccacatgactgtcccagcagagcttgctgctagttgaggctttctgtgccatgtgggagtttttttaacgttggcagggatctgggtccctggtccctgttggggtgaggctgggaggggatcaactgaccctgggcttgggctcaacattgctgacaggtactgagagccccgtcccaggacccaaatcagtgctggttctgagtcctg

SEQ ID NO: 500701 - DNA, 430 bp, Homo sapiens
gacatttacatgatgcttagtacagaccagacatgcccagggtttccacggatgagctcactgcctgctctattagctgggcactttttacaaggagttagttgaggctcagmattattaaggtgtgtgcccaacatgacacagccagggcggggtagagctgccgtccaggctgggccctgccccagattctgggggaaggtgcccatctaatgaccagccacatgactgtcccagcagagcttgctgctagttgaggctttctgtgccatgtgggagtttttttaacgttggcagggatctgggtccctggtccctgttggggtgaggctgggaggggatcaactgaccctgggcttgggctcaacattgctgacaggtactgagagccccgtcccaggacccaaatcagtgctggttctgagtcctg

SEQ ID NO: 500702 - DNA, 662 bp, Homo sapiens
ctgcagtgggactgaggtggaggtggaggtggggggtgggagctgaggaaggaggatcgcttgagcctgggaagtcraggctgcagtgagctgagattgcaccactgcactccagcctgggtgacagagcaagaccctgtctcaaaaaaaaaaaaaaaatccacatctcccccagagtctgagtctttgccactttgtgggtacaggcatcatcatgtctttggaatgcacccatggccccctgctgtgattgctctgagagacacgctgccgtctcatctgtgtctttaaagctgtggtcacgttcctttgccacaggctgagctggcctgggtgatgacccgtgtctcccccacaaagctgccatggagggtcgtggcatgagggttgagtggctattacgtgccacgtgaattgtgtcctctttaatcctgacagtaatcctggaaaatagaaagtattagcaccaatttgcagaagagaaaactgaggctcagagaggttcatctttaaaggacttgtacaaaccacacagctacaaatgtacaaatggtgaagctgggattcaaagccaccctgtctgtccccaaaacctgcacatagaaggtgctaatacgtatttattgtttctgtttgtttgtttgtttttgagacagagtgtt

SEQ ID NO: 500703 - DNA, 517 bp, Homo sapiens
gaaaccctttctcatagggttgtttggaggaggcaatgagataatgcataaatcagttccaagtaaatgtgaatgatgctgttatcatttagtatattgcacagtcagcatgttgcattagcatattttagtaacttatgattttcgtgggatgggtctggcacttggttacagtatgcaaggcaggaagagcccccttagtagccagacaagagggggttgtgaaagacttcctggttgtgtgacctcaggcatgctacttaacctctccaagactcaaggtttgttgccccttggctgttgaggagtcttgctgggacacggggagagagggaagygaggcatgcggttgtgttgggcaggtactccctgctggggggtcccagggctaagacaggactgtcttccctgagcatctgctgtgtgcccggggctgggtgtgcagagggcaggaggccagcctctgcctgcttaaagctggagcatctgtcgggaggactccagggaggaagtgcag

SEQ ID NO: 500704 - DNA, 435 bp, Homo sapiens
ggcagccgcgggttcctttccccacagccrtgccagtgccagccttgagtctgcgtgaccttgagccgcagggaagcggatgagtggccagcagccctctgctcctgcctcctcactgtgtgcacgcctttctgcaaatgccgctgcccgctgccgtgcgctccgcttccagacagtaattgttacaagacctctaactgcctcgacgaccacatggcccttaaaaatggtcatttcccccgtgagcattttctcttcatcgaaaccactttgtttatacttgctggtgacagtgtgactgtggacttgcctccagtttggttttctccctagttattaaaaaaaaaaaaaatggtgccaaccttggcagccaaggctgaagcaagggggtggtgggcatgaagcgatgaccccacggaggatgtccagggacag

SEQ ID NO: 500705 - DNA, 435 bp, Homo sapiens
ggcagccgcgggttcctttccccacagccatgccagtgccagccttgagtctgcgtgaccttgagccgcagggaagcggatgagtggccagcagccctctgctcctgcctcctcactgtgtgcacgcctttctgcaaatgccgctgcccgctgccgtgcgctccgcttccagacagtaattgttacaagacctctaactgcctcgacgaccacatggcccttaaaaatggtcatttcccccgtgagcattttctcttcatcgaaaccactttgtttatacttgctgstgacagtgtgactgtggacttgcctccagtttggttttctccctagttattaaaaaaaaaaaaaatggtgccaaccttggcagccaaggctgaagcaagggggtggtgggcatgaagcgatgaccccacggaggatgtccagggacag

SEQ ID NO: 500706 - DNA, 435 bp, Homo sapiens
ggcagccgcgggttcctttccccacagccatgccagtgccagccttgagtctgcgtgaccttgagccgcagggaagcggatgagtggccagcagccctctgctcctgcctcctcactgtgtgcacgcctttctgcaaatgccgctgcccgctgccgtgcgctccgcttccagacagtaattgttacaagacctctaactgcctcgacgaccacatggcccttaaaaatggtcatttcccccgtgagcattttctcttcatcgaaaccactttgtttatacttgctggtgacagtgtgactgtggacttgcctccagtttggttttctccctagttattaaaaaaaaaaaaaawggtgccaaccttggcagccaaggctgaagcaagggggtggtgggcatgaagcgatgaccccacggaggatgtccagggacag

SEQ ID NO: 500707 - DNA, 625 bp, Homo sapiens
agattgtgcccaccagattaagggtgggtctgccttcctcagcccactgactcaaatgtgaatttcctttggcaacaccctcacagacayacccaggatcaatactttgtatcctttaatccaattaagttgatgctcagtattgacaatcacaatcactatctaacaatctgtattttactcttccgatattttaactacctcacctcctcatccaataaaatgtaaactctacgaggactaaatgtttgtcctttgtgttcactgccggatccccagccctcagcacttcattcgttgagtggacagatattaatgccacatggtgacattattgtctccatcttacacatacagaagatggatccaggtggtgcaaagatgtgcccaaaggaaaataaatagaaaaagtcaaaatgactagttgcagaaggttttactgcgaattccatgtagttcccatcgtgcatactgccttcaaaaatggcagcttttcatatactttcagggagagattagaatcctatagaactcctgacaaatgcaaatgtttcaaatatcaggtcaaccagccaatcaacaactgtggtatccatgtggaggccaaagtaattccctgggtctt

SEQ ID NO: 500708 - DNA, 625 bp, Homo sapiens
agattgtgcccaccagattaagggtgggtctgccttcctcagcccactgactcaaatgtgaatttcctttggcaacaccctcacagacacacccaggatcaatactttgtatcctttaatccaattaagttgatgctcagtattgacaatcacaatcactatctaacaatctgtattttactcttccgatattttaactacctcacctcctcatccaataaaatgtaaactctacgaggactaaatgtttgtcctttgtgttcactgccggatccccagccctcagcacttcattcgttgagtggacagatattaatgccacatggtgacattattrtctccatcttacacatacagaagatggatccaggtggtgcaaagatgtgcccaaaggaaaataaatagaaaaagtcaaaatgactagttgcagaaggttttactgcgaattccatgtagttcccatcgtgcatactgccttcaaaaatggcagcttttcatatactttcagggagagattagaatcctatagaactcctgacaaatgcaaatgtttcaaatatcaggtcaaccagccaatcaacaactgtggtatccatgtggaggccaaagtaattccctgggtctt

SEQ ID NO: 500709 - DNA, 640 bp, Homo sapiens
tggactatttcacactgggttcaatcgcagcatcaaggattattgtccaaagcctggatcaggcagatcctaccacatcctgtagccaggtacattctagaccagcaaaaccagggaaggaagcaggctagaggtttcctgatatgaaataaaggaacaagctttgaaatgaactctttcaaacccttatcctgctccaataaaaatctccacatctcccagccaggttaattggacacacagccacccatggctgccaacaaccttcagtgcccacgatgcaaatacaaaacagacactcccactggccactgcgctgcaactagcttgcctgttcatttagggaaatgacstctctccatcaggaacctcagggaagaggaatcaacaggtttggatgcagccatatgccaggtaccatgctaggcccttactaatattttcttactggcttctcatgaacattatgccaagttgatacaaaagctctgctgtgcagagaaagaaactgaggacccaagaatttaataaattcccctgtggtcatagctcccctatcatttgcaggttaaaagctttgctcatttgtgacatccacaggatgcgatgatgtgaccccctgcctatatgcataccccac

SEQ ID NO: 500710 - DNA, 640 bp, Homo sapiens
tggactatttcacactgggttcaatcgcagcatcaaggattattgtccaaagcctggatcaggcagatcctaccacatcctgtagccaggtacattctagaccagcaaaaccagggaaggaagcaggctagaggtttcctgatatgaaataaaggaacaagctttgaaatgaactctttcaaacccttatcctgctccaataaaaatctccacatctcccagccaggttaattggacacacagccacccatggctgccaacaaccttcagtgcccacgatgcaaatacaaaacagacactcccactggccactgcgctgcaactagcttgcctgttcatttagggaaatgacctctctccatcaggaacctcagggaagaggaatcaacaggtttggatgcagccatatgccaggtaccatgctaggcccttactaatattttcttactggcttctcatgaacattatgccaagttgatacaaaagctctgctgtgcagagaaagaaactgaggacccaagaatttaataaattcccctgtggtcatagctcccctatcatttgcaggttaaaagctttgctcatttgtgacatccacaggatgcratgatgtgaccccctgcctatatgcataccccac

SEQ ID NO: 500711 - DNA, 492 bp, Homo sapiens
gtggagtttgcagtgagccaagatcaagacattgcactccagcctgggcaaccgagtgggaccctgtctcaaaataaataaggaatccagttttcaagcaataggacatacatggatacatacacacatggatacatacacacatggatacatacacacatggatacacacatatggatacatacatggatacatgcatacatgcatggatacacatacatacatggatacatacatcaatacatatctacatggatacatacatgatacatacacacatggatacatacatgcatacatgcatggatacacacatacatacatggatamatacatacatggatacatacatctatacatggatacattcattcattcattcatgcttcaatcattcatgcatcccccatcttactctagaaaggatttcaggcaagagctagagtgtgagagggaagaggctgagatcctggttgcagggccaggcagggg

SEQ ID NO: 500712 - DNA, 322 bp, Homo sapiens
ctttttagattcgagagcaggagcagccagcgctgctgaggcagtcacacgtatacagcttcacggagcaagcacccagccagggccttgctgactgtggctgctaataaaacagcagcaatttagtttcataaaattgctaatagttttcttaaaatgccattgcacttaagcatacacagggacacccccatcgtctctgctctccagtgggaggatatgaagctggagactggagactggccagggacagaggcaactactccctgaaatgrtgtcaccctgtgcaagcaccttccccaggccaggccaggcctcaaca

SEQ ID NO: 500713 - DNA, 607 bp, Homo sapiens
ggtgcccttggagcccgacttcccctggcacattttctggcttatccaggagccccggggtgtcctttctgctgtgaaacctcctcatgctccccaagcccacagcctctcgggtccaagggggtcttctcgaatacagcaaatcccagcccagccccctcagtagctctggaacactgcggctctcctggtacaatcttcaaatctggtggagaggaaagcgtgtggacttgggaccctgagttggagaatctgctctctgccctgtgaccctggccaagtctctcagctccaagcctgcatttccgcacctgtaaggtggagctaacgggacacgtgcagcgcagaccaggccacggtgagcacaggcaggaggccacggggtgcagtgctcaggcctgtgaggagtcagattctggctccgaggagttgttactggatgcccagaagcacagtggcctcatccttaaagcagtggaggtggggggtggtaagaacagggccgatcttgcagggccgttgtgaggattaaaaatacaatgtatgataatgatgcrtcaaagtaggttcctcagtcctatcaaatgtgccactctggtgggggacg

SEQ ID NO: 500714 - DNA, 583 bp, Homo sapiens
cttgaaatagctcacccaagcagaggtaattttgacatcctggaaactccagcctccaggggaagaatctgaaaaaccagagtgacaaaatgacagcgctcacaggaactttgcagattatctaatctttttatttattttattttattttttgagacagagtctcactctatcgcccaggctggagtgcagtggtacratctcagctcactgcaacctctgcctcccgggttcaagaggttcttctgcttcagcctccccagtagctgggattacaggtggctactattacacccagctaattgctgtatttttagtagagacgagttttcaccacgttggccaggctggtctcaaactcctgacctcaggtgatccactgcctcagcctcccaaagtgctgggattacaggcatgagccaccacacctggccaattgacttttattagcattcatatacaggttttgtgtgaatatatgttttcatttctccgggataaatgtgcaaaaatgaaattactgcatcatatagtagttgcacattcagtcataaaaaaaaacagccaagctgtttcccagagt

SEQ ID NO: 500715 - DNA, 583 bp, Homo sapiens
cttgaaatagctcacccaagcagaggtaattttgacatcctggaaactccagcctccaggggaagaatctgaaaaaccagagtgacaaaatgacagcgctcacaggaactttgcagattatctaatctttttatttattttattttattttttgagacagagtctcactctatcgcccaggctggagtgcagtggtacgatctcagctcactgcaacctctgcctcccgggttcaagaggttcttctgcttcagcctccccagtagctgggattacaggtggctactattacacccagctaattgctgtatttttagtagagacgagttttcaccacgttggccaggctggtctcaaactcctgacctcaggtgatccactgcctcagcctcccaaagtgctgggattacaggcatgagccaccacacctggccaattgacttttattagcattcatatacaggttttgtgtgaatatatgttttcatttctccgggataaatgtgcaaaaatgaaattactgcatcatatagtagttgcacrttcagtcataaaaaaaaacagccaagctgtttcccagagt

SEQ ID NO: 500716 - DNA, 518 bp, Homo sapiens
catgtattattaacttcatatgaagacccaaacaattcatgtttttaccctatctgtcattatctttgcctacctctttttgtctcttcttcattttttttaagagttggagtcttgctctgttgcccaggctgaagtagagtggcatgatcttagctcactgcagccttcaactcctgggctcaagcaatccttcagtcttctgagtagctgggactataggcacatgctaccacacctaactaatttttatttttattttttacagatggggtctcactctgttaacagcccaggctggtctagaattcttggcctcaagtaatcttcctgccttgacttccccaagtgctgggattatgggtgtgatctaccgcacctggcctgtctcttsttaataatgcagtataccactgggtgcagtggctcacacctgtaatcccagcactttgggaggccgaggcgggtggatcacctgaggtcaggagttcgggaccagcctgaccaacatggagaaa

SEQ ID NO: 500717 - DNA, 454 bp, Homo sapiens
gttggggtcaggcgcagtggctcacacctgcaatcccaggactttgggaggccgaggcaggcggatcatttgaggccaggagttcaaaaccagcctggccaacatggtgaaatcctgtctgtaccaaaaaaaaaaaaaaaaaaaagaattagccgcgtgtggtggtgtgcgcctgtagtcccagctactcacgaggctgaggcatgagaatctcttgaacccgggaggcgaggytgaaggaaggtagaggttgcagtgagctgagatcgcaccattgcactccagcctgggcaacagaccatccccaagcatagccttcctttggtataaggctcaactccaggccaagaggaccaggaagggtccaatggctacaagaacccaaggtcctgtactcagatgtaagtttcctctcagcccccgtacccatgcatggtctgccagaggacctcag

SEQ ID NO: 500718 - DNA, 605 bp, Homo sapiens
accttgggaggtctcaggtactgaagaaatccatgactgaggctttctgccaccatttctttatgatamctgaccaataaggagagggtaatcttatttccagattatgttaatgaaaaaatgaggattaatacgctaagctgctcctagatgtggaaagagtaatgattccagccagttgtttttaattaatctcttgtgttcttggcttatctggtcccagaaaatgaaagccatgaattttacaatacgtgtgccagatcacatgtgtaattcagtggaaaacccctacacaataaagaaggaagctttacaatgaatagtagttccctgggtcctaggaaaacttgaacaacattttgcaagctaaagaattcctccttctataacccacttcactctgaaacatcagagttttttgttttttgttttttttgaaatggagtctcactcggtctcccaggctggggtgcagtggcacagtctcggctcgccgcaacctccacctcctgggttcaggcgattctcctgcctcaggctcccgagtatctggggtaacaggctcccaccaccaggcctggctgatttttgtatttttattagag

SEQ ID NO: 500719 - DNA, 605 bp, Homo sapiens
accttgggaggtctcaggtactgaagaaatccatgactgaggctttctgccaccatttctttatgatacctgaccaataaggagagggtaatcttatttccagattatgttaatgaaaaaatgaggattaatacgctaagctgctcctagatgtggaaagagtaatgattccagccagttgtttttaattaatctcttgtgttcttggcttatctggtcccagaaaatgaaagccatgaattttacaatacgtgtgccagatcacatgtgtaattcagtggaaaacccctacacaataaagaaggaagctttacaatgaatagtagttccctgggtcctaggaaaacttgaacaacattttgcaagctaaagaattcctccttctataacccacttcactctgaaacatcagagttttttgttttttgttttttttgaaatggagtctcactcggtctcccaggctggggtgcagtggcacagtctcggctcgccgcaacctccacctcctgggttcaggcrattctcctgcctcaggctcccgagtatctggggtaacaggctcccaccaccaggcctggctgatttttgtatttttattagag

SEQ ID NO: 500720 - DNA, 520 bp, Homo sapiens
tgtagacacagaacagtgaagtcaaaagagcatggttttggagtccaggtatgatttgtcttataccttgcaaatgttaggtgcccgataaatacctgttgcctaaatgctttttattctaattaaaattttatgcatgctatcactcacagacctggtgattccacctgctaaatgttacatttggaaggccttatcttttcacaagcactacaatttagaattcagctttacatatgaagggtatcttaactttcattgataatgtagaaccaggaaaatagaagcaagacaaggcatgactatatctcagaaagttccatwgtaggggagagagaccctagttcggtttagaaatgaagagtagtgataacgattaaacatactctcattcattgattgcttccctggaatggggccaaattttacattaccatttaaggaaaataagcatcaaattagttttctaatctggaaaatgaaagcaagactgtctaatgtgcaaagaagtaattaccag

SEQ ID NO: 500721 - DNA, 520 bp, Homo sapiens
caacagtgagaatggataaacaaattgaggtacctccatacaatgggacactgctccccaataaaacattgcaaaccattgcacacaccacgtcatgcaccgctctcgcacgtgttgtgttgtgtgaaacaaaccagacaagaagggacgcatcccaagtgactgattggtttatgtacagtttaagaacagscaaatctcactgctatttatagatggcacagcagtggttacctctgctagtggggccgggggtcgcttgtgtactgggaaggggctccagggaaccttctggaggctgagggtgcccttgatcctgatttgagtggtgactatataggtataaaaaatgatcaagctggacacttaaagtcaacatagtttatgcactttcacgtgtaaacattattccttaagaaaataaaaacagcaccagtggctccccccttccctgcagactcccccgacaccaccacctccttcttcgccttgcatcggtacgataaggcacttgcttgac

SEQ ID NO: 500722 - DNA, 520 bp, Homo sapiens
caacagtgagaatggataaacaaattgaggtacctccatacaatgggacactgctccccaataaaacattgcaaaccattgcacacaccacgtcatgcaccgctctcgcacgtgttgtgttgtgtgaaacaaaccagacaagaagggacgcatcccaagtgactgattggtttatgtacagtttaagaacaggcaaatctcactgctatttatagatggcacagcagtggttacctctgctagtggggcsgggggtcgcttgtgtactgggaaggggctccagggaaccttctggaggctgagggtgcccttgatcctgatttgagtggtgactatataggtataaaaaatgatcaagctggacacttaaagtcaacatagtttatgcactttcacgtgtaaacattattccttaagaaaataaaaacagcaccagtggctccccccttccctgcagactcccccgacaccaccacctccttcttcgccttgcatcggtacgataaggcacttgcttgac

SEQ ID NO: 500723 - DNA, 403 bp, Homo sapiens
actgctctgtttcgggaggacagctctcagcaaccagtcctggcctctgtctatggagatttggacactggagtccagaaggtcgcctaagctaaaggacacatagcttgagctagaatccaggtgtccagaatctggtagctttctccttctggagccgtggaatcttgtggttgacggtgacctcagagcatcatgctcagttttcccacctagagtaggaaccccagccacagcaccgtcggctcatggtcactcagcgtccttaagtgcccagtgcagcttaactcgggctkgttgtggacccagcccagagcgactgcagaaccacagcccttcctgctacggccgcaccacccacgtccacagtgaagctcggccacttgcccctggccacgcatta

SEQ ID NO: 500724 - DNA, 581 bp, Homo sapiens
ttagccactatttctggccaacattttcttttttttttttttgagatgaagtatggctctgtgactcaggctggagtgcagtgactcagtctctgcccactgcaatctccatctgccaggttcaagcgactttccagcctcagccttccgagtagttgggattacagacttgtgccaccacaccaggctaatttttgtattttcagtagagacggggtttcaccatgatggccaagctggtctcgaactcctggcctcagatgatacatctgcttcggcctcccaaagtgttgggattacaggtgtgaaccaccatgcccagcctggtcaacatttttattaatgattttttgctgtatagtttgagtgtttaaaagtggttttggccaggccaagggtacagggattaaaggactgagccactgtgcccagccttttgcagaatkataataagaataatctaatatgacagacttcaacttgcttctaacctgacaggcccccccccccatcctttttttttttcctttttctaacacagagttctcatagataccatgaaaaatatttagtttataatt

SEQ ID NO: 500725 - DNA, 519 bp, Homo sapiens
ctggagattgtatcttcaccaccgctgccaataatgtccactcatggtttggctcaggcttccccttcttgggcagcctgatcccatagtgttcatagcatagctgagcaatctcatccgcggtccacatggtctgagctggtattgagaccttgatcaaaaaccacaaccatcagaagtacggaaaggagaaccagtgcacgatgctacagcctctcatatccatgcttcgagtctttcaaatggagcagaccgaggtttccctatctggaactctatggatcattttcttctactatctccctgcccccttttcatctttaatgaaagatcaaagaaaccccaaattctaccaatccccaaaattattgtttcaagtttttcttaatgttatatatctgatacatttctaaggagtctgcatcctctactcaacattaaaggacacgagaaggaaatgtcctcactactccagttttcaytggaaacggcatgtaaagggttgcagactcacttgct

SEQ ID NO: 500726 - DNA, 551 bp, Homo sapiens
ggtcttaaggaggctagggatagaaaggaactgaggcagcagtagacaacttgtatgtgagggttggcaggaaaaatgaccgagtgtgaaagctagaagggacagaagggtcataaagtccccatttctcttcaaacagttgcaggctcacaatttgctaactgctttgctggggtgagcagaaacaggcgtggtctcaaacttcatcaagcatctacacttgtaaagaaaatagatagtaataaatcatcctccaaaattgtataaaatggcagctcaggtaaatggtttgaaggagaggtccacggggtgttgagaagctataatggacayggacctagttagaggaggtttctctgaggacatgagatctgaagggaagaaggctttccgtggtatggcaacaagtgcaaaagccctgtggtaggaagggacatggagaccagtgagagtatagaagcccaaagaaatatggcaccaggtgaggcaggaaggggctggccatgcaggactgtgagcactactatgggatttttgtctgtattttaaga

SEQ ID NO: 500727 - DNA, 551 bp, Homo sapiens
tgagcagctcccactgtggttccagttcccgctgggtagcacstccttgctggctccagctcctgcttcatggccccagctcctgggcttgaacatcacttcctgctccaaaagtagtagaaacttcttgctcatgctaatacccagattgccaccctttctccaacacatgtggttcactatattaaattcccctaattgaacgacctgatatgtgtcctgtttccctacctagcccctgatgtgaatgtagactggcttcaacagctccatgctgagcagtaagagagccagctacaaagtctctcagtctccttataaaccagcaaaaactacataaagctatcacaggccattcctatgaacccatgctctatagatccagttcctatgcccccacttaaccccatcaacattcatcactgaagacccatctttgctcactgactactggacacacaataggctgtctggtctcattctctaaaaacagtccaccccttgactctttggtcacaaacacctgggccaatgtcattggttcatggggc

SEQ ID NO: 500728 - DNA, 628 bp, Homo sapiens
attgtctttgtatccccattgactttgtaaccagaaatctctcatgggcctatttataactgaaacactactactagtaataatagcaataactcaatcccaatagtccaacaaaatagctatgtgtcttggatcttagatataggaggctcaaaataatcaaagtgtaagatcccaaacaaattgcctayctgaaaactctctggatagaaatgaaatatcaagacaagcaggtactgctcacagagttatagaccactatttttcagttgcagtccattagtgggtggcaaattcaatttagtggaccatgaccagcatttaaaaatatggaataaaatagtatagaaaagaaagtattggccaggcacaggggctcatgtgcctttgagataattccagcactttgagaggctgaagtgggaggattgcttgagcccaggagttcgagaccagcctgggcaaaatggcaagaccctgtctctaaaaaaaataaataaataaaaaataaaaataaaaataaaaaaattagctgggcgtggcacatgtctgtagttccaaccacttgagaggctaaagcaggaggattgcttgagtccaggaattccaggcagtggtgagctgtaat

SEQ ID NO: 500729 - DNA, 614 bp, Homo sapiens
tcacagctctgatctaagccactggtggcttccgcttcattaaaataacaggggaagcccctaatttagccagatttaattttcaacttttataattcatttaaaatttgatcaaygagttaatttatgacaagggcaaggggtgccttgctggctcctctggtgggcacaggcattataacttaatttatggttaaagcagcttgttttaattgagtgcaaaaaggtggtttcttgtctggattttggagtcctaaggtgaatggagagaggactgggtgtacccgggttctttttttgaagggggaggatcatgaacgtcagtccacaagaagcagaatattggaagaggatatgttttgatccaatgccatcgatcaaaagcttgccaaggggataaaaagaaaaacatgacagccaacacacacccagggcctcctaggcttctccatggcccttgggggaacaggagcacattctggagcagggcaggagaatgcaccagcatgcccacttgtatagttatggatgatacatatgacttgagatatcactctggagaaagctctgaggttctccagacaagcctgggaggcactgagggctttgaattt

SEQ ID NO: 500730 - DNA, 614 bp, Homo sapiens
tcacagctctgatctaagccactggtggcttccgcttcattaaaataacaggggaagcccctaatttagccagatttaattttcaacttttataattcatttaaaatttgatcaatgagttaatttatgacaagggcaaggggtgccttgctggctcctctggtgggcacaggcattataacttaatttatggttaaagcagcttgttttaattgagtgcaaaaaggtggtttcttgtctggattttggagtcctaaggtgaatggagagaggactgggtgtacccgggttctttttttgaagggggaggatcatgaacgtcagtccacaagaagcagaatattggaagaggatatgttttgatccaatgccatcgatcaaaagcttgccaaggggataaaaagaaaaacatgacagccracacacacccagggcctcctaggcttctccatggcccttgggggaacaggagcacattctggagcagggcaggagaatgcaccagcatgcccacttgtatagttatggatgatacatatgacttgagatatcactctggagaaagctctgaggttctccagacaagcctgggaggcactgagggctttgaattt

SEQ ID NO: 500731 - DNA, 594 bp, Homo sapiens
ggctttaaagtcattgcagctaggggcagtggctcacacctgtaatcctagcactctgggaggctgaggtaggaggatcacttgaggtcaggagttcaagaccagcctgggcaacatagagaaaccttgtctctacaaaaaaattttaaaaaagtgattggtcaggtgtggtggcacatgcctgtagtctcaggaactccctgagtccagaggatcccctgagcccaggagtttgaggctgcaatgagctatgattgaaccactgcacttcagcctgggcaacagagagaaaccttgtctctaaaataatactaataataaatgaagtcactgcatttaaccactrcttaacacatcctcgggaatttgttgatgaatcacattttttttctaatgattttatactttaaaagaggactgagtagagagaacaatgctttacccaaaagaacaaatctaatggtaggattccaggcatcatgacttggcttggtggcagagattaggaccagagaggccttttctgggtcttccaatcacagctcacaggaagcggctgcatggccggctggcctgggtcacagtctccatttc

SEQ ID NO: 500732 - DNA, 485 bp, Homo sapiens
atggacaaggcactcccaccatgtgccaaccggggagaatctgaatatttggtgaacagctctaatgaccactccagcaggttacaaacattatgtataatcttcacaaccactacaggaaatgttactatcatctctctactaaagacaaggaaactgacgcacagaggcacagcaagtggcccgagatcacacagcaagcaaccagtgaagccactagattccaaagcccattctcttaaccccattttgtttttttgttttytgagagatggagtcttgctctgctgcccaggctggagtgcagtggtgcaacctcggctcacagggcgagactgtctcaagtaaaaaaaaaaaaaaagccaggtgggggataggtgtaggggcagaacctgggtgtcctgtccatatctcagcctattccaagactgatttttgggtccacggaattctgtgaatgcaacactgtggcagaggcacctaga

SEQ ID NO: 500733 - DNA, 534 bp, Homo sapiens
acttgaatttttttcactcaacactgtgtttctgagaccaatcctcgctgatacatagagagctagttaattcctcctgccttctgcatagcatctcactatgttattaattgccttttgttttctcaagctatttctgtgttgatgggcatttgtgttgtgtctactgccttgctattgaaaatagcacttcagtgcgtgcaccgcgtaggcctctgtgtactaccgtgaagtgtttcctgaggccagtagttctcaacttggctgcagacagaatcacctgaacgtttttttttttttttttttacaatcacaccaactctctgcctttccccaaattcttaattgaatggttcagggtaggcatcggcagytttagaagctccagggtgcttctaaatgtgcattcagggttgagacctgctgttctggggtgtacattggggatgttggtgttgcaatgactgggccaaaagaagaacccaaccccgtgttttaccaggctctgcccaattgcctttcaaggtgactgaa

SEQ ID NO: 500734 - DNA, 620 bp, Homo sapiens
ctaagcaacttccctactaggtgtttaccagaacaatgaaaacttacattcacacacacacaaataaaaaacatatgcacaaacgtttctagtagttttattcacagttgccaaaaatggtaacaaatcaaatgtcctgcaattggttaataggttttaaaaatcactgtacatctgtacaatgggctactcagtgataaaaagaaatcagaggtgtgattacacagatgactcctacacaaaggcaggatagtgagtaacagaggccagacacataatcttaygagtacatctagactacttaattccatttaaaagatattctgaaaaaggcaaaactataggtactgaaaagagatgagtggttgtcaggggctgagggtagcaggagaagttgactacaaagggacaagaaaaaaattagggaggggggattgtggaaatgttctatatcccgattatgttggtgagtacacaactgcacgtttatcaaaactcactaaactgtgtacgaaaagggtaccatacccaagttacgtctcaataaccttaaccaaaaaagtaaacaaataaaatattttgctgaagccctgaacccagctacacctgaagtgaaattt

SEQ ID NO: 500735 - DNA, 610 bp, Homo sapiens
gcttttctctctaagatcaaagttattttttgacaacacatgctgacgaatccaaactgacgccaataactgtttatagtttctctgggtgcaaacataaatattttagatgactgcatccatttgttatcactgtggcagaacccacttctcttattctaaaggaactgaaaattgttggacctctcacctcctgtgtgttcagaaagccaaacttctttcttttctgccaatattccaggaccctaagaggtctccgtagaaaacttacaagtatattcacaaaagtgagcatcgtattgatgctatgttgcttttttattttcctaagtctactatgcagtgtttctccctacattccccacttctattttcaattttgtatatataggactggacaatataccagagtttctattcctaagtaagaacctaatttcctagatgttstttttaaccctcaaattgcttttaaaaaccagatcataaataatagctattttcaaagttctcttatatgcattatctcatttaatgcacaaaattttccaagagaaaattactcataaattcattcttagaaacgttattccacataccccaagtcaga

SEQ ID NO: 500736 - DNA, 598 bp, Homo sapiens
ctgaagtcccgcttcagtccatattctagaccttttcagttccaaaacacgaaacacaatgtccttctgccaaaatatttactttgcaaaacaggttgtttttgctatttggccatggactcagcatatcttaagaaatgaattataaagctagttctttcagcatgtaaaaattctaatcccggagtaacatttcttactacaacttattcattttgtaaatagatattgcgcattagattgtgaccacatttatgggatactctttttcctggctgaartgaatggttctctctctgagtccccataatttggtttggcagcctgacatcaatcgagaaaaaggaggagacaggtctcaatcattttatagggtttgtttgccaaagttaaggaggcgcaacagggagacaggtctatgcctttctccaaagatgattttgagggctccaaatttaaaggagaaagagcaggatattgagaaatacacaattttcatgtaagaggtgggtagggcaaaatagccactcatgcctttgtctggctcagtgaatcagcattttttacagaagatgacatagacaaatggggtagagga

SEQ ID NO: 500737 - DNA, 598 bp, Homo sapiens
ctgaagtcccgcttcagtccatattctagaccttttcagttccaaaacacgaaacacaatgtccttctgccaaaatatttactttgcaaaacaggttgtttttgctatttggccatggactcagcatatcttaagaaatgaattataaagctagttctttcagcatgtaaaaattctaatcccggagtaacatttcttactacaacttattcattttgtaaatagatattgcgcattagattgtgaccacatttatgggatactctttttcctggctgaagtgaatggttctctcyctgagtccccataatttggtttggcagcctgacatcaatcgagaaaaaggaggagacaggtctcaatcattttatagggtttgtttgccaaagttaaggaggcgcaacagggagacaggtctatgcctttctccaaagatgattttgagggctccaaatttaaaggagaaagagcaggatattgagaaatacacaattttcatgtaagaggtgggtagggcaaaatagccactcatgcctttgtctggctcagtgaatcagcattttttacagaagatgacatagacaaatggggtagagga

SEQ ID NO: 500738 - DNA, 577 bp, Homo sapiens
cgcggtggctcatgcctgtaatcccagcactttgggagaccgaggtgggtggatcacaaggtcaggggttcaagaccagcctgaccaacatcgtgaaaccccgtctctactaaaagtatgaaaattagctgggcatagtggcrggcacgtgtaatcccagctactcaggaggctgagacaggagaattgcttgaacccgggaggcggagtttgcagtgagccaagattgcactactgcactccagcctgggtgacagagtgagactccatttcaaaaaaaaaaaaaaaaaaaaaaaagaaatataaattgcttaaaatttctaagaaatacaatgctacaataagtaaaaactactacactttggtcaatgatacagagcgtttctccagtcttttgaaaataaattaaggcattgctagaagaaaggaaataaacgaaagaaaggaaggaaaagttgattaatttacctagtaatttggtatatataatgacgaacagcatatttgtaagtttctttttttttattgaattttgctgataattttcctcaatgggaattaactgaattgggtagca

SEQ ID NO: 500739 - DNA, 577 bp, Homo sapiens
cgcggtggctcatgcctgtaatcccagcactttgggagaccgaggtgggtggatcacaaggtcaggggttcaagaccagcctgaccaacatcgtgaaaccccgtctctactaaaagtatgaaaattagctgggcatagtggcgggcacgtgtaatcccagctactcaggaggctgagacaggagaattgcttgaacccgggaggcrgagtttgcagtgagccaagattgcactactgcactccagcctgggtgacagagtgagactccatttcaaaaaaaaaaaaaaaaaaaaaaaagaaatataaattgcttaaaatttctaagaaatacaatgctacaataagtaaaaactactacactttggtcaatgatacagagcgtttctccagtcttttgaaaataaattaaggcattgctagaagaaaggaaataaacgaaagaaaggaaggaaaagttgattaatttacctagtaatttggtatatataatgacgaacagcatatttgtaagtttctttttttttattgaattttgctgataattttcctcaatgggaattaactgaattgggtagca

SEQ ID NO: 500740 - DNA, 560 bp, Homo sapiens
  misc_feature (1)...(560): n = A,T,C or G
caatcatatcttggccattcattctctccacccaatttctcccatatggcaaattgcccagagatcattattagttccacgaatagccaatcagcaaatatttaggtaaagtcagtctgttgcaagatccaaaagagagagggagagggaaaaggagaaaaagagggagagagagatggagagagagaaatggagagacacagagagaaggagggagggaaggagagacagagagagagagagagagagagaggnnnagtgccttnagtactttattagtggctcaaaagcaggtgtcttaagaggaatatagagttaaaaaaaaggcaagcctargcatcaatatagagcttggggcggtgatgttcagagacctgcagaccttcaagatggcctattttacccagttttatagatgaaatgtttaggaagccttgaacctgcacctaaacccaatgctcctgttgccctagactctctccaaccattttatcatttagttgttgtgaaagcagtgactactgcctctagaatacatcccatttgcccctgaagagaag

SEQ ID NO: 500741 - DNA, 584 bp, Homo sapiens
agcaagactgcatttcaaagtaacatgggaaagccattacaccaaaattcatttgaaacaagttactcctggacagtgtgagttaagtgtgattactagttctggaaatccattatgaaacagataaagttaaacattgccctggataattgatgcattgagttgcattcatttatctattgaatagcaaataragctcagttttggtaagagaggttatctgggagaagattttatcttaaggacataggtaagaacaagttaggttaagaaattaaaagtacagagtaggaaatttatacaatcatttagaatatggtggattggtggtatatcagtttaactcagttggaactatgtttcgtaaaatttcttccctgtatagttcttgttaataggaagcatcagccatgttctttttgcactctgaaggtcaaagcaagcatgaggccccctgcagtgtatgcacattgttggttattgagggctcactaccttgcaatggcatccctcctgcagttcctatagctcctgccagtcctcattcacggctggctcctgtgctaggtgcagatttcgctcta

SEQ ID NO: 500742 - DNA, 559 bp, Homo sapiens
taaaaatacaaaattagccaggcatggtgacgcacgcctgtaatgccagctactcacgaggctgaggcagaaggattgcttgaacctgggaggcggaggttgcagtgagccaagatcatgccattgtgctccagcctgggtatcaagagcaaaactctgtctcaaaaaaaaaaaaagaaagctcttttagttggttcttgggcttctttgacatgcccccatatatgtgggggttttgtttttatttttaagttagcaggcaattttttattaagatgcaatgaacataacaaaaaattacaattttaaaatgtacacttcactggatttttgtatatttactatattgtgcaaccatcacatctctctaattccagaacatttctactactcccaaaagaaatctcatacctataaagataattaggccaattctcccctttctctagcccctggtaaccattaatctactttctgyttattaatttgcctattctggacatttaatataaatggaagccttttgtgtcaggctgctttcatggagcataatgttttc

SEQ ID NO: 500743 - DNA, 596 bp, Homo sapiens
tgtacagggtcgcagaagcagcacagacagcaacttgcttgcatttcgtaagaagaaagacaggccgggcgcagtggctcacgcctctaatcccagcgctttgggacgccgaggcggttggatcacgagatcagkagattgagaccatcctggctaactcggtgaaaccccgtctctactaaaacatacaaaaaaattagtcgggcttggtggcgggtgcctgtagtcccagctactcgggaggctgaggcaggagaatggcgcgaacccgggagctggaagttgcagtgggcggagattgctcgacaaaaaaaaaaaaaaaaaagaagaagaagaagaaagatgccagaaagggtgaccaaatatatctataggaaagttcattgaaacattatataaagaataggatatatgttggtacaaagatgattattgtaaatatatttaggaagatcaatgagacttaattgcctgtccaataggtatgtttaagtttataagaaagaatttacctcctcattattcttaaattttatagcactttaagaaaagttcacaaaatgtaattctgaaaatatataagcatagaatcatga

SEQ ID NO: 500744 - DNA, 561 bp, Homo sapiens
agacattaaaccaaagttgtagatgaagaccgactgccataggatgtagttaaatgaacaaagttggttacaaaaagggtgtgcaccatgtgatccaccttgtaaaaaaaatctgtgtgcataggcaagaaaaacagtctggaagaatgggtacactgtggttaaatctgggttgtcagattaaggtggttttttaaattcttgcgtatttaaattttgtgtattttatattgtgtatttaaattttgtrtatttttcctatagtgaatatatattactttcatacttaggattttattttaaacaaatgaaactagaaaacggttatgattccatgtggattcttggtggaatcgctggagaaattgtagagaggaagtactgaaggtgtgaaaacatacagtgctggtgtggctctagggaaacacattgccatatattgcccagagtgcattttggcaatccctgatagagggcaatttagcaacctctatccaaactgaaaggagcatacattttgtcctaagtgttcatcagtataaaacatggcacaaccacaca

SEQ ID NO: 500745 - DNA, 555 bp, Homo sapiens
aaaaagaaggaatgaggaaattctttatgtactgatttgggaagactctgcagatacattaaaataaaaaaaatcaatatgcagaaatatgtacaacctgctactacttgtgtaaaatcagggaagaataaagtagaaaaaaaagccaaaccatggagtctagattcagacagagctgcatttgaacactgatgccacctcatagcatctgtgtgagcttaaccaggttccttatccttgtccaaacatcagctttctcctctgaaaactaggactaataccraccatcctgttgaattgttgtaaggactgtatgacataggtgatcaaaagctgctatcattattacttgcacacattctttaatgcatataacaaatattgattgaatgcctagtttgtaccacacgctgttctaggtgcttggaatgcatcagtgaacagaatagacaaaaccagagttattgacacgtaaaataaacaccaatgatcacctaacttagacttttttcttctagcctagcatctacaatggtttgagcgtgtcccccaaag

SEQ ID NO: 500746 - DNA, 556 bp, Homo sapiens
ttataactttcatagtttcccattctggtctcacatttccataacaatttcaataacaattatatttattatgacatttataataaaaaatctatagcaaggtaagtgatgctgttagtaaccatattagggtttcttagttttcatccatcattcccagcttccrtttggagttcattgatattttttcaatccatctgctccaatgataggcatgttatcactgaacacagagaaagatccagaaattccttgccctaacccacataataggctcaagtgagccctgctaccttttcatgtccaaacataatcattttatgaatcaggacaaaaaccatcatatattttcctgagatgtgttatgaagaggaaatgagttgaaaacactaagaagacaataagctctcaatatttctatatcatggaataatgatttccacagtacggaagacatttatttacaaagagcacagagttacaaattgtgggaaacagctatattgtaaccatgtatgacttgctaagtttagacaagttctcaaaatcttctcca

SEQ ID NO: 500747 - DNA, 624 bp, Homo sapiens
tgtcaccagcctaaagacggtaacggaaaacaaagaagcatggagtgtgggaggaggtgagggccccacaggtcgttaacctttaaggttaggcagaggaagaaaagcccatgaaggagataaaggaggaggagccagggaggtaggaagaacaccagtagtgtacatggtgttcctctctggactcctgtaagtcagaggaaargcatttccagaagaacggtcaagaacagtgtgaatgattcccagaagtctagtaaggacttgcccttgaatttggtgtccttggagcaaataggttcagtgaactgatatgggcagaagccagatttgactgggttggggagttttagaccagcacttctcaaccatttcaccctcaggactcctttccactctgaaacatttttgaggacccccgaagagtttttgtgcatgttgcttacatctaccgatatctaatatactagaaagtaaaactgataaattattgaaatattttttatgtatttaaaaacaacaattctatttcataagtcatatctttttataaaacataaccatattttccaaaacaaaaacatttggtgagaagaacagcatctttttacaattttgcagata

SEQ ID NO: 500748 - DNA, 624 bp, Homo sapiens
tgtcaccagcctaaagacggtaacggaaaacaaagaagcatggagtgtgggaggaggtgagggccccacaggtcgttaacctttaaggttaggcagaggaagaaaagcccatgaaggagataaaggaggaggagccagggaggtaggaagaacaccagtagtgtacatggtgttcctctctggactcctgtaagtcagaggaaaagcatttccagaagaacggtcaagaacagtgtgaatgattcccagaagtctagtaaggacttgcccttgaatttggtgtccttggagcaaataggttcagtgaactgataygggcagaagccagatttgactgggttggggagttttagaccagcacttctcaaccatttcaccctcaggactcctttccactctgaaacatttttgaggacccccgaagagtttttgtgcatgttgcttacatctaccgatatctaatatactagaaagtaaaactgataaattattgaaatattttttatgtatttaaaaacaacaattctatttcataagtcatatctttttataaaacataaccatattttccaaaacaaaaacatttggtgagaagaacagcatctttttacaattttgcagata

SEQ ID NO: 500749 - DNA, 524 bp, Homo sapiens
tgacttccagcagccagtctctgcatctcggagggatttttctgaaactgtttaaagccggtatgcttttgtctgggagcactttaaaaatgattgacatgagtcggtatatagatatcccagttcctttgctcctcagatgggatatttcagacatgtgagttttatactattcccagaatttcctggcaggattaagctccagtcacccagtatggtagctggctggataatccattctttattgactgtttgttttctcttcccagcatagtttccttacccttgcacaggaatctttgtattggggtctccttctagggaaatccaaactaagacaaatattaacatcaaccccgtgagttagatatgatcattacatttatttttgcagacaaggaaattgaaacatgcaaaggcaaaggaagaggcagaagtgttcaaacccacgttgtgagtctggtttgagagccygcattctagctacaccaagtaaatgctacaggagctaagtgaaggagtgc

SEQ ID NO: 500750 - DNA, 574 bp, Homo sapiens
tttactcattctaattatttcatagaagtgtcacaatattgaattttggtctgtcatctaaggtagtatcagttcatttaaattattatttaaattgttcatcacagtagaagtcattatttttaaatattacagtgaaatgtgcttagttttattttttaattttcagtttttctaaatgttgtgttgtattattatatacayacagatattttatatttcattattattgcaaatttttccaagcagaatgatgtaatttaaaataataccatcaattttcatttgaagcagtatttcatatgtaaacatatatttgatatccacatattggacttgttttttcctgctgaggaaatctaatttatgaacagttgtttagtgggaacactcaaagtattaaggatagatttcactagattaaattcatgagggctgataacataacttatttctatatcatcacttacaaacagttacaaacccttacactgagcggtcagcaacttattttaacaacaaaccaaggttggaaatgaaactgtagattttacactgatgaagcttttgttgc

SEQ ID NO: 500751 - DNA, 636 bp, Homo sapiens
ggtgataatttttgagaagaaatattaacaaatagtaaatagtaataagtaaactttttactcattctaattatttcatagaagtgtcacaatattgaattttggtctgtcatctaaggtagtatcagttcatttaaattattatttaaattgttcatcacagtagaagtcattatttttaaatattacagtgaaatgtgcttagttttattttttaattttcagtttttctaaatgttgtgttgtattattatatacatacagatattttatatttcattattattgcaaatttttccaagcagaatgatgtaatttaaaataataccatcaattttcatttgaagcagtatttcatatgtaaacatatatttgatatccacatattggacttgttttttcctgctgaggaaatctaatttatgaacagttgtttagtgggaacactcaaagtattaaggatagatttcactagattaaattcatgagggctgataacataacttatttctatatcatcacttacaaacagttacaaacccttacactgagcggtcagcaacttattttaacaacaaaccaaggttggaaatgaaactgtagattttacaytgatgaagcttttgttgcaatcag

SEQ ID NO: 500752 - DNA, 415 bp, Homo sapiens
tcttcctcccaccccatcttccctgtccctttctttttccacagcagctctgcaacgggccaatagcttccagtctccaaccccaagcaaataccagaactggaggagagaattctggtggagtgagtcactagctctctgggggtgggaggctggggctgggcagaagatctctggttaattctcaggggcagcygttctcattccttacatggtatctctctggcatggcctcctggttgtcagaggcaagaaataaaatataagcttgactttatttccactgctgactagagggagccttttccagggactcaagatcttcccatccccctccaccccacccctggctcaggaattatggagccttaggattctacagtttcacccagacagggccttagccatcattgcc

SEQ ID NO: 500753 - DNA, 532 bp, Homo sapiens
gatggcagagagggagaatgagggtgcaaggaggaagggaagaaggaatttggcaaactgaggacaagaacgggaagcaaggcaaggactgactcacaacttttgcctttttaggcttgaaccttctaatcgtgggctgcgatgggggtgcggtagtgggaggcaggccagccgcctccccagcagctccttcctgccgccctcagatcagatctgttcccagaattaccttttccctccaaagctttctgcgaggcctccckctgggagcttgctgaccgtgtgcgtgtggtgccatctgttcagagcccacggctgggacacacagtcgcacatgttcgcattgatgtatgggggaaggcaggacagaatatcgagaacggtgtggcctcctgggggtggaggggactcaatgggactcttcttgggatgggacttgggtttggcctggcctgtgtgggtccctgaggaagagcttttcactcagagctttggggaaactaagaccaggggattgtgttgcgctaagaag

SEQ ID NO: 500754 - DNA, 505 bp, Homo sapiens
gacttctcaccctgggacttcctttgccccacgggaccctgccactgctctacccattcctctgagtcccacgccttgggcaccaggaacctctgagtcaggctctgacatcttcctctttctgactgtttatagaattggagcttcacttaaagcctcctcttttcttgataaaataataacacctttgtaatgaagagtgtgttctttccttggtaggtttgacgccagtgaacaaaagaactatgtcacctcctaaggacccttctccttctcttcctcttccttcatcgtcttcccattcatcttccccaccatcttcttcttcaaccagtgtttctgggaatgctccagatggttcctccccgcctcaggtgagtgtccctgagggtcctgcccaggtgtcaggaagctaasctacctgtactcttcccaccttccacacttatctctggattccacgtgctcataggtcaacctaagtgcaaagccagcgccagaagat

SEQ ID NO: 500755 - DNA, 516 bp, Homo sapiens
aatgcttgttcctatgacagcatttgtcatactgtattgtggattacctctttacctatgtgtgcctctcaatggactataaacttctcaaggtagaaactgcatcataytcattgttacagacccagtgttttaatgtctaatgcatagtaggtcttcaccagatgagttctgtttgaatccaagaagctgaagctattactggaaaagttaccacttattgctttaccttgggccaggcaatgtgttaacttaagcatcaaatataatttcttctttaatccttatatcagttctataaaggagaaaaccaccattatccccattttagatgagaaaatgaaaaagtataaaggtttataatgtgactggcccaaggtcgtacaggtagtaaaggaaaaaccaggacattgactctcactctgagttttgaattactaccaacactgctccaatacccatatatttctcctgaatttatcttaatccttgaattgcaaagaacattcatgttag

SEQ ID NO: 500756 - DNA, 516 bp, Homo sapiens
aatgcttgttcctatgacagcatttgtcatactgtattgtggattacctctttacctatgtgtgcctctcaatggactataaacttctcaaggtagaaactgcatcatactcattgttacagacccagtgttttaatgtctaatgcatagtaggtcttcaccagatgagttctgtttgaatccaagaakctgaagctattactggaaaagttaccacttattgctttaccttgggccaggcaatgtgttaacttaagcatcaaatataatttcttctttaatccttatatcagttctataaaggagaaaaccaccattatccccattttagatgagaaaatgaaaaagtataaaggtttataatgtgactggcccaaggtcgtacaggtagtaaaggaaaaaccaggacattgactctcactctgagttttgaattactaccaacactgctccaatacccatatatttctcctgaatttatcttaatccttgaattgcaaagaacattcatgttag

SEQ ID NO: 500757 - DNA, 507 bp, Homo sapiens
ttacttagccttggacagagagttatacctttggcttccctggctctgatgccttcagacttggaccgagccaggctacctgcaacccagggtctccagcttgcacagagcctatcatgagactgacttctcagactacgtaatactatgagccacttcccctaatgaattaccgcttgtctatctatctatctatctatctatctatctatctatctatctayctacctacctatctatctatctattcatccatccatcctggagaaccctgactaatacaattagactagctctatgaaaaagtgatacatgatggcagaaaacctcatgagttacagtggtaaatagcaaatggacaggggaaaagtagagtgacaataggtgtacaaaagtctagcaggtagaaaaaccatccccaagtatgtccattccctaaaaccctaaaatctgtgaatattttatgtttcataacaaaacagactttgcagatataatcacaacggg

SEQ ID NO: 500758 - DNA, 600 bp, Homo sapiens
agcatagtggtgaagcctcaagatttggactcagatggacctttgtcatgtacaagtcattggctttgggtaagtaatttaacttgtgtacgcctcagttttcctgtgtatagaatgattattttgaggactaagtaggataacacatacatagctctttccacagtactggcacatggtgaaagctcagtaaatagtatctattattagtaattccgtaggaaaaggaggctcaaggaagacattgctcaattgaacctctattcactgagtgccactgggggccaggcaccagcctaaytcctttcatgttgcttatctcattgaaccttcacaaccaggatcaagatcccagacataggaagcggcgacgggaggagttgagttggttctttccaactccgagagatcaaaacctctcaggaaggaagaaatctggtgggagtaagtcaaatctgtggcaaggagagaagcttttcagagggagtagctgggctaagggacgtgtggctgtcacaaagcaagtccctccaaagggcagggaagctgtttccatgagagtgggtggcctgactccacaggagatgcctccatggaagc

SEQ ID NO: 500759 - DNA, 600 bp, Homo sapiens
agcatagtggtgaagcctcaagatttggactcagatggacctttgtcatgtacaagtcattggctttgggtaagtaatttaacttgtgtacgcctcagttttcctgtgtatagaatgattattttgaggactaagtaggataacacatacatagctctttccacagtactggcacatggtgaaagctcagtaaatagtatctattattagtaattccgtaggaaaaggaggctcaaggaagacattgctcaattgaacctctattcactgagtgccactgggggccaggcaccagcctaactcctttcatgttgcttatctcattgaaccttcacaaccaggatcaagatcccagacataggaagcggcgacgggaggagttgagttggttytttccaactccgagagatcaaaacctctcaggaaggaagaaatctggtgggagtaagtcaaatctgtggcaaggagagaagcttttcagagggagtagctgggctaagggacgtgtggctgtcacaaagcaagtccctccaaagggcagggaagctgtttccatgagagtgggtggcctgactccacaggagatgcctccatggaagc

SEQ ID NO: 500760 - DNA, 545 bp, Homo sapiens
agaatttgcttaagaaccaggtgtcgctgtccctccgctcctgcacatttctatttgctatttcaatatgtgacatgaatctctgaggccagcatgtcacacgtatacaggggcttaagcttgtgggggccttcccgaggacagagaaagtggccctaaatgctatactttgattcctaaactcatgaacttcccaacaattctcatggaattcatgaacgacccaagcatgatatagctgtcaaaatcaatcaaacccactcgcaaggagctggagaggtgtgactttcagccactctgttgttttgattcaggacctgccaggtcttttgctggctatggtcagcggctgctgggagccaaggagccagcaccaaccgtgggaggcctggggagttgaatccttgccccgaagctgcctacgcggagacagcagaacccagataggacacacaggtgtcttgcctggctttccagacctggccacagtgctactgtagagwttcatcggctcctcccttcttagctgccccttctagaacagg

SEQ ID NO: 500761 - DNA, 652 bp, Homo sapiens
tacagtgcaaaagtgaagggtagtgggagtcagaaaactgaaggtagtctggatgaattttccacctaaaatgatgactgctaacaaatgcatagtacatttaagaaaggataggctcctactagctcttgccagttctttcctcttcttcctcaccactcctctcatgactgtcttgcctggatgaccctccttgatttggcttttctctgctatggagtttctactgcctaagcccacctgcccttagaccgcggtcctcagatcctgagctcctcagtccaagccaaactccarccctgaggggagcaacttctttgtccccaggttcttggtctgagctgatgtggcctccactataaattaaaaaaaattgtattgtggtaaaatatatataacataaaattgatcatcttaaccattgttaagtggcatcaagtacattaagtatattcacgtaattgtgcaatctccagaacttttctttctcctttttcacaatacaaacatttaatgaaaattggttagtgagtgtgtataatccacagggggctaaatgttaacctgggactgtagcagaaatttaaaatagaatagatgctggagtaaatgttatatattgtcatcatctgattcatcttcttccttcaaa

SEQ ID NO: 500762 - DNA, 628 bp, Homo sapiens
tcagacaggaactggtatcaaattccaagtgtcaagtggagaggaggcttctcgtcctccccaagggaaccctgctcagtaacataccaaatgtcacagaggggtccaattttcccacgcaagagcagaggtgcaagcatcaacgcagcttagctttgttttcaaaggaaaaagagttgtttaggaggtggtttcattttatacttcagtatttccgttatgaaagggttcctgttgttttagttttagttcttaatttcaccataagcaggagagtcacaactcaagtggtctcctcgcttctctctcgcttycttgtcctaaaagagagaaggaggtagcttccagtcttccaatgggtcttgctcatctcacacctgacctgcaaggtgcgtgctgccagccaggtggaacagatgcaccctgaataaaatgcttgattagaaaccacacactttacttaaaggggtgccgactgcgaactaagagagttaactgtattgtgtctacaccttatcatgtgtggcaggcagaaaaatgcgccccccaaaggtgcccaacttctaattcccaaacctgtgactatgttacattcatggcaaaagtcattgtgcagacggcattaaga

SEQ ID NO: 500763 - DNA, 579 bp, Homo sapiens
tggtaacttgtcaaaaatgtacatttgtacgccagtcccagaactcctgaatgagaaggtctggggttggagcccagctatctgtgttttaacataatgctccagaggacccaaatgcacgctaaagtttgagaaccactgctataaattatatttttttaaatgagcattcattcagatttccattatatttgggtttaatttccattaaacctattaagtacaggttattttctaatatttcttagtayagattttgtaatattcctataaaagtaaattcgtatagagggaagctttgaatttaccaaagttcagtagaagagggtgactaatatgaaactgaacaattggcttatatttttctcatacttcatctctggaacaaaatccttacaacagtttataaggaaacgcttcattacattgctcacatttacttcatcccctgtgttacacaggttcttggcatttgaggtgacttctgataattgcctaaaatgaaccagaactacagggtgcggaagatcaaggaccctgagaagatatgaagctgaggactcagcttgatcactttcc

SEQ ID NO: 500764 - DNA, 605 bp, Homo sapiens
gctgtaaaatctattaaatcttctctattgctagattcatcatattattataagccatcatcatatgacactggattattacaatagctacttaaatggtcttcctaaattcattcttgtccttatcttatccttctccacattttggctcaagctttcycccccacccaaaatgaaaatatggtttttccaggctttaatttaaaacgtattttaaaatttctagtgtgaaattaaaccaaatatttaacattttttaagaactttcttcctttgctcatatttgcattcttaaacttgttccatcccaacccattaatttttcagtttgatgacattaagctgctttctatttctcactcatcatgtttgctttccttgccttttcaagcttacagcaatgttatttagttcattggaagacaatttacctctacatggttggtatctaccctatgcgttcatagtgccctttacttcaaatctaatgacacttattttgttgtattttgagtatctgatacctctaagtgtgacccacaagtctctaaattccatacataaaaatctttctgtccagtttatttattaaccttatatttatt

SEQ ID NO: 500765 - DNA, 605 bp, Homo sapiens
gctgtaaaatctattaaatcttctctattgctagattcatcatattattataagccatcatcatatgacactggattattacaatagctacttaaatggtcttcctaaattcattcttgtccttatcttatccttctccacattttggctcaagctttcccccccacccaaaatgaaaatatggtttttccaggctttaatttaaaacgtattttaaaatttctagtgtgaaattaaaccaaatatttaacattttttaagaactttcttcctttgctcatatttgcattcttaaacttgttccatcccaacccattaatttttcagtttgatgacattaagctgctttctatttctcactcatcatgtttkctttccttgccttttcaagcttacagcaatgttatttagttcattggaagacaatttacctctacatggttggtatctaccctatgcgttcatagtgccctttacttcaaatctaatgacacttattttgttgtattttgagtatctgatacctctaagtgtgacccacaagtctctaaattccatacataaaaatctttctgtccagtttatttattaaccttatatttatt

SEQ ID NO: 500766 - DNA, 590 bp, Homo sapiens
tgtgatcctaatatgatgagattctcaagtttgctgtttcaaattcatcaagacttgatctagtatcactgaactgtatgtctggaattagttttatgtaaaagaaaactaaataaatgagtaaattaaacccaaatgcttttatttctgctaaatgaccattgcaaaattaaaatatcagacattaaaatgaattcagtacattcacctcttcttagcaacttaaatgcatccagaaataataaactrtcaagcacatttagaataggagtgtaaaatatctgataatcttctcctccataaaggcttggagaacattgaaaaaatttgtgaacattaaatttttcaaaacaggaatttcccaaatactggcaataatccaagaaccactaaataaataaaaatggccaattctttgttagaaagttgaatctggtaatattgtaataagccctgtctcctatttttcctcacctcagctagacagcagcccttgcaaaccagtaacctaacacaagagggaagaagatgggtttggagctcccccagagatttgtctcacagaatagagctccagttctgtctggagc

SEQ ID NO: 500767 - DNA, 590 bp, Homo sapiens
tgtgatcctaatatgatgagattctcaagtttgctgtttcaaattcatcaagacttgatctagtatcactgaactgtatgtctggaattagttttatgtaaaagaaaactaaataaatgagtaaattaaacccaaatgcttttatttctgctaaatgaccattgcaaaattaaaatatcagacattaaaatgaattcagtacattcacctcttcttagcaacttaaatgcatccagaaataataaactatcaagcacatttagaataggagtgtaaaatatctgataatcttctcctccataaaggcttggagaacattgaaaaaatttgtgaacattaaatttttcaraacaggaatttcccaaatactggcaataatccaagaaccactaaataaataaaaatggccaattctttgttagaaagttgaatctggtaatattgtaataagccctgtctcctatttttcctcacctcagctagacagcagcccttgcaaaccagtaacctaacacaagagggaagaagatgggtttggagctcccccagagatttgtctcacagaatagagctccagttctgtctggagc

SEQ ID NO: 500768 - DNA, 544 bp, Homo sapiens
gcacctggcaaatattctatatgtgactgtgaaatacataaataaaacagaaaacwtatgataaattaggcaaaatagaaaactattggcataggccaggcacagtggctcacacttgtaatcctagcacttagggaagccaaagcaggtggatcgcttcaggccaggagttccagaccaacctggccaatatggtgaaaacctgtctctactaaaaatacacaaattagccaggcatggtggcacacacctgtaataccagctacttgggagactcaggctggagaatggcttgaacctgggaggtggtggtggcagcgagctgagatcgtgccactgcactccaggctgagcagcagagagagactccgttgcagaaaaaaaacaaaaaaaagaaagaaaagaaaactattgactcacttaatcacagcatataaaggactgggtgcaattggatctaagagataactggatactgaaaattgaaagcactcaaaaatccctctacttcctatctctgctttttggcatcatcttctcccaa

SEQ ID NO: 500769 - DNA, 474 bp, Homo sapiens
ctccctattatatgacaagttctgagggtcccttcattacctacagataatattcatcaacttgaataaattataggccctaataaaaggttgaggaccacagtattatatgcatgaactataggagtcccttagtatacaagaggaatttgttccaggacttcctgtgtatacggaaatttacgtgcactcaagtctcacagttggccctgtacacctgcatatgcagtgttttccatccaagctgaaaaaaatatacatgtaartggatgcttgcagtttgacccatgttgctcgagggtcaactgtattttttttatgccaagcatcttcagcattgactcattgaatcctcacaatacccagtgtagtagaaacttctgttatccccattttccagatgagcaaatctaacttcaataacaatgtcatgtaacaggaaggctgtgaaatcagaattcgaacccaagcagt

SEQ ID NO: 500770 - DNA, 474 bp, Homo sapiens
ctccctattatatgacaagttctgagggtcccttcattacctacagataatattcatcaacttgaataaattataggccctaataaaaggttgaggaccacagtattatatgcatgaactataggagtcccttagtatacaagaggaatttgttccaggacttcctgtgtatacggaaatttacgtgcactcaagtctcacagttggccctgtacacctgcatatgcagtgttttccatccaagctgaaaaaaatatacatgtaaatggatgcttgcagtttgacccatgttgctcgagggtcaactgtattttttttatgccaagcatcttcagcattgactcrttgaatcctcacaatacccagtgtagtagaaacttctgttatccccattttccagatgagcaaatctaacttcaataacaatgtcatgtaacaggaaggctgtgaaatcagaattcgaacccaagcagt

SEQ ID NO: 500771 - DNA, 608 bp, Homo sapiens
gctgaaatcttttacagtgaagttgtatcatatgtgcctttaagcaacttaaactatatgcacataaagtagtgttataaaacattgctctatatttctgttatatgccacctactcatatattatactgtactttatagagtgatttaggggactttcaagggtaatcttgccttcatgattttaccctaatttgctaactgagagctcagcccatatactagggttcttctgactttatttacagcttcctttttccatatcagctcaagcycctaggtctctgtagaatattccctgctaaccatagctaaggctggaaaacactattttcgcctcttaggcatttcttttctgtgaggcaaattttgacattgaaatatacctggctttatagttgctttgtagcttggatatgtctggcctctctaaatagactacacaccccttgatgcaggggctgattcactcatttctttggagtccctgacagtgtgaggcacccacagatggttgttcagttgagctggctcacctaatccttaattgaaaagaggaccgttattggaaaggaagtttcatgatgccctgacctcccagcataaagt

SEQ ID NO: 500772 - DNA, 576 bp, Homo sapiens
catggaaggtgttgaagttctttagacttttctctctgttacttataggagggattccagaaattgaagaatcacattcacattgacyatatctcaggctttctgagagtttggacttatttcacgagcggcaccgtgaagacgtatgactttgtaggtcaggcatggtggttcatacctgtaatcctaacaagttgagaggccaaggcaggaggaatgcttgagtctgggagttggaaatcagcctggggagggtagaaagatcccatctcttggtggggggcaactacccctcaaaagaaatgactttgtcatgttttcaattgactataaccttgacatatgggtcaccataggatgtgaagaaacctggctgaatagacatatggaatggtacaagtaatatctggccttatacaaacccttgaatatagaggtctctgttctgttctttcctggacaaagagttttttgggtgggttcttcctacatgcctcggcaatattgcatgatatgtgaatgagggctctggagtaataaaaaaaaatgcggtttgagtttgggtccatttaccag

SEQ ID NO: 500773 - DNA, 420 bp, Homo sapiens
ttcttgtgaacattaaataagatgactataaacaaagtgcttagattaggtgcttctccttcctgcctcattccccttgttctttgcttgtagcctcccttcctctcttttcttttttgtggaacatcaaggaaagatcacactgtcaattatcctctggcttttcattttgttttaatctcagccacatgtgatagggccaggaggcagaggaattctagacggaaaagggcagtgtccctggcaaaggccacaccctcaagcctggaacctcagccccatgtgagaactttacatccccatcttcccactagaatgctgctttttccaaaastactcctggcctaccccgccccactccatgctatatcgataaaaaaccctgtgtttcactggcagagagcagagaaggggagaaga

SEQ ID NO: 500774 - DNA, 637 bp, Homo sapiens
tgttttgataaatatagagtaaatatatgagctttgtaattttttaggacctgtgaataatctgtgtttacaaaggagagctgttttagttaaaataatcctatttgctctaacagatactccccaatccaatatcccagaggctcaatatrataaaagtttgtcactcttaacagtctaacttgggtgctcctggtctggtagttttttctcaatattgaatttggagactccatttccttccattttcaaccctatatttttcaatgcttgtgtctgacgctaccctggggagtcttcattatagtcaacccgatgcagaaaagaccatggagaattatgagggaggattttatgtggaaaccccaaaatgacatatattgctgctgctgcattacactggctacaactcagttttgtggctactcctgaccacaagggaggctagtagtctagctgtgtgcccaaaaggaaaaggaactagattttatgcacagctagccaatttctaccacagggccaacataagttctttaacagctcaagttttatgcctgtaactattgcttccagcagaataaatttctcttcggcaagctgtgataaatgttatgacttcatattttattttatgaca

SEQ ID NO: 500775 - DNA, 618 bp, Homo sapiens
ggcaagttaattagctactctgtgtctcaaattccctaatgtgtaaaatgggactaatcatagtagctacctcctggattattgtgtggattaaataagataaggaatgttaagtatttaagacaatatctggcacttaacatgtgcttcataaatattagttattaccattctttaaaaaaattccaggagaactggtatccagttcaaggacttcaaagaagaaaatatcaggatatgtggccttatgttattggcaacagtgaagtagaggtagaaaatgtgacatcagcattatctatttgcakaagggaatatgctcttccttagtaagctaatctggcaggaatcaaactttcctatgaggtatggccaacaaattgcaggaactgttgtggagggcagggattccgaagtatgtctgcctagtacacaggctgctggcactggctgtgtccagatgtccctagtctgagagtggtggcttcccctgagtggctgcttccctggagagaacagaagaccttatgttccttgagccagggcaaatgttccttcactgtcagtgagagcactttctaatcttggtgttgaaagtaacttgcttattaacaatta

SEQ ID NO: 500776 - DNA, 618 bp, Homo sapiens
ggcaagttaattagctactctgtgtctcaaattccctaatgtgtaaaatgggactaatcatagtagctacctcctggattattgtgtggattaaataagataaggaatgttaagtatttaagacaatatctggcacttaacatgtgcttcataaatattagttattaccattctttaaaaaaattccaggagaactggtatccagttcaaggacttcaaagaagaaaatatcaggatatgtggccttatgttattggcaacagtgaagtagaggtagaaaatgtgacatcagcattatctatttgcagaagggaatatgctcttccttagtaagctaatctggcaggaatcaaactttcctatgaggtatggccaacaaattgcaggaactgttgtggagggcagggattccgaagtatgtctgcctagtacacaggctgctggcactggctgtgtccagatgtccctagtctgagagtggtggcttcccctgagtggctgcttccctggagagaacagaagaccttatgttccttgagccagggcaaatgytccttcactgtcagtgagagcactttctaatcttggtgttgaaagtaacttgcttattaacaatta

SEQ ID NO: 500777 - DNA, 459 bp, Homo sapiens
tttttgttgatgtaataatgcacatttcagttcaccttaaacaatgactatcttgactactgtattatgtcattatatactgcatttatggctctttcaggaataattgtgaaagctttattgaattatttttcatttcttttctaattacaattttcaatttatgtcatatccaagggaacataacaagaaactaaatcaatttatttctctgtgtttcttttttaataaaaagaaaactaagcttttctgatttttttctgaaattgcttttttatgctttcttaaaaacaaatttatctttaaatttaaattcaaatatgaaaccccttrccaagatacatgtttagctttttttttccttcagagaatttttttcctggtaagaataatttatatggctgaggctttagtcccaaaacagttttaaattgaaaaaaaagtggcttttaagaaacc

SEQ ID NO: 500778 - DNA, 507 bp, Homo sapiens
tcccaccctgcaactactcactttagtgtgaaagacagaaggatgaatacatttcttttttttttttttttgagacggtgtctcgctctgtcgcccaggctggagtgcagtggcgcgacctctgctcactgcaagctctgcctcccaggttcacgccattctcctgcctcagcctccagagtagctgggactacaggcgcccgccaccacgcctggctaattttttgtatttttagtagagacrgggtttcaccatgttagccaggagagtctcgatctcctgacctcgtgatccacccacctcggcctcccaaagtgctaggattacagacgtgagccactgagaaatttctaatacatatagaaaaagataaattgttataccagggctaaaacatataatagaaatatgaagtagaacaagatagagactgaacaatattgcttggcttcacgggagagatgggatttgagttaggcctaagtgaacaggcttccaaagatgtc

SEQ ID NO: 500779 - DNA, 591 bp, Homo sapiens
tggacagagctgagaattgggaatgcacstgaacttttatgaagactcattaaacaattgaagataatcctgagcaaaacatacttctgtgtttattcccttggtttttgcatgaagacagcaatgtttgcttgccccatgcaaaagcgaatatgacagacttccgccttttacttttatagtcaagaatgcataacttctttgggatagacactgccttcaaatgacaagttctgtgcttccatgttctagaaatacaatatctctcagcctacagagctattaaaatctgctagcaaacctcagggaagcagaaaacatactacctctcttgttttattttaaacagaagttaaatgataattctgaatgctttcgtgagaggaaaaaacctcctaacatctacactcaagcctcttaagttgtcttttatggcatgttgcaaacaaggctaatgccacctctacaatatgcatgttacattgttttctgaccaaaacttcatgttcaacccagatcacatagcacagcggtccccaaccgccaggccacagactggtccaagtccttggcctgttaggaactgggctg

SEQ ID NO: 500780 - DNA, 494 bp, Homo sapiens
tctcacaaccacttcacaaacaagatgtccaaaaatgttatcatctttcttaccaagcctgtttctcttcctgtccccactgtctcagtcacccaagttggaaaccttygatatatccatggctccttccacttccttccgtcctacatccagtctgttacataacattaagacaatctttcttttataaacgtggtacttataaatcttgaggacaagcatgattctaactcacacggtcttagcaaatgttgttggcctcattatgcctgccagatgtcatggaagcaggttggaatctgcctccagtctgactcagaaaaggtgacactgcagagatattatcaacaaagccctgcccatatcattacacctatctcttcccaattaaatgaaaacacacataccaccacctctaccaccataactcatccattataaacacttcatctttaataataacatctttgcatgggttcttatctcttgagatt

SEQ ID NO: 500781 - DNA, 640 bp, Homo sapiens
ctgcccatgcacaccgtcctggcacgccagattattcatcatttcccatgccattatttttacactttgtgtgttttcttggagttgttctctctacctggaatattcttctccctatttctgccatcctttcattccaggacctctggaaggtgaaattctgggttttttaaaatccagtttagaagacatctctgtgatagctttctttcctccttttcttctttttctgttctcctgtaatacttaagctgtgattcactgttcttactgaacctgaataatacaattaattgtatttctactcctctgctaccttctgagctccttgatkaccattttttcagttttattaaatgaaatggtgtatcatagtgcttaagagcacagattctaaaaatcctctgcacccaattttcccctctaaccatgtcctatgttggttctttcctttatagcaaaattccttgaaagtgctgccaatttctttcccatttccctttaaacatgtttcagtaagattttatttccatcactccagcaaaccaccctgttctggaacatgaatgaccctatgttgttaaattgcgtgatccattctcagtcctcttcttactttgcctgccattagtattgcacc

SEQ ID NO: 500782 - DNA, 424 bp, Homo sapiens
agttgggtcgtataattttaagaaaaagaattttataatgtgtgaagttaagaatgctgacctattctatttagtttttaatatttttcagtcactttcaactcactatctccctaaattcagtgtcttcacttgtgaaagggaggaaacagaagaccctaactgaaacggttattataattaattaaaagaacactatttaagtacttagtgtgttatacagcaaatagtcaataatgttaattgttgctattttttataactgaatatagttgaaaagtatttcagccatacaggaaaagttcaggaatgagaacagtacaaagaacaccatctttatatagattaaattactgtaaakattttacattattttaataagtaaactacagccccttattaccagatagttctgtgtatttcc

SEQ ID NO: 500783 - DNA, 591 bp, Homo sapiens
ggttgggggacattttaaacaataaaaattaaacattcctaaatttgtaaaatgctgttggccaatttctgaaattctgtgcacatttcacaatgttctttacctggtcaaatttcctaatagacagagtatgtctctgaaatcccatagcacttatgtaaccacttttatgcatatcaaattctgtcttgcatcataattatctatttaatgtttcctctagatattaaggtttcttgaaatcagccttcatatttgtgtgaaatatttttcccaaaataacaagatgttttacatatactgggttcacaataaattattggatttataggttagagaactacagagtagtggaatttttaagaatagtttgaagcagatctcttacaagtagacatggaggggaaaaagcagaaaatgtatataaacatggccttaaattagtgtgataaaaatgttcaaatatataactctatagaatcataactagtgtttgatttttagatgtgaaaaaatattcatctctacaaatcatgtacttaatctgagactaatagtayttctaatttgttgagcacattccaggtacac

SEQ ID NO: 500784 - DNA, 636 bp, Homo sapiens
cccctaaatttcatttatggtacccaggttaagaagataagttaaagaaggtgaaaattcctcagtcctccttagttaatgttcctagtcacacattcactctcagtcattcacagaacaccagtaaaatcaagattctgaggaccagatcatgattcatggttaatttagcaatatcaatactcctggatggggtgctttctggactggcatgaggcttttttcagacaccccctgttttgctctgtgcttcatatatgaacacggaatctctaaaaacaacaatagaaaaataaaaatactaaatttattatgtaccaatgctattcacaggtgggttattcttgactacagaacactgtatttcttcgacaagaatgttttttactaaaatttcaagaaaaatactctgaagtatcactgatctcagtgaaacttctgaaatttatatttttttcatcmaaaaagcttttcacctccaaagaattttgagtgaatttttaattaaatcctgataatcccactactgagctaaagaagatatgcaattaatctataagcatcgtccatgttgctcaacttttttactcatcagcaaagatataatttttgaatgtatagaaaaaatatatagaa

SEQ ID NO: 500785 - DNA, 551 bp, Homo sapiens
cataggagaggctatatttttatatctagatatcacttactttcagggtgagaattgacctattgtcattaatttgccatacatttattgacaaccaactatatgcagagcactattaggactttgagaaactgcttttaacttttaaaaggagatttatttgcacagctacatcccaaaatagcaaagtgttatcacctgcttctctagaatcccagttggagcttggaaattaaaccttcagtgcatttacatagaagtaggaaaatttctcttccctctatgaaggggcaggttaggtctaggagaaggtggcyacccctgatgatccacctccagggccaacatctccatttacagtctggacgcaggcctacctgagcctcagctcactttgatcaagtgaggagaactagtttctcccagagaaagcagagatcctaaaattgattctgagctttaagaccaggcaattccccctgaatctgcatacctcctttctcccactactacccaatggcctaagtctgcacaaattccttgagaaagca

SEQ ID NO: 500786 - DNA, 466 bp, Homo sapiens
actcccctggtgcaaagcacagccccggaccggggtgcaggacaccagctttgggagacatggctgccccgggtcatgcacactttggaaagcaattcgtagctgtgacgtggttcttgagagagaggaggcaaagtgaatggaaaaaaaggacagaagaaagcagggagacacggttccagggtctcctgcagacggccagcccctcacaggcattctgttgaccacattttaaacagatcccagggcaccgtctgtcctttaggcagcccctttgctcttggtgctttttatcttccattcttgagtgtgartgtgagtgtgtgtgtgtgtgtgtgtttctgaaaacagggaaagctgacgcttactgcaacaccagactgaccctcgaacctcaaaggagtcactgagaggaggcagaaatggcaagggaatgccacagttcccagttctccctcccaggcac

SEQ ID NO: 500787 - DNA, 476 bp, Homo sapiens
gagactcctctcagtgggtctccagtactaagggttgctctcctctcgctgggatgagacrgggacaacctcacagagggagatttatgctcctcttttaagcagaaaagggcagagaagagaactctgcctgcatctattgagtctcaggtgccttcagatccgcagaatcctcatgccaaagtggcatactttgggtttgtattccgatccccctttcagtttcaagtacaataaatagtctcttctgaattttacccgttaaagaaaaacaacatcacgcctgtgatcccagcactttgggaggctgagatgggcggatcgtgaggtcaggagatcaaggccatcctggctagcacggtgaaaccccgtctctactaaaaatacaaaaaattagccgccgggcgcagtggcgggcgcctgtagtcccagctactcgggaggctgaggcaggagaatgaaaggcgtgaacccgg

SEQ ID NO: 500788 - DNA, 476 bp, Homo sapiens
gagactcctctcagtgggtctccagtactaagggttgctctcctctcgctgggatgagacggggacaacctcacagagggagatttatgctcctcttttaagcagaaaagggcagagaagagaactctgcctgcatctattgagtctcaggtgccttcagatccgcagaatcctcatgccaaagtggcatactttgggtttgtattccgatccccctttcagtttcaagtacaataaatagtctcttctgaattttacccgttaaagaaaaacaacatcacgcctgtgatcccagcactttgggaggctgagatgggcggatcgtgaggtcaggagatcaaggccatcctggctagcayggtgaaaccccgtctctactaaaaatacaaaaaattagccgccgggcgcagtggcgggcgcctgtagtcccagctactcgggaggctgaggcaggagaatgaaaggcgtgaacccgg

SEQ ID NO: 500789 - DNA, 551 bp, Homo sapiens
ttgcacctgcaagcaccctcagtccaaataaggtcagtcacaagtgtctgaggttaggattttaacatgttattttaatcctaattcaactggtaacaccaagataattttgaaaatggaaaaaaatgtgtttgtaaaccagcgtacctaaagtcttcagagactgccagtaacacctgaggaaagccccggcgatgcggagcaggggaggatgagggctgcgaaaggcggcgtgactggcagatgctgaggccagtcctagaaggctgtgtccttgtggctccatgtgaaaggtgcagatgtcccccacccccaaactgcttgcacttatgctctgtgaccaactcctccctgagacccctgggcaagattctctcaggataaaccatgtggctcccagggcaccgcatccaactctacattgaatggggagcggggagtctggtccagaggacagacagagtgggccccctgggtggaaggatgcccrgcaggatgactgcaatgtgtggagggttctgggccttcaggggacctgtggggtaagaata

SEQ ID NO: 500790 - DNA, 562 bp, Homo sapiens
ctctttgattttaatgcccttcaatattatttatgataaggcatcgaaaaggcaaagaaatgggcacaaactgacacattagttttcaatatctggaacctagtcatttatgatcttgaagtccagaaactatggtgtcccaacttgttattaaaacaagtracagttttcatgtttatcggcctagattgtggataaaactgctcttttccagatcaatttttgataacttaagaaacagtagtctctaccacttgccaaagacaactattgctaatacttctgattttccaagaagaaatagggttaaaattaatcctgtgtagcttcttacatattaggcagaactagttatatactttgttgaatagaatgaaatagttatttaaaacttgtaagaataactttttcttttcttgcttatctgttttcatttttttgttattgtttgtttttacattctttcttttccttaagggaaaatacttccctcccatctccttgactgaatgactatggatgtgatgcagtctagatcaatcatattctctcctggggcctt

SEQ ID NO: 500791 - DNA, 562 bp, Homo sapiens
ctctttgattttaatgcccttcaatattatttatgataaggcatcgaaaaggcaaagaaatgggcacaaactgacacattagttttcaatatctggaacctagtcatttatgatcttgaagtccagaaactatggtgtcccaacttgttattaaaacaagtgacagttttcatgtttatcggcctagattgtggataaaactgctcttttccagatcaatttttgataacttaagaaacagtagtctctaccacttgccaaagacaactattgctartacttctgattttccaagaagaaatagggttaaaattaatcctgtgtagcttcttacatattaggcagaactagttatatactttgttgaatagaatgaaatagttatttaaaacttgtaagaataactttttcttttcttgcttatctgttttcatttttttgttattgtttgtttttacattctttcttttccttaagggaaaatacttccctcccatctccttgactgaatgactatggatgtgatgcagtctagatcaatcatattctctcctggggcctt

SEQ ID NO: 500792 - DNA, 649 bp, Homo sapiens
aaaattatttctcaataatatacaatggtgtggggaaattgtcactctcatatactgcttgtgggcagtaaatttagtttagttaaataaatatcattagatagrcctctgtgaaaacctctgccccttttcatctcagccactgtgagaagtttctccatttgttcttatggcaaagaatgcataatcctagcacttgactgtgtctctcaatactctgaaatttctttgagaatgaggacagagaaatgttcttgttgttcagcgcaatccctatatagcattcactgaattaatgtctgttaagtgaattctaaagttacagaaattttctgcttaatttttttattatctgctattacattaacaagaaatattctaagatcatatgatgttggagtgacgaaaatagttattttctaacacacgaactttttgttaacctcattattccttattttatgcagtaaaaatcatctgaatgtacataattttttctttgttttgggggataaattctactttaaattcaactttctatgtcttactacaactagtaaatgtaagataatgaaatttttctcctgactagaagaaataattttatgccaatctaaatacagcacccatccggagggggcaaactgat

SEQ ID NO: 500793 - DNA, 210 bp, Homo sapiens
tttactgcataacttgttctatttatagatagccaaattttttttaagttctgcttttggtcttttcttccttaacctaacactctactctctgaagcaacatattatatacctagcgtctgctgacatgataayctttgtcttaagttcacatctcctaccctccttgcccaggacaaacaattcttattctcataggaatctcctata

SEQ ID NO: 500794 - DNA, 626 bp, Homo sapiens
acacaacccatctcaccatcctcatggtccagccctctcctcagggtctctgccacgctgaagcgcatctacacaaaaacaccacccaccacatccggctacagaccaccagctcggcccgccctgccaggcctgactcctgtgtgtctgcacttctgcagaggccactcttgccctctgctcacccgggaagcctcccctacccagcccgtccttcttgacatctgtgggccattgataactcgtaactgccctctgcccacacagtacctggcaagtccatctgcggttttttgtttttgtttttgttttttgagacagagtcttgctctgtcttgcctaggctggagtgcagtggcacaatcttggcttactgcagcctctgcctcctgggttcaagcgattgtcctgtctcagccycccaagtaactgggactacaggcacgtgccaccacacctggctaattttgtatttttagtagagacagggtttcaccatgttggccaggctggtctcgaactcctgacctcaggtgatccacccacctcggcctcccaaagtgctgggattacaggcgtgagccaccgtgcccagccccatctacatatttttaatttacattaac

SEQ ID NO: 500795 - DNA, 506 bp, Homo sapiens
aatctttttgctccctggtcccaacagtcagtcctcttcccaggtgttccagggcatgcttagagccaacaaggacttccatgataccaagtccagcatcacacggctctggatccatgaatgtttcaggtgacatgcatgtgccctggccaaacgaaggcttcctcagccttgctcccacccctactttgttcccagcctgacactgccttccccaggccattctcctctttattccccgatctcaccccagttccctgcycacagagtcttctctgaccggctggttgatgcggcagacacagaagccttcatgggcatcataagcgacaagctcggctccttctttgacctcacatttcatcatctctgtcccagcaagcgtcctcctatctttggtgagccaggagctgtgatgaccttgggcttgacactcttagaacatcggggctagaaggagtcagggcatggggtctgaagtgtggagccctgtggggggaggcaaa

SEQ ID NO: 500796 - DNA, 582 bp, Homo sapiens
ttttttttttttttaagacagagtctcgctctgtcacccaggctggagtgcaatgccacaatgtcacctcacttcaacctctgcttcccaggttcaagcaartctcatgcctcagcctcccaagtaggtggtactacaggtgggaaccaccatgccaagctgacttttgtatttttggtagagattgggttttgccatgttgctcatgctggtcttgaactcttggcctcaagatatccacccacctcagcctcccaaagttttgtgattacaggtgtgagccactgtgcccggcctaagggtgcaaatcttgacgacttcatctagtgacttttttgaagaagcaactgtacagtaggctagacacacctacccaaggctggtgaagaactgcttaacatgataaaaaatttataggcattgacatactgtcaaaatataactttcaatattgttggcttaaaaaatatttatttcctaatagttcttgctggatcaattatggccctataatcacaagtcctcataaatcaagtttttttaaatatgcttaaatcttgatcatcagcaggttcaaatggt

SEQ ID NO: 500797 - DNA, 539 bp, Homo sapiens
ggcacctgtgggcagggccagggagctctgaccacatggtgacgtgccctcctccagctcccagagagcctgcggccctcaacagggtggggtggygagggtggagcccaggtctagggaggcccgagtaagacaatggattggactcactgagtgctgcctgtttcctggcgctgggctccatcctcccatgtacaccctctttctgtcttcacccttgacagagcaggagcaccgtcatctcggacaaacaccaccactttaagttccagctctctttctagccccatgcatttcaagaaaatcacttcttttctaactacatgcaacaaccagaaagagcaggcagtaaaacacacataagacagataagacagctcgggtacagggggaggtggggggaaagcctctcaggtaactgccaaacttcaccctcatacaacaggccccagtaaaccagtgggccttaataagcacattcctttccctgcaggtgcactaagatagggaagctaaaagcagatttgggggctatgcgt

SEQ ID NO: 500798 - DNA, 539 bp, Homo sapiens
ggcacctgtgggcagggccagggagctctgaccacatggtgacgtgccctcctccagctcccagagagcctgcggccctcaacagggtggggtggtgagggtggagcccaggtctagggaggcccgagtaagacaatggattggactcactgagtgctgcctgtttcctggcgctgggctccatcctcccatgtacaccctctttctgtcttcacccttgacagagcaggagcaccgtcatctcggacaaacaccrccactttaagttccagctctctttctagccccatgcatttcaagaaaatcacttcttttctaactacatgcaacaaccagaaagagcaggcagtaaaacacacataagacagataagacagctcgggtacagggggaggtggggggaaagcctctcaggtaactgccaaacttcaccctcatacaacaggccccagtaaaccagtgggccttaataagcacattcctttccctgcaggtgcactaagatagggaagctaaaagcagatttgggggctatgcgt

SEQ ID NO: 500799 - DNA, 613 bp, Homo sapiens
caaaatggacaagaaactggtagagaatgaggaaacattggtaacaaagcagccaggtttaaaaggggcttgtatgctactgtaaagaatgttgrctttttacggagtaagatgagaaaccactgaagggttattgcagaggaatgatacgatctaacatacattttaaaaggacagctccggtggctgcattaagaataacctgagccaatctagaagttgtgatgatactactggcttggactagaataatgcaggtagaagggatgaaaaccggtttgctgatggtttgcatgtggcatgtgcgggaaacggaggaatcaaggatgtcatgatgtcatgtggatgtaagctttttccagtccactgaaaaagccagatgtgctatcattaccccacagcaaaacattcatatccctggcttcattgtacctcttgcctaaactgtgctggataaacagccaaacatttactgtccccttgtcaagttctttgctgttcatgagttttactttatctatctcactttacttaaaattacttactttaaagtttcattttacttatctttaataatttgactatgccatttaaaagcaatagtacctttcac

SEQ ID NO: 500800 - DNA, 613 bp, Homo sapiens
caaaatggacaagaaactggtagagaatgaggaaacattggtaacaaagcagccaggtttaaaaggggcttgtatgctactgtaaagaatgttggctttttacggagtaagatgagaaaccactgaagggttattgcagaggaatgatacgatctaacatacattttaaaaggacagctccrgtggctgcattaagaataacctgagccaatctagaagttgtgatgatactactggcttggactagaataatgcaggtagaagggatgaaaaccggtttgctgatggtttgcatgtggcatgtgcgggaaacggaggaatcaaggatgtcatgatgtcatgtggatgtaagctttttccagtccactgaaaaagccagatgtgctatcattaccccacagcaaaacattcatatccctggcttcattgtacctcttgcctaaactgtgctggataaacagccaaacatttactgtccccttgtcaagttctttgctgttcatgagttttactttatctatctcactttacttaaaattacttactttaaagtttcattttacttatctttaataatttgactatgccatttaaaagcaatagtacctttcac

SEQ ID NO: 500801 - DNA, 613 bp, Homo sapiens
caaaatggacaagaaactggtagagaatgaggaaacattggtaacaaagcagccaggtttaaaaggggcttgtatgctactgtaaagaatgttggctttttacggagtaagatgagaaaccactgaagggttattgcagaggaatgatacgatctaacatacattttaaaaggacagctccggtggctgcattaagaataacctgagccaatctagaagttgtgatgatactactggcttggactagaataatgcaggtagaagggatgaaaaccggtttgctgatggtttgcatgtggcatgtgcgggaaacggaggaatcaaggatgtcatratgtcatgtggatgtaagctttttccagtccactgaaaaagccagatgtgctatcattaccccacagcaaaacattcatatccctggcttcattgtacctcttgcctaaactgtgctggataaacagccaaacatttactgtccccttgtcaagttctttgctgttcatgagttttactttatctatctcactttacttaaaattacttactttaaagtttcattttacttatctttaataatttgactatgccatttaaaagcaatagtacctttcac

SEQ ID NO: 500802 - DNA, 622 bp, Homo sapiens
cttatgaggcaaaacaaggatatcatakataatagtagctactgacacctacctctataggatactcggacaatttcaggatgccaaatcttattcattttttgcaattgccatgtgggcctgtatcattaaagttgtataaagatttagggtcttctgcctacatacattttacagatatatttttggattagggacattcaatgattaatattttaaaaaagtatttctatcccaactatgagctaatctgaaatattacttgtttgtatctctctgtgtatggtgtgtgaatgtatttttccattgtcgtcattagtaaactgtgtggattttagaaaaaaattttggtcatgatatgggaaacaccattactgaggcttctttttccaaaaacttattttctaagcacatacctatatgtaaatacaatgctcactcaaatcacttatctgaattttttattgtaacctaccatgaagaagtgtgttaattttctgctgctgcacaaaaaaagaatccaaaacattgtggcttcaaacaacacataattatctcacagttttcaaaactcagaagtctgaacgggtcttagctaggtcctctgcaatcaaggaatcag

SEQ ID NO: 500803 - DNA, 622 bp, Homo sapiens
cttatgaggcaaaacaaggatatcatatataatagtagctactgacacctacctctataggatactcggacaatttcaggatgccaaatcttattcattttttgcaattgccatgtgggcctgtatcattaaagttgtataaagatttagggtcttctgcctacatacattttacagatatatttttggattagggacattcaatgattaatattttaaaaaagtatttctatcccaactakgagctaatctgaaatattacttgtttgtatctctctgtgtatggtgtgtgaatgtatttttccattgtcgtcattagtaaactgtgtggattttagaaaaaaattttggtcatgatatgggaaacaccattactgaggcttctttttccaaaaacttattttctaagcacatacctatatgtaaatacaatgctcactcaaatcacttatctgaattttttattgtaacctaccatgaagaagtgtgttaattttctgctgctgcacaaaaaaagaatccaaaacattgtggcttcaaacaacacataattatctcacagttttcaaaactcagaagtctgaacgggtcttagctaggtcctctgcaatcaaggaatcag

SEQ ID NO: 500804 - DNA, 622 bp, Homo sapiens
cttatgaggcaaaacaaggatatcatatataatagtagctactgacacctacctctataggatactcggacaatttcaggatgccaaatcttattcattttttgcaattgccatgtgggcctgtatcattaaagttgtataaagatttagggtcttctgcctacatacattttacagatatatttttggattagggacattcaatgattaatattttaaaaaagtatttctatcccaactatgagctaatctgaaatattacttgtttgtatctctctgtgtatggtgtgtgaatgtatttttccattgtcgtcattagtaaactgtrtggattttagaaaaaaattttggtcatgatatgggaaacaccattactgaggcttctttttccaaaaacttattttctaagcacatacctatatgtaaatacaatgctcactcaaatcacttatctgaattttttattgtaacctaccatgaagaagtgtgttaattttctgctgctgcacaaaaaaagaatccaaaacattgtggcttcaaacaacacataattatctcacagttttcaaaactcagaagtctgaacgggtcttagctaggtcctctgcaatcaaggaatcag

SEQ ID NO: 500805 - DNA, 300 bp, Homo sapiens
tgctccccctcccgcaaggggtagagggcagcagatctgagcgagtgaagccgagtaaagccaagtgaagcagagtaaagccaagtgaagctgrccaaagccgccaactagctccagcaccagcactccaattcccccaccaccacgaaggcatcagggaaaacttcctgtttcattatcacccagcatgttgttcctactgttactttatacagtttcttttagatcaatgaggaataagaaaaataaaagatccttattttaccttcatttttttccttttatcattattttcctttc

SEQ ID NO: 500806 - DNA, 638 bp, Homo sapiens
aaaaatcatggcactatataaaccacaaaaaggagacttgtttaccrtatgagagctgaaggaaatcagcttgtcaactaggaatgtgttgagcaatccaaatttttcaccattctgtaccatttgcagtcatgcactcagttgaatgcctagtgtcatgagtattgattttgcagttacaaataaattttataggttcagtatcccttaccctgaaatgtttggggtcggaagtgttttgaattcagagtttttaaaaattttgaaacatttgcattatatacttattgagtatccctaatccaaaaatctgaaatccaaaatgctcccatgagtatttcatttgcgcatgacccttgaggattgtgttgagcatcatgttggcactcaaaaagtttaggattttagagcatttctgattttagatcagagatgctcaatctgtagtaagcagacgaattcatgaaaacaaaatctgtgaataataagggtcaattctatttgtttttacagtgataacacaattacaaaccttggttgagtacagcatcatagaaagaacaatgttcttactaaatttaaaaaatggtgaaacagaaataaacttggacttggctgtggttcacatataattcaca

SEQ ID NO: 500807 - DNA, 545 bp, Homo sapiens
tgcagtgagaggaggtgctcagggccccagtcccctttagcaacagcgcccctgctctccaaacccaaggctgctgctccccaagcagcgctgtcaccagaaagcactttgtgtgctgtgaccacaaagcccccgcactccctccctaactgctgactcatgtcttcccctccctggggctccagccggaaacactgccctgcctgccagcccctactgcctcctctcgggttcagtcaccagacacagctcaccccaaagcatggattcttggctcaggcccatctagaaacggggtctgggagagtgaggtgaggctgcgggagggcacaagggatgcaaatgaggacaggtaaggatgcasgtgagagggcacagcacgtctgcaggttgatggtgatggcgaatctacaaggacagatgccgggggaggtgcacgtaatgaaaccgcttttgcaaaatcataactgaggaaattatgacgctgaaagaaatcagacctaagcgtctccgtcttgcttctaagcttcaagctgtccttgttc

SEQ ID NO: 500808 - DNA, 545 bp, Homo sapiens
tgcagtgagaggaggtgctcagggccccagtcccctttagcaacagcgcccctgctctccaaacccaaggctgctgctccccaagcagcgctgtcaccagaaagcactttgtgtgctgtgaccacaaagcccccgcactccctccctaactgctgactcatgtcttcccctccctggggctccagccggaaacactgccctgcctgccagcccctactgcctcctctcgggttcagtcaccagacacagctcaccccaaagcatggattcttggctcaggcccatctagaaacggggtctgggagagtgaggtgaggctgcgggagggcacaagggatgcaaatgaggacaggtaaggatgcacgtgagagggcasagcacgtctgcaggttgatggtgatggcgaatctacaaggacagatgccgggggaggtgcacgtaatgaaaccgcttttgcaaaatcataactgaggaaattatgacgctgaaagaaatcagacctaagcgtctccgtcttgcttctaagcttcaagctgtccttgttc

SEQ ID NO: 500809 - DNA, 545 bp, Homo sapiens
tgcagtgagaggaggtgctcagggccccagtcccctttagcaacagcgcccctgctctccaaacccaaggctgctgctccccaagcagcgctgtcaccagaaagcactttgtgtgctgtgaccacaaagcccccgcactccctccctaactgctgactcatgtcttcccctccctggggctccagccggaaacactgccctgcctgccagcccctactgcctcctctcgggttcagtcaccagacacagctcaccccaaagcatggattcttggctcaggcccatctagaaacggggtctgggagagtgaggtgaggctgcgggagggcacaagggatgcaaatgaggacaggtaaggatgcacgtgagagggcacagcacgtctgcaggttgatggtgatggcgaatctacaaggacagatgccrggggaggtgcacgtaatgaaaccgcttttgcaaaatcataactgaggaaattatgacgctgaaagaaatcagacctaagcgtctccgtcttgcttctaagcttcaagctgtccttgttc

SEQ ID NO: 500810 - DNA, 434 bp, Homo sapiens
ttcatttgggaataacagtccttggtaacccttccttgcttccatactcaacatgaaagacattggtcagccattttggggttgcttcctactaacttccttgacttcattatccttttgcactttaccttattcactttggttatactgaattttcaataaacccagtaactatgttttgccagaccaatcacttcctctatcaatttttgtctccaaatggagtgaggcctgagctagattattgccaatggaaatgtaaaagccatttagatatcacaagtgaaaaaatgagcaaatgtgacatacgaggartatcaaagatgctaaatcatacacacaaggatcagagccaagatcctgaatgcatggatgagttttctaagacaaagaatatactaaggattattattttaaatagtggaacattatta

SEQ ID NO: 500811 - DNA, 603 bp, Homo sapiens
tttatggtaatattatttttgtattttagtatctttagctcagatctatttatgttcccctagactaggagtaagaagcaaaaggagtagtgagaacaatcaacctctggtcagatatttagggattgtttagagatcttttcaaagatcatctgtaccttttggcagcaaagcaaaaaatgggctctaggcctttgggaaatttgctatgtaggtccattcttaggccgtaagtttcctctgggccatatgttaaagaaaacccagttatctcgtattgaattcctttayggtcaaaagaattactagggacttatgctattgggggtgtaattttaagttgtgaaactctttttgttgattgtctgaattcattatctccattatttgtctcttgcagcaacagtgatattgctggtcagggtccaatgtctcaggattaatatggttagaattgcaacaaatatatataaaatgaattaattcataagctgtgctagatttgttttggtctgtggtcattctgttgactggttgttgagggttctgcacgttccttagccgctgggcaatggccaaccagaaatatacatgtgagctgga

SEQ ID NO: 500812 - DNA, 569 bp, Homo sapiens
caggaccatggaagaatattccaactgtactattttactgtatttcagtttggcagagaggtattttagcaccattataataacctcatttatgaaagtgttggagaattgcattctataagataatgtagcttctctgtatgataatgttttcacacagtgtattagtgcatgtggaagtatattggaattgagatttgctaacctgcatctaagatagcttagtttatttgattagtgaactccaaataaattattttggagggcccytgggaagtatataagaaatttaaaaaccaactccttcagaccactagtttcccttctgtttatgatgtttatcacttcacatttttaattagtaaagtataaaatgaatcatacaattatagtagtggagttttttgtcttctagaagtgacatcgtaatagttattttaaaacatgtagagagtcatgcatatgtatgtggaagggtaatcaacattgttttaatgtcttatgctaagttgcacatacaaacacatcttttaatttatggaagttacttacatttctacataaaatct

SEQ ID NO: 500813 - DNA, 457 bp, Homo sapiens
acacaggccacagtgcttataccccaggggtgggcccagagcctccagagtgggagattcatgacacggctctgtctcctgyagtgatgtcatgctctcctttcagctagattttaatttccagggagagcttgctaagttcactgtcaggatgcttgtccatggggctggaaggcccagcctcgatcagcagcacagcatctactgaaccacggttaactgttgtctttctgtattgaagggggtggggagtgaaatcaggccttgcctgtcatgacatggccagtgttgggaacaaagcttatcttggtcatttatcatttcctctttgtttttccatttgggaagtaagaaattaaattgtatctaaagagaatctccttccaaggtcttcctctgaaaatcattctgggactagaaagggtttttcctatgctccgggcaataaagcttttaa

SEQ ID NO: 500814 - DNA, 457 bp, Homo sapiens
acacaggccacagtgcttataccccaggggtgggcccagagcctccagagtgggagattcatgacacggctctgtctcctgcagtgatgtcatgctctcctttcagctagattttaatttccagggagagcttgctaagttcactgtcaggatgcttgtccatggggctggaaggcccagcctcgatcagcagcacagcatctactgaaccacggttaactgttgtctttctgtattgaagggggtggggagtgaaatcaggccttgcctgtcatgacatggccagtgttgggaacaaagcttatcttggtcatttatcatttcctctttgtttttccatttgggaagtaagaaattaaattgtatctaaagagaatctccttccaaggtcttcctctgaaaatcattctgggactagaawgggtttttcctatgctccgggcaataaagcttttaa

SEQ ID NO: 500815 - DNA, 542 bp, Homo sapiens
tatctttagttctggacactgtacctggtgcacagtagggctgcaggaaatgtttgctgaatgaccacaggaaatcacaagataatctcttctaaaaactagacatctccttctaaaatgggtgtgtggagttagtatcgtgtgttcaaaccaggtggacttagactaatttgtaaaatacaaacacacttaaggtgaaaatgaagaattatatgctgaattaataaagacacataaacacaaggtacatcaaccctgggtacaagaggtgtcagtgatagcatttggtatttttctctaaactcctcattacattatagtcacaaggtcaggaaaaagtatggcaaataggatagttaaaaaaaattcagcaaggaacaatgtcagtaccatggataactaaattagaaacttgatrgtaaggtcatagataattagcaacaaaaagaaaagagggagtgttgggaggagaagaggaaggagaggaaatagtagaagcaactgattctggaaataaagagatgaaccagtcatggtggctg

SEQ ID NO: 500816 - DNA, 499 bp, Homo sapiens
aatctcttgggctcaggcaaggttcccacctcagcctccctagtagctgggactacaggcacgtgccaccacacctggctaactttttgattttttttaraaacagggtcttactatgttgcccaggctggtctcaaactcctgggctcaagcgatccttccctgtcagcctcccaaagcgctggaattacaggcatgagctgctgcacccagctaatatttctttacccttatggagctaacaaatcatgttccagccatttcaggatgaatgctaaaacggggttcaaatggtaaagttggacttaattcagtgagatttaataatagacaatttatgtcgatttccaaaaatacaagtcagttccaatatatcccttaagaacttccaaaaccccttgcggcagatgggaaaaacatcccccacctctcttagctgggagggcgctggggcttggcgtctccccctgcttttctttctgtacttgcattccgtctg

SEQ ID NO: 500817 - DNA, 146 bp, Homo sapiens
taaagaaaatagagtgagatgagagaaataattttcagattaaataawttctagttctttctagatctgagaacctaaaagttgatgcctacaagatgccttccacatagaaatacacacatgaggctgggcacaggggcttacgc

SEQ ID NO: 500818 - DNA, 604 bp, Homo sapiens
ctctctgtgccatgttaggatacagtaagaaggtaaccatttgcaagattagaagcaggccattaccaaaacccaaccatgctagacccggatcttatgcttcagtcttcagaactatgagaaataaatgtcagttgtttgagttacccagactttgatatagcagcctaagcagactaatacaatatacttgaatttaataatttgattaaaagtttccaaggacatattaacgtgcgaaggcaggtctagtgtaggagtttgaaatacattactcactagtggagaatgcctatccctggtcctgttgctattgactctgcatgtcatacatagagtctgcttagattcaggatgatgaagaaaggaacatttatacttttacttatgatatgccactagaatacacttcatgtcaacacgaggcaaattaacsaagagatcagactccaaattctggaaataatcatcaaaagctaaatggtttgcttccaattcaacacttcaaagatgagcaaattagtaagccgaaataaaagtttaaaaacctcatcagcgtagatgaaagagaattttccaagattttgaaaaatttaaccgggtt

SEQ ID NO: 500819 - DNA, 377 bp, Homo sapiens
ggctcctccagtggctctcacaaacccaaccccctccatgtcatcgcaaaggctgaggagatcagtatttcaccacacctgtgtgcttcacttaggtgagtacttctggttgtgaagctctgcaggcccacaggaatstgctcctccattccattcctagaactattaaaaagcactactcattatcacctcaacatcttagctttctcatttcgtgcactcacacctcactcctctctgtctatccaagaccaacatatacttggataagcagtgaagccccagatccttcaagaagactcccccaacaaactcaaccctagaggagttcctggtgcttattctctggagcagtaatttgacattgaatgttaatc

SEQ ID NO: 500820 - DNA, 377 bp, Homo sapiens
ggctcctccagtggctctcacaaacccaaccccctccatgtcatcgcaaaggctgaggagatcagtatttcaccacacctgtgtgcttcacttaggtgagtacttctggttgtgaagctctgcaggcccacaggaatgtgctcctccattccattcctagaactattaaaaagcactactcattatcacctcaacatcttagctttctcatttcstgcactcacacctcactcctctctgtctatccaagaccaacatatacttggataagcagtgaagccccagatccttcaagaagactcccccaacaaactcaaccctagaggagttcctggtgcttattctctggagcagtaatttgacattgaatgttaatc

SEQ ID NO: 500821 - DNA, 377 bp, Homo sapiens
ggctcctccagtggctctcacaaacccaaccccctccatgtcatcgcaaaggctgaggagatcagtatttcaccacacctgtgtgcttcacttaggtgagtacttctggttgtgaagctctgcaggcccacaggaatgtgctcctccattccattcctagaactattaaaaagcactactcattatcacctcaacatcttagctttctcatttcgtgcactcacacctcactcctctctgtctatccaagaccaacatatacttggataagcagtgaagccccaratccttcaagaagactcccccaacaaactcaaccctagaggagttcctggtgcttattctctggagcagtaatttgacattgaatgttaatc

SEQ ID NO: 500822 - DNA, 653 bp, Homo sapiens
gctgccagcaaccaccatttttagattttcatgtcaggactatccagctttaatcctcagctcctgtccctcccgctctgaagaaaccattacatcaggtttatgattctccccttccaggtcactcctgcctactgattggccccagcagatggagtcaagatggagttggaaggagagagaatgtgagagacactaagctgccatcttttctttacttaaatttgaaattaattgtttttcatattcatccagatcatctttcatgctaaatggatagtgtgcaaataaagtctttgtgagtgtattagtctgttttcatactgctatatataactgcctgagactggataatttataaagggaagaggtttaattgactcacagttcagcgtggctggggaggcctcaggaaacttgcaatcatggcggaaggtgaatgggaagcaaggtaccgtcttcacacggcarcaggaaggagaagtgccgagtgaaggggaaagagcctcttataaaaccatcagatcttgtgagaactcactcattatcatgagaacagcatgggggaaactgcccccatgcttcaattacctcctggtctctcccttgacatgtgaggattataattcaaagatgagatttgggtggggaca

SEQ ID NO: 500823 - DNA, 601 bp, Homo sapiens
cagattatacaggctatcagccaaagacatagtttctttcaaacaaatatcttcaaataagaaaagagcaaggtggtgactttggattaatttgataataaatatttcatatccatcttgtaattagtacaaatacacaattctggttaacaaacatacatttataaatatagtagtcattatacattaagacttagaaaccgagcactatttttttttgaactacctccctcagaattatatataaatgttctttatttttwaaaaaaagtcttcagtacttattaaataatattgtcttttttttgagacagggtcccactcagtcacctaggctggagtgcaaaataatactgtcttaaatattggttactatctgtctacagttcagaagtattacaatggaacacttaccctctaatctgacaacatcaggacagtaaaaatgaataagggcagctaatgcacagccatctgtcccatccttcaacaaattttctaccaatggaatgcaaggcagttgcttaagcaatgtttgctctttccgataacgagcctacgatataaaaaaaatacatgaaaataaataagtaccaaataa

SEQ ID NO: 500824 - DNA, 520 bp, Homo sapiens
gagttgtgttcagaatgttttcaaaattggcgattaaatgacattcaatctagtatagttttgagggacaaggtgttggtatagaaagactgatgggagaactaacatttaactttgaaagtacattcctaaaatccaagagctttaaattcattaagtcatactccaaaagaactcaaacatttacctgacataggaagttatatgctcaagttagacttgttaccaraacatattcctcaagggtagaaatcggacaaaaccatatatggtttcatactggccaaccttaacatgagtaacatgcgttctgaactgatattttcagatgtatgcttttggtactgtctcatagcctctcagtgaataaatgtttacagaataaagcaagcataagagttcctcaagtatcttatatattagacatcaaggctgcttaactcattatcacaaagaaaccattagtcttatctgcagttgcaaatacagcaacaaaacaacctagaaaaatcttaacaat

SEQ ID NO: 500825 - DNA, 643 bp, Homo sapiens
ctgggctgtaacaactcatgacaacgctgccattctgcctgcccttggaaacgtttacattttcataaacatcctttcagatttgtctctatggacacaaattcttgcttaaatgtttatatatgaaagtatgcatgcgactatgccaataaaaggttttattgtttgtttgtttttgagatagggtctcactgtttgcttaggctagtgtgcagtggtgtgatcatggctcactgcagcctcgaccccccaggctgtagtgatcctcccaccttagcatcccgagtatctgggaccacaggtgcatgccaccatgcccggctaatttaaaaaatatatatgtttgtagagatgaggtgtccctatgttgcccaggctgttctcaaactcctaggctcaagcaattttcccaccttggcctcccagtgtgctgggattacaggcatgagccaccatgcccagcacaataaaagtatttctgagtaaagawgtcagaggagagcagtgcttaagggaatgaactctgaagtcaaaaccagccaaatttttggtagcaaccaaataagaaaagcggtttaatcatatggcataaattttgaaaagttagtcaagggagagtctagtagattccagcatgaatcag

SEQ ID NO: 500826 - DNA, 515 bp, Homo sapiens
cttctcccactcccatatcatcaccataaccatttttgaatgttacaaaatttaccaagatttttgcattggccataatttgctcataatgataaaagtaacttcaataaatgttatttaaaagtcaattttctggctgggcatggtggcttatgtctgtaatcccagcactttgggaggccaaggtgggcggatcatgaggtcaggaggtcgagaccaggctggccaacatagtgaaaayccgtctctactaaaaatacaaaaattagccgggcatggtggcgagtgcctgtagtcccagctacttaggaggctgaggcaggagaatcgcttgaacctggtaggtggaggttgtggtgaaccgagatcgcgccactgtactccagcttgggcaacagagtgagactctgtctcgaaaaaaaaaaaatagtcgattttctgagatagcccatctggctgtggtgggaaacctgggggcctcttagtgctacacttctccctgttctggctctcca

SEQ ID NO: 500827 - DNA, 504 bp, Homo sapiens
ctgcttctcccactcccatatcatcaccataaccatttttgaatgttacaaaatttaccaagatttttgcattggccataatttgctcataatgataaaagtaacttcaataaatgttatttaaaagtcaattttctggctgggcatggtggcttatgtctgtaatcccagcactttgggaggccaaggtgggcggatcatgaggtcaggaggtcgagaccaggctggccaacatagtgaaaatccgtctctactaaaaatacaaaaattagccgggcatggtggcgagtgcctgtagtcccagctacttaggaggctgaggcaggagaatcgcttgaacctggtaggtggaggttgtggtgaaccgagatcgcrccactgtactccagcttgggcaacagagtgagactctgtctcgaaaaaaaaaaaatagtcgattttctgagatagcccatctggctgtggtgggaaacctgggggcctcttagtgctacacttctccct

SEQ ID NO: 500828 - DNA, 480 bp, Homo sapiens
agacctaacatacagcatggtgatgatagttagtggtaacctgtacttgaaatttgcgaaggaagtagatcttaagtattctcaccacacacacacacaaacacacacacacacacacacacacacacagaaaaaaggtaactatgtgaggtgatggatataattagcttgattgtggtgaacatttcacaatgtatacatacatccaaaaatcatgttgtacatcttaaatactgtatatagtacaatttttattcctcagttatacctcaataaagctggaggaaaaataggaactttattcctgtctgctgtcacagccactttctcaacttgtaccatctctcagatctgtttctgatcctcctagctactaactagcttcgtttgtaacttctttttcacycgtgtctgcccttctgcatcggtttcttggctatgacttttgcttctctcagtagtaatcctgattattcactt

SEQ ID NO: 500829 - DNA, 623 bp, Homo sapiens
ctggcccaggctggtgtaggtgactgagggttccacctgagctgtggtcggtaagtccacaacaggtcctgaaggattgcggaactgcttatacactcgggggtcctgggctatgtaggtggaggtggaggagtagagcaccagcccaatgaggatggtgaagaaagacaggagataaagtcctgaaaactaaaaaaacacaacagtaaagtcatttgacagccagggcagaaccactgacacattaatgaggcacasagaaacatgagcagagctgcttcttctcagaacaggcagcatgatgagttggccaacaccgttgatggagaatgaattttctcatcataaactggcttggtcctattgattctccttatctttcctagaccctgtggctaacacagaggaacacttagctaatcatctctaaagtgccaatctgaggatctggtatggtgcgagaactagttaagcacaaattaaaatgcatcaagttaaaagcaaaaaatctccagtatcagtcaataaaaagttggttgtttgtggcttcattaaacctagagaaatacagatatcccctttagggttgtaatgaagccataaacaatgaaccgctcactgac

SEQ ID NO: 500830 - DNA, 578 bp, Homo sapiens
tggagagggaaaaacactaacccaccaagcacatgctacttatctaccttttgcaataggaaatacccattttacagatacaggatgggaagcaaatgcctttagcaaataacttggccaaggtaacagagaaagtatgttcacagagctgggatttactagttctatctgttctaaaatactactctaccattctgcttgaattgaatgatggaagaaattagttttaaaatttgcacttggagactgagatgaatttgggtatctggccataaaatcttggtgagtggttcgtaataatgtaaaatatatttttgaagctagaatgtaagttgtgaaattaaaaacatttaaattgactgggcacggtggctcacgcctgtaatcccagcagtttgggaggccgcggcgggtggatcatctgaggtcaggagttcaagaccagcctggccaacgtggtgaaaccctgtctctactaaaaaatacaaaaattagccgggcgtggcggcaggtgccttaatcccagctacttgggaggcaaaaaaamccccaaaaatttaaattacaaaatataaatg

SEQ ID NO: 500831 - DNA, 561 bp, Homo sapiens
gtatagatttgggaatcatcagcatggaggtcctgtctgaagccatcatagtaaattacattgagagagtgtagcgtgaggagttgcttaccatgaggaattagcagagatcatggatctggtaattaagaggctggcagtgatctcytaagaaccgatcagtacagagtgtgagtaacaaccaaatggcagaaggaaactgtaagggacggcatgatggtatcttgaggttgaggtagtataaagggacagtgtttccaggttactgaaaacaactaagtttgtagcagagagaaagcagtgaaaagggaaagattgaaagtatttttattttttttcttttcctttcaaaattgtctgcaacctttatggctgccagggcccacccatacccagactatgtagtatgatttcagctcaaataattgctattggactataggtctggaccttatctttgcaaatctagtgggaaattttacccagtggatattgagttacagatcgtaatgaatctacagctttcatttatcttgatcttcttgatataaattttgctat

SEQ ID NO: 500832 - DNA, 612 bp, Homo sapiens
ctgaaagggacagctatttagaaggctaaaaattcctttagtttaggcatgacacacggtgcctcactgagttttcacccctctgtcacaaactatgcctgttggtacacatgacttttatcagctaatagctgacgaaaccttgaggatcagctagcccagtcatcatagcaggtgctctataaatatttgtagatttggaaggcatgcttctaacttttcatcttttgattcccttcataactatgagctgggataaaaggagtggtttttgtttgtttgttttgttttgctttttaataaaaattttgaagagagagtgaattctggagacatttgtggtatgtaagagaactgatgggagaggaaaggggatttcacgaagtattcctgagggctatgcattcccttcaattaaaaaacaagcttaggttatttcgaaattattcttttttatagcatcttttctcttaaytgctctgaggtgagttaagttatagtttgtaaatgctacacaatttttgttagagtggtgtgtgaaatgactgaattggctttgaggggaatttgtaggggctgtcttatgaacgaattttcagttcactggtgttt

SEQ ID NO: 500833 - DNA, 576 bp, Homo sapiens
tgatagatggtggaggtcccaccagaagggcactctgaatggataaaatctgtgtttgttagaaaagttgccaactacatgccaggtgagagaaagaaatcacctggctgttcctaaagggggcctcccttagaggggctgggggaaagagtgcccatggtgggagaggtgtgggtgatcagggaggcaagaaggagtcttgtactgggactgtactctgacctgggcctctgactcctgctttggccctgtcagtagcttgatatgtaacctgggggatctcctcactagtgggagagcatgcaggatccagctttctgggactcgagcaccctgtgaatgaatgtgattctggaaactcacttctcaaacaatggctgagagagcatttacacaaagaccaggactagcctccaggagacgaggaccagcctscagcagtgtggtctgagccctgggtacaggacggcttccccagcatcatgagtgctcccctctgtatagctgagaatttcactccacccctgagcttcagccacagaagaaagctaacacaccttgcccgcagtgtttctg

SEQ ID NO: 500834 - DNA, 440 bp, Homo sapiens
tctctaaaatggttttaaaggaaaaatataaaaatatataaataagtaatcttaaaaccctaaattgactcagttttataaaacactggtagcatcctcattttatctgtaatgcctctactcaaccccctaaaacttctctataaaaagataaatgtatgcwatagaaaggaagcaattctctcctccaaaattgcaagatcggttatgcttccatttcctccacctccagctaagtcaatctctgtggctgctaaactataatttggccccaggactgctgtgaaatctgtctgttgaccagtataagcagtccatcttacaacaggaaggcccagatataatcaaaaggtgatttgttgctgaattttctcaaaaagaaaataaaagaaacaaagtcacagaggaaacctggccaaagaaagtacagcctgtgaaaa

SEQ ID NO: 500835 - DNA, 440 bp, Homo sapiens
tctctaaaatggttttaaaggaaaaatataaaaatatataaataagtaatcttaaaaccctaaattgactcagttttataaaacactggtagcatcctcattttatctgtaatgcctctactcaaccccctaaaacttctctataaaaagataaatgtatgcaatagaaaggaagcaattctctcctccaaaattgcaagatcggttatgcttccatktcctccacctccagctaagtcaatctctgtggctgctaaactataatttggccccaggactgctgtgaaatctgtctgttgaccagtataagcagtccatcttacaacaggaaggcccagatataatcaaaaggtgatttgttgctgaattttctcaaaaagaaaataaaagaaacaaagtcacagaggaaacctggccaaagaaagtacagcctgtgaaaa

SEQ ID NO: 500836 - DNA, 599 bp, Homo sapiens
ttaagaaaataatttaggctgggcatggtgggtcacactggtaatctcarcactttgggaggctgagacgagtggatcacttgagcccaggagctcaagaccggactggccaacatggtaaaaccccgtctctacaaaaatacagaaaatcagctgggcatagtggccagtccctgtggtcccagctactcaggaggctgaggcaggagaattgcttgaacctgggaggcggaggttacagtgagccgagatcgtgccactgcactccagcctggtgacagagcaagactccgtctcaaaataataataataatgatgataatttttagtttgaatatcttgtgcatgtatggatgttgtaaattattatatgttatgtttagctatacaaactagataacaatttacatactctaaattctctcacacaaaaatcatcaatttacagtagtaaatcctgtaagttgaaaatagctaggcagagaacgtgatcataaatgtggcttagaggagataaatcatctttatatttcataaaatattctggcagggcctgaaataatttaaaaatgtgtttgcaggtgaacaatcagagaaaa

SEQ ID NO: 500837 - DNA, 629 bp, Homo sapiens
gggatccttggagggagaggttgccagcctgagtttgagacctggctgagcccctggactgcagtgtaaccttgagagagtccagattctgtgggagtggaccaggatgttgcctttctctccaccgccctgtctctatccagatctacttcactggctgctccatgaacccagcccgctcttttggccctgcggtggtcatgaatcggttcagccccgctcactgggtgagtctgtcccttcccctggctccctggagatgagggcctggagacccagcagtggcagctcagagctcaccagacctggattctgtgggtctagagcttgggggtgggccagggagtggtggctgacagagaaagggacacagtaggggatgggattcagctagaggggcagaggtggctttgtatggcctgaaccgctggggacagggagtctgagtatctatccgcttatggaagaggctctactgaacctggaggtgcagaggggctctgtgtcaattcccttgaggatttggtgtccgtccccctcggtgtctgygtgctggtcctctctgatgttttatttatctgtccctgttgagggggttgggagagtcttcctgtgggtctgtccctgtg

SEQ ID NO: 500838 - DNA, 619 bp, Homo sapiens
ctaagcatctacaagtgagaggtcagccactcatgtccgccccataggcttacagtaaacaccacgtggcattgcgtgtgagaaccccgggagcccagggaaggagcagccccccacccaccgtgtcccttcccacttcttccaacctgccccgggctgggggagccgggctgcaagtgccagctctggccagcagagggcgacgtcgtccaccgaatccacagcgtggcgcctcgtcgtccacaagtcctgggtctgggctctagccagatgggggtggagtggaggacacagggagtccctcatgcttgagtcccctggggccaccttgaggcagcctatcccaatgcatccccgccccrctatccgggtggggcgcagaagagaggggagcccttctccgctcagtctccaggagactcaggtacagacacagccatgaccaggaggatgggctcttcctccagcccaatgggggccacggcagggtggacagtggacccttgggagacaaacccgcgggggcaggcaaggcactaagtcagagggggctaccggccctgagcttcctgcaggttgcctcgcctggcccttgggcaggcttccagctagggcttgg

SEQ ID NO: 500839 - DNA, 461 bp, Homo sapiens
cttgcaccaacgtaggcaaacctgttcacactcaggggcatgcacaactctgcatgtgaggacaaaagagaacttggggatgaacacacttgcacactagtaaaaccagttgcatcattcccrgaacccccaaggcaggggtctgtacactccccactcagtacctgggtgcaggctctccagagtttccctcttaccacccacctgcctccctccccagctcagtcccctaagttcccagttccctgaaaaaggctggagaagccaccactagctgctcacagcctcagggcaggggacctgccaggctcagggctccctccggcagcctcctccccgcctgctcacagcactggcctgggcgcgcacgtccaggaagcagctactctgcgctggggggccaacttcagacctgcgggagaggagggacggggtgggcccttctgcctcgggcctcacaa

SEQ ID NO: 500840 - DNA, 427 bp, Homo sapiens
taaactttcagtgtttgtggcaagtctgccgtatggtgtaattaaccaccacccaagacagttaggactcttcttcagtttaggctactgtcctcctttaatagatctgattaaaaaaaaaaaaaagtacctcataaatccactgtattcctgaatgcaaaggtatgctaatttcataataggtgaatacagttccccccaaactggttttggggcctgggctgagtgtctgagttcaaccatttgcagttctgtttatgttcatggttgctctgccatcaacttacattgccatcattggaagaagaaayatatctggacatgaatggtgctacatgaaatcgttttccctgacgtggttaggaaaacaagccctttttcttagggtggtatcaaatccctaaggtccctcaggatacctggggag

SEQ ID NO: 500841 - DNA, 635 bp, Homo sapiens
tgtacagtttataaatattctcatgctgtgtgcataaggagacaagmacaagaaatttcataagagcatagtttgcaaagtataaacatggaaacaatataaatgtcagtaaataggaaaatgaaaaaatgaagtgtgcactctggattaaaaaggatatacacacagtgaaacaatatgaagaagaaatacatgcatcggtatagaaaatttcaaaccacaatatactacaaagaataacaaaaagcagagaatacatgcagtatgatactgtctacataattttaaaaatcaacaggacaatagttatatatattgctgcataacatgtatttctatataatgccaagttcacatgcagtagcttgaaatgataaaccacaaattcataatggcttcctgcagacacaagggtaagaaatgtgctagggtagaggattcaactatctttgtaatattttaccacttaagcctgttggtaagtacctagacttttttctttaccgtttttgtatgtctgaacgtttttacctcctaacataatttgactttatgggcatttaaaaaatatattttaattgacaaaattatatatattgtgtacaatatgatgttttgaaatatatatacattag

SEQ ID NO: 500842 - DNA, 511 bp, Homo sapiens
tcaagactacgaattctgtcttggctctgtgatctgtattcccaatatcagtacagttgtcaaatggttttttgctctgctcctttgggtctgtttaatgtactacttttggtattagtctgaatcttgggtggtcgcttaatctcagcccagcctttacatatttmtttgtgtcttcgcaacacaggctcacaaggttggcaatttttgtggcagtttaaactgaggttcagttttctacaaatttgctgttctacttttgatctgtcatgtttgtatggagcacagaggtaacactggaacttgtacagtttaatatacacatgagaagtaggatttttcaacctccagctctcttctctctgggatttcctctatactttctggctgaagatttttcctgttttttttttttttttggttctataacaggcttttcattttaaactttaactgtctgggccaccaccactgtgacaaaatgctctgactacagtctacggttaggtta

SEQ ID NO: 500843 - DNA, 641 bp, Homo sapiens
gactttctagacatctcattttatctaagttgtacatcacacacattttttgctcatagagtatgacaagagtatgtttagttttgtaagaaactgccaaattgtcctccaaaattgctgttccattttgcattcccaccagtgatgaatgagagtgatgaatggcacttacatatatttcttaagccttctctttaaggaacttaaatttataagagaaagacaaataactccattaaaaagtggtcaaaggacatgaacagaygcttctcaaaagaagacatggccaggtgcagtggctcatgcctgtaatcccagcactttgggaggctgaggcaggcagatcaccttaggtcaggagttcaagatcatcctggccaacatggtgaaacccatctctactgaaaatacaaaaattaaccaggcatggtggagcacacctgtagtcacagctactcgggaggctgaggcaggagaatcgctggaactagggaggcagaggttgcagtgagccgagagtgtgccattgcactccagcctgggcaacagagtgagactccatcaaaaaaaaaacaaaaaaaaaaaaaccagaagatatacggcagccatcaagcatatgaaaaacagctcaatatcacaga

SEQ ID NO: 500844 - DNA, 641 bp, Homo sapiens
gactttctagacatctcattttatctaagttgtacatcacacacattttttgctcatagagtatgacaagagtatgtttagttttgtaagaaactgccaaattgtcctccaaaattgctgttccattttgcattcccaccagtgatgaatgagagtgatgaatggcacttacatatatttcttaagccttctctttaaggaacttaaatttataagagaaagacaaataactccattaaaaagtggtcaaaggacatgaacagatgcttctcaaaagaagacatggccaggtgcagtggctcatgcctgtaatcccagcactttgggaggctgaggcaggcagatcaccttaggtcaggagttcaagatcatcctggccaacatggtgaaacccatctctactgaaaatacaaaaattaaccaggcatggtggagcacacctgtagtcacagctactcgggaggctgaggcaggagaatcgctggaactagggaggcagaggttgcagtgagccragagtgtgccattgcactccagcctgggcaacagagtgagactccatcaaaaaaaaaacaaaaaaaaaaaaaccagaagatatacggcagccatcaagcatatgaaaaacagctcaatatcacaga

SEQ ID NO: 500845 - DNA, 482 bp, Homo sapiens
gtttacaatttcatacacttcctccccaactagtgagccagcttttaacaaggatcatgacctcgggtccctgggcctcaacctgctctcttcatccatcaccctccctgctactttgtttggagataatataatagttgcawtgttaaagaatttgattttttttttttttttgagatggagtctcgctctgttgcccaggctggagtgcagtggctcaatcttagctcactgcaacctctgcctcctgggttcaagcgattctcctccctcagcctcccgagtagctgggacttcaggcacctgccaccacgcccggctaattttttgtatttttagtagagatgaggtttcacagtgttagccagggtggtcttaatctcctgacttcgtgatctgcctgctttggcctcccaaagtgctgcaattacaggtgtgagccacctcacccggcctaggaatttgattttaacaacaggcat

SEQ ID NO: 500846 - DNA, 502 bp, Homo sapiens
cagatccggtctctgtttacaatttcatacacttcctccccaactagtgagccagcttttaacaaggatcatgacctcgggtccctgggcctcaacctgctctcttcatccatcaccctccctgctactttgtttggagataatataatagttgcaatgttaaagaatttgattttttttttttttttgagatggagtctcgctctgttgcccaggctggagtgcagtggctcaatcttagctcactgcaacctctgcctcctgggttcaagcgattctcctccctcagcctcccgagtagctgggacttcaggcacctgccaccacgcccggctaattttttgtatttttagtagagatgrggtttcacagtgttagccagggtggtcttaatctcctgacttcgtgatctgcctgctttggcctcccaaagtgctgcaattacaggtgtgagccacctcacccggcctaggaatttgattttaacaacaggcatttatca

SEQ ID NO: 500847 - DNA, 583 bp, Homo sapiens
ctgccttgacttacctgttaccgcttgtggttctatctttgaataactagtgattaatgtctgcttccgtcaaggatgactgttaggtttggtaaggcaagggttctgttgggttagataaggtttcatttcacacacagtcctatccctgtacctaacgctgttctggctacatcaggaccctgagtaacttctcataaatgaataaatctaaaacttctgtttgtcaatttcttcttgtagaccccagagatgatgttctctttcctcatcagttctctctgctcaactttttgttgtctgtctgatgggctgcacagtaagaaaacatccccaccttccttacaccccttttgccaaacacaagcctttttgttataagctgtttcttaaaatcactgcaagagacaagtggtaacaaacctaggcagtttgtaaaggtttaggcagcctcatgttcccatggcccttgtctcctgggcagagtatcakgttgtgccattggctctccagacactttgagagtctagtgatggtacctgtcacacttgcattgccagggcttggtcattcctctgtctct

SEQ ID NO: 500848 - DNA, 579 bp, Homo sapiens
ccagcaaaacagttcgaaaagatgatttgcacaggccagcttcaaggaagacatgattagggggagcaggcagtcaccttagagttgtgcaagtaagcgtacagatctaaaaattagagatcagaaagatcccagtggttcatggactttaaaattctctagaatagatcgatgcactgaacccaaatcacatcaaaaatgaaagttatcctcttcttatgactactattcctgcttcagtacctaaaatatatttgtggattaatgttgactgagtataagaaatgacaaagctactgccaccacagcatcaaaaagaatctaaatgggaaataagaagttggctacctttacaaacacatctcagaatggatactgatggtgtcataattttgtgggccacacaattatgttcttcattcatgaatgaatttagcattttattataagtactaaagtgatatttaattatagagttaaaattgacaaaatggtaaataatttagaagtagaacatttgtttatacttgattaaactgytttggtcattatgtatcatttcactccttgcctttgaat

SEQ ID NO: 500849 - DNA, 660 bp, Homo sapiens
tgtcccagtagctcattttatattcatccccattacatgcattgtggaggatagatattattacctccattatacaaacgatagaagcttgaaatgaagggatttattaagggttgcaaaactcacggagaaaaggcyagcattgcaatcttgcatttctgacttttgaccttgatgagtcctaatttgttctttattctcatgaatctgcacgtattctatatctccatagagggcatcacaatttgtctgttttccccaattagaaacgacatctccttttgtcatgtacctccaatctcttactcgttgtcttgttaaatctgccttatataccttttcaatttttctggacttagtcatgccttcatcgtaatagcttcctaatttgtttatctactttgaagtcttactagttctaatctgttttgagctttgcttgaaagttttctttccaaatcatagatggaacccagcactctagagccatcaatggccctgccactctctataacacaaactccaagcttgttaagtgtggtgcatgtatgaggaccttctcactcaagctccctatccactagtcatgaatcccttaagtggttcaagctctgccacaccaaagaattaccacatacactacaaaaatgacattggaaa

SEQ ID NO: 500850 - DNA, 660 bp, Homo sapiens
tgtcccagtagctcattttatattcatccccattacatgcattgtggaggatagatattattacctccattatacaaacgatagaagcttgaaatgaagggatttattaagggttgcaaaactcacggagaaaaggccagcattgcaatcttgcatttctgacttttgaccttgatgagtcctaatttgttctttattctcatgaatctgcacrtattctatatctccatagagggcatcacaatttgtctgttttccccaattagaaacgacatctccttttgtcatgtacctccaatctcttactcgttgtcttgttaaatctgccttatataccttttcaatttttctggacttagtcatgccttcatcgtaatagcttcctaatttgtttatctactttgaagtcttactagttctaatctgttttgagctttgcttgaaagttttctttccaaatcatagatggaacccagcactctagagccatcaatggccctgccactctctataacacaaactccaagcttgttaagtgtggtgcatgtatgaggaccttctcactcaagctccctatccactagtcatgaatcccttaagtggttcaagctctgccacaccaaagaattaccacatacactacaaaaatgacattggaaa

SEQ ID NO: 500851 - DNA, 654 bp, Homo sapiens
ggagaaagaatacgtgtaagaacaagagctacaggtgtttctactagatatcacctaggctagtgctattacagacagacacacacagacacacacatataaatataaccatatataaatataattttaaaaccatgattataaatatcatattatatggttataaaactgtgattaattttcttaaatctaaggtgctaagtaagaggaaaggtcatttgccaagaattaacagtgtggagtcaggtttgtagttaaaacattatcaaagttatttgagaaaaattcattgtgaaaggtaataggaagtcactgaaatgcagagcaatagtaaaagtcaagagaaatcagcctgtggttttagtgggaaaaaaaatactttcgtgattgtcttcagcaagcatgatttcgtctaaattttcaaaatttgtagaaaagaggtaccacattatttctttacacagataaagaattaaggcacagagaggatagttcctaccctgagatcatatagcttaccagtggtttttcagtctgtattgtgagttgacagaggttttcttccctccaaaaccttgtccttgatttatgtcatataaaggaatcactgaggaggtttcaaatgcagktttaatgcagaatagaattttgttt

SEQ ID NO: 500852 - DNA, 575 bp, Homo sapiens
ttccaacagaaatgctttatttcagaagaaaatacagtaaatatgtaaagttctcaattaaaatgtaagacaagttattatattcagtaaaactgatctttaattatgaaactgttattaacacataaaactcagggagtatcattcacttgcttttatcttaagatatagtccttaaaacaagtttcaaacagcaagaatgactatagaaacattaatataaggacttgtggtgagcaataaatacatagttacatgtaaaactgtggtttagtgagagttaaatgagagacagcatattgtatgactagaaaatctgatgatgtagatataatwaaatattaacatatgcaataaaaatggagaatgcatgtttttacttaatttattttttattatatacatttaaggtatgcagcatgaaactttgatatacatatacatagggaaatgattgccacagtcgagccatttaatatatctatcagctaacataatttgtgtgtgtgtgataagagtgtcaggcctatgagcccaacctaagccattgtatcccctgtgacctgcatgtatac

SEQ ID NO: 500853 - DNA, 633 bp, Homo sapiens
tattacacttagagtaaggatcatgtggtctcatatttaatcgttttctaagtgtctcactcctaccctgcatggtagctgttgggggcagggaaccttcctataccatagatttgatattctcgaggcagacacaaagctctaaactcttagatgggataaaatacacagaggttctaggcttcctaatgactcatccatcgtgcacagcctcagatcacaacacagctacttttaacttccaataaaattacattgtacttggatttttttttttgctttttgccaagaaacatgtttctaaagtgctatttctgagagattccatgtatgttamacgtaaacaaagacagcaaagttgctgtgtgtgtggatggtgggcagtttgctaagcttacccaccagaaaagtgacagtcctgaaggacagctttgaagtgacagcgggggccatattgggtcctatgggacagtcatttattagttcatccgcggtttctgctttagcaaaatcatcaacttgtgtaagtaaagacctctcctataacttgcaaataagtgaaagcacctaaactgcatctacaaatatcaaagatttaaagtatgttgaatttcattttttaaatattaagct

SEQ ID NO: 500854 - DNA, 633 bp, Homo sapiens
tattacacttagagtaaggatcatgtggtctcatatttaatcgttttctaagtgtctcactcctaccctgcatggtagctgttgggggcagggaaccttcctataccatagatttgatattctcgaggcagacacaaagctctaaactcttagatgggataaaatacacagaggttctaggcttcctaatgactcatccatcgtgcacagcctcagatcacaacacagctacttttaacttccaataaaattacattgtacttggatttttttttttgctttttgccaagaaacatgtttctaaagtgctatttctgagagattccatgtatgttaaacgtaaacaaagacagcaaagttgctgtgtgtgtggatggtgggcagtttgctaagcttacccaccagaaaagtgacagtcctgaaggacagctttgaagtgacagcgggggccatattgggtcctatgggacagtcatttattagttcatccgcggtttctgctttagcaaaatcatcaacttgtgtaagtaaagacctctcctataacttgcaaataagtgaaascacctaaactgcatctacaaatatcaaagatttaaagtatgttgaatttcattttttaaatattaagct

SEQ ID NO: 500855 - DNA, 593 bp, Homo sapiens
gcctcaagtgatctacccgccttggcctcccaaagtgctgggattacaggagtgaaccactgtgcctgacctctctgggctagtttattttcaaatagagtctctctaccaaatcacagggtgcttgtgaggtagataaggtaatatcgatcccagagggtggaaattttaaaaatggttaagtggtatagaaatgcaactttctacagcagcatggccaattccctgctttgctggaatcagaataaatgcttcctttctttccctaatgaacgcaggagccagccatcaaagtgggtgtagggcctatgatgtagkgggaaagaacatgtcgtctaggggcacatgggctgagctctcatcctgtctctgtcacctagtaactatgtgaccttgggatattacctaaccctactgtcttttttggtcaaagttggataataatacatattttacagggcttgtcaagaagtagaggaaataatatatgctaatttcttgacatatcaaactcttaataaatggttgttgctattttattttcaagacatacattaggaaacagacatctttcaatgtatgaatttcagcaa

SEQ ID NO: 500856 - DNA, 444 bp, Homo sapiens
gagcattttgcttcataaattttaaatttatggtttaagacagatctagtggtgatgaatgcttttagcttttgtttatctgcaaaagcctttatttttccgtcatttctgaagaacasgtttgccaggtaaagaattcttggttggcaggttttttcctcaacactttgaatatatcatcttattctcttctggcctgcaagatttctgctgaggaatcccataataattgaactagggctcccttgtatgtagtatgtttcttttctcttgctgcattcagaattctttctttgtctttgaattttgatagtttgattaatctctcactgaactcttccttgcgttgaattgatggtacataaggagaactcattttttttaacactagaaacattttgttttgtattacaagcagaacaatggttcttcaaatatgcccat

SEQ ID NO: 500857 - DNA, 604 bp, Homo sapiens
ccagcctgggttctgagtactttatatgaatgaccacatgtaatcctcataagcacacacgtcagtataatgataattttattgccattttacagatgagggaattagggtacagataatttaaataacctgcctggagtgtcacaacaaggaagcagggcaggcaagaggcaaacacaggctctgactccagagtgtttgccctgtgaatccccatgttatgcagctctacctgaaggccagggcaatgtttgtcctcacttgaaacagggctgactgaggctctacaggagggatgttgtcattagattttctgagggttttaaggttcgttgctgaaggattttaaatgctcaagtcaagaaaagcaactgaaaccactcaagggctacttaaaaaggcagaatctgtactgttagtgtatgaactcctccaattggatctagaatataatmtaaagcatgcttaaaaataaagagttgaaaaggtcagcccattgttcttctcaaactaatgtgcctgtggacacccttcactttagaactttctttaatcacaggtttagaccatttattttttggctgtcaagaaaaaaaatgtatta

SEQ ID NO: 500858 - DNA, 662 bp, Homo sapiens
aagagtttaaagaaaaacacacttgtgaaatattaacattattatctcaggctgtttggctaattttcttgagaattggcttttcacctcactggccatcctcaatgtgatgatagggcagtgattggttgagcatttaataaaactttgatgttatttacccttgtaaaatcatgtcatttcttgctgaaaaaggcagtgtagagaaaaatagaattctacccagtcaatgttttttttctctccagaycttttccaaggataatcaagtgttaacttcttatttttatatccaaaaaaattattaagtatccaccatgtgccaatattgtactaggtattgagataagatgaataaatgtattatgtgttaggaaagacccataaacatgtcaacctaattccttaaaatgcaaatcacggtcaaaacagcaaggcagctgcaagatgcaaggaagagagaacagaacatagttttgaagtcaggcctgatatttacagtcccaatactatgtgataagaaccattcttcagatatgcatatgcagtgtcagcggcataaaggaggatggagagctgaggctgtcttcccacgcctatctcagacatccatgtcaaccaggcacacatctaggacatttagtattgaacaccaccacctc

SEQ ID NO: 500859 - DNA, 219 bp, Homo sapiens
tagttttgaagtcaggcctgatatttacagtcccaatactatgtgataagaaccattcttcagatatgcatatgcagtgtcagcggcataaaggaggatggagagctgaggctgtcttcccasgcctatctcagacatccatgtcaaccaggcacacatctaggacatttagtattgaacaccaccacctcctcccccataaaagtggggtggagggct

SEQ ID NO: 500860 - DNA, 600 bp, Homo sapiens
gctgacaccacccagaacggtaatctggctcaaccagttctgccaacccactcaggaacagaagacaccaagaaaaactcacttcaaccccctatgattccatctccaacctgaccaatcagcattccccacttcccaagcctctgccygccaaattatctttaaaaactctgatccccgaaagctcagggagactgatttgagtaataataaaattcacatctcccacacagccggttctgcatgaattactctttcttcattgcaattcccctgtcttgataaattggttctgtctaggtagctggcaaggtgaacccattgggcagttacagaacagccacatcatatcaacaagtttctgtgaacatagtctgagattatattactctcacttgcctagtctgacttttcttctgcacagttatcttctcttcctatttgagtacacttgattaattatgtatcatgattaattcatgtactcaacatttactgatctcaataagaacttttttaggtgcttttattatcttaatactcacagaaggtctgggaggtagactcattttttggtcctactttactgatcggaaaact

SEQ ID NO: 500861 - DNA, 538 bp, Homo sapiens
gtagaaagaggaagtattaataaaaagtaagatatttgattgatcagaatgaattttgaagggtctgtgaaatgattatataaatcattgaaagaggtaattgtgcaaatgtgtacatcacataggctgacatagtatcagagctagaagggagcttaaacatccaaacatccgtctcctcatacagatagttgggaaacccaaggtccaggcaagtgaaagakcctggcatgccaggagcccagggcccatgaggacctgtaacctgcaacggggccagggaagctgacggcacatggccacaccactggtgggaggcagactcagaacacttccatccctttctagcatgcagtcctagtctgctcagggaagtgttgatagctcagcctcagtacagccccccagggaggcaaatgactgacaaacgcctgcacatcccttcctacctgacacaccacatcatcacccaccagggcgcccaagccagaacccccagtgcatccttaacccatagcgcattcatcctcctttccag

SEQ ID NO: 500862 - DNA, 538 bp, Homo sapiens
gtagaaagaggaagtattaataaaaagtaagatatttgattgatcagaatgaattttgaagggtctgtgaaatgattatataaatcattgaaagaggtaattgtgcaaatgtgtacatcacataggctgacatagtatcagagctagaagggagcttaaacatccaaacatccgtctcctcatacagatagttgggaaacccaaggtccaggcaagtgaaagagcctggcatgccaggagcccagggcccatgaggacctgtaacctgcaacggggccagggaagctgacggcacatggccacaccactggtgggaggcagactcagaacacttccatccctttctagcatgcagtcctagtctgctcagggaagtgttgatagctcagcctcagtacagccccccagggaggcaaatgactgacaaacgcctgcacatcccttcctacctgacacaccacatcatcacccaccagggcrcccaagccagaacccccagtgcatccttaacccatagcgcattcatcctcctttccag

SEQ ID NO: 500863 - DNA, 538 bp, Homo sapiens
gtagaaagaggaagtattaataaaaagtaagatatttgattgatcagaatgaattttgaagggtctgtgaaatgattatataaatcattgaaagaggtaattgtgcaaatgtgtacatcacataggctgacatagtatcagagctagaagggagcttaaacatccaaacatccgtctcctcatacagatagttgggaaacccaaggtccaggcaagtgaaagagcctggcatgccaggagcccagggcccatgaggacctgtaacctgcaacggggccagggaagctgacggcacatggccacaccactggtgggaggcagactcagaacacttccatccctttctagcatgcagtcctagtctgctcagggaagtgttgatagctcagcctcagtacagccccccagggaggcaaatgactgacaaacgcctgcacatcccttcctacctgacacaccacatcatcacccaccagggcgcccaagccagaacccccagtgcatccttaacccayagcgcattcatcctcctttccag

SEQ ID NO: 500864 - DNA, 588 bp, Homo sapiens
gttgtcctcgtcaggtaatagcagcagcagcagcagtgacagttgacattaactgagcaattattagaggttagtcactattctaagtgctttacatgtgctgattccygatctgcactgccaccatataaggtaggaaggcggatatggtagtttcccatcttaaaggcgagagaatccagcacagaggggttaaatgacttgcccgggagcacatacctcgtttaggggctggcacagtatctggaaagatgatgactaggttttagggtgttggatcaatgagtgaatgagtaaatatgcccttcacagtgtctgtcacaaggcaaggactcaacaaatggcagtttttagtcatattgctctggaattggaccagagaactggagtgtttgttgagatagaaagtgtgtttgtagtagcatattttattggagaccttgggtgaccagctttctcaagaaaaatacggaagctcattaggagctaacctctgactttagcttgggcagtttacccattgtccatgagttaggccattcattcatcttcccctcttatttccatgtattatgcagtggttaaggg

SEQ ID NO: 500865 - DNA, 477 bp, Homo sapiens
ggcgtggtggcgggtgcctgtaatcccagctacttgggagtctgagcaggagaattgcttgaacctggaagcagaggttgcagtgagccaagatctcgcccttgcactccagcctggatgacagcaagagtccatctcaaaaaaaaaataaaaataaaaaataaatatatatatatatatatctatatctatatatatctatatatatatctatatctatatctatatatatctatatctatatatatctatmtatatatatatatataatgagagaacatttggttagctctcaaaagaaaaggtgatcatctagtaaatgtaacatactgcaacaggtacaagaagagcccatatgtgattcagaaactgagggtacagcctgcagcagtttaatttcaggtaaatgcctccaggaagtaagacacgtttttacaatttaaaaatggattgtagaagagaggaaaggaaagcagt

SEQ ID NO: 500866 - DNA, 577 bp, Homo sapiens
cgtgaaaaacgctgccagtgccggctcagactccagccttcccggagccagcccctgtccgtacgctgcttggctctagtgggagttgtggtccctggaacctggctgactgtgtcccggccagcgagggcagtcttgtgatactggaggttgatgtggggtccacactcccacggggttcaaagtgtcttgggtttttggaagttgacagtaaggcatgtgctcattagtttatcagtctgtcagcaaatatttcctgagcactgcctgcttaccagacactgtgccaggtgctggggctgcgttcgtgagcaaaacaaacgtggtccttgcccccacggaattcacagtctagagggggaggcctagaaacamtagacaaattatcaggggaaaacaaagttattctgtgccaggcccaaagccccagagctctctcatgctgccatcgcaaaccatttcccttccaggtgagtcctaggtcttggatttatacccatcgttctcccagaagcatctcagtccagcccccaaccatctggtcagttcctgtagaaaaccttgtcattttccttaa

SEQ ID NO: 500867 - DNA, 387 bp, Homo sapiens
gtaaatgaaaatattaatactagactaccaagaattaagtgaggacaaatgaaatagccaaagtaggcacttagcaatctggcactcaccaacaacctcctccagccgccttcctcacctcctgtcatgtagttttaaaggggrcaggagaaggatgaaggaaatatgtctttatgatttggttctcatgcaaatgaagaatagttgcttggttgtctagctagttaagaccctggatcttcaagcaagggttgggcattggggattgcaagtggccactgaggctaggcatgcatcctcccaaaatgagagcactatgagcaagagaccctccaaagaaaccatgaaattgtgccacaagatctaagatctcaacaagtgctatgg

SEQ ID NO: 500868 - DNA, 511 bp, Homo sapiens
catttcaaacagtttgagttaaatatgaaactccgtaactattcaatcaatgccaggtttcatcccgacaaaatgtttttctctcactttcacgaaaataaaactccaagtaaaaaggaaagaaaagcgacatgggatcacgctggcactctaaatttaaaaagatcgtgtagaaatctggaaaagcatatcttctaaaagggagtgaggacaacccccctctgagttcacagccacaacttggtgtgtgctgcaaggctgccacgtctgccctgtgaatcctctcaaccctacaccttcttccctaatgctcagccaaagtgatctttttaacgtgtggactttaagtcactgcctttcggagaccttcagtggcttcccattgattctgctagtatttctctggccttatcccatgytatggggtgcctttgccactccactccagttttatcccgacacacattccccaccatcacagggtctctgcatcatctctctccccactgcc

SEQ ID NO: 500869 - DNA, 511 bp, Homo sapiens
catttcaaacagtttgagttaaatatgaaactccgtaactattcaatcaatgccaggtttcatcccgacaaaatgtttttctctcactttcacgaaaataaaactccaagtaaaaaggaaagaaaagcgacatgggatcacgctggcactctaaatttaaaaagatcgtgtagaaatctggaaaagcatatcttctaaaagggagtgaggacaacccccctctgagttcacagccacaacttggtgtgtgctgcaaggctgccacgtctgccctgtgaatcctctcaaccctacaccttcttccctaatgctcagccaaagtgatctttttaacgtgtggactttaagtcactgcctttcggagaccttcagtggcttcccattgattctgctagtatttctctggccttatcccatgctatggggtgcctttgccactccactccagttttatcccgacacacattccscaccatcacagggtctctgcatcatctctctccccactgcc

SEQ ID NO: 500870 - DNA, 459 bp, Homo sapiens
gctactcaggaggctgaggcaggagaatcgcttgagcccaggaggtggagattgaagtgagccaagatcacgccactgcactgcagcctgggtgacagagagagactccctctcaaaaaaaaaaaaaaaaaaaaaaaattctcgatgtcactgttttcacatctctggcaaatgaactgtgtttttcrtacttgcctgaatggtgaataaaacaggttcttcccacactctcccattcacaataaagccttggtttgtcccatctgtggccatgaaagtaaagcagtcagtctgggagtcccctcctgagtgccgataggccacattcttgctgtccacatcctgctgggtgaaattgtgttgaagtagccctgtcccccacaggtagagctggccatgctgggggagctgaaccaagaggaaggtgaggttctccgcaggtgtatcagggtcggtcag

SEQ ID NO: 500871 - DNA, 459 bp, Homo sapiens
gctactcaggaggctgaggcaggagaatcgcttgagcccaggaggtggagattgaagtgagccaagatcacgccactgcactgcagcctgggtgacagagagagactccctctcaaaaaaaaaaaaaaaaaaaaaaaattctcgatgtcactgttttcacatctctggcaaatgaactgtgtttttcatacttgcctgaatggtgaataaaacaggttcttcccacactctcccattcacaataaagccttggtttgtcccrtctgtggccatgaaagtaaagcagtcagtctgggagtcccctcctgagtgccgataggccacattcttgctgtccacatcctgctgggtgaaattgtgttgaagtagccctgtcccccacaggtagagctggccatgctgggggagctgaaccaagaggaaggtgaggttctccgcaggtgtatcagggtcggtcag

SEQ ID NO: 500872 - DNA, 579 bp, Homo sapiens
catacgtttttatggtaaatttcttaatagcagatcacatttctcagacatgtaatctcacttaaatcatcttccccttccaggcctcatttccatggctctgaaaaatgaaggggatggaccagaagatcattaagtaccacccaactctaaaatatgacgggaggctctaatctcttatggtttacatgtgcttctgcactttctccccctataagacagatgagagttatgctacacaaggattattttcctgcttcaaagaaaggttcacaaagttggtgggagatcataagggcaggtaggagatgaagctgagactagaatgcaggtcttttaatccctgcacccactactcttgcagagtttaaaacaaattctggtttagcaatccaccacaaaagagttgtggtgcctgagcaccaytgcaaaactataaaaagaaagctgaaatgatacacatttgagacaagcaaaatctttcttacagtcttaggtttgtgatatcttaatgtgcttttgattctattgatcatgaaatcacattctacctactgaagccaatttcacaataacact

SEQ ID NO: 500873 - DNA, 483 bp, Homo sapiens
ttgcaacgtttgcctgatggaaattccttttagtcttctgtcccttctcttttaaagccaaaaatggacaacagaacagttagaatgtgagttgccagagggaggtgaagaatcagagtgcagaaccggagaaacagtcactgaattatcaaagacttctgcattcaacattgcttttgaagttcacttttctccagtgggcacaagaaagaggtccacgtwgaagctgtattaggaaaacaactttggtcagaagttggccacattctgtggtccacaaaagtgcttttcatgaatgatgtgggtcctgtgtaacttagtttggggcttctgcggatcatcttggagattcaacttggactagaaaacaggcacaagcttgtcaaggggtgcagccagggggtgaggcaataagatgcgcactcacttaggtctggaggtcagggttcactctccagtgacttcaggataattacttaaaag

SEQ ID NO: 500874 - DNA, 483 bp, Homo sapiens
ttgcaacgtttgcctgatggaaattccttttagtcttctgtcccttctcttttaaagccaaaaatggacaacagaacagttagaatgtgagttgccagagggaggtgaagaatcagagtgcagaaccggagaaacagtcactgaattatcaaagacttctgcattcaacattgcttttgaagttcacttttctccagtgggcacaagaaagaggtccacgtagaagctgtattaggaaaacaactttggtcagaagttggccacattctgtggtccacaaaagtgcttttcatgaatgatgtgggtcctgtgtaacttagtttggggcttctgcggatcatcttggagattcaacttggactagaaaacaggcacaagcttgtcarggggtgcagccagggggtgaggcaataagatgcgcactcacttaggtctggaggtcagggttcactctccagtgacttcaggataattacttaaaag

SEQ ID NO: 500875 - DNA, 554 bp, Homo sapiens
ctgttgagaaaaaaaatataaataaacagttgtatatcagtatttggttcttccagtcaggataaatttaggaaggctcagcttcaaaccctctttaggagcaatattgatttataaactgcatctatcagtaagccctggggagtgtttaccaaatgggcctgcacttaattaaattactctctagccctgccagccactgggtattttaaaatggcaattrtaaggattaaggaggccagtacctgttgttgtgttctccagatgtccatgttttgggccttgtagaattttaaagatgatctgatcgtcctcagtgtcagggtctgatgccttcaacacgcgggaagtgatgtaaatcccgtagcagccatttttcaggagccccacttgagaaggggaatgcaagagtgtgatacgaggagctgttttgtccaattggtctacctggatcatcaacaatgacataaaatgttgtccaaaggcccctcacccccatgcaacgttgggctttattggttcaacaatgacacactgtcccacgttttggattc

SEQ ID NO: 500876 - DNA, 312 bp, Homo sapiens
tcatagacctctaattttaaatgtatttggggcctcctrgttctgtttttctctcatttgtcttatttctgctgcccccttggaattgtagcattagggcacaaaatcttttcctactctatacagtagggaagagaaaaaggcagagatctgctccagataagccacttgtgtgtatatctacataatattccactcttaatttcttgtactactcagtaatctgaaaggtaaaatgaatgttcctggcaagttagacacacttgtacagaaatgttcggctctttgtgtttgtactttctgtaagtctta

SEQ ID NO: 500877 - DNA, 312 bp, Homo sapiens
tcatagacctctaattttaaatgtatttggggcctcctagttctgtttttctctcatttgtcttatttctgctgcccccttggaattgtagcattagggcacaaaatcttttcctactctatacagtagggaagagaaaaaggcagagatctgctccagataagccacttgtgtgtatatctacataatwttccactcttaatttcttgtactactcagtaatctgaaaggtaaaatgaatgttcctggcaagttagacacacttgtacagaaatgttcggctctttgtgtttgtactttctgtaagtctta

SEQ ID NO: 500878 - DNA, 344 bp, Homo sapiens
accacaaacccccttctccgtaattccctccacccaccctgtttgacttccctgctgacmactgtctctctgccaggtggcctaggccctcatggccacctgctaaccttgctgcagcctggcccacactctgggacttatctcctataggatgacaggtgctggccagagaggtcaggccacagcctcatgctcaggggtgaggtgacagcggggatgacagccctccagcccagggcttcagcttgcccagagatggggccagatctgggacagtagaattgtcagggagggattggttgttgatcaaagatgactgaatcattggcccccaaaaaggccat

SEQ ID NO: 500879 - DNA, 344 bp, Homo sapiens
accacaaacccccttctccgtaattccctccacccaccctgtttgacttccctgctgaccactgtctctctgccaggtggcctaggccctcatggccacctgctaaccttgctgcagcctggcccacactctgggacttatctcctataggatgacaggtgctggccagagaggtcaggccacagcctcatgctcaggggtgaggtgacagcggggatgacagccctccagcccagggcttcagcttgcccagagakggggccagatctgggacagtagaattgtcagggagggattggttgttgatcaaagatgactgaatcattggcccccaaaaaggccat

SEQ ID NO: 500880 - DNA, 344 bp, Homo sapiens
accacaaacccccttctccgtaattccctccacccaccctgtttgacttccctgctgaccactgtctctctgccaggtggcctaggccctcatggccacctgctaaccttgctgcagcctggcccacactctgggacttatctcctataggatgacaggtgctggccagagaggtcaggccacagcctcatgctcaggggtgaggtgacagcggggatgacagccctccagcccagggcttcagcttgcccagagatggggccagatctgggacagtagaattgtcagggagggattggttgttgatcaaagawgactgaatcattggcccccaaaaaggccat

SEQ ID NO: 500881 - DNA, 374 bp, Homo sapiens
tgatttcttccccataagcctggtgtgtgtgagtttgagtgtgtgtgtctgtctgtcctaaacatcagcacacaggactgagtctgtcacttaatttcaaaggrtttcataaccactcaagcatccaacatatatctggagaacagtttgagctctttgatggcacagaaatcaaagatgttaattatattttcatctcaatctctagaaagcctgatcactttcattaaacatgccccaagcagatgacaagaatctattttacatgaagacctcaaaggcaggaggaagcacagggcctggcatctggtaggcaacgggctcttgtcagtggaaatagcaggactgttgcttatattgttcacagggcatgg

SEQ ID NO: 500882 - DNA, 374 bp, Homo sapiens
tgatttcttccccataagcctggtgtgtgtgagtttgagtgtgtgtgtctgtctgtcctaaacatcagcacacaggactgagtctgtcacttaatttcaaaggatttcataaccactcaagcatccaacatatatctgragaacagtttgagctctttgatggcacagaaatcaaagatgttaattatattttcatctcaatctctagaaagcctgatcactttcattaaacatgccccaagcagatgacaagaatctattttacatgaagacctcaaaggcaggaggaagcacagggcctggcatctggtaggcaacgggctcttgtcagtggaaatagcaggactgttgcttatattgttcacagggcatgg

SEQ ID NO: 500883 - DNA, 374 bp, Homo sapiens
tgatttcttccccataagcctggtgtgtgtgagtttgagtgtgtgtgtctgtctgtcctaaacatcagcacacaggactgagtctgtcacttaatttcaaaggatttcataaccactcaagcatccaacatatatctggagaacagtttgagctctttgatggcacagaaatcaaagatgttaattatattttcatctcaatctctagaaagcctgatcactttcattaaacatgccccaagcagatgacaagaatctattttacatgaagacytcaaaggcaggaggaagcacagggcctggcatctggtaggcaacgggctcttgtcagtggaaatagcaggactgttgcttatattgttcacagggcatgg

SEQ ID NO: 500884 - DNA, 374 bp, Homo sapiens
tgatttcttccccataagcctggtgtgtgtgagtttgagtgtgtgtgtctgtctgtcctaaacatcagcacacaggactgagtctgtcacttaatttcaaaggatttcataaccactcaagcatccaacatatatctggagaacagtttgagctctttgatggcacagaaatcaaagatgttaattatattttcatctcaatctctagaaagcctgatcactttcattaaacatgccccaagcagatgacaagaatctattttacatgaagacctcaaaggcaggaggaagcacagggcctggcatctggtaggcaacgggctcttgtcagtggaaayagcaggactgttgcttatattgttcacagggcatgg

SEQ ID NO: 500885 - DNA, 518 bp, Homo sapiens
ggctccaaattcccagctaagcaggacaacttgcccaggtgtccgggatgacctcatggcatagcgcctcagcagggccttaagaggaggaggctactgccccaccgctccctggccttggaggtcaaggtctcctgataaytccctgccaactagcatccatcgctctaaagcccaggctatctaggagggctggctccagtcccgaccaatcagaagagcaaacaggttattatcattattattatgataacaacagattattttatgcttgcagcagaaggcacctgctttgtaaaggcttctgtttgccaaggtcagttcatgattgaggcacccgccactgccctctccctgccagcccctggtctcccactccagccacactgtcgcttctgagtttctttcacctttagggtcttgcatctgtaattaccattgcctaaaaccctcttcctctcccacccttctgtacttcctctgcctgggcatcacctactcatccacaggccccagct

SEQ ID NO: 500886 - DNA, 518 bp, Homo sapiens
ggctccaaattcccagctaagcaggacaacttgcccaggtgtccgggatgacctcatggcatagcgcctcagcagggccttaagaggaggaggctactgccccaccgctccctggccttggaggtcaaggtctcctgataattccctgccaactagcatccatcgctctaaagcccaggctatctaggagggctggctccagtcccgaccaatcagaagagcaaacaggttattatcattattattatgataacaacagattattttatgcttgcagcagaaggcacctgctttgtaaaggcttctgtttgccaaggtcagttcatgattgaggcacccgccactgccctctccctgccagcccctggtctcccactcmagccacactgtcgcttctgagtttctttcacctttagggtcttgcatctgtaattaccattgcctaaaaccctcttcctctcccacccttctgtacttcctctgcctgggcatcacctactcatccacaggccccagct

SEQ ID NO: 500887 - DNA, 495 bp, Homo sapiens
gctggtactacaggtgcgtgccaccacccctggctaattttttgtgtgtgtatttttagtagagacagggattcaccatgttggccaggctggtctcgaactcctgacctcaggtaatccacctgcctcagcctcccaaagtgctggaattacaggcatgagccgccgcgcccagccgacagagttgattttaaaatggtgtcactctggctctctgaggcccatgcttccctaacataatggcccggccatcccattgcaagtcgggtcaaccctgaagggccattctagtttcggagctcctggtggggtgggctgaggcctttgctgggtctgcactgcagctcarcttctccccctgtccagtcctgcttccttctcctgtggggttgatcaaggcactcccgctagtcatcaccctgtacattaaactccaaccctcaacagagaatctgacactaggactcacagccataacggctctctcccttctaa

SEQ ID NO: 500888 - DNA, 626 bp, Homo sapiens
ctataaaccttatatggctacctgtatacaaactttatatggctacctatataatttgccagaaagtaaycaacactcaatatgctaaaacattactaaattctagctagaagctgttgcctacagaggtctctggacctaaggtgtgttctttctttgttaaaagaggagattatcaagtgttgctaaaaggtaaagatttattaccactaaactgaaatttctctctgtgcaattcactgttatttaatgctatacccaggtgccatctacagttatcttgaatgccagcagtggtaatggtcttgcattttgtgaaacactggcctacaccatagcatttattttcctctccatagctgtgaaattcatataacgccaaacagccctgcacaggactatgtgctggggagtgggaacttcaaatcctacaaagttataacttgcaatcaaatccagtagattattattgttattattaaataaatataatattattgttaatgattgttatatatatagttattatctgtaatgttttaggctttatagaacattttcatattgttgctgtactatactggcaaagcatagccaggcctgtgaataaagatttctggtcgcta

SEQ ID NO: 500889 - DNA, 601 bp, Homo sapiens
caaactttatatggctacctatataatttgccagaaagtaatmaacactcaatatgctaaaacattactaaattctagctagaagctgttgcctacagaggtctctggacctaaggtgtgttctttctttgttaaaagaggagattatcaagtgttgctaaaaggtaaagatttattaccactaaactgaaatttctctctgtgcaattcactgttatttaatgctatacccaggtgccatctacagttatcttgaatgccagcagtggtaatggtcttgcattttgtgaaacactggcctacaccatagcatttattttcctctccatagctgtgaaattcatataacgccaaacagccctgcacaggactatgtgctggggagtgggaacttcaaatcctacaaagttataacttgcaatcaaatccagtagattattattgttattattaaataaatataatattattgttaatgattgttatatatatagttattatctgtaatgttttaggctttatagaacattttcatattgttgctgtactatactggcaaagcatagccaggcctgtgaataaagatttctggtcgctattc

SEQ ID NO: 500890 - DNA, 601 bp, Homo sapiens
caaactttatatggctacctatataatttgccagaaagtaatcaacactcaatatgctaaaacattactaaattctagctagaagctgttgcctacagaggtctctggacctaaggtgtgttctttctttgttaaaagaggagattatcaagtgttgctaaaaggtaaagatttattaccactaaactgaaatttctctctgtgcaattcactgttatttaatgctatacccaggtgccatctacagttatcttgaatgccagcagtggtaatggtcttgcattttgtgaaacactggcctacaccatagyatttattttcctctccatagctgtgaaattcatataacgccaaacagccctgcacaggactatgtgctggggagtgggaacttcaaatcctacaaagttataacttgcaatcaaatccagtagattattattgttattattaaataaatataatattattgttaatgattgttatatatatagttattatctgtaatgttttaggctttatagaacattttcatattgttgctgtactatactggcaaagcatagccaggcctgtgaataaagatttctggtcgctattc

SEQ ID NO: 500891 - DNA, 588 bp, Homo sapiens
ctagcatggaggaaggccgaggacctgcatggaagtttctggaaagcagacccactcctcatctcggaagctaccttctcagcaactgtggcttttcgctgcctcccttcatcatcggcactccccacacacatttcttacacctcacttctccctgaagccacagtagagacaaccaccctacctgccacagtcagtgacygtttctcagtcaccaccaccccgctctgaggacacatggacactacttactgaaacgtttctcctttagctgtactgcccttgcttctctgctgtttgtcctcatcccttacttccaaaagttctggccttgacccttttctctcccctccttggtgatcacactgtctcctgcagcatcgccctctgtcacctgacataggtccctcaaatgtccacccaggactccctctggagtgctgcaccacagttccaactctttgttggttgacagagaaactcagacttatgtgctcccaccccagcccctacaccctcaccccacctccctaaactcattctttctttcttttttgaaacagagtcttgctctgtcacctaggccag

SEQ ID NO: 500892 - DNA, 587 bp, Homo sapiens
gttaaaggcctaatgcattaatctgtttacctggtaccatcacaaaactgtaactctttcaatgagtaggactctcttaaatattaatgtaaaatgaatattcaataggccaattaatcattaaaaattagcaaacctcagcatgaaattcaggccatcatttattgcaaaaacacagagtaataggagaatgtattgtgtaacatttactgtctgtggcctaaagtactttgtactttgtccgtgtagctcagaatattaaacgatttttaaaaggctgcttccttgggtcagtgtggtgtgcttgagttcygggaatgcagcaaaatgaagtttagaaataatgaaattgaccaatgcttcctatctctgtagttggccattgtggggtcagtgtttactgatctttgctcactgtcctgatgagataaacttgatatttttaatggaataacttgtttgtatcagtcctcactccacattatgaaagaattgtggagaagcttgcagaaaactcttggtatgttatctttcactcaggaagtgtttctccaggaaacttccagagagggagattttgaagctga

SEQ ID NO: 500893 - DNA, 612 bp, Homo sapiens
ctgttgagaaacacagtttttgtaaatcatgatcactagacttttcagtccccagaamctgagtttgggtgggttaggatttgagataacaagtccgttttctggtgtaagaacagcagtctctaccaggcttcagggatttcttgaagtagcggtaatgataacaatatacaaaaatagcagcaagaatcacgactcactgctattgaacacttactacgttacaggcaccgtgccaaaccctttacatgcattatctaattctagttccctttccagactgtgggtcacaacccattattgggttctaatatcagtgtagtgagtcctgactaacacttttaaaagaagtacaggaaagtatagggtggaataaaagatatcagagtaaactatatgtagaagggttaagaattgtcttgcaaaactctcttatgtgtacacatgggagagtattaggaaacagtgtaaaatgtggttttcactgtgggtcatggctgaaaatgtctgatagccattgaggcgggtagtgttttgatccttgtttttcagataaggaaactgagactcagagaagttgagtaacttgctctcgaggtcgcatagccagcg

SEQ ID NO: 500894 - DNA, 603 bp, Homo sapiens
aaactgaatgtgaagctggagaaagggaagacaaaatggaagccatgcagataaactagaacccttgcctgtgtctctgctttcaacctgagcacatgtgtggcctgcagaagctggctcccttcatcatggatttacgcatgaccctggtcagacttggagaagcttgaaggaggacatctggcataaactgcagaagctacagccctggctattgattcataccaatgagtgagacagcagatcggtgataatttgaacagaaattatgtctttaaaaacaagtaagataactttccttagaaaaaggtctgcaaatctgccgtgaattgacttgaagtgagacaaaggttttcccaatctacaataaggcacaagatgttatgcagaaatttaagagaaytttaaagtgaaaaggctctcggtaaatccctggatcttgttttccaacatgtggaaagtaaacaaaatttttacaggaatataagttctttcatataggcattgctgagatctgtaatagcaaacacaatatttatttgcatgtgtctgtcagaaggtggttattataaaatggaacacaatggttttaataaggaaagc

SEQ ID NO: 500895 - DNA, 620 bp, Homo sapiens
tggaggttgcagtgacttgaggtcatgccacttcactccagcctgggtggtgggtgacagagtaagactctattaaaaaaaaaaaagaaaaaaaaaagccttcagcctcctaaacttgtataaacaggaagcatgctgaaacaatgaaataatacaccccgtgcaaacactggtcgagtcctctaaggcaggatcagagtcaataaaggaatggaagcactgctggggcaatcttcatgtcatcaatgctgtggatcacaggcatcactgtctcccattctgccttttctgagaggggagtttctatcacaaatatcgtttctgtttcatcattttcttcgggtgtgaagaggtaaataacctgttttttgcttctttggtcatggcacttcgaggaatggcatccaaatttgatgtagaggatggtattactatccaggaataccttttgtgtatgtgtgagttaaaaaattgaattccttttgtgttaaactactaaaatatttgacttaaaaaatcaaagcctagactacatgaaaatatcttcagtgataaagttccctttacttttttgacttcactraaatctgagtgttccacactcctagctcttctctcaa

SEQ ID NO: 500896 - DNA, 434 bp, Homo sapiens
aagctcaaggagaggaaaccccaagggctgaagaaggtgggagtcaggagtctcctgaagcaagtggcatttaaggagctctataaggaaagggtcagagttgtgataggtggctgtggagggagatgtgccacctggattggcatgtagagggatagaaagattataggcctttgcaatggcccagtaagaggtaatgaggggctggaactggaagaaaacacatttaagacacagtacagaggtggcagacaaggtgggacttggcaactacctgatgagatccaggagatgaggccaggaggcgggcagcaaagatgacgcaggtttctagccttaatargctaggaggagagtgatgccattagcaataagaactacaggagaaggagctgagtttgagggaactattaatttggttcagaatatgtgct

SEQ ID NO: 500897 - DNA, 624 bp, Homo sapiens
agccctgaaccactgttattgtttcctctgcccagagagacttccaaacactctgctcagcttctcattttctcaggtttgactttgaaactaggaacacctcagtggtgccagatgtttgtctcacctctgtggaattcccccttctccagaatcttgacccctaagttcttttctatctcggtagttctccaatgcttccaaacagatattttaaaaatatttttgaacagctttcctaactgttcttgatgggaggcttggtctggtttgcaatgtctttgggtgatttctatttattctgcctagctcagtgaacttgaaaaaggaagccattaacagtacccagggtatttctcaaaacttctcaaatgtaaaattctgccagtaataactttgagaacccatcggaacaaaacaagacattgtgacacataattcagcactgctcctggcagcgatgctgagatggaccattctaaagccttttctttcccttggctttctttatctctcccaaactatcaagcaaaaaaaaaaacaaaacatctacaggtacaaacctcttttacgctttcccagtagcctgttagscctctatttctaattattcccaatgttagg

SEQ ID NO: 500898 - DNA, 511 bp, Homo sapiens
cagcctgggcaacagagtgagactccatctcaaaaaaaaaaaaaaaaaaaaagaaaagaaagaaaagaaaataagtggggacccaaaagaaaataacaaatggtatctataggccaccgtggctggaaaagacctgaaggataagttcaatccattttatagatgaggaaaaggagctcaagacaggaaatgaatgtccaatagtcaccagtaagccagtggctgagccagccckgcaacccaggccttcaggctcccaggctggttcttttatgccaccaggaagccactgacgttctgtcagcatttgttcaaagcacacgtgtgtatgcacacacacacatgcatgcaggcaggtggcaggactatgttacacacctctggactcctctaagtacttagcaccaggctcaggaagtcccaggctctcaggcaacactgtctgaaggaaggtgactccctccaagtgtccaggtgtctccagaactccctcaggcctttgggttctggg

SEQ ID NO: 500899 - DNA, 479 bp, Homo sapiens
ccttgatgcagaaattacaatttaaatgtagaagttctatagtaaatatcttttttwaaaaaaaaaactttttttggtcagttccatttttctatattgtcatttctattttctttcttttttttttttttgagtcacagacttgctttgttgcccaggctggagtgcagtggcgagatctcagctcactgcaaactctgcctcctgggttcaagtgattctcctgtctcagcctcctgagtagctgggattacaggtgcccaccaccacacccagctaatttttgtatttttagtatagatgggttttcgctatgttggccaggctggtctcgaactcctgacctcaagtgatcccccccaccaccttggcctcccaaagtgctgggattacaggcgtgtgccaccacacccggcctggttttttattttcttaaacattactttttcacataatcccagacacaaaaggaatctgca

SEQ ID NO: 500900 - DNA, 389 bp, Homo sapiens
atattttatgccccttgaaatcagcctattacctgaragccatatcagtaaataaataacaaggacatatttaagaatcagaataaggaacttaggccaggattacaggaaattacatcacgttttgaaccaatattaattcatagtttcatttatttatatattctcataaaataaacctaaagtttaatattttcatatttttacattaaaaacataagactttctaaaaattgttggcagatcattttccacctgtgtaccctactttaaagaccactgattttaaaaataacattttggtctcagtgcaatattataaaattagattttataatataaaataaaatgatcttcattatattccttatttcggatcccctttaaac

SEQ ID NO: 500901 - DNA, 649 bp, Homo sapiens
ctggttgggggaagattgagatttgaacccaggcccataaaagtctaaagactgcacgtatcctgttaaagtacccaccttctcactaggccatgtggacaataagaaccggaaagatgaagaaacatgaaagtaatataaatatttttttccttattatacaaaggtcccaataacataataaaacttaatatcagactgtaagctcaccccatgaaaggatgaaattgtgctttacttttgattcctcattacttaacacaatatctggtatatcataggtgctttataaatgtttgtttaatatatgaatatgacattttatagttgttatatattaatgtggtttcttattattcaggtaaacaaatattcatttattcagcatgtatttagcatatgctatgtgccacataatagtttaccttgtaggattatagtttttaaggaggaaaaccaagttcctgctcttatagaacttaaattttagtgggcagataaaaaaaaactgtgtgcgtgcrtgtgtgtgtgtgtgcacgtgtccctgtgtgttatatccacaaatatatacatatatagagatagattggaagatagacatttaagttgaaggctgaataaataggagatggctatgtcaaatccagaa

SEQ ID NO: 500902 - DNA, 456 bp, Homo sapiens
tcctcccttgacccaacttttcttgtttgtacagacttgggaagaaccagggaaacccagagttgaaagagacccactctaytggaaatatatcccaatggcatttttaaaacgaagagctggggaattttaataaacaaacagcaaatgcaagcatgaataatgggcctgtatggacaggaagagagccagggcaggagacagcaaatgacaggccagaagccagatcccacgcccttctgttcttgtatggaacctcaagctaaacatggttgaaaagaactccaaagatttcgtgacatgtgaaaattacattaaatgcaaacttcagacttcagtgtctgtaataaagtttgattggcacacagccaccctcacttaggtatatacagtctgtggctgcttttgtgctgaacttagtgactgagcagactacatggctgcaaagcttaaaac

SEQ ID NO: 500903 - DNA, 595 bp, Homo sapiens
aagaaatgaatgaatgaatcgtttagtatctgtctctgtgtcatcccaagatgctagttctgctgactcaycttattcagtttgagccccctttaatactaattttgtttacagcttagattgccttaaaccatttatgtcaatgtgtttatattcatacatcaataagtgttgcacaagggttgttaaatggatgtgtaaccctatcttcttgtttttacctgtctcttaaagtcaacctggccactttaaaattagtaatgcaccttcattcctaaactgattatgaagctcaacttttgttccataaaattctagttttcttcctaacaacctgctataagtctttgactcttgagtctaacagttatcttcatattattattgttgttcatgttataatctctgaatcctacctattaagaaagtaggcttagaagtaacattatggaataagtcttgcctggtgcagtgattcatgtctataatcccagcactttgggaggccgaggcggtcttatcacaaggtcaagagattgagaccatcctggccaacatggtaaaaccccatctctattaaaaatacaaacattag

SEQ ID NO: 500904 - DNA, 176 bp, Homo sapiens
tttttcttgggtatcaaaagaggttctcagtgttgcttttgcccttcttcctttcctgggcttcttgtattcatctgaatggactataggcactttcctggggcgagggcrgcagggcaagagcagtatctttcagcaggaggaacctgggagactgtttatgttcttgaaatgga

SEQ ID NO: 500905 - DNA, 436 bp, Homo sapiens
gctgatgccactcttctttatttmtttctttttgctttgttttgtgtttttgagatggggtctcgctgtgtcacccaggcttcaatgcagtggcacgatcgtggctcactgcagcctgtacctcctggtctcaggcaatcctcccacctcagtttcctgaatagctgggactacaggcacacgccaccatgcctaagttttctattttttatagagacgaggtcccgcgatgttgcccaggctggtctcaaactcctgggctcaagcgatcctcccgccttggcctcccaaagtgctaagattacagacatgaaccactgtgcctggcctttgatgctacttttctaatacctttctcctgatcaaataattagttgtttcatcttagcccttactggtgtgtaacatttggaagtgcagatccacattggcacag

SEQ ID NO: 500906 - DNA, 436 bp, Homo sapiens
gctgatgccactcttctttatttatttctttttgctttgttttgtgtttttgagatggggtctcgctgtgtcacccaggcttcaatgcagtggcacgatcgtggctcactgcagcctgtacctcctggtctcaggcaatcctcccacctcagtttcctgaatagctgggactacaggcacacgccaccatgcctaagttttctattttttatagagacgaggtcccgcgatgttgcccaggctggtctcaaactcctgggctcaagcgatcctcccgccttggcctcccaaagtgctaagattacmgacatgaaccactgtgcctggcctttgatgctacttttctaatacctttctcctgatcaaataattagttgtttcatcttagcccttactggtgtgtaacatttggaagtgcagatccacattggcacag

SEQ ID NO: 500907 - DNA, 402 bp, Homo sapiens
tgtagctgactgtagcctcaaattcctggactcaagcgatcctaccacttcagcctcctgagtagctgggagaygctcaccactacgtccagctaattaattttttttttaacgtaaagataggatctcactctgttgcccacactggtcttgaactcctggcttcaagcaattctcctgccttggcctcccaaaatgctgggattacaggcatgagcaaccacatccagccaatgtgcacttttgtctgtttcatggaatgccactgtttctgatcctttcttacgattggaatagaaaagaatgcattcactaaaatcagtggtgcataccaaatatctgaggatgtattaatcaactctagcaaatacaccacatctgtcatgacagctgcgatcaggc

SEQ ID NO: 500908 - DNA, 538 bp, Homo sapiens
aaaattccaattcatttcaaatacctaaattctgatttctatcttttcaatttcgtgaaacaaaagtctctcttacttgaattctttctgtgtcaycgttctaaaattccttcctgataggaagctggagtgattgtagagctcacctctttgtttctcttagtgaacacagtgctatactgcccattatcctgattaatgaaaacatctgtttcaaatatttgttctcattttctggttgttcacgttgggagagaacatggacagaagtggaagttagtaaacaataatgtattacatagcttcgaacaactcaaaagaggtcattgaacgttcctaacataaataaatgataaatgttggagatgatggatatgctaattacccgaatctgatcactacacattgtacatatcaaagcatcactatgtactgcataaatatgtacaggtattatttatcaattacaaaaattaatttaaaaatttaatcataccatatatatttctttgctattttcaatccccacctcacccct

SEQ ID NO: 500909 - DNA, 538 bp, Homo sapiens
aaaattccaattcatttcaaatacctaaattctgatttctatcttttcaatttcgtgaaacaaaagtctctcttacttgaattctttctgtgtcatcrttctaaaattccttcctgataggaagctggagtgattgtagagctcacctctttgtttctcttagtgaacacagtgctatactgcccattatcctgattaatgaaaacatctgtttcaaatatttgttctcattttctggttgttcacgttgggagagaacatggacagaagtggaagttagtaaacaataatgtattacatagcttcgaacaactcaaaagaggtcattgaacgttcctaacataaataaatgataaatgttggagatgatggatatgctaattacccgaatctgatcactacacattgtacatatcaaagcatcactatgtactgcataaatatgtacaggtattatttatcaattacaaaaattaatttaaaaatttaatcataccatatatatttctttgctattttcaatccccacctcacccct

SEQ ID NO: 500910 - DNA, 538 bp, Homo sapiens
aaaattccaattcatttcaaatacctaaattctgatttctatcttttcaatttcgtgaaacaaaagtctctcttacttgaattctttctgtgtcatcgttctaaaattccttcctgataggaagctggagtgattgtagagctcacctctttgtttctcttagtgaacacagtgctatactgcccattatcctgattaatgaaaacatctgtttcaaatatttgttctcattttctggttgttcacgttgggagagaacatggacagaagtggaagttagtaaacaataaygtattacatagcttcgaacaactcaaaagaggtcattgaacgttcctaacataaataaatgataaatgttggagatgatggatatgctaattacccgaatctgatcactacacattgtacatatcaaagcatcactatgtactgcataaatatgtacaggtattatttatcaattacaaaaattaatttaaaaatttaatcataccatatatatttctttgctattttcaatccccacctcacccct

SEQ ID NO: 500911 - DNA, 649 bp, Homo sapiens
caaatcttgactctgccactagatcacctctcgcaccttagtttctcgtcaattaaatattggcataatcaaagccacgtcacatccatatgagggtcaaatgatacaatgtatgtgaaagccctggtactcaatgattaagaaatgtttattaaatgatttgagacagtttataatttaatamgtttttctttccaatgatattctaaagtcattgtgattctctgctatattgtcggttgagttgtttcataagcttctatgaccagggatcatgtctgtgtaattcttcgttctcagctctacagtatgcatagggactttcataaatgctttttgcttgccactgctcaataaacaaatttctgcttcctgctggtcctctggtccttgtttcccctttcactttcagttggcacgtaataattatacatatttatgggacacagggtaacatttggtacatgtgtacaatatgtattgatcaaatcagggtaattaacatatccatcactgcaaacattaataactttttgtgttgggaacattccaaatcctttcttctagctttttgaaaatatataataaattattgctaactatatttactctacagtgctatgaactagagtaaacactagaactcatt

SEQ ID NO: 500912 - DNA, 649 bp, Homo sapiens
caaatcttgactctgccactagatcacctctcgcaccttagtttctcgtcaattaaatattggcataatcaaagccacgtcacatccatatgagggtcaaatgatacaatgtatgtgaaagccctggtactcaatgattaagaaatgtttattaaatgatttgagacagtttataatttaatacgtttttctttccaatgatattctaaagtcattgtgattctctgctatattgtcggttgagttgtttcataagcttctatgaccagggatcatgtctgtgtaattcttcgttctcagctctacagtatgcatagggwctttcataaatgctttttgcttgccactgctcaataaacaaatttctgcttcctgctggtcctctggtccttgtttcccctttcactttcagttggcacgtaataattatacatatttatgggacacagggtaacatttggtacatgtgtacaatatgtattgatcaaatcagggtaattaacatatccatcactgcaaacattaataactttttgtgttgggaacattccaaatcctttcttctagctttttgaaaatatataataaattattgctaactatatttactctacagtgctatgaactagagtaaacactagaactcatt

SEQ ID NO: 500913 - DNA, 649 bp, Homo sapiens
caaatcttgactctgccactagatcacctctcgcaccttagtttctcgtcaattaaatattggcataatcaaagccacgtcacatccatatgagggtcaaatgatacaatgtatgtgaaagccctggtactcaatgattaagaaatgtttattaaatgatttgagacagtttataatttaatacgtttttctttccaatgatattctaaagtcattgtgattctctgctatattgtcggttgagttgtttcataagcttctatgaccagggatcatgtctgtgtaattcttcgttctcagctctacagtatgcatagggactttcataaatgctttttgcttgccactgctcaataaacaaatttctgcttcctgctggtcctctggtccttgtttcccctttyactttcagttggcacgtaataattatacatatttatgggacacagggtaacatttggtacatgtgtacaatatgtattgatcaaatcagggtaattaacatatccatcactgcaaacattaataactttttgtgttgggaacattccaaatcctttcttctagctttttgaaaatatataataaattattgctaactatatttactctacagtgctatgaactagagtaaacactagaactcatt

SEQ ID NO: 500914 - DNA, 649 bp, Homo sapiens
caaatcttgactctgccactagatcacctctcgcaccttagtttctcgtcaattaaatattggcataatcaaagccacgtcacatccatatgagggtcaaatgatacaatgtatgtgaaagccctggtactcaatgattaagaaatgtttattaaatgatttgagacagtttataatttaatacgtttttctttccaatgatattctaaagtcattgtgattctctgctatattgtcggttgagttgtttcataagcttctatgaccagggatcatgtctgtgtaattcttcgttctcagctctacagtatgcatagggactttcataaatgctttttgcttgccactgctcaataaacaaatttctgcttcctgctggtcctctggtccttgtttcccctttcactttcagttggcacgtaataattrtacatatttatgggacacagggtaacatttggtacatgtgtacaatatgtattgatcaaatcagggtaattaacatatccatcactgcaaacattaataactttttgtgttgggaacattccaaatcctttcttctagctttttgaaaatatataataaattattgctaactatatttactctacagtgctatgaactagagtaaacactagaactcatt

SEQ ID NO: 500915 - DNA, 610 bp, Homo sapiens
tttcggagacaaaaaaacaaaaactatcttctaagaggttggagtttatcaatttacagtttaaaataaagttaaaattcggaacacagctcattcatttaattaacacatactttggttgtttttcactatgagcctttcagtcctactactgttggtctttttaatccatatgcagacattactctaacatttttaaaagccaatttttcaaattagttgcccacattgaaagatcagaagatcttacatgataatccagctttttttttttcttttttttgacacggagtcttgctctgctgcccaggctggagtgcagtggcrtgatctcagctcactgcaacctctgcctcctaggttcaagcaattctcctgcctcagcctcctgactaactgggattataggcacccgccaccatgcccagctaattttcgtgtttttagtagagacagggtttcaccatgttggtcaggctggtttcgaacccctaacctcaggtgatccacccgccgtggcctcccaaagtgctgggattacaggcgtgaaatgtagggtcccgccctacggggcttgacgggtgttctccccgtgtgtggagacgagaga

SEQ ID NO: 500916 - DNA, 564 bp, Homo sapiens
agcacttgggggccagggggagaatgaggcaaggtgggagtcagccctgttcccagccatactcgtccacactgaaaccagagcctggttctgcttacttgggctgtaactgggtgctgcagactcccagggaacacagcccagccttgtggtgtggtctcctccccgacaggtggtacatggctggcagagtggctaccagcacaagcggatgccactgctggatgtcaagacgtgacctgacccccttgccccacccttcagagcctggggtcctggactgcctggggccctgccatctgcttcccctgctgtcacctggctccccctgctgggtgctgggtctccatttctccctccacccaccctcagcagcatctgcttcccatgccctcaccatcacctcactgcccccaggccttctgccctttgtgggtgttgagctcaccgcccacccacaggcactcatgggaagaggctttccttctgggatggsggcggctggtagacacctttgctttctctagccctcctgggctgggcttgggcacaaatccccaggca

SEQ ID NO: 500917 - DNA, 627 bp, Homo sapiens
gtgagaatccagacatttcaccccaacacccctaatataggtgatgcatttactcacgtggcacagcactccgtctgtaggtatctctgtcagcttcccctcttgtgagtctcgcaggtcgctcaccctccagacctatgtaaatcaaaccacactgtgaacacagggcaatgtgagaactctgtcccttaaagccaaaaaaactggcattgctctcctgttgtcactctcagcaaccacttgggtaagatgggttaawggggacaggaactccttaaacctacaatgtcagctagaaataattatttctccatagaaacttattgacaatcttggctgcaaatctgaaaaaaaaaaaaaaggcttccattttgtttcaacataaaactattttccaattattggaccaatctaggtatctagctatttctatgaacatctgaatagctaaacttttgaacctgacccacgttaagtggaaaacttagtatatgcaaacagaaaaggaagcatcctaagctgaaagtcccaactccaatattaagtacataatctaggggttaccaagaatcgttgagttcctcttgggcttcttcacatacctgttaggctgtgggatatatatta

SEQ ID NO: 500918 - DNA, 439 bp, Homo sapiens
tctgaaaacaggatttctcatgtgtcaccccaatactgcactgttatagtattctgctgtgaatactgtgactactaattcactatatctacatttgaaaattgaaacatcagtctgtttgctgttcattttgtgacaaacttaaaacacttgagctttttgaaggtcttggtacatraatttttatcatatacctaaaaacactcagatactactgctgagagattttgggccatggtagaggtgtttgtccaaaaatagaaaaaagtaattggttaagaaatatatacaagtaaacagaattatttctaggtaagttttattctactcaataatacaaaatgcactttgcatggcattgttgtgagatgtccattataggccttcctacatttgattagaaaaagttatcataattctagatagtataggaatcagc

SEQ ID NO: 500919 - DNA, 611 bp, Homo sapiens
tttgggaaggaattcactaagtagaccctttatcatattatcatcaaggaatactacttatttcttggttactactatctctttgatacatttaaatacattattaagcttttattatgacccgtgagtcctatttaatttttaagcaatgcatttgtagaattcctctggttttactagagttaaccttttattttctgctaatgacttaaaactcctcttagaaatgtatttaaatgctcacgtgtacaaaagggaaattgactaataactgattaagttatgcacaatattttatgygtaagctttatttttataaatcgtgtttatggtcttcctaaataagcagttaaggaaatacatataaatgttagtaaactatcaattatactgatactatacatgaattagacaaagttaaaaaatttagaaaatttttcaacctggcatataacatgtgtccaccttgaatataacaaatccagagacacaagaaaaagccaaatacagagaatatgattctttggttatgagcatgaagcggtgctgcagtgtttggggaaaagggccacaatcatgtctgctggggattcaccctgtaattatatcac

SEQ ID NO: 500920 - DNA, 583 bp, Homo sapiens
aagtgtcagggcaaaggcaactttaagaactgctgttttcgatgagctaagtgagaataaaacaaaaattcccctatttatgtatcaatagctatgcactgacagtttttacaagtgtaattatacacaagcaaatggaggtaaaaaatcaaaatatcctccagaaccagatattcttgaatttaaagacttatttgactactctaaatctctgaaaacacttctagtattcaaaaatgtggcataacttatgtgggccaactaaactagaaaatggtgagttttaatatttatatgatgacaagatcaccatgacagaatagaatgttcccaaaacagcttcgagcaataatagatccagcgcaaaaaaaaaaaaaaaaaaaaaaaggctggaggatttagctctgccagttattgactatgtgacctggkgcaattactattattacctatttgacattttcaaatcacatgacttacttcacaagtaaaaacaccaatgtccctaccgaggtttgttttcaaagaatcaggaaacccaactccaaaaagggctattcatactgttttcatgaatggggct

SEQ ID NO: 500921 - DNA, 524 bp, Homo sapiens
tcttctgtgctctgagcatcaagatggtgggctataaaccatagtctagacgaactccatctgtcctgtgcttcttatctccttatcaaactagggttttgattaaatagcttcccaaatttcatttcttattgattccccacatggctttaatttattgctaaagtgactctttggaaatcccatatttcctctttcaaggacacagaggagggcagcatagaatctttcctttttaaataaggttgctcctcttcttcattgttccctgtgccccttaaatgacctccatccatctatttttagctgctattgattctcacttaayggtcttgttcctcctagatgctggaaaacactttgactctgtagaaactaagtgtatgcctgcttcctctgattgaatgtgtaagcaaactataggtatgtgcagtataaatactccatcctacccctggaccctgggttggtctcactagaaaagtggtgtgggagtgtaagtaggtaagcttcctgtttaaaag

SEQ ID NO: 500922 - DNA, 514 bp, Homo sapiens
gcatggttaaagctccctcgccrttgcctcctagttgcagaaaaatatggcagattcttggttgctgagaaatgctgaagaaatgaaaagacaagatcaagagtttagatgaatttagtgcaaaacgtgaagatgatcaaagagacaagtgggtggctaatgtgatgccaggctacttggcatcggtgtactttttctagacaccaggtcctcgacacaccttaaggtcaggaggggaagccccagtgttctcggacaggtgaggtgggagctgcaagtgtcctgaggagaggggcgggcaggacactcacgtctgtgcacgtgattcaggtcaggacagccccccacccgccctgtgagcacctctgtgctggtccaagtgcaaagaggcccacccctgggggacgtgcaatcgcccttggcttctgccactgcacggcgacccccctgccgagtttcactggccactgaaggcaaagagagtagcagagtgcccagcgtcaccggcaggata

SEQ ID NO: 500923 - DNA, 514 bp, Homo sapiens
gcatggttaaagctccctcgccattgcctcctagttgcagaaaaatatggcagattcttggttgctgagaaatgctgaagaaatgaaaagacaagatcaagagtttagatgaatttagtgcaaaacgtgaagatgatcaaagagacaagtgggtggctaatgtgatgccaggctacttggcatcggtgtactttttctagacaccaggtcctcgacacaccttaaggtcaggaggggaagccccagtgttctcggacaggtgaggtgggagctgcaagtgtcctgaggagaggggcgggcaggacactcacgtctgtgcacgtgattcaggtcaggacagccccccacccgccctgtgarcacctctgtgctggtccaagtgcaaagaggcccacccctgggggacgtgcaatcgcccttggcttctgccactgcacggcgacccccctgccgagtttcactggccactgaaggcaaagagagtagcagagtgcccagcgtcaccggcaggata

SEQ ID NO: 500924 - DNA, 462 bp, Homo sapiens
gcagctttaaaaatagggagccgattctgtttccaagttcagaaggagcagcagaaaatgaagtatctcgaatggcagatcacatgccatgacttttaaagcccagagcactctccaggagtacaggctgtcattggtgtggcccagcaccggcagcctctgtcccgactatttatgggaaaaaatatttttttgtaaatatgatcttgacaaaacattggctggcaggaaaatagctttcttttcaggggagcaaaatgagagtgtatattttaattcaagatcaaagacttaacataaaacaaaccctgacaaatgaaaactgggcaatgggattttcctcctgtttgttggtagaatattttgagcattcaaacacrtttctagacagcaagttgtgatgctagataattaggtagtgtgggtgtggagaactgcacgctcaaaaatggtattaacaga

SEQ ID NO: 500925 - DNA, 462 bp, Homo sapiens
gcagctttaaaaatagggagccgattctgtttccaagttcagaaggagcagcagaaaatgaagtatctcgaatggcagatcacatgccatgacttttaaagcccagagcactctccaggagtacaggctgtcattggtgtggcccagcaccggcagcctctgtcccgactatttatgggaaaaaatatttttttgtaaatatgatcttgacaaaacattggctggcaggaaaatagctttcttttcaggggagcaaaatgagagtgtatattttaattcaagatcaaagacttaacataaaacaaaccctgacaaatgaaaactgggcaatgggattttcctcctgtttgttggtagaatattttgagcattcaaacacgtttctagacagcaagttktgatgctagataattaggtagtgtgggtgtggagaactgcacgctcaaaaatggtattaacaga

SEQ ID NO: 500926 - DNA, 614 bp, Homo sapiens
tgccctggcggtattagacgtgtaattaatcagaagacaatttaatttctccttgtcagtgggyggtgggaactggattacctgaacttagtgagctttgttatttttatattaaaagaaaagaaaatgttaaaaggtttctataattgtcacaaattcctggggtgatataaaattaaactatcaactaaaaagccaggttcagcatcctagagaaataagagcaaatttgtgtctcagtgtattggagattaaagaaaaagttaacttattaggtcagctaaatattactttttacattagaaaatatttattgaaaaatatttttccccttgagtattggctaaggagtatgcaatgtacatcaaaagtgttttggaatctagaagatgacatggacatcatctcttctttaaactggactaaccctttctggcaagataactttcaacaataatacatccttcctgatagaagattaataattacattgattttctttattattataaagtaatgctccaataattcacattatatcaagtgtccatgagaacttgtgaatgaatgtttatattatcatttgttaagcagaaataaatttgtaccactat

SEQ ID NO: 500927 - DNA, 614 bp, Homo sapiens
tgccctggcggtattagacgtgtaattaatcagaagacaatttaatttctccttgtcagtgggcggtgggaactggattacctgaacttagtgagctttgttatttttatattaaaagaaaagaaaatgttaaaaggtttctataattgtcacaaattcctggggtgatataaaattaaactatcaactaaaaagccaggttcagcatcctagagaaataagagcaaatttgtgtctcagtgtattggagattaaagaaaaarttaacttattaggtcagctaaatattactttttacattagaaaatatttattgaaaaatatttttccccttgagtattggctaaggagtatgcaatgtacatcaaaagtgttttggaatctagaagatgacatggacatcatctcttctttaaactggactaaccctttctggcaagataactttcaacaataatacatccttcctgatagaagattaataattacattgattttctttattattataaagtaatgctccaataattcacattatatcaagtgtccatgagaacttgtgaatgaatgtttatattatcatttgttaagcagaaataaatttgtaccactat

SEQ ID NO: 500928 - DNA, 627 bp, Homo sapiens
aaaaaatcaggattaagaaataacaggcaagctagaaaactagacyaacaacaagataacatttaactacataaacaaaaaatatggcattgaattacaaaacaaccagataagtataggatggtatgaacttgccttgacaggcccaaaaaaaaaaaaaaaaaaaaaaaattgtggtcctctcagctggatcattagcttactatgaggcaaagtataaagtgctgctcaacaaacattatttgtaatattatcttgaacttgcatcaacccattcaaacacttaccatgcacattcactgtatgttctgttacatcaaccattctaaaggaggcacatataaccaacatgcagcactaccttcaagatcattacaatttagggaagaagatgtgactgtgtgaacagtagttgtttatttaaatattgaaaaataagaaagcttataaaattcttagtgaattcctagaatttgccagagttttaatgattaatgtactctaagagaaatacacatatgcaaaatttaactagccatgatgaatgcataagcatgttatgaacaaaatgatcatttcagggagatacaaacaatgcatcatataagaagtaaaaagcaagttgaa

SEQ ID NO: 500929 - DNA, 646 bp, Homo sapiens
acaagcaaatgagaagtgaggaagtggaaagagtaagtgtagactcctctttctagaaatttggtgaagaagggaaggttagttttccagccctagctgaggaggctccayggaaaagagaaggaattttttttttttttttgacaggacagacttcagcatgtttataggctcttaggaaagcccagcagacaggaacaacggaatgaagtcctcagaggagataagagtaatgggatcaatagcactggcagagttccccaagtctctacagttaataggtggcaaagttacttatgacgggtagggaagagacatgattcgtcaccgcactttaaagatagaaaaacgaagcccacagtgaaagagaattgcctcaaaccatacagcctgggacttaatagaagagatccaccccccaccactggccacgtgactttctatcccagaagactccctctgtatcaatgtagagccttggccacccctgcagaaacctaggaaatggtggatgtctgagtcccagagaggagaatgtagggagggtcatagggcacattctgggaaggggtggctctccggagagggactggggaggagaggacagagctgggaggaaagcaaaggcatctccacccaggcagca

SEQ ID NO: 500930 - DNA, 507 bp, Homo sapiens
atgggctgagatggagaccacagaacttggtccttccccctggaagtcttctaactcccagctcccctgtgaggcacagagagcagggctgagagaaggggaagtttgtgatggaggcgagtagaggaagaggcaaggtcacagatctataacgaggaaaggacaatgagggaggctgtaggcagaacagatggagccaaggtgtctggaatgtatcctgagtcaaaactctctggctttcacagtgtgtccaggacccttagacaagatgaccctccccacaccagggtcccctcacacactgcagccatgcaacyctccaagcttcacctgccttcaaaagctgagccttggtttccccacctgtaacagcagtgtaggaatacccctcggtgtaggatggttatgagaacataatgagctggcttttggaaagcgtccagcactgatattttatcaaaaaggcaagtaggcagcaccaggccagtgaagcgtgggggtggaaag

SEQ ID NO: 500931 - DNA, 650 bp, Homo sapiens
cccacttcatagctgagactctgagccttccttttcatcctgcttctctgatctgacttttcttagaggggaatgagccccagggcccctagggaccagagagcccatatcacctttgtctaccaccctagggatctgctcctgggcccccagccttaaaaaagctaaatataccaaattacacaacccagagcctctccacaccagggctttggctctctgtcaacagctcaaatgattaaacatctcatgaaattacatttcatcatttttatggagctgtcatctaagaatatatctaaattctcttgaacctatttatatttttggcctttctaacttcctgtgggtaatagattctagaagtactgcttgttgtgtagagtacttcctgattttatttgtcctgaaaatgcccctgtcaggcccctggggaaggaactacctcctcttgatrgtttaggtttggtaaggatatttgtatttaactagttctcaccttttatgatttcataaactctgattgtattgcctctgggcccaagcctttgtctctccagacggagtgttcttaattcttttaggctttcctcatatagactcgcctctgtcccctgattgttttagctgcccttgtctggactgtttgc

SEQ ID NO: 500932 - DNA, 544 bp, Homo sapiens
ctactccaggtttccagttcaacccctcgctttacagagcagaaagtgaaggcctggagaggctgccagacccatctgaggycatagggctggctggcgtggagctgggactgtaatcccagcgaactgctgtccagtcacttctcagcacacacgcaccctcagcttccccttaaaacacagccgtgctgggagtccaccttttcccaacacaatgaagatcatagcagaacggttctagctgttggagtccttccttgcactaaaaaaatcagcctccatataagtatttttcagcttgtagctgttctgccacattctgctccgtgagaacgtttcaaatgcttgagcaggaatggacatgatgctatcgagcctggcatctgaactgtttctacaaacaacttacaagtcattttaaaaactgcatgcgtattcactgcttcatgtgataccacagccccgtaagctcgatggcataagtgttactgagtgcaggttttctggtatcaaacaaaccccaccctctttctactgaagtgtt

SEQ ID NO: 500933 - DNA, 544 bp, Homo sapiens
ctactccaggtttccagttcaacccctcgctttacagagcagaaagtgaaggcctggagaggctgccagacccatctgaggccatagggctggctggcgtggagctgggactgtaatcccagcgaactgctgtccagtcacttctcagcacacacgcaccctcagcttccccttaaaacacagccgtgctgggagtccaccttttcccaacacaatgaagatcatagcagaacggttctagctgttggagtccttccttgcactaaaaaaatcagcctccatataagtatttttcagcttgtagctgttctgccacattctgctccgtgagaacgtttcaaatgcttgagcaggaatggacatgatgctatcgagcctggcatctgaactgtttctacaaacaacttacaagtcattttaaaaactgcatgcgtattcactgcttcatgtgataccacagccccgtaagctcgatggcwtaagtgttactgagtgcaggttttctggtatcaaacaaaccccaccctctttctactgaagtgtt

SEQ ID NO: 500934 - DNA, 378 bp, Homo sapiens
attaaagttggacacaaggccaaactagaattcaccatcaaaaagcagaacgtgttaggaggtatcaactgtgatacaagagacacmctaccacagtgcattcatgtgcatgagggatttacatattaagctgaggcagacaaatagctttgcctgctgtctggaagtggaaagtgacaaatggtagggtgaggtgaaaatggaagtagcagacacatgcatcattatcgtgtcccagtaaaagcacacgggccgggtttgtcagatgaacagtcacttgaacaaaggtcaccactttataaagtgtcaaaagactttcaaacaaattgattaacatatttgtcatgagaaataaaattatctattttttttgggggg

SEQ ID NO: 500935 - DNA, 544 bp, Homo sapiens
aagggatgcatagttcccctgtgactttgagccttctctctaaataataaatctgactttattaaattaaagcacattttcacctcctgacctggctttcattagaaaggcttcccataggttttacagaaaatgtcccagctagagccatttagacaatagtgccccatactccagtggtttttctcttacaccttagcttctcctctattatcagggatggggatttttattccatctctctataaagaaaaagtctgcaagccctcagtcttgggagtgatcagatctttctggcatactgatatgtatcccgattgagtgtttagggtacatttttagaacagttcttcttttgttgacaaagagaaattgagactgaagcaatgacataaactatcaggaccaaaggaggaacattgtatgaatttttttgacttgtcatttctttgtggctggatatatttgatctgggaggaaatatgcatggttggrtactatattagggttataaattatgtaattaattttacagagtgagatt

SEQ ID NO: 500936 - DNA, 454 bp, Homo sapiens
tctctcttctcagaatcattctgcacaggagtcacagaataattctttaatcaatagctttttaatcaagttatcccttgtttgaacacttccagtaacttgcaaacaactaaaggacaaggttcaaacttgaacattggaactgtttgtcaacacagtgaactatatatgttgtgaggtaaggagagctctggcagaggaagtggtcaggaagatctgttgtaaataagattttcacgagagaaggttagaccagaggtcctcgagggttccttccaactttaagaccacgtgactcagtcatctcccttcaaagtcgcatctgctcttccaggttcasaaattctccccaaagccgatgattctcaaatcttgacctccagcactgactgtcctgcaaaatcccagttccatcttccagccatgtgctggacatttccaccatggtgtgcca

SEQ ID NO: 500937 - DNA, 590 bp, Homo sapiens
tgttgtgcccatgctaaatagatcagctcaattaatgtagtatcccctgggatcaragccacaggtgtcatctctattcagagaagtgagctgtgctcagagaaaaactgtgctatagccacaggaggttgctctgtggtggtcatccagctcacaaattaatgtcattggttacagaatctgggtcaagatccccaattcttgagggtgggagagagaatatctaaatttcttttaaaaatgtatccatggactccagtgaatgagtttctacccagcctagaggacaacccagatggctgagttccaatttgccctaagatttaaatatgctgtaggaaatgaaaaatgagagtctctgagaaaatacagagaatgcaaggtccattctagaagagcagcaaggccttaaaaggtctaattctttaatgcctagaatagatgtctcagaagtggggctggctgggaatgactcgtgctgtcccatataagacagtaagaatctgctctatgcccctatgggacactaacccagattccgccatctgactttttctgacctctgtctgattaccaagccagagctggtc

SEQ ID NO: 500938 - DNA, 558 bp, Homo sapiens
tttacaggtctatctctattctctgggagcttaccacagttttgtccttaatgaatttgctcaaatacttttgttagcagtgagactctgcattcactggaatagaattttccctggaagctcttgaattctatggcttctacttatctataagcatttctccactgccttgactttaatctatgcagcatggctgtctctcccaacactatcagatcactgtcctggcacaagtttactgttctgtatttgccgtaaaatatgtctactgataatgaatatttcaagattaataattttgcttgctttcctaaaaatgttaagagctttttgaggaatcatttggctaacccaagtctgttagtaaacattgctcaaagaaatttgtgctgaggtctctttttcattctgtawgttttgctctacaagcaaaggcattccaatgtctttgaagctatgggtgtttctcgtagagtttcagtgataaaggtagaatccctccctctaaaactattagtaaagtgcttactcagtatttcattccttcatttcttctta

SEQ ID NO: 500939 - DNA, 510 bp, Homo sapiens
tggagggatattagacagctcacaggatcatggagaggacagagaacctgagcttctagcatcaccttctccagcagaaataaactgaggcatgggtaccaatacrggatggtgatctagaaagatttccaacttgcttctctccctttcttcccatatgactttcatttcaaactttccctgtggtttcacctcttgaaacaccatgtctcagcttggatgagccacctgaaagacaatcagtgagtgtgtagagtaggcatgaggatctttccaaatgggctcaaattttatcactcaggattatgctgctcccctgctcaaaatctactaagagtttcatgacttcaagataaaagtgaaacccactgcatggctcccagcactgttaatgagctggctataacctacatataacagacacatccacaccattccttgcctatgtggaattctgcattccagagctcgcctacacatccaacagatgtagctaagcagtgggtaagg

SEQ ID NO: 500940 - DNA, 617 bp, Homo sapiens
catttaaagaatatgtggtgatgatctcctcttcccattcgacacatgttcagtagttatcaataatactagttactaagatatgttttagtaattattgtattaataaagtatgaatactgttaacagtttagggttcctgtttaattagaaccaaaaaatttctttgtttaaagccctctgtttagccaagaaatcaacttgagttattagcaataaactctgacacctcagggttggaacctgccaaatttttctactttatctagtcagatgctttgcttagtaggcttgctttgtgtcttatatttctgtctgggtattaatataagtgccattagaatacttagacttgctatatagaacctgctgattttaactataatctttagctgataaacttttcattttcattttttaaatgaaacaggaatatccaaccataagatctgcaactaaatttttattattacacmtttttcttggaagaaaatcagcatctgaaatatataatgtatgacttcaagtggagcactgtaatccacaagcagactcagatttgggcacttcaggtgagtcacatatggaacacagcattctttgcaaaaattaatctt

SEQ ID NO: 500941 - DNA, 631 bp, Homo sapiens
aaaaacagctgccacatacctgctcagactcctcatcactgatgttggtccggcccagcatggtggccttcactgtggacaggattttgagctgggtgcttatggttgggattcgctcacatacctaaagagaaagtttaatttggtatgtttctctgtttgccttgcccacaagctccttgaaggcaagacttacctacctctgtattcccagtggctggcacagaaaaggcactcgataaataagcagcagaattccacytgttttttcccctagggtcagtacaatccatttctccagaaatggaagcattcatttgattaggaagtaacctttcctgaatctgtctttcccagtacatttgtttttttccctttctgctatttctgtccccggtgaagtgcctctttctcccttacctagtttttctctcctgcttttctccctctcataccctcccctccaacacacacacacacgcacacacacacacacacacacacacacacgcagcctctttccccgagtacctgtaagaggttggttctaatccgtttatctgtgcactgcttggcaacctccttggccaaccgagtcacctcatctgaggccttggcgatgtccttggca

SEQ ID NO: 500942 - DNA, 513 bp, Homo sapiens
agtgtacaaagacagataggttgacagacacacgaacagatattcctccccagcccagtacacacatggttcaagtagcttctgacttcacacaactcaaagtcagcaaactcctgatcttgcacacttcaggagatagacctcaggacttctggccacaaatggcagagtggggcaagtaatgtgggccaatgctgtctgcttttaagtttgtttgtttttttaaataattcatgtatattttttgttctrcatagtgtattttggttcattgtaatgaaatttaaatttcctttaaaatcttcactgtcaccctcccccactccccatgcacagtggggctctgccacatgcagttggagagataccattataaataattctacaggtcaggtccaacaccagcaaagtctcccttccttcttagaacctgggctcacagctaacagttcagcaaaatacagagttaaaaaccaatgtgaatttcccagcctgaaaaaaatccaagatcag

SEQ ID NO: 500943 - DNA, 616 bp, Homo sapiens
ctgggaagaatctaagatgcgttgaaggctgggaaacactgttccttagctgtgtgtgcgatgacacaattttgtactcaaccaacttaaaaacttaacatcttttactgacattaaatatgggaaagtaaatcagattattgccttgataagttatttacaaagtcaaggtatttctaatactgttagttggaataagtgtctagaaataatcactatttctgtttctggaatttgtgtctgcaacatactgcctagctagcttcttcctacaccatgtaaaaatatattcacrgtacttgcggggggtagtggggaaggtatctaaagatcttaaattatagttagggaaaaattttttaaaagcatgtatcttgttacttaaaaaaaagtcaaataaaggaaagaaccaacacaagatttcaaccacctcggttctaccattatcaactaagaacacaccaaatctccttactccaagctgtgcagattattttaccacaatgcactacctcatcactcatcacatccacacttaccaaagccagctcctctgctccagccgctccccatcacagcaagccactaccacacacaccagtactacacacacaca

SEQ ID NO: 500944 - DNA, 616 bp, Homo sapiens
ctgggaagaatctaagatgcgttgaaggctgggaaacactgttccttagctgtgtgtgcgatgacacaattttgtactcaaccaacttaaaaacttaacatcttttactgacattaaatatgggaaagtaaatcagattattgccttgataagttatttacaaagtcaaggtatttctaatactgttagttggaataagtgtctagaaataatcactatttctgtttctggaatttgtgtctgcaacatactgcctagctagcttcttcctacaccatgtaaaaatatattcacagtacttgcggggggtagtrgggaaggtatctaaagatcttaaattatagttagggaaaaattttttaaaagcatgtatcttgttacttaaaaaaaagtcaaataaaggaaagaaccaacacaagatttcaaccacctcggttctaccattatcaactaagaacacaccaaatctccttactccaagctgtgcagattattttaccacaatgcactacctcatcactcatcacatccacacttaccaaagccagctcctctgctccagccgctccccatcacagcaagccactaccacacacaccagtactacacacacaca

SEQ ID NO: 500945 - DNA, 508 bp, Homo sapiens
tattttatttaattttgcttttgcatagttgacaactttcacttccctgttatgacttctttatgcatctttttttgttcttttgttttattctttttctcacgtttagaaggtaagctttctcttgccctctagtttctttttcgcttaaaaagagaaaagcatgtctgtgaggtttttttgtgctgtgtgccgtgccttattctgtgtataacactgtgcttgaatgtgcgtcagaatgtgatttaatacgggactctaggcagtgctggggagactgactgtggctcatattgagtgatttctttgggaaaagctaaaggaaagacattactgtgggctatcaggctgcctatatttrgtgggtgccttcatttctttgggtaggctcctgggatcttttttggcctggtctttcccattgacttcatttgaggagcaggattccccaggtagctgggagacccctgagttacctgtggaccctgctgttgggaaaggagacttc

SEQ ID NO: 500946 - DNA, 533 bp, Homo sapiens
gaatgtgtgcttgaaaaacatggaaatattttacctgtttggagatgactcctcactttacactctttctcctcccttcttttcttatgcctttccctttcctctgccctaaatgaagttgtccaatttgggaagtttttttttccttgtttcaatccataaaacatactgccgtttgctgacttttgggtttcattttgcattcctgtataaataattaattaaaccatgtctccaatgtataagaacttcaatgaaatcaacaaattgatcttgcttcaatataaaggtagaggcaggttctcatatatctattttcaggtgggtggcttagattccctttcactttagcgsaatactcctaatactgtctaatgtgttcgaactctagagtggggagacaaacaaaggaacttgatttatcttaaggtaggttaatttctgtaagaatgaatcattataaattagaaatggattgaaataaaatgaaaactgggtgctaatttaaacataggctcatgttgcatgagaca

SEQ ID NO: 500947 - DNA, 533 bp, Homo sapiens
gaatgtgtgcttgaaaaacatggaaatattttacctgtttggagatgactcctcactttacactctttctcctcccttcttttcttatgcctttccctttcctctgccctaaatgaagttgtccaatttgggaagtttttttttccttgtttcaatccataaaacatactgccgtttgctgacttttgggtttcattttgcattcctgtataaataattaattaaaccatgtctccaatgtataagaacttcaatgaaatcaacaaattgatcttgcttcaatataaaggtagaggcaggttctcatatatctattttcaggtgggtggcttagattccctttcactttagcggaatactcctaatactgtctaatgtgttcgaactctagagtggggagacaaacaaaggaacttgatttrtcttaaggtaggttaatttctgtaagaatgaatcattataaattagaaatggattgaaataaaatgaaaactgggtgctaatttaaacataggctcatgttgcatgagaca

SEQ ID NO: 500948 - DNA, 639 bp, Homo sapiens
tcttttctgctcttgtgaaagtatatcatttaatagccatagcctgttttcagtgttgatgctttttgccaaaaaaaaccttgaatgtagatttaatatatcttatatgaacacaaataataaccaaaatgctttaaaattatgtatcttattacaaaaaattgatgcataagaaattgtccctgcttctcagaaaaaatagcttacataaatattagtcaacacttatgtctgtataacaaatagttgggatgtaaaagttttacatatttaatcaatattaacctacgttcatttgactacatggccaatatatatatttttaatgtaatctccccacgacatttccaaaattttaaaacactaacaagtttatgaaccacatttttgtgttttttaccaaattaattttattttcttctttttataaagrgttagtgattgttacatgtgaaatcaccatagtatttttttgcatttttgtttcattttacttttctctttattcaactacttagtttgacaaattctgaacatatgaacaagtaacagaatagtacagtaaacatctacctacgtagattcatcagtaacagtttttcacatttaatttctgtctgtatctctctgtctccatct

SEQ ID NO: 500949 - DNA, 633 bp, Homo sapiens
cttaatgctaaattatacatatgatatattcatatattaatgtaatatgcaaatgtgcatatctgtacacgtgaatatttcaaattaatttcatataaaattacctcttgatttgtaattacagtaaagacaaatcaattaattaaggtatatttttaatacattgtttcatttctttgtttctcttccaaactctaccttgcctcactttatgtttattcttatttattaaaaaaaatttgcaactgtgtgaacatattttctcaagatattttgatttttcactattaaaatttctcagttttgaaggaaagaaaaacaaactrcttatttaagaagatacattttataaatatatattccaatatacataaaataaatatatatatattttttctcccaaactcattatatctttctacatttagaggtttctgtatctcatacttgtgataccaattttatgcagactaactttttactaattattttcttaattttaattttatttcttctcacctcctctctgtgactgcatttctaaatcatcatcatcaccaccaccaacactactatcacctacaccatcatcattgtcatcaacaataacagtttacatttataatgtttaaa

SEQ ID NO: 500950 - DNA, 557 bp, Homo sapiens
tcattgtcatcaacaataacagtttacatttataatgtttaaacatgtctaggcagtttagtaagtggtctagcatgtgatagcttatttaataattcccacaaaacaagtggtagtcaatatatttatctgtagtatatagattagtgtaatgagtttaccaaaaatttgttcatctcctcagttaatagatatttagattgtttcctgtttgaggatgttctatatgatgctaccataaatatttacatacaggtcttgagtgttcattttctggggtaaacactagagaaaggtatagctagattttttagagtttatctaattatatagtaaattgccagggtgttttccaaatgatctgttttacattccctcaagaaatttattaggatgctataagttcaaattcttgtttgtaattgatatcataattgatattgtcrgtcttctcaatttggccattccagtgagcataaagtggcatgtcataggttttaaattttaactcagtgaatgactaaggtgttgaatgtcttttaatgcgtgtttttttg

SEQ ID NO: 500951 - DNA, 409 bp, Homo sapiens
acctactaccacagtttattcaccaggacctgagccagtgcttctaagtcctaactggctgaatttgcttatgcctagagggaccagaacctcagtcaatgacacatgttcacagccttgtggctggagtccccaacttgcagtgaagtaagattgtccacaratatatttcacattgttttgaaatttcacctaagctagggtgtctcaatttcggcattactgacacattgggctggggaattctttgttgtgaggggctgccctgacccttgtagaatgtttaacagaataactggcctctgcccagtagatgccagtggcactcccagttcaaccaattctgccgacaaagtttccccaaaagacaatgcccctccataaaagaaaacacaagcacatttgtatt

SEQ ID NO: 500952 - DNA, 409 bp, Homo sapiens
acctactaccacagtttattcaccaggacctgagccagtgcttctaagtcctaactggctgaatttgcttatgcctagagggaccagaacctcagtcaatgacacatgttcacagccttgtggctggagtccccaacttgcagtgaagtaagattgtccacagatrtatttcacattgttttgaaatttcacctaagctagggtgtctcaatttcggcattactgacacattgggctggggaattctttgttgtgaggggctgccctgacccttgtagaatgtttaacagaataactggcctctgcccagtagatgccagtggcactcccagttcaaccaattctgccgacaaagtttccccaaaagacaatgcccctccataaaagaaaacacaagcacatttgtatt

SEQ ID NO: 500953 - DNA, 545 bp, Homo sapiens
tcttttcatttctatatgttttatttggttctttttttcttttagtttcttttcttgtgtgcttatttctttcatttccttaactcaccaaagcctaatatatttataatattttaaacctgttctgtcgtctcgagttgcgggggagtgaatcattctgcctattttatctactgactcttattcataaaggatcttttcctttagtgttttatacatctgtattataaattcttcagggagatttatttttccctgtgggaattccacgtggcctaaggtgtggatttgttcttccagagcaggtttgcatttgcttctgctgggttccccaggtataccgccagccagaaatgattgctgtggagtggcaaactgaaaagagaagcctgggggatgcaggtgcctgttgaagagcactctcccaaaagaacggcactctgtgmcctttctcccaactgtgaccgtaaatgactaagagacctcgtgcttcctacaaatgaggccagctcttttgacatccttagactttgagtcactagcag

SEQ ID NO: 500954 - DNA, 618 bp, Homo sapiens
actggtatagtaatacatactatgtttttctcctatacatacatacctaggatcaagtttagtttgtaaataggaacagtaagagattaacaactagtaatgaagtgaactccaacaccatatcgtagtaagttatgtaaacgtgatgtctctcaaaatatcttaccatactgtactcacctgactgtggaaagcaaaaccatgaatggggtggagggactactgtattaggatttgaacatatgatttttggcgagacacaaacattcagactgtagaagtcccaaccccctctcaaatcctatattaaaactaccaatttctaaacatgacatgaacttttgtgagtcaggatatttgaacatactgtttcctgccttctttaattgacaggacagtaaaatcttagtcatctttcaaaactgagttcatatacgacctcttgataaagccttcctaaatcccttcatacagagctaactgcaggtcctctgacatatacctacctatcatactgtcctgtaatactttacctaaaccctccactgtattgcttgctccttaagaacaaatactatgccactaygtcatctttacttttgtataaccaacatctac

SEQ ID NO: 500955 - DNA, 603 bp, Homo sapiens
tttttacttctaattaagagtctacctatacagagtaaaacaataaggcaagtgctcagatcatttagagagggggaaaaaacttcttcctgaaatggttatatagttagaacaagagtggttctgttgacttccattattcattcgctttgcttcacgccaaaacatctggctaaraagtgaaaaaaacacccaaatggcattgtatagaaaaaacacctagatgattgattgcatttttcactttaaagtcaatgttttgatattatagggacatgggctttgttcagtaagtgtaatattttactagcaaaaagcatggttttagaaagcttgctttgagaaggactaatttatcaattataattttaaatcaattaacagttttaaataatggacccaatattgcaggccctgaaccccacttatgctgagtcctaagctgaaagtcaggaaaaaggaaaagtcttcactagaaaaggctgctaactagactgctcaagtattcagacagtacaaggtcaaaaaaaatgtaaaactaaaggtaacattttaaaacagctttaaaatactaatagaaagtgattgtgccagagtaagcag

SEQ ID NO: 500956 - DNA, 603 bp, Homo sapiens
tttttacttctaattaagagtctacctatacagagtaaaacaataaggcaagtgctcagatcatttagagagggggaaaaaacttcttcctgaaatggttatatagttagaacaagagtggttctgttgacttccattattcattcgctttgcttcacgccaaaacatctggctaaaaagtgaaaaaaacacccaaatggcattgtatagaaaaaacacctagatgaytgattgcatttttcactttaaagtcaatgttttgatattatagggacatgggctttgttcagtaagtgtaatattttactagcaaaaagcatggttttagaaagcttgctttgagaaggactaatttatcaattataattttaaatcaattaacagttttaaataatggacccaatattgcaggccctgaaccccacttatgctgagtcctaagctgaaagtcaggaaaaaggaaaagtcttcactagaaaaggctgctaactagactgctcaagtattcagacagtacaaggtcaaaaaaaatgtaaaactaaaggtaacattttaaaacagctttaaaatactaatagaaagtgattgtgccagagtaagcag

SEQ ID NO: 500957 - DNA, 410 bp, Homo sapiens
gtttataatctagtacagtttagaagtagggagttacacagaaaaatataataccatgcaaaaattgtaccactgagaagtgcaaataagtaatatgaatgctcagagaatatacattcattatcaaaaaataagtgtgtagccaaaattgtcaggtgttatatgtaagtatatacacagaaggggtagttttagttttaaggttggagaatttcacacttccacaatattttctttaaaattagagatacacatgtatgaaccaaatcactgatgaaattcaaacacaaaggtaaatatatacamcagctttgggtttagaacttaagttaaaatgttaacaaaataagaagtaatgttattttcagacctggtgcttaggaataatttaaattctcttcactaacagg

SEQ ID NO: 500958 - DNA, 562 bp, Homo sapiens
tttgttgagtcgcttctggaaggagagatttatgatctggcaccttcatagacatgaatggcaatataacgaattgaaagagtgatagttgctaggaccagaaggaatccccagattctcagaactataaggggagtacatgggactaatattcagcgagcagtaggctttgaggctttccactggcaaaacttgaaaagcaagcaatggactcccgtcccgattgctaagaaatttagggtaagttcaatgsctttctcaggatattgtgttcagcacccctgctagtgggggaatggaagtggaaaagtgcagggacttacagagaatggaagtcctagatgttttagtccactgttaatgtgtgggaaatgtgattcctcaacccaattcccaggtaacctggtaaataatttaggctcctgaaatactgacattgcagttgtaacactaggcaccttatgcacagttgttgccaatgccctatcatcaaggcacaggcctttgtgttttttcagttctgaagatgagttttgactggatcactcccaacctgtgtgat

SEQ ID NO: 500959 - DNA, 632 bp, Homo sapiens
tatttctacaggaagtttcctgggttctgaattccacagattcagatccaagacaaccaaagcagagcctgggaatctgttattaagcaaaatctcaaggtgattctgatgctcatccaggttttggggaaataacaacttgcatttgtttagggagcactcactatataccaggcagaatcctaagccctttacatgaataaatccatttgattttaacaataggtttcggagataggtattagcattgtctccttttccacttgggaaaattgaggcacagagataacttgccaaagtttgaaatggtggagctgtaatcagaattctggtaacttggctccagagttaccaggctcctgtctgagggcaggaactttatctgatttgttcacggctgtattaccagcacagtggccagctcaaggatattcaatatgtatttgttcaatgaattmattcattcattgaaagagagtggtgaaattctgaacagggacagagagatgacctaggcatcttttttttttccaaatatggattttgttttatgatggtgaaaatataaacaaacaaatataaaatataaagagagaaaaattatctttggagactctttacagagttttttg

SEQ ID NO: 500960 - DNA, 351 bp, Homo sapiens
ttgttgatttttttatacccccatctctctctctctctctccatatttctgtagagaaaggaatcttctgtgtctccttccctcagaattttctctcttctttttagatgtcttgaatttcataatagtattataattttttcattcctttgactgaacactcaatgtacttatgattctaacaatttatacctttttatctctgggattacttcatttctattattaktattattttgagacaaatcttgctctgttgcccatgctggagtgcagtggtgcaatctgcagtctcggctcactacaacctctgcctcccaggctcaaatgattttcctgactcagccttct

SEQ ID NO: 500961 - DNA, 620 bp, Homo sapiens
ttctcatgaggagagaggctgggagcaatctctgctaatgcaactgtgtcctggctaagccagaactccaatggccttgctttcttgctctggggttcttatgctcagragaggacagtgccatggagaggaagcggcaccatgtactgcaaacgtctcattcctccctgttgtcagcgtatagtggtttctttggatgtagacacttttctaagaccaatgagctgctgcagaagtcaggcaagaagcctactgaccggaaggagctgtgatcctcaactgagaggtagtctgtctccattaacggttattgagaaactgctgttaaagtatttgtcaggtatgaagtcgaattgaaaatttccctgttgattttaagtattctgcatgagggtggaaagcttctgtaaagcagccatgaaacaggctgcccaggaatggccgctttgtccaggcagacacagcaaaggctatcacttgaccaaatgactttctctgcaacacagctttggcccaaaatacacacatttctcagaagacagatgaggtcaaatattcacttggctctctttacctcctttacctgtatggctgaagtggggagatgtacacctttaggg

SEQ ID NO: 500962 - DNA, 620 bp, Homo sapiens
ttctcatgaggagagaggctgggagcaatctctgctaatgcaactgtgtcctggctaagccagaactccaatggccttgctttcttgctctggggttcttatgctcaggagaggacagtgccatggagaggaagcggcaccatgtactgcaaacgtctcattcctccctgttgtcagcgtatagtggtttctttggatgtagacacttttctaagaccaatgagctgctgcagaagtcaggcaagaagcctactgaccggaaggagctgtgatcctcaactgagaggtagtctgtctccattaacggttattgagaaactgctgttaaagtatttgtcaggtatgaagtcgaattgaaaatttccctgttgattttaagtattctgcatgagggtggaaagcttctgtaaagcagccatgaaacaggctgcccaggaatggccgctttgtccaggcagacacagcaaaggctatcacttgaccaaatgactttctctgcaacacagctttggcccaaaatacacacatttctcagaagacagatgakgtcaaatattcacttggctctctttacctcctttacctgtatggctgaagtggggagatgtacacctttaggg

SEQ ID NO: 500963 - DNA, 597 bp, Homo sapiens
gataaaaacctgggtgtcctgtccagaaagtgcagggtgctttctgctctgtagcaaggcagcagacatctctgagccaggcccaccaacaggcccttatctggtggttggatcatgatcccattttgcttggacatgctctcaggaagataaaaaccatggagaaacactaggccattgacaaatgatctgagacaactttagaaaacaatgtaggatgaatggaaagagaaagaaaggaaagaaagaagaaaaagaaagaaggaaagaaagaaagagaaaggaaggaaggaaagaaggaaggaaaagaaggaaggaaggaagsaatatagtgttataaatactgcactcaacattttccaaattcttgccattatttttcaaaagtttaatagtttgcagaaatagatactcaagccaaagtctgttttagagaaactttccatggaaagtcagaatttctaccacttccttttctatccacatttccagtgcagaagaaactgagaaacagagctttttgaagagaggacagggccatagcaacaaggaccttcttgggggattaatgggaggtcagtagaattaataaccctc

SEQ ID NO: 500964 - DNA, 511 bp, Homo sapiens
ggttttctctcttatagtttgttgacacatgctaaaaatgtctttggagagaacttctgcctgataaacacccaattctagactgtgggtggattttcgagctgacggtggtcaattcctttcattaagcagtgatctgatttctccacatggccattctgccttcttgggggcagagtagatgggcagcagttcaccttttcagagaaagaggtcttctagccacctgggctgctactgaatggttttctccaggacgctctacctaatgatyatttctataacattaagcatggtaataagtagcttccaattcaattcatcctaaagccaaagaaaatacagcaccacacacacacacacacacacacacacacacacacacacacaccactttatggcaattcttaactgacattcaatgacttacttcttttcttagaaaatttccaccacatttctatccccaagccaacatacaatgtgaaatgaaagccagtgcgtggagtgc

SEQ ID NO: 500965 - DNA, 534 bp, Homo sapiens
tttcagcacagggctctttctgactctgctcatgagatggtatcagccacccaatgactggcgtatcttggtcctgtgtctttcttcttacgctgtgttaatgtgtttactttccatttggcagagagacaagagagacacctccaacttcgacaaagagttcaccagacagcctgtggaactgacccccactgataaactcttcatcatgaacttggaccaaaatgaatttgctggcttctcttatactaacccagagtttgtcattaatgtgtaggtgaatgcaaactcyatcgttgagcctggggtgtaagacttcaagccaagcgtatgtatcaattctagtcttccaggattcacggtgcacatgctggcattcaacatgtggaaagcttgtcttagagggcttttctttgtatgtgtagcttgctagtttgttttctacatttgaaaatgtttagtttagaataagcgcattatccaattatagaggtacaattttccaaacttccagaaactcatcaaatgaacaga

SEQ ID NO: 500966 - DNA, 578 bp, Homo sapiens
gcagcaccctctctgtcccactcataggccactgctgggcctggttcagggaggccaggaacctgcctgagtcctccccctgaggagtcttttctgctccttctgctgctgctggaatgatgttgcctggtgcatggataggtctctggccagcgttccagccgaggaggagggaaacccacctctccccaccacctgtcctttctccttcccarggttctccaagccccaaagggaggggcttctcctacaatcacccaatgagttcatctagagctgattcactgagacggcaatattttagcagagaaagagtttaataaacacagtgccagccaagctgaaggatgggagtttattactcaaatcagcctcctccaaaattcaaagactagggtttttcaaggacagtttagtggtaagtgggggctagggaatggggaatgctgattggtgggttgagagtgaaatcatagggggtcaaagctgtcttctcatgttgagtcagttcctgggtgaggatcacaagaccaggtaagccagtttcgttgtatggattcccagtctgggttgcacca

SEQ ID NO: 500967 - DNA, 671 bp, Homo sapiens
tttagttttgtcagtcattcactcattctgtcattyaacaaacatttattgaacatgtactatgagccaggagctattgcaggctcttgagttacaccagtaaaccaaaacagcaaagatacttgccctcatggggcttaccttctagctaggcattgacacattgcctgttacctcagagggatcaatatacaatcatctcccctggaaccatcctctcttgattgagttcagctattcaaagtgcgaggtcagggctggatgcagaatcacccctgtaatcttagcactttgggaagccagggcaggtggattgcttgaggccaggataccagcctgggcaacacagtgagaccttgtctctacaaaaaataaaaaataaaaaaattagccggacatggtggcacttacctgtagccctagctacttgggaggctgaggcaggaggatcactgagcccaggagttcgagtccgcagtgagctatgatcatgttactaccctctaggctgcagtgagtcatgatcatgctattgcaatctaggctgggtggcagagcaagaccctgtgtctgaaaatataaaagtgtgaagtcaatagaaaacattacctgttgtttcagagtcaacagaaggcacctatacaaagctaagtgtggctacaaatgaacac

SEQ ID NO: 500968 - DNA, 413 bp, Homo sapiens
atactatttatggatgaaacagaaatacacagaacactgttctgttttcaatgagtaaaagcatacaaaaatctggaagatttcaaactgattttataacactggttacctctgaggataagggaattgtaaagagaaatttagctatttctgtatactgctgacattttttacaaggtaaatgtatttgggtattacttgagtaataaagtaattctttaaaaataataaggctttactcggacccagtgaagttttccctatgtgatatgctttggtctattatcattttgttaattaattagataggacacaatccataacacaacttcctgataggccaggggttccataatctctggttctcaactctaackgcagtttagagtcgtgagggagcttttacaatgtag

SEQ ID NO: 500969 - DNA, 636 bp, Homo sapiens
cagctggtacatagatggtgccactggaaattgaatgttgtctcaatagctcccaagctttgtctctgagagaatgaatctcttgtactggtgatggggcaggagaagatcacatgaataggtcttctctgcccagaacatcttctttttctcaacacaggaggcccacttgtcaggttaggtcaacacctaaatgactgaaagagactcaaccaagcctggaatcctcacatgttcttrgaaaccatgagatcaagagccttgcttttcaatagtccttggagcctggatacatgcaaggtcctggggccccactttttgagagtgggggaccggaaggaagagtggaggatgagagtggcctatatggcagtctgtgttccagaactatatttagcaactcatttagatgatgaccgtgagcccaacatgatgacagggctcaattacatcagttctccctattgctgtgaaacaatgaaggcttgtgtgttcattagtcaatggattccacttccaaagtacatacaatgcttataattatgggcaacttggaggggagatcccaatttgcctctgctggttcaacaaaaatcacatttggaaatttaaagggacagttatatgcctgtatct

SEQ ID NO: 500970 - DNA, 554 bp, Homo sapiens
tgaggtcaggagatcaagaccatcctggctaatatggtgaaaccccacctctactaaacatacaaaaaagtagctggtactaaacatacaaaaagyagccgggcatggtggcacgcacccgtagtcccagctacttgggaggctgaggcagagcttgaacccagaaggaggaggttgcagtaagccgagatcgcaccactgaactccagcctgggtgacagagcaagactccgtctcaaataataataataataataataataataaacaaaaaatttaaaaagaggtagaaggcagagtccttttcctcataaggcttatgacttaattatagagacaagatacacaaccataaaatatgtatgaactgttacaggacagtgcatgattaaatgtcaaaagatgggccttgatgagcagtgtcaattacatctgtcaagagagattttagggagctgtagcaaaggaacaaaattaaacaagatcctaattatcttttcttataccctaagtggtgtgtttttgcctctatcctgtatgacattatgtgtaat

SEQ ID NO: 500971 - DNA, 609 bp, Homo sapiens
tgttaatatgtggcattagttaaattgttaactgtctgggacttccctaaggttgataagaccttggcatccccaggctgatagtcgcaggagcccaggcttccatttgaacatcaatcttaagtgttttaggactgacaytgctttaggcctgtagactacttaaaatttaaggccaaaatcctctaagattaaaataattttcatttgttcagggaaatgtgtgctatgcagatagtattattgccaataataaatgtatatgaagttttaaagagtcaagaagtttgaagccagtttattgaggagtctcagtattttagggtttaaacaagtaataattatttttccaataactgactcccagttgtgctgtgataaatccctttcccattacatagtagattctttaatggctccttggccagattccttaacttttctgtcacttttggttataaagccttattttagtatgctagagtcttgtatatgaaaaaatttggtacagtttatttcaaaacttcattcctattttttttcaacacctgttctttccctcattagggatcaacaaggcctacctatgggtgaagttgcttttgagta

SEQ ID NO: 500972 - DNA, 677 bp, Homo sapiens
gcagttttaatacacaaagaagtggctgctttcctcttaatggagaagcaaagtctattttgcctgctcttgaatcttgactgccctctgactgtttctttggagttcacaggcctcagagtgaataggtctacttttctatacttctacgtatttttttcttacctgagatagtcataaatcaaagaactgcttggccaggaacatctgcaacatgcttcatgtggccaaaaaatgtatcttgctgtgtgtgttactgatatttatggtatcgattagcctataatggtctaatatattgatcaacccaagctgtcattttttatagtgagaagaaatagaaaataatttcacaacgaatgataatcagcagcctgaatgtaaaaaatgcatatatattgattatttagaaaggtttggttgaaaagcagggatgatatttttaaaatacacaatttgtaatttcagtgaaaatcaaaaggataattaatttatcattaataagaataggttattaggaaaatgaagcagttatagaaaaataaagatttcttacaatgataaaaataaatatctaccaaaaataattcaagaaatactaataaaataatcactatcaagtatttyggtagttcaataagacatttaggcagcatttagccagaaatatagtatta

SEQ ID NO: 500973 - DNA, 500 bp, Homo sapiens
tcatggaagtatctgggtaaggactagcgcagggctttaggaatataaactggaaccattgcacaggacatactagaggggaaagtgtgatattataatttacatatattggttttcatycacagttcctggcttgtaactccacagcccttgttaaagtgaatagaatccctccctctcttaccttctcctcctctcctttcacctgcccaaggcaggactctaatctgactatgggtcataagactctcataccatggaggaaggaatgctgcacagagaggccaaaaagaatctggacaggcccttctgagtttaaatcatactctttttgttcaatcacatttctacagagttgccaatcatgcctatccaatggcataaaaggcccaagaggacagggttaggagagttcccataaagctaaacatgtagagtttcctggatggtggcgtacctgtggagggcatggaagctctgcaccccttctcatatgcctt

SEQ ID NO: 500974 - DNA, 595 bp, Homo sapiens
aaagagccttgctaccggagatagcagccgtgcctcttaagcaccatctattggatcacggccctaactacaacaccaaaattggccagctaatacaacatctgtgaaaccaagcacaattcacccacacgtaagggtcctgtacagaaccctggccctctgaagcatccagaaacgaagccagctgacaatacccaacttacaccacagttaaaggaacaccaaccctcccagatgagaatcagtgcaagaactctggcaattcaaaaagacacagtgtccccttggaagacccaggcctgcggagggacgtgaggagcagccccgacgcccgactcagtcgcaaacaccggagttggggaaaaccaagtaataaaaccctcgaaactgcgcctgcgcgccggagggttacacgcaatcccctctgggaggggagggaccttcctcaggggcgggaagagccaggcccctcccccacctcctgagccccaaaccgggttgtgcccgtgactgacaggcaaggctccgccctactccccgcccatttagcgcctcctgactgcygaatggcgggctcgccttggtctccgtgctg

SEQ ID NO: 500975 - DNA, 661 bp, Homo sapiens
atgcaggcccaaaggccattgacgacagtggagtaaaataattyttctgatttttaccctctaaaaagcctttgccttgtttttctgaaactcagatcaccaaggggagaaactgctatgagtatgtggatggaaaagataaatcctgggccaactggatgaggtaaggccagtagctctctgagttgcagagagaaccttcatctctcacaaagctggatttccttccttatcattatgcctccctcaatgattttcacattccctatttctatttttctccatacaatgctgttttataccatcaacatttagaaataataaataaaaatatagatattatgatttattggtatcaaaacataaatatgtatgctagacaaaattgaggcaccaagataaaccttgagaagcctagattcacgggggactctgaattcatgctttaatttatgtaatccacgtttattaagcactttgtatgttccaggttaggaagtgaggttcactacttgaacagaagtgagctgcaggatgactcagcccctttccacaatgggctctcgttctatcagagaatagaaaaatgaatcaactattactgttctatgttattgggccaagagaaagagacttctaagtttctctgggaatctgggga

SEQ ID NO: 500976 - DNA, 513 bp, Homo sapiens
gaagactgttgggatgctgtcaaatatctttgtaagattattttgaaattgaagataatcagcaaaagtgtaaagtaagcataaatcttaaaactaggaaagcatacatgagcaaaaaaggaaagatctcttgaaacaaaaagtatttactacttgaaattatctgttttaaataaaatgctccaaaataacacttttcaatcagataaaatgattgttaatctacttttcatttagcaaattggctatttgataagggttagtgawgaaaaaagaaaatgagagaggaaaattggataaatcccatatctaatttgaatagcaatacagatgacagcaacatcaatagatgttgaaactacaacagtaacaggtttgtaggagaagtgaaagaacaacatggtaaattatatttcaaatattatggctttgaggagcctgaaggataaacagtttataattacatcaggcagttgactataagatctagtgtcatgggagatatcaaagtga

SEQ ID NO: 500977 - DNA, 602 bp, Homo sapiens
tgaggttttgagattagcattttacttcctcctttctaaggaaacactgaaagaaaacttgagccagcttctggctaagacaactgtctgtcttagtctgcttcaaattttgggggttcttgcatgaactttcttccaactcttctaccctattctattggtgttagaatggtgacatttcctcacagtggagcccttttaaaattataatgaagactctaaatttgctttgggtcattttgagtgcactgacttcattagttgcagcagcagaaggattcctaatactcccatctaggagccattgaaaatttaatttggaaaagttttttttcctcatttttggcatcttgcactattacatttcctgttgagtattctgatggctgcatttaaaaataatttggtttgctttagaggttgaagagtctgtcaatttgatctaaaatgaaatacaaccgtcacagccaagaaccatgaatatcaaaacatcctgtctggttttakccacttgaggaaattactatttaaccaaatattgaagcagttaaacagtaatttacaaggccattgttctctgttgctggagacctaaattttaa

SEQ ID NO: 500978 - DNA, 534 bp, Homo sapiens
ttttgattttaggagaaatgggatataaacatcccctctttcctcacatagcttagaacaaaaggagaaaaaagcaacaatagcaggccttcccttgaagagcaccactttccctgctaaactcattacatggtgatttttccaggcagaaagacatgaggcagagaatttggaagggctaagttgaatttcttcctttagctcaccaacccatgaaatcacatcytcctccaatggaagagataaagagggacaggagagagtcagattgttccctcctggtcagtagtatacatattgtttctgtccctatggaatgtgaggaataaagaataagtgttgacactaacaagacgcagggctatttttgagtttcaccccaatattagccaacaacaggcagaaaagccaaacctttgtgaaagacagagtgggctacagtatctacacactaagcattgctaaatctaggttgtacatttttcatgcagggtggagaagagaatggtacacagaaaaagtgtcattcagaaa

SEQ ID NO: 500979 - DNA, 629 bp, Homo sapiens
gttaacattgtttattgagaggttattagattatggtgggttttttccttctaaagtttctgacattttctaatttttctcactgagtttttattaaaattttaattggaaaaataatggaaatacattgtgtttttgaagacagtacaacaattacatatgccgtaaataggttttgaagacataaattctgctcaggacttgggggactctgttctcgagtccaggccctccctcatgttgcctaggaaggtagtgccagagcttgccagagggaaagagaattggcaggtggtgccagaagtctagaaccaggagcaatcatggtaagtcggagcagacgttggcagagagaggttgaagagacagttggaagctggaaacaaggagaccattttatttcacttaatccattttatttcatttaaatttttttacttagcatttatcataccagccactttcaaattcatgatctcacrttaatccttttatcactttgtggaaggtatttatacactagttttcagatggggcaaagagcattctcagaaatgtaaataattacattcattctcacagctagtaggtggcagagacaagattcaaacttcacaataattccctgc

SEQ ID NO: 500980 - DNA, 635 bp, Homo sapiens
tattggactgcctagtttgtctatttgtactttgagaaggtactttaagggtaaaaactttttataatcaaaaggtcacaatgaattgaaaaaaatgaaagcctcacttaaaaaacaaacaggctccctgcctcaattcttggtacctttctaattcactcttcacactattaccaaaataatcttaaaattcaaaagtcatgttacttcctcccactgacttgccagctcctacgataaagatcaaagtctttgacttacaagaccatacatgatttgaacaacacccaactttctactctcagatcttgccaaactccctcttcatctctgaactccaatagtggcaatctattttagttccggrgatccaccacagggcctttgaacacgctggtcctgaatcttggaatgttctcccacctgtactgtcctcacttatccatcatatctctacacaggtcacttcctcagaaaagccttacagctaggtccagcattctatctatatcctactcttatggcttcctatacttttcctttttgccacttaaacagctaataatttatatctatatgagtaatcaatatttaatatttacataactggtcaatattataaatattaaattatt

SEQ ID NO: 500981 - DNA, 413 bp, Homo sapiens
ataggcgtgagccactgcacctggcatgtgtttttattattagtttgaattgtagactattcctacttgatttcggataacacacaccagacatttatagaacctgatagccttcatttcattttaggcactgtttagtatcttataaccttccctgtacaatttggagacctgcttctgtcacttttgggtgtggaacacttttgtcttttttccttccttggaattcaaattctttgaaaggaaagtatatacttcaaaaaatatacttaatacataaccttgactgactcattkgtccatacaataatatttttacaacataaaggaagcacatatttaaaagacaaaaaattaacagatgttggcaaggatgcagagaaaagggaatgcttacacactgttggtgggaa

SEQ ID NO: 500982 - DNA, 457 bp, Homo sapiens
tagcagtaagtataatgtttgacttgagcagagaaagctttatttctgactctacagccttagtagttctaagtcagacacgtgtagctatacaaatatctattatacacttcacgtatcatcagaaaacagtctgagaattaacaaattccaccttgaaaccagagatctgagcaaaatttggccagaaagatagaagttctccttatgcagttaatttctaactctattaaacaaactttgagtagacagcccccaatttacctrtaataccattggcccacacgtctattctcttcattccttgctgcccaaaatatgtgtccatacttcaattttggcctctaggatacattttttcaacaggtttctgaataggctaggcaattctcattcagaacaagcctcactgtttatttcagcaattttaccaaggatgttttaaagctgcttttaa

SEQ ID NO: 500983 - DNA, 396 bp, Homo sapiens
taatatatactgtatcaaggatatttggttttggttaatatgattctattttttgtacagtttgctgtatactagggacaaaaatctaacaggcaaggatggcaatttgtctggatctaagagtcattaccaggataattatttaacatttcccagtggttccaaacccaaatactcttttatcccaggtcccctgaattcyaaacagttgacagtggtagaactatgttcagccttttttagcattcccactgaccatgacagtcaatatctatttgctttcacctggaataatcaacagtgtacctggacagtcatgcctcaggggttcactgaagccccctcctacttctctcaagtgctccatcaagacttgagcacaccctccagtatcga

SEQ ID NO: 500984 - DNA, 634 bp, Homo sapiens
ttgaatgcttgaatagcaggaggcaaaggtggcccatcatacctcactccatttcagggatgatcttgccaatgggaccagaaatctcaaagtccataggaaaggtgcccttctccttggatagtgctctcttttgctctgtttcttaggctggttgacactttccttagttacattcatatccatagtcagatcacatcatctcatcaggtagacctgagagccactctgatcatgaaggtggcaaagcatgtttcagttctgatctattgtataatgatttcaaaatgtaaaatgttagagacactgatttctctccttttcaagttcttaggggataccttgtcataccatcaagtacttctaacaggtcatccccttgtctggaggtagatgtgtggtccccactgtcccctgsctctctgattttgattatctgtgtttttgttgtattcttgggtctttccacaattctgtagcttcacagaaataccagtgtccctaatatttcaatggctgttagagattctctacacccagatttagctagagaagttctaagaattctgctaattggatccactggtatttcatttgtattcttactgttgctcaataataattattttattca

SEQ ID NO: 500985 - DNA, 634 bp, Homo sapiens
ttgaatgcttgaatagcaggaggcaaaggtggcccatcatacctcactccatttcagggatgatcttgccaatgggaccagaaatctcaaagtccataggaaaggtgcccttctccttggatagtgctctcttttgctctgtttcttaggctggttgacactttccttagttacattcatatccatagtcagatcacatcatctcatcaggtagacctgagagccactctgatcatgaaggtggcaaagcatgtttcagttctgatctattgtataatgatttcaaaatgtaaaatgttagagacactgatttctctccttttcaagttcttaggggataccttgtcataccatcaagtacttctaacaggtcatccccttgtctggaggtagatgtgtggtccccactgtcccctggctctctgattttgattatctgtgtttttgttgtattcttgggtctttccacaattctgtagcttcacagaaataccagtgtccctaatatttcaatggctgttagagattctctacacccagatktagctagagaagttctaagaattctgctaattggatccactggtatttcatttgtattcttactgttgctcaataataattattttattca

SEQ ID NO: 500986 - DNA, 403 bp, Homo sapiens
acacggtccacaagcttggtggtgaatgtggttgagaggagcacctggctgaccttctcaccacagccctggcacccmgaaaaccaagtggctcccaaagtggagttctcggccagcagtgttagttaactagcacttcttacaaatacacactgtccagccccgcccagaccaatggacacagaagctgggattgggtcggggaggctcccagccatctgtgcttaccaagccctccaggggagcctgctgcagatgcagatcgaggccccagcctcatcctcccccaccaccctcgacccccttccatgggaaccagcttcgccctgcgctgtctggccacacacctggcactgcgcactctcctgccgcagtccttttcttcatcttgccttacaggtgc

SEQ ID NO: 500987 - DNA, 596 bp, Homo sapiens
tggccaggaaacagttaatttgatttgcgaggcgaaaaggtcgcatgttttgttcagccctttctcagccccttcctccctcgctcggccccagatccatggcagcgcggtttctctctgccatagtctcggctgtgtcatggctgcatcccacgtgggcgacacacagtgccccagcgccaggcagcggggacaatggtccccagctcaggrggttcctttgccggcgtcccttccccttggaatgcgctttcttgcacctcctgtttacaaacaaaataaaacggcaccaagctaaacagccaaaaaactccaccaccagcaaaataaagctagagtcaaaactccaggaaaggttaaatgttaccagtccccagtaaaagcacaaccttgttctcagactggtatttgacattgctgaaggttttgtcttgattactttcaataaaattcaaagtaaggatgactgtcttggctcactaagcaacacggttttatcactaattacaatactttattaccagtagtttaataggtttatgataggtcataaaacaattcagcatgggagtacataaaaagaaagggttatacag

SEQ ID NO: 500988 - DNA, 543 bp, Homo sapiens
ctgtgacccaaaccacatgccccggttctcctgggtctcccattttggaggtttgtgtctaataaatcactgcaggagggagccaggtgcctcccctgagagctttccctcaaagcttccggagccttacagaggccgagcttcctgctctggccctgcccaggacacagtgagactgggtgtggagacagaagccaccagatgtaggtatctcctcccctgctcccttctgtcttcagcaggtggatatgccggctctgggctgctgctgaacctgtggctggctctgagggatgatgcctttcctgagctgctcttctaaaaaacagtccagattatctgcgagacatctagggtaggaccaagttttggccaagcagagagctgatgcgagggcgctgcgtcctaagaggtgtgggctcaattcctccctcttctggtttccccccaggcagccaaatcagagccctactaattttggaacttggccccatattgggaaaacacacartccattggtatgtgctcagaggaagaaacaaa

SEQ ID NO: 500989 - DNA, 664 bp, Homo sapiens
aagacactttcctttaacagtgtttttgaaatatctgactaatgtgtttgatagatgaagtacctttttataaacactctcaagtattcctttttaaaactgattgatgccagtaagcagtcagatggttagctccgggaacaagagccatttattcagcatgatacacagtgagtcaggaattccaagaaatcaagtgggtggtaatggcttaagaaaaaaatgttctatttagaacaacattaacattttggaaatcaacattatatattgctctgccttacttactaatccccaattcatcaatattcagaaaagtttctccagtaaagtttaaactatggatatactaaattaggcatctgtttatgacacttgtttttaagggcatcaagaatttccctgaattattccccctagcccaatttccctcaccaatgtacatccaatgtctgaattktttccatcataagtcaattattttatgtactgtaaaaggaagttttagtaccaagatataaatgcccagtaaaaaatactataaaataatttatttatggcaaaaataacagaaacagagaaaactcatcaggaaatagtgtttgtatacaaatctctgtgttgaagtaggaagtggaatggaactctattctttgtgaatgcc

SEQ ID NO: 500990 - DNA, 635 bp, Homo sapiens
ctttggaaaagaaataaattggtttcaaaagcaataagtgattcattagcaggtggtgacgtttagtatctgataattttcttaaaatcctatctaaacagtgatgtcaagttattaaagtttgcacatttaaaatgttaaccagtataatcattatctgaactatatatctttgttaactgccataaaaccaaagcattttaaggtcctgacctataaaacraatagtctgctattgtgtctcctgaaagtatatggtctttatctgctttctgtctctaaggacctatgttattttattgttacctttgcgggcaatggaacttttcattttgccatcatattttctctttaaatattatttctaattttcagtatgccttttaaaatcacgtaaatttgccatttttgagttataattttcccctcgactcagctatatatgaaaatgaggtttaaacttagtaggaaaaaaacagcaggcaggcagaaaagcaaattttaagaagaatctatgtgctaagaacatattctggtttttaagcttcaagatttctgctaatatctcacatcaactaatagtaggtttgatctcttgtgattgggagaagagcaaaattaaaagaagaaaagcc

SEQ ID NO: 500991 - DNA, 567 bp, Homo sapiens
cgtgtcaccatgcccagctacrtttttgtattttttgtagagctggagtttcgccatgttgcccaggctggtcttgaactcctggattcaagtcatctgcccacctcagcctcccaaagtgctaggattacagtgtgagccactgcacccagccagagtgttaatttttaatgctcttgcaaatatttttgatggctgttttattttcatttttgcttagaacttaaaaagttataattagaggttgaaaatgtacattaattcacattaactgatacaaataaaaaaattcaacaacttcatagacctaaaagttgattcaagttcatagaatcacagaagctgcactgtaggaagctaacccagtctgggttttcctcatgtcatggaaggaaccgcaggagattatgtggtcaatgagtggccaaagggtctcaatctttagtccctgctcattctgctacagcccactgctatttttgggttcttggcctgaccaggcacctgtgcttcagtgcctgcccgtgcgggggaaggtgcccagcacctgcgtcacctctctgcccc

SEQ ID NO: 500992 - DNA, 498 bp, Homo sapiens
cagcaccacgaggaagcctgaacagcagcctcttcaacgaggagtgttcaaaaggaacacaacggactcatctgaattttagtgtagtttgatttttgaaattggtaatccatacagcaaacttcctgcaaacacagatatctgattaaccaaatatgggcaaataagttggactatattctgcataacttagtcacctggatggtagatgtaatttcagattctcgtcatcctaatttcgttatgctgaagcacaaccaacaggggtcagtgttagactgactagtatggcagtatcacataaaaccggaaaagtgaaaggaytgattttagctgtgtaaaggtcattagcattatatcacaatatttatagcaagcttccatcctgcttgtcacacagatgagcaccactctcagttcagtgccatatcgtcttcaaaagcaggcactgggcttgttcggaagtaaaccactgtccaccacacctcctgagggtca

SEQ ID NO: 500993 - DNA, 625 bp, Homo sapiens
tttgaaatgaaaacagctatactttctgttgtctttccagatatccttacactggatgaaagataagtgagcatcatcttttggggcaacaatacagaataaaagccaagaggctaaaaacattaatatcctgggacactacacaatatccacattactaacatttgcactagatcctcccaaataatagtctttgaggcaaatattactattttcattttgtagatgacaaaactaagtattcattagacatatggtaactggcccaagaccatacacaaccaggactgaagtcttcatcttgaagtctgagccactgagctggaagccacactcaggaaggaacccaacacagaaacaggccagtcctttcctaaagagtgaaaagatgtaaatataactccaattattcagaaaattgtgtacatctatctatacaatattttaaagttgtttaaaagagctttttaaggacaggaggaaatgcttacctagcatttttttaaaatacgaaatgatacatttgctacatatttaaagcaccattaaaagtgacaagaaatatgctcaaatgttaacaatggaaaaattayaggtagtttctgtattttccaaattttcttca

SEQ ID NO: 500994 - DNA, 645 bp, Homo sapiens
ttgatggagggtaaaaaaggagaatttatttcagcctgataccagaaaagagtcttcactgaatggctcagagttggtatgctggatgcatagagaactaaatgaaatactaggacatgatttgactctccaacattggcatctcacagtcatactaatgtaaatgcgatttatttgtcttcaactttcagaatcagcttatagacaaatgatagaagaccatccaaatgctgacatggcaaggayatcttggtcatcaagtctaaccccagccttgaaagatgaatacaccagggtttgaacagggatgtgattttcccaaggtccctgagtgtgtagcaggggttggagggcaatggccttggtgcctgtactcccagtcccactgtgccctgactcttgtactgttcaccttgcctggactcacactcacaagccatggcagggggagctcctgcccatgaccttgctttctcagcaaaggctattgtgactcctgcagggtttatcacctagttccagttctgacacgccttcccctccctgtttctttagacacttttcctcccagtaggggcagctgttgatttcttctctagagaagataaccttgcctgtccaatgtgttctaatctagtgctctgt

SEQ ID NO: 500995 - DNA, 479 bp, Homo sapiens
agtcgggcaggctgtcacttgcttccctgctgagccctgaatccaatccagcaataatatggaaccagtkatcactagtcttcccagttacagatccttttctcctggcttaaagcactttgggttgcatttttgtcacttgcagttggaaatcctaattcatgaggacttgcaagctcaccaaggcaggagctttgtactgcctgccaccctatcttcagcaccggggagagtgcctggcatctagttggctctcagaaatctttgaggaatcatcaaatgaatgattccaaaatagcaactcctttgtgaacctaatacattttaacagaagaaatgattctcaataaacattatttccttttctattttattgcccattatcctatcaactctttctaaattaactcccagagacgaaccctattaactctttatttggctattaatgtcttgtgagaatttttatttagtttcct

SEQ ID NO: 500996 - DNA, 607 bp, Homo sapiens
aaagcatcgactttggggttagagagtcatatctcagagctcaactycatctatctgtgtaaccttgatcagctttatgaacacccctgtaccttaattttctcatctttaaaatgggaatacttatgcctaacccaatttggcaggaatttattacccttatcaggactgagacatttattactaatgtagtctcttcaatatgattctctcccacatacatctcattattgatatgttattgtctccatgaatgtgactataaccttaatatcagttcatataacattcctaaggctcattttctttcttacatacattttctctctgtctctataaatgccaaatttaatacatattctttaagaacactaagatattgaggtcaagattagttatcctcatcaatgcacaaatgctaaccctttaactcacatctttattacatactgtctttttaaaaatttatatatttatttatttttgagatggagtctctctctgtcacccaggctggagtgcagtggcattatctcagctcactgcaacctctgccttctgggttcaagcgattctactgcctcagactcccaagtagctgggatta

SEQ ID NO: 500997 - DNA, 523 bp, Homo sapiens
taattaagaatcctcacatgactctgtggggaactagcattcatcacaaggtattttattcaggtgtctccttctctgtcttccctatgagacaaaaaccaacccagacacaaacagtcagcccaggaacctaccragctagcaccaggcctggtacattgcaggctcccaatgctttcttgagcacacactgacataatgcttactatgcaccaatctctgttttaagattttcataaattttaatttattgaattctcctaactttatgaggtatgattattatcatctccattttatagatgaggataattagacaacactgcctccctggtgcctgatcaaggagctaaaagatccccaacccagacagggcatttctggttctaaaccctctcctaaacagagactcagcaaatggtaaagttctgcttcgttgaagactcacccttcagagttgctggttcagaactctgttgaatggttttttgtatattgctattcatctgtgtaatatttattt

SEQ ID NO: 500998 - DNA, 523 bp, Homo sapiens
taattaagaatcctcacatgactctgtggggaactagcattcatcacaaggtattttattcaggtgtctccttctctgtcttccctatgagacaaaaaccaacccagacacaaacagtcagcccaggaacctaccgagctagcaccaggcctggtacattgcaggctcccaatgctttcttgagcacacactgacataatgcttactatgcaccaayctctgttttaagattttcataaattttaatttattgaattctcctaactttatgaggtatgattattatcatctccattttatagatgaggataattagacaacactgcctccctggtgcctgatcaaggagctaaaagatccccaacccagacagggcatttctggttctaaaccctctcctaaacagagactcagcaaatggtaaagttctgcttcgttgaagactcacccttcagagttgctggttcagaactctgttgaatggttttttgtatattgctattcatctgtgtaatatttattt

SEQ ID NO: 500999 - DNA, 523 bp, Homo sapiens
taattaagaatcctcacatgactctgtggggaactagcattcatcacaaggtattttattcaggtgtctccttctctgtcttccctatgagacaaaaaccaacccagacacaaacagtcagcccaggaacctaccgagctagcaccaggcctggtacattgcaggctcccaatgctttcttgagcacacactgacataatgcttactatgcaccaatctctgttttaagattttcataaattttaatttattgaattctcctaactttatgaggtatgattattatcatctccattttatagatgaggataattagacaacactgcctccctggtgcctgatcaaggagctaaaagatccccaacccagacagggcatttctggttctaaaccctctcctaaacagagrctcagcaaatggtaaagttctgcttcgttgaagactcacccttcagagttgctggttcagaactctgttgaatggttttttgtatattgctattcatctgtgtaatatttattt

SEQ ID NO: 501000 - DNA, 571 bp, Homo sapiens
tccctgatgaatcccctggctcacagacccagatacccaccttaaccaatctgttccgttttcccctcctgacagatatggccctattccaccctacacctagactctgagggttactcctccttaaatactctaatactctgcccacccagatcctggtcttcctctccaagtacctctgcctccaagaggtccttcccaatcccaccttccacccagcgcatttctgtgctaaattctcacgtcacccacggtttggcctgtgctgctaactaaatatgctttgtgctgcattcgccgctcaccattgtgctcaccacattcttaaagctgtttgtgatgattctttcttctttctcataatcccacggtgagatmtcagataagaatttcttgtacagtgcagttcacgatcatctttacttgtaacacaagaacagtcattttgaataaattcagatttaaattatatataccattctcatctggaatggataatgaatcacagataattttgttctagtcagcatggtcataaaagtgtttctgttcctaagaattactggacaac

SEQ ID NO: 501001 - DNA, 571 bp, Homo sapiens
tccctgatgaatcccctggctcacagacccagatacccaccttaaccaatctgttccgttttcccctcctgacagatatggccctattccaccctacacctagactctgagggttactcctccttaaatactctaatactctgcccacccagatcctggtcttcctctccaagtacctctgcctccaagaggtccttcccaatcccaccttccacccagcgcatttctgtgctaaattctcacgtcacccacggtttggcctgtgctgctaactaaatatgctttgtgctgcattcgccgctcaccattgtgctcaccacattcttaaagctgtttgtgatgattctttcttctttctcataatcccacggtgagatctcagataagaatttcttgtacagtgcagttcaygatcatctttacttgtaacacaagaacagtcattttgaataaattcagatttaaattatatataccattctcatctggaatggataatgaatcacagataattttgttctagtcagcatggtcataaaagtgtttctgttcctaagaattactggacaac

SEQ ID NO: 501002 - DNA, 474 bp, Homo sapiens
atgggggcgtgtaaaagagagcttgagacaattctaacaaatacccgagcttgctaagccttcactaaagacatttactaagtttcctgtgataaagtgaaaactgctatatttttttttccattttaaaacaaaactcaggcctggcatggtggttcactcctgtaatcacagcacttcgggaggccgaggcaggtagatcayctcaggtcaggagtttgagaccagcctggccaacatggtgaaaccccgtctctactaaaaatacgaaaattagctgggcttggtggcaggtgcctgtaatcccagctacttgggaggctgaggcaggagaatccttgaaacctgggaggcagaggttgcagtgagccaagatcacaccattggcaattttcccaaaccctggggcaacaagagcaaaactccatctcaaaaatgataaataaataaataaataaataaataaataaataa

SEQ ID NO: 501003 - DNA, 474 bp, Homo sapiens
atgggggcgtgtaaaagagagcttgagacaattctaacaaatacccgagcttgctaagccttcactaaagacatttactaagtttcctgtgataaagtgaaaactgctatatttttttttccattttaaaacaaaactcaggcctggcatggtggttcactcctgtaatcacagcacttcgggaggccgaggcaggtagatcatctcaggtcaggagtttgagaccagcctggccaacatggtgaaaccccgtctctactaaaaatacraaaattagctgggcttggtggcaggtgcctgtaatcccagctacttgggaggctgaggcaggagaatccttgaaacctgggaggcagaggttgcagtgagccaagatcacaccattggcaattttcccaaaccctggggcaacaagagcaaaactccatctcaaaaatgataaataaataaataaataaataaataaataaataa

SEQ ID NO: 501004 - DNA, 610 bp, Homo sapiens
ctggtcacgctggcacgaggctcctctcaacagtctctgagataatgactttggcatctgctgacgagtgcttgtgactgcccacagaatttacaactcacaagtggaaaacagaggctccgacagaactgttttatgcaaggtctttgaaatttattaatgtaatgcaaacacgagccttccaacccattaaattgttgatgttatgcgagcccactctggaattgcagatcctcattagcattatttgcatgttaatctgcatctttttaattagtgatattatttatgcacataattttcgcctactggtgccaaggctgaagcgcattaattaatctactgagatgccaaactgtttattttcccccgtacttttatttgtttacatggtgttttggattcagggaaaatraaaaagagcctgaagaataaaagctgaaagacaagattaactaaaagctctttttgttttcataatttaaattgtaatattagccaaatgttgtgtttcttcccttagagatcggttattcagttacattaccttgatgtattattaaaatgtataatggactctggaggcttctgttagttctctccttcattt

SEQ ID NO: 501005 - DNA, 579 bp, Homo sapiens
ttgcccacaaaaccttggcagccaccctttgcatggctaaagtcaccartctctctgatggacagtccatttttgccattttgtaaacagcagagtccctgtacagacatgagaggttgaggaagcggtataggatcattgatgctggacagctaagctgctaagaccaccagcattggcaacaacaactcctgtgcttagcccagcaggggagcgtaggaatggcatggggagaaagtgggaaacctctctccctaccccagacatgctctgctgctgttcggaaattatggagaatttcaaaatagtggcagcagagcctacattaagcaggggacttataatttcataggctgcgactccgggaagattgtctgctcagccctataccagctactttcaacccagcataaacatcccaggaaagaatattctctaggcttcatgggccatttctgaatccactggcacagagcccatgccctgtattgctctcctctcaacaagccctgccctccagccgtggtgcattcccatctctgcttcttcacttacccctggcttagaatgcaggtgtga

SEQ ID NO: 501006 - DNA, 579 bp, Homo sapiens
ttgcccacaaaaccttggcagccaccctttgcatggctaaagtcaccagtctctctgatggacagtccatttttgccattttgtaaacagcagagtccctgtacrgacatgagaggttgaggaagcggtataggatcattgatgctggacagctaagctgctaagaccaccagcattggcaacaacaactcctgtgcttagcccagcaggggagcgtaggaatggcatggggagaaagtgggaaacctctctccctaccccagacatgctctgctgctgttcggaaattatggagaatttcaaaatagtggcagcagagcctacattaagcaggggacttataatttcataggctgcgactccgggaagattgtctgctcagccctataccagctactttcaacccagcataaacatcccaggaaagaatattctctaggcttcatgggccatttctgaatccactggcacagagcccatgccctgtattgctctcctctcaacaagccctgccctccagccgtggtgcattcccatctctgcttcttcacttacccctggcttagaatgcaggtgtga

SEQ ID NO: 501007 - DNA, 579 bp, Homo sapiens
ttgcccacaaaaccttggcagccaccctttgcatggctaaagtcaccagtctctctgatggacagtccatttttgccattttgtaaacagcagagtccctgtacagacatgagaggttgaggaagcggtataggatcattgatgctggacagctaagctgctaagaccaccagcattggcaacaacaactcctgtgcttagcccagcaggggagcgtaggaatggcatggggagaaagtgggaaacctctctccctaccccagacatgctctgctgctgttcggaaattatggagaatttcaaaatagtggcagcagagcctacattaagcaggggacttataatttcataggctgcgacyccgggaagattgtctgctcagccctataccagctactttcaacccagcataaacatcccaggaaagaatattctctaggcttcatgggccatttctgaatccactggcacagagcccatgccctgtattgctctcctctcaacaagccctgccctccagccgtggtgcattcccatctctgcttcttcacttacccctggcttagaatgcaggtgtga

SEQ ID NO: 501008 - DNA, 579 bp, Homo sapiens
ttgcccacaaaaccttggcagccaccctttgcatggctaaagtcaccagtctctctgatggacagtccatttttgccattttgtaaacagcagagtccctgtacagacatgagaggttgaggaagcggtataggatcattgatgctggacagctaagctgctaagaccaccagcattggcaacaacaactcctgtgcttagcccagcaggggagcgtaggaatggcatggggagaaagtgggaaacctctctccctaccccagacatgctctgctgctgttcggaaattatggagaatttcaaaatagtggcagcagagcctacattaagcaggggacttataatttcataggctgcgactccgggaagattgtctgctcagccctataccagctacyttcaacccagcataaacatcccaggaaagaatattctctaggcttcatgggccatttctgaatccactggcacagagcccatgccctgtattgctctcctctcaacaagccctgccctccagccgtggtgcattcccatctctgcttcttcacttacccctggcttagaatgcaggtgtga

SEQ ID NO: 501009 - DNA, 600 bp, Homo sapiens
taccccactgtattttattatggtagctttatggtaagtctggaagttgggtagtatcagtcctgcaatgttcttctctgtcaatatttcattggtcatcctggcccttttggttttccctataaactttagaatcattttttgacacctataaaatcacagytgaaattttgattggaataaaaatttatctacatatgaaagtgattctattagggagaattaactcaaatgattacaaaggtgaagtcccatgacaggctgtctgcaagctggagaaagagaaaagcgagtagtgtggcttccagggaaggtggtagcatggcacagtttaattccaaaagcctcaaaaccatagaagctgacaatgtagcccctggtccgaggccaatggcctgagatcccctgggtggctgctggtgcaagatgcagagtttgaaagccaaagaaacaacctggagtctgatgtccaagggctggaggagaaaaactatcctgctccagaagagaaagtacagggtgagaggcagagagagagaaagagaacaggcaaatgagagttaagcacctggcataccccctcttccacctgctttgttt

SEQ ID NO: 501010 - DNA, 600 bp, Homo sapiens
taccccactgtattttattatggtagctttatggtaagtctggaagttgggtagtatcagtcctgcaatgttcttctctgtcaatatttcattggtcatcctggcccttttggttttccctataaactttagaatcattttttgacacctataaaatcacagctgaaattttgattggaataaaaattyatctacatatgaaagtgattctattagggagaattaactcaaatgattacaaaggtgaagtcccatgacaggctgtctgcaagctggagaaagagaaaagcgagtagtgtggcttccagggaaggtggtagcatggcacagtttaattccaaaagcctcaaaaccatagaagctgacaatgtagcccctggtccgaggccaatggcctgagatcccctgggtggctgctggtgcaagatgcagagtttgaaagccaaagaaacaacctggagtctgatgtccaagggctggaggagaaaaactatcctgctccagaagagaaagtacagggtgagaggcagagagagagaaagagaacaggcaaatgagagttaagcacctggcataccccctcttccacctgctttgttt

SEQ ID NO: 501011 - DNA, 600 bp, Homo sapiens
taccccactgtattttattatggtagctttatggtaagtctggaagttgggtagtatcagtcctgcaatgttcttctctgtcaatatttcattggtcatcctggcccttttggttttccctataaactttagaatcattttttgacacctataaaatcacagctgaaattttgattggaataaaaatttatctacatatgaaagtgattctattagggagaattaactcaaatgattacaaaggtgaagtcccatgacaggctgtctgcaagctggagaaagagaaaagcgagtagtgtggcttccagggaaggtggtagcatggcacagtttaattccaaaagcctcaaaaccatagaagctgacaatgtagcccctggtccgaggccaatggcctgagatcccctgggtggctgctggtgcaagatgcagagtttgaaagccaaagaaacaacctggagtctgatgtccaagggctggaggagaaaaactatcctgctccagaagagaaagtacagggtgagaggcagagagagagaaagagaacaggcaaatgagagttaagcacctgrcataccccctcttccacctgctttgttt

SEQ ID NO: 501012 - DNA, 460 bp, Homo sapiens
agtgagatctgggctgttagagctatcagagagagggagcgagagagagagagagagagagagagagagagagagagagagagagagagagagrgagggagagagagagacccattaaacttccccagagtttactgattaccccatcacttaaagacaacaacaaaaattgttctaccaatgtttccaacaagcttcgttttgaagttttaatcaggtctaaatggaaagtgattgagaatggcgtggtctgcattttaatccctggaaacgctccccgcccccaagtctttggctgtgtggcgtgtagtgtggccttgggtttctgagtgtttctaacatacataatgagctcaatgtcaagctgttggatcttttgtctttaacaataagcatttagctcaactaaatgaatagaaattgctttagtgaattacaaaagccaaggtctttttaatgc

SEQ ID NO: 501013 - DNA, 604 bp, Homo sapiens
aaggagtgagatctgggctgttagagctatcagagagagggagcgagagagagagagagagagagagagagagagagagagagagagagagagagagagagggagagagagagacccattaaacttccccagagtttactgattaccccatcacttaaagacaacaacaaaaattgttctaccaatgtttccaacaagcttcgttttgaagttttaatcaggtctaaatggaaagtgattgagaatggcgtggtctgcattttaatccctggaaacgctccccgcccccaagtctttggctgtgtggcgtgtagtgtggccttgggtttctgagtgtttctaacatacataatgagctcaatgtcaagctgttggatcttttgtytttaacaataagcatttagctcaactaaatgaatagaaattgctttagtgaattacaaaagccaaggtctttttaatgcaccaatgatgacattaattattttcgacattgtcttatttttgcaaatgtattaacttaaaatttgacttaaaatgtaataaattcatttactgttccaattaaaaatgtgaaacattcttagtaaatcaaaatgtctgc

SEQ ID NO: 501014 - DNA, 605 bp, Homo sapiens
cctctaggccaatactgggtcctcttccctctgacttggcctcttcccttggctgctggccctgcaggatggaaacagtgtctgtggccagagcagaagagagaggatgctcagtgtttagagccgaacattctcagtggcgtgtcaccagatttgatgttgctgagcagccttctgcacattcctgccctcttcagggtttcagccacctgagccaccttcttgctgcatatgcagtkgaggtgaaaacttctgtgcatctgaggttgagtttggaaggcagggtgaggctttgacactggatttctcaccggttctgatgacgccatactcttgagggtttctcttggcttcctaaggccccaggcgtttgcttcccctctcacagccttcggagaggcctgtgactttacaaccaggcacagccaacgtacaagaatcacatgggacttggtccacagagcaggtgcaaagaaacagttcccaaccgtgttcgtctttccattgctgatacagattctccaaaatgtaactgcaggccaaagaccccacctgtcctcactgcagccaggagacacacagggtgcatgcatggtttggggatg

SEQ ID NO: 501015 - DNA, 262 bp, Homo sapiens
atttgtgtgtaataattgatttttcagtgtaatcgaaaagacactgaagtgtgctccatgcatatctgttaggaatatcaaagtgctaacgaaaagctggcagcaatttgacctgtaaagcctttgaatactgtggcccagaaaagttgcaagtaaaattccagccacaaacgtaaaagactggtagactaggattgtgatagaatcyttcatgtgttgaatattttatttgctttttgaagcaagatagtatgtacttttt

SEQ ID NO: 501016 - DNA, 631 bp, Homo sapiens
tgttaacattccttttaaccaggcagatgccttgggactgtgggaaattgcagtagcaattagaggaaaatagggaagggtgggctggtcagtcttggagagcaggaacaatgcagaatttaaacataggaatgtcatgtgtcaattagggatacagcaaaacccttctataacactataaaaggagccccaaatattcagttgtgtaaaatatgagatgacattaaacatagggttatgtaataaaattgattaaataactaggttgagcctsttgtggaggttgggagccaactgccagtcctgtttcatccaaattagtattaaggagtaatatggaggggtttcactgggcttaatatttcgttttccttttaaaaatgcaattgtatgttagagatgaaatcattgagattttgattttagacctgtgtaactgctaaaaataaaagatcaggtgaattgaattaactctatctggtggtacttgaatatggaatgaaatctatggccagccagcatggttacctgttgtttcaaaacagcaaagttagtgcttgaaatctgtgaagttcatttaaaaaaatgaaaaaaaaaaaaaaaggttagcaaaatcactgatgttaatgac

SEQ ID NO: 501017 - DNA, 529 bp, Homo sapiens
tctatgacctggtccttaccttaagttttataaatgcaggttaaaaaatacatatttaaaagatctaactttggtttagcccctgtttattttaattgaatcctttcaccagtaattcaatggattgtcttattaactttctcaggtcttgttgagagcactcacagtgaataaacaagaatgcactatattacaatcactgttctctgaaatcagtggggcaaggcaccacaataaagttatttatcaagtgtaaatcttaacctttgttctgatcatggcatgttttttacaatattcttctctctttataatacactgagtgttactgaactttctgctgtatgagaatcataattgtgaatatcttatatggaattgtactgctcaagatagatgcctgtgtagggtcaggtaggtactaagcagtgagtgggatattgattgtaaaaatgactttgattatttccctcctgtatctrtgccccttgcaatataactctgtagaggtagagtctgtttccttact

SEQ ID NO: 501018 - DNA, 630 bp, Homo sapiens
gcctcatttaatctgaaatagacagaatggtgaaaggtgtttaagagttatgaagacctgctttatttcctttacaaccctattttctcctcagtttcctctgatttttcactccatcacattttgccaataagaacgtcacttctaggctccctgagaagcttttgacaggcagtccaaagccccattctgcttggtacagtgtacacatgcatctttggtgtcacatttgttataaaagtgttataattcaagagtagcaccttgaaattttggtgggctaagggatagcaccatttggttggaccccctcttacttctcatcctcaacactaccacctattccctgcatcaatggcagtcccacattttgcagagcttagaaaactagccagtagtgaaattaagacaaagcatttggctatcagtatcataaaaatagagtaacaaacagtggattacacttattggggtaaggagacatttttcttacataataagaaagtctgaagataggctaaccaaggctggttcttgtggtctttctgctctaacttccttagtgttctgygttttgtcctcattgctgcaacatggctaccaaacctccaggcttcatatatattttcc

SEQ ID NO: 501019 - DNA, 630 bp, Homo sapiens
gcctcatttaatctgaaatagacagaatggtgaaaggtgtttaagagttatgaagacctgctttatttcctttacaaccctattttctcctcagtttcctctgatttttcactccatcacattttgccaataagaacgtcacttctaggctccctgagaagcttttgacaggcagtccaaagccccattctgcttggtacagtgtacacatgcatctttggtgtcacatttgttataaaagtgttataattcaagagtagcaccttgaaattttggtgggctaagggatagcaccatttggttggaccccctcttacttctcatcctcaacactaccacctattccctgcatcaatggcagtcccacattttgcagagcttagaaaactagccagtagtgaaattaagacaaagcatttggctatcagtatcataaaaatagagtaacaaacagtggattacacttattggggtaaggagacatttttcttacataataagaaagtctgaagataggctaaccaaggctggttcttgtggtctttctgctctaacttccttagtgttctgtgttttgycctcattgctgcaacatggctaccaaacctccaggcttcatatatattttcc

SEQ ID NO: 501020 - DNA, 441 bp, Homo sapiens
gcaggccctaaatccaataaaagtgcccttgcatgagacaagacgcagaaacatgaaaagaatgccagaggacagaggtagagattggagtaatgctgctacaagccatggaaaacctgcagccaccaaaaactggaagagataagtaaggscactttcctagaacttttggggggatcatggcactgcctacacattcatttttaacttctagcccccagaactgtagaagaataaattttcattattttaaggcaccaagtttgtagtattttgttatgacagccctaggaaactaatacctgtcctatgcttctgccattacctggacaagagcttccttcaggtggctgctgccctttgagcctggactctaacatgatcatatgggtgtagacatgagtccaactcacagcaaagggtcaagcctagccagggttg

SEQ ID NO: 501021 - DNA, 623 bp, Homo sapiens
tattgagtataggtagagattgactatgtcatcttaacatgtaacttgcaacctgaactacttattataaactggttaacctagccgtaaaaactaccatgccagcagcactccataatcaggtcgtactaatttcaggctgagactgagtaaattctgaaggtataaataagttgcacagacagattgctcacatccaacccacataagtccccattttttactggtaggtcacagtggtagtgtatgtttccaggaattaatgttaacttagaaccagtatccaacaatctctgaaacatatgcctgtagtatacagttacccttgtaaatggtgcagggtattcatatttaaattcacacatgcaacttcatgaggagttgcctataatcagtcgtctaaggcgtaaaaaaaaaagcaagccagacttacagagagatgccagcaaccagaaacagattctgcagtgttcaaacccagccacagcaataggctgggagagcagagaagggggtcatcctagcagrcagatctgcaatcagtgcagggtttttttccactttaactttgaggtaagaatttacattagtttcagggcagtggctaacaaataaaggaaata

SEQ ID NO: 501022 - DNA, 524 bp, Homo sapiens
gcagtggcgcagtctcggctcactgcagcttcctcctcccgagctcaagcagttctcctgccttagcctcctgagtagctgggttacaagcacgcgccaccacacctggctaatttttgtagttttagtagagatggggtttcaccatgttggtcaggctggtctcaaactactgacctcgtgatccacctgcctcggcctcccaaagtgctgggattacaggcgtgagccaccatgcccagtctatcttcttttaagtgaaatagctgtttcttcaaccattcctcacattagagtttcctgactcttcgacctcctgtttatttgcatctaaactcatttttaccttatgaatctctctcttcacatataatatctaatctgagtagatccttctagaatctagatccttctagaatctagaatgttagggagtatagcaggactgttakagaccattatctcttttgctttggatgttattattgtaacctgaaatcaattaacttcctttttttgtcttc

SEQ ID NO: 501023 - DNA, 606 bp, Homo sapiens
ggcactagggaaaagctataaccgtgaatggaatgctcaataatatgcttccaggcaaagggctacatgactagttccagattttagtgctatgattcataaattccaaaggcctcatgcttctccatatcacaacatagttaggtttcactggtccctatggagaggtaragaattaattccttacaaaccttaggaataaagccaacaggttggacactcaaaaggaaataaagacaagttggcatctgagcagaacaggtgagaaagagctagaaggaatcatcccatccacgggcaaaaacgtcctttttagtgatttttcagtaaagtattgcaaaacaggacctacatacaatgtgattattcacattctcatctaatatgagattttaaaagtctgctgcttccaacagattttgagatatcaattattttggtcaactccaaggaaaaaatgaggcaataaaaaataaaaaatttcaatgcttgcaaatgttattgtttctaaagcttattttccctaaaagagatttagatgagatttctttgaattttctctggtttaatggaaaggtcaagttaatgatactatctaagtctcac

SEQ ID NO: 501024 - DNA, 630 bp, Homo sapiens
ctgcacagtcattgcctcaatgatgtaaagcaagccaaagccagcttcactgcacaaagcaaamctaaaatgaggcaaaaggaattcacctcagagaaagcttggattctgttgaccaagccttggatgccctcagttgaccacacagtgcagccacggagatgtctacaccagtgccccctacagtggtgaggctctgctctgaatggtcaggagtgtgcagcactggctgctaaatatttaaagcgataggcctgacaaacatgtccacattttgggaacttgctagatgagccgcaagggagtggatgactccaagaggtggagtagggtacaagaagaaaggctggcttcacgtcttttgtcgcaaggagccgctgcaaatctgtttaggaattaggtcaggtatccatgcatgaattaaacaaaacaaagatctaagtgtaagaactataccccttacttcctttgcaattctcccgtggatctaatacagagctcagcaaagaaaaatgacttagtacgttacaggagccccaccagtacaggggagttttttctgatcactttcctacctattatctcatggatgagagcaaatgttgaacaaaaaattacaggggaaggcag

SEQ ID NO: 501025 - DNA, 474 bp, Homo sapiens
gcacagtcattgcctcaatgatgtaaagcaagccaaagccagcttcactgcacaaagcaaaactaaaatgaggcaaaaggaattcacctcagagaaagcttggattctgttgaccaagccttggatgccctcagttgaccacacagtgcagccacggagatgtctacaccagtgccccctacagtggtgaggctctgctctgaatggtcaggagtgtgcagcactggctgctaaatatttaaagcgataggcctgacaaacatgtccacattttgggaacttgctagatgagccgcaagggagtggatgactccaagaggtggagtagggtacaagaagaaaggctggcttcacgtmttttgtcgcaaggagccgctgcaaatctgtttaggaattaggtcaggtatccatgcatgaattaaacaaaacaaagatctaagtgtaagaactataccccttacttcctttgcaatt

SEQ ID NO: 501026 - DNA, 630 bp, Homo sapiens
ctgcacagtcattgcctcaatgatgtaaagcaagccaaagccagcttcactgcacaaagcaaaactaaaatgaggcaaaaggaattcacctcagagaaagcttggattctgttgaccaagccttggatgccctcagttgaccacacagtgcagccacggagatgtctacaccagtgccccctacagtggtgaggctctgctctgaatggtcaggagtgtgcagcactggctgctaaatatttaaagcgataggcctgacaaacatgtccacattttgggaacttgctagatgagccgcaagggagtggatgactccaagaggtggagtagggtacaagaagaaaggctggcttcacgtcttttgtcgcaaggagccrctgcaaatctgtttaggaattaggtcaggtatccatgcatgaattaaacaaaacaaagatctaagtgtaagaactataccccttacttcctttgcaattctcccgtggatctaatacagagctcagcaaagaaaaatgacttagtacgttacaggagccccaccagtacaggggagttttttctgatcactttcctacctattatctcatggatgagagcaaatgttgaacaaaaaattacaggggaaggcag

SEQ ID NO: 501027 - DNA, 612 bp, Homo sapiens
cctgccttctacttttccgttgttcttgaacctgaaagcattgcactagaggcaatatgcttttctaccattctcttctagattctagaacaggacttggcaagctttttcagtaaaaggacagatagaaaatattttagcttgtaggccctaggtctctgttacaactactcaactctacctgtgctggatgaaagcaccatagataatacatcaacaaatgtgtatggctgtgtattaaactgtatttatgcaagcaggtagctcaggccatagtttatagaaccttctatttcatactgtcttctgcaaccaagttctaacagaataaagaagaaggccacattgtcacctcattactgctagggsttgggttggaggccagactccaggccttttagccacattggtttgctcacacagaatgccagatgccagaattagttagacttatctaccatggcacaggcagccgttggatcagggcagcttcccttctcctctgccagccactagggcacatcttatggagaccaggggaagcagagttcctcatggcctttcatcccaaagtggaagaagctcagagctgggccaagccctgcacgctta

SEQ ID NO: 501028 - DNA, 609 bp, Homo sapiens
acctgcctgccaagtgagcaaaccctttcaagcaaatccgccagggtcagtagagcctttggatcttccaggtcagctcccagacgtggtgaagcagagaaggtcatccctactcttccctatctggtgttcctatgaacctgtgaggtgtcataartgaagattgttgtttccagcctttaagtttgtgggatgatgatttgttatgtctgatctgactgatcatctcacaaaactatccatctttccctctaatatcatctggggaattccctttacctttgcttatcgaaataaaaaagagcaacctgggcaatatggcaaaaccctgtctctacagaataatacaaaaattagctgggtgtggtggcacatgcctgtggtcctatctactctgaagactaaggcaggaggatcatttgagcccaggaagtcgaggcagcaatgagttgtgattgcaccactgcactccagcctgggcaacagagtgagaacctggctcaaaaaaacaaaaaaaagaaaagaatagaaaagaaaaaagtcaaaaggttgaaacaatctaaatgtccattgcaaaatgtagtatacagtatacatatgatggagttt

SEQ ID NO: 501029 - DNA, 609 bp, Homo sapiens
acctgcctgccaagtgagcaaaccctttcaagcaaatccgccagggtcagtagagcctttggatcttccaggtcagctcccagacgtggtgaagcagagaaggtcatccctactcttccctatctggtgttcctatgaacctgtgaggtgtcataaatgaagattgttgtttccagcctttaagtttgtgggatgatgatttgttatgtctgatctgactgatcatctcacaaaactatccatctttccctctaatatcatctggggaattccctttacctttgcttatcgaaataaaaaagagcaacctgggcaatatggcaaaaccctgtctctacagaataatacaaaaattagctgggtgtggtggcacatgcctgtggtcctatctactstgaagactaaggcaggaggatcatttgagcccaggaagtcgaggcagcaatgagttgtgattgcaccactgcactccagcctgggcaacagagtgagaacctggctcaaaaaaacaaaaaaaagaaaagaatagaaaagaaaaaagtcaaaaggttgaaacaatctaaatgtccattgcaaaatgtagtatacagtatacatatgatggagttt

SEQ ID NO: 501030 - DNA, 557 bp, Homo sapiens
tctgtgtacagggagtgaacatttcagcaggcttcaatctgatggggaagattacctgtaaaatggtgtgggcattattatttctaattgttttggctcgttttgctgcttggcatataaacatgagaaaagggtaaccagggcctactctgggtccctgctgccctcaccatgaggttcaacctctgcatgtttggagtcaagccagaccatagtcagaaaatacctaagacagagtagcttagcgatccaaggactgaacatcaacctcacactgttccacctgtcacctaggacctaggcttctgccttttctggattgagtgtccatcgagttccctcctgctaatgaccagatggtgacgtgcttccatcagcctgggccccaccctgacaccaagcacctcagcttccttaaagcaagggygattccccattcctcgctggggaatcctgttcctggctaggacctcactctttgctactcagaattttctgatggcatctgcttaattacctattgctcacctgctcagttttatgtccccaatgccagg

SEQ ID NO: 501031 - DNA, 557 bp, Homo sapiens
tctgtgtacagggagtgaacatttcagcaggcttcaatctgatggggaagattacctgtaaaatggtgtgggcattattatttctaattgttttggctcgttttgctgcttggcatataaacatgagaaaagggtaaccagggcctactctgggtccctgctgccctcaccatgaggttcaacctctgcatgtttggagtcaagccagaccatagtcagaaaatacctaagacagagtagcttagcgatccaaggactgaacatcaacctcacactgttccacctgtcacctaggacctaggcttctgccttttctggattgagtgtccatcgagttccctcctgctaatgaccagatggtgacgtgcttccatcagcctgggccccaccctgacaccaagcacctcagcttccttaaagcaagggcgattccccattcctcgctggggaatcctgttcctggctaggacctcactctttgctactcagaattttctgatggcatctgcttaattacctattgctcacctgctcagytttatgtccccaatgccagg

SEQ ID NO: 501032 - DNA, 503 bp, Homo sapiens
ctgcaaagaccctgtttccaaataaagtcacattcacaggttctggattcgccagttcagtatagctttttgaaggacacaattcaacccataatatcaaatgactatcctttggaaaattgacaattctccttgtattttaaactatatattagatagaccaaataattgaaakaagtatttcagttaattggtcattctgatggccagaactaagaataaagacttatcagaatgctcttagcaaaacatgttttaaaagaacatctatgttagttgattcgaaggtgaacgtgagattacagatgacgtgccaccagagggaagacgatttcaaatgcatggaaagaaagaccttgtccagggcaaaggagaccctaatccactgcatctgagctattcacaccacacctgggacgctgtgtctagttattggcagttccagaaacagacacatgcacaaactggagtgtgtttagagtagaggacaaaagactcaaaat

SEQ ID NO: 501033 - DNA, 574 bp, Homo sapiens
ggcttctccctcctccagccgggtccgcaagcccagcctggaaaatcacgtggatgactctgatcaagcgctgttctctggagccctggcagtgcgagtatccgggacgcgcctgtctgggaattctccggccaagcactcacctactgtagatattgtcaggattttggcagcctctgagagcaggaccccagggagaaggaagcccactagaagaagcactcgctgcccagccatgctcacttctacggaagccgcggatctcagcctgggctgcgcgccctgcrcccggctaagggaccctgtgcacctcagtgcgccaaaggcactggctgtgggtagaggtaggagtaaggatcctgccagtcttctcttctgtccatcccctcttgccctctgcccctcctccctcgtgctccattggataatctatcctcgctctaccaaactaccagcagtcagtaggaggggtcggtgagcccatacttaaccctgctctgcccttgtgatcacagccctcctgcctggaaaatccttactgtgagtgaggaatggcagggacctcagtaaatcg

SEQ ID NO: 501034 - DNA, 524 bp, Homo sapiens
tgtgccttataatatatttgaagcttaaaacatacacgtgtatatgtatgtgtacatatgtgtgtgtatgaactaatgtgaaataagggaaaaatacaacggattatagatggtgtttctaaaacaaaagggatgttctaaaaacgtactgaatagcacagtaagagggttttaatatccatagtttaattcaatttaaaaaaagaaaatgtgaaatataagcacatgaaggaacattttaaatgcttaggtgtactagaattttcttttttaatagtgcttgaaataagtsgaccactggccagagttatgaaataacttcatcataaaaaaattgtcagtgtgatttgtgtgacaaatctatcattaaaaaggtggactgtagataagatatccttaagagagtggcacacttttgtatctttcttgcccagacagaaatccattttggcctccaaggtattggtattgacaccagatcagcactgctctggttgtcttgaatctcatgcttgatgtttcct

SEQ ID NO: 501035 - DNA, 608 bp, Homo sapiens
tccaactactattcatttaaaatcaaatggaagccccagttcccacagaaggcctcccgtgacatcaacaaggacaggccacttatgtaccataatttcattatttacttactcatctctctagacccccaggagctcttgagaaacaaaaacgcttttttttttttttttaacaatttttgtattttcaggaactagcataaaattgatacattcatccactcccatatttataaaatatgtactatacactgaggtctattctaggttttaaggacacaatgataaataaggcacaatcctgacccttattctgctcagagtttgagagatatagacaaacaggaaacttcaataamctatcctgatgggctacagtaggattcggggtgctgtgcagcttatgggaatggcgcaggggttagggaagcctttctggaggaagtggcctctcttgaagaatgagtaggagatacacagttgttcaatgaatgcctgttcccctagcctcacgcccttcaggggacaaaattaaaggactgactgaggccctgaaagctaggggtagaaagctgaagacagatcacccctgctgatctggggaggca

SEQ ID NO: 501036 - DNA, 608 bp, Homo sapiens
tccaactactattcatttaaaatcaaatggaagccccagttcccacagaaggcctcccgtgacatcaacaaggacaggccacttatgtaccataatttcattatttacttactcatctctctagacccccaggagctcttgagaaacaaaaacgcttttttttttttttttaacaatttttgtattttcaggaactagcataaaattgatacattcatccactcccatatttataaaatatgtactatacactgaggtctattctaggttttaaggacacaatgataaataaggcacaatcctgacccttattctgctcagagtttgagagatatagacaaacaggaaacttcaataaactatcctgatgggctacagtaggattcggggtgctgtgcagcttatgggaatggcgcaggggttagggaagcctttctggaggaagtggcctctcttgaagaatgagtaggagatacacagttgttcaatgaatgcctgttcccctagcctcacgcccttcaggggacaaaattaaaggactgactgaggccctgaaagctaggggtagaaagctgaagrcagatcacccctgctgatctggggaggca

SEQ ID NO: 501037 - DNA, 542 bp, Homo sapiens
aaatattaagtgatgaaagattatagaagctctacttggcagattttagactcttgactgtttggttgacaataaggagccaatgaatattactaaccaggaaagtgacaggcttagatttgtgtgttataaggttctggcctagagacttctagyttcagtgtaaaggaaactggaagagatttgtagacaaagtgataggagccaataatgacacagacattgaagatgcaggagaaaaaagaggtgcttcatggacaggttttatagtggttggctgggaatggcaccacgagaccagtagacagactagctgttgggaatcggagggatagtggttgactaaattaataatttttagatgaagataaataaatggagggagctcatatttgatggcatcagtctctaaagtttacaaggaagagttaacttagcagagtgagaaaaaaaatgggcttgataagtttgagagtgaaaactgttctgttttaagaattatggcctggttgcagcggcttacacctgtaatcacagcactt

SEQ ID NO: 501038 - DNA, 621 bp, Homo sapiens
aggcaaagtgaccagaaaattgaagacgttcagaaagaggagccccagggagtctggataggctggatgattctggatgaggctgctgagcttggacttctgcacctctgaggatctgctttgtcagattgccctcagggctgacatgtgtcatctggagtgtcctacrgaaacagccagctagaaaagagtccctaggaaatgcctgtttaatagttaatgctagcagtcaatcggaaaagtggctgagaatgcagaacagggaatgttaactcctgactccttctgaaggactcagaacagtgctggtgtctgctggggccttgggttctggttggtggtgctgatgcaagacaaggaaaagagagaggaaatagtgatgggggggaggaatccatctaagggctttgggcttagtaaagaatttattaccatggtgtgtgaatctcaagatggagagatggataaatgtttggagaccctgaccaaatttgcatggaattgctcagcacttcctctccactatgtgaatcatattttgtgggaaataagtgatggtggaggcacagaagaaaaaagtctccttttccccaacattgggctgtggaaaaggcagagcca

SEQ ID NO: 501039 - DNA, 562 bp, Homo sapiens
ctcctgtaatttaaattccaccttttcagagctaccctaaccaatttagcgccctcttgaagcagcaaggcagtggcaccctcttaagagtgaataacaggttcaacttattttggttgcaatttcacattagaaacaactggtattttttaaaaagtagtaataactgggtcccgtcctggacaaattgcatcagtatgtctgggggtggtgattctgatgcatggtgaggatgcagaactattggtctcacccatccctcctaccctgtttgattatagactcctggaggtgacggtggtggtgtgatagcatcttctgcttccttgactgtccctatmaaccttgttccatggtggtgaatgcttgctgctcacaactgactttgcaacttctttgaaggcatcttttacccaagtggccccatcagaccctctcatctttcagtttaacatctgagagaggattaggagagaggtgggctcacttcccacttctttcaggatgagagggcattgccagggtcctgccctgctatctttagaggcagagagctgttgca

SEQ ID NO: 501040 - DNA, 282 bp, Homo sapiens
cagtctccccgtggtgagacccagcaaccaacacacagtctatttattatcttatacttcctatttatttttactatttagtaagcctattttcttccaaagtttaagttcagtttatagggctttaagaaaagcacagcttaacttttagtgatttcayatcagaaaaaatggggaggaaaaagggcccatttatttttactgtcgccaaaaagtctaagtaaacacacatctacacttgttttcttttactgtcatttaaatatatccatttttacatag

SEQ ID NO: 501041 - DNA, 601 bp, Homo sapiens
gtactagttcaagttcatgttgatttttttttttttaatgttcacaatattggcaggagcaagatagagaagctgagagaaaagtttgtgcattaggggggactgggaagggaagggagtgaccaaatttaaagttctatgtacatatatctatacacatgtttatgtatatgtatatgtgtatgtaaatatgtagttttcaataggccccaaatagcaatgtcaagaagaaaaatcatgcaatttctggctacttgtagtctttattctatgacttgaagactrttgacggcgtctggctgtaaaagtacctctcactttctggtgccaccaggagggctgggttctttggactcagcataggtttgggctcctgaacatcaactgtgctctgaaggtgttttttgcaccgcatgaacttggagcatccagaagctgccggtttctcagtgcttacgggattttatttcagctctaatttccccaaaccagcacaggtcctagaggaacctgtatgtctttagctattttagttttttttccccaccttgaaattatttctaataattatatttaataatctactacctaatatacatca

SEQ ID NO: 501042 - DNA, 675 bp, Homo sapiens
ttgattttttatagtattttcagacatcttaagataaataactgcagttcagtggttagcaagaacaggtgggctttaaatttctatcaaagaaayatttctgtttttttgaaatatttaacttgtaagacaaagacagttgcttttaattcccctaaaaactgtgtggcaacctgaatgatatctagatgataacccatacatccaacagtatcatctttaatttgctcttttataacagggagcagatttccagctaagatgcaaatcaaaagatttctctgttctgtactgaaagctgtttgcttttgatatgttttaataaattattttcttttattcagagtatgtggttccattatgcttaagggagaaggctaaacaaacaaaatagcatgttcctattgcattctaaatagaaaccaacgttttatatcaaaaatatacctacaagtgacttgaaatcaaaataaataagcatacatgagacaaaagcaaataaactttatgactttaaccaagtctctaaagaggaagcaaaataaaattcagccctttcaaaatccagacaactgccaaagacagggataaagaaaggaaagcttaaacaaccatcagtatgctactcacaaatggggtgcaacttgcatttctgtctggtcatattcttggggt

SEQ ID NO: 501043 - DNA, 631 bp, Homo sapiens
agttttattattgctttctcattwaaaaaaaaaaaaactgcctgctagctccatgctggtccatcccatccactactcattcaataaacctgtgttgtccatcacttctttctttaggagctcattcgttcatatagcaaatggacgtgaactgcctgttcttaatgcacagcttataagagctcattcattcgtatagcaaatggacgtgaacagctctacacctaacacattgggatgcaacagtagacaatactgataatagtccctgttctcatgaggtgtcaggtgggagaaacagacggatagataaatatataactaataacaaattatcataagtgctgtacaaagcaaaaataaaagtgaaatctacggaagataacaaggaagtcttctttaaatatttggacaagaaaggtgtctttgaagacagattatttaagctgaaacctgagtggaagaaagtgtattctgggcagtgggaacatttaaatgggcttgaggtgggaaggacgttggaaattgagtaaactgggggaactggaagcagaaggatgtgatcgcagcatgatgatgaatacgcaagtggcatgagttgagagttcggaggaaataggaagtggcagtt

SEQ ID NO: 501044 - DNA, 598 bp, Homo sapiens
ttctgattttcaccatgtgaggacatggcatgcatcttttttgccatgtgaggagtcagcctcaacactctatcttagagagcagctttcaccagatactaaatgctggcaccttattctaggacttcccagcctctagaacttaacaaataaatttccattgtttataaattgccaagtcttggaaattatgttatagaagcacaaaaaatacacccatgttgaaaaacaattgaaaagcaataaatgtgagggtttattccttgattyctaattctattcctttgatcttgccataacacactgtcttgaggactccagcactgtaaaaaagtgttgacatctggaagtataagttctttaattttgttttgttttatttttctacagggtttggccattctaggtcttctgaacttccaaatgaattttaagatcagtttgtcaatgtctacaaaaaaagccagcagaatttttgataggaattgttataaacatccagaacaatttggagaatattgccttcttaatattaagtccaatgcagccctctccatcattctgtatttcagtgtgcaagtttgtactacctttgtta

SEQ ID NO: 501045 - DNA, 598 bp, Homo sapiens
ttctgattttcaccatgtgaggacatggcatgcatcttttttgccatgtgaggagtcagcctcaacactctatcttagagagcagctttcaccagatactaaatgctggcaccttattctaggacttcccagcctctagaacttaacaaataaatttccattgtttataaattgccaagtcttggaaattatgttatagaagcacaaaaaatacacccatgttgaaaaacaattgaaaagcaataaatgtgagggtttattccttgatttctaattctattcctttgrtcttgccataacacactgtcttgaggactccagcactgtaaaaaagtgttgacatctggaagtataagttctttaattttgttttgttttatttttctacagggtttggccattctaggtcttctgaacttccaaatgaattttaagatcagtttgtcaatgtctacaaaaaaagccagcagaatttttgataggaattgttataaacatccagaacaatttggagaatattgccttcttaatattaagtccaatgcagccctctccatcattctgtatttcagtgtgcaagtttgtactacctttgtta

SEQ ID NO: 501046 - DNA, 649 bp, Homo sapiens
tgcaatacttatttttcactttaggtatattattttgtgcctcagttccctcatctgtaaaactgggggagaacaaaatacctaccccgtaaggttgttgaggcttaggtgaaataatgcatataaacatcttaaactcataatctgagacagcaaacactcaataaatttyacttattgttattagtgaaaactggtaacaacttaaatatctaacaattagaaaactttaaataaattgtagtttttccatattatacaacttctaaaaattatgatgtggatccatattctcatagaaaaatcatcacaatatattaagtgagaaaagcaggttagaagccagtacatttcatttttgcatttttatgaacatatgtaaatgtaataatattgggtatatatccaatattaagagtaacaatatagggtaatgagatgtggataacagttttgctggtggttttttgtattttataatgtttttttctttttttgtattttataatgtttcatcaatgaacataagtgatgtatgaaatacatgatttatttaaaaacaatccaaaataatgaacagaaaaatcaagaggtgtgaaataaatacagtggactttcattattaaaagtaattatgttctattaaaag

SEQ ID NO: 501047 - DNA, 649 bp, Homo sapiens
tgcaatacttatttttcactttaggtatattattttgtgcctcagttccctcatctgtaaaactgggggagaacaaaatacctaccccgtaaggttgttgaggcttaggtgaaataatgcatataaacatcttaaactcataatctgagacagcaaacactcaataaatttcacttattgttattagtgaaaactggtaacaacttaaatatctaacaattagaaaactttaaataaattgtagtttttccatattatacaacttctaaaaattatgatgtggatccatattctcatagaaaaatcatcacaatatattaagtgagaaaagcaggttagaagccagtacatttcatttttgcatttttatgaacatatgtaaatgtaataatattgrgtatatatccaatattaagagtaacaatatagggtaatgagatgtggataacagttttgctggtggttttttgtattttataatgtttttttctttttttgtattttataatgtttcatcaatgaacataagtgatgtatgaaatacatgatttatttaaaaacaatccaaaataatgaacagaaaaatcaagaggtgtgaaataaatacagtggactttcattattaaaagtaattatgttctattaaaag

SEQ ID NO: 501048 - DNA, 573 bp, Homo sapiens
ggcctacatggtgtatttttttcctactgtcatacttttctctttacttttaataaatcatgtttgaagtgggctgaagagtgagctctaaaacttgtctagtaagtggtattattttatgtttcttttccactccattccacatacaattattttgaactcagttgcatgaattggttaaaatcaatgtactgaaccagtgttagtatcgcttttaaaactttgcacataaagtcaaatctggttctacaagaaaatggatagaatttaatgccaggactcttctccagaaataattgttttctttgcaaaagagagcaaaracacctttggaattatttcatgttctcctcttaccctgtagagttgatacagcaaaagtacactaccacgaaggtttttcatcttaattacagtgaagttgagatttaatggattattcctacactatctggcaagcctagaattgaaagtgatttgaagcctggccaacctctcccgccggctcctgggtcatttactgcagccaccgaaaaaccagacacgtgactcctcacacagtggaggccactt

SEQ ID NO: 501049 - DNA, 560 bp, Homo sapiens
ctattctgagctggaaaaacaattaacaccatcaagaatcgtaaccgattcgaataatctgctcattcttatttttacagtcctataacatctttattctcctatttggttataggattttcagtttataaaatgacattcatggatgtccctgtggyttctcttctcaggacactacacaatgaaattcaagtgatctttgaaagaaatacaggaggtttttttctctttattgtatggcgttcagaggtccttgacaaggagctagaggcaatttgtccagcctcaattatgattcaccagcctggataaactgtaatatacaaacgtgaacacatttatcttcattaagtccctactgttctaggtgtagtgaggtgggaaggctaatctcataccctgggtgggaaatacagagaggacgcagaggaggcacctgccctttgcaggcatggaagacaatggacccttccagggcctcaggcaaagaacttctcccaggtgctggattcagcaagaagtgacaccacctgtgcatgccccagggcgtagcaggcagc

SEQ ID NO: 501050 - DNA, 560 bp, Homo sapiens
ctattctgagctggaaaaacaattaacaccatcaagaatcgtaaccgattcgaataatctgctcattcttatttttacagtcctataacatctttattctcctatttggttataggattttcagtttataaaatgacattcatggatgtccctgtggcttctcttctcaggacaytacacaatgaaattcaagtgatctttgaaagaaatacaggaggtttttttctctttattgtatggcgttcagaggtccttgacaaggagctagaggcaatttgtccagcctcaattatgattcaccagcctggataaactgtaatatacaaacgtgaacacatttatcttcattaagtccctactgttctaggtgtagtgaggtgggaaggctaatctcataccctgggtgggaaatacagagaggacgcagaggaggcacctgccctttgcaggcatggaagacaatggacccttccagggcctcaggcaaagaacttctcccaggtgctggattcagcaagaagtgacaccacctgtgcatgccccagggcgtagcaggcagc

SEQ ID NO: 501051 - DNA, 612 bp, Homo sapiens
ggtgttaggggccgcaaggctgctgctgagaggtgggggagagcccagccgtgtctgataagggacatctttcctttgctggagaaacatctcctccatgccagataccagcaggagagggctcaggtcagccagcagaggaagcattggggaaaagtaagagttcggaaacttgagagtaggatctgttggttagatgggaccggcagtttatcgagagatccgatcacttttgctgggatggactgccatttacccttacacagaggtgctgggtgctggctgtggcatgctgcactttaggcaccacatttcacctgcccggttcctgatggcgaagcatgctcctccccaggatggrggcctcatcttagtacatcctcatggaagggaatctgaaagcttctcaaggctgctgctggaaccaattaaggttgatttaccagtattgtttccattagagattggactacagaatgttttaaggttctaactgtgtatcccgtgcttgccttatagtgggactgcatggccgatgagatcatgagccccttaatggttaccagggacaaatggaggaagactcagcactgggcatctgaaaatccagca

SEQ ID NO: 501052 - DNA, 519 bp, Homo sapiens
tgcccagggcagctccactgggggagcagcgatatcagggaggcagagtggcctgcacaagggctctgatgcgctggagagcatccttagggcctgccactatcaaaaggacactgggagcaccccagcagcctgggaatgaarctggggccatttcttaccctccatcttctcattctgtaccttttctcttttggtggggaccccaacacttcatctgcagggtgacccctgataagcaccagcccaatcaaagtggaatggaggcaggatctaagatagatgctattttttacaatactttactgattaactagcttgatttcattaacgctgccgtgttaccttaaattagcctttttttcttcttgcacactgaaagctttcttctttgttaaatacataccaggcaagaacaagtcaggagaggtttgagggcaggaagagaacagaactctgatgggacatttagggtgggggcacagggcctccactgcccgcagtgggctctgcttccct

SEQ ID NO: 501053 - DNA, 520 bp, Homo sapiens
tggtccagggtgtggaagggatggttcaggaaaacctgagtccctgcaactgagttgcctcgtgacacgattgtccccttcttgcccctactccaggctcatattttcttttttatctttttttttttgaaatggagtctcacttcatcacccaggctggagtgcagtggcgtgatctcaactcactgcaagctctgcctcccggattcaagccattctcctgcctcagcctcctgagtagctgggactacaggcgcccaccaccactcctggctaattttttgtatttttagtggagacggggtttcaccgtgttagccaggatgstctcaatctcctgacctcgtgatctgcccgccttggcctcccaaagtgctgggattacaggcgtgagccactgcgcctggcccaggctcatattttctaaagctgcccattcccagataataaccaactcctgataaagaaacttgaataaccattcagttaatatttattgattgatcattcactacatcct

SEQ ID NO: 501054 - DNA, 520 bp, Homo sapiens
tggtccagggtgtggaagggatggttcaggaaaacctgagtccctgcaactgagttgcctcgtgacacgattgtccccttcttgcccctactccaggctcatattttcttttttatctttttttttttgaaatggagtctcacttcatcacccaggctggagtgcagtggcgtgatctcaactcactgcaagctctgcctcccggattcaagccattctcctgcctcagcctcctgagtagctgggactacaggcgcccaccaccactcctggctaattttttgtatttttagtggagacggggtttcaccgtgttagccaggatgctctcratctcctgacctcgtgatctgcccgccttggcctcccaaagtgctgggattacaggcgtgagccactgcgcctggcccaggctcatattttctaaagctgcccattcccagataataaccaactcctgataaagaaacttgaataaccattcagttaatatttattgattgatcattcactacatcct

SEQ ID NO: 501055 - DNA, 520 bp, Homo sapiens
tggtccagggtgtggaagggatggttcaggaaaacctgagtccctgcaactgagttgcctcgtgacacgattgtccccttcttgcccctactccaggctcatattttcttttttatctttttttttttgaaatggagtctcacttcatcacccaggctggagtgcagtggcgtgatctcaactcactgcaagctctgcctcccggattcaagccattctcctgcctcagcctcctgagtagctgggactacaggcgcccaccaccactcctggctaattttttgtatttttagtggagacggggtttcaccgtgttagccaggatgctctcaatctcctgamctcgtgatctgcccgccttggcctcccaaagtgctgggattacaggcgtgagccactgcgcctggcccaggctcatattttctaaagctgcccattcccagataataaccaactcctgataaagaaacttgaataaccattcagttaatatttattgattgatcattcactacatcct

SEQ ID NO: 501056 - DNA, 520 bp, Homo sapiens
tggtccagggtgtggaagggatggttcaggaaaacctgagtccctgcaactgagttgcctcgtgacacgattgtccccttcttgcccctactccaggctcatattttcttttttatctttttttttttgaaatggagtctcacttcatcacccaggctggagtgcagtggcgtgatctcaactcactgcaagctctgcctcccggattcaagccattctcctgcctcagcctcctgagtagctgggactacaggcgcccaccaccactcctggctaattttttgtatttttagtggagacggggtttcaccgtgttagccaggatgctctcaatctcctgacctcgtgatctgcccgcctyggcctcccaaagtgctgggattacaggcgtgagccactgcgcctggcccaggctcatattttctaaagctgcccattcccagataataaccaactcctgataaagaaacttgaataaccattcagttaatatttattgattgatcattcactacatcct

SEQ ID NO: 501057 - DNA, 615 bp, Homo sapiens
ccccactgactcccttcccaataagaagtaaaaggagaaactgatgaaggaggctgagaaatagaagaacagtgacactaaacttaaaaccatgttaagtgtctgcaaacctggctaccgaggttggtttcctctgtgctagtgggttggtaacaatggtgaaatgaaatgcgactctgcggggagttgtaaagaaagtcaaaraatttaaattcaagcatgctgcaatccaggggaaggctgagcacacacaaatactaaaagcaaaatgcaagctggtttatgtagaaaaaaattcacaaatccactagctgtggtttgcccttagatcagagatgtgaagagagtcctatctaatcagtttgcctgtgggaaatgggagaatgaacttcaaatacttaaaatacaagcaagaacattattttatgaatggttatcacagactcccaaatggaggcaatttttgatgaatgcttcatatgggtgccaaaatctaaagggcttccgaaggtgattgataaatgttctcacgaatttatttgcagcaaatccatagcaaatgatgaaaacttccttcaaagtggtagatagaagagtattaaaccctgcttactt

SEQ ID NO: 501058 - DNA, 570 bp, Homo sapiens
caattccactctcaattatataggaaaatatatgtataaatttgtaagcctattgctatatacaagaatgtttatgacagaattattaatagtgtccagaaattgttggcactcaaatgtctattgattataaactaaaaagataatctgtggtattctcaatcaatgaaatactacacagcaacagaattaaaccaacaactgctacattaaaaaaaaaagacactttgggaggctgaggcaggtggatcacgatgtcaggagttcgagacaagcctgaygaacatggtgaaaaccttgtctctgctaaaaatactaaaattagccaagcatggtggtgcgcacctgtaatcccagctactcaggaggctgaggcaggaatattacttgaacctgggaggtggaggttgcagtgagccgagatcatgccactgcactccagactaggtgacagagtgagactccatctcaaaaaaaggaaaaaaaaaggagtatatattacataattaatttaattacataagcaagtaaagctgaagtatgacctttgaagtcaggttaatacttaat

SEQ ID NO: 501059 - DNA, 574 bp, Homo sapiens
ttaaggcagtgtttcttgaaattataatcatgtttgtgaatttcaggcaaagctcaagttcaatatgcttcaaggtcatgattataccttttaaagtaatattaaagaatgaatgcaagcctgaaagtcagtgacctgaatgttgttttgtggctatactatatattttaaaatagaataccatgaggaaaacagtgctgagtagaaccaatgcaaagctttcaaatatttatgaatcagatcattaataataccaatgatgtactaagtgtgagcagtcaatcgatgtaaaaactgtacagttattggccctctctgactggctggaaaagtatggggtaactaatgatgtaaaatgcttattacaaatttgatagttatacaggtatatattaagatctgggaataaaatgataaactgaaccayagaaaagagattttgaagcaattactaatcaggataagattctaataaatcaatctgcattaaggttgctcttcatcagctagattcatggtattgcaaattatttacatttttaaaggctcacctggcttagcaatgatattcaaa

SEQ ID NO: 501060 - DNA, 534 bp, Homo sapiens
cctgtcctccccgagcactttgcacattcaaaagctgtttyagaagtagcagcacatctgattctctttaatgcacttccaggcagcacagatgtgcatcaatgaatgaatgttccctgaaccaaagtgcttccgtgggcctcatggtcccctccctcggcacccactcccaggccaagagcgtcctatgaatcatgcatttgttcctgttattgctgttcacagagtggcaactcttgcaaagggaggggtacaaagtgaatttttagatgctgcaggagacgaagggtcagggactctggctggggtggggatggggaacgggaagaagcagaccttgtcagggggtgatggatgtaggctcctggaggggaagcttgcagagtccagagccctgccacctgttcacatggcaacggcaccctggctgtaacacctcctgcatatgtccatatgtaacaggctttatcctgaatggagaatttggcacctgaagcagtcccatgtggagtccagctgacacgggagtggggt

SEQ ID NO: 501061 - DNA, 534 bp, Homo sapiens
cctgtcctccccgagcactttgcacattcaaaagctgtttcagaagtagcagcacatctgattctctttaatgcacttccaggcagcacagatgtgcatcaatgaatgaatgttccctgaaccaaagtgcttccgtgggcctcatggtcccctccctcggcacccactcccaggccaagagcgtcctatgaatcatrcatttgttcctgttattgctgttcacagagtggcaactcttgcaaagggaggggtacaaagtgaatttttagatgctgcaggagacgaagggtcagggactctggctggggtggggatggggaacgggaagaagcagaccttgtcagggggtgatggatgtaggctcctggaggggaagcttgcagagtccagagccctgccacctgttcacatggcaacggcaccctggctgtaacacctcctgcatatgtccatatgtaacaggctttatcctgaatggagaatttggcacctgaagcagtcccatgtggagtccagctgacacgggagtggggt

SEQ ID NO: 501062 - DNA, 559 bp, Homo sapiens
ctgggctgcattagcaattctgctcttcttcatttgttgacccttctaactaactataagcaatattagatttcctattcaagtattgcaaatgccttggtgtttagcaggatatcagattcattgcatacttctgtgggaaatattactgcttcactctatcaacaatcaggccagagtgggcagcccaaagagttatggttcatgtttttggcttttggcaaaccccttctcattttctttttgattcactgtctgcttaacttcttttgcttttatgcatgacttgccttgggtgagtaattttatttacagtctggagaaaaggagttttagatataggtcaccagaagcagacccagagaccaagattcatgctaaagtactttattagaaaacgtttctgagaagaaacaataagaaaaaaggaagttggatgggarccaaaggaaccgttttgtggttgatactgccctcttgattcaagagggaggtcgacctcccaggctcaagcacaaagaggcaagcacagtatcaagtacaaagccaccatgggact

SEQ ID NO: 501063 - DNA, 465 bp, Homo sapiens
actggaggtagtaccgctcggagctcaggctgtccatggagtagcgcgcagtggccgcagccgcggcggcggcggcggcggcgsctgcagcggcggagggcagctcctcctccccgcagggggagcccttgcggccgtccgggggccccggcttggccactgccgcagcgctggcaaatgcgtccccggcgtcggtgtcactaagcatggccgcgggggcccctgcgctggcggctgcgggctccccgctcaccgcctcgcaggagagactgccggaaaacttcttggacgctttgtctaagtccaacttctgaggagagggggccgcgctggggaggtggccagcgctcccgccgctgccgcctcgcgcactctccagcgggtagaagtgcgcgccaggcaggttcactgagctcaccaagagctgctcccctaactgcatgctttgcaaagcgcagacggcag

SEQ ID NO: 501064 - DNA, 602 bp, Homo sapiens
tacaattgaaatctaaagaaagaaaaaatgactttccttcaggtgtctgcaatgtaaatgaaaattaaagcctggatatatgattgtcttttctcacttagtttgcaatgaaatcagcccaccaaaatataaacttttacctagcactcttttcaaaaaacttttaacacacacattttaaaaaattctctcacctcctacttaacctgaaatcttgcttagaaacaaagctaaacttggagtgataatggcttttctttagctacaattcctaaggttaaaaaaaaaaaacaaaattaaaaactactgatgtatgctatttaaaaaaataaaaagcagccatcctcccatctgcctgcaaaccccawtgtaaaaaaataaataaataaaaataaaaaataaaatacttttctaaactctgaaagaagatctaaactccgacactctggcctcaggacccaatgttaaaaaataaatcttagaattcaatcttctgtgacttttttttttctcaagattatctaaatttggcttattatgaagacaaggacaaccattcaatacttatttattccccaattaattcactcagacatgccaaa

SEQ ID NO: 501065 - DNA, 380 bp, Homo sapiens
ctgactgcatcctacccctcctgggttcaagtgattctcctgcctcagcctcccgagtagctgggactacaggcgcacaccaccacccctggctaatttttgtatttttagtaraaatggggtttcaccacgttggccaggctggtctcaaactcctgagttcaagtcatctgctcgccttaccctcccaaagtgttgggattacaggcgtgagccactgcacctggcccctttcaccttttaaatccggttactaacagccagccttgatgtcctccccaaaaagaagcctcttccccatttctgccaaaaatcagcaaacaagtcaaggaaaagggaattaggccaaaaatgaaaactcttattcctttgtcaaataa

SEQ ID NO: 501066 - DNA, 380 bp, Homo sapiens
ctgactgcatcctacccctcctgggttcaagtgattctcctgcctcagcctcccgagtagctgggactacaggcgcacaccaccacccctggctaatttttgtatttttagtaaaaatggggtttcaccacgttggccaggctggtctcaaactcctgagttcaagtcatctgctcgccttascctcccaaagtgttgggattacaggcgtgagccactgcacctggcccctttcaccttttaaatccggttactaacagccagccttgatgtcctccccaaaaagaagcctcttccccatttctgccaaaaatcagcaaacaagtcaaggaaaagggaattaggccaaaaatgaaaactcttattcctttgtcaaataa

SEQ ID NO: 501067 - DNA, 380 bp, Homo sapiens
ctgactgcatcctacccctcctgggttcaagtgattctcctgcctcagcctcccgagtagctgggactacaggcgcacaccaccacccctggctaatttttgtatttttagtaaaaatggggtttcaccacgttggccaggctggtctcaaactcctgagttcaagtcatctgctcgccttaccctcccaaagtgttgggattacaggcgtgagccactgcacctggcccctttcaccttttaaatccggttactaacagccagccttgatgtcctccccaraaagaagcctcttccccatttctgccaaaaatcagcaaacaagtcaaggaaaagggaattaggccaaaaatgaaaactcttattcctttgtcaaataa

SEQ ID NO: 501068 - DNA, 629 bp, Homo sapiens
aaaaattaccatctatacaacgttttgggcaaaaattaaggggtttatcatcatggcttttactcaagtaacacaagtcaaatagcaaatcaaacataattttgaaattactcaacttttccaacccctctttctttcacatatgtgtgtcctgttacattcaccctcaacaaacaaatttgtgaattacaccttttacctacaccacactccttcatttttatttggggtttgatggagttctaaattctagataattaaaagttgtccatgactaggaatgtgccaaaacctgggaagaatttatttacacttatataatcwaaacgttgagattctttcctccaaaacaaacctctgtaaggaattgtgaaagggctgaaattttagcctacttgcaaactagtaagtcagtctgccacaatttcatatgtactggcagaaaacaaaacactcttgggtcagagacataggattttactcctcatggcacagaaagcactatgagcttcatgtttgtgtcagctcccttcttactcaaatcctacagaatgacataaaatggttcctgtggaagctttgcacgcagagggtttgcatcagagctgaggaaccctgagtttagaaaa

SEQ ID NO: 501069 - DNA, 626 bp, Homo sapiens
ttatatagtttaatatatctactcatatcctagatttcttaaatatgctgggtcgttggggagtgtagaacattgctgattatatagtaaactcccacttgttgccttcctttaaaataattgtcattttataattttctcttgtttagtatgaaacttcatyggtctgtgtcatttatatatatgtgtgtgtatatatgtatgtgtataatgtggattcttttacacaaataaaaattggataactattgtacggtgtcatggtttgatatctgtatctagtgaaatgattatacagttaagctaatgaacacatctgtcacttcacatggttagttttatgttgaaaacacttgtctgctgtgttaacgcaaattttaagcatacaaaatattattaactgtactcatgatgctactcattagatttccaaagcttatttattttataactgaaagtttgtgcccttttaataccatcttccattttcctacctccttggcaatcacgtgtgtcttctgcttctaggagtccaaccttttaagattgctcatatgagtgagaagaacaggaagtatttgtttttctgtgtttggcttatttcacttagcgacttagtatgttgt

SEQ ID NO: 501070 - DNA, 523 bp, Homo sapiens
cccatctctcgtactgcagtttctcatctgctataacaaccatttattattggtctcaacagaaccaacctgtcggtcaaagtataccatcattccattcagtactctgtgtaataggagacagaaaccagtctttttcaarcccccaaaagtatggacacatgtgccactattttctttattttctgagggagaagtcggaagtttactcctaagggcacctaccttattggaaaaaaggtagggctgtggtgggtaaatggaaccaactttccttccattctatggggcttatggcattgtgctcacctgcaaacccttcattgatttttagagttctcagaaaggatttttaaaaaatttaaaaaaatttgtgggtgcatagtgtatatatttatgaggtacataagatattttgatacaagcatgcaatgcaaaataagcatatcagggaaaatggggtgtccattccctcaagcatttattttttgacttacagacaaattatactctttattttaaa

SEQ ID NO: 501071 - DNA, 519 bp, Homo sapiens
agatctctaatttaaattacttctactacattatgaatacaatattaacttcaatataagaatcgcttttcacagccaggtgcggtggctcacacctgtaatcccagcactttgggagttcgaggtgggtggatcacgaggtcaggagttcaagaccagcctggccaagatggtgagaccccccccccccgtctctgctaaatatacaaaaaaattagccaggcgtggtggcgggcacctgtaatcccagctactccagaggctgaggcagagaattgcttgaatccgggtggcggaggttgcagtgagccaagattgcaccactgcactmcagcctgggcgacagagcgagactttgtctcaaaaaaaaaaaaaaaagaatcacttttcaatatcttaaaacaaagacaacatatttaaaatagaaaacaacaaaatggtaatataaacccatagtccaatgaccatttacctcatataagatttgtcctgatgccaaacactttctattaccaaagg

SEQ ID NO: 501072 - DNA, 519 bp, Homo sapiens
agatctctaatttaaattacttctactacattatgaatacaatattaacttcaatataagaatcgcttttcacagccaggtgcggtggctcacacctgtaatcccagcactttgggagttcgaggtgggtggatcacgaggtcaggagttcaagaccagcctggccaagatggtgagaccccccccccccgtctctgctaaatatacaaaaaaattagccaggcgtggtggcgggcacctgtaatcccagctactccagaggctgaggcagagaattgcttgaatccgggtggcggaggttgcagtgagccaagattgcaccactgcactacagcctgggcgacagagcgagactytgtctcaaaaaaaaaaaaaaaagaatcacttttcaatatcttaaaacaaagacaacatatttaaaatagaaaacaacaaaatggtaatataaacccatagtccaatgaccatttacctcatataagatttgtcctgatgccaaacactttctattaccaaagg

SEQ ID NO: 501073 - DNA, 648 bp, Homo sapiens
ctttgagaacaagctgcttgttccagtaacctgctgtacctatgcwttcaaactttctttgccacagaagaagcatgtgtggtaaatgggaaccaatttgattacaaacttcatttggccagtttcctataaatgtggatgcaagatccaactttgcatattcaaattgggaatatttatataccgattttttttttactttttattttacttatgctttacatgtggtatgcaatcagcagtcttcccttcctttttctctagtactagggaaaaaacctaggaaggtgctggttttacttatactgtcttaactttgtctttcttaatattgctaacccataggagaaaaatttagtcttcacaatgcctttttctaaacttaaagttaacctttatactgatcaagaaaagaactaaggaagcttataattatatgtaccagaatgactaaaaaatgtgaaaatctaaacaaaaatgcaatctcttctgagaatctaagacataagtattagttttggcttcgctactcattttgccaaataatcttcaaagaatcctcatcttattttgaaattcagttctctcatctacaaaatcaagataaatataattgcactctctgcttcattgggatatttgtatgct

SEQ ID NO: 501074 - DNA, 648 bp, Homo sapiens
ctttgagaacaagctgcttgttccagtaacctgctgtacctatgctttcaaactttctttgccacagaagaagcatgtgtggtaaatgggaaccaatttgattrcaaacttcatttggccagtttcctataaatgtggatgcaagatccaactttgcatattcaaattgggaatatttatataccgattttttttttactttttattttacttatgctttacatgtggtatgcaatcagcagtcttcccttcctttttctctagtactagggaaaaaacctaggaaggtgctggttttacttatactgtcttaactttgtctttcttaatattgctaacccataggagaaaaatttagtcttcacaatgcctttttctaaacttaaagttaacctttatactgatcaagaaaagaactaaggaagcttataattatatgtaccagaatgactaaaaaatgtgaaaatctaaacaaaaatgcaatctcttctgagaatctaagacataagtattagttttggcttcgctactcattttgccaaataatcttcaaagaatcctcatcttattttgaaattcagttctctcatctacaaaatcaagataaatataattgcactctctgcttcattgggatatttgtatgct

SEQ ID NO: 501075 - DNA, 623 bp, Homo sapiens
agatagagataatagatgatacagataaataaataatcatgagtatacatcatgacacaagccaaggggggaaacttgcaagagwacaacagtgatcaacactatccactagccactattgatagactattttgaatgaatggttgaggcaggattagaagttatgtcttcaaattccaagttttctcttttgacattattatacagccaagtatcacactcatcctttcagaattgcaggttttctctggtatttgagtgcttggtcataagtttcttcagggctgcgggacaagataatatagatttgtacctcctaactctacttccttgccatttaagtgcatctgggaatgatgtgagaggtagtggatagaaaagatttacaaacatatatagagaaaagaaagagaaatagcaagttgacattaaaatgtatgcacatgtagttcattttcatgattagaaaatatataattatgattcattttttatatgagagatctagcatgaatggcttgattattatgcttgtgtcacttttatcatttgagctttcagtttcatctctaaaatgtttgtttttaaaataaggtcaatcacagattgcatgatttgggaag

SEQ ID NO: 501076 - DNA, 623 bp, Homo sapiens
agatagagataatagatgatacagataaataaataatcatgagtatacatcatgacacaagccaaggggggaaacttgcaagagaacaacagtgatcaacactatccactagccactattgatagactattttgaatgaatggttgaggcaggattagaagttatgtcttcaaattccaagttttctcttttgacattattatacagccaagtatcacactcatcctttcagaattgcaggttttctctggtatttgagtgcttggtcataagtttcttcagggctgygggacaagataatatagatttgtacctcctaactctacttccttgccatttaagtgcatctgggaatgatgtgagaggtagtggatagaaaagatttacaaacatatatagagaaaagaaagagaaatagcaagttgacattaaaatgtatgcacatgtagttcattttcatgattagaaaatatataattatgattcattttttatatgagagatctagcatgaatggcttgattattatgcttgtgtcacttttatcatttgagctttcagtttcatctctaaaatgtttgtttttaaaataaggtcaatcacagattgcatgatttgggaag

SEQ ID NO: 501077 - DNA, 596 bp, Homo sapiens
  misc_feature (1)...(596): n = A,T,C or G
nnnnnattaatgatggaggtaacctcatcgtgtgtcaaggagcatctggaattataagggttccatttatgatttttggactttatgataggtttatcagattatcaaatgcattatcagtttatgatatttttgacttacgatgggtttatcagaacataatcccattgtaaatagaggagcatytatacggtgataaacaacaccacattgagaaaattaaggaaaatcagagatagacttcaacttcaagtaatttatgagtctttggactccaattcgatgtttttgtttccgccactcccaaggttgtctggcaactggttgatttcacattccattattataataattattgtttttgttttttaatgagttattatctctatttatataattcctatttcagcagtatatgtggatctctttcaagacctctgtatttacagtttggcaaaggaactggcatactgaaagagaaaaaatataaacttttaaaatctttttattataaagctcattaattcagtctctccttatagtagagagctcagattttcatcatctgtgggaagggttatatctacttgccaggt

SEQ ID NO: 501078 - DNA, 596 bp, Homo sapiens
  misc_feature (1)...(596): n = A,T,C or G
nnnnnattaatgatggaggtaacctcatcgtgtgtcaaggagcatctggaattataagggttccatttatgatttttggactttatgataggtttatcagattatcaaatgcattatcagtttatgatatttttgacttacgatgggtttatcagaacataatcccattgtaaatagaggagcatttatacggtgataaacaacaccacattgagaaaattaaggaaaatcagagatagacttcaacttcaagtaatttatgagtcyttggactccaattcgatgtttttgtttccgccactcccaaggttgtctggcaactggttgatttcacattccattattataataattattgtttttgttttttaatgagttattatctctatttatataattcctatttcagcagtatatgtggatctctttcaagacctctgtatttacagtttggcaaaggaactggcatactgaaagagaaaaaatataaacttttaaaatctttttattataaagctcattaattcagtctctccttatagtagagagctcagattttcatcatctgtgggaagggttatatctacttgccaggt

SEQ ID NO: 501079 - DNA, 610 bp, Homo sapiens
aaagtacagcgattctctgggacaccttgtcctggacgtttgagacatctgcccttctcttttcctcctagggagggagctacagtgatcacctcctgcggcgcagggtcgggggaactaaagggcgatttttagagaagcaagagccaaactcaagaggcaaaacctgccatgggaggagagcccagcagttcagcgccggtgaatcctcacctgagccgagtatcaagagcgacagcaccacyggcgccggcggtagcagcggggctctcattggtccttcgcagcggcggcgtctcggtctctggggcaactcggtctctgggacacgagctgccgccaaaacgagcgggtgttggaagagcgagtggagaccgggagtgtgcgccgctctcgaaggcttggggagctcggggcggcgggcgcggcgcctcgggctgtcccgggacctctggggcgctggcacccaggtgtgcgaacgtctgtagggcggcgcgcacctgccgctttataggctcagccgggagggggccgcagcccatgacgtcaaggcccggccgtgggtggaggcaggcggcgccccagaaggtgctacccgaaaaccacgcgc

SEQ ID NO: 501080 - DNA, 614 bp, Homo sapiens
caaaatgggagaaggaacgtacagggtctaaaaacaaaaagagattataatattcaagtaatgactaaaaagtcaacaaagaaataccttcaacttaggaccttccatttaaagaggggaaaggatatgagctaggaattcacagaatttaaaacctaagtaaccaataagcatgtggctatgactagtgacagcccatttgttgctttggtggaattagaaataaatagtcagcctttccttcaaatagctattgtcccatccatgccagtgcacacagggcacaagctggttttgagctcccactcacattcttggctaggtgttcttttgtaagtaccsgcatccatatatcatggccctgcatataaacatgctcaaacttcttgaaataaacagaaatgcaaatcaaaataacaataggatatcacttaatgaccataagatttgcaaaaatagaagctgggtaatgccaaatgttggtagaagcttgtggacataggaatccttaaacattactgactggagattagcatggagctgccattatggaagtacttagtaaaattaaaaatgaatataccatattatccagagtaaatatattcctgaca

SEQ ID NO: 501081 - DNA, 659 bp, Homo sapiens
ctaaaatagcattatttttctaagtattaataataatttaagtagtgcttttgcattcccaactagaataatttttaccaagtactccttcaaataacactgagaggtagatcgttaagcattagttcattcaacaaatatttactgagcatctggagtttgtaagacaccatattaagtcactgattcctatcctattttattaaccaagttacagaaaggggaaagggaatgtttacaggaacaagtcatcaaacacctttgctcagtttcgccatgtcctaaactattctgatagcttgcatctgtatagcattttacagtctcaaagcacgttttcatgacatgaattctcatatcacattattttagcctttatgactcctgaactttcaccctgcttttattgtccatggtgttgatgtcattgatcttgcccttaggttttaagttcataaaaactgaggctattttaaacaccatcraatctttcacagtgtctaacccactttcttaagtacagtaggtacctgatatttaacgagtgaatgaatgacatttcatttgatccttacaagcatagcaggcatgattatctccatgaaagaagacaatgctgtaccatagggagattaattcctgattctagctgttagaaa

SEQ ID NO: 501082 - DNA, 659 bp, Homo sapiens
ctaaaatagcattatttttctaagtattaataataatttaagtagtgcttttgcattcccaactagaataatttttaccaagtactccttcaaataacactgagaggtagatcgttaagcattagttcattcaacaaatatttactgagcatctggagtttgtaagacaccatattaagtcactgattcctatcctattttattaaccaagttacagaaaggggaaagggaatgtttacaggaacaagtcatcaaacacctttgctcagtttcgccatgtcctaaactattctgatagcttgcatctgtatagcattttacagtctcaaagcacgttttcatgacatgaattctcatatcacattattttagcctttatgactcctgaactttcaccctgcttttattgtccatggtgttgatgtcattgatcttgcccttaggttttaagttcataaaaactgaggctattttaaacaccatcaaatctttcacagtgtctaacccactttcttaagtacagtaggtacctgatatttaaygagtgaatgaatgacatttcatttgatccttacaagcatagcaggcatgattatctccatgaaagaagacaatgctgtaccatagggagattaattcctgattctagctgttagaaa

SEQ ID NO: 501083 - DNA, 575 bp, Homo sapiens
ccatgggtggggaaggtccagtctgagagctgctattctgaagtacaaccttagggcatttgctattcctagcatttttgctgccctgaggctgtccagacattaaggctgagttatgctccttgctttaaaagaagataaaatctaaacaagagcaagggaattaaatggcccccttttggcattcaaagcactcttgaagcccttttcagagacaatagttgcaaaaagctagagctagacttttttgagagaaaaagagattttcaagtcccagtgagccaaaacttcctggaatctaggtttataaactaaacataggtaggaaagatgargatatcatgttcgaacatttccctggctcaaaatgttaccggaaaggggtctcaatcaggacctcaagagagggttcttggatcccacacaagaaagaatttgaggtgagtccatagagtaaagtgaaagcaagtttatttattaataaagtgaaggaataaggaatggctactccacaggccctcaggactgccggttgtctattttatggttatttcctgattatatgctaaacaaca

SEQ ID NO: 501084 - DNA, 535 bp, Homo sapiens
tccaggtttaacaccttttaactttttgctataattgtatcaatccattcttccccagaagtagacactattctgaaattagtgtatattcttctgttgatgtttatagtcttttatcaaatatggatttattaaaaaataatattatatatagtattattttgttctcatattttaaatataaaataatgtatgttttactttttcygatttgtttttttcactcaacattcttgttaatgacttatctatgctgatacatggatcgttgtagtgggttcattgttaactgttgcatagaatttcatcccctaaatattccacaatttatttattcactcacctactgaaggacacacacactgtatagatagtgtttaatttccatttacctttcttctttagttttatatttatttattactaattcatcttcatactttccccactattgtctaagttttctcccaaattcagatacacaagattttcttaaaacttcatcttgttgaagatctcttttctggagccttct

SEQ ID NO: 501085 - DNA, 395 bp, Homo sapiens
agggctacagatacaactttgggatatagcagtgtgtagatagcacttagaaccatggaagtttatggaataacccagagagagaatattcgaaggagakacttagggacagtcaaagcttagacatcagccagcaaatgaggcactagtaaagaaattgaaaaagtgtctagagaggaaaaccaggagccaggagtcaataagagtgactaagagctgggactcaaggcttacatagttgccttcccctttattttacaatgaaaatatcagaagatgtgaaagacaattagaaaaaaattataatgacttcaggttttggtcttctcaaattcatttcctcattgtacactgcaggagtgaaacttaacaatagtttataatctccacgaaaa

SEQ ID NO: 501086 - DNA, 550 bp, Homo sapiens
tatttaataatgaagacaaataatgcataaaatttaaagcaacaggctggtatgatgctctccctccagggaacactacacaattgcttaaaaggaggccttttagattagttacaaaagctggattgttggaatagctgtgatagcacagatgtattagaggttacaggctgttggcaggctttatgttgtccctctgcagacagataaaaaaccaccatgtcgatttttaaaagtaggtgtccaataataatcacatccaacataacgtaatcgatcattttgacatttgagcctgttaacatatttgctgtcttgttaaacagaatttaggcattcataaaaactaacggaaattaagatgtgatatggtttggctctgtggccccacccaaatctcatcttgaattgtayttctataattcccacaggttgtggggggggactttaaaacagattgagtttgttgtgtgtatgtgttgagaagggtggatgggtggcaaaaatatcttactaccattaaaaagcaaaacagttctcattcttctca

SEQ ID NO: 501087 - DNA, 526 bp, Homo sapiens
tgaaagcttctgtcagagcctgattgcagaacagcagggcgtgcgtatttctttgttctacaagacgacatttctagtaggtggtagcaggtggtgctattgctctgtcaaaagagccacactcaaagtccacgttatttcacaggccctaggaagtaacttactggcagaaacaaacaggtcttggttgacatagaactaagtgggaaaacaagtgagaacttacctttgctttgctcaagggcagaaaggttttaacaggaaagaaagaagggacaatgagttagaaatagggaatatggtagaaggggtaataacagtgataaaatraaagatttataagttatcatgggatggccactccaaggacatcacattcaagcctctacctttgctgtttgctacaatgaccctgagaagtggccatcttttctcagtacaagtttccaccatgatggggagtttcatacagtgtcactgattgccgctaatgtttatctagcatccactttgtgtcatcctgggc

SEQ ID NO: 501088 - DNA, 535 bp, Homo sapiens
ctgtttccctcacgggagaacagaactgcgaattgggactccgcattcactttgtatcttggatacgtctcagtcacacacactcaacctgcaaaaatgcccaactattaaggaagtacttatagtccacttttccttcctcagctcatgcacgaggttgccttgttcccacagggcctgctttcttccctttgttgcctctattgcctcctgaataacagtctccggtttgtctatggcctccgcggggagccgggatgcccagacagagcaggccacctaaatcgggtggaatgtgtctcccctctcagccagagtcccactccatgcaggcacagagatcctgaacgggacctcagatttgtgagaaacatgttcactcatccaaacccaaagaatggactcagagatacaaagaacagcaaaagtgagacttttaatagcggtcttgcaagatctggtgtctgacaggcacacctgtaacagctacagcaggtaatttatctcctaacakgcaaatccttcccccagttcc

SEQ ID NO: 501089 - DNA, 542 bp, Homo sapiens
agaagtcaaaagagaggtaattctctccttcttcctctgccttgctgtctagccttaagcaatagttttccaccttatgtcctccatcaataaaagtaggtatattaataaatatatccttatcttgatttcttagcagttttaggaactaagaaatgcatataggaatatctatactctatatagatatttttctttttaggaagtaagaatgagcaataaatttattgtgtctaatgcaaagtaggtttgtttgagttttatcacttttctacaaacttcccaaaaacatggaaaaaatcaagcaaaacaaaaacacttgttgtacacaaagaaatatgactcagcacatttgcattattttaaaggtctggatggattttgtcttgttgcrtttctgtcataaagtgacaattttaacattggcaggaaactaaaagccattgtaggggtcaaggaaaaacttctttgccctctatcgtatcactgaaaaactcaactgacaaaaggcaaattaacaggggaaacagtgtacaaattta

SEQ ID NO: 501090 - DNA, 652 bp, Homo sapiens
ccattccttctaggtttaaggactttgaaattggtttggtttttaaaagaaataattaagtattttgttcatggtatattcacaaaacaagaattgctcttgtaaaacttggaacaaatagcaactggaattcaacgtatggagcatagaaagaagttttggtaacacccagatttgagcctcaggagaaatctaagactcatgttttaattttaatcacatatgtgtgacctggacaagttattctgcctctacaaaatgaagtgattgtttcaattgaataatttcttctggctacaaaatgtgatgatatgtctactttttcagccatgcctgttccataactgtggacctcaatggttgtgttttagttgactctgaagacgaggaaatgcactgtaaaacaaagccatttcaggcagctatgtgtgcaaatgagtgttttaggctccacaaatgaggttgcaaacctaaytatgacaaagaacaagcattagttctgttacttagttaaatgagtcaacagaagagagtttaagcccattctctttcttagagaagtctcatcaaatgccatgactttgcagatacctaggtaaatgcattgaatgggaactactgaaaaagaaagtctgctcttaggcaatcactt

SEQ ID NO: 501091 - DNA, 540 bp, Homo sapiens
aatgaaaaggttaatattagaaatacatggcatatataacaatatattacataatataaaatatatattgtatataatagaaatagatatataatttagtttcaaaggtatttttaacagaccgaatggaaaattggttaaattattgagattttaagagttttagcatgtatatacaaataaatatattccagaatgctgataaattaatttatgacacagattaattttaatgcatggtagttacaactaagaaaatgtggttttacctcatacattgtctctgcaatttactaggtgtgtgaacttgggcaaattatatataaccccttggttcctcaattcccacatctgtaaaacaccaataattataccctatctaatcatgttgtcatgtgaaatgacaataatgtgtataaaatatatagtacagtgcctgaagtaaaccataaatgattggtctgtacagtggttctcaaccccagatgratattagaatcacctggggagtttcttgaatactgatgtccaggcttcacc

SEQ ID NO: 501092 - DNA, 574 bp, Homo sapiens
tcacaaaaaacaaagatattctaaactgtcaccacctcttggaagtcttctccagtttagtggagacaaaatcatgagatccacaacaatttcagcacagtaaattaagagcaggaactctgggatactgttactactattagctctgtggtttcaggcaagctgcctaacacctttgtgccttagttcactcgcctttgaaatgaagacaatagtaatatttatcacagatttgaaaagggtactgaatgttcagaataatgccttgcatatggagagaactacataaatgctaatagtttatattataaattgttaatagttaatattataaatatgactattaggagaaagagttactgaattttmttccttccttccatccttccctaaacaagaagaatgtaggtatctctgttttaatttctacaacattgcttattttataagttaagggcctaaacatattggccatagagataatatactttcaccattcatatgaaaaaacaagtctatatttaacttacaaaacaggagatttctcttctataaatcctttgtaatatttgtt

SEQ ID NO: 501093 - DNA, 602 bp, Homo sapiens
ttcttaacgtttagtttgtatcttctttgaggtggggctgagaatttccacctcacaggcttatgtgggaattaaatgagaggtctggcaagcacttagcacattgcctggctcaaattaaacactccccaaatgggagctatgattgtaactaatatggaaaaagcctgcaagaaaatgcacaaagtgttaacagtgggtcatctgcgagtgatgaaatgaatttttttatttgtatatttctgtattatccaaaactactcaaagaaaaaatattttaagtcaaaaaattaaacaaactttattaagtaaaatgttaattgtagatttaggggctggtaaaatgtgggtcatttttattttctcctttaygctttttaatatttctcaaattgtccactatttactaactttaacagttttttaatataaaagccaggcctatacatatttggatattttggagaaatacagaaaaaccctgaaaagaaagtgaaaaataactgacagtctcatgactttttcctttatgcttattttttgttgtttaaatttataaagtacagactcactcctaaatgaatggccttcttgaattgtag

SEQ ID NO: 501094 - DNA, 527 bp, Homo sapiens
ccaccgaaatttactcgctcaactccatcactgactccaaaatcttggattgaagataatgtgttcagaacagacaacaatagtaatacactcttacccttacaggtaagaatggtatgtaaatgaycttatctctaatgttaatctttcaaaatagggagttgggtggtggtggtagtggtatgctaaaattaacattttttgaaataaagttttaatttttaagcatgtaatttaattaacaaaggttaaaatatctatacagagaaaattgagaatgtaaaataattctctaaacacgcaatggaaaataagcttagtaaaacgtagaaaaaccttttgtatttattaaatacatactgaagctttcaattagcagctctttaagaatgctttaatttataaattctaatgggccaccaaaatttgtttctcctttaatatagctaagctaatatgttctgtaattgtaactgttcttagaattgactataattggctgtatatatattagaatatacttagta

SEQ ID NO: 501095 - DNA, 527 bp, Homo sapiens
ccaccgaaatttactcgctcaactccatcactgactccaaaatcttggattgaagataatgtgttcagaacagacaacaatagtaatacactcttacccttacaggtaagaatggtatgtaaatgaccttatctctaatgttaatctttcaaaatagggagttgggtggtggtggtagtggtatgctaaaattaacattttttgaaataaagttttaatttttaagcatgtaatttaattaacaaaggttaaaatatctatacagagaaaattgagaatgtaaaataattctctaaacacgcaatggaaaataagcttagtaaaacgtagaaaaaccttttgtatttattaaatacatrctgaagctttcaattagcagctctttaagaatgctttaatttataaattctaatgggccaccaaaatttgtttctcctttaatatagctaagctaatatgttctgtaattgtaactgttcttagaattgactataattggctgtatatatattagaatatacttagta

SEQ ID NO: 501096 - DNA, 492 bp, Homo sapiens
cctgcaaagccagccccacagatgagtaggaattagaaaggtcatgtgggatccagcaaagcatccaggaggcaggattagtcatcatcccgaggcagaggcacttgtttgtttctactccaggaatttgtcatcgtcacaattccaccactccctgcctctgcttattctgaacctgccattactgaccagcttatttctattcctatctctcagccttgtggcttttgctgcctcatgccgttgtctgtstcctgtcttttgcacccagcctcctctctgagttagttctgcctttgtttgtgttaaggaccgctggctcattctgtaggtctcacacttctactgcctggggagaaggttcagtttgctatcatcagtgttgtgctggtaatgtttaataactggttctctgtgggaggttgggtgggggtaggggaaaccctgacacctgtgtgttgccaatttccttggcacaaatactcctacgag

SEQ ID NO: 501097 - DNA, 492 bp, Homo sapiens
cctgcaaagccagccccacagatgagtaggaattagaaaggtcatgtgggatccagcaaagcatccaggaggcaggattagtcatcatcccgaggcagaggcacttgtttgtttctactccaggaatttgtcatcgtcacaattccaccactccctgcctctgcttattctgaacctgccattactgaccagcttatttctattcctatctctcagccttgtggcttttgctgcctcatgccgttgtctgtgtcctgtcttttgcacccagcctcctctctgagttagttctgcctytgtttgtgttaaggaccgctggctcattctgtaggtctcacacttctactgcctggggagaaggttcagtttgctatcatcagtgttgtgctggtaatgtttaataactggttctctgtgggaggttgggtgggggtaggggaaaccctgacacctgtgtgttgccaatttccttggcacaaatactcctacgag

SEQ ID NO: 501098 - DNA, 628 bp, Homo sapiens
gatttagaaattgcatgtatatttgcatatatttgcacaattataatttaatgcttcaaaatagcattttatctgttccaaatcttataaatgacttagaaccatcttggcttgggaagggaatgtcactgagacatcccacagcaggtattttctatccaccagatcatatcattttcatgtaccatgagtcacagcaaattcattcattattagaagctgatttagtaagtgaattatcatttaaaagtcctcttagttagaacaactctaatgtttagttccttccaggatttagaatcttgaaaaacacaattctgtattggaatgctgcccatttaatgagatggtttggacaattgaagagataatggaatcacagttagttgctcatagtagatacttatccctttcaagtgtttgtggtttgcaaacaacaaaaacaaactctggcttatttaagcaggaaaggaattaaatggaaggaaggcaaggtagaaatgctcatagaattggtaagaaggctggagaaacagccttagaaagtgggcagaaaccacaggaagcaaggcccagccaccaccaaccacagscccagtcaatgaggaagctgattggcatctcccag

SEQ ID NO: 501099 - DNA, 586 bp, Homo sapiens
tggtaaagaaaggaaactgcttcaggccagaaagttaaaggcagctaaaagttataaacaggtctgtgactgactccagagtctgtgattttgtctaccacttttcactgaggaagacrtgattttcttgcttaaggaaatttcatctagctgagaagatgtgactctacccaaatagagggaagtcactgtataagagtaaccccaatgtcatgctgagaagtgggagctatttctgggggacagtctgagagatgatgatgatcttctagcacagaggtggtctaatttcagtgttggctggatgggaaaaataaaagtgagttgaaagtaagcagggagaaggggcaagtctggaccgcccaataaggatacttttgcaagagttctgacatgagaaaaaagtggaggctgtgcaattgcaaagcaaaggactggtcccacaggcatttaaaaccaccttgggctataatttgctctttaatgaaactgctgatcctgctgttattcatgtctgaggacctcaggggcatttcagagacaccccctggtggccatttgccctgtgtgtggcacttaaagagcc

SEQ ID NO: 501100 - DNA, 586 bp, Homo sapiens
tggtaaagaaaggaaactgcttcaggccagaaagttaaaggcagctaaaagttataaacaggtctgtgactgactccagagtctgtgattttgtctaccacttttcactgaggaagacgtgattttcttgcttaaggaaatttcatctagctgagaagatgtgactctacccaaatagagggaagtcactgtataagagtaaccccaatgtcatgctgagaagtgggagctatttctgggggacagtctgagagatgatgatgatcttctagcacagaggtggtctaattycagtgttggctggatgggaaaaataaaagtgagttgaaagtaagcagggagaaggggcaagtctggaccgcccaataaggatacttttgcaagagttctgacatgagaaaaaagtggaggctgtgcaattgcaaagcaaaggactggtcccacaggcatttaaaaccaccttgggctataatttgctctttaatgaaactgctgatcctgctgttattcatgtctgaggacctcaggggcatttcagagacaccccctggtggccatttgccctgtgtgtggcacttaaagagcc

SEQ ID NO: 501101 - DNA, 586 bp, Homo sapiens
tggtaaagaaaggaaactgcttcaggccagaaagttaaaggcagctaaaagttataaacaggtctgtgactgactccagagtctgtgattttgtctaccacttttcactgaggaagacgtgattttcttgcttaaggaaatttcatctagctgagaagatgtgactctacccaaatagagggaagtcactgtataagagtaaccccaatgtcatgctgagaagtgggagctatttctgggggacagtctgagagatgatgatgatcttctagcacagaggtggtctaatttcrgtgttggctggatgggaaaaataaaagtgagttgaaagtaagcagggagaaggggcaagtctggaccgcccaataaggatacttttgcaagagttctgacatgagaaaaaagtggaggctgtgcaattgcaaagcaaaggactggtcccacaggcatttaaaaccaccttgggctataatttgctctttaatgaaactgctgatcctgctgttattcatgtctgaggacctcaggggcatttcagagacaccccctggtggccatttgccctgtgtgtggcacttaaagagcc

SEQ ID NO: 501102 - DNA, 586 bp, Homo sapiens
tggtaaagaaaggaaactgcttcaggccagaaagttaaaggcagctaaaagttataaacaggtctgtgactgactccagagtctgtgattttgtctaccacttttcactgaggaagacgtgattttcttgcttaaggaaatttcatctagctgagaagatgtgactctacccaaatagagggaagtcactgtataagagtaaccccaatgtcatgctgagaagtgggagctatttctgggggacagtctgagagatgatgatgatcttctagcacagaggtggtctaatttcagtgttggctggatgggaaaaataaaagtgagttgaaagtaagcagggagaaggggcaagtctgsaccgcccaataaggatacttttgcaagagttctgacatgagaaaaaagtggaggctgtgcaattgcaaagcaaaggactggtcccacaggcatttaaaaccaccttgggctataatttgctctttaatgaaactgctgatcctgctgttattcatgtctgaggacctcaggggcatttcagagacaccccctggtggccatttgccctgtgtgtggcacttaaagagcc

SEQ ID NO: 501103 - DNA, 238 bp, Homo sapiens
tcttttttaggcctaatcgatttttgtaggtctctagggcatattgcttttttaataggatttatgataaatcatattattttcaagtgtgatttttcacatctcttgaaatggatttgaattagtattttgattttttcgttgttgtttttttgagacagagtcttgcttttttgcccaagctggagtgcartggcgcggtcttgactcactgcaacctccacctcttgggttcaag

SEQ ID NO: 501104 - DNA, 625 bp, Homo sapiens
  misc_feature (1)...(625): n = A,T,C or G
ggggccaccaaagtaaattaattctgtatgtgtcagatagcctgaantttaagtcagactatcccacacactctncacgtgctggtgaaaaacacactcatatgaatcatgctctgacacacctatatgaaggaagctgaactgcagattcattctcctgtcattttcaagtatttccagattttgctggctgtgagtccatttggaggcataaaatactgttcttaaccagaaaatcatggtctrtcccttgaaggatagaaataatgtatttctatcactggagattattctattaagtacccgaaaactgtcatctatctttctaattggcacactatcattcagaatcatttctattttattacatctatactcaaatgtgttttacctgggtatatatgtgcatacacatatataaaccttcttatggccattctatgcaggtgacatttcttaggactattctatgtacttgacattttatttttttctccagctttattctacttaacactaattgagattactttaactctgtaatcttataaggatgttttcaatgattacatgctcatccttctaatatcagaagtagatggtaaaaagtgggctaacagcaata

SEQ ID NO: 501105 - DNA, 510 bp, Homo sapiens
tgctactgcactacatagggtgcaggtatttattaaggtatttatgacctataccttaataaatacatgacgaaacattcatttatggctgaataagtggaagaagcaggacaggttgggaagaccatgtcaaggcaatgacacacagtccctgtggactcatgggctgataaggtttggagctcaacagctctgtgtctggtcctcatcattggtgacagaggcgttaggatttggtttaaggactccagagcaccttcttctgagcatccctcacacagtgtgagcacagttcccyatccccactgcacactaggaggctgagtgaagagtgccacagagtgagtgagtggctgacaggtgtgtccacctcggtttccagcccacatcttactcatcctcactctcccatctgcctgctccagagcaggccttcattttgtccctcctccattggacagctttgactgctcccccctttcctgctgatcaaaggcagtttctgcctgg

SEQ ID NO: 501106 - DNA, 538 bp, Homo sapiens
ccttttggcctctctcacctggttttcgtggtagtcagcaatgtagaatatctgagttgcttatgagaggatatacttgaaaattccgtaaagattgcacctgtgcaatcttcagacatctgatatttaagagacaccatctaaggaatgtatttcctacctcatcaactaaattgcctggtactatgtttgtattatgtaaactcagggagttaagcatgtggatgtgaggtcctctactcgtttgaagtgttgatataagaactgtttggttaaacagcatttccgtgtctactatggtattagagttaaagccactgtccagtgtgtcttacaacatgcttttaagcaaaccccatgctgttaattcagtattgagattagttccagraaacaaaacaaaacaaaacaatgattcagtgtactatatctcttgtcaaaaacacaaaaatatttatataactgttttccttttttgccttagctacaagaagaataagctgcctgaagtaattagctctttttgaggctgaatact

SEQ ID NO: 501107 - DNA, 591 bp, Homo sapiens
ttgaggggttaattatggtatatggtgtgtttggtttactcacttcaattctagttcattcctggtcttgraggaacctcctccactaactctccatgcccacatttcttatgtggggtgttctgcttcgtgagttctcacaggcaggggcctgagttagcgaacaagctatatccttgtgaggtcagccctaatctgctatatgtatgcctcctggggaaatacaaggttgtgcctgccctcagacagaagtaggtagaagtaggaccactgggctggaagctctagcaggcatggctttcctggctaccagaaatagggatgggtggggatgcctgccttgctgtctaggcctttcctgagacacaggaaactgtgccttctagctgagtttacacagaatcagggttgctaggctggaaattctagcaagtgttgcctgcttggctattaatggtgggggagggtggggtcatgagccctgcactctgggtgtttcctgggacaacaggaggctgcattcatcagctgagttcatgcagaaccaggagcaccatgctagaggctgtggcaggcctgcctacctggtta

SEQ ID NO: 501108 - DNA, 618 bp, Homo sapiens
ctggtaccctatatccatggtgccacagccaagtagcctgtgtatagtctatcaaagaataataatgattgtattattgttttttctttttttaaaagaaacgttttctatttttatctaaaataatgtacataaaaagagaagaaaagcaagtaccatttaatttatatctaatcctgtaacctatttttattggctcagtttatgactatatataacatctgaagacatgtataaacattaagcattgttctaggttcattaaaatcagaaaaatagtttacatcagctaacaaaattaaattgtaacttcacattaaaatgtgatatttcctttattcyagagaggctatgaaactctaaagcatagtggcaatcaatctaaacttcagacatggagttttgctgcttcagttcttttcaggccatgtcattagttgaaataactcccctcggcttatttacactttaaagattttttcaatgcctaaaaagaacattttcaaataaaatttcttaacctgaaagctaaagtaatcagggtatctaaatgtgttttgactacatccgttctttaaaacactattacccagaatgctcaattggcagtggagttct

SEQ ID NO: 501109 - DNA, 608 bp, Homo sapiens
ctgcttacatctaatgaaaaaagactccttaaaattatctccagttatatacctaatgtaaatgacgagttaatgggtgcagcacagcagcatggcacatgtatacatatgtaacaaaccttcacattgtgcacatgtaccctagaacttaaagtataataaaaaaataaaaaaattatctccagttatacagtcttaaccttgaaaaatttacctattagccaaatatttgcattccttttcatttgagatatttcatcagaatgtcatttaaacatttaatgactcacaatagaaaatatccagagtgttactgttggaatcagattttgaarcctgctcatgtaaaggtctaggagctgaaagagcccattttactgatgcatgtcccacctacaggttgctgagtaaactctgcttaaggatggagaaaagaatgacttagggtttgaaacgttttaagtgagtaagaacaacagaataccagcatgtacgtatttacaagaaggaactctgaaagacacgaattaagaaacattaccatttagtttttgaaactgtggtaaaatatacataacacaaaatttattattttaactatttttaaa

SEQ ID NO: 501110 - DNA, 354 bp, Homo sapiens
caactaatagattattcttaaaatttctaatgtgttctgtcctgtaaaataatataataatagyaatattgacaaacgcatatagtacttataatatgccaggcactgttcaaaatgattgacatattcttttcatttaaccttcataccgacaatctgaggtagtgaatattatccccagtttacagaaaaagaaactgagaataaaaaagttaagttgagtcatcttgcccaaggttacacagctagtcagtagacaagctgggttttaaacccaagtactaggattctcaggtgtatgtgcccaacatctatgtctgtagtctctttgctgttgagaagcttaactttcac

SEQ ID NO: 501111 - DNA, 527 bp, Homo sapiens
taatgctcagacccaggaaatctaacttcagagcctatattcttaactaaagcagcatattctaccccaaaatgaacttcgcgccttctgcttagttgtgcttctactcttggatttttttttatctcagtaaacagtattccttccacccaaggtcttatggcaaaaattggttgccgtccttgactccttcctccccgtcacctccacattccatccgtctcataccacgcccaaatctaggcgtgtctgattcccatatccttctcaggcctctcctctctaccacctctgccttgcctacagtctaggtcacccttgttgcacacctgggctgcgaggccccgcagcctctagtcttgcttacctcagaaccgtggttctcwaagtgcagtcccaggatcagcagcttcagcttctcctgggagcttgttaaaaatgcagattctcggccgggcacggtggctcacgcctgtaatcccagcactttgggaggctgaggcgggcggatcacctgaggtcaggag

SEQ ID NO: 501112 - DNA, 592 bp, Homo sapiens
catttgaaggcagatgctaagctatgtttcacacagaggatgaagaaattatgtagatgaatgagagcattggttaggaattaggatttgggagttctactcctgacactcttgaggactttcttataaactgaagtcaataaaccactgaacctctaaatctcatactccttgtattagtctgttctcatgctgctaataaagaaatacctgagactgggtaatttataaaggaaagaggtttaatttacttacagttccacatggctggggaggcctcacaatcatggctgaaggtaaacgaggagcaaagtcatgcggtggcaggcaagagagcacttgtgtagggaggaactctttataaaaccatcagatctcgtgatacttattcactatcacgagaacagcatgggaaagacccacccccatgattcaatcgcctcccamcaggttcctcccatgacacgtgggaattatgggagctacaattcaagatgagatttgggtggggacacagccaaagcatatcactcctcctctataaaaagaggatgccatttgacaagtgcttttctatgctcgctgcccacta

SEQ ID NO: 501113 - DNA, 541 bp, Homo sapiens
taagtgaattttaacaccttagctcagcagtcctcaacaaatgagccactgctagatacatacactgagaatatatatttaaaatgarcctaacaagcaaattagaagaatttctgtatataactattagtatccttaatctccaagtctctggaccatcgggccatcatgagggagagacccatttaactaataattattttttgatctcttctctgtaaagatgggcctagaccagggtttgcaaaataaaatgcctttaagagcctgtcaggtaaatagagggtatggcccacccagagatatttgagtcaagtaatttttcaaatactgtattggccaaacaaaatgtctatgccaagaagtttgtgacctctggctaagactaaagaaagccgtggtgtcacagttcttaaaatttttctaactggacttaaaaccacaatactaacagaatcaatgatgatttctgtttgcgcttctagttagggactcaattttccacttaggtggcatacactttatatatcaggttattttt

SEQ ID NO: 501114 - DNA, 403 bp, Homo sapiens
tttcttgtctcgctaaatctaatatgctctaaaagctatagctaattctgttttaccaataagtattgtaaatacttgaatgcacccaataggaaaaaatcactyaggtaagaaagtcttttctcacagaaaaagtgttggcactcaggaaaggataggcgtggtactgcagtatcatcctataatgagaaatattctgccatagaagggtccacatcttccactccgctaattcaaagacttctgggtctagagtatggagggagaatcacagtatttcataggcagcagtaaccttaaagatactttagaagttatttaggagttatggaaaccatcttatttgatttaaacccttgtggaaactcttcactcagattatgcattaaaagtagtttctgta

SEQ ID NO: 501115 - DNA, 403 bp, Homo sapiens
tttcttgtctcgctaaatctaatatgctctaaaagctatagctaattctgttttaccaataagtattgtaaatacttgaatgcacccaataggaaaaaatcacttaggtaagaaagtcttttctcacagaaaaagtgttggcactcrggaaaggataggcgtggtactgcagtatcatcctataatgagaaatattctgccatagaagggtccacatcttccactccgctaattcaaagacttctgggtctagagtatggagggagaatcacagtatttcataggcagcagtaaccttaaagatactttagaagttatttaggagttatggaaaccatcttatttgatttaaacccttgtggaaactcttcactcagattatgcattaaaagtagtttctgta

SEQ ID NO: 501116 - DNA, 636 bp, Homo sapiens
caaatattcagtgagtaccagttgagtaacaactctatacagcacttaatttctggattaacttatcttgcatccacaaagaacttacaaacgaatacagacatgcacatgtatacacattcacccatatacactcacaratgtacctatacacacacacacacacacacagacactcaagaacataagcaatagagagattctttttacctaaaaatgatcaatgaaagtctcaatgagtaggtgtaatttatactacccctaaaatgtatattataaattttcctcttttatctcctgtcctacaactttaaatggctaaattatttcttgctaatattccatctgtggatagggtaaacattcctcaatttttttttctgtgtatatgccaaaatcatttcctaatatcaaaacttaagtattcctggtgatttttattagacaaatttggaaaaatgcagcatgaaaaataaaatctaacttgtttttatggaatcaagttcttgtttgtgcccagcctcattggtccttcctcacttaatagcaataggtgctgttgcactttgcttttatatacttttatcatatcacttgttaaactccactagaattgtttactagttgatttcccag

SEQ ID NO: 501117 - DNA, 636 bp, Homo sapiens
caaatattcagtgagtaccagttgagtaacaactctatacagcacttaatttctggattaacttatcttgcatccacaaagaacttacaaacgaatacagacatgcacatgtatacacattcacccatatacactcacagatgtacctatacacacacacacacacacacagacactcaagaacataagcaatagagagattctttttacctaaaaatgatcaatgaaagtctcaatgagtaggtgtaatttatactacccctaaaatgtatattataaattttcctcttttatctcctgtcctacaactttaaatggctaaattatttcttgctaatattccatctgtggatagggtaaacattcctcaatttttttttctgtgtatatgccaaaatcatttcctaatatcaaaacttaagtattcctggtgatttttattagacaaatttggaaaaatgcagcatgaaaaataaaatctaacttgtttttatggaatcaagttcttgtttgtgcccagcctcattggtccttcctcacttaatagcaataggtgctgttgcactttgcttttatatacttttatcatatcacttgttaaactccactagaawtgtttactagttgatttcccag

SEQ ID NO: 501118 - DNA, 610 bp, Homo sapiens
taagcaaatatcgctctctttatggattgttactcagagtgaatgtttgagtgtatggatactccattctccatgatgtgcttatttcacattgtatgcctgtatcaaaacatctcatgtaccccataaatatatacacatactatgtacccacaaaaatttaaaaaataatttaaaaaaattaaaaatagataatgatgatattyctgaagctaacttaagactgtaagtctgcctcaactaatcatattattttatattatctggaaactattaatatatctagtttagaacctagtcccttttgtctcacatgatcaatgattgaaaaggaatctttgaaaatatataaatattgagtaatttagtaattaacaggtaatttttatacacaagtatatttgttatgggcaagagaagcataagtcctagtatacattgaaggatttatattcttataagaatataaaataatataaatataaaaagaatattagaaaaatgatttaaatatatccttcttctattccttttcttatattttatctttcttgttttatattttatcaagcttctctcaattttcataaatccaaagccatcacatttt

SEQ ID NO: 501119 - DNA, 610 bp, Homo sapiens
taagcaaatatcgctctctttatggattgttactcagagtgaatgtttgagtgtatggatactccattctccatgatgtgcttatttcacattgtatgcctgtatcaaaacatctcatgtaccccataaatatatacacatactatgtacccacaaaaatttaaaaaataatttaaaaaaattaaaaatagataatgatgatatttctgaagmtaacttaagactgtaagtctgcctcaactaatcatattattttatattatctggaaactattaatatatctagtttagaacctagtcccttttgtctcacatgatcaatgattgaaaaggaatctttgaaaatatataaatattgagtaatttagtaattaacaggtaatttttatacacaagtatatttgttatgggcaagagaagcataagtcctagtatacattgaaggatttatattcttataagaatataaaataatataaatataaaaagaatattagaaaaatgatttaaatatatccttcttctattccttttcttatattttatctttcttgttttatattttatcaagcttctctcaattttcataaatccaaagccatcacatttt

SEQ ID NO: 501120 - DNA, 490 bp, Homo sapiens
gctgttggcggtagcaactgttgcatccctgagcaccacctcctgggaatggctgggatgaagagaggcacaggggtgcactggtgacttcaaggatgagtactcacgtgtggctgtgcaccacaagcaaggatcaccatcagacccggggcaatcctgccacctgggtcacacaagcctcatttgcccagcctgcttctacctggacaagrtcctgctcacctaggggagcctcctgcactagagacgctgctcacgctcttaatcttgatcttaaatgttttttggccatgctgccatgttgctggaatagtctcttctgtcttctactgtctgatgaacttatcccccaaactgctgtttcatttcatgcagaggagtttagctacattatgtattttttttatttctcattgactcatactcatagacatgctttacataatctatgtttaatctaaattttcattgattgtatgatgcatcatta

SEQ ID NO: 501121 - DNA, 515 bp, Homo sapiens
tttttccttgattgaaggcttttatttactgatttgattttctttttcaattgttgatctgtccagatttcctttttttttttgattcagtattggtaggttatgtttctagtaatttattttattttctagattgttcaattagttggtacataattgtatatagcagtctycttttttattacttgtaatttctctattacttcttttatgagacttatctctcttttttctaagtttatctaagcatttgtaaataaaaagcataaaaaaattctttgatggagtcagccttctcaaatttagctaaggaaacacagcattttgagactcaagtggtttatttataaaatggttgctctggctcaatttttctcaacagtaaaaggtattgattaattaaggaagagcataaaactagaacagttacttcttggcttactatattttagagcaatggattgcattctcacaagtaaacatatttttggcttggttcctaaaggaatacatta

SEQ ID NO: 501122 - DNA, 665 bp, Homo sapiens
tttgaatttactttagatattataagtgaatgtttaatataagtaatatgtggaaaaatatttgtatgccctttcccccaatagaatatgaaagcttactgaaagcaaatatatatatatatattagtttgttttatatacatagccatctgtttagtgctagtaaacaataggcatttaataatgattmtaatttacagttgatgaatggagatgacaaaatattttaagaagtaaatataaagactgccattaatatgggtctagaggaaataataaacttgcttttggatatagaatactgtcatttttctagaaatttatcacttctcgtaaaggtgtgataaatgaagactgagactttgtttgatcaaggtcatgtgaccagggagactccagactcaggcccacatctgcctgtaatcctccctcctcttcatctctggtctgtatcccacacaacacagtccccagtgacacctctatacagcagttgtagcctgcactaaattccacaagttcaccttcttatacgaatatctgttttcatcttcctagcttctcttagaaagcaaatatgtgctggaaagaactggtaaactttaggataggtattgtatgggcaagccttgcagcaataagtcacagtaaactttcttatttta

SEQ ID NO: 501123 - DNA, 665 bp, Homo sapiens
tttgaatttactttagatattataagtgaatgtttaatataagtaatatgtggaaaaatatttgtatgccctttcccccaatagaatatgaaagcttactgaaagcaaatatatatatatatattagtttgttttatatacatagccatctgtttagtgctagtaaacaataggcatttaataatgattataatttacagttgatgaatggagatgacaaaatattttaagaagtaaatataaagactgccattaatatgggtctagrggaaataataaacttgcttttggatatagaatactgtcatttttctagaaatttatcacttctcgtaaaggtgtgataaatgaagactgagactttgtttgatcaaggtcatgtgaccagggagactccagactcaggcccacatctgcctgtaatcctccctcctcttcatctctggtctgtatcccacacaacacagtccccagtgacacctctatacagcagttgtagcctgcactaaattccacaagttcaccttcttatacgaatatctgttttcatcttcctagcttctcttagaaagcaaatatgtgctggaaagaactggtaaactttaggataggtattgtatgggcaagccttgcagcaataagtcacagtaaactttcttatttta

SEQ ID NO: 501124 - DNA, 497 bp, Homo sapiens
ctcgttcccactctgccttcatggtttcttgtctccttattctgctcaaaaattttccttagcatttatcaccttgtaagatacattagaatttacttattatgattttgtcttattggctctctgtcccagctaaaatgtaggtttcaaaaggacagagatttattttttctcatcccatctacctagggatactgcctggaacgtatttgaagctcactaatatttgttaaacacagtgtatttactttcaatttcccaaagccttgtgttcagatagaataatgtgtttatgccaagcaggactcttgattttaaatgacagaagcccacttccaaccaacatgagtaagaatgttctgtttatttrttctgttgtggtttccttctggtttggtctaggtttatgttagaagataacccaggatttgcacttttcttcaaccacagttgaatgcaggtacccccagatggccaacaaaacttgatctctagct

SEQ ID NO: 501125 - DNA, 602 bp, Homo sapiens
caaggagggtgggcattacagggaggcaaaagagctccaaagaaggcccagcccaaaggcatgcacaatggccctacccagggggcctggtcccaaacaccaggtactaggcctccggagcatagttgcccccaggcatggtccctgctggctcccaagtcaagggatgcttcctcatggccaatacaggaaaggaattgccagcgtcagcaaaggacgctgcctctgtcttcctcagctccgtctcccctgttcccccacccagccaccatctactggagctctgttcagaggacccagctttctgatctctgagcccactccagcctctgcctccctctgataaaatcctcccatcgctttataggccccattaactgtcagctcctcagaagccgcccctggtctttttctccctctagttcccagmtctatacatttctctagatttaatgcttgccatgtaacacacacacacttccagactggttttcctgagcagaccaggtctgagcctttttcactcttgaatcttcactcaataaatccagaccctgcccccagtgtcctccactccagcattttatttattggcaaagagc

SEQ ID NO: 501126 - DNA, 560 bp, Homo sapiens
gccgctgagtccgcccccgagagcgaagcgggacttgcgattcgtgcgccccgccccttcgccccgcctccagccccggccctgcgcagaagcggactcaaaggccggagtctaagggcctacctaagggtaggggagtgggaagaagaccagggccgtcgttattagccacacaggcctggcactgagggaaaaaggggaatttcccgaggggagtcctgtggggatggggaaatctttggaggaatccagttattcgagaaggacttccccaccccacctgcctccttcagccatcccaagcagcagctagaacttctgtagttcttcctctgagtgccccgagcctrctgtctgccagaaagactcctagactagaggattggacagtagggtcaaaaccctaacccttggttgaccaccggccttccctatcaggacgccccattacctcccttttcctcctgcttcccctgaaagaggagtctcagcagttatttacaaagatttattacagcacgggaggggttcaggcctggagtcagggaagaaggggaaag

SEQ ID NO: 501127 - DNA, 531 bp, Homo sapiens
ccctttctcctttcttacttcttacacaatttatattggaagtcctcactcagatctgactttgcagacatcatgcataatgagaattggccagaatcaggagtcctatggtcataggactgacccagtcctagattctccaaaaaataaaacgagatttttggctaggtcctttcacctctgtgggcctctaattcttcatctttaaaatgggatcgataataggggtaataataatacccaactcayagggcctttgggataataacacagcccaggaaagaagcatccaacccacggcctggagcaaggcaggtgctgcaggaatattttataacaccccccgtcagccctccagccaagcccctttatcctgggtaacacaaggctctgctcacctcagccattctggtctgcctcgcgcgctagactgtgaattcctcttggcaggatcttgttcatttctaatcaccgcccgttcccctccctagtgtctagcctgtgctcgggtacgtaagttcaacacacatt

SEQ ID NO: 501128 - DNA, 531 bp, Homo sapiens
ccctttctcctttcttacttcttacacaatttatattggaagtcctcactcagatctgactttgcagacatcatgcataatgagaattggccagaatcaggagtcctatggtcataggactgacccagtcctagattctccaaaaaataaaacgagatttttggctaggtcctttcacctctgtgggcctctaattcttcatctttaaaatgggatcgataataggggtaataataatacccaactcatagggcctttgggataataacacagcccaggaaagaagcatccaacccacggcctggagcaaggcaggtgctgcaggaatattttataacaccccccgtcagccctccagccaagcccctttatcctgggtaacacaaggctctgctcacctcakccattctggtctgcctcgcgcgctagactgtgaattcctcttggcaggatcttgttcatttctaatcaccgcccgttcccctccctagtgtctagcctgtgctcgggtacgtaagttcaacacacatt

SEQ ID NO: 501129 - DNA, 505 bp, Homo sapiens
ctggaaggatttaccaaaagttaggaaatgaagtaaaggaatgaggtgtcttctccttttttttttttttttttttttgagatgaagtctcgctctgtcaccaggctggagtgcagtggtgccatcttggctcactgcaacctccgactcccaggttcaagtgatcttcctgcttcagcctcccagatagctgggactacaggcatgggccaccacacccagctaatttttgtatktttagtagagatggggtttcaccatgttggccaggatgatcttgatctattgaccttgtgatccgcctgcctcggcctcccaaagtgccgggattacagacgtgagccaccatgcccggcagaggtgtcttctcctcttaagggctaagagaattaaatccactaatcttcctgtgtgccttcctttacgtcttcctgaatagtcagcaatagatcctccgaactccagacctcattcctctccagtttcccttctccactccccctca

SEQ ID NO: 501130 - DNA, 482 bp, Homo sapiens
gggcagcggtggggatcgccgttgaccccggcgggactggcaccctagaaggagttggagatgcggcctcacattctgcaggggccgtctccggcgtgcggtggcttctgcctccccctctgggctcagtgtcctccttagtggcttctaaggagagaacctgggcggggaccaggagctgaactaggattctttaagaaaggaaagaggtctaggagatgtgagaggccaatgcaaggctttggggcccaggtagcctgggagacaggaatgaagactccatctcctggatggctgagtaaactgaggcacaggacaggcaaatcttagctcccacccctcttctcccaaggggaaggaagctagarggatgttctggttggccccagccttttcttatatctggtgggcgccacaaggttgggggtgcctccagctttccccttccacacgatcaaaccgctgccccgcccccatgggca

SEQ ID NO: 501131 - DNA, 545 bp, Homo sapiens
ttaatgtaaaaaaaaaaaaaaaaaggcctacgtgtgtcgatgattatgacagtgagaggtggccttgcagagtattcatgtcactagatgctttgtcactcttatctgtaaaactagggtgatgacattatccacgttgcaccacaccctcagaacctgaaaaagtttgacacagtaaaacttggaaataatgttaaagtaatacacctgtctaaactggagagattgaccttttgttttgaaaggaattctttttgaaaggaatttatcaccaagttaaggttctttattaggggaagtgtgcatgtttttatattaattttcttagctgttcatgttaaggctgcctatatttttatgccttttcagtctcttcatgcttttatttttctctcctttttgcaaatatcagcaaagctttgtcatctccctaaatatcctatattacttctaacttttatgtcatttctggtcttgcctcttggcagaccttcatccrcacatctggggctagcctctatagctagggttctccttggacaccc

SEQ ID NO: 501132 - DNA, 513 bp, Homo sapiens
agctccagcagccttcttgtccactgctttgatgacacccaccgcaactgtctgtctcatatcacgaacagcaaagcgacctattaaaaaaaaagttaattattacccaaagtactgttcagttgtatttttcatctttaacacaacttttttacatttaagtagtcatccttacccaaaggtggatagtctgagaagctctcaacacacatgggcttgccaggaaccatatcaacaatggcagcatcaccagacttcaagaatttagggccatcttccagctttttaccagaacggcgatcaatcttttccttcagctcagcaaacttgcatgcaatgtgagccgtgtggcaatccaatacaggggcatagccggcgcttatttggccyggatggttcaggataatcaccttggaaaaaagatttgcattcagtgcaaatccaaagtctcaaatgactttagcctctgcaataagttaatgttactttaaattgttacctgagcagtgaagc

SEQ ID NO: 501133 - DNA, 653 bp, Homo sapiens
actactaaacttaaatggccaattgaaacaaacagttctgagaccgttcttccaccactgattaagagtggggtggcaggtattagggataatattcatttagccttctgagctttctgggcagacttggtgaccttgccagctccagcagccttcttgtccactgctttgatgacacccaccgcaactgtctgtctcatatcacgaacagcaaagcgacctattaaaaaaaaagttaattattacccaaagtactgttcagttgtatttttcatctttaacacaacttttttacatttaagtagtcatccttacccaaaggtggatagtctgagaagctctcaacacacatgggcttgccaggaaccatatcaacaatggcagcatcaccagacttcaagaatttagggccatcttccagctttttaccagaacggcgatcaatcttttccttcagctcagcaaacttgcatgcaatgtgagccgtgtggcaatccaatacaggggcatagccggcgcttatttggcctggatggttcaggataatcaccttggaaaaaagatttgcrttcagtgcaaatccaaagtctcaaatgactttagcctctgcaataagttaatgttactttaaattgttacctgagcagtgaagc

SEQ ID NO: 501134 - DNA, 653 bp, Homo sapiens
actactaaacttaaatggccaattgaaacaaacagttctgagaccgttcttccaccactgattaagagtggggtggcaggtattagggataatattcatttagccttctgagctttctgggcagacttggtgaccttgccagctccagcagccttcttgtccactgctttgatgacacccaccgcaactgtctgtctcatatcacgaacagcaaagcgacctattaaaaaaaaagttaattattacccaaagtactgttcagttgtatttttcatctttaacacaacttttttacatttaagtagtcatccttacccaaaggtggatagtctgagaagctctcaacacacatgggcttgccaggaaccatatcaacaatggcagcatcaccagacttcaagaatttagggccatcttccagctttttaccagaacggcgatcaatcttttccttcagctcagcaaacttgcatgcaatgtgagccgtgtggcaatccaatacaggggcatagccggcgcttatttggcctggatggttcaggataatcaccttggaaaaaagatttgcattcagtgcaaatccaaagtctcaaatgactttagcctctgcartaagttaatgttactttaaattgttacctgagcagtgaagc

SEQ ID NO: 501135 - DNA, 218 bp, Homo sapiens
tttaactagtagagtattacactgaatgggccctcagttgttaccacaacaaaaagcaactatgaaaaacctaagatatgtaatccccaataagatatgtagccaagactcctgcaactagaaataactggtgtgctttgaatgaagaaattccagttggaaaagaaaaaytaaaaagctcatctgaagagctgaatcaaaatataagaaagttatcc

SEQ ID NO: 501136 - DNA, 607 bp, Homo sapiens
ttatctttttgagctttgtttttgtttgtttgtttgttccttaaaatcaacattaattggctgggcgcagtggctcacgcctgtaatcccagcagtttgggaggccgagatgggcagatcacaaggtcaggagttcgagaccagcctggccaatatggtgaaaccctgtctctactaaaaacacaaatacaaaaattagccgggcacggtggtgggygcttgtagtcccagctactcaggaggctgaggcaggagaatcacttgaaccagggaggtggagtttgtgcagtgagccaagatcgcaccactgcactccagcctggccaacacaacaagactccatctcaaaaaaaaaaaaacaccttaattttccataaaattaaagtgtttgaccacgggagttttccagccaagtcttcaaaatcctttagaatttctttgtttttctaaactagtaatcttaaaactcctgaacaaccacaaataagttatcaaccgatctcggacaataaacctaagccaaattttcactgaaatgacaaaatatatcttgccatggtctctgctgattgtatggtgaccccaatttgtctctcacttcttccac

SEQ ID NO: 501137 - DNA, 561 bp, Homo sapiens
tgggcagttatcctgtacaaacytacagattcaaaattttgggattcttctcctgtggttcaacccttacctatcaatgggttttcattgcattgtctatggggtattaggtatgggaaaatgatgtatgtcttgacttaagtaataataactctgatctctgctccagaaactttgtgtttactttcaggttacaagaatgaatcaatatagagattaaaaacttaaatatttttaatgtaaaacacttcttaggagaatatacttaataatttctctgtacagaaatgattgtatgtatacttcaggtttaagctttaccttagtattcctaaaacttttcagattatatcagttttccttatagaggtgcttattgttagctgtttcatgttaaaggctactaatagtggaaaagtaaatgcttctgtaggatgtgattagctcactcgttgatagggttagacctgcactgaacacagtagattgcttaactgtcacttaaataatgatctcattgataaagggagaattagaagtggcttgttttaaagggtttcc

SEQ ID NO: 501138 - DNA, 610 bp, Homo sapiens
atcatggcagaaggcaaagggcgagcaggcatctcacatgttatgagtaggagaaagagaggagggaggtgctacatacttttaaacaaccagatctggcaagaactcactcactatcatgaagatggtaccaagttgatggtattaaaccattcatgagaaaccactccccatgatccaatcgcctcccaccaggccctacctccaacactggcgattacaattcaacatgagatttggtggagacacagatccaaaccatatgaaggagtataactgkattgtttgtaacacaaaggataaatgcttgaggggatggataccacatttaccttgatgtgtaagcctgtgtcaaaatatctcctgtatcccataaatatatatacctactatgtacccacgatttaaaaagaaaaaatttaaataaataaaaactaaaaactagagaaattcaaattgtttcaactatatctaagttcctttccaaaggtataacatgttagcactggaaatgatttagttcaatccattttttttcccagattaagaaactaaagcacagagaatgtaagcaactgaccaaggttgtacaagcagccactggcaaccc

SEQ ID NO: 501139 - DNA, 519 bp, Homo sapiens
actactttatagttatattttcagcattagctaggcaatataatgcagcagaaaggatccagaagtcttcacatccataaaaattatagaaagtgtagtttctatgtattgctggtagttgtcagtcactatatctagctaattttcgataatatcttttggttcatttattcatttaggcattcattcagtactaattcggccctstttctgtgctgtaccctgtgtcgagcactgggatgtaacagtgtgcaatacaaagtccttgtccttaaggaattgataatctagctggggaggcctacttgatgaattacagatgagtttagcacaaattgtcattgagagatgctgtgtgctttaggacgatttcacataggagtctaacccagactgggagttcagggacaactttactgaggaataatatttaagtgaagacttgaatgatatataagagttagcaggactaaggcggggatgtagggagaaggagtacttatagtttagtgggaacag

SEQ ID NO: 501140 - DNA, 489 bp, Homo sapiens
actactttatagttatattttcagcattagctaggcaatataatgcagcagaaaggatccagaagtcttcacatccataaaaattatagaaagtgtagtttctatgtattgctggtagttgtcagtcactatatctagctaattttcgataatatcttttggttcatttattcatttaggcattcattcagtactaattcggccctgtttctgtgctgtaccctgtgtcgagcactgggatgtaacagtgtgcaatacaaagtccttgtccttaaggaattgataatctagctggggaggcctacttsatgaattacagatgagtttagcacaaattgtcattgagagatgctgtgtgctttaggacgatttcacataggagtctaacccagactgggagttcagggacaactttactgaggaataatatttaagtgaagacttgaatgatatataagagttagcaggactaaggcggggatgtaggga

SEQ ID NO: 501141 - DNA, 527 bp, Homo sapiens
tcccgaatcatttgattctatcagtcatgatgcttggatttaacttaatatcagctttccatcctgtatgggaatgctctaatacaaaacagaagttaaaatgacccatgaatggtgtggcagaaatttccagctttagaaattttaattagtgctgtcagtggttcagtgaagtcgtagtgttccttccacaggttgcatgcactggtagtctcatcctttagatgcrtcctcaaaaccctggcagaaattgcaactttattgtttgttggatgtgattctttatacagtattagtatttcaaactaatataccaaagggaaatgttattaaaatgtaacgttttaatgaaataaattgttaagagtgaagatatttttaacataatgttctttgtctttattttaaagaattcagaaggaacttgcagaaatcacattggaccctcctcccaactgtaggtaagtactcatggttttttatttacttgtatcttttgcagaaggtgcatttgaactgttggtttt

SEQ ID NO: 501142 - DNA, 521 bp, Homo sapiens
tggtagctcacacctgtaatcccagcactttgggaggctgaggtgggaggattatttgaggtcaggagtttgaactagtgaaacctaatatggtgaaactccgtctctgctaaaaatgcaaaagttagttcggcatggtggtgggcacctgtagtcccagctactcaggaagctgaggcaggaaaatcacttgaacccrggaggcggaggttgcagtgagctgggattgcaccactggacttcagcctgggcaacagagcaagaagagtccgtctaaaaaatgaaaaagaaaaatgttttctcatttggtcatatttaaaaagattccacattttttctttatagaggctgcagagaaagccagagcgttcatgaaatactggaaaatattcattagtatactttctgaattcataaaaaatagtaaagagcttatgtattctttgaaatggttgttgatatgaatgatgtgaaacagttacacccatctccacaattctatagtctggggaaatggcagc

SEQ ID NO: 501143 - DNA, 619 bp, Homo sapiens
ttttcccaccctctgtcctcaagtagaccccagtgtttaatacactagtaagtagtgaattagcaragtaaactgtgttgaaatacaaagttattcaataccaacccacctagttaaagcaaaaacggctttgaattttggagaaaataaaaaatattaaaaatgaccaggtagaaagagaaaattactcctgttacacacagaaggtgttctgcctctctcagatcttcaggggtccttgtttaggatttggctgtaggaaattaaactctatggcaggcatctgatcttttggtacccaatattagtatcataaatactaatagaatattagatattgaagggatacttttaattctcatttttttttttgtttgccagtgaatagactgaggattaaagattttggggtgaaaaaaattttttaaaaaataaagatttttgttgatttcctcaagaaactggagaactaaggctatggtccacatctgctgacccctgattcaatgttgtttctactagactaatcgcattcaaaatgttaagtttatgttttaaagatggaaatatctgcaaaattgttttattctgaatgttttagtttgcagcgaggaaacat

SEQ ID NO: 501144 - DNA, 619 bp, Homo sapiens
ttttcccaccctctgtcctcaagtagaccccagtgtttaatacactagtaagtagtgaattagcagagtaaactgtgttgaaatacaaagttattcaataccaacccacctagttaaagcaaaaacggctttgaattttggagaaaataaaaaatattaaaaatgaccaggtagaaagagaaaattactcctgttacacacagaaggtgttctgcctctctcagatcttcaggggtccttgtttaggatttggctgtaggaaattaaactctatggcaggcatctgatcttttggtacccaatattagtatcataaatactaatagaatattagatattgaaggkatacttttaattctcatttttttttttgtttgccagtgaatagactgaggattaaagattttggggtgaaaaaaattttttaaaaaataaagatttttgttgatttcctcaagaaactggagaactaaggctatggtccacatctgctgacccctgattcaatgttgtttctactagactaatcgcattcaaaatgttaagtttatgttttaaagatggaaatatctgcaaaattgttttattctgaatgttttagtttgcagcgaggaaacat

SEQ ID NO: 501145 - DNA, 619 bp, Homo sapiens
ttttcccaccctctgtcctcaagtagaccccagtgtttaatacactagtaagtagtgaattagcagagtaaactgtgttgaaatacaaagttattcaataccaacccacctagttaaagcaaaaacggctttgaattttggagaaaataaaaaatattaaaaatgaccaggtagaaagagaaaattactcctgttacacacagaaggtgttctgcctctctcagatcttcaggggtccttgtttaggatttggctgtaggaaattaaactctatggcaggcatctgatcttttggtacccaatattagtatcataaatactaatagaatattagatattgaagggatacttttaattctcatttttttttttgtttgccagtgaatagactgaggattaaagattttggggtgaaaaaaattttttwaaaaataaagatttttgttgatttcctcaagaaactggagaactaaggctatggtccacatctgctgacccctgattcaatgttgtttctactagactaatcgcattcaaaatgttaagtttatgttttaaagatggaaatatctgcaaaattgttttattctgaatgttttagtttgcagcgaggaaacat

SEQ ID NO: 501146 - DNA, 619 bp, Homo sapiens
ttttcccaccctctgtcctcaagtagaccccagtgtttaatacactagtaagtagtgaattagcagagtaaactgtgttgaaatacaaagttattcaataccaacccacctagttaaagcaaaaacggctttgaattttggagaaaataaaaaatattaaaaatgaccaggtagaaagagaaaattactcctgttacacacagaaggtgttctgcctctctcagatcttcaggggtccttgtttaggatttggctgtaggaaattaaactctatggcaggcatctgatcttttggtacccaatattagtatcataaatactaatagaatattagatattgaagggatacttttaattctcatttttttttttgtttgccagtgaatagactgaggattaaagattttggggtgaaaaaaattttttaaaaaataaagatttttgktgatttcctcaagaaactggagaactaaggctatggtccacatctgctgacccctgattcaatgttgtttctactagactaatcgcattcaaaatgttaagtttatgttttaaagatggaaatatctgcaaaattgttttattctgaatgttttagtttgcagcgaggaaacat

SEQ ID NO: 501147 - DNA, 567 bp, Homo sapiens
ataatcttacctgaatagacttagcatttttctatgaattattcattttggcacgtaccctgtaaaacatctaaagtttctaaccttttgaaaccacraggcttccccagccagcatttagagtgaaatctctgtggtagcactttaccaatttaccccttagctctttttcagttcttggctcatgtgaataagcaggccaaaatgctcttctgggaatgcacagcatggatatatattttttactatcacagcagaattgttttgaatgcatttcggccatgaggttaaagctctccacaaggaatacttcagcaataattctgctgccctctagctgagcactgaaatccctccggaacgccagtattacccttcaagaatggttctgaaatgactttactcacttccccgtcctttctattcctattgaaattcttctagaatgctcacagtaactttcagccagatgccagaataacttttaagttctagataggtttctgtaacaatttattacacaacgcaacacaagctcactttttaaagaagaggcctgataggcac

SEQ ID NO: 501148 - DNA, 567 bp, Homo sapiens
ataatcttacctgaatagacttagcatttttctatgaattattcattttggcacgtaccctgtaaaacatctaaagtttctaaccttttgaaaccacaaggcttccccagccagcatttagagtgaaatctctgtggtagcactttaccaatttaccccttagctctttttcagttcttggctcatgtgaataagcaggccaaaatgctcttctgggaatgcacagcatggatatatattttttactatcacagcagaattgttttgaatgcatttyggccatgaggttaaagctctccacaaggaatacttcagcaataattctgctgccctctagctgagcactgaaatccctccggaacgccagtattacccttcaagaatggttctgaaatgactttactcacttccccgtcctttctattcctattgaaattcttctagaatgctcacagtaactttcagccagatgccagaataacttttaagttctagataggtttctgtaacaatttattacacaacgcaacacaagctcactttttaaagaagaggcctgataggcac

SEQ ID NO: 501149 - DNA, 633 bp, Homo sapiens
aaagcaaaatttgatttgtacaaatgtaacaggaggcaagatgatagatactgtgttcaaaacagtttatttagtaaagattccagcaaccgggtctatgttggaaataaataggccctgttttggggagtttaactatagtagagaaggctagtggtgcaacaaaattcattccccttccctggtgtggagttgtcagtggaagaaggctccccagtcagggactacatttcccagcctcccttgtatccatgtgtagccatatgaccagttttcattaatagaatgtgagtggaagtaatgcgtaatttatttctggattggaacttttaagaagaggataggcttttatccacaggtaggggaagaggattctggagctctaaggatttgtggatctcaaggtgggagaaagctgacttctatttttttgtttgtttgtttgttttgttttttgagacagagtctcgctctgtcrcccaggctggagtgcagtggtgcaatctcagctcactgcaagctccgccctcccgggttcacgccattctcctgcctcagcctcttgagtagctgggactacaggcgtgtgtctaatttaattgtgctaagacgtgggggatttggggcttcggc

SEQ ID NO: 501150 - DNA, 647 bp, Homo sapiens
ccttcttactgtaagggcatctagcaaaattcctcagctctcttgttatctgtgatctgctggcaattgtggtgctgtcatgtgccagggagagtttaataatcatgcttgggaagcagtactggggcagaattttttatcctcactgagctgcttagttgctgagtcactctgagccagtttctttacttcttcaagcctcagcgtcctcatctaaaaacattaggaataataatgcctactcttcagagttatagtaaagcttaaatcagataaaaataagttctgaggtcagtatctggcatatagtattctatttccatctaaatgttcccaagctccccctaatcaacaatagtaaatgaataagcactgttttctctctcttcttgcagaggaaaaactttttggatagctacttttcagttcttttgatatggcaagctgtagatgaagctttggggagggatggtgaacaaggctggcctagttcctgccctcatggagattagtgagtctattatagaaaaccgacaygaaacaagtaatgacagggtactgtgaccacatgtaaagaggaaacctgtctcgatattgaaggtcaggagaaacctccatgaggataccatccaagatggggccagaag

SEQ ID NO: 501151 - DNA, 543 bp, Homo sapiens
aaatagaatatttgcaaacacacatatgaaattactactatggtaaatgccatgaatttacagtgcaggctgctataagaggctgtaatgaggaagtctgacttcatttgaaatatcagtgcaaacctctccaaggaagtactgtttgaactgaaatctaamgggatgaatttgtcacccacccagatttgtatcttgagtcctagcctgtagtactacagaatgtgactgtatttggagatcgtgcctctaaagaggtaattaagttaaaatgaggtcattagcatgctccctaatctaatatggctgatttccttgtgagaagatcagattaggacatggatatacacagatggaagacattataaagacacagagataatacatctatctagaagccaaggagaagggcctcagaagaaagcaaacctgcctacaccttgacctcagacttctagcctccagaaaacaagttatgttgttaaaggcaccatctttgttagggccaagttatgttgttaaagccacttatctttgttatgg

SEQ ID NO: 501152 - DNA, 476 bp, Homo sapiens
ggaattagacaagctgaaggagtgatctaagagaagkcagagaaattgcagacctatagctgctgcttcatgccaataagtgagtcagcagatcagtaacaaaaactatgagctacaaaatggttactgcttctgttccaaaatcttcccagaatcttccttgtagcccatcctaactgggaaaacacaagatagacaatctggaaaatgtagttgaacccagctaagttgatagatggcaaaactattacagtgatagaccgaattatggtagctaatttattaatatacatgccaattcaaatcttatcacttgcagtttaaaagatgaatttgactaatttatttgaatgtgaagttttcttgaagattagtgctgaggtcatgagaccatgaatggtcttttgtttattctctccttcttctagctcaacaccctcaaggcaaattaaatgagtttcataagcagtccaaga

SEQ ID NO: 501153 - DNA, 476 bp, Homo sapiens
ggaattagacaagctgaaggagtgatctaagagaaggyagagaaattgcagacctatagctgctgcttcatgccaataagtgagtcagcagatcagtaacaaaaactatgagctacaaaatggttactgcttctgttccaaaatcttcccagaatcttccttgtagcccatcctaactgggaaaacacaagatagacaatctggaaaatgtagttgaacccagctaagttgatagatggcaaaactattacagtgatagaccgaattatggtagctaatttattaatatacatgccaattcaaatcttatcacttgcagtttaaaagatgaatttgactaatttatttgaatgtgaagttttcttgaagattagtgctgaggtcatgagaccatgaatggtcttttgtttattctctccttcttctagctcaacaccctcaaggcaaattaaatgagtttcataagcagtccaaga

SEQ ID NO: 501154 - DNA, 452 bp, Homo sapiens
ttattacctaggtttctcttatgatgaagattgacagrctgtgccaatgggaatgttcatagccatgcttttttgtccaacctctctctctctctttctctttcttcactacatgggtgtcatgaggtatgttatgggctgactggtgtcctcccaaaatctgtatttgaagttataatacccagtactttagaatgtaaccataatttgagatagaatctttaaagacgtaattaaatggtataatatcattaaggtgggctctaatgtaatgactagtgtctttataagaagagaaaatctgaacacagacatgtacagagggaaaactgtgtgaagacagagggaggccaaggcaacctacaagccaaggaaagaagcctgaaacacatccttcctcgtagcccccagaaggaaccaaccatgctgacactttgatctcagattttcag

SEQ ID NO: 501155 - DNA, 536 bp, Homo sapiens
cattttgcagaatgccatttaagttgggtttgtcttatgtttttctcatgattagactggagttatgggttttaggaaataatcctttacagagatgacatgcccttcttaccacatcctatcaagggcacatgccatcatcatgacattgtttgtgatgttaaccttgcttgcaatgctaaagttgtgtctgctaagtttcttttctataaaatcactgctttcctactccatgttcctgctgctatttcatctgatgatctctttcctcccttcttttctccttctcttttctcacttttatttcatttcttctggtatcctttctttattcctaacagatttcacagacaagggattataatttaggtaagggccattgggmaaactcatttacaggaagctttacactttcaaaaatttccattgtatgcaatatctcaacagattctaacaagttcttacaggggtgttcatattattatctccatttgcagaagaaaaaacaaaggttccctgactcacctaaggtcaaa

SEQ ID NO: 501156 - DNA, 389 bp, Homo sapiens
tcccactgtgccttttcctcttttcctgtcctcgccaatgcatggtctcatgcgacctttcaccacagtaggctgagtygatgttactgccacatgctttttgcagcttctgcatgccaattgttcacactggggtaggcaatggccctctgcctagctgtggtgcatacctccttagaggccactgtgatggatagctctgctcacccagtttcttgtacaccctttctgagtttcctagggtcttacgatcactctctttaggatcttgaatcaattcccttcagaagagatggcaaatgcctgaaaatgtgtcctcctaaccaacaaccaacaatcttctcaggtctgagtcccatgactagcatttttattatattgtccaggcg

SEQ ID NO: 501157 - DNA, 618 bp, Homo sapiens
gacactcccactgtgccttttcctcttttcctgtcctcgccaatgcatggtctcatgcgacctttcaccacagtaggctgagtcgatgttactgccacatgctttttgcagcttctgcatgccaattgttcacactggggtaggcaatggccctctgcctagctgtggtgcatacctccttrgaggccactgtgatggatagctctgctcacccagtttcttgtacaccctttctgagtttcctagggtcttacgatcactctctttaggatcttgaatcaattcccttcagaagagatggcaaatgcctgaaaatgtgtcctcctaaccaacaaccaacaatcttctcaggtctgagtcccatgactagcatttttattatattgtccaggcgagcagtgtaggggaggtgctctactctccaactggtttaagaatcttagtcttggatgaccattgtcccaagagctttctacccacaaagcttatgaaatcttcaggcgaatagtgccctgataaatggttgctttgtcaggtcctcccagttcttgcaatacacttgcatgcaaaaaataaaatcttaagtgttccaaccaattggatggacaccccgacttg

SEQ ID NO: 501158 - DNA, 389 bp, Homo sapiens
tcccactgtgccttttcctcttttcctgtcctcgccaatgcatggtctcatgcgacctttcaccacagtaggctgagtcgatgttactgccacatgctttttgcagcttctgcatgccaattgttcacactggggtaggcaatggccctctgcctagctgtggtgcatacctccttagaggccactgtgatggatagctctgctcacccagtttcttgtacaccctttctgagtttcctagggtcttacgatcactctctttaggatcttgaatcaattcccttcagaagagatggcaaatgyctgaaaatgtgtcctcctaaccaacaaccaacaatcttctcaggtctgagtcccatgactagcatttttattatattgtccaggcg

SEQ ID NO: 501159 - DNA, 600 bp, Homo sapiens
gcattgtactcattctctgtatctgtgacagtaaatagttgtagacgccattggtgtctgtccatttcacaaaaatctgagattcatggaagatcctaagacataaaacagctaattttgcaagtttctaaaaatacgttcattccaaagagtaaggagatatgagaaaatcaattatttgggtggtgatttatcaagattaggagataatttcccttttcagtcatgcacgttattaattgtrtcaaattcccttaaacatcagcgattaacagagatctacttgaaatctatcctgctttagtttctgtgtatatcaatagtcagtgtttcaatgatgtgagaaggaggtggtcaatatccttatacatagacccactgccaggcctctgagcccaagctaagccatcatatcccttgtgacctgcacgtacacatccagatggcggttcctgccttaattgatgacattccaccgcaaaagaagtgaaaatggcctgttcctgccttaactgatgacattaccttgtgaaattccttctcctcgatcatcctggctcatcctggctcaaaaactcccccactgagcaccctgtgacc

SEQ ID NO: 501160 - DNA, 600 bp, Homo sapiens
gcattgtactcattctctgtatctgtgacagtaaatagttgtagacgccattggtgtctgtccatttcacaaaaatctgagattcatggaagatcctaagacataaaacagctaattttgcaagtttctaaaaatacgttcattccaaagagtaaggagatatgagaaaatcaattatttgggtggtgatttatcaagattaggagataatttcccttttcagtcatgcacgttattaattgtgtcaaattcccttaaacatcagcgattaacagagatctacttgaaatctatcctgctttagtttctgtgtatatcaatagtcagtgtttcaatgatgtgagaaggaggtggtcaatatccttatacatagacccactgccaggcctctgagcccaagctaagccatcatatcccttgtgacctgcacgtacacatccagatggcggttcctgccttaatkgatgacattccaccgcaaaagaagtgaaaatggcctgttcctgccttaactgatgacattaccttgtgaaattccttctcctcgatcatcctggctcatcctggctcaaaaactcccccactgagcaccctgtgacc

SEQ ID NO: 501161 - DNA, 471 bp, Homo sapiens
cttctccccccttgaggttcctactgaaatctgacaatcagggttgaacttcactgtcagcttccattaagcaaatcaagcaggaaaaaaaagagtgtgagtctcgtcttggcaggaagctgattcagcagtgataatctgcttgtgctggagggcccagataccaaagggtttaattagttagcctaggtgctgtctccggccacagkgctcccctccccttccctccatcctctagcctcccagatgagtgtttttccctccatccctagcctctgggatgagtttctttccctgcgtcctctgcttctaattcatgggaatgccttgggaatgacaagtacccatggccatgcctgccaggcaccatgttgaccctgtcaagagcatttcctctgatgtggactgatccacaggcactggctgtctccctccctccatctcttggctctctcaataggagtgagactt

SEQ ID NO: 501162 - DNA, 627 bp, Homo sapiens
tctggaccctgcctgcatggatccaattcaaagaagttgatgaaatggagcttggccagagtttagagaaagcttcagggatagttccatggctcttagagaagggataagagatgcccctggaaaactgatagaaatggagccttaggcaccttggggacactgttcatgctccattttacttatccatggaagagaaaatacagctaaagatgaacacttccctactgttactaggattcctgtagcccttggtgccatkatatgtagcatctttttccagtccttaattcaagctgctgcttgagtgatttacttaaaaacccaaacacagtcatgtcactgtccactctgtaaactctggttggctgccccctaactataaataaagcatcaatccctttaacatgacttataaggccctttatattctctccccaacctacctacccaggtctttccattgctttccaaaacatccaatgaaacagaagtatgaacatttctgatattcagaaaagcatacatcttctctcccaagcttcactgccttttcaatgtctctgcccatttcagtctctattttctctctctctttttatagtcttagtcttagagttatgttaa

SEQ ID NO: 501163 - DNA, 481 bp, Homo sapiens
tttcagccaccagaatcatgagccaaataaacctcatttttttttcacaaattacccagcctcaggtagactgttattgcwacacaaattggacaaagataatataactccttaaattttcttcaattctcaaaactacccttcaaagtagttgttgaagtatcttcctcagaatagtacttgtgttcactgaggttaactaacttaactaaagctgcacagctagtaagtgaccaagtgaccttatgtccaatttttctcttctccactgatgccacagtaccttgttatcttaagaatctctttcatgacagagttttctatttttataatcatttctattgttagtatgtaataattcttaataatagcaaacttgatttgagacttcttagattgacttttctaatgccttcgtcttcctgagtttcaaatgcacataaatatagggcctaagaccattagttacccagcctcttct

SEQ ID NO: 501164 - DNA, 481 bp, Homo sapiens
tttcagccaccagaatcatgagccaaataaacctcatttttttttcacaaattacccagcctcaggtagactgttattgctacacaaattggacaaagataatataactccttaaattttcttcaattctcaaaactacccttcaaagtagttgttgaagtatcttcctcagaatagtacttgtgttcactgaggttaactaacttaactaaagctgcacagctagtaagtgaccaagtgaccttatgtccaatttttctcytctccactgatgccacagtaccttgttatcttaagaatctctttcatgacagagttttctatttttataatcatttctattgttagtatgtaataattcttaataatagcaaacttgatttgagacttcttagattgacttttctaatgccttcgtcttcctgagtttcaaatgcacataaatatagggcctaagaccattagttacccagcctcttct

SEQ ID NO: 501165 - DNA, 650 bp, Homo sapiens
gtttcctttttatggcttttgtctctctgctgaagggatgcttagttctttggagtagatgaactttgaggatgccccaaccattgcactatgcttcctgacttccatcaccacatcttctaggggtcactaaacaggaacttgtggaacagtgcttctcaaactttgacctgcatcagaatcacctcgagggcttgcaaacagacagctaagctgcagccccagagtttctgattctgttggtctggactggggtctgaaaagttgcatttctaccaagttcatggatgatgatgtttctgttctgaggactaccctttgagaactattggtgtagatagaagctatgcatgcagactctgaatttgaattgcttgagtttatgtacagtgattagctttcaagacattgcacaaacaaaaatatgtgcatatcagatcagtgcccttgctttgcatgatttcaatatatgtgagtttcagtcaacatgatatcatgaggactgcctgtgatctttaacctctctgtgcttcagttttctcatctgaaaatgggaataatagtacctactttatrcaattgttgtgaggattatataagacaatacttggaaagcatgtaaaacaaacagtgcaatctatgaataggta

SEQ ID NO: 501166 - DNA, 517 bp, Homo sapiens
ctggagatgaaggggatcaaactttattatatatttacttacttatttggacatgtcagtgtttgtttgtttattgtatatatttaataatgcacaacgtgatgttttgatatacatagtgaaataattactagagtcaagccaattaacatatcatcatctcacagagttaccttttttagggtgtstggtaagaacacctaaaatctgctctctaagcgaatttccagtacagatggtccttgacttaatgatggtttgacttaagatgtttcagcattatgacaatgtggaagagatacacattcagcaggcttcttgacttacaataaggttatgttagagaagcatctgtatataatataatattatatcgtccttgtgctgtgcattagatttcaagacttattcatcctatgtaactgcagttttgtaccctttgaccttcatctccccctggtccctttggtaactgccagtctactctctgttttgattatttttagattcctcatat

SEQ ID NO: 501167 - DNA, 517 bp, Homo sapiens
ctggagatgaaggggatcaaactttattatatatttacttacttatttggacatgtcagtgtttgtttgtttattgtatatatttaataatgcacaacgtgatgttttgatatacatagtgaaataattactagagtcaagccaattaacatatcatcatctcacagagttaccttttttagggtgtctggtaagaacacctaaaatctgctctctaagcgaatttccagtacagatggtccttgacttaatgatggtttgacttaagatgtttcagcattatgacaatgtggaagagatacacattcagcakgcttcttgacttacaataaggttatgttagagaagcatctgtatataatataatattatatcgtccttgtgctgtgcattagatttcaagacttattcatcctatgtaactgcagttttgtaccctttgaccttcatctccccctggtccctttggtaactgccagtctactctctgttttgattatttttagattcctcatat

SEQ ID NO: 501168 - DNA, 631 bp, Homo sapiens
gggatcaaactttattatatatttacttacttatttggacatgtcagtgtttgtttgtttattgtatatatttaataatgcacaacgtgatgttttgatatacatagtgaaataattactagagtcaagccaattaacatatcatcatctcacagagttaccttttttagggtgtctggtaagaacacctaaaatctgctctctaagcgaatttccagtacagatggtccttgacttaatgatggtttgacttaagatgtttcagcattatgacaatgtggaagagatacacattcagcaggcttcttgacttacaataaggttatgttagagaagcatctgtatataatataatattatatcgtccttgtgctgtgcattagatttcaagacttattcatcctatgtaactgcagttttgtaccctttgacctwcatctccccctggtccctttggtaactgccagtctactctctgttttgattatttttagattcctcatataaaagagatcatatgatatttgttgttctgtgtctggtacatttcacttaacgtaatgtcctccaggttaatccatgttgtcacaactggcaggatttcttcctttttaaggctaaataatattcc

SEQ ID NO: 501169 - DNA, 554 bp, Homo sapiens
ttgacagttgagatggctgtgacrtttgtctctgctgatcagttggtaatatatgttagctcttccctcctctattcatgtcaccttttccatgaagttcaagtaaaggggaatctagggtccaaagtttatttgagtggccagcattcctacgtgtggtcagtgtgaacaaaccacatgggttgagtagagtccctacaccaacatctattgttgtttctctctaaattttccaatttgcatctcttttcaagaaagtttactcacctctagcagctctgcacagttctcactttgtagaatttaattggaatggtctattctcatgctgccagcctcccttcctccttccctgctccttccgtggtacagaacatctctcctgcctgagttgacaaaaacaaaacaaaacccagaacctcggaaattacatttcatttgacatcccctccctaagatagcaattcagaaatagcactttctgttcagtctgcttgaaagtaacatttctcagccagagtctcagcatcagccccagctaagagctgtcagat

SEQ ID NO: 501170 - DNA, 500 bp, Homo sapiens
atctttaactgatgctgggattcaccacatttcctgcatctgcagaactaggcaatcatcattcacatcttaaattatggtctggaggtaccacacactccttaatcaacaaacaaaatgcagattttgcaggcggtgagttccgtgtggtgccataaagatggccacacattctttgtcattgggaggccattgagagttgacataaatttccccttctcttgaatctgggctggmcttgtagttattttgaccaatagaatgcagtagaagtgacacttagtaatttccaaggctgacccttaagagatttttcagcttttctatgtgacttgcaacactttcttgaaacacagccaccatgcaagacatctacctaccctgtggccaccagtctgtgaagagcccacactagccataataagagagacagaaagagggtcagggtggaatagcactgaggtaccagatgtggtaacaccttttgaaatgtagccaag

SEQ ID NO: 501171 - DNA, 585 bp, Homo sapiens
ctgtttgtatacccatttgtatacccagactaaagaaaactggtcctcaacaagactaaatagccttccctgggtcaactcatgagtagcagacacaggtaaggatgacaggtgcggtacgaagcattaccaatgagacaggctgggtsttagatattaggtaagatgaaagtaccacagaacaaaagagctgtctgggaaatttataggtagggatgggcaaagaggcctatatttggaaaaagtgtagcaatcctcaccacacaagaggacatgtcaataaccctcttgccttcttcctccttgacacatgaacagtgcaatcgcagaactcatggagctcaaaatctgacgcagacaagaggcacatatgacaccacatagtgcacaggaaatgcagggtgctatggcaatactggtacggtggggcacaatggactgggcgaactgataaaagatgtcatagagaatataataagcaagctgaactttgcaggacaaaccgacatcaaatgacctcaactcaactctttcattaaataattgtgtgaccctggataaatcacataacctctccggactttg

SEQ ID NO: 501172 - DNA, 503 bp, Homo sapiens
agctgtttgtatacccatttgtatacccagactaaagaaaactggtcctcaacaagactaaatagccttccctgggtcaactcatgagtagcagacacaggtaaggatgacaggtgcggtacgaagcattaccaatgagacaggctgggtcttagatattaggtaagatgaaagtaccacagaacaaaagagctgtctgggaaatttataggtagggatgggcaaagaggcctatatttggaaaaagtgtagcaatcctcaccacacaagaggacatgtcaataaccctcttgccttcttcctccttgacacatgaacagtgcaatcgcagaactcatggagctcaaaatctgacgcagacaagaggcacatatgacaccacatagtgcacaggaaatrcagggtgctatggcaatactggtacggtggggcacaatggactgggcgaactgataaaagatgtcatagagaatataataagcaagctgaactttgcaggacaa

SEQ ID NO: 501173 - DNA, 503 bp, Homo sapiens
agctgtttgtatacccatttgtatacccagactaaagaaaactggtcctcaacaagactaaatagccttccctgggtcaactcatgagtagcagacacaggtaaggatgacaggtgcggtacgaagcattaccaatgagacaggctgggtcttagatattaggtaagatgaaagtaccacagaacaaaagagctgtctgggaaatttataggtagggatgggcaaagaggcctatatttggaaaaagtgtagcaatcctcaccacacaagaggacatgtcaataaccctcttgccttcttcctccttgacacatgaacagtgcaatcgcagaactcatggagctcaaaatctgacgcagacaagaggcacatatgacaccacatagtgcacaggaaatgcagggtgctatggcaatactggtacggtggggcacaatggactgggcgaactgataaaagatgtcayagagaatataataagcaagctgaactttgcaggacaa

SEQ ID NO: 501174 - DNA, 585 bp, Homo sapiens
ctgtttgtatacccatttgtatacccagactaaagaaaactggtcctcaacaagactaaatagccttccctgggtcaactcatgagtagcagacacaggtaaggatgacaggtgcggtacgaagcattaccaatgagacaggctgggtcttagatattaggtaagatgaaagtaccacagaacaaaagagctgtctgggaaatttataggtagggatgggcaaagaggcctatatttggaaaaagtgtagcaatcctcaccacacaagaggacatgtcaataaccctcttgccttcttcctccttgacacatgaacagtgcaatcgcagaactcatggagctcaaaatctgacgcagacaagaggcacatatgacaccacatagtgcacaggaaatgcagggtgctatggcaatactggtacggtggggcacaatggactgggcgaactgataaaagatgtcatagagaatataataagcaagctgaacyttgcaggacaaaccgacatcaaatgacctcaactcaactctttcattaaataattgtgtgaccctggataaatcacataacctctccggactttg

SEQ ID NO: 501175 - DNA, 533 bp, Homo sapiens
ctgaacaattttcacaccatcatgattaggtgtggatgtaggtgcacttctctagttttcttcatctttcctagccttcttccttattaaaaaattacccatgtggaaaattamaaagaaagcaaaactaactataaaattacaactcacaaacattccaatggtttgcaattttcatgactattaacaatgtgctccctgtggactgcggcatagatgagataggctgttggttatgcaggagctccaactcagtctttccctcccactcaagaagacataataaaagcaagcaaaggaaaataacattggtacaaccttggattaatcttattatttatttttaactaaaaaatgattagcggcttttttttttcctgatagtaaaacaaattatttcaaataccaggatgcattctttcacagaatcaggaaaatgcaaatttggaattgcaacttctttgccatgagcatgttggcatttattatttttattatcactgccctactaaatttcattagcatttaagaca

SEQ ID NO: 501176 - DNA, 533 bp, Homo sapiens
ctgaacaattttcacaccatcatgattaggtgtggatgtaggtgcacttctctagttttcttcatctttcctagccttcttccttattaaaaaattacccatgtggaaaattaaaaagaaagcaaaactaactataaaattacaactcacaaacattccaatggtttgcaattttcatgactattaacaatgtgctccctgtggactgcrgcatagatgagataggctgttggttatgcaggagctccaactcagtctttccctcccactcaagaagacataataaaagcaagcaaaggaaaataacattggtacaaccttggattaatcttattatttatttttaactaaaaaatgattagcggcttttttttttcctgatagtaaaacaaattatttcaaataccaggatgcattctttcacagaatcaggaaaatgcaaatttggaattgcaacttctttgccatgagcatgttggcatttattatttttattatcactgccctactaaatttcattagcatttaagaca

SEQ ID NO: 501177 - DNA, 631 bp, Homo sapiens
tagtaatgtattattttgtgtttttttccaaatgcatattaaaatatagttaygaagaatttatccaagactgcatcaaacattctacataaaatgggtgtatcatctcttaccctttaaaagtttgtactttgtgagaaaaaaggtttaaaggcagaaacaggcacaagcagtcgtacattcagttccagtgctagatatacatatttcttccttttgcctcctttgtgttttgggccttgacagtgtggtaagggcagcggtggagagaggagaggaggagttgcagagtcgaggtgactgaaggtggaaatggcaatgcaccgagccctgagctggcaggtggtccagagagcagcgggccccagcccagctcctcagtatcattgcaagggttttgagaatccaacatcatcggtgatgagaaaaatgtttcacatttttcaagcatatatgaaagtgctttgatgaattgaataacaattcatagtgattttttgatgttctatattttttctaattaattgattctagatgttaaacctattagatgggaagaggactctagttcatttttgcattaaaagggttctttcttacttgaagctggtgggaactattggaagagggc

SEQ ID NO: 501178 - DNA, 631 bp, Homo sapiens
tagtaatgtattattttgtgtttttttccaaatgcatattaaaatatagttacgaagaatttatccaagactgcatcaaacattctacataaaatgggtrtatcatctcttaccctttaaaagtttgtactttgtgagaaaaaaggtttaaaggcagaaacaggcacaagcagtcgtacattcagttccagtgctagatatacatatttcttccttttgcctcctttgtgttttgggccttgacagtgtggtaagggcagcggtggagagaggagaggaggagttgcagagtcgaggtgactgaaggtggaaatggcaatgcaccgagccctgagctggcaggtggtccagagagcagcgggccccagcccagctcctcagtatcattgcaagggttttgagaatccaacatcatcggtgatgagaaaaatgtttcacatttttcaagcatatatgaaagtgctttgatgaattgaataacaattcatagtgattttttgatgttctatattttttctaattaattgattctagatgttaaacctattagatgggaagaggactctagttcatttttgcattaaaagggttctttcttacttgaagctggtgggaactattggaagagggc

SEQ ID NO: 501179 - DNA, 621 bp, Homo sapiens
tacagtgagggagggcacactagaagcctagagtctgacaactgggagggccttacagtcagtccaccctccaagcatggcatctctccagtgaactggcaggcgactgaccccrctacttatacacaagctccaagctttacccatgtctgtatcccagatctggagaacagcctacaggggggacatttgcttattgcatgaatgattaaggcaatttaaataaactaataattatagctaagtattgagcagaaactatgtgctgggcactagaatcaacatgtactaacatatttactattaaattttaaaaactcaagtaagctttgcagaatgtggtgagggaggtacatattttcattaaatcagactctggagagacagataaaagcatcacaaaagtgtccccaaaatagaagaggggatcttcatcttcacagggcctgcacttcaagaaaacattgagtaggataaggtgactgtcttacttaaaagcgctcaacaccaaaacccccagccagccagaaaatgaaagtcagagggtcttcatacaactgtgttggttgtaccctgcagaggggcgcccaacccagggagcaagtgaggacagaaacacac

SEQ ID NO: 501180 - DNA, 642 bp, Homo sapiens
taacacttaacatggctctgtgggccaggcattctcctatgcacattacaaacagtaactcacatatcctcataatgagcttctgaggtggtagcattattaccctcatgttacaggtgaggrtgctgaggcccagaggggttacataacctgcagggtcatgcagttaggaagtggcagagccagaatggtcacccattctgtatgacttttctgtctcccgggacctggcctggcccgctgtaagctagcaaacgtgtgtgctgaatgaatactggtgtttaaaagactgacatggtgcatgagaacagggtcttcctggtttggggaatggtgctgattcacacttggcatgtgtttatttcctgaaggttctacggccagcagagctctatcctgacaatgtttctgaaccaccgatcacctacaggtgtgcagaggttatgacacagcagttttacacttggccttgggagttgttgtccggttccccattatccccagtttacacactttcactaagtcaagattccatgtctgtagctgtaatagcagtgtaatagcactgtgctcaagggcctggagtgttccttgatgtgttttgggatttctagccaaatgaactcagtataagttcatctc

SEQ ID NO: 501181 - DNA, 619 bp, Homo sapiens
atgaattcttgatggctctgccataacttgtttgagctttgactgtaatatcttcttgaaacaagacactcggatggcaataagcacrcatgagttttaatgttgatgatttaccaatgattaaagaaacattctgcacagtcagccctccatatccctaggttccatatctgtggatcaaccaactgcagatagaaaataatgggggaaaaaaaggatgcttgcatctatactgaacatgttctgctttttttgttcttattattccctaaagcataacaactatttacgtagcaatggcattatattaggtatcataagtaaactagagatgatttaaagtatacaggaggatgtgcgtaggttatatgcaaatactattccattttatataagggactggagcttccatggatttgtgggggtgggcaaggggggagggtgttgccctgaaaccaatcacccatagatactgaggaaacaactctgtgtgatactataatggtggaaacacgtcatcatacatttgtccaaatccatacagtgaacaacaccaagagtaaaccctaacgtaaattatggaatttgggtaataatgatgtgccaatgtctgttcatc

SEQ ID NO: 501182 - DNA, 468 bp, Homo sapiens
cgatctgtttacttacgttgtggctgcttcagtgtaaggaataggaaatatagggtttgcttacatgattttgtctaatttatttactgcacaccagaaggtggaaaatagcccctgagaatgaagaataagaaacttgtcctctgaccttgcaccagaaccttgcatttgtgcacttctggggcaatctcttgtttagttggctcacaccaagtaccaagttcttaagaggggaagaaacaaaaaccagacagagttttcagcttgaataaaagaagctaccctaaaggcaaatcagcagaatttttttgttttgtttgcttatttttgtgaggggatcagttattcttctttccttcacaatatgggaggtgtgtgcatgagagagacaggagaaaaaaaacaaaaaaaaagaaarcatgccaccaaacaatagcttcatccaaactctgacatacactctttgta

SEQ ID NO: 501183 - DNA, 642 bp, Homo sapiens
taaatgtaatataagtgcatttttctctcttttttcccatatttacaattagaagcttgaaagaagacagaattccatctggccttggtaccacgtttctcctaacatgaggggctagtgaccagacacgatagggcagtgattgctttgtcactgccttccctccccatgccctgccatttttatttttgatcttctcagaatcctttgtttatttggccccattcaaggcccactttttaaattcttcctttyttcatatacattcccagcagataggtggcctttgctctattcatttgacaaccttttctaagttaaaagcaaataagaaaaccaacataaaccttcccataggactgagcagatctcctctgctgccttctctttctcccatccacctcaaggccaacaccccaccagtatcaaccccatgttttctttctcagtgtcctctccctcaggatccctagatctctattaactcttcatgatacagtcaaaggttatacttgctttgggaccatgtattagacttgtggccctggagaaatcacatctactctctgagcctcagtttcctcatttgttccttatattccttcctcagtcaacaaagacacctatgggtggtgtgcccag

SEQ ID NO: 501184 - DNA, 642 bp, Homo sapiens
taaatgtaatataagtgcatttttctctcttttttcccatatttacaattagaagcttgaaagaagacagaattccatctggccttggtaccacgtttctcctaacatgaggggctagtgaccagacacgatagggcagtgattgctttgtcactgccttccctccccatgccctgccatttttatttttgatcttctcagaatcctttgtttatttggccccattcaaggcccactttttaaattcttcctttcttcatatacattcccagcagataggtggcctttgctctattcatttgacaaccttttctaagttaaaagcaaataagaaaaccaacataaaccttcccataggactgagcagrtctcctctgctgccttctctttctcccatccacctcaaggccaacaccccaccagtatcaaccccatgttttctttctcagtgtcctctccctcaggatccctagatctctattaactcttcatgatacagtcaaaggttatacttgctttgggaccatgtattagacttgtggccctggagaaatcacatctactctctgagcctcagtttcctcatttgttccttatattccttcctcagtcaacaaagacacctatgggtggtgtgcccag

SEQ ID NO: 501185 - DNA, 567 bp, Homo sapiens
taatcaaatgcacgatcgggcacacactctgacaggaagttttgttttacaaaaaaaaaaaaatctaaaaaccgcacaaaactgaccttctatattgaaatggatttctcattatacctcaggaggttaattataggacaaaataaaatgacttaatcatgtctaaaacatyttaataacaacaaaaaactatacttagcttcatattttaaaagtagtgcttaagacagattggcaagtctatcaatgtttatgttatatttcagtgtacaaaataggtttagattgaatgaacggccattaatccttatgttaaaaaaacagaaatctttacattcattaataaatctatcaaaataaatgtttctactgtgttaatagttcataaataagataatattacctatttaaaattaagattcctagtgagatgcctaggacacagcttttcatgtgatctttaataaatataatctcttctgggccttggcaagctaatcacactaaccccatttatgaatgcatggaagctaatttacaagtgtatgtgaagtgggtgcttaaacc

SEQ ID NO: 501186 - DNA, 567 bp, Homo sapiens
taatcaaatgcacgatcgggcacacactctgacaggaagttttgttttacaaaaaaaaaaaaatctaaaaaccgcacaaaactgaccttctatattgaaatggatttctcattatacctcaggaggttaattataggacaaaataaaatgacttaatcatgtctaaaacatcttaataacaacaaaaaactatacttagcttcatattttaaaagtagtgcttaagacagattggcaagtctatcaatgtttatgttatatttcagtgtacaaaataggtttagattgaatgaacggccattaatccttatgttaaaaaaacaraaatctttacattcattaataaatctatcaaaataaatgtttctactgtgttaatagttcataaataagataatattacctatttaaaattaagattcctagtgagatgcctaggacacagcttttcatgtgatctttaataaatataatctcttctgggccttggcaagctaatcacactaaccccatttatgaatgcatggaagctaatttacaagtgtatgtgaagtgggtgcttaaacc

SEQ ID NO: 501187 - DNA, 345 bp, Homo sapiens
ctcggaaagcaaggttatactggggagaaaaacttgttttgagataagaagaaagaaaataaaaaatataaaaaaaagcattatgaaaacggtgttatgaagctaaactgggaagcttaaataatcattcctgaacaaaggaakctgcatcacaagaagcctgccagaagttgagtgctcatttgaagagaattcttaaaggctatttctgccaaggaaagttaggttgaaagatgacacgttttctttccccctttacaggctataatttacactttgaggactattttcctttttcacctctacggtggatttactagctctagttgttgaagaagcacaaag

SEQ ID NO: 501188 - DNA, 602 bp, Homo sapiens
tctgttcacaatctcagaaggtcatttctaatatcctctaccattattatgcatttaaaaataaatcataagaaaaaccagactattattgagtttatgttagatgaggattactcatatctttccgaaataatatttttgtttcctaatgaaaaatatctttrtgtataccatttgtaaaatttcaatatatacacattcccagaggtttattcactacttggctccaccagatatctaagattgcatataagggatacataaaataaaaaggtagaacagaaaacagaagatgaaagaggaaaacaaatggacaaaaacaattccagggctatgaagcaaaggtagaaaggaggcccttacagagacgtccaccagagtcctcttcatcaagcatggaacatacatttggctccaagctttcttacagtcctacataaggatccatctgctatgagaatatggcttataatagttaaccacgagcagaccaagaagataaaatttattactacttaaaatagaaactttttccctgagatcattgtaaataagattatgtataatataataaaaaactccctcttcgtatttttaaagca

SEQ ID NO: 501189 - DNA, 602 bp, Homo sapiens
tctgttcacaatctcagaaggtcatttctaatatcctctaccattattatgcatttaaaaataaatcataagaaaaaccagactattattgagtttatgttagatgaggattactcatatctttccgaaataatatttttgtttcctaatgaaaaatatctttgtgtataccatttgtaaaatttcaatatatacacattcccagaggtttattcactacttggctccaccagatatctaagattgcatataagggatacataarataaaaaggtagaacagaaaacagaagatgaaagaggaaaacaaatggacaaaaacaattccagggctatgaagcaaaggtagaaaggaggcccttacagagacgtccaccagagtcctcttcatcaagcatggaacatacatttggctccaagctttcttacagtcctacataaggatccatctgctatgagaatatggcttataatagttaaccacgagcagaccaagaagataaaatttattactacttaaaatagaaactttttccctgagatcattgtaaataagattatgtataatataataaaaaactccctcttcgtatttttaaagca

SEQ ID NO: 501190 - DNA, 620 bp, Homo sapiens
ccacatgttgtaagcagcttaaaacttcaagccaaaggaagaatattcatccgtggtagaaaccatagaatctcatgtgtgacatcattataggcaggcagaactcaaagagattttcccaagggatctgaaatttctttatcaatgagatactaataatttccattattgatgataataatagcagaatctactatttgtttagggccagccattctaatatgcgtttatcttgatrcttgcaatagtcatataaggtaaatactagctaaggcattaaaaatgatgaaataagaggttgtaatacctctaaagtatagccagaaagtgggaaaacaggagtcaagcccagatattcttaaaagtttagcttatttctattttaccaacctgaccttcattcaatttgccctttctaacttgaaaggaagtgtatcccttgttttctcatgttatttactgaatagagcattataataccaatcagaatctttccagagaggttctgccagagaacacaggtggagatcagcttactcacaagagctggctgctgggtgtcgctgtaacctctgtcccactcctcatggaagccaaatgtcagaggtgggttctgaggt

SEQ ID NO: 501191 - DNA, 480 bp, Homo sapiens
cattcacagggctgccccaaaacccaattatcaagacatacaggatttyaatacagtcattttaaaaatcaaaattaatgacgaaaaagtccatgtgaataaattatcaaaattctcaataaggataggctcaatgttcctaatttttcttttgcctttggcttcactgtacaactcaactgggcacttactctgactacaccattctgaggacagagactttctttcttctatatcctctcctgggacagaggagaacataatcaatcatgtactagctgagccaaggctggaggtgagagcttatgcccccaaagatccgttgtactaactaagcctgttgctgagagcaactttttaattagttgatcatgccctactctacctcacaactgtatggttcctaactgtgtataaaagggactagctaagcaggaatgtactgatgcagctaaaaatagtattaagtcattattggag

SEQ ID NO: 501192 - DNA, 500 bp, Homo sapiens
tctcaggtggcagcatcacctcttttggtaggactttgagtgtgacacaaacaagattactgtgtctatcaggttttcactattgaggctactctctgtgacaaaggtttgagtccccaagaragacatttaatggggtctggtggattctttctttgcattgtaccttagacggggctctggcccttgatacccaacctttttttctggtacaggatctgaagcttttttaagttaaagtgtaaatgattagtaatctacaagtacttctgggtaacagcattagcttaaggctttaatttctgccaacagtaatggtaaaattataggtattgcccaaggaatatgaagcaaaaccgttgttctttccattggtataaaaaatagacatggtattttgatgaactgattttattttattttttgaggagggttacactgtcatttgttgaacttgttgtctctcctcaatgctctgtatcaagaaatacctttggcag

SEQ ID NO: 501193 - DNA, 500 bp, Homo sapiens
tctcaggtggcagcatcacctcttttggtaggactttgagtgtgacacaaacaagattactgtgtctatcaggttttcactattgaggctactctctgtgacaaaggtttgagtccccaagagagacatttaatggggtctggtggattctttctttgcattgtaccttagacggggctctggcccttgatacccaacctttttttctggtacaggatctgaagctyttttaagttaaagtgtaaatgattagtaatctacaagtacttctgggtaacagcattagcttaaggctttaatttctgccaacagtaatggtaaaattataggtattgcccaaggaatatgaagcaaaaccgttgttctttccattggtataaaaaatagacatggtattttgatgaactgattttattttattttttgaggagggttacactgtcatttgttgaacttgttgtctctcctcaatgctctgtatcaagaaatacctttggcag

SEQ ID NO: 501194 - DNA, 611 bp, Homo sapiens
gaaaaacagttgtgtgtgtgtgtaatgatacattttgtctcacttcttggcccttgataatgatgataatgataaaaatgtttattattgatattcttattattggtatccagggatatagataaaagatatcattgcatatttattattaattgttaatatgttattattactattattattctattattaaaaactatgtaccaggccctgtgctgatacattgcatgctatgttctcatttaatactctcaacaaagtcatgagacagatactacttttatcttcagtttgtaggtaataaaactgaagtttagcaaggttgagtaacacgcctagagggaggatggaactagaacatctcctaggctccagtctcttccctgtatttagggagtacaaagttgagycccagtgcttggagcacaactgtttatacatgctaattgggattaggcttacatttattctgcttaggtcacaaatcttattgtccaggcatacatgtcaagtctgatcagcaacaactgaagcttggaattgaatttcctgtgctctttgcccccaacagcttgcaggttaaagctaaacgtatgtgttatccatctcca

SEQ ID NO: 501195 - DNA, 512 bp, Homo sapiens
atggcactgaagccaggcggcagcatccggccaggcatggtccctgtgaacaggattgtgtctctggtgagcggcacaggggcaggggtgtggcagtggttgaacatggggcaatgggcagtgccccttgaygtctgttctcaacacaaagatggcagtgtgtgtggtgctcccagcctctccacagccagcccaggcaggtgggcaggtacaggtctctcctcggttatcaaggaatgggggaaaataccactcttactactgccacctttctaaagcagttcatcctgctcaggcagcagttacaggttgtctgtgggaacactgacagacatgggggctggagggctgtgagatgcccttttggtggcggtggggcggtgtgtggcacaaacccagcaagggactgccctgatgcacaccacaggctctgctagggtatatcctgacaataccatgctaaagggactgtcctcccccagggagaagatgaccaggacaaattcagccag

SEQ ID NO: 501196 - DNA, 483 bp, Homo sapiens
tttttttttttttttgtatttttagtagagaygaggtttcaccatcttggccaggctggtctccaaccactgacctcaggtgatccacccacctcggcctccaaaagtgctgggattaccgatgaaagccaccccacttggccagaacattctatatcatttattatcacccctattaggatgtaaactccacaagggcaaaattttgttttgtacaccaattacccttagtgtgcctatgtttggcatacaacagacatgcatatgttcaaagacctgcacctctatcactgtaaagtacttgcctatctccttcattaaaagagttccttaaagactaactggatctactttgccgtgtcctcaacacctgtccctgggcctgccccataatggacacccactgcacagatactcaagtgattacagccattttcacctgaaacacaatgtcctctatgctgctgaataaaaaagacatct

SEQ ID NO: 501197 - DNA, 638 bp, Homo sapiens
accttggtgaccccatcatatccaggtgagcctctgtcttggcatctgtctcattgcacagcagtcatctattctggacaggctcccctctgagtgtggccccggtgccragcagcatctccaagacactgcaggtgctcattaaatttctgttgtactgaatggaatcagaagggtctagtctccccttgggaaactcttgggtgtgtttgtaagggagagggcaggaccgtggggcagggagcagtgtggcagtcacactcacgggcttcagagtcatcagactgggctccaccctgagaggtccagtgtgcacctgttttcgaggcaatgctaacatctggtagctctgggtgctgaggaagacctgagatggggcaggtgaacccttggacacaatgcctggtaggcaactaattttgacaaacgtgagatcttggtggtcactgtagctacagcatggcctccggctgggctggcctgttgtggccaatcccaacctcccacctccaatccacaaccctcacaatcatattccagatctgatggagaagactcagcaatcactgtctccctggtcccaggaaaggtgcaaggagctgtcttccagacaccgtgcctatccttcaaaggtaaag

SEQ ID NO: 501198 - DNA, 638 bp, Homo sapiens
accttggtgaccccatcatatccaggtgagcctctgtcttggcatctgtctcattgcacagcagtcatctattctggacaggctcccctctgagtgtggccccggtgccgagcagcatctccaagacactgcaggtgctcattaaatttctgttgtactgaatggaatcagaagggtctagtctccccttgggaaactcttgggtgtgtttgtaagggagagggcaggaccgtggggcagggagcagtgtggcagtcacactcacgggcttcagagtcatcagactgggctccaccctgagaggtccagtgtgcacctgttttcgaggcaatgctaacatctggtagctctgggtgctgaggaagacctgagatggggcaggtgaacccttggacacaatgcctggtakgcaactaattttgacaaacgtgagatcttggtggtcactgtagctacagcatggcctccggctgggctggcctgttgtggccaatcccaacctcccacctccaatccacaaccctcacaatcatattccagatctgatggagaagactcagcaatcactgtctccctggtcccaggaaaggtgcaaggagctgtcttccagacaccgtgcctatccttcaaaggtaaag

SEQ ID NO: 501199 - DNA, 620 bp, Homo sapiens
ctcttcaaattgttcctcaggggattcggggtcccaggatgttgacagcctctctcctcacacaccagaagatgccagatgtgacaactgcctctgagatgagcgacagactccagggccctttgatctgcatcctcaccaatccaaaactcagcctgagaaaaagcacatcccgccgctgctagaaactgcattgtcctcatcaccaatgaagtggtgtgtcgctgcagaaggaggyggtgttgttgtaggactttctccttagttcaactaaaaaatgggttctagtcacacagccaggaaacattaggcccgcagacacatagaagggtgagaaaaatggaatttattgggcgaaaaaggaaaaacagaaagctttcagcagagtaagaaggaagcctgctaacctgctcccaccctgccacacaggaactcaagggactgggctcctcccctctgcacgtggcacgaatttccgtggctccaccccctttctcccagtgtgcaggcccgtgggaggttctccagggaaccttggctgtctcagtgcgtcggtgcagaaggaggtggcgcctgggtgcagaaggagatggcgcgtcggtgcagaaggaggtggcgtg

SEQ ID NO: 501200 - DNA, 620 bp, Homo sapiens
ctcttcaaattgttcctcaggggattcggggtcccaggatgttgacagcctctctcctcacacaccagaagatgccagatgtgacaactgcctctgagatgagcgacagactccagggccctttgatctgcatcctcaccaatccaaaactcagcctgagaaaaagcacatcccgccgctgctagaaactgcattgtcctcatcaccaatgaagtggtgtgtcgctgcagaaggaggtggtgttgttgtaggactttctccttagttcaactaaaaamtgggttctagtcacacagccaggaaacattaggcccgcagacacatagaagggtgagaaaaatggaatttattgggcgaaaaaggaaaaacagaaagctttcagcagagtaagaaggaagcctgctaacctgctcccaccctgccacacaggaactcaagggactgggctcctcccctctgcacgtggcacgaatttccgtggctccaccccctttctcccagtgtgcaggcccgtgggaggttctccagggaaccttggctgtctcagtgcgtcggtgcagaaggaggtggcgcctgggtgcagaaggagatggcgcgtcggtgcagaaggaggtggcgtg

SEQ ID NO: 501201 - DNA, 594 bp, Homo sapiens
agtgatgcattttaacagggatcaagttytatagaggcttgctgaagctgcagggagcagaacaaattgggagttggtaggagaggatgcaaggttaccatgatggtccagggaagaggtgccagtcaggaagaggaggaaggaggtagccagctagagggcattcgtggaggagcctgagcaagccccttcctgccagagctttggggtaagtaaggaaaatgcatgtagaaagtgtctagcttggccgggcgtggtgcctcatgcctgtaattccagcactttgggaggttgaagtgggccgatcacttgaggtcaggagaccagtttggccaacatggtgaaaccttgtctctactaaaaatataaaaattagccaggcatgtaggcacacatctgtaatcccagctacttgggaggctgaggcaggagaattgcttgaactcgggaggcggaggttgcagtgagctgagattgtgccactgcagtccagcctgggcgacagagcgatactctgtctcaaaaaaaaaaaagtgtctagcgtgacagaggtgctcaccattgtggtgtcattagccactggagtcaagccag

SEQ ID NO: 501202 - DNA, 540 bp, Homo sapiens
atggcacgatggttcagaggccccagcccagcaccttctgctcagcatccctgtgctcaccaggcacagagcaccatggcactcttatgtggttaacaaacagcagactgtggggttatacaggcagctctgtagctacaaatcaccaaggagaggctgaggcccagcacagccctgaggctggacacccaccagcatggacctcatcgacttgctctgaggatcacatgatataagaaatgtaaaatgcttcattgagtgcccggtayataataaaatcttgataaatatcaactattaggagtaacagcccacatttatagagtgcttatgtgcattagccactgttatgagaacattagggtgactaactcattgaatcctataccatccccagaacgtaggcgtccccatgtcaggaggaaacagagcacagagatgtgaagttattgccaagagtcacacagctctcatggtggccccaggatgggagcccaggcagcctggctcctgaggccacattcttagccactgggctgg

SEQ ID NO: 501203 - DNA, 540 bp, Homo sapiens
atggcacgatggttcagaggccccagcccagcaccttctgctcagcatccctgtgctcaccaggcacagagcaccatggcactcttatgtggttaacaaacagcagactgtggggttatacaggcagctctgtagctacaaatcaccaaggagaggctgaggcccagcacagccctgaggctggacacccaccagcatggacctcatcgacttgctctgaggatcacatgatataagaaatgtaaaatgcttcattgagtgcccggtatataataaaatcttgataaatatcaactattaggagtaacagcccacatttatagagtgcttatgtgcattagccactgttatgagaacattagggtgactaactcatkgaatcctataccatccccagaacgtaggcgtccccatgtcaggaggaaacagagcacagagatgtgaagttattgccaagagtcacacagctctcatggtggccccaggatgggagcccaggcagcctggctcctgaggccacattcttagccactgggctgg

SEQ ID NO: 501204 - DNA, 540 bp, Homo sapiens
atggcacgatggttcagaggccccagcccagcaccttctgctcagcatccctgtgctcaccaggcacagagcaccatggcactcttatgtggttaacaaacagcagactgtggggttatacaggcagctctgtagctacaaatcaccaaggagaggctgaggcccagcacagccctgaggctggacacccaccagcatggacctcatcgacttgctctgaggatcacatgatataagaaatgtaaaatgcttcattgagtgcccggtatataataaaatcttgataaatatcaactattaggagtaacagcccacatttatagagtgcttatgtgcattagccactgttatgagaacattagggtgactaactcattgaatcctataccatccccagaaygtaggcgtccccatgtcaggaggaaacagagcacagagatgtgaagttattgccaagagtcacacagctctcatggtggccccaggatgggagcccaggcagcctggctcctgaggccacattcttagccactgggctgg

SEQ ID NO: 501205 - DNA, 216 bp, Homo sapiens
gaatgaaatcggtagcagaggagacacagagacagggttgacaggagggatgcatggggccagcatttggtgctgagagggaaggtctggagaacagacctacaggggagagtaacaccggaggcagcaaactccaggcccagmcccccaactcccaccctgccacacctgcagctcctggaagctctgatgatgggtccatgggctctgaaccaa

SEQ ID NO: 501206 - DNA, 678 bp, Homo sapiens
gctgtaggcaaacatggcaaagatcctcaaggcccttcttttgtgtggaagtaatgaactctgtcagggagcaaactgtggccagggttttcttaggacccctgaggaaacttgttccctcctcagtccctacctagtatgccatgggtttctacaaatgctggcaaatgcttgcgaatgcaaatttccctgacttttcatggaatgccacttgtcagcctcgtggaaatttggaaagcatctcatgcaggcaaatcaactgcctgaatctcagttaaaaacaattctgcatgttagggctggtcttgtaatcaacactgcccagacctgcctctatgcagtccccagcaagcccacttcccacatcagcttcttccacattgttctgcctctgttgaggattaaggatgaagggcgttcatttcctggggaattttctgcaacttccagagctttggtctgcaagtttcagccaccaaataaaacaatgatatttgggacaactaccccccacctctccccttccaccaagtcaaaagaggatcttgctgacaactgtgtggaaagaagcaagttttgtcccctagacaggtaacggggctgagactgcctcctggccattgccgcctgtggctgagtycttgttcttcaacctctcaggagtgagtaggggatgca

SEQ ID NO: 501207 - DNA, 541 bp, Homo sapiens
cttggttaaggcagacacaaaaaataggtccactttcttgatttcacatgccccttcccacctactgtgcctggcctggtgctgtctggctttgtaatgagtgttggtctctgacttgaccttctttcatctctgctggagcttgtcaggcaatatccatgagcattttctgagtgtctttaggggtggttatttgaaggcactgagaatgtcaggctsagatctttagtaacctgccagcctttagtaatgtcacctcccatcccacccggacacccctgcgtgcgtgccttcctccctgggctctctgcttggtgctggcctggggctgtcagaggggatctactcctattttttattattatcattttctgcagacggactgagcacttcataaacattaacaatgacaaatcaccagcctcagtgacaccacaattacataatgatagtcattacccagtggctgtatgatgcgctgagcagcatcggccggcggtccactgcagccagacgcagatgctggaacaatagccatgag

SEQ ID NO: 501208 - DNA, 541 bp, Homo sapiens
cttggttaaggcagacacaaaaaataggtccactttcttgatttcacatgccccttcccacctactgtgcctggcctggtgctgtctggctttgtaatgagtgttggtctctgacttgaccttctttcatctctgctggagcttgtcaggcaatatccatgagcattttctgagtgtctttaggggtggttatttgaaggcactgagaatgtcaggctcagatctttagtaacctgccagcctttagtaatgtcacctcccatcccacccggacacccctgcgtgcgtgccttcctccctgggctctctgcttggtgctggcctggggctgtcagaggggatctactcctattttttattattatcattttctgcagacggactgagcacttcataaacattaacaatgacaaatcaccagcctcagtgacaccacaattacataatgatagtcattacccagtggctgtwtgatgcgctgagcagcatcggccggcggtccactgcagccagacgcagatgctggaacaatagccatgag

SEQ ID NO: 501209 - DNA, 665 bp, Homo sapiens
gataaagagacatagtatgtaagaagaaacaccttgagaaggggcaatgaaatttggtggatgaaagaaggaggctatgaaggagactaattcctagtacaatacttagctcagagtcagggggaatgaagcaagtagaaagatatcacaatgaattctgtgttttcagtattgctaagaggattctgaacaatttgctaagaaaataaagtgatacctaaattagagcacatgtgtgtatgtgtgtagggagagcyttcaaatcatggtttcttgaggaagcaaaagcttaggtgagacctgaaagatgaattagagggagtggtacagacagaaggcagaaaaggaaagaaaggcattcatgtagagagagctgaatctacagagatgattcctttaatgaaaggatttattcagttccccttgagggaactgtagaatgagtgacaagacctcaaaatatagcatagttgcccccgtcttaaaaacatgcaggttttcaataataggatggggaaagtaccaaggtagattgcaaagagtttggggtagctagagtaagaagtagaaatgcttggagaagcaagaagaggcaggagaggaaaggctggacagatcagtggctgaagatcaatgataatgaagaagcttttatggcattcttg

SEQ ID NO: 501210 - DNA, 582 bp, Homo sapiens
cttgatcttagactttccagcctccaggaccatgagccaaataaagtcctattttttataaactacccagtttgtggtattctgttatagcagcaggaagcagactaagacagccccaaggctccatcagggaaaaattcctggcactttccaggtgctcacacctccctgtccctttccagcctcctatctccagctctatccttccactcctacctcctgcccaggggactgacaacccattcggtagagcatatcctctctaattccttttcataacacgtgttaacacatcagggcatttgctccctcatttagatccctttattacagtataaaatctgtaaagggaggaaatgtattctattatatccttatatacccttatattatattccytatgcccagctcagtacttaacacatagtaagtgtttaataaaagttagatgagtaaatagttaacgaattaatgcaagatacacacaaaagagtattgcaggaagcattcaacaatccagcggacatttattcagtgagttagtgtgtaccacatggtaatgttctcatgaggacatattat

SEQ ID NO: 501211 - DNA, 583 bp, Homo sapiens
gtctgtaaactttccacacactyagtgggcctctgagagaggccttggagaaaatattcttcctttatctatcagcatgctcatgctttgcaagggaaatgtcagctccaagggctcttgacgagtgaaacaaaacactgctttgtagctcggatgctacttagaagcctggcctgtgtatattgcaagtaatcaatgaactctgattttgagtgtcatgttttgcaaacatttcctgagatatggagtactgcagtctccttttctgaccatgaacacctactgtgaacacctacaaagggcattacaggtgagttggtatatgggcttctaaaactttggttttacatatatacaatgtatatcctaatgtcattgttaatatttttatagttttgcttcattattctttgcaaactaatcgtaagagcaaatgtgactaagtaaattgtatccaagtattctgttcagaaaaatacaaaatgtttatcaagtgcaagagtcagataggtaatatgaatcgatgaagtgagctgggggctgcacacccagagttcctaatttagtgggacttaaggggagg

SEQ ID NO: 501212 - DNA, 446 bp, Homo sapiens
ctgtgcatccttgccccatcaattgagtgctgtgggaagcacattaaggtggcagtctgggtgcacaacatttccttgtcctcatggaaggagcagaggtgttcagagcccctaggacttccctgaaagcctccccgttcccgggccctctgcagtccctacccaatgccagaactccaggcagtaggctgggctgtcaccctcttctctgagacacctacctcgactcagagacctccccgatgcccttcagatggggaccctccayaggccttatttgatgctgtagcgctcttggagcacgcatggtttctgaaggcgtggctcacgtccaggccattctggtgtacattcactgaggacagcttgccctgctccatcattttctgtagagcagggccaagagggggacccaccctcataacagacacaagactcactgccga

SEQ ID NO: 501213 - DNA, 649 bp, Homo sapiens
tttgctgtgggatcacagatgagatcaggagaaggatagctgaaaggagaagggagaygatctcctcaggtgaggtgcaggtaggtgtctgctagtgaagagaagacattggccctaagtcctggcattgctccagattcctgtggaaggacatgacagtgcaagaaagaaatcaaggctggtgggagggagatggtagattacatgacctcccatcctatgtgttcaatggttgctgataggagcccataccctttgggtatctaaaaggtcatttcttgacacccttccattcactgtgcatgacaagaagaggcctttgggaagaaagaccagtaggagttataaggtcttctcaaaagatgcactaccttacccttatggtgactcttacactgtgtccatcatgtcttgtgttcctgtgtgctctcaggtcggtcttctcaacctcacgtcagtcttgggaagagtgggtatattggaggcagtcatgaaaccaaagggatttaataaggtttctgaatgtttcctaggctgggcagtaaattcccagatcctaaggcaccactgtggccacactacatgagattcaccgggtgtgaatagtggaatctgcatttttaaaagatcctgggttaaaattttcatg

SEQ ID NO: 501214 - DNA, 551 bp, Homo sapiens
gcatgtgcctgactctgtgtgtacaccccttgttgcccatgtgccctgctgtcagatcagttgtcccagaagtttcagtgtgagtgagtgtgaggaggagcccgcgggcacagtctatagcctcctaggcagaagggccttgaggttgttgtcctcctaacaggcagcgatgcactgcttgggggtgccggataagggaagaaggagggccatagaggggaggagggcctggtgarcatacagtgagttatgaagggggacactatttgaggtatttgaatccttagagcatatggaactaactgcccaaaaaggatggattccagagtccttagtggataccttggaggaagtggagaatgcagtgaggcagggtaccacagcctacaaggcaggcacccatctcactgcacatgctccttgtacctcagtgggcatgttcactgggcatggtccagtcggccccttcgaccacatggtgaatgccgtggagctgtgagggtgggagggtggcggtcctgtggtctagactctctcctctactgagacac

SEQ ID NO: 501215 - DNA, 516 bp, Homo sapiens
cttggttcaggcagaaacaggaagcaactaatcaacatccaatctcttcctgcacccagtgccatcctcagaagtgactctttctgtactggaatcaattccaggttttttcctcttattctttcttcacagtctaattttctatctcgattttggaataaacattttttttaacataggcatctttattgttcatcagaaattgaaatacataagttttgaatgatgtaagattcaatttccaatctgggggttctctgaacactcaatgtaggaaaatgtttatctagggaacattctttgcaatggagaagagtgagggggaagcatcctgtgctttcttctargaaatggcaaaggtcaaggctgattttcacactcgatgccaagctgaacccaacacactggggacagaacaaggacaaactgtcttttaagggctgaggtgctgaggcacatcaatggcttcttagtgaagaacctggcaaactgataaagctgctaaattaagtaaga

SEQ ID NO: 501216 - DNA, 617 bp, Homo sapiens
cacatctgtttctctctcctttataattccactccgacgtataacttatgatgaaccaaatgatgagctttcaacctggaagacagaagcccgcaccccaggttgcaatggaggggactggggtcttggacttcgctggccagctcatctccatttgggtttgggttctatgttccctggaggggtctttagaggtggagagtccagcttcctcgagagcaccccaaaaagagaggggtgaggggctcccataagcctctcccaatgcctgccatcccagccaggggcgtcccttcttgcctcatacttggcatttgcctttattactgggtgccctctgcagccagaaagttgccccagcaacagtgcctcccccagagaaggcatctgagaaaaacctggcatgaaacggggaagcagggggtaatgacggccatggacacactcttcytggattctagtagatacagaaagtcgacttctctggggctcagagaatcttgccacccgaccctgggtcaactctcttcatggccacttgacacccacagctccccactcagaggcccccgggagcccctcacccacggggcccagctctgtgtgtgcgatgacca

SEQ ID NO: 501217 - DNA, 529 bp, Homo sapiens
acatccataatcatcatggaaaccagcattccttctcagaaacagatcaggtagacaaaaagtaaraaagactccagaacttctgaatgaacttgatagaacacacaggtgatagaggctgatgcctaaaggtatcaggcaggcagggtaaatggctgaagcagccaggtctgtgaaggccacccggggacgggtagactgccctttgagttaggagcaatcgtagccgactgttgccattaaggaatgagggcccagcacagccagagcttctaagctttcatagaaagccccaaatccatatttttacataaaatactgtgatttgtaaatgtttactcaagttttcaaaaatacacttgtgtgagtcaaacaaaacatgtctgcaggccaaaggcagcttatgggctaccagttgcaatccctaatctgatacagattttttttactcaatgagcatagaataaaaatactcttcaaacactgatatggtttggctgtgtccccacccaaatctcaactagaattg

SEQ ID NO: 501218 - DNA, 529 bp, Homo sapiens
acatccataatcatcatggaaaccagcattccttctcagaaacagatcaggtagacaaaaagtaagaaagactccagaacttctgaatgaacttgatagaacacacaggtgatagaggctgatgcctaaaggtatcaggcaggcagggtaaatggctgaagcagccaggtctgtgaaggccacccggggacgggtagactgccctttgagttaggagcaatcgtagccgactgttgccattaaggaatgagggcccagcacagccagagcttctaagctttcatagaaagccccaaatccatatttttacataaaatactgtgatttgtaaatgyttactcaagttttcaaaaatacacttgtgtgagtcaaacaaaacatgtctgcaggccaaaggcagcttatgggctaccagttgcaatccctaatctgatacagattttttttactcaatgagcatagaataaaaatactcttcaaacactgatatggtttggctgtgtccccacccaaatctcaactagaattg

SEQ ID NO: 501219 - DNA, 529 bp, Homo sapiens
acatccataatcatcatggaaaccagcattccttctcagaaacagatcaggtagacaaaaagtaagaaagactccagaacttctgaatgaacttgatagaacacacaggtgatagaggctgatgcctaaaggtatcaggcaggcagggtaaatggctgaagcagccaggtctgtgaaggccacccggggacgggtagactgccctttgagttaggagcaatcgtagccgactgttgccattaaggaatgagggcccagcacagccagagcttctaagctttcatagaaagccccaaatccatatttttacataaaatactgtgatttgtaaatgtttactcaagttttcaaaaatacacttgtgtgagtcaaayaaaacatgtctgcaggccaaaggcagcttatgggctaccagttgcaatccctaatctgatacagattttttttactcaatgagcatagaataaaaatactcttcaaacactgatatggtttggctgtgtccccacccaaatctcaactagaattg

SEQ ID NO: 501220 - DNA, 532 bp, Homo sapiens
ggttcttccaattgctaatgtcatgtatttaatctctgaaacataattatgtttttttccaccaaaagctgtgccattaaaactttaccttttcaacaattaacaatactttgaataaattagtgatgggamttgcagttcttccccctttttactaaaaagttctccatctgagaaaccattatggtaaaatttcatctttttaatttgggtcagaaaataaggggttctagaaacctacaattcttctaagggacagtcagttgccactgcccttacaaaactctcatcttgaaatactgaccacccaaatgagaacagttaaggatttctaccagcagtgaaggaaactaatttatgaatttgcaaagtttaatttttaggtggaaattaaaatagggaaagaatgtaccccagtttccacctttcctccaaacagtgcacaaaaacttaacattcaaccatttttttcacttatgtaaagcaaaaaaaaaaaaaaaattctaacctaatattaataagaaaacctttt

SEQ ID NO: 501221 - DNA, 499 bp, Homo sapiens
tgcctggcgctgaagcatcggaatggaggtgagggtggctaggtcctgtgaactggactctggacttctctgagagggagaaaaccgtaaaagattatcgtttccatcctgcagtctacaggcctctaaggacttgagagacatcttagctgtttcatgcagttgaatccatggcaagtctccatggccaagggtaaatagaattacctgaacgattgtctctgttctccaaagatctttggccaggaaggtctagtccctagtcagtacagaaaatagtagrgaggtaggaagtaggccttttcccctgatgtctgatgtgtctggagtgattttctcattagtaactatagtcctgcactgtctctccgacgtatgggaatgccaactgagtctgtgttccctaaaatgtgaccttaaaatttgtcatctggtgatgccatctttcttagtaagcacgttaaatggtgtggattgaagttacagaaagaaaacttaa

SEQ ID NO: 501222 - DNA, 625 bp, Homo sapiens
gatcttatttctgtctggatctctcgaggtcggtcacagcattgccttgcctaatgttggtattctgtgaaatgcttacgagaaaaccaaagcattgctaagactgccaggcaagttcctggctgccgggagctgctttctccttctcagctcctcttctgctcctcttcctgggagctgagcattgttacataagtggtgagagagctaaaggaaaaacaaaaagaaggagaattttccagtaaaactttctggaaaaagtagcactgagctatgaggcaaagcaagaataggatgctgagaggtgggccagagggagtgttctaggagaatgggatggcttggaagcaggagaaggaggcctgcggaagaggaccagtgcatgtgtgtgtatgcatgtgtgaataggaggagaaaaaacaaaacaaaacaagccacctgagctggactaagaatgaggagggaggctgggcgcggtggctcacgcctgtattcccagcactttgcgaggctgrggtgggcggatcacctgaggtcaggagtttaagaccagcctggccaacatggaaaaaccctgtctctactaaaaatacaaaaattagccgggcatggtgtgtgtgcctgt

SEQ ID NO: 501223 - DNA, 686 bp, Homo sapiens
tgaagcatttaaaaaataatgttgattttttttttttactgagtttggaagaagaaatagccaagataaaagaaagtgtgaagtcctatggtgtgatccatgttgatggttggtattctcccagtgtaatgaaaacctccacagggaaaacagtgtaaacattctaataacttatatttgaaaataatagtatatttgtaaaaatttacccttaaacattttggtgataatatttctcttccagagacttatgatctaattattcttaagactttgaagtgtgttttatagcttcttaggggttagagaatataataaaagctataatttcaataatattatttggttataaagttcattctgaaaaaattcttgtatagcatcttgcagccttgtacatgggctgaagataggtaatgctgactgtgtatttattggtgtcaatatgatmtgtttatattactgaaatttttctgtatttgtggaacacatttctttgagatcttcccattttcctttttattaatgagttgagaaaaagttcattttatactatttttactggtaagattggactggagatcagaattgagggcttctttttaggcagtgatgcctttttttttactttatgagacaaaaatataaaaactttgaagcctgatacggggggtgggtatgttttt

SEQ ID NO: 501224 - DNA, 454 bp, Homo sapiens
tcaaagatggtggtaaagcatgctttggctatacttagtgtcactaaatgggttttccttgtattccattcatccgtctaaatgtacatcaaagagcattgtaagcaagaactatgttagagttgtacagaaggtcccaagtttctgttccttttccacgttgcccatgcagagtcaggttccctttagtggggtctactctaatgtcagtattgattgtgaattgctckaagtgctcaccaattaactgaaaggagtcagagttccactttcgctttcacaaaactggtgaatttgagaaactgcttggcctataaccattcactaatcttacagttgtaaaattacagtgtgtgagtccctggtaggtgagaaaagagagcgaaaaccagaatagtaatgtagtatcctggcaactagactttgcaagcatcaaaatgttgggttagactgg

SEQ ID NO: 501225 - DNA, 657 bp, Homo sapiens
cctttcacttccaagaggacgttattaaagggcatgacctgcagtggaaaattcagctcaacccagctttctgttgtatgtcctacaggcaaggaagcccctgcttcctaaatgttctgccaaaggaaagatcttttagtaaagaaattcattttctaactcagaaaccagatcttcaaatcttatttttatttaatcgacaacaaatcagcatatgttgttaatataattactgtaatttaacctcacagaaaaaccacaaacgtgacccaacctgttytgtggatattttttcttacaaacaatacctctacctacttgcaaaatatggtttgcagtaagatctttgtgtagagttcctcctaacaatgctacacaaggttcatgatttaataagagattgcaaatttttccaacctagaaatcctaaacaaaaggagtttgggttatcctggctgaggcagcaaaatgtttacctctggttatttcttctgtcactccaggtgttcaatgacctggggtcgtggccctataggcagaattcagagatccaggaacctgagtggaaaatgaatgacagctttattttcactgatctctgatagcatttcttttcttattttaatattggcagcaaaacaagtacctgactttgac

SEQ ID NO: 501226 - DNA, 657 bp, Homo sapiens
cctttcacttccaagaggacgttattaaagggcatgacctgcagtggaaaattcagctcaacccagctttctgttgtatgtcctacaggcaaggaagcccctgcttcctaaatgttctgccaaaggaaagatcttttagtaaagaaattcattttctaactcagaaaccagatcttcaaatcttatttttatttaatcgacaacaaatcagcatatgttgttaatataattactgtaatttaacctcacagaaaaaccacaaacgtgacccaacctgttctgtggatattttttcttacaaacaatacctctacctacttgcaaaatatggtttgcagtmagatctttgtgtagagttcctcctaacaatgctacacaaggttcatgatttaataagagattgcaaatttttccaacctagaaatcctaaacaaaaggagtttgggttatcctggctgaggcagcaaaatgtttacctctggttatttcttctgtcactccaggtgttcaatgacctggggtcgtggccctataggcagaattcagagatccaggaacctgagtggaaaatgaatgacagctttattttcactgatctctgatagcatttcttttcttattttaatattggcagcaaaacaagtacctgactttgac

SEQ ID NO: 501227 - DNA, 379 bp, Homo sapiens
ggtggaaggctaaaaagcagtgccagtggggtgtgcagcrgggcttgaagtcactcaagcttcctgtctctcaggaaactatgagctctgatatattcctggcttcgggtctcacagcatgttgtgatttgaagagaggtggaaccacagggtctgtgtagttgggaaatacattttactgaaatgcctctagtgcatcacatgatgaccttggtcagggtcagtgcaggacctgtactgggggctagccagttgcttataaatcaaaataaaccgattgggtattctacaacccaagtgttattcttacatcaactggtaaagtatgatttggtgctgaaacccagcagttcttctctgtactactttagttcagttg

SEQ ID NO: 501228 - DNA, 400 bp, Homo sapiens
aattctctttttaattttaaatttaacattttggggatgctgggtgattccatggaactcaaggagccagggaggaaaacatgtagagaggggagatttacattccaactggacatttctcatttgtgaatgaggcaaaggatttaaaagataaacatgaagtgccaggtaacaatttactgagagaagtggactggtaggtttaactttattgyttcttcttctacccctgtaactccatgctctggagaagttctcgggtaggtcctgtagcttttattactacttttaggaacaagaacaattttgtcagtaattcgaaagttctatctatttgaatataaaatcaaaatttgtattcagtttacagcttgagcccttccccagcttgggcctgcag

SEQ ID NO: 501229 - DNA, 578 bp, Homo sapiens
accctgtgtaatttttataagaagaacrggcacaatgcaatatgttttatctgtcccctaattctactgaaaaaaatgctaactccataaagtggctgaatgattttgagagtttttattctactttttaactttttttctcctcgaataatccagccaaactcatggccaagatttaaacagcaacaacaaaagtagttctcagtttcttgcctgtaattagtaagaagaaaaaaaaatgcttatattgactcatggactttatttttataggaaatgacagtagtcactacaaagaaatattgccttttttcttttcttttttattaaaagcttcaacttttggatagttttcaatacaatacatcaagaactaattttagtaatttttgtaataaacaataaaaaaattaaaataatcaacttatccttaagtatgaaatccaaaatgttaagaaaaatgcccttttagtttctaagactctattggcttattcaacagtcctccctactacattcaacacaccagtgacgttgctctgctgtgctgtcttgacaatgcctctgaaagagaagcc

SEQ ID NO: 501230 - DNA, 667 bp, Homo sapiens
ttgtgctccaggacagattatattcacattctcagttcccactgatttcaataatttagatggtgagatttgagacttttgaatttatgaatttaaatgggagtttagactttcagttgatgcaataatgggatgagaactttgagatcttgggatggggtgaatatattttacatttggaagagacatgaacctttgggcaatgtagggaagactgtggtaaggagaatgacagaccctcctaaagagtccacacccagctcctgggaacctgtgaatatgttacattgcatagtaaaggggtttttgcagaaattaaggtaacagatgttagaatagggagattatcatggattaccttggtggaccaaatctcatcatatgagtctttgaaaacagataactgtctccagctagagaagacatgtttcataaggggaagacaggaacatttgaagtgtgtaaaggacctgaaatgctgtctttggtttgaagatggaaggggcagtgtgatgagagatgcaggtggccttaaaaagctagaagagtcttcagcaaggaaagcaggacctcagccctatagttgtaaggagrtgaatcctgccaacaacctggatgatgtcagaagtggattctcccctagagcatctagaaaaaagccatggcc

SEQ ID NO: 501231 - DNA, 571 bp, Homo sapiens
aaatcccactccattcctcaagcctccagtggtaaaatcaagacccctacatatggtgtgggagaatgaaaagtgatattttcattcaaacaactaaaaatgtctatatatttcagcaaaaatagcaaaccctttagtcacattttatatagttcttatgctcttaaaaagtrtaagccaattttttagacaatgtggatacagcagttaacaaagttctctgtcctcatagatcttaaattttaatgtgggaagacagaaaataaataaaaataatgtatagtagactatatagtttaatataaagtgactttataaacttaagaaaactgacagtttccatgaataacaatcacacaccctaagatgtctccagagaagcagggtatgaagcaccaagggcattgcatttagcaagagaatagacgtgcaagttctcatagtgatgaccactgggcagtcttaatggagaagacataaccaaaaatatacttagggaagagcatttcaagcaaagaaaatagtaaatgtcaatgccttgagtaggatggtgcctaatatgttacctagg

SEQ ID NO: 501232 - DNA, 504 bp, Homo sapiens
gaaatatgaatctgtcacctgccacttgtggttcagattccacttggtgggaaatatatacaatatgtttcactagctgttgtattttaaaggrtgtatgtaaaacatattgggggtctgcacccaaatccctgaaactacataccgccctactaatgggtattgttgtctaaaatatcagtttgaatttatattatcccataatgtgttcatactatttttttagcccaatgggttagtgagcagcataataattaggagtccttggaaagacattgactctgaccggacaagattaagaatcttaagttgtcatctttcaatttttatttagtattttatttcataaacttacgttattaaggtggctttcaaaacaaatcatgtaaaataaaaggagtctttcctgtgttttttgtgtgcaaatcaaaatgccaaatgatatatttattatattattaaagaaccaatatttatcaaataataattatgtgtcagctacag

SEQ ID NO: 501233 - DNA, 636 bp, Homo sapiens
tcacctgccacttgtggttcagattccacttggtgggaaatatatacaatatgtttcactagctgttgtattttaaagggtgtatgtaaaacatattgggggtctgcacccaaatccctgaaactacataccgccctactaatgggtattgttgtctaaaatatcagtttgaatttatattatcccataatgtgttcatactatttttttagcccaatgggttagtgagcagcataataattaggagtccttggaaagacattgactstgaccggacaagattaagaatcttaagttgtcatctttcaatttttatttagtattttatttcataaacttacgttattaaggtggctttcaaaacaaatcatgtaaaataaaaggagtctttcctgtgttttttgtgtgcaaatcaaaatgccaaatgatatatttattatattattaaagaaccaatatttatcaaataataattatgtgtcagctacagttttggacactgtattatttagctcatgatgaaatatagctgtataacaaattatcccaacatgaagtggcttgaaatagtcatttattctcatggatctgctggtcagttttggtgattctggtgatctaggctgggctatactg

SEQ ID NO: 501234 - DNA, 636 bp, Homo sapiens
tcacctgccacttgtggttcagattccacttggtgggaaatatatacaatatgtttcactagctgttgtattttaaagggtgtatgtaaaacatattgggggtctgcacccaaatccctgaaactacataccgccctactaatgggtattgttgtctaaaatatcagtttgaatttatattatcccataatgtgttcatactatttttttagcccaatgggttagtgagcagcataataattaggagtccttggaaagacattgactctgaccggacaagattaagaatctyaagttgtcatctttcaatttttatttagtattttatttcataaacttacgttattaaggtggctttcaaaacaaatcatgtaaaataaaaggagtctttcctgtgttttttgtgtgcaaatcaaaatgccaaatgatatatttattatattattaaagaaccaatatttatcaaataataattatgtgtcagctacagttttggacactgtattatttagctcatgatgaaatatagctgtataacaaattatcccaacatgaagtggcttgaaatagtcatttattctcatggatctgctggtcagttttggtgattctggtgatctaggctgggctatactg

SEQ ID NO: 501235 - DNA, 636 bp, Homo sapiens
tcacctgccacttgtggttcagattccacttggtgggaaatatatacaatatgtttcactagctgttgtattttaaagggtgtatgtaaaacatattgggggtctgcacccaaatccctgaaactacataccgccctactaatgggtattgttgtctaaaatatcagtttgaatttatattatcccataatgtgttcatactatttttttagcccaatgggttagtgagcagcataataattaggagtccttggaaagacattgactctgaccggacaagattaagaatcttaagttgtcatctttcaatttttatttagyattttatttcataaacttacgttattaaggtggctttcaaaacaaatcatgtaaaataaaaggagtctttcctgtgttttttgtgtgcaaatcaaaatgccaaatgatatatttattatattattaaagaaccaatatttatcaaataataattatgtgtcagctacagttttggacactgtattatttagctcatgatgaaatatagctgtataacaaattatcccaacatgaagtggcttgaaatagtcatttattctcatggatctgctggtcagttttggtgattctggtgatctaggctgggctatactg

SEQ ID NO: 501236 - DNA, 595 bp, Homo sapiens
tcagtagcagctcacttccttgtaaatgccaactctgtctttattataacatacttagtagtcatttgatctttacagtggcattttaaacatagggttatgtttcctttttagaaaggaaaactcggttatctcttgtacacttactgacaatttctaatatattttcctggaattcttaagaaactatatcytggagtaaattacttataggtgactcgaaacatttgtttcctgtgaacagagcaagcttttgtttcagtttagcaaatcctcctttaatgcctactctgtgttctgtctagaatgttctgaggaatcagagaccattcagatatgatctttgtcctccaggagttcatattcttttgacttgttttcagaacattggtcttgggtttagaaggttttctttgcagactggagagaaagtgttttgggggcagacacctaaatgttctgcttgcaagctatgttggctgagtccacaggtacgagaaacgtggaagggcgtgagcatactggcctagtggtccaaggcagaagggatggtagaaagagccacttttcttgcttattcagtcctgggcaatct

SEQ ID NO: 501237 - DNA, 577 bp, Homo sapiens
tcacaattatgaataatagtagttgttaatgggtacccaggaaagataattacaggaaagaagggagaaagaagaaaggaatgtgtgtgtatataggaagagagggcaggttttttccatgatatagcgaattagaaaatgttaggtggaatcatgttatatagatttctttcatccaagacttgtctgagtttttaacatctagggagcattttgaatttccagggtagtggatttagtattaaccattttccaaacttatttgattacaaaatgtatgcttctgaggcaagttgattaatatcttgtgggacactggtrtttaagaaaagctgtcacaccatactgatttcttatcaaagcatttagagctcttttcatattgttccaatatttgactccttggatattgacattcagaactgccagtcaatttgtggtttcataaatacattatccctttttttcttgtctctttaattctctttccttttgcctgggaagtagacttccactgtgattcctgctactatatcctcaaaaatatttttctcaactacttgtttgtgtcacatgt

SEQ ID NO: 501238 - DNA, 421 bp, Homo sapiens
gtgaggaggacaatatgacaggctgagtaagcagaagaacagaatgttaagagggcttaaggagctamatggggctagaccaggtgaaaccttgtagttcactggaaggactttgacctttacttcccaagcgtgaaagaaagagttgttaacgtggaatttcaagaagttccagatgaaagaaaatcaccataccagagaactggcaaacaagaaaatccaatggagaatgggtgtatcccatagtttatgcgagaagccttcttcctgtcagcgcttggattggaagctgctttattcagtcaaacacaaatggaggcagaacacacaactccccgtaacaacatgaagagaagagagatgagaataaggcaaggcttaaagtcacacaaaatggcagcctggggaagggaaagtgaac

SEQ ID NO: 501239 - DNA, 560 bp, Homo sapiens
taattgttcatcagaaataatatccccatggaccaatgaatgtgtttagcattaatgggcagtggctgcctgcaagctttctgtgggcaacaacggacagaaaacaaggckcaagcagtttcaagggggaaaaaaaggtatttctgaaacagccacatcaaagaggatttatcattcctttgtggtaactatattctattcactgaacatacatgtctttattcaaatagcatttaaaaacacccactatgcataacaggtgctttggggatacaaagatattgcacatttaaggaactcatagtttgatggtggaatcatacatggaaacaaatgattagaatcagtttgattagtttcttacagcttagctaactctgcaggaagtagttaaatgtttgcacaggaagtaaaaatggatatttctgtatataggggaaatctatttttctcattcagaatttcaattccttgcaagtgttctccctatcaacatatattcaaaggtcctctcccattgccacaaggcacagaaaacatggatttcatgagcgactgca

SEQ ID NO: 501240 - DNA, 537 bp, Homo sapiens
caggtaattaacaggagagggcagagcattacatcagaacagagaactgtgattgcagtgccaaatcagatcagcagacattcaaagcaggttaaagaaatattagaaaggcactgcagtaacacagtaaaaatagggagatgtgtgtttaacaaagtggttgggagaaaaagtgttttttaattccctcatttctatataaaacgtatgtcaaaatataacttctccaaggcttcccatcaaaaatagcatcaggacgacctttacgagttcaatctggagccacaatgtcaaatatagtatcactagtcgcatgtggctactttatctaaaattaaataaaatgtaaaattcacttcctcattcaaactatcacagttttcaagtgctcaatagccattcatgtttagtggctactrttagacagcacaaatctatagatacacatatttccatcactgtagaaagttctcttggttagtaatgatatttgtggacttgatcctgtcattgtgctattagctggttattagtttg

SEQ ID NO: 501241 - DNA, 642 bp, Homo sapiens
tggttttgctctaaaggagtgtgggtgccacgttaaaacacccctttgacagcatggaaaggctggaccaatccaacctcaggtcaataaatttggtgtcacaaactaattgaaccaatgaatgttatgtagagtgccacgtgagggctatgttctccatggttttggagaagccaggtactcaaaccacctcaatggttgaaagacaaggttatgcctagggagaactgtatgatatttgttgtttcaaaataaacaagcattaccaagctgtggcgaatgaaggtttacctcaattttagattttcataatctaaattaaactgaaatggaaaaattttacctggtgtcatgtaacaaggtaatccaaggagcaratacatatctggaaattaagttaacccaacaaccaagggaaacttgacacatattagaatccaaattaatacatgaaactggtgggctctgagcttctgggataatagtaccaaagacgggtatccttggaccttaaaaggatctactggctgtcactgttttattagtctggtgctattgccaaatcaaactaacactgactaccttctctcattttgccttggaaaatggtcaaatacaaggatttttttccaagcctcctag

SEQ ID NO: 501242 - DNA, 642 bp, Homo sapiens
tggttttgctctaaaggagtgtgggtgccacgttaaaacacccctttgacagcatggaaaggctggaccaatccaacctcaggtcaataaatttggtgtcacaaactaattgaaccaatgaatgttatgtagagtgccacgtgagggctatgttctccatggttttggagaagccaggtactcaaaccacctcaatggttgaaagacaaggttatgcctagggagaactgtatgatatttgttgtttcaaaataaacaagcattaccaagctgtggcgaatgaaggtttacctcaattttagattttcataatctaaattaaactgaaatggaaaaattttacctggtgtcatgtaacaaggtaatccaaggagcagmtacatatctggaaattaagttaacccaacaaccaagggaaacttgacacatattagaatccaaattaatacatgaaactggtgggctctgagcttctgggataatagtaccaaagacgggtatccttggaccttaaaaggatctactggctgtcactgttttattagtctggtgctattgccaaatcaaactaacactgactaccttctctcattttgccttggaaaatggtcaaatacaaggatttttttccaagcctcctag

SEQ ID NO: 501243 - DNA, 592 bp, Homo sapiens
acttggacaaaagtgattccttccaaaaatggtcactaatgcccagatctgtgcccactttcagtgtcttcttatacttggatttctctcagcactcaccacactgtatattgtaattgattgcatatttcactgtctccttgacctgaatttgagatccttgaaaacaagaatcatgtcttatttgccgttgtagcctcagcaacagggatactgactgtcatgtgacaagaattcaatgaagatttattgaatgagtcacagaatagacactggttttggaatcacaataccagtgatattgttctagctctgccgctaacaagctttgatttttcagtaaattgtgatgactgttgcatactcttgacctcaggatcctcagctaccatggataaatctttgttttcaacttccattttcatgaattcttagttcctttttcttttcatttgtaaggtggggatgactgcacytgcatgatggctagtaggaaaggtcattatgaagtatatgcaggagctctgtaatgggcaaaacactatagaaatacaagttattgttgatcctcagtatagattaaaggcaataa

SEQ ID NO: 501244 - DNA, 474 bp, Homo sapiens
tagtatggaagtaattgaatggccactcttttctaggatgtcaacatacatttatcaagatttctgggcagctagttgctcctttgaaatctaaaaagatgtgactcttggcaacactgtataaacattaaattattttcctgaktttttgcttaacaactatcatttgattcatttgccaagataacttcattatgtccttggagcaattcaatatgccagcaatttgagtctccatttttcaaattcaccaagcaagaactccaaatcttaaaagaggccagcacaaacctttaaggggcagagttagaaggcaggagagaggaaaaacattgactattgtgggttctgagacgcttgttaaaaataagacatgatattcccatccattatataaacttctctctcttgttctgtcttttcgtctttctgtagataaagtttggattaatctcccttttacaccaactgcac

SEQ ID NO: 501245 - DNA, 549 bp, Homo sapiens
catactatcacagccaagtcccacttcaattgcaaagcatagattctgaaaggcagggttggcaagagagaaataccctggratctaacacatttagtactaagagaaatgagagtagcagcccaaatcagtattgtgagacaaaacgaactcttaatcaagtcaggattgctacagaatttcttaggagactgagctgctgagtccacatggatagacgggtggtcttgagaggtgacaacgtgctagcagccctcactggctcttggcgcctcctcagcctgggaatccactctggctgtgcttgaggagcccttcaacccaccgctgtactgtgggagccccactctgggctggccgaggcacagccagctccctctgcttgcgggcaggtgtggagggacaggtgcaggcaggaactgggactgcgccctgcgtcgcaggccagcgtgagttctgggtgggcacaggctctgagggccctacactcggagcggccagccagcgccaccggccctgggctgaggggcttggcacctgggccagcag

SEQ ID NO: 501246 - DNA, 549 bp, Homo sapiens
tctaatttagcctcttgtggaactatagatgtttttaaaatctattttttaggaaagatagtatggcaaagtttgcttaaggaaaaggcataaacttgaggctagcaggctacaggggcttttctttctctatcaaccgtctatatatagatgctgagagcagtgtttcctcacaaaaccctcctttagctgtcagtgataaattgttatggaagacaggactctcaaataaataaaagtttccaggaatttatcttctcacatctatagtaatacacccatgtattttaatacaaaaaaaatggtagtcctcaaatgatcactgttgacaagtttccttttaagattacttaagagagagtcatatctttgtcataaaatccaagaccataagctggcttaaaatctctaactcattcttcgacttttctcccttgcttatacttgcaatcactttggcctaatatgaacatggactcccrtaagaaactctatattatttttcttcttcagacaaatgaaagactcaattttatccttgtttgccat

SEQ ID NO: 501247 - DNA, 518 bp, Homo sapiens
aataacacatttgtatttttagttttgtaaatatcacatttatctttctcaaagatatcacatttctatttgttaagaatacggactatcttttttgtgtatcaataatatyccatgggtatatgtaccacattttttatctgttcatacattgatggacacttatattgattccatatcctgactactatgaatagtgttgtaataaacatgggaatgcagacatctctgcaatatataaaatgaaatcttgtaatttgcaaccacatggataaaactggaggacattatgtcaagtgaaataaaccaggcagggaaggacaaatttcacatgatcttagtcatatgtaggaacttaaattttttttaattgaacccatgaaaatatagagtggaatgatgattaccagaagctgggaaggggagtggggaggggtggataaagtggggatggttgaagcgtacaaaaatatgcttaggtagaattaataagatctagtattttgtagcaaaacagg

SEQ ID NO: 501248 - DNA, 640 bp, Homo sapiens
aaaatataataataatgatgattacgaggatgaataaaatcaagcctcatatgcatagagcttatattttgtaggctctgtgctaaaagcttttcaccatcacccttttratttctatcaaaactctaaatgatgggtgttattaactccatttcatagatgaaaaaactgagtttcaaagagtttgagtcatatgcccaaatttgcacagctaatcactggcagaaccagacttcaaatccaagtgtgtcagaatgagagcctgtattataacctgggtcactgaagtacgatttctactctgaagcatcaaaaaattcccaaaagtcagagcatacacaaagcagaacttctatcttgtgttacttttaaatttatttcattgacaaggtaggtttactatacatttaatgaagcatgaattttaagaccccttacttacatgggacccatttagacttaggaatttaccaggagttgtagcatgttctaggtggggcggaaaagccaagttgcaatcagaaagtgtatctacttaagcatttcaggaaaatggcctaaatggagctcaaaagaaaagaatttgaaactctacaatttcagaagtattcaataattgattataaatatttgattttgt

SEQ ID NO: 501249 - DNA, 608 bp, Homo sapiens
ctttcatgagcttaattgcaaaatccattgcaagtgcctatctggtattccagctctggttgcagtgaaaaactcttaacccaaagctaagtgcttgtctgagagaatcaagtgctagatggtcaaaaagtcattctgaattagaggaaaatgttttaaaatatttattattcataaatctctatttaatcatataatgatacttatatacataattatttttaagaatttgaaggtgctatacttatttccyccttttgtcttattttccttctttccttccttttttctcccttccctccctcctctttttttaaatttaagttttattttaagttcaagggtatgtgtgcaggtttgttatataggtaagcttgtgtcatgggagtttgttgttcagattatttcatcacccaggtattaagcccagtacccattagttatttttcttgatcctcccaccctccatcctctgataggcctcagtgtgtgctgttcctctctgtgtgtccatgtgttctcatcattttgctcctgcttataagtgagagcatgtagcatttggttttctgttcctgtataagtttgctaaggataatggcctccag

SEQ ID NO: 501250 - DNA, 608 bp, Homo sapiens
ctttcatgagcttaattgcaaaatccattgcaagtgcctatctggtattccagctctggttgcagtgaaaaactcttaacccaaagctaagtgcttgtctgagagaatcaagtgctagatggtcaaaaagtcattctgaattagaggaaaatgttttaaaatatttattattcataaatctctatttaatcatataatgatacttatatacataattatttttaagaatttgaaggtgctatacttatttcccccttttgtcttattttccttctttccttccttttttctcccttccctccctcctctttttttaaatttaagttttattttaagttcaagggtatgtgtgcaggtttgttatataggtaagcttgtgtcatgggagtttgttgttcagattatttcatcacccaggtattaagcccagtacccattagttatttttcttgatcctcccaccctccatcctctgataggcctcagtgtgtgctgttcctctctgtgtgtccatgtgttctcatcattttgctcctrcttataagtgagagcatgtagcatttggttttctgttcctgtataagtttgctaaggataatggcctccag

SEQ ID NO: 501251 - DNA, 569 bp, Homo sapiens
tttaagacatcagtaatgttcagtggttctctgactgaggtakttttttttacatttaaggagtcatctaggggagtctcactgataagatgctgttctctatcttttaaaacaaataagacacagctaattcatctataaattacaatctttttttattcaatattacagtggtatgtttctcatttattttctaagttttcctcacttctgatgacttccttttagaaaaagaagatatgagatattgatgagatgagatggtcaatgtgttttattcaagaattctggtgcttccgtggtggctcatgttgttctggaagtggctggtcagtgcttcattcagtttaagctctcttgggttgtaggaagtagaatggagtcttggcattatttcatctttgagcaaatagttcggtagtagagagattccagatacctttcctagctttgtgtcacagtggaatctgaggggagatccctaaatctaccttctcatttaggttatctgagttggggccaatttgtttcatctactatttcagtattcttaacattttcattttcaa

SEQ ID NO: 501252 - DNA, 616 bp, Homo sapiens
atttgcagactagtgtgagattaggkgattttattaggtctagcaacttctatgattgtggagggaaaagtgtgtttcttacccctgtggatctacccactcagcaaggtttggtgaagcccttcagatgagtgtcttttcagtcaccatgctgtctcctcttagttctcactgtttcgctgcaggcaaacttaacatgggggctgcatccccactatacttgtcagaaataccttgtggcatcataaactatcatatggtagaacatctggtgctgattacagcctagagaaacatacagatgtggtgaccagcaactcacatggcaattgcttcaattatttaaccacatatgggtagagtgccttttgaggttttcaaaatgcattacttgaacacctatgtgcatataaagagggtagcctcacgcatgctgtgataaccactgaagcatatcactcttagtcacagaggaaaagatattatcatgtgatatactcatctggttagtagtacatgtcaattacattggtgttttgcctgaaagtcaggatgaaattttatgcttgctgtggagtggcagacatattttcccttgggttaccacaggaaaagt

SEQ ID NO: 501253 - DNA, 616 bp, Homo sapiens
atttgcagactagtgtgagattaggggattttattaggtctagcaacttctatgattgtggagggaaaagtgtgtttcttacccctgtggatctacccactcagcaaggtttggtgaagcccttcagatgagtgtcttttcagtcaccatgctgtctcctcttagttctcactgtttcgctgcaggcaaacttaacatgggggctgcmtccccactatacttgtcagaaataccttgtggcatcataaactatcatatggtagaacatctggtgctgattacagcctagagaaacatacagatgtggtgaccagcaactcacatggcaattgcttcaattatttaaccacatatgggtagagtgccttttgaggttttcaaaatgcattacttgaacacctatgtgcatataaagagggtagcctcacgcatgctgtgataaccactgaagcatatcactcttagtcacagaggaaaagatattatcatgtgatatactcatctggttagtagtacatgtcaattacattggtgttttgcctgaaagtcaggatgaaattttatgcttgctgtggagtggcagacatattttcccttgggttaccacaggaaaagt

SEQ ID NO: 501254 - DNA, 567 bp, Homo sapiens
ataagaaatttgcagactagtgtgagattaggggattttattaggtctagcaacttctatgattgtggagggaaaagtgtgtttcttacccctgtggatctacccactcagcaaggtttggtgaagcccttcagatgagtgtcttttcagtcaccatgctgtctcctcttagttctcactgtttcgctgcaggcaaacttaacatgggggctgcatccccactatacttgtcagaaataccttgtggcatcataaactatcatatggtagaacatctggtgctgattacagcctagagaaacatacagatgtggtgaccagcaactcacatggcaattgcttcaattatttaaccacatatgggtagagtgccttttgaggttttyaaaatgcattacttgaacacctatgtgcatataaagagggtagcctcacgcatgctgtgataaccactgaagcatatcactcttagtcacagaggaaaagatattatcatgtgatatactcatctggttagtagtacatgtcaattacattggtgttttgcctgaaagtcaggatgaaatt

SEQ ID NO: 501255 - DNA, 484 bp, Homo sapiens
  misc_feature (1)...(484): n = A,T,C or G
atactaaaggtaatatccctgctacttagtgcagcaatcgaatcacatccctttctcaagtgcacagaaatgctttccgcaccatgccaccactatcagagaatggggaaagagtggtgttggtgattgaagactgtttttcctacctcttcagtacctctttcagttatgtgaagttaaagccagatactgtgagtgctcacctgattttttgttcttatgaaggtgctttttttgngtagttgttaaattggtgtccttgttggggggagacaatcggtggagcttctattctgccgtcttgctccactcccctcccctaactctttatttttcagtttctatgtcacaaccttaagaaagtcyttccttgaattccctctctatagtcactttctacttgcgtcaatctgtttgtttattctgtaatacttaccagattttttaaacttacttgtttattgtttaccagctccctcccacc

SEQ ID NO: 501256 - DNA, 484 bp, Homo sapiens
  misc_feature (1)...(484): n = A,T,C or G
atactaaaggtaatatccctgctacttagtgcagcaatcgaatcacatccctttctcaagtgcacagaaatgctttccgcaccatgccaccactatcagagaatggggaaagagtggtgttggtgattgaagactgtttttcctacctcttcagtacctctttcagttatgtgaagttaaagccagatactgtgagtgctcacctgattttttgttcttatgaaggtgctttttttgngtagttgttaaattggtgtccttgttggggggagacaatcggtggagcttctattctgccgtcttgctccactcccctcccctaactctttatttttcagtttctatgtcacaaccttaagaaagtccttccttgaattccctctctatagtcactttctacttgcrtcaatctgtttgtttattctgtaatacttaccagattttttaaacttacttgtttattgtttaccagctccctcccacc

SEQ ID NO: 501257 - DNA, 604 bp, Homo sapiens
aacccatatgtacacatctatttctcttcagtaaagtgccttctgagatctcagattaaggtacagcatttctcctgctgaaatgaccatatttaagaatgcagaacatgcttaagaagtcactatttcttgcaaaaaaaaaaccccatataattcattattcagctattgacaggcaataaagaatccatgcttatgatgtctgtttttcaagcattttgaaatggtttttaaaacctacattactctaaatcagccaagtgaatacaagaactcattggtgatcttcaaagggctggcagtcctaatgctagayatatgataaaagagctgcagttattaactcttgccagaaaaaaatttataaatatacttcagcgtttcaacaaaagcactgccatttctccattagtttgcataaagttacacactattttgaggtaccaaggaaaaggcacagtgaatacacagttcttacatctaccaaaattatctgtggaataaagaaaagggtaagttattcttcaccacagttgttagactaaatctacttaggagaaggcagcaggatattcaaacaacttctatccccacttccaaccct

SEQ ID NO: 501258 - DNA, 604 bp, Homo sapiens
aacccatatgtacacatctatttctcttcagtaaagtgccttctgagatctcagattaaggtacagcatttctcctgctgaaatgaccatatttaagaatgcagaacatgcttaagaagtcactatttcttgcaaaaaaaaaaccccatataattcattattcagctattgacaggcaataaagaatccatgcttatgatgtctgtttttcaagcattttgaaatggtttttaaaacctacattactctaaatcagccaagtgaatacaagaactcattggtgatcttcaaagggctggcagtcctaatgctagacatatgataaaagagctgcagttattaactcttgccagaaaaaaatttataaatatacttcagcgtttcaacaaaagcactgccatttctmcattagtttgcataaagttacacactattttgaggtaccaaggaaaaggcacagtgaatacacagttcttacatctaccaaaattatctgtggaataaagaaaagggtaagttattcttcaccacagttgttagactaaatctacttaggagaaggcagcaggatattcaaacaacttctatccccacttccaaccct

SEQ ID NO: 501259 - DNA, 609 bp, Homo sapiens
ctgtcagcctagcctcaagcactgagacctccatcctttcccttctaaacccccagagctggtggattatcatggatgataggtacttcctcttaatactaactctccctgggagttgaaattaaatcagaatagtaaagttgtttggtgggaagtttcaaatggcagtgattgtagctgtggtttaatagtgcctggggctcttcccttttcctcttccttgatatcttgggatctarcagaataaagtctggttttcagtcttcctgaagtgagaattatgaatccaacactttaacctaggtaaagaagaaaaggagaatttataattgggacacaggggtttgtatcagaccccaaaggccttcagaagagcagagggtcatctccaccatatgtagcttctctccacacttccctctatgtctgcttcattctttctttgcctatactgggtttttaaatgttgcatgttgtgcatggaagctgcccacactgcagcacctctaaggaggattacaatttctttcagtgacaatcgcaagttgccgggaagtagttctgattggcccaacttaggtccggtgtccaatccaccgtgagcaagaa

SEQ ID NO: 501260 - DNA, 659 bp, Homo sapiens
ttctaagggaaagtatgaaggaaagccagtcatagtggaaaatggtcttgacaggattacattaaaatttttcctcctcagctttattaaggtataattgacaaatgaaaattatattaatgtatacaacatgataatttgagatacacatacattgtataataattaccacaatcaaattaattaacactttcttcaccacacaattacagcctctccagtaactgggtatacaggcacgggccactacacctggctaatttttaaatttttttttttttttttttttttagaaacagggtctcactatgttgcccaggcttgtcttgaactcctagactcaggcaatcctcctgcgtaggcctcacaaagtactgggatatacacaccagaccaggcgtccatacatttttcatgggcttggagatttacttaacttgcaggagaggaaaagtagagaggagaaactgaagcagtagttttctaggcaaacctatctttttccttgtggggtgtctgtgtgtgtgtgaagagcrgaaaaaaaaaaaaggaagaagaaaactttggtcttaccactccagcacattttctcttgcatttccaggaatgatttttaatcttgctttcctccttctttttccctaacatcagacctccca

SEQ ID NO: 501261 - DNA, 338 bp, Homo sapiens
ggaagatatggatatactttattttaatagatattgccaaattgactcaaaaagcctatatcaatttatacttctatgttttatgaagatataaatttcaccaaatccttggggatacattctttttttaagcatgtgaatgattttgatctcattttagatttaatctgcatctccctaactgatagtagagttgagcatctcgtagctgagaactttatgtgaagaagctagtcatacaaaattctggcaggaatgaactaggtataagcaagaacaaaaaaaacgyccagaatgatttgaatatgaatgatggggagagtattagacataaggtt

SEQ ID NO: 501262 - DNA, 438 bp, Homo sapiens
ttgaccatctactttatattaaccttctcatggccagtgctgaagctgaggtgctgctccaagtgaaggggagagcctgtacaaggagcacccctgactccaacctttgggttcactcattttttaggcccagtaatatatggcttgagttttttttttttttttttttttttttcccctcagcatttcagttccactagcaggtaaactgtggttcacaacgtattgttctttctaaagaaagaaatatctagttgrgtagaggaaggcactgtcttcctggcccttcttcgttcatatttttatgtcactgtcctaacgtgggccgtgtgccaagagatctttgagaagttagaacgtttagctaagctcgcctttacatgtatacagacaaggggaagaggaatgtaagcatatgtttactgagcgcagatacta

SEQ ID NO: 501263 - DNA, 577 bp, Homo sapiens
cttacagggcaatatattgttgtatcgatttttccctctattctccggcaagagtgcaatgtcacatgactggtttcggcccacgtcttttaactcctgttaggtcaaatatgagtttgtaagtggagaatatgaaatagaataaagcaaatcatacagtcctggagataacataataacatgaaaatatatacactagctattgtttatgaatgcctagtactcaacatgcattagccctgatccccacaacagccccacaagggaggtggtggtctcactattttacaggtgaggctcagtcaggataactgatgtgccccaggtcacccaagtggcaaacctgagaatcagttccaaaagctacgtgctttttgcgaaaccacggcatcttccagccaagcaaatggccaggctgaatatctgacagcwttaggtctgcatttgagatttgttaattcttccttactatctgatccaggtagcccttggtttgctgtgttattctggagctcaagctggcctctaagattagatggtatattctattcagggcatagtttaggcataaaagagt

SEQ ID NO: 501264 - DNA, 543 bp, Homo sapiens
gctgaatatccacatgccaargaatgaagttgaactctgattgcacattaaaataatggatgggagacctaaatataagtgctaaaactttaatgcttgaatatgatactaaaagcacaagcaactaaaggacaaatagatatgttggacttaattaaaattaaaaacatttgtgcttcaaaggacaccatcaataaaatgaaaagacaagtgtaacagaaagaaaatatttgcaaataatgtatctgataagtgtctagtaccaagaaaataatgaagaatgcttacaacacaacaagacaaataatccaatttaaaagtgggcaaaggatgtgaatagtttttttttttccaaagaaggtatccaaatggccaatgagcacatgaaaaaatgtttgacatttttagtcatgagggaaatgaaaatcaaaaccccaatgaaataccacttcagatccattagaatggctgtaaaaaagacaataacaagtgttgtcaaaataaattggaatcttcatacaagaatgtaagaatgaaaaagat

SEQ ID NO: 501265 - DNA, 601 bp, Homo sapiens
ctggaaggcaaaacagatctccagaaattaaggactccatttttatatcagatccttgatcccaaaaagattgaattggcccttctccaaaggatgttgcctacctagttattacacaccacatttttcttattatgtgtagtaatttctgataccctcaaaagtcaaaaacatcagctaatgtaatgcaaaacagaacatagccttagattttgagaaggatctatccacttttaattccttgtattccatgaggaaaacatttatttttcccggaaactgggtctgtggttccacctctgtttttcctaaggagtcccaagctatcagagcttggatatcaacttttagttaaactgacttttaatcatagcactctaaaaaaaaaatccttttaaattttttattaccccactttagctaggccaaacagttgatatttctggtttttgaactgcaacaaaaataacctcacacatgctctgaaaaggaaattcaagacagtttgcggaaaagaagagaatcaaaagatggcaaaggtcacccaaatatcartcagatatgctcgtcccctaaggtaggggttgaactctgaacccag

SEQ ID NO: 501266 - DNA, 506 bp, Homo sapiens
gctgctgccattgggaaatctccgcagtctgttgattcttaatcagggaacaagagaagatgtccctctctccgagatgaatccatggccccaggaaagaggaaacagataggagactatggatgtttagagaggaaacacagtaaacatagccctgaacccagttcctcctcaatgttctccatagtgagcaccgaagctttgctatttctgggttctgggagagggagagatgggggtaggggatggatagatgcttatgttgtattgttctttaaatacttcacctatggtgataagatgacacctttttatggcagatgggtctgatttatacactagctacttggagagkcgttagggagaactgaggcatagtgggcaacaaggcttggaatccaaatgtacttctcagtcctcctccttggctgcctctggccaatccaatttgctgggctctatgaagcacagccttggaatgagttctgggatgaagaaatggaaaa

SEQ ID NO: 501267 - DNA, 587 bp, Homo sapiens
aaaggagctaagcagattcagctccctttcagggtctttttctggggccattcttcaaaacgagctttaacccacctcacagaatggaagcaagacagggggatgaacttcccacagaggataaaaaactgtagggaggggcttcctgaagctaggtgtcaggggatccttatccagagaccgggctcaacagggagggaagggccctccacccgcaagcagagaakgaaagtcaagagaactcgctcatagaaaccaagggattgggcaaattaacacccccagccccagttttctcatttgtaaaatggaaattggggaataaccatgaattaaccagagagaggtcaatcggctcagaggtaaggagaagcgatgagatggcccaggaggggccaaaagaggcacccagaaggggtctgaggaccaggaacccctctcccgccttcagactttgctttcgccaaggttggggagggaagaacccagcctctgcagctccaagtggacgtgcgcacacagtcccagcccgcctcctgattggctgggagatgtcgccaccaatacatgtacgctggggccgtgat

SEQ ID NO: 501268 - DNA, 587 bp, Homo sapiens
aaaggagctaagcagattcagctccctttcagggtctttttctggggccattcttcaaaacgagctttaacccacctcacagaatggaagcaagacagggggatgaacttcccacagaggataaaaaactgtagggaggggcttcctgaagctaggtgtcaggggatccttatccagagaccgggctcaacagggagggaagggccctccacccgcaagcagagaaggaaagtcaagagaactcgctcatagaaaccaagggrttgggcaaattaacacccccagccccagttttctcatttgtaaaatggaaattggggaataaccatgaattaaccagagagaggtcaatcggctcagaggtaaggagaagcgatgagatggcccaggaggggccaaaagaggcacccagaaggggtctgaggaccaggaacccctctcccgccttcagactttgctttcgccaaggttggggagggaagaacccagcctctgcagctccaagtggacgtgcgcacacagtcccagcccgcctcctgattggctgggagatgtcgccaccaatacatgtacgctggggccgtgat

SEQ ID NO: 501269 - DNA, 587 bp, Homo sapiens
aaaggagctaagcagattcagctccctttcagggtctttttctggggccattcttcaaaacgagctttaacccacctcacagaatggaagcaagacagggggatgaacttcccacagaggataaaaaactgtagggaggggcttcctgaagctaggtgtcaggggatccttatccagagaccgggctcaacagggagggaagggccctccacccgcaagcagagaaggaaagtcaagagaactcgctcatagaaaccaagggattgggcaaattaacacccccagccccagttttctcatttgtaaaatggaaattggggaataaccatgaattaaccagagagaggtcaatcrgctcagaggtaaggagaagcgatgagatggcccaggaggggccaaaagaggcacccagaaggggtctgaggaccaggaacccctctcccgccttcagactttgctttcgccaaggttggggagggaagaacccagcctctgcagctccaagtggacgtgcgcacacagtcccagcccgcctcctgattggctgggagatgtcgccaccaatacatgtacgctggggccgtgat

SEQ ID NO: 501270 - DNA, 587 bp, Homo sapiens
aaaggagctaagcagattcagctccctttcagggtctttttctggggccattcttcaaaacgagctttaacccacctcacagaatggaagcaagacagggggatgaacttcccacagaggataaaaaactgtagggaggggcttcctgaagctaggtgtcaggggatccttatccagagaccgggctcaacagggagggaagggccctccacccgcaagcagagaaggaaagtcaagagaactcgctcatagaaaccaagggattgggcaaattaacacccccagccccagttttctcatttgtaaaatggaaattggggaataaccatgaattaaccagagagaggtcaatcggctcagaggtaaggagaagcgatgagatggcccaggaggggccaaaagaggcacccagaaggggtctgaggaccaggaacccctctcccgccttcagactttgctttcgccaaggttggggagggaagaacccagcctctgcagctccaagtggacgtgcgcacacagtcccagcccgcctcctgattggctgggagatgwcgccaccaatacatgtacgctggggccgtgat

SEQ ID NO: 501271 - DNA, 534 bp, Homo sapiens
gggaaaaggagcagttgcaggactgggggatactagggcacaggggcaagrgcaggggcactaaggacctccctgcattgtatggataataagttgattttatccttttcccttctcagtcactcttttttccctgctcaattcccatctatgccccttcccaaaggaacggaggaatggtcccacagttctctcagaccatgtagtcttgctgccttaggggacaatttcattatctaacaacttccagtctccccagttgtctcacttccaccccacctgctgtcctggttttgtccctctttctctgctgctatcctgaagagagttggaaaatagctactcaacttccgtacctgagaaaaatcagccccttgagattcaaaggcaattacttggcttcctccccagagggactaggaggatgaggtcactgagaaggcaaaagacacgccttgcagaagacaggagtcggggctggactcctaaggccccagagggcacctatagcaagcttatcctgtaccatcacca

SEQ ID NO: 501272 - DNA, 612 bp, Homo sapiens
gctgcacaactaaagttcaacccctggacccctggccactttccattccacgcatgcagtaagcacaatgaacatgggttcagacgcagcagttacatgttctcttgccccatcaagaattgtctctgcaataggagggactgggacactgctgataaaaagggaagtgttactaagataggagcagctagtgaggagagttaagaggtctaaaacagaatctgtgggtctggggtccagaatcacctctgctcccaagtaactgcatgcccttggatcactgcttttacatcctgggctttggtttcctcatctgtgctacaagcagccggatgcttcaagaygcagctagaccagcaccgcttgcccttctagtgggaatgtgaaccagctcaatccttttgtacagcaatttggcaatatgtgtcaagagcctcagaaactctttgacccactaattctgcttctgagaatcctaaggaaataatccttaaaaaggaaaaagccttatgtgcaaagaccttcatctcagcactgtttataacactaacaaactggaaatgagctaaagtctaataataggagaatgggtaaactgtgatatggtaaatc

SEQ ID NO: 501273 - DNA, 611 bp, Homo sapiens
gcattccaggaagcaggagaaataaaagacagaatgaatggtctccagagggaaggtttggacttgaccttagcagaaaacctactagtaccctgatgaggctcggtgccccacatttgcaggctcatgcctaagcctattgttttcctttacagatgtgtctgtttttcccggctctggccaagcctgcagttggaaatgctaacagsatctgctttggttgagcccaggctcagggcacatcataaattccacactgtgatcttgctttcatgacttgtgcagccaaacgttgcaaagtcctggggcttgaagtttcagaagctttagagaagccatgaatgaattaggggtggaggcgagtctgaagactgcccacaccagacctagttataaccaggatcatctccttgcaccccttccagcaaggtagccaggtggaccttccaggcagagaccgtggctgagttcccacaaaggcagtaggctatttgaaagtgatacttcgctggttctacttgctttcctttctaggacaggagtgacagtaagatccccattaggaacttaattctttgatttcaagaaaaaaagccagctatcaactcaaa

SEQ ID NO: 501274 - DNA, 609 bp, Homo sapiens
taatatatttaatttgctaaaagtgatttgcattagaccacattccactgttaagaaaatagtagtaggttttggtggcagtggcttttctttttgcttactttcttctcttttaaaaattaaaacctgataggaatggatttggaacaaaatgaatgtatatatgttgggttttaaatgtgaaatgaaataaactgctctgcaagttattttatagctatttaggaagaagtcggcagtggccgtaggctgtrttttagagaaagcctcctattttgctttgtgactttggcaaatcatagcatccttctatgcttggagtttttctacagcagcgattctgggggtcaagaatcatatgatgaaagctagggcctccatccagagacatatatttgcacacatactcaacaacattcttcattgaatttcaaggggttgctaggccccttgaaacccatttatgaatggcctagggtctcatggtgtaaacttccctccttcatgaagatgaaaaggagcatcaaagtttcttttctccagggacagagaggaagttaaatgaatgtaaaaatacatttttcctaagtcacatagggaaaagggaag

SEQ ID NO: 501275 - DNA, 609 bp, Homo sapiens
taatatatttaatttgctaaaagtgatttgcattagaccacattccactgttaagaaaatagtagtaggttttggtggcagtggcttttctttttgcttactttcttctcttttaaaaattaaaacctgataggaatggatttggaacaaaatgaatgtatatatgttgggttttaaatgtgaaatgaaataaactgctctgcaagttattttatagctatttaggaagaagtcggcagtggccgtaggctgtgttttagagaaagcctcctattttgctttgtgactttggcaaatcatagcatccttctatgcttggagtttttctacagcagcgattctgggggtcaagaatcatatgatgaaagctagggcctccatccagagacatatatttgcacacatactcaacaacattcttcattgaatttcaaggggttgctaggccccttgaaacccatttatgaatggcctagggtctcatggtgtaaacttccctccttcatgaagatgaaaaggagcatcaaaktttcttttctccagggacagagaggaagttaaatgaatgtaaaaatacatttttcctaagtcacatagggaaaagggaag

SEQ ID NO: 501276 - DNA, 445 bp, Homo sapiens
gaacccaggatgtggggcttacacaaaatcagtgtccgctcgatcacatggcttccagatgatgtttctcttggggaaggcccatggacaggaagatgtagacaatttaatgtaagctttaaaactcttatggctgaactttcctggagagcaaacaaagccctgattgtatgagtccagagagagtttggttctagacgagcaattccttaattctytaagcactgtggaagacctacagagggctagcctctggcggaggctgtggacttgcagaatgacatgcacaggtccctgccctcacagcagtgagggcagactggcatataacatcctatgagaggcaggccaggtgcagtggctcacgcctgtaatcccagtactttgggagcctgaggtgggaggatcacatgaggtcaggaatttgtgaccagcctggccaaca

SEQ ID NO: 501277 - DNA, 584 bp, Homo sapiens
taccctctctctgccgctcccccttgtcacaaaaaagctgtcttctgagggagcataacagaagcagaagcagcatctctcagtctggggtcggctcagagctttgtgtgtgccagccccttaacataccatttctcctgcctggggctcagtcctcggcagccatgtctctgaaccagggcaaagggatactcttctaatagacaractctggatctgatggtctttctccatggggctttctttgcaccttcctcttgggactctcttacttttttaactttttatcttgttactcatgtatgactcctctgctcagggacaaccatgcagactgggtatctttcaagtggcccttggaggcagccgcctgcgagacacatctctgtggctcccacagaactgtcatcctcatcctaatgcctgctgtttattgagcacttagcatgtgccaggcagcacgtaaagtcctttatcactgaatcatagtgtcctgcagcagtcttaggagatgtggcactgttaagatgtctgctaatcagatgaggacactgaagctcatccaggttgaataattccccaaa

SEQ ID NO: 501278 - DNA, 645 bp, Homo sapiens
ctgtgtgaggcgatgatgttattaccccattttgcaggtggggaaatggaggctgagggaasgtgaatgatttccccaaggttacaacagcaaggagcagaacaaggactggaaccaggcttgttagtctccagactctgcactgtcagccttactctttgacagtgtgttccatgtttgtccttattctgccctgtgaatatggattactgtgagaaaggaagaaagattaaaatgttgaaaatacatttttataaatctctgatggaggctgggtgcagtggctcatgcctgtaatcccagcactttgggaggccgaggtgggcggatcacctgaggtcaggagttcaagaccagccttgccagtatggtgaaaccccgcctctactaaagatataaaaattagccgggcatggtggcacagtcctgtaatcccagctacttgggaggctgaggcaggagaatagcttgaacccagaggcggaggttgcagtgagccgatcacaccactgtactccagcctaggagacagagagactccatctcaaaaaataaaacaaaataaaataaaataaaataaaataaaaataaaaattaaaaaatctctgatgggaacgattgctatttaaagtgatggatgagtga

SEQ ID NO: 501279 - DNA, 535 bp, Homo sapiens
gcttatttcctctttctcatggcccagcactcctagaattacaaacacagctcagaagccaaccagaaaggtggctctgggccaccttgggtgtgatgaagccacttagggtgctggggtaggaaggaggtatgtggatcacaaagccaggcagagtttctgttgtcagtcttcctggtttgggggtctaatgctcgctgagatgtctgatgcaaaggccaccttaaagtgtaatgttaaaagtttaaacaaagcaaggcaacccacctccccaggggagccctggcaggcagtagaaggttcagggtctgagaatggacccaagagttctagcccagctctggtcccaatgcactgagaaaccttgggcagctcattttgcttctctctcacaggytcagttcccccatctgtaaagtaaaagagagaagctaacagacctctaagcccttgtagttttgattgtctgagattattccagtgcattcacacatagtacgttaagtacttgatctatgacaaggcctttgaggat

SEQ ID NO: 501280 - DNA, 625 bp, Homo sapiens
cagcagcagttcctaaaacctgactctgttttaacatcgcccagcaagctttttttcctccttcactgaatacctactctagggccactttcacacctacacactcaaaatctcaggggagagtcaccaagaagctgatagatctggttgacagatcagcatttgagaggcattgatctaatgaaatgagtcagtaacccctaaatgtgggaatcyctgggcccctaaacacttggtctccatatatagatagccttgcaaattcacctactggaaatgtaaaataaatggcaagattttggatcactctgggctgtaattgtcaccaggaaaggtataactggagactggtataggactgtgtcacaggagtcagggtggaggtggagataagcctgtttgctcagggcacatgatgatgggtaagacagacagttgatccacagagtttattgagcacagagagggtctggaccttgttccagaatttcaagggctataaaagggaatcagaagccacagacttagctcaggtatctagagcagcttccttgatatcaagcggcttgctgatgccttttgcacataattggagaggttaaataacttgcaggtagtttcacag

SEQ ID NO: 501281 - DNA, 596 bp, Homo sapiens
ttttaacatcgcccagcaagctttttttcctccttcactgaatacctactctagggccactttcacacctacacactcaaaatctcaggggagagtcaccaagaagctgatagatctggttgacagatcagcatttgagaggcattgatctaatgaaatgagtcagtaacccctaaatgtgggaatccctgggcccctaaacacttggtctccatayatagatagccttgcaaattcacctactggaaatgtaaaataaatggcaagattttggatcactctgggctgtaattgtcaccaggaaaggtataactggagactggtataggactgtgtcacaggagtcagggtggaggtggagataagcctgtttgctcagggcacatgatgatgggtaagacagacagttgatccacagagtttattgagcacagagagggtctggaccttgttccagaatttcaagggctataaaagggaatcagaagccacagacttagctcaggtatctagagcagcttccttgatatcaagcggcttgctgatgccttttgcacataattggagaggttaaataacttgcaggtagtttcaca

SEQ ID NO: 501282 - DNA, 596 bp, Homo sapiens
ttttaacatcgcccagcaagctttttttcctccttcactgaatacctactctagggccactttcacacctacacactcaaaatctcaggggagagtcaccaagaagctgatagatctggttgacagatcagcatttgagaggcattgatctaatgaaatgagtcagtaacccctaaatgtgggaatccctgggcccctaaacacttggtctccatatatagatagccttgcaaattcacctactggaaatgtaaaataaatggcaagattttggatcactctgggctgtaattgtcaccaggaaaggtataactggagactggtataggactgtgtcacaggagtcagggtggargtggagataagcctgtttgctcagggcacatgatgatgggtaagacagacagttgatccacagagtttattgagcacagagagggtctggaccttgttccagaatttcaagggctataaaagggaatcagaagccacagacttagctcaggtatctagagcagcttccttgatatcaagcggcttgctgatgccttttgcacataattggagaggttaaataacttgcaggtagtttcaca

SEQ ID NO: 501283 - DNA, 557 bp, Homo sapiens
tttgtgcatagacacaaccatgcctgtcattgcagtttgctaaacttargagagattggtgatgctggttgttaggagaaattggaattttaaaagattaaggtggaaggaggaaagctgtggccagtaagttagggtgctccattgaatggactgttgtagttcactaaaatagaaggcaacaggagtctcaattctccaaagtcaaaattctcagtctcaggagtcttttccccagaactaaaatgatttcaacagtatctccccctaatatgagatgtaatttatatctctgcatttttgtatagggagcagagaaacctttttttttttattgttttattatttcttgtacctgattgaatatttaaataatatagaaaggaataaaggagaaaattaattccctaaaatccaaatacccagcaataattataaatggttggtgctcatctttctgtacttttcatatatatatatatatatatatatatatatatatatatatatatatacacacacacacacacacacacacacacatatatacaaaccca

SEQ ID NO: 501284 - DNA, 557 bp, Homo sapiens
tttgtgcatagacacaaccatgcctgtcattgcagtttgctaaacttaagagagattggtgatgctggttgttaggagaaattggaattttaaaagattaaggtggaaggaggaaagctgtggccagtaagttagggtgctccattgaatggactgttgtagttcactaaaatagaaggcaacaggagtctcaattctccaaagtcaaaattctcagtctcaggagtcttttccccagaactaaaatgatttcaacagtatctccccctaatatgagatgtaatttatatctctgcatttttgtatagggagcagagaaacctttttttttttattgttttattatttcttgtacctgattgaatatttaaataatatagaaaggaataaaggagaaaattaattccctaaaatccaaatacccagcaataattataaatggttggtgctcatctttctgtacttttcatatatatatatatatatatatatatatatatatatatatatatayacacacacacacacacacacacacacacatatatacaaaccca

SEQ ID NO: 501285 - DNA, 630 bp, Homo sapiens
gctcttcccactgtctatcatgtctgttgcctactatggatatactcattgcctgtgcttcctccacagttctgctgatttattttaccatcaaaataatcaatatttattgaacacctactatttgccacacattcttctatggccttaggctgcagcagtaaacaaaacagacaaaagttcctgctctcctggagcactggggggaagcagacaataatataactgtcataagtaataagaaacataatacataatacattgcctatagaaagcattatgtgctatgaaaaacattcagaagggtaataggaatcagggatgatggggagggagkttgcaatctgaaacacaatgcttatagtaatactcattgacaaagcgatacctgaaatgagacttagaggaaatgagcgagttattcatgtggatacctgaggcagacgaaccgtacagtgtaaagaccctacagggacagggcgttgtttaagaattgcaaggaagttaggtaggccagactaagagacaccagtaggagatgagattagggaggtaacggagcatcagttcctctgtggtcttgcattttccttagcgactttgatgtggtgaagctcatccatctgtgac

SEQ ID NO: 501286 - DNA, 505 bp, Homo sapiens
gttttttggggaatcccagatatcagtatttttaggtcttttttccttaggctgatcagaatcactggtgaagactcttttagtctcctgcctggaagctgtaattctggataccactttctgggacagagataggaagagggctgaaggtttcaacattgagtatgaaaatttcctttaaaactcactgaattcagtatgrtacacaaccaaggactgtgtcttctcacgtaattatttttttttcattttctgctgactataaatctctagttttccataaagtggaagcctgtctactggagaagagaggccatttggagtctgagtgctttttaaataaactttcaaataatccttctgtttttaatcctgtcttccatcaaaatcccagtggcatcaacatctggtgccattatttccagaagagttgggtgggagatctggggtgcaaattggttgcttagctttcctcattgttggttgagaatacaactttcttcac

SEQ ID NO: 501287 - DNA, 630 bp, Homo sapiens
atctttcaaaatgaagacctaacaatggctgaagtgtatgaattttgtaaatacagtggttgcctgaccctatgtaattagcatggagctaaaacagcaccaaaaggcattagagtccactggttgatagagcaggataaacatcagctccttcatcagtagctgtgcttctttggggaaattggttaacctctctgtgctttatttgtcctcatctgtaaaaatggggatagtagtagtatctacctcatgggtttgtggtgatgattaaataagttaatatayataaagaagtaggaattaactagataaatgtttaagaaaaagacatttcaaccagtattttataggtgtttttatgaagcagaaatatgtaactatttggcatagtgatgaataaatttaaatgttgagttttaaaacgaagaggaaataagatagcaagaatatgataaggcagaaattcttctatcatgaattaagggaatggggaaaaagtggattttgtaaacagactgactgagatttcaatcctgaatctaccccttcttgttctggaacatgtcccttggcttttgcatgctccagtctttggatttgtaaaataaaaatgatcactttacctggcag

SEQ ID NO: 501288 - DNA, 616 bp, Homo sapiens
gaaaaagcagtgaacccaaattatttttctcacttgtgacctattaatagttacttttgcatgaaataaaattccattactgctggaggggtatcgaacagatgtgatgttacttgcattggtttgctgggctgagtgaggtggctcacgcctataattccagcactttgggaggccaaggtggaaggatcttttgagcccaggagttcaagaccagcctggaaaacacagggggactccgtctctataaaaaatttaaaaattagctgggcatgatggcatgcgcctgtagtcctagctacttgggctgaggtgggaggatcccttgagcccagaagaaggtggaggctgcagtgagccatgatcattccactacactccagcctgggtaacagagcaagactctgacttaaaaaaaaaaattatgtgtacctaaaaatgttatatttaattcctcatttggggatctaccggagccctaatctttatgaccggttgtatcttaytgtgtgacttgtaaaccaaataacaagaatgctggtttgtaacatttggccaaatagctaacgagtctacttggtagtgcttattttaaaacaaaccagcaaacaaacaa

SEQ ID NO: 501289 - DNA, 635 bp, Homo sapiens
aaaaggtcactcaagtctgcgtaacaagtgaacaagatctatttcccattgatgatcccacagagtggactctaagcaaaaaggaataaaacccccatcagcccagggagggaaaaagagccaggcttctggtgcttctcaaaaggatctgccttaaagtacaattctgataaacacctcagtgaggaacaggtgattgcaatgcattggtagaagtctcatttatcatttagtccaatataattattctgacctattctatttcataccaaaataactttggaggaatccaatggagtttggcagaaacacttttggggggatraaaagaaacgtagcttttgcagtgtcattctttaatatgagccacaaaagactgtgtaggggtgggggtgtctactcaaatcacagaggtgaaaagacttaagacatgagatccaagaataagaaaagatttatagatcctaaaatgtatagagtatgaaaatggacaccctttaaaagtattgtatgacatggtcaagttttaaggaaagaaagaaagaaagggcttaatgaatccacctcttctaaagaaattggtcccccaaatttccatttcattgccatgacaactagtactccatcattgccat

SEQ ID NO: 501290 - DNA, 602 bp, Homo sapiens
ttattcaaagcaatgacagactgatggtaaccttctcactcaacaggaacatagaagccacaacaaagtacagtgatatatttctaatatacaaaaagaaaataactgctgcacagaaaaagatatttagtaaatgaagggtgaaataaaagacgttgtcaagtcaacaaaacagacacatactaaaaagaacttctaaagggtacacttaaaatatagcactcgacatcaaagaatgtaataaatacatgggtgatgctaagtgaatcttgactacatgaaataataatgtcggggatttatatattaatatttatatatattctattataatatattacaaaaatagcatataaatcaggaggastaaatgaagttaaggtgttctaaactctttacattgtgtgacagaaggaaaaagctatcaatttacattatactttgataagcaaaggtagaatatgaccttcagtgaataaaaagactactaggagattaataaataaataagctcctaacagataacataaagcagtatctttatggctatgagataggaaaatatttcttaaataggacacaaaaaacactaaaaggaaaga

SEQ ID NO: 501291 - DNA, 598 bp, Homo sapiens
tggaaggaaaaaggaacatcttacatcgcagcaaaggagataaaggagagccatgtgaaaagcgtttcccctcataaaaccatcagctctcatgagacatattcactaccaagagaacagtatggggaaaactgaccccataattcaattatcccccactgggtccctcccacaatacgtggcaattatgggagctacaattcaaaatgagatttggctggggacacaacaaaaccatatcatcagacttcttttgcatgtgagaaaaacaaaacttatcttctttaagccatcaatttggrcctcctgtattaggtagccaaaccatctcctagctaatcactgagtaattaattgtattgtcatgatccttgtcaagtttttattcatacatgtatttttttaaaaattgtccacagtcttggagtatgtatttttatttgtttccttggaatttaattgggctttggaatgatgtgcggaagactatttctaggcaaagacagttttaattatttttagtttgacctctgttctctgcctttcatttccatcatcttcaatttaaagcataactaaagtgcagttcatttgcaca

SEQ ID NO: 501292 - DNA, 562 bp, Homo sapiens
ctaatacaattttgtcaaatgaatgagtgagtgagtgaatgagtgagtgagtaaaaaggtatttcttccacttctatagtaccttatatttctgcaaagtgcctttatactttatctcattggaccctcaaggagtgtttagaaacatttttatttcagtttactaataaagaagctcggatgcagagaggaacactaattatcacaatactaactggggtggagccaggattgcgactygccagctccctgtccagggccctttctcccacattgcagtatcccctaaatatgaataaaagttaatataattggaaaaatgaggttacttgtaatttacagcctgtaatatacttagtgatgagcaatggcaaacaggagaactggatcttcttctgtctcccgtttaccaccccaaccccaccgcaagtcaccagacccaagccagtccctcactccctccagggctcaaccttgtgacccttgggtagcatctgacttcacctctttgtgattttttactgaatttccacaggaaattatgttttgtgaactatgccag

SEQ ID NO: 501293 - DNA, 511 bp, Homo sapiens
ttttcttctttggactgctaaattcactatctgtaaagaaagacagtgtttataaaatgctagatatcaccagttcaaattagctcactctttctcttatatttcctcatttttaactcctctggaaggaataaaattgcactgaaacacctttggtcaatgcgtgggcctatataaacacaaaattaattaattattttaattaactagttaattcctttaacattgaagaggtattgagcatttcttttgtgcaagtcattctgctaggtaccaaaaaatcaagccacagcagaggytgtgtgaagtaaagatatgtgtattattcagtattgatttcctatcccttcttttttgcctaaactcttctcaaaacccaaagaagctaaaaaccatactggaaggaggattctgctaatgatacctcaatgccttccctcaatgtaatactaaactacttcacctaaatagattggaactaagaggctgtccttatgttctccaaagagtg

SEQ ID NO: 501294 - DNA, 521 bp, Homo sapiens
ttgactactcaaatgaagggtaaaagacacatggattataccaaaaaatggataattctcaaatcatttataaagtaacacagtgatcgataagaaaggaaagtactcttggttaattaaaatttttgcttgacaagaggtttaaagaaacaggtgtttttattttgaaagtttcaaaaatgcttcttgatttaacaagtagagtttcatgaccaatattgaatctttgaagattgaaaatcttgcatcactttgggtgtcattagtctgtagagacaggatcttgctatgttgcccaggctggtcttgaacttctgtacacaggcaatcctccyaccttggcctcttaaagagctgggattacaggtgtgagccaccatggctggcctgggtgtcagtaatctgaacatgaatagtcaatgtaaaaacagagaatgtggaggaaattgggttgacgttacacagtttgagaatgtactctctaatgtattattttaaaaaactaaatttctcctgtgagt

SEQ ID NO: 501295 - DNA, 575 bp, Homo sapiens
caatgagaagtgtccaagatggtttccagctttctctccaagggtaagagttgaatgtgttgactgacctttaccagcacgaacacatttgccatttgactctgaggaataaatgggtgacctgactgtgggcacagagctgaaggctgattctccagaaaactcaccatcagtttgctcagcaacgctgmtgactcggaacacattttgttttttctttttgaaactgcaccatgcattcttgaaagcatgactcaaccttaccagcagtctcagtgagcttgaaatggcctcaactagaggatttatagcctttgcaaacacagggcacatttctttgtttcctttcagaaactgagaagtgattcattttcagtaaacaaagagaggattaccaacacatttactagtctgaaattcagcttccattgaatgcaattcctttagttcctagtaaaggcattgtgcatttcaaacagctatctttcttctttaatccactttctttcttcctagtgtggaaaagatatataatttagccctcactcaaatacaaataagatgagtttcaaagg

SEQ ID NO: 501296 - DNA, 652 bp, Homo sapiens
caaatacaaataagatgagtttcaaaggccattcaggccctaatgtgtgtcctttgcaagaacaagaaactgtgattctgaagaatttaaatacagatactgttggcagccagagatgttttctgctgttggaatgcaaaagaaaatattactttatagctgcactgtgccactcctgacattgatgggtcttgtattcaccagaggrgggaaaattaaaatatcttacctgtctacacagtatccttggtggttacacaacaataaaatattcagcagtctgatacctttactgttaaaactgaaataccaaattgaaactggttgagaatgtgtgcagtctattgtgttcctactttctttagattagctttctatcacaataactgcattcagtagggctcatattgtctcaattataaagtcaactccagacattagcactagattgcttcagcgaatctcaaatatttttaactgttgacaaaagtttcagtttcattatgccaagttccagagtaaaactatggtaatgtaatcacttctcagactttcattatttgcatgttcccagaaaatcattataactttctagaattatcctgaatggttcaaagtaagcagttttcaagtcagtaggaattgcagaggc

SEQ ID NO: 501297 - DNA, 561 bp, Homo sapiens
ccagtctacaatctctgctaaagagaccagtgctctgcccataatgtggtcctgtcttccctccctctcaagcacccgggcagagttgattggacaggatactcaaagtcaacagatccatgggtttgcttatggtctgctgggaaaaaacgagctggagcaatttgatttcctctctagaatatgtgggaagggaaggatgagaagaagtcagtcagcagtgacagccagagctactsagctgacagctccttaggtatctttaaaacaaattctcctttttccagaggcaacattagccaatctctgctccagcagccaaaaacaccaaatgacaatatggtggaaaagtgaaagattctattaatcaaataaactgctccacatcaaataaaaagtaatttactgaattgactgagtcgattcatttttagcacattctgaggatgtgattttcactccatattgaacggttacttaatttattagagttctgcctaataaggttcactaaggaactttgtgttaaaattgtttaaatagagtgactgaaacaattac

SEQ ID NO: 501298 - DNA, 561 bp, Homo sapiens
ccagtctacaatctctgctaaagagaccagtgctctgcccataatgtggtcctgtcttccctccctctcaagcacccgggcagagttgattggacaggatactcaaagtcaacagatccatgggtttgcttatggtctgctgggaaaaaacgagctggagcaatttgatttcctctctagaatatgtgggaagggaaggatgagaagaagtcagtcagcagtgacagccagagctactcagctgacagctccttaggtatctttaaaacaaattctcctttttccagaggcaacattagccaatctctgctccagcagccaaaaacrccaaatgacaatatggtggaaaagtgaaagattctattaatcaaataaactgctccacatcaaataaaaagtaatttactgaattgactgagtcgattcatttttagcacattctgaggatgtgattttcactccatattgaacggttacttaatttattagagttctgcctaataaggttcactaaggaactttgtgttaaaattgtttaaatagagtgactgaaacaattac

SEQ ID NO: 501299 - DNA, 514 bp, Homo sapiens
gagtgcagtggcgtgatctctacycgctgcaagctccgcctcccgggttcatgccattctcctgcctcagcctccccagtagctgggactacaggcgactgccaccacacccggctaattttttgtatatttagtagagacggggtttcaccgtgtcagacaggatggtctcgatctcctgacctcgtgatccgccctcctcggcctcccaaagttctgggattacaggcgtgagccaccacacctggccagatatttcttacacattaaacacaaagctattttaaacaaatgtgtcagaaaagtcagtctcttcaaaggagaacatctgcttattctgcatttttcccaactgcaaagtctatcatctctctgcagcctcactgtgaagagctctttagaagtgccctttctagaacgaacttctggtgagtcatcatcaatacctcatccttgtgtcagacctcatcaggtgtacttgtcaatggaaaatgttcctaagccagtacttcaa

SEQ ID NO: 501300 - DNA, 514 bp, Homo sapiens
gagtgcagtggcgtgatctctactcgctgcaagctccgcctcccgggttcatgccattctcctgcctcagcctccccagtagctgggactacaggcgactgccaccacacccggctaattttttgtatatttagtagagacggggtttcaccgtgtcagacaggatggtctcgatctcctgacctcgtgatccgccctcctcggcctcccaaagttctgggattacaggcgtgagccaccrcacctggccagatatttcttacacattaaacacaaagctattttaaacaaatgtgtcagaaaagtcagtctcttcaaaggagaacatctgcttattctgcatttttcccaactgcaaagtctatcatctctctgcagcctcactgtgaagagctctttagaagtgccctttctagaacgaacttctggtgagtcatcatcaatacctcatccttgtgtcagacctcatcaggtgtacttgtcaatggaaaatgttcctaagccagtacttcaa

SEQ ID NO: 501301 - DNA, 514 bp, Homo sapiens
gagtgcagtggcgtgatctctactcgctgcaagctccgcctcccgggttcatgccattctcctgcctcagcctccccagtagctgggactacaggcgactgccaccacacccggctaattttttgtatatttagtagagacggggtttcaccgtgtcagacaggatggtctcgatctcctgacctcgtgatccgccctcctcggcctcccaaagttctgggattacaggcgtgagccaccacacctggccagatatttcttacacattaaacacaaagctattttaaacaaatgtgtcagaaaagtcagtctcttcaaaggagaacatctgcttattctgcatttttcccaactgcaaartctatcatctctctgcagcctcactgtgaagagctctttagaagtgccctttctagaacgaacttctggtgagtcatcatcaatacctcatccttgtgtcagacctcatcaggtgtacttgtcaatggaaaatgttcctaagccagtacttcaa

SEQ ID NO: 501302 - DNA, 612 bp, Homo sapiens
cgggacaataagagctacctcatagatgagagggcataggaattccttaataaatggtagctgttatgattacaaatcaacatttggaaggagaataaatcctccccatatagtcttgagagttaaatgaaaaattctctctatcctatagttttatcagctttatttcttttattaatttcaagaggtgtttcttatgcaaaaatatagctgtgcgtgttgcacatttttattcacagttgctagggatacacagtcttttgatttgagcyggggatatctgttgaaagtgaaatattcacatgtggctggagaagggcaaatgaggctgcatccctcccttttctctcaagggaagcccaggaatttcctaggaagagtcattaacagggcccaggaagacctctcaggtaagacgttataatctatgcatacatccaatctcctgggacctaagccattgggatgctttgcaaagttgagattctccatcatgctgcaaaccttgccttggagacaacagacattattttctattactttatgtgcacttatgctattttcatggagtcccacatctatatataatgttttagaagtaatgagcatgtc

SEQ ID NO: 501303 - DNA, 276 bp, Homo sapiens
gcctgtgttccctggaattgcctgcttatatggctgttggctccttaaggacagggagtctgttttacccaccagtatatccctagcacagtgcctgacacagccagagtccttaatcaattgttcaatgccactctgatggcccaggctagaataaccagagctccctctttggtactttgcagtctttgatttcaaatgagttacaaaatcttgtgaaggcagcctctgcactgtcccttacgartcattttaggatttttactagttttgaac

SEQ ID NO: 501304 - DNA, 672 bp, Homo sapiens
tgttgcttatacattttacatctcaactctatataaatagtatatgattgagggtggggataaagggctgagtcctctgggtctactgagtgaatttgttccctactcttatagtaactccctagtgctgaagcccagagcagccaagaaatagtgtggccccagaagaatcaaagagtttttttaatttgaatttttttattttgaggcaatttcagacttagaagttacaaaaatagtacaaagagtttccatatacccttctcctagattctccaaatgtaacatttgccacatttgctttatcattctctcttcatgtgtatttccttatatatatacatatatataatgaaatatttgagcatatactacatccatgatgcccctttacccgcgaaaacgtaagtgtatatttctgaaaaacaaggaccttaaccacagtatgatgatcaagctgagaaaattaacgcagacataatacttgtacttaacctaaataggccttaatctagaatcatacttcaggctttcttctatgaaaacataactttttaagagtcagttattctgtrgaatattcgtcagtttgggtttaactaatgtttcttcatgattcaattcaggttttgcattttgggcaggaatataatagaaatgatcctgtgtctt

SEQ ID NO: 501305 - DNA, 580 bp, Homo sapiens
tggactccagaatttaagaaactgggtatgaatcttggttctgccacttaccagatggtaggacattgggtgaattatttaaactgtgcctctgtgtcctcactgataaaatgaagaatcttttaaaatctatttcctagagttcctaccacaatgccaagtacaaaacaatcaatcaggttactgattatttttaccacacaatttttttccttaggaaaattttaagaattgttttmattaaaaaaggaataaaagttattttgccacgtcacccatgcctagcctacgtccctgtgaatttggaacttgacataatttcaggaatccctgctctgccttttccctaagcccatgtgggatcttggaggacggatgtaaataatggccagagctgcagatgtgcaaatagtagggcttgctttcacatcacatctggcctgctttccaattcctaggtggccaagagtgattcacaagtccaaagcaacatgtcttcaatgaacatataccattacatgagtgggagaaaaacgaggggcccagcaggtatagaggccccaggtgaattcccaaacta

SEQ ID NO: 501306 - DNA, 580 bp, Homo sapiens
tggactccagaatttaagaaactgggtatgaatcttggttctgccacttaccagatggtaggacattgggtgaattatttaaactgtgcctctgtgtcctcactgataaaatgaagaatcttttaaaatctatttcctagagttcctaccacaatgccaagtacaaaacaatcaatcaggttactgattatttttaccacacaatttttttccttaggaaaattttaagaattgttttcattaaaaaaggaataaaagttattttgccamgtcacccatgcctagcctacgtccctgtgaatttggaacttgacataatttcaggaatccctgctctgccttttccctaagcccatgtgggatcttggaggacggatgtaaataatggccagagctgcagatgtgcaaatagtagggcttgctttcacatcacatctggcctgctttccaattcctaggtggccaagagtgattcacaagtccaaagcaacatgtcttcaatgaacatataccattacatgagtgggagaaaaacgaggggcccagcaggtatagaggccccaggtgaattcccaaacta

SEQ ID NO: 501307 - DNA, 486 bp, Homo sapiens
acaccttcttagcctcttggtctttaaaatcaaaaggaaccaactgcatagtgctatggtctgaatgtcagtgtcctcccaaaattcctatgttggaacctaatacccagtgtgatagtatcaagaagtggggcctytgggaagagatgaggtcatcagggctccgctctcacgaatatgattagtgctcttctaaagaggctcaaggttgctttcttctaccccttctggcatgtcaggaaggcacaatctatgacgaagaagacctccccagacatcatatctgctggtgccttgatcttggacttcccagctcccagaagtgtgagcaataaatttctcatgcttgtaaattacccagtctaaggtattttgttatagcagccctaatacactaagacacatggtatattgcttacaaatgttttttaataagcatgagagttgtacaaaaccccatttgcaacatctgcaatgccaaagaca

SEQ ID NO: 501308 - DNA, 482 bp, Homo sapiens
ttcctctttgagtgaagaatccatttttgaaaaaaaattttaacattaaaaataartcattactttgatccaacagatgaataagccccctgtacagtttatgctcatttgcagacttgattataaaaaacgtaggaaaattaaggaaggatggccaccacattatcaaccatgggttacagaagggggttgatgagaaggaaaagaatctagcccacacggggcagaagaagggatttgcactgcttatggtatactatgtaagggccatgactacgggtgatttttctgttttatgtttcactactttgcatattgtattttttaaaagtttggatgggctgggcatggtggctcacgcctataatcctagcacattgggaggccaaggcaggcagaccactctggccaacatagtgaaaccccatctctactaaaaatataaaacttagccaggcgttgtggctcatgtctgtaattcc

SEQ ID NO: 501309 - DNA, 482 bp, Homo sapiens
ttcctctttgagtgaagaatccatttttgaaaaaaaattttaacattaaaaataagtcattactttgatccaacagatgaataagccccctgtacagtttatgctcatttgcagacttgattataaaaaaygtaggaaaattaaggaaggatggccaccacattatcaaccatgggttacagaagggggttgatgagaaggaaaagaatctagcccacacggggcagaagaagggatttgcactgcttatggtatactatgtaagggccatgactacgggtgatttttctgttttatgtttcactactttgcatattgtattttttaaaagtttggatgggctgggcatggtggctcacgcctataatcctagcacattgggaggccaaggcaggcagaccactctggccaacatagtgaaaccccatctctactaaaaatataaaacttagccaggcgttgtggctcatgtctgtaattcc

SEQ ID NO: 501310 - DNA, 482 bp, Homo sapiens
ttcctctttgagtgaagaatccatttttgaaaaaaaattttaacattaaaaataagtcattactttgatccaacagatgaataagccccctgtacagtttatgctcatttgcagacttgattataaaaaacgtaggaaaattaaggaaggatggccaccacattatcaaccatgggttacagaagggggttgatgagaaggaaaagaatctagcccacayggggcagaagaagggatttgcactgcttatggtatactatgtaagggccatgactacgggtgatttttctgttttatgtttcactactttgcatattgtattttttaaaagtttggatgggctgggcatggtggctcacgcctataatcctagcacattgggaggccaaggcaggcagaccactctggccaacatagtgaaaccccatctctactaaaaatataaaacttagccaggcgttgtggctcatgtctgtaattcc

SEQ ID NO: 501311 - DNA, 622 bp, Homo sapiens
acaatcatttcactgaataactatctctgaaacaagttcacagagacattgtgtgaaatcaagtgtaattttttaggccatgaatccttcccgacctcccccttattcctgctgtcatcttaactttttttttttttttcttgaaacggagtctcgctctgtcactcaggctggagtgcagtggtgcaatcagggcycactgcaacctctgctcactgctgcaacctctgcctcctggattcaagtgattctcctgcctcagcctcccgagtagctgggattatagacgcctaccatcacacccggctaatttttatatttttagtagagatgggatttcgccttgttggccaggctggtctcgaacttctaacctcaggtgatctggccaccttttcctcccaaagtgctgggattaccactcccagccaatcataactttttttttttttttttgccttgaaatcaacaactctgaattacttccagtttgcattctgtgtattgagacccacaccaaactgaagtgtcacccaggctggcatgcaatgacatgatcacagctcactgcagcctcaacctcctagtctcaagtgatcctcccagctcggcttcccaagca

SEQ ID NO: 501312 - DNA, 622 bp, Homo sapiens
acaatcatttcactgaataactatctctgaaacaagttcacagagacattgtgtgaaatcaagtgtaattttttaggccatgaatccttcccgacctcccccttattcctgctgtcatcttaactttttttttttttttcttgaaacggagtctcgctctgtcactcaggctggagtgcagtggtgcaatcagggcccactgcaacctctgctcactgctgcaacctctgcctcctggattcaagtgattctcctgcctcagcctcccgagtagctgggattatagacgcctaccatcacacccggctaatttttatatttttagtagagatgggatttcgccttgttggccaggctggtctcgaacttctaacctcaggtgatctggccaccttttcctcccaaagtgctgggattaccackcccagccaatcataactttttttttttttttttgccttgaaatcaacaactctgaattacttccagtttgcattctgtgtattgagacccacaccaaactgaagtgtcacccaggctggcatgcaatgacatgatcacagctcactgcagcctcaacctcctagtctcaagtgatcctcccagctcggcttcccaagca

SEQ ID NO: 501313 - DNA, 583 bp, Homo sapiens
ctgctcttcattgtacgagtgtcttttttttcacggcgccccttccctctgcaagctcccactcaccattatgactgaggtcaagtggctcctcactctgaaacttttcattgcctccttggacagagatggatttccctcttctctgttcatgctgcactgttacccatctttatttataataatctcttctggagtctattttccctattacagtactaacatacccagtttcagtggtttatatacaagaggtgttagtaagaggggtaatactttttctgcagataaggggtttagttcttttctccccatgactatataaaacagggattgcaaactccaagtctttagagtcaagagggtaactcaagagtgacactggcctggctgagagggtcagaaactttgggtggggtggtgactggaccagagagtactcacctggtataagaaattcaaaacttaattaaaaatcaaacaaacattttgttggcacgycaaatatttgcaacagccttcttcagcctccacgtttccactttgtgacttctgttaaggaatacggctccttgcctccctg

SEQ ID NO: 501314 - DNA, 567 bp, Homo sapiens
gtcctgccctggcatcctctcctagcggcccctctgctcaaaccccaaggacggggatctcactacccmccttggggcagccttcaaacagctgagaccatgagaaggtttattcaagccaggtcagacctgcctccttgaagcccaccccacccccaaaattccaaatctggcttcagcacttcacacgccagctccccggcactgggctggctccacagtggtctgcgcgcagcctgcattcccaccaagctgcactcccagggctgagctcagcaccctccactatggagttccttcctcttcagaatggtccctctccatgcccacgttggaaacacaagggctggagccccagcggggcctgcccggcatcttcttgagcattctgctgaactgctgagcaagcctagctgccagtcctcaagggcctactctacaccctgaccctgcggcttggaacttccatctctcatctcactgatcctcaagatgccttaggtagcatttagtacccccgctttaccgacaggcaaactgaggctctgaagaagaaggtgatctgct

SEQ ID NO: 501315 - DNA, 567 bp, Homo sapiens
gtcctgccctggcatcctctcctagcggcccctctgctcaaaccccaaggacggggatctcactacccaccttggggcagccttcaaacagctgagaccatgagaaggtttattcaagccaggtcagacctgcctccttgaagcccaccccacccccaaaattccaaatctggcttcagcacttcacacgccagctccccggcactgggctggctccacagtggtctgcgcgcagcctgcattcccaccaagctgcactcccagggctgagctcagcaccctccactatggagttccttcctcttcagaatggtccctctccatgcccacgttggaaacacaagggctggagccccagcggggcctgcccggcatcttcttgagcattctgctsaactgctgagcaagcctagctgccagtcctcaagggcctactctacaccctgaccctgcggcttggaacttccatctctcatctcactgatcctcaagatgccttaggtagcatttagtacccccgctttaccgacaggcaaactgaggctctgaagaagaaggtgatctgct

SEQ ID NO: 501316 - DNA, 588 bp, Homo sapiens
ctctgctgggaggccacttcctcccccagtgctggattccacccccagctcaccctcaaacatggccccctctctcctcctgcttgcccctctctgctccctggaggctgttctgtcctcccctcttgaaaagcaatgccagcttcctgggatcttctgccaactccagctaccatgccctttgctcctgtcagctcagctcctcaagggaattgtctaccctcggtgtcctgcttcccctccctcaccctcctcaccctgctccaagctggcatctgcccctccactgcacagaagggctcccccaccacctgcctttacagggaggaagcagcaacatggaggaaccgaactataggggctacaaggattgctcagctctgatccccgaaggccaaaaggcatctttggccacggggctccgggcaggtgggaaggcagggaagggggcgggaggctctgggrtggtgcaaagcattgtggctggaggcctccaagccaaggaagggccacagggagccctgaggtgggctggttcctgtccagccggctccctgggcagctccccaaatgggtaaaactgtgcag

SEQ ID NO: 501317 - DNA, 647 bp, Homo sapiens
tgtctttgccgtactcaagagttgagttcggctctttactgagatctctcttccctactgcagtagcttgaataaaatctatcttaccgtttacaaatatttatttattttttgagacagggtcttgctctgttgcccaggctggaacgcaggggtacggtcatggctcactgcagcctcaacctcccaggctcaagtgatcaccccatctcagcctcctgagtagctgagacaacagacytgccaccatgcctggctatttttttttttatttttgtagagacaaaatcttgctatgttatcagggctggtctcgaactcttgggctcaagggatcctcctgccctagcctcccaaagtgctggaattacaggcatgagccactgtgcctgggctgtatttccatttttacaagtgtccagtgcatactttttcttttacagtaggaactggggtcatcctgcagaaactgaagccacagcagccattttggagacacagaggaagtgaatccactgccagagtcactgtgggaggcagagggaacacaggggaaatactctagcttctccctccctcccagtttctgtcctccagtctcctgtcagtatctcccattggcagaacctggtttcaaccttcatatc

SEQ ID NO: 501318 - DNA, 647 bp, Homo sapiens
tgtctttgccgtactcaagagttgagttcggctctttactgagatctctcttccctactgcagtagcttgaataaaatctatcttaccgtttacaaatatttatttattttttgagacagggtcttgctctgttgcccaggctggaacgcaggggtacggtcatggctcactgcagcctcaacctcccaggctcaagtgatcaccccatctcagcctcctgagtagctgagacaacagacttgccaccatgcctggctatttttttttttatttttgtagagacaaaatcttgctatgttatcagggctggtctcgaactcttgggctcaagggatcctcctgycctagcctcccaaagtgctggaattacaggcatgagccactgtgcctgggctgtatttccatttttacaagtgtccagtgcatactttttcttttacagtaggaactggggtcatcctgcagaaactgaagccacagcagccattttggagacacagaggaagtgaatccactgccagagtcactgtgggaggcagagggaacacaggggaaatactctagcttctccctccctcccagtttctgtcctccagtctcctgtcagtatctcccattggcagaacctggtttcaaccttcatatc

SEQ ID NO: 501319 - DNA, 581 bp, Homo sapiens
ctcactttctttttatataaatcaggcttaaaaacatttaaatggacatggaaaggatccacgagaactactgaatttataaaaaaaaaaaaagatttggtgaggcttctgagaaagcagaaaggcattgatctgaggcatgggtagagattggtgactttggataggagacacactttctcttgtgaataggagagaaggtaagaataggtgctaaatacaggtgtgtgtgtcctcaaaatgggtggaatttctgtattctgagccccccactgatttctcccttaaatagaaagtgaggtcgtctgctgagaatgagagggtaacaggagtggaacaaggttgagaagggagttttgaagttgaccaataaaatgtagtgttagtgcaggttgtgttgaggcttgtttggtgctaaagaccatgaattaacarcgatacctatctgtcttcttatagtgctatctagtgcctttttgaagcagggtattttagggcagtgctactcaaggcatgagctgcgaactattagggtctgaaacaagataaggacattgccacagaatgttgaccagtgtact

SEQ ID NO: 501320 - DNA, 636 bp, Homo sapiens
tgtgccaggccatgtcactgcctccctttgtcttgatctcctcacagttgcccacctcatggagtggcagcgaagactcaaggggttgatgttggctgggcacagtggctcgcacctgtaatcccaacattttgggaggccaaggtgggaggactgcttgagcccaggagttggagwccagcctaggcaacataacgagactcctgtctttacaaaaaattagctgggcatagtggtgggtgcctgtggtcccagctactcaggaggctgaggtgagaggattgcttgagctggggagttcaaggctgcagtgagccatgattatgctctgcactccagcctggacgacagagtgataccctatctcaaaaaagatgaggggagttgatgtccgtaaagcactcagagctaaacctgcacataggacaggctcgagacactggagctgttggtattattttgaatggcaattaggtgaggtgagggttaccaacatttctttctaccttttaacccagctatttgatttctaggaattcatcctaaatatcatagaagcattcacacaaaatattgcacacacaaagttattcgcagcagtgctgtgtgtaaaagatgacccaaaatacccaatgc

SEQ ID NO: 501321 - DNA, 636 bp, Homo sapiens
tgtgccaggccatgtcactgcctccctttgtcttgatctcctcacagttgcccacctcatggagtggcagcgaagactcaaggggttgatgttggctgggcacagtggctcgcacctgtaatcccaacattttgggaggccaaggtgggaggactgcttgagcccaggagttggagtccagcctaggcaacataacgagactcctgtctttacaaaaaattagctgggcatagtggtgggtgcctgtggtcccagctactcaggaggctgaggtgagaggattgcttgagctggggagttcaaggctgcagtgagccatgattatgctctgcactccagcctggacgacagagtgataccctatctcaaaaaagatgaggggagttgatgtccgtaaagcactcagagctaaacctgcacataggacaggctcgagacactggagctgytggtattattttgaatggcaattaggtgaggtgagggttaccaacatttctttctaccttttaacccagctatttgatttctaggaattcatcctaaatatcatagaagcattcacacaaaatattgcacacacaaagttattcgcagcagtgctgtgtgtaaaagatgacccaaaatacccaatgc

SEQ ID NO: 501322 - DNA, 554 bp, Homo sapiens
agctgccagtacccagggcttcaatgggtcaacggggaaaagaaattattctgcatcccctggaggcatgccacaaggcatggtcccagccaggacggagataacaccatcttcaaggtaagccccggggaggaggttggctggacctccagggcaccctgtccccagaagaggagcgcacataacgcacacaggcagctcctcgaggctggccacccgcccagctaccatgctgctgctgatgccgggcccggactaaggggatgcagacgtagacacagggtacacctttttcctttttttttttttttaagacagagtctcgctctgtagcccaggctggagtgcagtgtgcgcacaatctcagctcactgcaacctctgccwcctgggttcaagcaattctcctgcctcagcctcccgagtagctaggattacaggcacctgccaccatgcccggcctagggcacatcttttctaacctgcaccctagagcatcgtggggactgagggtccccagaaggccttcccataactcgtcctactcaccctttg

SEQ ID NO: 501323 - DNA, 554 bp, Homo sapiens
agctgccagtacccagggcttcaatgggtcaacggggaaaagaaattattctgcatcccctggaggcatgccacaaggcatggtcccagccaggacggagataacaccatcttcaaggtaagccccggggaggaggttggctggacctccagggcaccctgtccccagaagaggagcgcacataacgcacacaggcagctcctcgaggctggccacccgcccagctaccatgctgctgctgatgccgggcccggactaaggggatgcagacgtagacacagggtacacctttttcctttttttttttttttaagacagagtctcgctctgtagcccaggctggagtgcagtgtgcgcacaatctcagctcactgcaacctctgccacctgggttcaagcaattctcctgcctcagcctccygagtagctaggattacaggcacctgccaccatgcccggcctagggcacatcttttctaacctgcaccctagagcatcgtggggactgagggtccccagaaggccttcccataactcgtcctactcaccctttg

SEQ ID NO: 501324 - DNA, 554 bp, Homo sapiens
agctgccagtacccagggcttcaatgggtcaacggggaaaagaaattattctgcatcccctggaggcatgccacaaggcatggtcccagccaggacggagataacaccatcttcaaggtaagccccggggaggaggttggctggacctccagggcaccctgtccccagaagaggagcgcacataacgcacacaggcagctcctcgaggctggccacccgcccagctaccatgctgctgctgatgccgggcccggactaaggggatgcagacgtagacacagggtacacctttttcctttttttttttttttaagacagagtctcgctctgtagcccaggctggagtgcagtgtgcgcacaatctcagctcactgcaacctctgccacctgggttcaagcaattctcctgcctcagcctcccgagtagctrggattacaggcacctgccaccatgcccggcctagggcacatcttttctaacctgcaccctagagcatcgtggggactgagggtccccagaaggccttcccataactcgtcctactcaccctttg

SEQ ID NO: 501325 - DNA, 554 bp, Homo sapiens
agctgccagtacccagggcttcaatgggtcaacggggaaaagaaattattctgcatcccctggaggcatgccacaaggcatggtcccagccaggacggagataacaccatcttcaaggtaagccccggggaggaggttggctggacctccagggcaccctgtccccagaagaggagcgcacataacgcacacaggcagctcctcgaggctggccacccgcccagctaccatgctgctgctgatgccgggcccggactaaggggatgcagacgtagacacagggtacacctttttcctttttttttttttttaagacagagtctcgctctgtagcccaggctggagtgcagtgtgcgcacaatctcagctcactgcaacctctgccacctgggttcaagcaattctcctgcctcagcctcccgagtagctaggattacaggcacctgccaccatgccyggcctagggcacatcttttctaacctgcaccctagagcatcgtggggactgagggtccccagaaggccttcccataactcgtcctactcaccctttg

SEQ ID NO: 501326 - DNA, 573 bp, Homo sapiens
caaatctcatttcctcgtctctaaaagggggatgatgttaccaagccggcagcattgatatggggctcccgggatagaggctatgcaggggctcagcttggctcagatcctgacttccctcaactgaaagaacctgagccaagaatcatctggggccagagacatggcccaggagaaaggaaggacagagagcagcactccagtgtttccaggatctgggatcccttggcctcccagtgccatcctgggggtggaagggcaagtagaggggaagtgaagccacacccggcccttgtgtgagcactcccatttccccttgatgggccaggaggcggtggggacagggaggtctgtccrggccccccactccccacagtgagatggccccttcccccatttcccctggctggaatatcacagactgagggtgtggtaggaggcaccctcccctgactcgagtagaagctacgctgtgtgagcgagtgtagagtggggtggctggggtggggagcaggggggaggagggaagccgtgtcaccaaagggaactgaaagaaacccagaggcccactgg

SEQ ID NO: 501327 - DNA, 645 bp, Homo sapiens
tgtgcttttcttctttgttccttttgtacttattgtaataaatatttggcaagtctgaatgctgtggcatttctgaaaaagcatttcttttaaaatcactgttttgttttaggcactgtgcatccccacctttcagctcctagaacagcagaatggtctccagaatcaccctgacactgtagatgacctgttccggctagccaccaggtaaatccttctgaagagcccatttcttaattgctcatcctatcactgcttagtcttgccatctgacccttggttgttttattcttgtaaaatgaagtcactggagtaagtagattaatgattcataacccaraggtaaattgcaagctgatatatccccagcagtgacgcagagtattgcgggaagcaagggataaaggagctgagttcctgccaggaaggagggctcacacacaagacaatgcagtgtgcctggcaaaacacttgactagatcatctctacagtcctctgtaggttttaactgttcgtgctgttgcgatttcatgtttcacctcaaccttctctttgagaagcttagcatcctttagatataatcagtttcggaataaagaatgtttgggattttaagatgccttagcagttatctcatactgtat

SEQ ID NO: 501328 - DNA, 645 bp, Homo sapiens
tgtgcttttcttctttgttccttttgtacttattgtaataaatatttggcaagtctgaatgctgtggcatttctgaaaaagcatttcttttaaaatcactgttttgttttaggcactgtgcatccccacctttcagctcctagaacagcagaatggtctccagaatcaccctgacactgtagatgacctgttccggctagccaccaggtaaatccttctgaagagcccatttcttaattgctcatcctatcactgcttagtcttgccatctgacccttggttgttttattcttgtaaaatgaagtcactggagtaagtagattaatgattcataacccaaaggtaaattgcaagctgatatatccccagcagtgacgcagagtattgcgggaagcaagggataaaggagctgagttcctgccaggaaggagggctcacacacaagacaatgcagtgtgcctggcaaaacacttgactagatcatctctacagtcctctgtaggttttaactgttcrtgctgttgcgatttcatgtttcacctcaaccttctctttgagaagcttagcatcctttagatataatcagtttcggaataaagaatgtttgggattttaagatgccttagcagttatctcatactgtat

SEQ ID NO: 501329 - DNA, 564 bp, Homo sapiens
tgccagtggtgctgtcacgtcagggctgctctccccacccaggtctcagaggggctgtggcctggccggccctgttctgcaggccgagaggtggatccgtgccgggcagcaggttaccgtgccaggcgtgaggccaatgcccggtgtggggtgctgaagtcctccccattcagtcgctgccatgctgtggtgccaccggagcccttctttgccgcctgtgtgtatgacctgtgtgcctgtggccctggctcctccgctgatgcctgcctctgtgatgccctggaagcctacgccagtcactgtcgccaggcaggagtgacacctacctggcgaggccccacgctgtgtggtgagggggtgatgcccgctgcaggttgggggaggctcagcacaragaagaagggcagcccggagggctcagggcaggaccaggccgggtatggcgagtctcgcaggggtacgcacagcaactggggcagtttcaggtgccttggtaaccccgcctcccactccccctgcagtggtaggctgccccctggagcgtggcttcgtgtttgatgagtg

SEQ ID NO: 501330 - DNA, 587 bp, Homo sapiens
acttgggttccaggtgccactgggttatgaaataaaactcctacagctagctagttgtctgcccaaacagcctcccagttttgtgcttgaaacccagggcccttgtggtgtaggtacccgagggaatctcctgatctgtgggttgcaaagaccaagggaaaagtgtagtatctgggccagatagcactgtccctcacggcagggtccctcaaggcttcctttggctaggggaaggattttctggaccccttgagcttcccaggtgaagcaacaccccaccctgcttctgctcatcctccgtaggctgcacccactgtctaaccagtcccaatgagatgagcagggtacctcaattggaaatgcagaaatcacctgccttgtgcattagtctccccrggagctgcagactggatcttttcctatttggccatcttgcctcgagccctatcctgatatttttatttgggtctgagtatgatgtttctggtagtgtttaaacttttagttcttgctcttcatttttaataaacagctttttatcacactcattttcttttcccatttgctgttataaaatatacaagtat

SEQ ID NO: 501331 - DNA, 539 bp, Homo sapiens
ggctgcagtgaaccatgattatatcactgtgctctagcctgggtgacagagtgagccttgtctcaaaaaataaaaattacacttaaaaaaggtttgtattaggaatggatagagtatgaatctgacacccacaaagaaatgcagaacttcagccaacaccacatatctcttcctgagatttaaggmtctgttgaactaggcctttgacattttgaagcaaatgtataaagtccatcacatactagtttgacactttggaaacaaatgtacaaggtttattaaataatcttcctactgaccataccctaaatcaatatactaacatatttatttctatcaaaaatcattcctctttgatcttgtgtgggacattaggttttttgttgttgttttgttttggagttttattcagtcatgacatgatctatcctgaggagtagatacagtaaaaacataacccataatgctatcattttctatgagctaataataagaacgtgtgagttggtatcattaataactactgtcatggctgtatc

SEQ ID NO: 501332 - DNA, 504 bp, Homo sapiens
ctaccttctagaggtcaccagcattccgtggcatgtggctcccttcagccctcaaagccagcaatggcaggtcaaatccttctcacatcaaacaaccctggcctctttttctgcccccctcctccacctttaagaacctttgtgattacattgaatgcacctgtataatccaaactactatccctaatttaagaccagctgcctagtaaccttatttccatctacaaccttagttccgttttgctatgtaaggtaacataatcacaggttccagggattaggatatgaacatcttggggaagggaaggtattgttctgtctaccacatctcagttctgtttaaagcacctgctttggaatttacatatacactactaaatatattgaaaagacaaacgttgargtaacattataattcactgagacctagcgttcagcaagagacctgattcaaattttagcttcggtatttaatgtctactgggtggagcatatttttgaatt

SEQ ID NO: 501333 - DNA, 504 bp, Homo sapiens
ctaccttctagaggtcaccagcattccgtggcatgtggctcccttcagccctcaaagccagcaatggcaggtcaaatccttctcacatcaaacaaccctggcctctttttctgcccccctcctccacctttaagaacctttgtgattacattgaatgcacctgtataatccaaactactatccctaatttaagaccagctgcctagtaaccttatttccatctacaaccttagttccgttttgctatgtaaggtaacataatcacaggttccagggattaggatatgaacatcttggggaagggaaggtattgttctgtctaccacatctcagttctgtttaaagcacctgctttggaatttacatatacactactaaatatattgaaaagacaaacgttgaggtaacattataattcactgagacctagcgttcagcaagagacctgattcaaattttagcttcggtatttaatgtctactggrtggagcatatttttgaatt

SEQ ID NO: 501334 - DNA, 602 bp, Homo sapiens
catataactatttaaaaaaaacttgaatacaaccattagcagatacttggcttgtgtaaatcagaacatatkttttagctttatggtaataggctgtgagctttttgtcacttggtctcttaagacttcccaaaatgtgttaatgttccaggtgtccacttaattcaggaccaatataaagattttttctatctaaaattccaagatttaggctaactttattgaacgaaacaagtttcttggacaaaagtaatgtagctctgcataatgttacaataagcattctacataattacttaaaatttaactatctagtgtgaatccaattaatggatttttcacaatgttctttattatttgaatagatcagttttcattacaaataattcattatcagtctgttgcaaatgtttgcacttttgaccagaaatatgtcctcattttacctaacaattgaaattaatgatagaaacatttgatgtttttccccagtgtattcacataatataaaaaagtgttttacctgctttttgtatgcatgttggcatatttcagtttgattgtctttaaccatcatttcccaaagctatttgactattgga

SEQ ID NO: 501335 - DNA, 566 bp, Homo sapiens
tatgaccaactgaactttttctcttgctacaatttaaaagtatttccttttatttggtctcctgtggaagtaaagaacatctgttctgcatcttccctataataacctttcaaatacttgaagacagttaaatcatcccttcgtcttcccttctccaagttaaacacttctgatcccactgagcactctcttaggagctagtccccattccttacatcacttctgctgatcttcgctggaccttctccagagtctccatacccttgccaaactcaaacaccaaaattgaacacagaaacaatgccaaataaagcacagagattacttttcacttctgtatccstctcttgataaaacattccaagtgaagtggtgtgcttgccctttttttccaaaaatatagtgctctttctacgtcttgctttgtactcatgtatgctatcatctgtgatacttttgtccaaggctcatatcagatttcaggtgcttcaaataattcctgtcaataaggatcaaatttggaagtgcactgcttcagagcatttttctaccttctgtaaaagtta

SEQ ID NO: 501336 - DNA, 596 bp, Homo sapiens
tggtaaatagagctgcgatttgaacccaggcattgtgagttcctgaggttcatatgtaactcctttcctcatcgcctcactatgaagtggctctagttatcctattaggcagctcacacctattatatagcttattcgccaaaagccctgatgaccacatcttcagttgaatccaaaatataagtccttaggctaccatttagagtggttttccatatgtgcttcataagcatgttgcggcatgagttattttgtaaaagttaggtgcaatttttcttttacaagacactcttagcatcggatgctttgtcaccttctcccacttgcttcagcttagtgggaatctaggtaatcaatcaaggagatggttaatgggaaaagwtgtgactgtttcttctacacacacacatgcacacacacacacacacacacactatgtaatatgtgtgcctgccatcactaccaacctaaaataagtgaaattgattttttactatttcctcttccaagactgaacttaataggcattttaatctgatttcgcacaaataaaagtgttaaaaagtgctgaaagagttgaacgacttaatttaatt

SEQ ID NO: 501337 - DNA, 613 bp, Homo sapiens
caccagctcagattctgtgcccaccgcaccacccacgacgatggaaagctccgcgttcagctctgcgaagggcggcttgcccgggacggcctcgggcaccagaccagcccctgtgtccttcatctcctccagccccagcgggtcaggcaagggggtcaccaccttgcgcccaccactgccgccacggcgcggggctgccctcttctcgcgggcggtggtggggggggggggtgccgccgggtttgcaggtccttttccttctgggggccgagacgacagcggtgatctttgaggtatttgtggcggaaaaagcccttggcacagccagcatagcggaacttgtagtagcccgtgtgggcgcgcaggtgctcggcgaggtgggcacggcggctgaaggacctgctgcacagggcgcatytgtggagcttcatgccggagtgggagaggacatgggccttcagcttgtccggccggttgaacaacttaccgcagcttgtgtgcgtcgataaagggcatttatatttcttgaagggctggtggatcaacatgtctctcttacagtttgtccttgaggttgaatgcggactcgcacaccgagcatttgtagggcttc

SEQ ID NO: 501338 - DNA, 626 bp, Homo sapiens
ccccgtctaccctctcttcttctgagttcttatatcatgtctggttttaaaacatttgctctttgtgaagatttagtttgcctttaaataatctgtggtcaggctttacattttgaataatgtttttttttcctcccttactttgctctgaataaaaatgaattcagatactcaaattatatttatgatgttatgagggaagaggatactaggatcatataaattcttccaaatcaataactgaataattttcaaagagtgatcttttataaaaccatgtctgaatgagtatatatttctgtatatcaatatgagaaaatctggtttgggtaagcatrtctctcatgccaatatttatagtcttattttgggtggttgtatgtttttcaatggaaggtttaggattttaaaaacagagcctcttaaaattaaaacatatttaataagcacaataaccatcataatagtatacatagagattgtaggggaagggtataaagggggaaaatgaggcaaaggaaatcagtaactgaaaataagatctagctctccaagtgctcagttgtttcagaaactcctgccaactggtagacacagcctggctttgaaactgggtgcattgccag

SEQ ID NO: 501339 - DNA, 638 bp, Homo sapiens
tgtctcaaaaaaaaaaaaagaaaaaaattcacaaaaagggtaacaatgataattgtaattatttgttgtgctcttaatcaaatgcactatacccctggacctatgcatttgacatayattttcccatgttatctttaccactatagtgtaagtacattattagcccctcagtttacagatgaagaaactgaggctcagaaaatacaagtaaatggcccaagtcaatgggccagctttactgggaagtgagtctgctatttgaacccaggctgtttttattctacagtggagggactcagtttcagaagacattcttggatgcaattgaacacacatgtcacacccttttagactacaagactcagggttggacagaatgtaaatgaaaacaataaacataaaaggctacattccatggcctttacgactaatgcacctctagaaatttctgcttttgaatacttgagtaacctatttgcaagctgttgggaaatttaaatctgcatgaagtttgcacacaccctctaaattatcacactaaatgctttttgttcccctattacctccgaattctctaccacttcttttgtgttcctgatgtttaaggttacttttaaaaatgaatatgaaataagctg

SEQ ID NO: 501340 - DNA, 560 bp, Homo sapiens
tgtctgggatatcttgggcaggttacttctgagctgagagcctggaataaaaatagtagtaaagaataaagaaattgaacccagaaaataccgattataaaatcagccttgcagtattgtgaaagttaaacaaaacacatatttaaatgtgcctgacctgtaactctttattaacaaatgataatattaataattgttatttgtcttgtattatttataaatcagttgataattatktatatggaagcaagtcgatagtaagtttcattaggcagaatatcgggaaagtgtgacaagtgttagcaaatatccagctaaagagattcagattaggaaggaaattggctatagcagaggataaacccggttattggagatagactagaaggctggggcatgattgagaagagaagataattaaggtaccaattactgacacctaggagtatgtgtatcagtcagctatagccacaataatgctgagaaccaactccaaactacaatgagtatttattctcacactcattttgtctgatctaaattggctgaagctatagctc

SEQ ID NO: 501341 - DNA, 560 bp, Homo sapiens
tgtctgggatatcttgggcaggttacttctgagctgagagcctggaataaaaatagtagtaaagaataaagaaattgaacccagaaaataccgattataaaatcagccttgcagtattgtgaaagttaaacaaaacacatatttaaatgtgcctgacctgtaactctttattaacaaatgataatattaataattgttatttgtcttgtattatttataaatcagttgataattatttatatggaagcaagtcgatagtaagtttcattaggcagaatatcrggaaagtgtgacaagtgttagcaaatatccagctaaagagattcagattaggaaggaaattggctatagcagaggataaacccggttattggagatagactagaaggctggggcatgattgagaagagaagataattaaggtaccaattactgacacctaggagtatgtgtatcagtcagctatagccacaataatgctgagaaccaactccaaactacaatgagtatttattctcacactcattttgtctgatctaaattggctgaagctatagctc

SEQ ID NO: 501342 - DNA, 317 bp, Homo sapiens
tcatctaacctactctatatttacttatagattttgtttataacttcctctgctagaatgtaaggccaagattttttcgttaatgttgtgtgtttacactactgactgacacaggtaggcgcaggataaatatttgctgagtaaataaatgaatggacataaaaatggtctattctgcagaagctgtaagtaatttcagaaggacttggagtgtaatgggacttggttaaaagtggtttgggggaragactaataaccctgtgataaataggttgaactgctgcagactgcaatacaacagttcagacactacgtaa

SEQ ID NO: 501343 - DNA, 517 bp, Homo sapiens
gcttaactgttgaactttaagagctattttgattcttatattatctccagggttagtctagatgaattctgttataagccttgacctttaaaatgatgaatttgaatattagagatcaatatttagatttacataatataatcagcctcctgaaatcatagtgctttcaatcatgtttctttctagtacattccatacatctggaaccaatctcttacatcctctccaggttcccaagatgctatrtagaataacaactaacatttagtgagaacaatgtgtgtcaggcatacaggtaatattttatccatatgatttaatttcattttctttatgaggaaattactattattatctttattatatcaagtgattagatagcaagaaattagggatcatgctcaagctcacagagatagtatgtgatagagtgtgcacctggtaagcagattgattccagagccttttagatataactcatattttcctttctttcccccagaggtgtctgccagca

SEQ ID NO: 501344 - DNA, 507 bp, Homo sapiens
ataatttacagagttagaaaatagctcaaaacacacaaaggctctatagaatcagaaaaccaaacgaagccggtagacattgaagacttccaatatttttggtccatttcaaaatcttgtgcaactttttatatgtatttttaaaccaaagggcaataagtgtcttctaggagcaacaaagttaagatttgtattatccagtaatatgataatatagaaatattgacattcagagccttcccaaattctttgtcacaattttatgccctccaaggaaaactcagtgtcaagtgrttattgagggtagcctgttttgttaatcaggagaatgttcaaagagacaaatcgcaagaatgaatttagagcaacgtaaattataaagattctgcaaggaggcacagaggagaaagagaagccaaggaaatacaggctaaggattttgagagagagtttcagaaggagaaaaagagtagagtagtgacattagggacagctcctgtggtgtga

SEQ ID NO: 501345 - DNA, 579 bp, Homo sapiens
ctcctcgaaagagtaaagctttaagtgtagtgtgtgctcaagggctacgtttcagttcgatggataccaggaagacacctgttccctgcgtcctctccacgccccaggccgggcgcccacaccctgytcctcctgacgccgcacagccacgcacccaggtaccctctccgccaccccttctcctcgcctgcaggcggtgtccacaccgccctctccgctcctgcagaccgggtcctggagggcggccgggcggtccacgggccggtgtcgcgccgccagagagaacgcggcaactcgcttcagccgactctggactcctgacctggcgcgaccccggaagtgggcgggcgcgcgacctcgaagccagcaccgacgcggcgcaccgcagccaatcgcacgtcccaggtcgcagcgtcctggcgaggctggccaatgggcacggggcctgatgccgcttccggcccaccctcttgcccggtccccgggagggccggtccgctcctcccggacgccgaggacctaccaccgcgacttcgccccgcccggcgcgggcccaggtgagtgcagagtggcgcccca

SEQ ID NO: 501346 - DNA, 509 bp, Homo sapiens
tccacttcttgtctttcgtgtaggtggcgggaaagtcgatggcrtacgtccacccctgaaacaccaaggaaggggctctcaggctctgcggggaaggcatttgaagagctggggaaggtggggagggagggtgtggcctgaaacacccgagctcaggcaccacagggtgcaggggacagaagcagggacaggcgggaggcaccccctccccacagggcagtcatggagggtcccaagttcacctacccctttctcagtgggttcacctccaaaattctcatccacgtaccagtcagactcccactcccagtgcggcgagggcagtgccaccctgtccagcggccggtgctggagcccactcacgtcactccacccccagcggtcactcagcaggagcttctcacagaagccgcccatgggattccagcgctgagggccggggacacagaggcggccttggacccaagcctgctgggcgggaacccaggcgggccaggcatctccaggac

SEQ ID NO: 501347 - DNA, 560 bp, Homo sapiens
tgaaattatgtctacaaaccaacaaagtttataaaaattaatattcagctctcatgagcactattagctttctccatcacaccrctggaaaggtactttcctaagtattaatttggggttgagcagagtgttagagaactagaaacatgtgcataataaggatgaggagaggcaatagagattgttgttgagggagctgttgaaatgatagaagaaagtatgtggtgtgtgtctgcatatgtgtgtgtagcagacaattcctcacaatgttatagactaacacagtcactaattagcataatgtggctgagaatttaaaaaaaaacttgtggcaagattttaataccaagatgacaatacaattatttcattatcaacactcactgaatcttatgtactaggtaagcactggtgataaaagcatgacaccagacttaggtaccagttgtgtccttattttacatagcaaacatagccacaggataatatacaacctcttgaagatcaggctgttgtaaactgggttaatagatctgggtttcaacacatagagtcaatta

SEQ ID NO: 501348 - DNA, 422 bp, Homo sapiens
aaatgtattagaactgctcataactgtattttatgtaaatttattgtgattatgtagattgtgctrggggttctgatgaggaggagaaagaatactttctcttcatactttaaatgcttgaagaaagttcctaagactaggaaaagaaatcagtaagttttattagcaattaccatttagttacctctccctagaaatacaccccccaccagatttttgattggtttgattttttgctaatgagttctaagagtttcttatatttttttattattaacaccttagcctaatgtgtgtaacaactattaacataaaataagagtttaaaaacattatttcctattcacttattttcctaataatagtattgtttatatttcccctgcccctacaaaatggatgaaggaaccctaatagggtta

SEQ ID NO: 501349 - DNA, 597 bp, Homo sapiens
ctgcggttctgctacaggtggaggcactgctccatgggttttctcattcaaagaccaggacgaaagaacagccaccatctgggacttgtcataatagcatgagagcaggatgcctcacacagttacatttcataattctgtcacatctactcacatttacctcaggaagtcacatgatcaagcctagggctgaaagtgagaaagtagagggagatactgaaagtgacatggcaaggacaaagagatataatccccttatagggaagggaacaaaacaatatttcaatctacctcattcagccattggtttctaaatttctttctgtagacctcatactacagtggaaagagggtacatcagaagtcagatggatacatctgtctcagctcttgtccaattcaatctcactgaggtttggtttcttcatctataaaatgaagggatagaactaaatcatctaaaaattacccatccaaataggccatccaagttttgtgtgacactttcttattctgtcatgattgggaaggaaatgcaaaatgcaacaagaaaaactagtttccatttataaggrctggttcaaacacatgatgcca

SEQ ID NO: 501350 - DNA, 564 bp, Homo sapiens
cagatattggggactgctttgtgggtgaagcccagaaatagtaaatgtcttgcaatatactggacagttctgcacaaagaactatctcacccaaaatgccaatagcacatccattaagaaacaccatagtttctcaataagtgtctgcttaggaatgaataaatgaacataaatgaataagtaaaataaagtaaaaatgaaagaatacattaatgaataactgaaggggaaaaagcagcctgaccatttagagatgaaagtgtaccctaaggagagacaccgatgggaaattcatgacttgacaacttaaaattttgtctttgttatwttcttagcccttttcccctagagctgtgactgcaaggtgcaatctgaattgaaagaactaattaaagtgaggctgggcatggtggctcatgcctgtaatcccagcacttggggagaccaaggtgggcaaatcacttgaggtcaggagttcgagaccagcctggccaacatggtgcaactctgtctgtactaaaaatacacaaatcagctaggcatggttgtggacacctgtaatcc

SEQ ID NO: 501351 - DNA, 417 bp, Homo sapiens
gggtgccagacactgagccctggccctgccacctgtccttgctgggcaataagcaaatgtatgaaaatacttcaatgacttctttgaaagagttaagcttggcaataaatttatcttctagattttccaaattattaatatatagttgctcataatagcttctaataatcctttgtaatgtgattcttccagtttcattctttttgctcaggatagcattggctattctggctctttgtggttccatacaagttttargattgttttttctctttctgtgaagaatgtcagtggtatttgataaggattgcattgaatctgtaaattgctttgtgtagtgtggtaattttaacaatattgactcttccaatccatgaacatggaatatgttttcattttttctgatgtcctcttcaa

SEQ ID NO: 501352 - DNA, 474 bp, Homo sapiens
acagggctgcctgcaaacatctgtgtccgtacctagacctccccgggaaagggcaagagtgaaggaatgacggcctggtgttcctgccccaaatcagcttttcccaaagggctgcttaagactctagtccctagatacattctacattaaaacctaccactttcccgtgaatgtgggaagtactgcattcacactctccttcttggacactcacaattcatattagcataacaaagatcctgagatgttctgcagtaaagaaatctctttgacttgcttaactctgagttttctaaatgtattttcacataaaataaatttaggaagaagttgggaatgctgtactagcttatattccaactctggccaatgcygtgcaaacagttctgcatgaagtccacagacctctcaggccctcttgaaagcttaatgcatgaagctgtcttaccagaattatattaattctcctggagt

SEQ ID NO: 501353 - DNA, 334 bp, Homo sapiens
tttgaatctacacacaacacagattacttaaagctctccaacccatagcaaacatgctatcaggtaatttaacggattgaagaaattgctaacttgttaaatgagagaaaaaatctccgtcctgcattctgccttatcaactgttccaaacatattcatttacagtgacctttagaaaccaccctaaatcagtagctgtacattttkttaacaatgaattttattatctacctaaggtatacacaagcaaccacattgactgggattgaaagaacacacagcttcagttctagaagagcatcacatattacgtctcaaagcatttgattcatcc

SEQ ID NO: 501354 - DNA, 577 bp, Homo sapiens
ctcagaggccatatgcattattttgtaaaagatagtttcaggcaatgcctggaacatctgttgaatgatcaatctttgcatagtagcaaaaggaaaatacattatttctgtttttatctagaaatttctggaaaacttgcaatgtctttttttaatgttatgcctttgtttcatgtagttttccagacaaaataatgaagacataagcaagccaagasagttatctaagttgaaaagtttggattgttctaattatacctaattagagatcaaaatgaaaagtgcttagggtgaaaccattaatcaaaaagaggtcactgctcactactcaacagaattaaatgtaccaatatgatttccttttctaagtaagcaatgtactagtcaatcattacttacaacgtgacccatttaaataattaaactatatttcaggtcttgtgtgctatttgaagaggaataatgaggtctttaataacaatttcatgcttgaattttcatatctggaggaaagaaagccaatgttctggagtggaggatgaaaatattaaagtgtttttctgatatagaaagaaaa

SEQ ID NO: 501355 - DNA, 484 bp, Homo sapiens
ttttggtttgaattcaggaaagctaggctgccaccactggaacagaaacttcttcttcttctttttttgatagtgaatcataaattrtatttcaaaatgtaaacatcactaaacatgcatacatgttaaaacaataaaatttacagtttcattcattttttttctttttacatagaacatcattacaatatggaatctatgccatacaaaatacaaagttttatccaagcaagacaaggccagactgggaattgtacaactgcaatatttcagtgtagggatccaggaaaaatgaaacatgaccttcggaagcatggtgggtgctagttaaaaaataaataaataaataaataaagttcctacaggaaagaaaaacgagctccagggaaatgatctcggactcttggattctgccttcggctttggcttccagagaagctccaccaatggcttcggatgggaagggggtacctgtgcgggtctg

SEQ ID NO: 501356 - DNA, 484 bp, Homo sapiens
ttttggtttgaattcaggaaagctaggctgccaccactggaacagaaacttcttcttcttctttttttgatagtgaatcataaattayatttcaaaatgtaaacatcactaaacatgcatacatgttaaaacaataaaatttacagtttcattcattttttttctttttacatagaacatcattacaatatggaatctatgccatacaaaatacaaagttttatccaagcaagacaaggccagactgggaattgtacaactgcaatatttcagtgtagggatccaggaaaaatgaaacatgaccttcggaagcatggtgggtgctagttaaaaaataaataaataaataaataaagttcctacaggaaagaaaaacgagctccagggaaatgatctcggactcttggattctgccttcggctttggcttccagagaagctccaccaatggcttcggatgggaagggggtacctgtgcgggtctg

SEQ ID NO: 501357 - DNA, 484 bp, Homo sapiens
ttttggtttgaattcaggaaagctaggctgccaccactggaacagaaacttcttcttcttctttttttgatagtgaatcataaattatatttcaaaatgtaaacatcactaaacatgcatacatgttaaaacaataaaatttacagtttcattcattttttttctttttacrtagaacatcattacaatatggaatctatgccatacaaaatacaaagttttatccaagcaagacaaggccagactgggaattgtacaactgcaatatttcagtgtagggatccaggaaaaatgaaacatgaccttcggaagcatggtgggtgctagttaaaaaataaataaataaataaataaagttcctacaggaaagaaaaacgagctccagggaaatgatctcggactcttggattctgccttcggctttggcttccagagaagctccaccaatggcttcggatgggaagggggtacctgtgcgggtctg

SEQ ID NO: 501358 - DNA, 638 bp, Homo sapiens
tgtgactcagtactattttcataaacctcttaaaccccttactcaaaggctaacagtttaacatcaacccagggacaatttttgagaaaaattaagttttacagccaagataattttaatatctgtcaaattttctgaatttttccagttgtagctaaattatcagtcagactgagggctaaagttagatattaaatcttttatagaataaatgaaaacatttataaagttgtacatctcttattcttaccatgtacttcatatctttcataaaagaaatagagatattgatcagggtatatatatatatttattacataaaacttttatctctgcataattagatgctcaaatttgtctgtgtctgaaaaactatctaggtaccattaaataatttggggtacaaagtttgctattttccacaatatttgtaaattttcctcattctcattgacaaagctgtatggatctttggataagaacttgtctaaatcacaggtacaagttatattgctttatgtagggaaygaactgagagtaggttgcctgatttcaccgaacctatggaaaataagaatatcaatatttatcttataatagcttatgattactgtgaaattaaataatattatgtaaag

SEQ ID NO: 501359 - DNA, 501 bp, Homo sapiens
tggcgagatgctctgtgctccgaatgtccaccaagagtcagcttccggacacttctggaccctcccacactgtcacaggggagggtgtgggggtatgggtgctcgagttatcctcgtgtgaaccagacgccagtgagggatggggacaaccacggtgccctcagcgctggccatgggtgcttcccaccgagggccctgaggacaacatggacattctgctgtcctgggcacctggcacacctgcatgtccttctagagaccaggggtttggctccaccccactagttcaaatgtgaaagcagaaagctctgcatgtctctgcttagaaacttgctgaaagataaaggtcagtgttaagcaccttctctgtgtgagacagaaacaaggaggatccctgccctcagggctgctkgggggaggtcctgttaggaggatgagtgctacagtaactgctgtgttccctgggatgacggctgcagtgggggcgaaggtcagattcat

SEQ ID NO: 501360 - DNA, 538 bp, Homo sapiens
agctgccttgaccaatcagaactaagcaagtttgaatccttcatttggatacacagacctgactgagacctgggtgggagcttttgctataaaaccggaacgttccctttgttctccaggtacatttgtttacaccaaaggctgcatcttcccggtttgcaaactgtgcactggagtctccttcttccaaactccttttcagaggatgtgtttactctgtatttataacttcaggagcgcaatcgcagccacggtttctcttgttagtgctacattactttgattttataatcagccaaaatattgtgataaaaaaatccccttttcataatctgcgaattttagacgtcacgtggtaygactcaaagtcatacccatttcttcccaagaagaaaatttactcaaaatccataaaagatttggctcggttcggctcagttggccacaggcaggtagcctgttggctggaggaacagaaacgaacgacccccactctgagccggcctcagagacttgtggtctagccgaatgctccctg

SEQ ID NO: 501361 - DNA, 250 bp, Homo sapiens
gttactttcttggaaggggcaggatgtcagcatttcacatcctagtcatagcctgttgctggggctaagaggtggaggctccttytttcttctcagcctacattcattggatgaatgatctatcctgggtgtactgaaattaagttaatataaatatgaagcttattctgaaaaattaaaacatatataatatgtcctaaagcaaccattcaaaaacatatagcagaaaattactacaaaaattaaaatg

SEQ ID NO: 501362 - DNA, 642 bp, Homo sapiens
aaacactactggccgagcatgccctacctgactgtgggacaagagtacagcagtgctgaggtgcacttggcagagccctttgaggctgtgaaagcggccaatatttccaagttgcctctgtatagatagatttgttataaaccagctcagtcatctcagtgtcaacaagaagttgtcatcttcttgttgaatcatcaacaccttgatggtcaccttgaatcatcrtcattccttgattttgtggatcatggggttgccatgtctttacctggtctggtgctgaaaaactgtaactgctataaaaatgtgaggctttggaccagagtcttattaaaacaaatgtgagcatagtggtctgcatatggaatatctagggctctaaacagatgaatacttaaaagtataattaatgtcctattgtttttcatttctttaccctgacaggaagatatcagggatttcctgggtcacagatgatataaaacacattttggatgaaagctgcaataaagctactaagtataatttgggatttttttttaagtatgagataacttcatgggggctttatcatgcattagtttgcttatcttctgtcaagaataactggctaaacttaaatagaaatgtgaggttcttcag

SEQ ID NO: 501363 - DNA, 597 bp, Homo sapiens
ttaaaccttttattggacaaatccagttccaactttcaatttaattgaggtaaaaggtaaagtaatagtgggaacttgtaagagattctttctttgtttgcctgtgtcaatatattttctgtttgtgataacacaaaaggaaaaaaataaccataatcatacaatataattatcacttttacattttttccctgtttgcttaaacatatattatacatatgtawtccatgccttttgtattattctggctcccatgaatgatatattataagcattttcattttgctatatagcattttaatcatacataaaattaatttcattaattaaattatgccatacaagattaaattatcacagaatcaaaaaaatcaaaagttgaacagaagcttcaaatataatcactcaaatatcatcattgttaacatttctatttacagttttcagattttatttttcagaatatatatgtgaatatgaacacatttgtaggaatttctgttggtgctgcacaaatataccctagaccctcattagcacatgcccatgatatcttcttgaaagcatcaatgatgctgttcttcaaaacattctttc

SEQ ID NO: 501364 - DNA, 571 bp, Homo sapiens
tttgtacactagaaatagataaataattcagaatgaattagaaggttacatacattttacctaagtagtggaagctcgtaagcatttgattgaatgagttcagatttttctaaaaattaaatagggacatgaatatcaaatctgcttttaagcatttttgcatcatataattttatatttggaagaagcattcaagaaaacaagtccttcctttaatggaagcagaagcaagtactatgatgtatttgccagataatttttcaaacatactgagctcatctcaaaacctattatttttaatagccaaatctaattttgtaggagaacatgtcacaaaaacaggtctttgcaagatgttaacaggtattatataaaattgggccycatggtcaaacttggaaaacgtgatcaattttctttgctgtgggacctttcaagacctttaaatgctaatgagtccccataaaaggcgaatactttctcctggagaaagcattttacagaaatgtccttctaagatgtctagttgggaaaacagtggttcaacggaacactgtctcatttttcattt

SEQ ID NO: 501365 - DNA, 645 bp, Homo sapiens
cctatttgacagtgtctcttattcagttgagggaaacacaacaggcaacatttttttctgaagggtcaaaatctatctgtttcctatttatcccttagtagatccacgccatccaagagaactgtctgtggtaatggaaatgtttgacatctagctgatccagtaaaggtaaccattagtcacacgtggctattgagcacttaaaatgtgattagttggactgagaaactgaattttaaaattttattcaattttaattaatttaaagttaaatagccacctatggctagtggctgtggtttagcacagcctcagattcacactctcccaactctytcgtctactaagggaatttttctgagtggtttaattttttgctagacctttaaatcttaggccaaaatgaaattccagtctgcctgtcattcaaactactgaacaattgcttttattcagagtctttccactgtcagccactgctatttatgtcaattaatagacaaattactattcgggacctcttgtctctgatgatggtcatggtaacactcttcaaattcccagtggttcaaagcaaacattattttttaagtaagaggttttatagtccaaataattacttttcatcaattatgaaagtctagg

SEQ ID NO: 501366 - DNA, 645 bp, Homo sapiens
cctatttgacagtgtctcttattcagttgagggaaacacaacaggcaacatttttttctgaagggtcaaaatctatctgtttcctatttatcccttagtagatccacgccatccaagagaactgtctgtggtaatggaaatgtttgacatctagctgatccagtaaaggtaaccattagtcacacgtggctattgagcacttaaaatgtgattagttggactgagaaactgaattttaaaattttattcaattttaattaatttaaagttaaatagccacctatggctagtggctgtggtttagcacagcctcagattcacactctcccaactctttcgtctactamgggaatttttctgagtggtttaattttttgctagacctttaaatcttaggccaaaatgaaattccagtctgcctgtcattcaaactactgaacaattgcttttattcagagtctttccactgtcagccactgctatttatgtcaattaatagacaaattactattcgggacctcttgtctctgatgatggtcatggtaacactcttcaaattcccagtggttcaaagcaaacattattttttaagtaagaggttttatagtccaaataattacttttcatcaattatgaaagtctagg

SEQ ID NO: 501367 - DNA, 645 bp, Homo sapiens
cctatttgacagtgtctcttattcagttgagggaaacacaacaggcaacatttttttctgaagggtcaaaatctatctgtttcctatttatcccttagtagatccacgccatccaagagaactgtctgtggtaatggaaatgtttgacatctagctgatccagtaaaggtaaccattagtcacacgtggctattgagcacttaaaatgtgattagttggactgagaaactgaattttaaaattttattcaattttaattaatttaaagttaaatagccacctatggctagtggctgtggtttagcacagcctcagattcacactctcccaactctttcgtctactaagggaatttttctgagtggttyaattttttgctagacctttaaatcttaggccaaaatgaaattccagtctgcctgtcattcaaactactgaacaattgcttttattcagagtctttccactgtcagccactgctatttatgtcaattaatagacaaattactattcgggacctcttgtctctgatgatggtcatggtaacactcttcaaattcccagtggttcaaagcaaacattattttttaagtaagaggttttatagtccaaataattacttttcatcaattatgaaagtctagg

SEQ ID NO: 501368 - DNA, 645 bp, Homo sapiens
cctatttgacagtgtctcttattcagttgagggaaacacaacaggcaacatttttttctgaagggtcaaaatctatctgtttcctatttatcccttagtagatccacgccatccaagagaactgtctgtggtaatggaaatgtttgacatctagctgatccagtaaaggtaaccattagtcacacgtggctattgagcacttaaaatgtgattagttggactgagaaactgaattttaaaattttattcaattttaattaatttaaagttaaatagccacctatggctagtggctgtggtttagcacagcctcagattcacactctcccaactctttcgtctactaagggaatttttctgagtggtttaattttttgctagacctttaaatcttaggccaaaatgaaattccagtctgcctgtcattcaaactactgaacaattgcttttattcagagtctttccactgtcagccactgctatttatgtcaattaayagacaaattactattcgggacctcttgtctctgatgatggtcatggtaacactcttcaaattcccagtggttcaaagcaaacattattttttaagtaagaggttttatagtccaaataattacttttcatcaattatgaaagtctagg

SEQ ID NO: 501369 - DNA, 599 bp, Homo sapiens
aacgtgttatcatgtgacgctctgtaaaatagtaaggcacagtaagattttttttcctttcagtaagcttatgctgataaaaaaataattattttaatgatgtatttagaaaaaggattatgtacaacagaaagtcacaagggtaacactaattaaaaggtgtctcaatttattactacgaatatttcacagaacctacatgcatttttacctgatatttgcaaaggccgtttcatattatacatataaccagcaaagaaggaatatagaaaagtgtgggtctggcttttctatcatgaaaagcaaatttaacagtgataaagaaggcaatcaagatacaaatacagaagccaggcatggtggcacacacctgtagtcccagctactcaggaggctgaggcaggaggatcacttgaggccaggagtttaagaccaactgggcaacatagtaagactccatttcaaaaaaaaaagataaagatacaaactgatattacsatcttactcattatatcaacatatttattgagcacctactacatatactgggcactggtgattaaaccaggtattatcaacttcatattaacctaaagggc

SEQ ID NO: 501370 - DNA, 596 bp, Homo sapiens
gcaaataaataatctgtaaaatttattgttttacccaatctgtctttttacacaaaatatgggctttaaactttcttttcacacagcctaacaaaggtatctcgtgataaactgtaaattattctctaatatcacatgctgtaaaagaaaaatggctcaagagaaactgcatcattatggggaaaaaaatgtaatttagtagaaagctattctgattgcaagaaattaaaaattttaagtagctccatgaaaaaaacttaagatagttttacagtgtagcaatactgagacttcaaggctggttttgctgaccaccaaagttaacatgactagaactggatgtttcattcagaaaggtttagggaagtccctctcctgtaaaccaggttcagtagccaacagaggcaaacaagttttctaagtttcaggtacaaatgtacctcaaygctaggtaaacccttcatttatttaaaacctttttaaataacacttcattcaaaaaagggaaacaaagcagtaagctaaaggcgtctctttgtactgtaagtcaaggatcaaaattaaaggctgctgacctagagaatattgaatgtttg

SEQ ID NO: 501371 - DNA, 590 bp, Homo sapiens
gttttctaagtttcaggtacaaatgtacctcaatgctaggtaaacccttcatttatttaaaacctttttaaataacacttcattcaaaaaagggaaacaaagcagtaagctaaaggcgtctctttgtactgtaagtcaaggatcaaaattaaaggctgctgacctagagaatattgaatgtttgagaagaaaccgcaaaaaatgaaaactcttcagcagcaawccccaatcaatcaaactcatacaatccccacctgtattagtggataactactagtgatccagagaaacaaaacaactaaaatgttcaaacccaaatacacaaaatccccaaacattaagcctcaaccacagttcctcttggtataacttacacatagatcctccttaataaaaaataattaatgtataaaagaaagctttatagcacagcttcatcagtaatggtagtcaaaactaaaatttaagtgacaatcagagagaactttagtcaattgtactacatagcacattactttttcttatgcttttccttttaggccatattacaaatggcaaggccttaaaaatagggtctgaataggcttttt

SEQ ID NO: 501372 - DNA, 475 bp, Homo sapiens
aaattcattcatttttgtttgttttaaacttttaaaaatctggagttattaagggctgtttttgggkttttttttttttttatttgtttgtttggttggtttttgttttgcttctggattatataaaatgaatctccctggttttaaagtctaataaccagtgcttttgctttgctgtttttgctttggttatagtggtcctttaaataaagagttagcttctcctttggcctgagattttaagatcttcccaataatctttaactgtagccctcatgtccagatgttttcttgccgtgttaccttaatatgcacatttttgctgcctgttctggaagttcacaatttggaacctggggtacaggaaggggagtgatctttttgttgatattgttatctacatgtaagaatctgtgcgaaagagctttataaattgcagattttatattgagtgggcaaactgtttttaggtaat

SEQ ID NO: 501373 - DNA, 507 bp, Homo sapiens
ctgaccagcaattacatagttgcgagaaccagcagaaagggggtgtaggtgaccctrtgttgttcttgttgtaccccatgccactctcagaggaaagaggatgaatactgggtcaaaccagggataattacctgcccaccacaggagtcattacaatgaggaagtaaattggcagatttgatacggccccagacccagtgtctgatgttggcctcttggcaatcagataagttatttagaataactgcttcatgagttgcttgagttgatgcatccaaacttgcccagtaagcctttctcaagagctggactaaattctggtaaatctggtcctcccatgcatcatggctaagtgagattattgacttccacctggcttggttcagccatagtggtgaagtggtgtggtatgctgtcttttaatcaaacagacatttagaggaggtcttttgggtcataggtggcatggggatggattgcacaaaggtgactgagtagttagttggc

SEQ ID NO: 501374 - DNA, 507 bp, Homo sapiens
ctgaccagcaattacatagttgcgagaaccagcagaaagggggtgtaggtgaccctatgttgttcttgttgtaccccatgccactctcagaggaaagaggatgaatactgggtcaaaccagggataattacctgcccaccacaggagtcattacaatgaggaagtaaattggcagatttgatacggccccagacccartgtctgatgttggcctcttggcaatcagataagttatttagaataactgcttcatgagttgcttgagttgatgcatccaaacttgcccagtaagcctttctcaagagctggactaaattctggtaaatctggtcctcccatgcatcatggctaagtgagattattgacttccacctggcttggttcagccatagtggtgaagtggtgtggtatgctgtcttttaatcaaacagacatttagaggaggtcttttgggtcataggtggcatggggatggattgcacaaaggtgactgagtagttagttggc

SEQ ID NO: 501375 - DNA, 540 bp, Homo sapiens
tagccccagtaggagttatttttcctttaaaggaatgtttggattaggcaaaaacatggattttaatgctgtattttaaactgtgacttagataattctcttataagggggaattaatttttctggatattgattggttgataattatttttaaactatgtgtctctgaggtacctcagagctacagcttaaaatttgcagctttatggcatttgtctaggatgtaacaggaagaaaatgaatgtgttaaggatcacatttggtrtatatctcaagtaaattcttgtcaccttttatggcaaaatagagaatattactgtatatagcaaaataaatcagttaaaaatctggagaagagggacttaccctgaattatcttggtgggtccttacaggagagtggtagaggcacagaagatgatgaggctgttgaactgtggaggcatagattagagtgacgtggtcacaagccaaggaacacctgaagccaccaacagcttgaaaaacaaggaaagctttctctcctgcaaccattggaggg

SEQ ID NO: 501376 - DNA, 539 bp, Homo sapiens
cttgggtgggagagcaggaactcagaaggacgttgatgcaggcagaggggagaagaggcaaggcctgaaggggagctgggtcatcccagggagtcctctcccttcccagaagcctctgagatgccctgcagrtgggggctagagtccgaggctccagcctggggtgcctgtgtctcttgcagaggacaaccacgtgtggcagcaggtcaaaggcgggcctgtgtgggcaggcagaaacacggggggatgttgagttaggcagaggggagaagacctgagaccttagtgggtactggctcctcccaaataggcctctccctttttagaagccaccagggcaacccggaattggtactagggccctgggctctggcccaaggtgcctgtgtctctaggagggctcccatgggtgtcgacagggcagcaggcaggcctgtgctgatgggcagaaactcaaggagacgttgatgcatgccaaggggagaagcggtgagggctgagcaggagtggggttgtttgagggagtcctctcccttccc

SEQ ID NO: 501377 - DNA, 553 bp, Homo sapiens
ctgggctgcagggactcagagggacattgagatgggcagaggggagtggtgggcagagtagcagcaaaaccacagggaattctgggagccttccaaagatgcttctcccatcccagaaggccctcaggctgtcccaagtgggctgtaaagtcccaggctttggagcagagtgcctgtatttttggcagaaggccctcagaatcaaaaaaggggccccagtgtttcatcggctcactgcaggaactcagagggatgttragacagaatgaggggagacgaggagagaccacagggaacgtggggaacctcccaagaaggcctctcccctcccagtagcccccaggactgtctcgggctagctgtaaagccccaggatttggagcaggttgcctgtgtccctcgcggaaaaccttcacaagtgaaaatgggtcagcttggtggtgtggatgggctgcagagactcaaggggatgtaccgacaggcagaggggagaagcaacaataccgcagggaaggctgggagcctcacaagggggcctgtcccatcccagaac

SEQ ID NO: 501378 - DNA, 531 bp, Homo sapiens
tttaagcatgggaatggtataatcttattgaaagttcactctagctgctatataaagtgtaggtaatggaaacaagaggagaaagagaggaatcaatcagcaggatattgcagcaatccaggtgagaggtgatgcaagagctgatggagcctcagctgaggtagttgcagcagaggtggcctaaaacaacaatgctttatgatatgattcctcatggttctgtgggtttcctgtcttgagtrtttctgtggctgggctgggctcctgtggctacattcagctggaaggtcagctggggctggatcagctgggccagctgaacttctctctctatggggtctttcatcctctaagaggcaacacccagtttcctcacacggtggcagcagcattccaagaggactagtttctttgcacaagcatttatcaagcctctccctgtgtcgtatttgctgatatctcattggccaaagcatgtcacatggtcagaggtaatatgggcggggactatgaaaaagtgtgactagtggg

SEQ ID NO: 501379 - DNA, 488 bp, Homo sapiens
  misc_feature (1)...(488): n = A,T,C or G
ccttcccagtggtcacagcctggttccttttgtcttttttttttttttttttttttttttgagatggagccttgctctgcctccaggctggagtgcagtggtgtgatctcgtctcactgcaacctctgcctcccgggttcaagagattctcctgcctcagcctcccaagtagctgggattacaggcatgtgccaccacacccagctaatttttgtatttttagtagagatagtgtttcaccatgttggctgggatgatctcgatctcttgactttgtratctacccgcctcggcctcccaaagtgctgagatcacaggcataagccaccacgcctggcctccagcctggtttctatttggccttataaggaaagtagaggaaaggaagcagcctgggttaccaaagagatagagagaacagctttctacatgtaagaaagaagttttagcctctttgttcttnnnnnnnnnnnnnnnnnnnnnnnnnn

SEQ ID NO: 501380 - DNA, 488 bp, Homo sapiens
  misc_feature (1)...(488): n = A,T,C or G
ccttcccagtggtcacagcctggttccttttgtcttttttttttttttttttttttttttgagatggagccttgctctgcctccaggctggagtgcagtggtgtgatctcgtctcactgcaacctctgcctcccgggttcaagagattctcctgcctcagcctcccaagtagctgggattacaggcatgtgccaccacacccagctaatttttgtatttttagtagagatagtgtttcaccatgttggctgggatgatctcgatctcttgactttgtgatctacccgcctcggcctcccaaagtgctgagatcacaggcataagccaccacgcctggcctccagcctggtttctatttggccttataaggaaagtagaggaaaggaagcagcctgggttaccaaagagatagagagaacagctttctacatgkaagaaagaagttttagcctctttgttcttnnnnnnnnnnnnnnnnnnnnnnnnnn

SEQ ID NO: 501381 - DNA, 593 bp, Homo sapiens
agtgagaaaatgtgatgtttgcctttctgtgcctggcttatttcacttaacccaatgaccttcagttccatccatgttgttgcaaatgactggatctcattcttttttatggctgaatagtactccattgtggagtactatagtggatacaagtcctttatcagatatgttttgcaaatattttatcctagcctgtgacttgtgtttttattttcttcaggtttagtttattttgatacttggttttaatagctgaaaagtaaatttcataaacatatatagaagtgagtgcagaaagtacagtattgactctgcttcccaaattaatacttattttcaaatctgtacaccagttacacaaagagtttaaaaawtaatttgtctagtaaaatttcactttctcagaattgttgtctatactaacgaatcagaacatgtatttctaatagattcaagacctattgagtttcacttagaaaatgtttaaataggtgtgaaaatggttttcaatcttttgttatattttatttactttttattgaggtttaacatgcatgcaatacagtgcattaattttaagcatacaatttagt

SEQ ID NO: 501382 - DNA, 511 bp, Homo sapiens
atcccattaaagttgtgtttcattaaaatttgtttcagaattttaggagtatatgttttccatgccagtgcaaatgcttcatgagtgcttgaccagtgtttagcatgtgagagattktgtgtattttacttaaaataaaaaatctgaatttatcagtttttgcaaacattattcaaaagtgaatataaactgaaagcattttgggaaaggccttttttatccttttgtagttcttcacaccattacatagcaaattttaggtgctcaataaatgtttatcaattgcttaactgaaggcagtttctagtcactgactagttgatttctagaaggaggctctcacaccgtctatgccttctgcagctgtatttacccaagcaacttagagcaggattgttttttcattaatttttcagagaccactgtgtaccagggactgcacataggcacaggggacactattaaaagtctcagtcgtgccctcaaggcactcagcattgggtgagggatg

SEQ ID NO: 501383 - DNA, 624 bp, Homo sapiens
gacaggaaagcctgtgaaatgcggtctgcagaggtcaggtctcttgtatattgagaaggggagaggtgaggaatggaccttccttcatgcagtccagagaccagcatatttaagaattctcaatacaacataggacaggattctactcatttattgcacaatgtttctactacccctggattcctttagtgagtttatttcttgcttaaactgtaaaaacgttagagacccattctttggaatataagatatttaagattagggaggcatgcacttgagaacttaagaaagaagagtttagtactagactctacaytcctttttattctaaaatctctcccagaaattttaaaatgtgtctagaaatgcattgttaattgggtcaattgagctactttggttaaagaataaaatcagcctagatttcagaactgaagaatcaggtcctctgtacaagctagtgattctaaaaattgactttacttaaattagaatccctcttctcttggcaacattaatgatacctgttatattttactaaagttggcaagtaagacaacactaagcctctcttctcaatttcaaattgtaaataatgagagacaggcaagataacaatacctt

SEQ ID NO: 501384 - DNA, 489 bp, Homo sapiens
gttatcctcaggcaaaactttttcaagagcataggcctcttttagtattcatatcacatgccattacagagctattcctcaaagtctgcaatatacatatagatatagtctgcaatatatatatagagagagagtcagttctatatatatgtatcttcccccctggcctgcggcctataagctccatgagataatggcctctatctttccccctcacacaagacaagcacatggtaagctttcaatagatacttgttgaatgcatgcatgcaygcatgaatgactgaataaacgaataatgatgtacaaataaatgaatgaacaaactcagtggcttacacataccttatcttatgtttatctgcttccacaaaatattttagagggtgaacataatttacaataacttggggagatacatatcatgttcatatgtaacaaatgtcattccccagcagttgaaggcaaaacgataatgagatatttcaa

SEQ ID NO: 501385 - DNA, 649 bp, Homo sapiens
agattataattatttccctgttgtagtcaagaatggctcctcactgaaccctaccattaaccattaaacctcttcgtctccataacacattatactggaatatcaatctgattctaatactgaatcacatttatgagttgtaatgttcatyagccatgagagattatagatgagccaaagcctttcctagaacttgatctgtatggttgtattgtcaatcatggtgaatactgacggcaaggaggctagagaaaacaaaatgaaatgagaaattaggcatgtttgctgggggtttcagttatctgtgttgcatcgctggcaagagagaatactttgctcaataccataatcctttaggaggaaagacagtcttatagaacagcaactcacttcaagtcaacgtggggtagagaaaaggctatgccctgcagagagcaaaaatcccatctaagagtgcaagagtgcgaggctgcatactgtttatgcaggctttatcatagtattactctagggtaatttttaatttttgtttttaaaataatgagcagtaaatgccagctctagttagaaataaagcatcgttcgtgatttagcatgtctgtgtaactgattctaaatttcccactctgctgcaacaagcacagcttga

SEQ ID NO: 501386 - DNA, 653 bp, Homo sapiens
tgtgactgtctttacttctcaggaaattgttaaagtaaaataaaataatgtaagttgaatagcttagcatgctacatttttatgtttgaaaactgatcttatccctcccttccttccttccttgtgtttgtccttcctactcctttctttattttttmtattctacatttcttcttattcttccatgtctgaaaatttaatatatatgaaagtgcatttagttcaacgtatctgttttgctactcttagcatatttttaaaactcattatatcagtcttcacctcttcgcatcaaataatgacacagatttattttgacaatatcatgtattatcaattttattgcttaataaataaaaggcaaatttgtagtaataattgcatttttactctggaaatattatgagggtattttgatcccatccatctcaaatgagagacatgtaaagaataaaaagtaaaatgttttcaaaagtgcattttcaaagaaaaaatgtattaagcactgaacaacatgcggaatttgaggaaatatacataatatgatagtaattatttttattttggaaagtctctctaaaatataggaggtcctatggtatctaaggtaaaagaaaatcatagttaaaaggtccatacaaaaatatattcag

SEQ ID NO: 501387 - DNA, 567 bp, Homo sapiens
tgaagtcacatttattaaatgcttacttactacactcaaagtaataatgtaggcactaagggaatacaaattttttaacaactacaataaagacagaaggaagcacctgcattacacagccatgcatcactcaacaatggatacattctgcgaaatttgtcgttgggcaatttcgctattgtgcaaacatcatagagtgtggttacacaaacctagatggtatagcctaccatatatccaggctgtatggtgtaagctaatgctcctaggctacaaacctgtaacagcatgttactgtactgaatactgtgggcaactgtaacacaatggtatttgtgtatctaaacacagaaaaggtacagtaagagtatagtacctttacagtaaaaacmcagtaaagttacagtatataatcttatgggatcactgtcatatatgtgctccattgttgattgaaataccattatgagcacatgattatatttatgttgtggggctttactttattattttaaacatatcagtcttattcctttagcctcatcacatacagggtctactgtagag

SEQ ID NO: 501388 - DNA, 630 bp, Homo sapiens
tttaaagccccttctgtacattgctcctgggggataaggctcctggaaatgctatgcacctgtataaaatcacctttttcctgtggtctaragagacttgcatatgtctaattccctctacttcaagaggtaggaggttgaggatgtagtcttaggtggaagctgtaatagtgggatgctcatcatgtggacaaactctaggaggaatcagtagacacaaaattatagctgactagattgggagaggcagttgtctcatctaacatacagaaactaacacagaaagtcaaagaaaatgatgaaacagagatatatattccaattaaaaacaaaataaatttccgaaactgtacccaagtgatgtggagatatgcaatttacctgacagggaatttagaataaaggtcataaagatgctctctgatcaggtgaccaatgtaggaacaaaactgtgaatttcaacaaagagattttttaaaagtttttaaaacaccagacagaaattatagaactgaaaaatactctgactaaaaaatctaatagagatgttcaacagcaggctacatcaaacagaagaaagaatcagggaactcaaagacaggtcattgaaagttatcaagtttctgtttc

SEQ ID NO: 501389 - DNA, 437 bp, Homo sapiens
ttttaaatccatgggattccaatgcagagtgaaagtgactatttttattgccagttcttcctggatgacacccatacatcctattcccgtgagtggaatcattgcttcttcaatctgaagctgacaaagttggtgggtcagagctctgacttctgtagttcaaaacagaagatgttgaggtgtgttcaaatgctgcagcatgtctgaagaaggggrcctgatgcaggcttttcctctctgtaaaatggtgtaaataatagagctgcatcagacttacgcaaaaagattatgccaaaaattcatgctaagtgttcagcacagtgccaggctcagaaaatatttgtaataatattgtctatcatcataataatccaaccacttacccaaagcctcactcagttctcagtatttccacctgaggttgcccaagcacactt

SEQ ID NO: 501390 - DNA, 500 bp, Homo sapiens
ctcaaagccactgggagtggggagagagactccagcaagataggtgctttaagctgatgtaatataattacagaatcccatgtaccttatcagttttactatattctgttgatttgaggtgagtcagaagtcacatccacactcacggagaggggattatacaaaggcatgaataccaagaggaaggatcattaggggcctttttttttttttaatttaaagaaaaaaatcrttgagaatctgtaaaacaattcctgaaagatcaagttttccagaaaactagctacaaaaatgcattgtgtttatcacattaaaacgtgcattagaccaaacgaaaatcatgaaagaagcaacccttcttcaacaatgcaagcaaagataaaatgcctaagggacaacatggatggcttgcaaaggatgagctctttaagcaccacttttcaaaaaatgatcacaagtaggtgagtgtgctcagttacatacactgaattgaacttttg

SEQ ID NO: 501391 - DNA, 500 bp, Homo sapiens
ctcaaagccactgggagtggggagagagactccagcaagataggtgctttaagctgatgtaatataattacagaatcccatgtaccttatcagttttactatattctgttgatttgaggtgagtcagaagtcacatccacactcacggagaggggattatacaaaggcatgaataccaagaggaaggatcattaggggcctttttttttttttaatttaaagaaaaaaatcgttgagaatctgtaaaacaattcctgaaagatcaagttttccagaaaactagctacaaaaatgcattgtgtttatcacattaaaacgtgcattagaccaaacgaaaatcatgaaagaagcaacccttcttcaacaatgyaagcaaagataaaatgcctaagggacaacatggatggcttgcaaaggatgagctctttaagcaccacttttcaaaaaatgatcacaagtaggtgagtgtgctcagttacatacactgaattgaacttttg

SEQ ID NO: 501392 - DNA, 500 bp, Homo sapiens
ctcaaagccactgggagtggggagagagactccagcaagataggtgctttaagctgatgtaatataattacagaatcccatgtaccttatcagttttactatattctgttgatttgaggtgagtcagaagtcacatccacactcacggagaggggattatacaaaggcatgaataccaagaggaaggatcattaggggcctttttttttttttaatttaaagaaaaaaatcgttgagaatctgtaaaacaattcctgaaagatcaagttttccagaaaactagctacaaaaatgcattgtgtttatcacattaaaacgtgcattagaccaaacgaaaatcatgaaagaagcaacccttcttcaacaatgcaagcaaagataaaatgcctaagggacaacatggatggcttgcaaaggatgagctctttaagcaccacttttcaaaaaatgatcacaagtakgtgagtgtgctcagttacatacactgaattgaacttttg

SEQ ID NO: 501393 - DNA, 500 bp, Homo sapiens
ctcaaagccactgggagtggggagagagactccagcaagataggtgctttaagctgatgtaatataattacagaatcccatgtaccttatcagttttactatattctgttgatttgaggtgagtcagaagtcacatccacactcacggagaggggattatacaaaggcatgaataccaagaggaaggatcattaggggcctttttttttttttaatttaaagaaaaaaatcgttgagaatctgtaaaacaattcctgaaagatcaagttttccagaaaactagctacaaaaatgcattgtgtttatcacattaaaacgtgcattagaccaaacgaaaatcatgaaagaagcaacccttcttcaacaatgcaagcaaagataaaatgcctaagggacaacatggatggcttgcaaaggatgagctctttaagcaccacttttcaaaaaatgatcacaagtaggtgagtgtgytcagttacatacactgaattgaacttttg

SEQ ID NO: 501394 - DNA, 582 bp, Homo sapiens
ctatctcctagtgttgctaatgaattaatagttgcaaagggctaaagggcttggatgatacttggcacacattaaggaactaagcatttgttaaataaattaaaagcaaacttaccttttaaaatatttaatatccctaggtagggatcatgtatcttgatcagaaggggaattaggaaaaaaaagattgatgatagacatcgtcaatattcggaccatcacttcgaggaccccgtcagtatgaaggggtggggtagcataatgaacatcatgacaggctcacggttaaaataactgttctaaaagtcatacagaagctggagaatatgagaaattgttgagaagaacttttggaaaggaaaaactgaaacagctgaggtttaaatgaaatctggtgtgatctgaatgtaaagggcaattttcctgaaaaattcttcatttcagatctcttatgatcttttcaatctaggcctgaagtggattttggaacataatttaagcctctacctctcctttcccaayggactgtttttcagcatttgtcggtttcttgtctatttaaattgtgacccttttaaataa

SEQ ID NO: 501395 - DNA, 559 bp, Homo sapiens
ggggaagaatttggaatcaggaggagcttctctgaaatgtatatttttcttttcagtgatcttccacaaaggagatatattaaagatacttttcagaagcccttgttggaatcaacatgatgcatgctcttttgaatttttaagtagacaaatttaaattcactcctactatgaatgagatccaagttgacttctatagtcatattgtatcttgttggaatgtaacgtatwtagtcctaccatataggccgttcaattatttaacaaaattgtgtgtatgatagagactatgttttggtcaaaacaaggtaacttccaattatttctaactgtgtactaccagcactttgaactggaaccttagtgctagttccttgatacaggtcatcccttgaccagtgggccagctagaagtaggataagcatagttatgattattcctccatccaatggaaagctctaagatagtggctggtgagatccttgtcttgtttcctgagggtaaaagaaactactgtgtacttattcttggaaatgagattcctcatgtcctcccact

SEQ ID NO: 501396 - DNA, 559 bp, Homo sapiens
ggggaagaatttggaatcaggaggagcttctctgaaatgtatatttttcttttcagtgatcttccacaaaggagatatattaaagatacttttcagaagcccttgttggaatcaacatgatgcatgctcttttgaatttttaagtagacaaatttaaattcactcctactatgaatgagatccaagttgacttctatagtcatattgtatcttgttggaatgtaacgtatttagtcctaccatataggcygttcaattatttaacaaaattgtgtgtatgatagagactatgttttggtcaaaacaaggtaacttccaattatttctaactgtgtactaccagcactttgaactggaaccttagtgctagttccttgatacaggtcatcccttgaccagtgggccagctagaagtaggataagcatagttatgattattcctccatccaatggaaagctctaagatagtggctggtgagatccttgtcttgtttcctgagggtaaaagaaactactgtgtacttattcttggaaatgagattcctcatgtcctcccact

SEQ ID NO: 501397 - DNA, 449 bp, Homo sapiens
ccttcctccacaacccagccaaaaggttccatctgccatgcagtaccaaggaacasataattctatagtctgccctgattccctcactcgacagggagtctaatgtatagaatgtaacaggaggaaaagctgagcgcttgagtcctgaataaaacctgcctgtccaacaacactgtagggtcaataccctgctaacaaatatcctctgaaagaagtaagaaatctcaaagttaactttcttaagggaacacataaaagagctacccaagttataggcaagaaagaaacccttggctgaaaacaaatcttgagactcctcttgaacttttatcctcaacaatacaggtcctgtctgtcttatgaacatctgtatataagaacaggatcattccatatataagaacaggtggcccgtgctaggtaggggccacgggaagaagggtgttttt

SEQ ID NO: 501398 - DNA, 570 bp, Homo sapiens
tatttaataaatgtaagttcccatcctgattcctttcccatgttgctaaaataaatcaattctacagaattatgttttatgtatgaaatacttctgaagcatggttatatctaaacaaatcaagcccgatcagaaattctaatctttgtctttttctctcaattaagaagatccaaatagatatttcatggcaactctttaaaaatctcctgttaatatttctccccacccctaaactgagagtgtctcattctttgactccccaaaaacatcgtaatccatgctattcagtccttatcttagttmtaagacaaactcttttgtctctgtcatctgtgaccccatgacatgctcttgacacttcaagccccctagatgtagtcaggcccccagggagtagggtgctcccttttgcactgttttctcaagagagtacacatgaagagattttatcctttttctacttgatgaagaaggaaagaagcagaaaataatcaggcaaaaggtgtcaggaaaggactgcaaaccttcccacattaaatgcttttattcaattatatacaatctgat

SEQ ID NO: 501399 - DNA, 570 bp, Homo sapiens
tatttaataaatgtaagttcccatcctgattcctttcccatgttgctaaaataaatcaattctacagaattatgttttatgtatgaaatacttctgaagcatggttatatctaaacaaatcaagcccgatcagaaattctaatctttgtctttttctctcaattaagaagatccaaatagatatttcatggcaactctttaaaaatctcctgttaatatttctccccacccctaaactgagagtgtctcattctttgactccccaaaaacatcgtaatccatgctattcagtccttatcttagttataagacaaactcttttgtctctgtcatctgtgaccccatgacatgctcttgacacttcaagccccctagatgtagtcaggcccccagggagtagggtgctcccttttgcactgttttctcaagagagtacacatgaagagattttatcctttttctmcttgatgaagaaggaaagaagcagaaaataatcaggcaaaaggtgtcaggaaaggactgcaaaccttcccacattaaatgcttttattcaattatatacaatctgat

SEQ ID NO: 501400 - DNA, 464 bp, Homo sapiens
ttcaaggttagtaaatccatttaatcccaaatagcattaaaaaataagaaaaaacctagagcctaccttattttctacaatgatgctaagtcctaagaatattcacccccaaatggggagcactatgggaaagatagaggagaggcaacgccttattttggttatcaaattttccatgccccttgtaaaataaattcataccttcaagaggacatggtacagttatctttagtgatgaggaagagatatactgaaawttttccccaaataaatcttaatatacatgctagtacaatagaacccacatatccttttaattaggatgatagtttagcttactataggactcttggtcaagagatctacaaacaccacccttctgtaagaaacctacaaacaccacctaatgctggtggtctcagggcatgattgcagggcaatgaggaaaattcaaatctagtcgt

SEQ ID NO: 501401 - DNA, 464 bp, Homo sapiens
ttcaaggttagtaaatccatttaatcccaaatagcattaaaaaataagaaaaaacctagagcctaccttattttctacaatgatgctaagtcctaagaatattcacccccaaatggggagcactatgggaaagatagaggagaggcaacgccttattttggttatcaaattttccatgccccttgtaaaataaattcataccttcaagaggacatggtacagttatctttagtgatgaggaagagatatactgaaatttttccccaaataaatcttaatatacatgctagtacaatagaacccacatatccttttaattaggatgatagtttagcttactataggactcttggtcaagagatctacaaacaccacccttctgtaagaaacctacaaacaccacctaatgctggtggtctcagggcatgattgcarggcaatgaggaaaattcaaatctagtcgt

SEQ ID NO: 501402 - DNA, 545 bp, Homo sapiens
gaataatattggcatcagttgccaggatcttcggaattctctccttgataatatctgattctttctgtctaatttggtccagtttttcagggtctgtaatgaccacctgtacatcaagtatattagtccattctcacactgttataaagaactgcctagactgggtaattagtaaaggaaagaggtttaattgactcacagttttacagggcttgggaggtctcaggaacttacaatcctggccgaagaggaaggaaacatgtccttcacatggcagcagaaaggagaagtgcagagggagaagggaacagctccttataaaaccatcagatcttgtcagaactcagtatcatgagaacagcatagagtccctcccccaacatatgggaattacaatttggattacaattcaagatgagatttgggtggggacacagagccagacaatatggcaaagcttcatttttgtttttttacaggctagagttaagtcaagcaatttcckcattaacaattattttgggcatgccctgggatcccaccac

SEQ ID NO: 501403 - DNA, 577 bp, Homo sapiens
tatttacacacgtgtgtatttgctggtacaggcctaaaatatggaaacatttgctattttattaaaaagtgctcataccatatataatattcatgcaacattgttctgtatcattgacatagatgggtttgttctttttaatggctattttatgtactattgaacaggtatgctataatacctatattcctaktggtatgcttttaggttacttctgagttttaacaattaaaaaatacgcaatatgtcttcttacaattataactttctaacttgtatagatagaactaaaacttctccaaaaattattattccaagctacactccttccaacagagtaacaatttctcaccaccactagatagcatcaactgtttaaattgtgtccaatggacaactgaaaaatactctcttattttaatttttgccatcattaatgaggccatctttgcttggctgttatatttttctttgaatagcccattcatattctctatttgttttcttccactgagttgttactttttactaattgagtcccttgtttcacagagaaattagcccatcatctgtcatg

SEQ ID NO: 501404 - DNA, 592 bp, Homo sapiens
ctggggtggcaaggtcaccagggtggtcagaaaggggcattctgagtgccactcaggggaaaacattgtcctgagatcagctttgtccctggaaggtctgaagccccttcgaataggaacactggagttaaatcaagtgcagtttctttatctgcaaaatgagacaattggacaaatgtggtcctcaagttctcttctacacaaaactttctgactctgactggctgctgggttctcctctttatgcaaactcaggattgtgaaagctcccagagccttctccccttcagcatcctattcctgggatgggcagakggcatgggaaagagacagatttggtattccagtaaagcaagggaggcttttcctctgttagcctgtgtcagaggggactccctagtatctggtgctccatctgtcagtgagtctgcccagaggggcagagctggtcctgagtcacctacctgttgctctctgaaggacttccaccacccctgccgctttcctcccaaagaaaaatggccaaagccaacactagtgtacaggctggaggggtgcacatggagatcctgggagaaagagaaatccttca

SEQ ID NO: 501405 - DNA, 613 bp, Homo sapiens
ggagcccctgcagggctggttctctcttcaagcaaggctttagagttgcattaagcaatttatcccccgtccacctccccttccagcatcccagggatggcagaggcacccatgagccccagaarggacagggggtaagatattgatgatgatgctttttcttggagtgttagttggaagagaaaatctgcccagactttccaaggtacaaagcattgtctttgttggtttcagtcttgggtgacatccaggggaccgagtgtcagggaaactattgttgagcaagagcaaagagcaggaattggtgctgggcaggaaaggaagcctcatcagagcaggccagtgagtcaccaaatgggccctaagtatttgagttccctcaactgggagaaggaaagcaaatgcccctcacccacttccagtcatcaatccaccggctgtcacccttgagtttgtaagcccttgttcctaccgctcctgagtttctatgaaaggaccttgaggtgttcaacaaacagggaagggatcaactctccccaccctgcgttgaccaatgaattcttccctcctctgctgcccagtgaattaacaggagaaagaactccggtattgg

SEQ ID NO: 501406 - DNA, 613 bp, Homo sapiens
ggagcccctgcagggctggttctctcttcaagcaaggctttagagttgcattaagcaatttatcccccgtccacctccccttccagcatcccagggatggcagaggcacccatgagccccagaaaggacagggggtaagatattgatgatgatgctttttcttggagtgttagttggaagagaaaatctgcccagactttccaaggtacaaagcattgtctttgttggtttcagtcttgggtgacatccaggggaccgagtgtcagggaaactattgttgagcaagagcaaagagcaggaattggtgctgggcaggaaaggaagcctcatcagagcaggccagtgagtcaccaaatgggccctaagtatttgagttccctcaactgggagaaggaaagcaaatgcccctcacccacttycagtcatcaatccaccggctgtcacccttgagtttgtaagcccttgttcctaccgctcctgagtttctatgaaaggaccttgaggtgttcaacaaacagggaagggatcaactctccccaccctgcgttgaccaatgaattcttccctcctctgctgcccagtgaattaacaggagaaagaactccggtattgg

SEQ ID NO: 501407 - DNA, 347 bp, Homo sapiens
actgcggtggtggccacgggaactcggccccagccagctctcttccctctctgttttcgcgggtggcagcgccgccctctctctcttccttacagccgggaggcccccttccccatgccacccaatgcctgwccacacagggcctgtagggggggggagaaggggcgggcatggtggcagaggagggcggacgtcaccggtctgcacttggggggacagagggccccggcaggccatgcgagggaacccccagccgtgcaccccaaggagcccggaggcacccccggtgactattgatcagcaagcgacgcttagacaggcatagccctgggaggaacccgggccac

SEQ ID NO: 501408 - DNA, 609 bp, Homo sapiens
cccagcactttgggaggccgaggtgggcagatcacgggggtcaggagatcgagaccatcctggctaccacagtgaaaccccgtctctactcaaaatacaaaaaattagccagacactgtgatgggtgcctatagtcccagctatttgggaggctgagacaggagaatggcgtgaacccgggaggcagagcttgcagtgagccatcacgccactgcactccagtctgggcaacagagcgagactccgtctcaaaaaataataataataataaatagatggaaatagaaaattaaaaaaaaaaacgtagctggccgggcgcaattgctcacgcctgtcatcccagcactttgggaggccaaggtgggcagatcacctgaggtggccagttcgagacccacctgacccacatagagaaataccgtctytactaacaatacaaaatcagccgggtgtggtgacacatgcctgtaatcccagctactcaggaggctgaggcaggagaatcgcttgaatacgggaggtggaggttgcggctagccgagatggtgccattgcactccagcgtgggcaacaagagtgaaactccgtccaaaaaaaaaaattaagccc

SEQ ID NO: 501409 - DNA, 608 bp, Homo sapiens
tgtgccttgtgtttcccagcccttcgggtctccttctctgtgaattgctcctggtccataagtctgttggatctttggtttctccttgctgacttgtaagtactattttttttttagacggagttttgcacttgttgcctakgtgggagtgcaatggcactatcgcggctcaccacaacttccgcctccctggttcaagcgattctcctgcctcagccttctgagtagctgggattgcaggtaagtgccaccaagcccagataattttgtatttttagtagagacggggtttctccatgtaggtcagactggtctcgaactcccgacctcaggtgatccacctgcctcagcttcccaaagtgctgggattacaggcatgagtcaacacgactggccaattttgattttaatgatctggatatcaatgcttttttggccaaataccttacaaatatgttttccctattggtgcactgtattagtccattttcacactgccgataaaggcgtaacccagactgggaagaaaaagaggtttaattggacttacagttccacatgacggaagaggcctcagaatcatggtgggaggtgaaaggcacttctta

SEQ ID NO: 501410 - DNA, 406 bp, Homo sapiens
aaaacaatgacgacagcaccaccagcagcaacaacaacaacagaacagaagctggaacacaaaaccaccaccaccacaatcaccagttgggggttgggggagggtggccgcgctcgaggccctcaggctcagtcccctcgggtttaaaaaagaaaacagcagactcattcctgtctgtaggcaggaaaaatccaatcaaaggtctccattgctagaaagggaagtagaataaggagaagggcttattgatcttcttgtggtcgatcragaccatacatgtagtaaaaaattaaattcagccagcaatactttctacactgttcaaaagcatcggagatcagacgcaccacactccatggggcttgtgccactagaaagaaaaggcaggccgggtgaggtggctcac

SEQ ID NO: 501411 - DNA, 406 bp, Homo sapiens
aaaacaatgacgacagcaccaccagcagcaacaacaacaacagaacagaagctggaacacaaaaccaccaccaccacaatcaccagttgggggttgggggagggtggccgcgctcgaggccctcaggctcagtcccctcgggtttaaaaaagaaaacagcagactcattcctgtctgtaggcaggaaaaatccaatcaaaggtctccattgctagaaagggaagtagaataaggagaagggcttattgatcttcttgtggtcgatcaagaccatacatgtagtaaaaaattaaattcagmcagcaatactttctacactgttcaaaagcatcggagatcagacgcaccacactccatggggcttgtgccactagaaagaaaaggcaggccgggtgaggtggctcac

SEQ ID NO: 501412 - DNA, 568 bp, Homo sapiens
tgaatcggatggtcatttctttctagtttaatttcaatggaacctcaaattgctctcccttctttcaccgaaactgcagcataaaatatgtcaggctgagataacttgttggccaagttgtttgggtggtggcagaatgaatggcaataatgcattctgtacacgatccaaagctctcaccaggggagaaagcatacagtaggggagatttaaaagctacagcttgaagtatgtatgttctgaagactttgrtagggaggggaagagagagactacttgggatcctgttcattggcttgaataaggaataaataaaaccaggaggaacaggctgggacaccatcaagcagacatggacaaatatggatctgtagcagtagatcacaataccagatagtgactttattgaaaccaaaatgccttggctcttcagtcttcatttcacaaataaaagaattcccaagggtgaagtggaggatctaatacaccactccataggttgttgatctagtattttgaggaacatactaggatgcattacaatacctcaccttaaatgtatagaatg

SEQ ID NO: 501413 - DNA, 568 bp, Homo sapiens
tgaatcggatggtcatttctttctagtttaatttcaatggaacctcaaattgctctcccttctttcaccgaaactgcagcataaaatatgtcaggctgagataacttgttggccaagttgtttgggtggtggcagaatgaatggcaataatgcattctgtacacgatccaaagctctcaccaggggagaaagcatacagtaggggagatttaaaagctacagcttgaagtatgtatgttctgaagactttggtagggaggggaagagagagactacttgggatcctrttcattggcttgaataaggaataaataaaaccaggaggaacaggctgggacaccatcaagcagacatggacaaatatggatctgtagcagtagatcacaataccagatagtgactttattgaaaccaaaatgccttggctcttcagtcttcatttcacaaataaaagaattcccaagggtgaagtggaggatctaatacaccactccataggttgttgatctagtattttgaggaacatactaggatgcattacaatacctcaccttaaatgtatagaatg

SEQ ID NO: 501414 - DNA, 603 bp, Homo sapiens
aactggaaaaaatatccccccagattattcacacaaaaaatagtgatattgttttgctagggggcaaggtcagagggaagaattctacccttccttcatatgatgagaaaataaatggaaacatgacaagatggcttactttttaggaaaactaatgaggcaatcaactgcatggctttctgctgggaagattgaactagaattggagcacccaggttcactgtcacatacaggattgaagccttcacatctgacactcaactttgcaggacacaagggaccaaaagggaggaatttctccctgtggagcatcaaggagttttgtaaaagrtttttcaactgagagacatgaaagagggcctcaaagaggggacatttggaatggtctctttttggaaaaccgaagccataaacaaacccttcccttctttggttaagagtatgagtagattagattcagtgacagcctttgttctctctcatactatattgcttttttgagagttactgcagcttaagaaaataactttgtatatttccattatagagggtttggtctggggaagatagtcaggacagtaggtacacaaggaaaggatggca

SEQ ID NO: 501415 - DNA, 603 bp, Homo sapiens
aactggaaaaaatatccccccagattattcacacaaaaaatagtgatattgttttgctagggggcaaggtcagagggaagaattctacccttccttcatatgatgagaaaataaatggaaacatgacaagatggcttactttttaggaaaactaatgaggcaatcaactgcatggctttctgctgggaagattgaactagaattggagcacccaggttcactgtcacatacaggattgaagccttcacatctgacactcaactttgcaggacacaagggaccaaaagggaggaatttctccctgtggagcatcaaggagttttgtaaaagatttttcaactgagagacatgaaagagggcctcaragaggggacatttggaatggtctctttttggaaaaccgaagccataaacaaacccttcccttctttggttaagagtatgagtagattagattcagtgacagcctttgttctctctcatactatattgcttttttgagagttactgcagcttaagaaaataactttgtatatttccattatagagggtttggtctggggaagatagtcaggacagtaggtacacaaggaaaggatggca

SEQ ID NO: 501416 - DNA, 603 bp, Homo sapiens
aactggaaaaaatatccccccagattattcacacaaaaaatagtgatattgttttgctagggggcaaggtcagagggaagaattctacccttccttcatatgatgagaaaataaatggaaacatgacaagatggcttactttttaggaaaactaatgaggcaatcaactgcatggctttctgctgggaagattgaactagaattggagcacccaggttcactgtcacatacaggattgaagccttcacatctgacactcaactttgcaggacacaagggaccaaaagggaggaatttctccctgtggagcatcaaggagttttgtaaaagatttttcaactgagagacatgaaagagggcctcaaagagggkacatttggaatggtctctttttggaaaaccgaagccataaacaaacccttcccttctttggttaagagtatgagtagattagattcagtgacagcctttgttctctctcatactatattgcttttttgagagttactgcagcttaagaaaataactttgtatatttccattatagagggtttggtctggggaagatagtcaggacagtaggtacacaaggaaaggatggca

SEQ ID NO: 501417 - DNA, 592 bp, Homo sapiens
tcagcagatgttttcttgtcacaaatcgtatattgccccacaattattctccaagatgttttagatgaatattctttatcttcccccaccccacagtcttattcattcattcacaagctaaaggaacacagatttaatgagcacctattatatgcccagcaattagcatgatgggtcactactttaaggagctcacagcaaatwccctgagagcagaaattatgtcttttctcttttcttgcttttaccccttcccccagtcatcccaagcatctattatgctacattctataagctttcaggatggacgagtgaacgtgctggtttgccatagtcacaaatacacaacatctgagagtcaggaagggctaccacagccctgtgaaattttatattgaaaaactgctaatgatgccatcaggcccagtgtccttcaggaaagaaaatgagtgcttgaggcaaacatgtggaagctgcaaaccatttgtaatcagaaagtgaagtatgcaacaagggaaacatgccaagctcaaggactcggtggctttaatgaagggctggtattaccagtggaaatctaacttgcctacca

SEQ ID NO: 501418 - DNA, 603 bp, Homo sapiens
gcgcttccccctttctctctctttctctcctgctgccactgtaagatacatcttacttccccttcaccttctgccatgatcataagtttcctgaggccttctcagccatgtgtaactgtgagtcaattaaacctcttttgtttataaattatccaatctcaggtattatctttatagcagtgtgaaaacggactaatgcacctgaccaggtgtattagactgccrccaatgttcagcaacttctcagtagtgctctttagccactacgattattcttcccttgcaaccctatgttcaaacccttctctgttcagtctctcctgccaacagctgccagatcactcttcagaaatgttgcccgcttcacgtaaatccctgtcgagatccacaatggctccccactgccagcagagtaaatactccattctcaccctttcatcgagtagttgtagctttcagtttcaattttatcatcctctgcaccatatcatttcttctctacatcagccaggaaagtatcttccccatcaatgaactgtgtcacacgcctttagtttttagttctgtgttttgaataatatttgttatcctgttgtgtttagt

SEQ ID NO: 501419 - DNA, 561 bp, Homo sapiens
ctgccacaccttcaagcagtcttgagaaaagggaagccagcttccaagttagcagcctggggataagccacatggcaagatactgagggctgccggcaaccacggagagagtcagaaacaacactccaccactagagccttgaggtggctgcagccccccgccaacagcttaactctcacctcatgagactcagaaccagaactaccctgccaagctgtytgtagatttctggtgtacagaaactgtgcaataacaaatgtttctggttggtttgtaagccactaaatttgggatcatttgtgtgcagctataggttaccactataataaccctgcaaatgtagccccaagagtaagataggactataagggcctctgcacattctgcagtcacaatttatatttttgttatacatacatctgtccatttggggaggtcatgtatcatttcattaacatattttggcctataaagaggtggatagatacgcactaagaagcaatcgagtatcatggtaatggatatagactgaaatcccaacacttgaactgcatttcctg

SEQ ID NO: 501420 - DNA, 301 bp, Homo sapiens
aacctgcttcaaagcagactgggkttctgatttctgatggcagagttctccattctgaatggtggggcacatggataccaatggcccagggctttacaacacccctgaaacataccactgtgtcagttcagtgctgggaaggttctaagtccacattcctgtcagtcagccgattatccaatccacatagccgtaaaaacatgagaaatctagattgtcaccccatctaaagaaaggagggattgcaaaggtagaaagtgggggtaagagagcacaactagcatggagagaagaaaaggaa

SEQ ID NO: 501421 - DNA, 570 bp, Homo sapiens
tttatttcttattaactcttttaaaagtagtcttaatggtcaaaacatagatatgttgatattatttatgcctgcttttttcttacctcctatagtagcacccgtctgctgcgatggaaaactgtaattactggtagcatcagtgtcagattaaaataactcagtgctatattcttatttatgaatcacaataataatataatttaaaatatttcttttattctagaggaaaaataacttactataacattaagcctaaaagcactgctctcaatctaggagcattgattcattgccttccttttttttattttttcaagcctaaactactgtaattctccttaactggtcttcccactgggcaaatttaacctccaaacagtataaagctctgcagctcatctttccatttggaaactagctaaatctgcatatattttcttcatggaaggatttaccttgccttgcaggaaagcttcatggtgatttgaaamtgttatcactcagtctttagagcattccgaggtctggcttctacctcgaggacctgcagatagtacataccctaca

SEQ ID NO: 501422 - DNA, 561 bp, Homo sapiens
tgctacacaggctcaacatgatctactaaactgcttacttctctgaatctatttcctcatcaatgaaatgggcttgataaacctaatccaaggcatcttcaagagttaagtgagattggatatgaatcacatccattatgatgccctgcacattgggatgtctccaacaaaagctggtttcccacatgctgtgtcttctctcwcatgctgactaccagagggaggcatagcatttctctgctggatttgtgtgtatttcaggaaataagggctccctaaagggaagcctccttcctcagggtgactgcagtgacatggatggatttctctttatctgggccccttcttctgaaccttgtgtctctgcaaattgggttcaggggacaggtgaccagcttcatgaggcacacgtgtgtgcgtaagcatagtcctgtattatgatgatgacctttgaatccaggtggcagtgctgagcttgggattcaggaaaaagcagatgggtgaaggcaccatgtgagcagtgctccatatgcagttctgttgagcagaggaggaacaatg

SEQ ID NO: 501423 - DNA, 561 bp, Homo sapiens
tgctacacaggctcaacatgatctactaaactgcttacttctctgaatctatttcctcatcaatgaaatgggcttgataaacctaatccaaggcatcttcaagagttaagtgagattggatatgaatcacatccattatgatgccctgcacattgggatgtctccaacaaaagctggtttcccacatgctgtgtcttctctcacatgctgactaccagagggaggcatagcatttctctgctggatttgtgtgtatttcaggaaataagggctccctaaagggaagcctccttcctcagggtgactgcagtgacatggatggatttctctttatctgggccccttcttctgaaccytgtgtctctgcaaattgggttcaggggacaggtgaccagcttcatgaggcacacgtgtgtgcgtaagcatagtcctgtattatgatgatgacctttgaatccaggtggcagtgctgagcttgggattcaggaaaaagcagatgggtgaaggcaccatgtgagcagtgctccatatgcagttctgttgagcagaggaggaacaatg

SEQ ID NO: 501424 - DNA, 561 bp, Homo sapiens
tgctacacaggctcaacatgatctactaaactgcttacttctctgaatctatttcctcatcaatgaaatgggcttgataaacctaatccaaggcatcttcaagagttaagtgagattggatatgaatcacatccattatgatgccctgcacattgggatgtctccaacaaaagctggtttcccacatgctgtgtcttctctcacatgctgactaccagagggaggcatagcatttctctgctggatttgtgtgtatttcaggaaataagggctccctaaagggaagcctccttcctcagggtgactgcagtgacatggatggatttctctttatctgggccccttcttctgaaccttgtgtctctgcaaattgggttcaggggacaggtgaccagcttcatgaggcacacgtgtgtgcgtaagcatagtcctgtattatgatgatgrcctttgaatccaggtggcagtgctgagcttgggattcaggaaaaagcagatgggtgaaggcaccatgtgagcagtgctccatatgcagttctgttgagcagaggaggaacaatg

SEQ ID NO: 501425 - DNA, 616 bp, Homo sapiens
catctattgagataatcgtacaatgttagtttttaattctgttctggaaaaggtaaagggaaagtctcaccttaagcctctgggaagaatacagtttgggccaacaccttgatgtcagccctgcagctctcattgtgaactcctgcccttcgaaacactgaggtgataaatgttaagtcactaagtttgtggaaatttgttgmaggagcaataggaaacgattgcttggatgttgtagataaatttggttggaactgatatctgtacattattgggtcttccattcatgaaagtaatataactgtacatttggtcagtcttctatgcctttcaataaagtagtgtaattttctccataaagatctttcacatcttttgatatatttattccaagctactttgtaatttttgctgttcatggtataaatttttaaaaattatattttctcatttgtcattgtgtgtaggaacactataggtttttccaagttgatctttccagcaaacctactgaacttaaaaaaaaaattattccgatcatttgcttaaagtgcccagtggattttccatgcagacaatcattatttacaaacaatgtgtcttcctttctaactct

SEQ ID NO: 501426 - DNA, 616 bp, Homo sapiens
catctattgagataatcgtacaatgttagtttttaattctgttctggaaaaggtaaagggaaagtctcaccttaagcctctgggaagaatacagtttgggccaacaccttgatgtcagccctgcagctctcattgtgaactcctgcccttcgaaacactgaggtgataaatgttaagtcactaagtttgtggaaatttgttgcaggagcaataggaaacgattgcttggatgttgtagataaatttggttggaactgatatctgtacattattgggtcttccattcatgaaagtaatataactgtacatttggtcagtcttctatgcctttcaataaagtagtgtaattttctccrtaaagatctttcacatcttttgatatatttattccaagctactttgtaatttttgctgttcatggtataaatttttaaaaattatattttctcatttgtcattgtgtgtaggaacactataggtttttccaagttgatctttccagcaaacctactgaacttaaaaaaaaaattattccgatcatttgcttaaagtgcccagtggattttccatgcagacaatcattatttacaaacaatgtgtcttcctttctaactct

SEQ ID NO: 501427 - DNA, 478 bp, Homo sapiens
gtagtgatggtagaagttatgggtatggataaaattttccaaagaaaagacatagcaaaagaagaaaaaaaaagagttgaagatgtaattctagggaataaatgagacagaggatggtcagatggacaaaagaggactgaattacamaagccggaagaaaagagaatgttgaggaggaatggtatagacaacagttttgactgctactgagacactaaggagaaacacagttaagaggtcatcaaatgtggtacttggaaggtgacctttggctctctgagtatataacaggctataactgtgtgggtcctggtgttctaaacttgtcaataataaaagcataaaaaaggaactcagtttatctgagaaaaatactaaaccctatttcctaacaggaaacagtcttaaatatatcaatgcttatgtagttaattattgtgtatttcagatttaagcattatttatctggcccaatttg

SEQ ID NO: 501428 - DNA, 478 bp, Homo sapiens
gtagtgatggtagaagttatgggtatggataaaattttccaaagaaaagacatagcaaaagaagaaaaaaaaagagttgaagatgtaattctagggaataaatgagacagaggatggtcagatggacaaaagaggactgaattacacaagccggaagaaaagagaatgttgaggaggaatggtatagacaacagttttgactgctactgagacactaaggagaaacacagttaagaggtcatcaaatgtggtacttggaaggtgacctttggctctctgagtatataacagrctataactgtgtgggtcctggtgttctaaacttgtcaataataaaagcataaaaaaggaactcagtttatctgagaaaaatactaaaccctatttcctaacaggaaacagtcttaaatatatcaatgcttatgtagttaattattgtgtatttcagatttaagcattatttatctggcccaatttg

SEQ ID NO: 501429 - DNA, 574 bp, Homo sapiens
ctagctacatggggagagcatggagacacaaagccagcattactaggaatcacagggctagaggaagaagcagcctggctcctggaagttcaaccagcctacaacctttgaacttcttagtaagaaaaaaaatagacccccagtgggcagtgaactatcactgtgtacttccaataaaccctgtctcttttcttggtggcttctgcttcctgccgtgaagtgtagaccttgtctcaaataccacaggacacagatggtgttcttaggactcaatttgaaaaaaaaatgtatttatgcatgcataggaatcataaaatataaatttaaactcgtcttttgaacgaggaaagtaacatcaataraactatgaacaagaattaatgttagctttttgcccaagcaattctcctttccttcatgtttatctttgctttctcttgaagaatgacctaaaggaagtaacccaccttccacagtcctttgaattcatggatacataaatgaacactatgaactttagactttaagaagtgtatattagtcagggtttgccagagaaacagccagtaggatg

SEQ ID NO: 501430 - DNA, 549 bp, Homo sapiens
gttagaaatgcaagttctcaggcctcaccctataccwaccaaattagaaatgctggctagttttgatgcacactaattaatgcatgaaatccattgatctagtccaagtgttgtccaactcatatttatggactagctgcttattttttataacaaaatggtttattggaacgcagccacacccattcgtttacttagagcctatggctgcttttatatcacaaggcagagttgagtggttgacagaataaaggatttatgatatggctcttaaagaaaacatttgccaactcctactctagtgcaaccctgcactgctgctccccacaggtgagtcatattcttaccaagagtcagtggtttttcttacccaaacctgtgtgtaccagttactcttgttattgctatcatttaacctaattgaacctacctcaaccaatgccctatgaattcaataaggaaatagggattttggattttatttttatggaaactaagttgagtgttttgaagatgcttgaggtgagtaactaaaatgtattgctataa

SEQ ID NO: 501431 - DNA, 549 bp, Homo sapiens
gttagaaatgcaagttctcaggcctcaccctataccaaccaaattagaaatgctggctagytttgatgcacactaattaatgcatgaaatccattgatctagtccaagtgttgtccaactcatatttatggactagctgcttattttttataacaaaatggtttattggaacgcagccacacccattcgtttacttagagcctatggctgcttttatatcacaaggcagagttgagtggttgacagaataaaggatttatgatatggctcttaaagaaaacatttgccaactcctactctagtgcaaccctgcactgctgctccccacaggtgagtcatattcttaccaagagtcagtggtttttcttacccaaacctgtgtgtaccagttactcttgttattgctatcatttaacctaattgaacctacctcaaccaatgccctatgaattcaataaggaaatagggattttggattttatttttatggaaactaagttgagtgttttgaagatgcttgaggtgagtaactaaaatgtattgctataa

SEQ ID NO: 501432 - DNA, 549 bp, Homo sapiens
gttagaaatgcaagttctcaggcctcaccctataccaaccaaattagaaatgctggctagttttgatgcacactaattaatgcatgaaatccattgatctagtccaagtgttgtccaactcatatttatggactagctgcttattttttataacaaaatggtttattggaacgcagccacacccattcgtttacttagagcctatggctgcttttatatcacaaggcagagttgagtggttgacagaataaaggatttatgatatggctcttwaagaaaacatttgccaactcctactctagtgcaaccctgcactgctgctccccacaggtgagtcatattcttaccaagagtcagtggtttttcttacccaaacctgtgtgtaccagttactcttgttattgctatcatttaacctaattgaacctacctcaaccaatgccctatgaattcaataaggaaatagggattttggattttatttttatggaaactaagttgagtgttttgaagatgcttgaggtgagtaactaaaatgtattgctataa

SEQ ID NO: 501433 - DNA, 546 bp, Homo sapiens
tcaataaggtactagccctttcagatgactgatttacatttcaaagggaatatttcatgccttaacctactactgattttcacacattttaaacagtaaaattcttttatgaaacttacaaatttattcttacaaagaagctcagccaagagacaaatgaaaagggagcagttctggaggaagctggggcagagggtcccgagcctcacccatcgttctcctcacctcctcgcctctcccaagttatccctgtagcatttagagcttttgccccaattcaaggttaagttgggggaaaatagcagaaatctgggatcaagtaagaaacaggtcttctcaaatcataatattaaagctagcaaagaataaaaggaaagtaaacccaacaattcttatgatccttttctttctataaaaattatatcttaaatatccattatagtacgtgcaaaatgacaaacagaacaggcaaatcatcggtcaggggcttggcaagaaacagatgggaytcacagtttgggtcatttaaggaaagttgagtaaatg

SEQ ID NO: 501434 - DNA, 608 bp, Homo sapiens
tggcagaacacagtctttcttctgggaaagccgccttgcatgaaatagaacatgctaaaggacttgcaggtgttatgaattgagtgtaaaagatgagactatgtctgattagggagagctaacgatgtatagacatgtctttctaaacaccgagttactaatattttttttgtgtgtggatgacagttctttcattgaacaaatatttttgaatttgtaatctgcacaaagcagtgcactagacacagcccatagcctaagaaacaaataaaactggccatgatggaaaagacagtgaaaaatcaacatagaaatgaactcaatctctaaggtaatgcagtgccttattttggttttctttttcataatgagatttccatccaactcattctagagatcataaaggtattartaaaagctaacatttagcatggccagagaggtgaaattatctgcccaaggtcttattcaggttttgtaattcccagtttagtaaaatgttgacttcaccataatcttctgtgaaccaatcagataagagttcatgaccatatcatccacttacacttccctggtgttgcaaaaggaattattatttatgatttagc

SEQ ID NO: 501435 - DNA, 447 bp, Homo sapiens
acatatcacaatgttcatgatgttctcaaccatatgactcagtgacatctacataattcaccaaatttgatatttctttcagaatttagtgctaagaaaaactttatttaactakaactcatttctttcctttacaaaaaaagaagaagtatttaatgtaacagttttccttctctcagtgggcaggaaactcagatgaaagttttatactgaatcatagtgacattttaagaattaggcttttttctttttctctttgcctttcctcatttattttcttctcttccttttacagtgttttcaaactcatgggttttttttttttttttttcttataatacattcttgtctacaaaaaaagtcactaggtgttccttaggggataaaagaatgttagtttaggcaacactgactagataaaagctcaaaatattttttgcctcacat

SEQ ID NO: 501436 - DNA, 447 bp, Homo sapiens
acatatcacaatgttcatgatgttctcaaccatatgactcagtgacatctacataattcaccaaatttgatatttctttcagaatttagtgctaagaaaaactttatttaactagaactcatttcttycctttacaaaaaaagaagaagtatttaatgtaacagttttccttctctcagtgggcaggaaactcagatgaaagttttatactgaatcatagtgacattttaagaattaggcttttttctttttctctttgcctttcctcatttattttcttctcttccttttacagtgttttcaaactcatgggttttttttttttttttttcttataatacattcttgtctacaaaaaaagtcactaggtgttccttaggggataaaagaatgttagtttaggcaacactgactagataaaagctcaaaatattttttgcctcacat

SEQ ID NO: 501437 - DNA, 655 bp, Homo sapiens
tttttgcaatgagtgggctctagctaagactaatccacgtcttcttaccttattctgtaataagtaaccagaggaaaataatgttgctgcttcatagtgacacgtttcaggccattcatcaaagattggttagctagtgcttctaaaatttttcattgattgcatttacatgagtcatactttttcatttatacaagttccttagcattacatgacagtagtgtattacatttgttgtgacagtcatattaaagtccaattatcactagttatcatcatgacagtgtactcattctctagattatctagcctatttccactgatattaaaacacatttttccaagttaaagtaatattttttataacatgtctttttactctacttactcatacatatgatctgggccagaatagctttgttcctcttctcctttaatagaaagtcctcactgaatttcatatgctagcttcaaacttacctcttttttctgagtttttartaaattttttatttttggctctgaaaacacttatttgtaaatattttaaggttgttgggtgttgctgctgggtgttacctctttggattgattgtaaatatcctgatgggtatttactgtggaatgggttttccagcttttttactttttctga

SEQ ID NO: 501438 - DNA, 592 bp, Homo sapiens
agtgttttcattgagagtagctttttttacataagtaacaaaaggtaaaataatcacacagatcatatgtcaatatgtcttccatatgttgtatatacaaactataaatgcatgtagattatatatgtagactacttagaaatacacatacacagtcttacttcagtacctttcaggtataataggtggcaggcagattgaaagcattttatttatggtgagacattgagaaaggttgagcataaataaaatggaaatcaaattgctattagagkcaaatagttaagcatgagcctaaccattgcaaggaaattagaggaaagaaaaattgagaattaaaaatatattttattaaccaacttttagtactctctttaatgggaatgtaccacaagttctactaaaataaatgcggtaacaaaaatgcttcaaaatgcgtatgcatgggagctgggtacaatgttgagaacaagtgcaagtgatgacttgattcagttaaggtggctgtcagtttagtttactatcaaacctgcaacaagctgtgtagaggacaaacacaaggttaagaacacagtgagcaggatcactcatg

SEQ ID NO: 501439 - DNA, 452 bp, Homo sapiens
gcagtacaatacacactggactggggactacasagtctgtgtaacaatgggacctaaaagccctggttgccctagagacaaggccacctcagcgtagatgcaacttgcatgaaccttgtaacaaagcttgcccttacaagaatagctaaagttcctttatgaaagaagcacctagtaactgacctggactgaatatagatataggaaagaggaaagaatccctcaaactctcagaaaagtctccaaagggagatcctcccagtaagtcagtcaactgacccttgactgtgtctggcccaggtcactgggcctgttcctgctgtccgtcttgtaagatccttgctagaataaactgcttgagtatcagatggtgcctaagagttacctttaatgggaataagactgaaggagaaaaactgcccctggggaagctggttaaataggaccaactg

SEQ ID NO: 501440 - DNA, 478 bp, Homo sapiens
gctgtcttatacttaagcaaatacaccraataatagtttgtagctttattgctgcttttgttcaaactatgttttatatcctctgtgaccaaggaaatttctgatattgtcctatcaggctaaagaaacaaaaagccgggcgcggtggctcatgcctgtaatcccagcactttgagaggccgaggcaggtggatcacaaggtcaggagatcgagaccatcctggctaacatggtgaaaccccgtctctactaaaaatacaaaaaattagctggatgtggtggcgggtgcctgtagtcccagctactcaggaggctgaggcaggagaatggcgtgaacctgggaggcagagcttgcagtgagccaagatcgcaccactgcactccagcgtgggcaacagagcgagactccgtctcaaaaacaaacaaacagacagtgattatactttcaagtggcagtttatcccagatactccatatg

SEQ ID NO: 501441 - DNA, 478 bp, Homo sapiens
gctgtcttatacttaagcaaatacaccgaataatagtttgtagctttattgctgcttttgttcaaactatgttttatatcctctgtgaccaaggaaatttctgatattgtcctatcaggctaaagaaacaaaaagccgggcgcggtggctcatgcctgtaatcccagcactttgagaggccgaggcaggtggatcacraggtcaggagatcgagaccatcctggctaacatggtgaaaccccgtctctactaaaaatacaaaaaattagctggatgtggtggcgggtgcctgtagtcccagctactcaggaggctgaggcaggagaatggcgtgaacctgggaggcagagcttgcagtgagccaagatcgcaccactgcactccagcgtgggcaacagagcgagactccgtctcaaaaacaaacaaacagacagtgattatactttcaagtggcagtttatcccagatactccatatg

SEQ ID NO: 501442 - DNA, 525 bp, Homo sapiens
aataacttcaattttatatcatttgctttagtattaaaggtgaaagtatgactaatgaaagtcaattttgctttattttaaaaagcagcaggggagggcaagatagccaactagatgcagccaggtagaacagctctcacagagggactgagatgacaggtatgcttttaacagatcttcagaggaaaggcgctgagagtggacagagggaagacacagaagctggtctgaagcagcagaaagctggaaacaatgcatggggctactgtacaccgggactcatttttggaccacaatagctccaggagaacaagttsaactgtcaagaagcaatccactctcacaggcctctggaaccccgagcaggaagagacccctcgaccaccagagacacttgagttagcagggagagctgctgtcccttagagctgcaacccctacttggtagagatagcaagccagctgatgcagagcccaaagggtttgataaagaagcatctgtagtgaagtgtggacttggccaac

SEQ ID NO: 501443 - DNA, 632 bp, Homo sapiens
tggcaaaaaaggccaggcaacaacactatttggaacagggtgtggctgacttgaccgctgtactcggaatctcaggtaacctgcttttcacgtgtcagccatgttgggcgtctgttccatttgccaggaaagtataaaaatgcatccttggtcagaatcctattctgtttctctctgcctctccatgtcactagcattattttttcctcagtacaaagtattgtgaaagaactgttatcattacttacagagtaaaaaataaataaataaataaatcctccattgttttaaggggggactggattcagcttccactttgtttcaagtttatctttacaaaatgctgcatttacatcagtataatttgctggtaacttttcaatatcaaatgttcacttgaaaatcaattttgaaactatttaccaattttctgtgataaaataatcaccagtatcatatcyggatgacacattttcactagtttttaattttttgccttgaaaacacaatatataatgttactggtttcattatgtgcttaagtgccttaaaattacaatattgtatttaagtcatctttatgttagaaggaaaatttaaagaatattattcaaaaatagattgcgccctcc

SEQ ID NO: 501444 - DNA, 632 bp, Homo sapiens
tggcaaaaaaggccaggcaacaacactatttggaacagggtgtggctgacttgaccgctgtactcggaatctcaggtaacctgcttttcacgtgtcagccatgttgggcgtctgttccatttgccaggaaagtataaaaatgcatccttggtcagaatcctattctgtttctctctgcctctccatgtcactagcattattttttcctcagtacaaagtattgtgaaagaactgttatcattacttacagagtaaaaaataaataaataaataaatcctccattgttttaaggggggactggattcagcttccactttgtttcaagtttatctttacaaaatgctgcatttacatcagtataatttgctggtaacttttcaatatcaaatgttcacttgaaaatcaattttgaaactatttaccaattttctgtgataaaataatcaccagtatcatatcckgatgacacattttcactagtttttaattttttgccttgaaaacacaatatataatgttactggtttcattatgtgcttaagtgccttaaaattacaatattgtatttaagtcatctttatgttagaaggaaaatttaaagaatattattcaaaaatagattgcgccctcc

SEQ ID NO: 501445 - DNA, 534 bp, Homo sapiens
accatacaaacaaactaatgactagccatattttttagtctgcaaattgtcttcttccatgaatggagaaaaaataatttgtccttaggacagtaatcactgatatgcaaatagtgttgccaaaaatggagttttcaaagtctgcttgaaaacttcttacatgatttygtacacgttttcttactttagtaaggtatggtttaatactatcataaattaacaaccaaagcgtaagaagcggtataatactgtagtttccataacattatttcaggtaaataataagctctgttatttttctagatccctgcttttgaaatgaggtggtaggtggctgggcagaaggaaagctaaggaggcccgggttgttgggagttcccagcaggggttcaaggtggaatccggaagccaggcctcatcgtcagagaagacctagactgagccagctctgaggatgctttgaacatcaacatctgccatcagcttctgtccttggcagctttcagagacacaagactgaaatatagctttcag

SEQ ID NO: 501446 - DNA, 552 bp, Homo sapiens
tttttgtatttttagtagaaatggggtttcgccatgttgaccaggctggtctcaaactcctgacctcaagtgatttttaaaattatcctgcagccctagagggatgagctgcgagatgggttctgtatttctaaattcattcccaattttttctgtggctatatggaggccagaattcctctccatccacaccaatagacacaatatttggccatgatgagagaaagaaataaacttttgttgggtcaagtagcaaaaatgttgatttactttttcatatgtgatgcttacctttatatgtcaacttcactaggctatagtayccagttatttaaccaaacactaattcagatgttgctgtgacagaattttggagatatggttaacatctacaattggttgaccttaagtaagagaagttcaccctcaatagtttgtgagggcctcatcctacaattagctaaaggcctgaagagcaaaactgaagtttttctggaaaaagaaattctgcctcaaggatacagtaccaactcctgcctgaatttccagtca

SEQ ID NO: 501447 - DNA, 552 bp, Homo sapiens
tttttgtatttttagtagaaatggggtttcgccatgttgaccaggctggtctcaaactcctgacctcaagtgatttttaaaattatcctgcagccctagagggatgagctgcgagatgggttctgtatttctaaattcattcccaattttttctgtggctatatggaggccagaattcctctccatccacaccaatagacacaatatttggccatgatgagagaaagaaataaacttttgttgggtcaagtagcaaaaatgttgatttactttttcatatgtgatgcttacctttatatgtcaacttcactaggctatagtatccagttatttaaccaaacactaattcagatgttgctgtgacagaattttggagatatggttaacatctacaattggttgacyttaagtaagagaagttcaccctcaatagtttgtgagggcctcatcctacaattagctaaaggcctgaagagcaaaactgaagtttttctggaaaaagaaattctgcctcaaggatacagtaccaactcctgcctgaatttccagtca

SEQ ID NO: 501448 - DNA, 622 bp, Homo sapiens
tatgtaaaggtggatctgtggttagtacatacactcaggatctacatgctctaacacatatcatatgtatcattagcatataaaatctccatctaaggggtgttttttgatattaaaatgagaaaaatattactataagctaaaccttgagtctagctatgcctgtgggacactggaggagtctctgcccctctctcagtgcccagcaggcagaaatttgtagctaatagtttcttgtgcttttggtgctggggaagttacatcaggaataayagacttttgttctcttccccaagcccatactgagtatcaggaacttgtaaccatctaacagtctgttggtattcggtaggaccgcttatcttgcaaaagagttaggtgttgatgcctgagggtgcaaggggaaagagccagctataaaagtggcccactgagctttacacacaggacaagtaagtatgggtcctaaccttacttatcctgcctcaagaccatgttttcattcttatgcaaataggaagcttcctgactgtggtacctaggacattggagagagactagagttgtgacatttaaaataaggattacctatcattacactaaaaataatatttgtaaacag

SEQ ID NO: 501449 - DNA, 473 bp, Homo sapiens
ttcatgttgatttggaagaattctctgtaaaatgaatagccatttttaatatgtacacacacaaaaacacgtggtaaatattatataagtatgatgtcttttattttatctttttctcatattcagtgtgrtttaattttaattttgctaaataaactttcagaatgcttgcttgagaggttcctaggaaggtctttgtcaacacaaaaatgtatttgtataaataggcatttgcgttttcttctggtatttttctcattttgcatatttaaaataatctatattcaatgagaaacttatttttgtgacataaaaatctagctagtttcttccaaaaagcaggcatttcatttataaaaataactcttttcttattagtataaagtctcaccattaccctgttatacgttcttacatatatttgggtgttcctggattttctattctcttgcattcatttatctatcttttca

SEQ ID NO: 501450 - DNA, 473 bp, Homo sapiens
ttcatgttgatttggaagaattctctgtaaaatgaatagccatttttaatatgtacacacacaaaaacacgtggtaaatattatataagtatgatgtcttttattttatctttttctcatattcagtgtgayttaattttaattttgctaaataaactttcagaatgcttgcttgagaggttcctaggaaggtctttgtcaacacaaaaatgtatttgtataaataggcatttgcgttttcttctggtatttttctcattttgcatatttaaaataatctatattcaatgagaaacttatttttgtgacataaaaatctagctagtttcttccaaaaagcaggcatttcatttataaaaataactcttttcttattagtataaagtctcaccattaccctgttatacgttcttacatatatttgggtgttcctggattttctattctcttgcattcatttatctatcttttca

SEQ ID NO: 501451 - DNA, 274 bp, Homo sapiens
ccggcaatcatttattatttgagacaggtagtttaatggcagcctgacccgtcgcctcctggtcgcctgatgtgtctggtggggtgtgggcgtggccctctccygcgctgctcctgtctgaccagccgcccacggtaacacacaaacatctggcaggatggagtggttggcggaagacacatctgacgagatcgaatgttttgcagaagagccatgtgacgggatccgtggtttggcagaggagacatgcgagaagacggaacgttttgtccga

SEQ ID NO: 501452 - DNA, 274 bp, Homo sapiens
ccggcaatcatttattatttgagacaggtagtttaatggcagcctgacccgtcgcctcctggtcgcctgatgtgtctggtggggtgtgggcgtggccctctcctgcgctgctcctgtctgaccagccgcccacggtaacacasaaacatctggcaggatggagtggttggcggaagacacatctgacgagatcgaatgttttgcagaagagccatgtgacgggatccgtggtttggcagaggagacatgcgagaagacggaacgttttgtccga

SEQ ID NO: 501453 - DNA, 581 bp, Homo sapiens
gctgctcctgtctgaccagccgcccacggtaacacacaaacatctggcaggatggagtggttggcggaagacacatctgacgagatcgaatgttttgcagaagagccatgtgacgggatccgtggtttggcagaggagacatgcgagaagacggaacgttttgtccgaatagacatctggcagggtggaacggagagaacacgtatggtggagagaacgtctgagaaggtcgcaggattcgcacgagcatcgggaaaagattgcctgcttgcccgaaggaatggcaagttccaaaggtcagaggctcgcgtgaactctgtcgggttcgagagcagctcagtgttgctggtggcaagagtgtggtacgggaatggttgggtgtggtttgaatgtctagaaaaggcgagctgagggtagatttttgagcrgtccagagcagaaggggtagaggatatattctgtgggccacggccacattctcaggatgctcgtggctgtaaatagtagatgacccaagtaagagcggctgaagccataggcaccagaattgtgtcagcatcgtcgtgtcatgctcatgtttt

SEQ ID NO: 501454 - DNA, 523 bp, Homo sapiens
ttttgcagaagagccatgtgacgggatccgtggtttggcagaggagacatgcgagaagacggaacgttttgtccgaatagacatctggcagggtggaacggagagaacaggtatggtggagagaacgtctgagaaggtcgcaggattcgcaggagcatcgggaaaagattgcctgcttgcccgaaggaatggcaagttccaaaggtcagaggctcgcgtgaactctgtcgggttcgagagcagctcagtgttgctggtggcaagagtgtggtacgggaatggttgggtgtggtttgaatgtctagaaaaggcgagctgagggtagatttttgagcagtccagagcagaaggggtagaggatatattctgtgggccacggccacattctcaggatgctcgtggctgtaaatagtagatgacccaagtaagagcggctgaagccataggcaccagaattgtgtcagcatcgtcrtgtcatgctcatgttttcccttccagctgtgctgtgggcagtgtttagttc

SEQ ID NO: 501455 - DNA, 596 bp, Homo sapiens
gtggccctctcctgcgctgctcctgtctgaccagccgcccacggtaacacagaaacatctggcaggatggagtggttggcggaagacacatctgacgagatcgaatgttttgcagaagagccatgtgacgggatccgtggtttggcagaggagacatgcgagaagacggaacgttttgtccgaatagacatctggcagggtggaacggagagaacaggtatggtggagagaacgtctgagaaggtcgcaggattcgcaggagcatcgggaaaagattgcctgcttgcccgaaggaatggcaagttccaaaggtcagaggctcgcgtgaactctgtcgggttcgagagcagctcagtgttgctggtggcaagagtgtggtacgggaatggttgggtgtggtttgaatgtctagaaaaggcgagctgagggtagatttttgagyggtccagagcagaaggggtagaggatatattctgtgggccacggccacattctcaggatgctcgtggctgtaaatagtagatgacccaagtaagagcggctgaagccataggcaccagaattgtgtcagcatcgtcgtgtcatgctcatgtttt

SEQ ID NO: 501456 - DNA, 521 bp, Homo sapiens
caaaccgcatggcgtttctttcccggatcccgtttcaggaacgtttctgttggctacaaggaccgtctccaacatgcttaggctctgtgaactttcccaggatcctgagtagggtatccgccattcgtccttagggctccgggatgtctcgttcttactgtgtccctgccaaccctggtcccatctcgtcatgatcacccactgcagaagagaggaggtgctagagtgaacagggtcaggggagccccgttcatccccagggtcccagaatgaaccagtgttaccatgtacccctgcccttgccttcctccctgctctaatggccgtgtgttagccggagatcagtttgggtctgggtgctatgggtctgttgcgcctgtggccttggtccggcctctgtccttgtctctgtgaaatgagagtgactgtgcctgagagcgttccagcaagacaatgatgatctccactgtctgattcccgcttcccaggttctcacartagacgaggagcctgtttttcag

SEQ ID NO: 501457 - DNA, 552 bp, Homo sapiens
cagaatgtgggcgtggtggacaagtggagtgtgtcagagtaggaaaggacagaattgaggttaaatccctgagatgcatgaacatcagtctcaatttatagaaagatctcttcactcttttgtggtagacagaattccagtaaacgctgtgaattgtgaaatcaggccatttgtttatttgttcattcatttattcatcttatttattagaccaacttcrcacccctctcttacgtcctaggcactgtctggcagcttccccgctgaggagttcagtatggtgggaggcatgtgaacacacattttaatactgtgtgctaagagctctggtaggagagagtttgtaagaataactaacccaactagcagcaagcaactcaggcaacagcttcctgcgggatgtcatgcgtgaattagatacgaggaccccaaggagctgaagaggtaacatgggaggattttactgcagggtggacagcacaggcaaaggcatggaggcatgaaacagcatggcgtggaagcactagcagcttaataaatagcctgattaga

SEQ ID NO: 501458 - DNA, 530 bp, Homo sapiens
gaactaaacactgcccacagcacagctggaagggaaaacatgagcatgacacgacgatgctgacacaattctggtgcctatggcttcagccgctcttacttgggtcatctactatttacagccacgagcatcctgagaatgtggccgtggcccacagaatatatcctctaccccttctgctctggacygctcaaaaatctaccctcagctcgccttttctagacattcaaaccacacccaaccattcccgtaccacactcttgccaccagcaacactgagctgctctcgaacccgacagagttcacgcgagcctctgacctttggaacttgccattccttcgggcaagcaggcaatcttttcccgatgctcctgcgaatcctgcgaccttctcagacgttctctccaccatacctgttctctccgttccaccctgccagatgtctattcggacaaaacgttccgtcttctcgcatgtctcctctgccaaaccacggatcccgtcacatggctcttctgcaaaacattcga

SEQ ID NO: 501459 - DNA, 618 bp, Homo sapiens
tagatttgttttgttgaagtttcaacaagtgtcttatcagttctttctttttttgatcaaatacttaaaaaaactcgtattttaagttcaggggtayaagtgcaggtttgttacataggtaaacgtgtgtcatgaggggtgtgttgtacagattatttaatcacccaggtattaagcctagtactgatttattatttttcctgattcactcccttctccaaaccttcatgctctgataggccccagcatgtgtttttcctctctaagtgtccatgtgtcctcaactttgagctcccacttattagtgagaacctgcagtatttgcttttctgttccagggttagtttgttaaggataatggcctgtaactccacccatgtccctaagaaggacatgatctcattcttttttatggctgcttagtatttcttggtgcatatgtaccacattttctttatccagtctatcactgatgggcattataagaagaatcaattctttattaacacattcagcccattcgaccagtgttgcagttagtggaactaagatgaatcaaaaaaatagaagaaaaattgttctgatgtggaaagtggaggactaaaatcttgtttcaaa

SEQ ID NO: 501460 - DNA, 652 bp, Homo sapiens
ttaaactgtcttaaacaaaatgggtcaaaacaaatatctaagagttgttttgctagtttcctcttttctttatcactgtcttcttcccttagattttacacttattgtgacttattgtgaaaatasatacattcatatatacataataaaagtgagaaaaaaggaataaattaatgttggttagtacttggtttatgaaaaggagaaagtaatcatgagaatactagtctgaaggacaagagacacaggttctaatactacctctgcctttaatttgtcttgtggtatttagtgaaaacaaaaagcatttagtcaaataagtggaaaacaaaccaagtattggttttaaattaaattcttgaatttctaaaaagtgtaaaaaataacaatgtgagattttagcctattttaaaacataaatttcaaatatctcttaaaaatcatagatgtaatggggaaattcctgcccaaaccaaagcatcctcctatttttgttaatatgcatggtcttatttgaactcagcctggtaactttggtttactcatggaaacaaaaagggttatgacttgtgggctatatatgcctttgattaataataaatttgtagtcaattattatttaataaactccatgggtttggaagaccacagc

SEQ ID NO: 501461 - DNA, 647 bp, Homo sapiens
ctatcaagtggagaaaataagggaccataagaacaaatttgatttttatgtagaaagaagcaaagatgcagtaagcagagagagagagagasagagacagagacagagacagagacagaaacaaagagacagagagtgtgaagtgtgtgttggaaagaggattcacctaaatctggaccctgatatgaaaggtacacaaacctatggggttactggctatccttttatgggttatagtttgccagatgataaaattctaccctttgccgaattataggctttttcccaattcaaatgaatcgctggcttaagctcttctcactctgtttttttaacatacaggatgcaaaagtgtagcaaaagatagtttgagtggcagaaatcaagcttcagttgctttccttttcttaatgagctgcagttatggctctagtttgaggcccctttgctgcatacatggtaaacaaacaaacaaataaacaaacacactttgccacataatgactcctaggacctagcctctgtttcttgtttagtgaatggtgtctttgataatgatctatcttacaagcaaaatccaaaattattagtccaggaacactgaaagaggctgctgctaaaacaagcttctcaaaggtctggactat

SEQ ID NO: 501462 - DNA, 647 bp, Homo sapiens
ctatcaagtggagaaaataagggaccataagaacaaatttgatttttatgtagaaagaagcaaagatgcagtaagcagagagagagagagacagagacagagacagagacagagacagaaacaaagagacagagagtgtgaagtgtgtgttggaaagagsattcacctaaatctggaccctgatatgaaaggtacacaaacctatggggttactggctatccttttatgggttatagtttgccagatgataaaattctaccctttgccgaattataggctttttcccaattcaaatgaatcgctggcttaagctcttctcactctgtttttttaacatacaggatgcaaaagtgtagcaaaagatagtttgagtggcagaaatcaagcttcagttgctttccttttcttaatgagctgcagttatggctctagtttgaggcccctttgctgcatacatggtaaacaaacaaacaaataaacaaacacactttgccacataatgactcctaggacctagcctctgtttcttgtttagtgaatggtgtctttgataatgatctatcttacaagcaaaatccaaaattattagtccaggaacactgaaagaggctgctgctaaaacaagcttctcaaaggtctggactat

SEQ ID NO: 501463 - DNA, 569 bp, Homo sapiens
taataggtgagggcctcaggtgacaccgtcgtctgaagtcttggagaaacctttactgtccaggggaggagaggactggcggtcggtggggatcgaggcccagcacacatcactgggtggcttgaatgtcttcggcagagatcacatgccctgccttgcagcctggtccttagagaaacggagagagctctgggcctgggcagcggccctggctgtaccactcacaggctgtgtgtcctcaacgcagtctcagttcctcacccttgccaggtggccgtgagcactggggacgtggaggcacaggtagggtgtaaggtagtccctggtgaccaggcaggcctcccrgatgtaggtcaggtttgagacgcttgctcaccaggaggcagcctgtgtgcccatcgggggctgggggtgctcattgttcccttgggtggtggttggcccgagcgcccacagggagacttctctggctccttcctttcccagagttcctccccacccccctgctgcccaccgcctgggttgggtccagctcatgtctcagagcagcctgctggcacaggctgagt

SEQ ID NO: 501464 - DNA, 569 bp, Homo sapiens
taataggtgagggcctcaggtgacaccgtcgtctgaagtcttggagaaacctttactgtccaggggaggagaggactggcggtcggtggggatcgaggcccagcacacatcactgggtggcttgaatgtcttcggcagagatcacatgccctgccttgcagcctggtccttagagaaacggagagagctctgggcctgggcagcggccctggctgtaccactcacaggctgtgtgtcctcaacgcagtctcagttcctcacccttgccaggtggccgtgagcactggggacgtggaggcacaggtagggtgtaaggtagtccctggtgaccaggcaggcctcccagatgtaggtcaggtttgagacgcttgctcaccaggaggcagcctgtgtgcccatcgggggctgggggtgctcattgttcccttgggtggtggttggcccgagcgcccacagggagacttctctggctccttcctttcccagagttcctccccacccccctgcygcccaccgcctgggttgggtccagctcatgtctcagagcagcctgctggcacaggctgagt

SEQ ID NO: 501465 - DNA, 456 bp, Homo sapiens
aagctccatttgatgtgggggttgggrgtggagagcacctctgcgattagacctttgtatcatcttgatgattttaatcagacatctaatattatgctgtagttcatgtcaactgatttcccaaacctgaatttcagagacttcccatgacacatcgggcagtgggagtggggatggtgagagactgttagttattccaggaagagaggccttttctgattgtcctgctcaccagcacactgaggggctgggccggtgacctgatgggctggggagtagagccctggcttatttatgtgcacttgtttcttttgaacatgtcttgttttgctggtgatttggcaaataggttgaaaccaagccctcccccagttcctcaaccgcctaggactccacaggtgcctgggagtccgatggctggcaggctgccttttgaagcttggcctagtgtcccac

SEQ ID NO: 501466 - DNA, 613 bp, Homo sapiens
tggtaggtagcagagccaggtcagtatgattcttcttcaatatcctgccagccacatgggcaagtggcctcaaaatcaacaaaagacargtagaggttgacatgcatcaatggagagaggctcaaaaggaggattttatacacaagaatagaacagaaatgttctggaagtatatctgtggatgtgaagcaggagggggcacaccaggtttcaccttggtcaagtgaatctataattccaaccggggcctcgccgccccccacccccccgagctccagacttagctatctgtctttcttactctaatataaaatccacagggcaggaccttaatctctagcttgttcacacagattaaagcagagtctggcttataataaggacttaataaatacatgaatgaataaataaactatcaaagaagctaaagaaacattccacattcttgcgggaagggattaccatgaaacagaccctagcagtcacttacaaatacagttgaccctcatcattggagtatcccatattttcaaattagcttacttgctaaaatgtctttctaagtcccaaattaatacttgtggcactttcaaggtggctcctggatagacat

SEQ ID NO: 501467 - DNA, 613 bp, Homo sapiens
tggtaggtagcagagccaggtcagtatgattcttcttcaatatcctgccagccacatgggcaagtggcctcaaaatcaacaaaagacaggtagaggttgacatgcatcaatggagagaggctcaaaaggaggattttatacacaagaatasaacagaaatgttctggaagtatatctgtggatgtgaagcaggagggggcacaccaggtttcaccttggtcaagtgaatctataattccaaccggggcctcgccgccccccacccccccgagctccagacttagctatctgtctttcttactctaatataaaatccacagggcaggaccttaatctctagcttgttcacacagattaaagcagagtctggcttataataaggacttaataaatacatgaatgaataaataaactatcaaagaagctaaagaaacattccacattcttgcgggaagggattaccatgaaacagaccctagcagtcacttacaaatacagttgaccctcatcattggagtatcccatattttcaaattagcttacttgctaaaatgtctttctaagtcccaaattaatacttgtggcactttcaaggtggctcctggatagacat

SEQ ID NO: 501468 - DNA, 613 bp, Homo sapiens
tggtaggtagcagagccaggtcagtatgattcttcttcaatatcctgccagccacatgggcaagtggcctcaaaatcaacaaaagacaggtagaggttgacatgcatcaatggagagaggctcaaaaggaggattttatacacaagaatagaacagaaatgttctggaagtatmtctgtggatgtgaagcaggagggggcacaccaggtttcaccttggtcaagtgaatctataattccaaccggggcctcgccgccccccacccccccgagctccagacttagctatctgtctttcttactctaatataaaatccacagggcaggaccttaatctctagcttgttcacacagattaaagcagagtctggcttataataaggacttaataaatacatgaatgaataaataaactatcaaagaagctaaagaaacattccacattcttgcgggaagggattaccatgaaacagaccctagcagtcacttacaaatacagttgaccctcatcattggagtatcccatattttcaaattagcttacttgctaaaatgtctttctaagtcccaaattaatacttgtggcactttcaaggtggctcctggatagacat

SEQ ID NO: 501469 - DNA, 613 bp, Homo sapiens
tggtaggtagcagagccaggtcagtatgattcttcttcaatatcctgccagccacatgggcaagtggcctcaaaatcaacaaaagacaggtagaggttgacatgcatcaatggagagaggctcaaaaggaggattttatacacaagaatagaacagaaatgttctggaagtatatctgtggatgtgaagcaggagggggcacaccaggtttcaccttggtcaagtgaatctataattccaacckgggcctcgccgccccccacccccccgagctccagacttagctatctgtctttcttactctaatataaaatccacagggcaggaccttaatctctagcttgttcacacagattaaagcagagtctggcttataataaggacttaataaatacatgaatgaataaataaactatcaaagaagctaaagaaacattccacattcttgcgggaagggattaccatgaaacagaccctagcagtcacttacaaatacagttgaccctcatcattggagtatcccatattttcaaattagcttacttgctaaaatgtctttctaagtcccaaattaatacttgtggcactttcaaggtggctcctggatagacat

SEQ ID NO: 501470 - DNA, 656 bp, Homo sapiens
ctaagcattctaaaatttcattggattcttttaactatgaattacaagggtgtttaatttccaagttcatgaagcctttggttaatctcttcattattaacttctaaccttaactgcttcatatttaaattatcaattttatggtgtggattgtaccaattgtttttcaatcttctgacgtgcttaatggattaatacataattaatgtttctcccacagtccacatatgcttgagaagaatacagaatatctgattattgggtacagaggtctatatttgtccattacatcacgtccattcacgggttattcaaatctatatatgggcattctgtgtaacttacttatggtaagcagggtatgttgaaatctccaaatacaatggcagactcgtcaatttctccctgtggttttatcagtttttcctctgtattttgagtctattttgataggtacataaaatatgaaaattgctacawcctcctaattaacagtcagttggcatcaagctgttactaatgctttgtgttccaacatcctatcttgtttgaaactgaagctccatcagttgttttggttaatgtataccggcatatctttctctctctctctcctttataaaaactttcaatcttttcacatcctcatagtttca

SEQ ID NO: 501471 - DNA, 624 bp, Homo sapiens
ctgaaaaaaaaaaaaaaaggaatggcactaatgaaaaaactcagaaatagcttatcatgtgtggctcaatagcatgtttctttatggacatgtgtggtcttggctgtgattttataatgcatacatataacgtcatcctattytactgctagtagaattgttcctgaatcctatgatggaattaaacatataaatatgccatggtattctgcagagagcaacattacttccaggtgtgtttccatctagtgggtttagaagcagctctccggttccctctcaactgggtgagagagcagacaggtgccagaggtgatttagggtaaactgagcatatccatttgtgcacaagtttataaatcataaattttacttctcaaagtggctttagactcattcctcagcagggatgagtggacatatgagcagttgtctttttgaatagtttctttcggataatgaaaactgtcagatttaaggaatcagcaataaaaccaacaaataaactcccagtcctcaaaaatcattactacctaaagcaaatgaagttgtccagaacaaattcctttggttgcattataaatataaacatcatgcatgctgcacgtgggctaaccagaaggc

SEQ ID NO: 501472 - DNA, 624 bp, Homo sapiens
ctgaaaaaaaaaaaaaaaggaatggcactaatgaaaaaactcagaaatagcttatcatgtgtggctcaatagcatgtttctttatggacatgtgtggtcttggctgtgattttataatgcatacatataacgtcatcctattctactgctagtagaattgttcctgaatcctatgatggaattaaacatataaatatgccatggtattctgcagagagcaacattacttccaggtgtgtttccatctagtgggtttagaagcagctctccggttccctctcaactgggtgagagagcagacaggtgccagaggtgatttagggtaaactgagcatatccatttgtscacaagtttataaatcataaattttacttctcaaagtggctttagactcattcctcagcagggatgagtggacatatgagcagttgtctttttgaatagtttctttcggataatgaaaactgtcagatttaaggaatcagcaataaaaccaacaaataaactcccagtcctcaaaaatcattactacctaaagcaaatgaagttgtccagaacaaattcctttggttgcattataaatataaacatcatgcatgctgcacgtgggctaaccagaaggc

SEQ ID NO: 501473 - DNA, 624 bp, Homo sapiens
ctgaaaaaaaaaaaaaaaggaatggcactaatgaaaaaactcagaaatagcttatcatgtgtggctcaatagcatgtttctttatggacatgtgtggtcttggctgtgattttataatgcatacatataacgtcatcctattctactgctagtagaattgttcctgaatcctatgatggaattaaacatataaatatgccatggtattctgcagagagcaacattacttccaggtgtgtttccatctagtgggtttagaagcagctctccggttccctctcaactgggtgagagagcagacaggtgccagaggtgatttagggtaaactgagcatatccatttgtgcacaagtttrtaaatcataaattttacttctcaaagtggctttagactcattcctcagcagggatgagtggacatatgagcagttgtctttttgaatagtttctttcggataatgaaaactgtcagatttaaggaatcagcaataaaaccaacaaataaactcccagtcctcaaaaatcattactacctaaagcaaatgaagttgtccagaacaaattcctttggttgcattataaatataaacatcatgcatgctgcacgtgggctaaccagaaggc

SEQ ID NO: 501474 - DNA, 624 bp, Homo sapiens
ctgaaaaaaaaaaaaaaaggaatggcactaatgaaaaaactcagaaatagcttatcatgtgtggctcaatagcatgtttctttatggacatgtgtggtcttggctgtgattttataatgcatacatataacgtcatcctattctactgctagtagaattgttcctgaatcctatgatggaattaaacatataaatatgccatggtattctgcagagagcaacattacttccaggtgtgtttccatctagtgggtttagaagcagctctccggttccctctcaactgggtgagagagcagacaggtgccagaggtgatttagggtaaactgagcatatccatttgtgcacaagtttataaatcataaattttacttctcaaagtggctttagactcattcctcagcagggatgagtggacatatragcagttgtctttttgaatagtttctttcggataatgaaaactgtcagatttaaggaatcagcaataaaaccaacaaataaactcccagtcctcaaaaatcattactacctaaagcaaatgaagttgtccagaacaaattcctttggttgcattataaatataaacatcatgcatgctgcacgtgggctaaccagaaggc

SEQ ID NO: 501475 - DNA, 647 bp, Homo sapiens
cagctggccagctctttgtgcsctgctctgggcatcttctcttccagccctgcctcactccctcagttttttattgttactgacctgtggccctgggaggccagtaggtgacaaaggagtatgttctcatggctcctaagatacaagatggagaataaagtaagcatactaaagatggaagaggaagagagctcaagagagttggtttaaataaaggtagaagatggactttttccagcacagatatttccttcccttagccccctcaccaccacgatcggaactccttccatctcttagattctgttcagccaggggctcagatgaccacagatttggattccatagggtcactgtatattcagaggccagcatgatgcggatgaattgcccatcagtgaacaaactgggagagagtagtgaagaatagccttgataccaactccaggaatctaaaaactatcctctgcttcagggcacattttctctccagcctacctgcctcttaagccacctcctcaacttctttcccttcatgccagactttgaagaaattatactgtgttcaccatctttcttttgtcgaattacatgtgcctaatatttgagcatcaagtgtatatcattcacaaatgaagcatatttgt

SEQ ID NO: 501476 - DNA, 665 bp, Homo sapiens
aaaggaggctgggtggctacaggggtagggcctggagagcagcatgttcagagcctgggggacattgagatcccatgagggccttctccccattccaaactcccactggctgaaagcaaggtgatcctcctgaaagtcaaatctcattatgctgttctcctgtttaagaaaacgaatgaatgagcttttcatgaccagtaagatgaaaccaaaattccttccattggtacaagggccctccatactccgaggccttcrtgcctctgtggcctcatctccaccattcccaagatgtgtctgaagtttcaaccacactcaacttctcctgtttttgaacatgaaaggcaggttctttggggaactttcctttatccattctattttctttgcctggagtgttttttcttcctattctcaagttatcaaactcctactcctgctgctgcagtcacttcagatgtcatctctttccctaaggctccttggcaagatggaaggggctccttctgtttgtccccctactgccattcatagctgatgagagggtgctgccttgtgtccacacctctgatttaacactcctcagaatgtgcgacctgtttccctttgagctactctaagccatatgtctcatgcctctgtctagccccaagggccagcagcac

SEQ ID NO: 501477 - DNA, 648 bp, Homo sapiens
atgatgtccacggttaatgtgtttttcatctcatggatgtcaggggtgggggtagatgcctttatctctgttatgaactcaaatcccttcaatttatctttatttttagggatttaaaaaattaccattaatttgagtaaaattctaataaaaacagtagatggccttttaatactaatattttctacaartcaaaacaaaaaattaaaggaaaggccactcaatttcattgagtattctgtattaggtttcttggctccagcatttaaatagcttttgcttgctaaatatatagggtattctctgaattatctttttattgtttcccaaaatcaacttgctgaaaaggaactatgttggaaaacagttactatcttaaaacacttttctgttttcaaaagtttgaaaaaaatggcatatttaaacaacaaattcttaaacttgagattcatatgatttccttttaaaggggatgaatttgcaaattgccaaagatggtttacagtgtctgacttgctgggacacctgtatttgctaagagaaatgttatttaaaaaacacctaatatatttggaagcacaaaaaaaaatgacgaagggaaagtggggtgcattagctccctgtgagggtcatttttatgtatcaact

SEQ ID NO: 501478 - DNA, 648 bp, Homo sapiens
atgatgtccacggttaatgtgtttttcatctcatggatgtcaggggtgggggtagatgcctttatctctgttatgaactcaaatcccttcaatttatctttatttttagggatttaaaaaattaccattaatttgagtaaaattctaataaaaacagtagatggccttttaatactaatattttctacaagtcaaaacaaaaaattaaaggaaaggccactcaatttcattgagtattctgtattaggtttcttggctccagcatttaaatagcttttgcttgctaaatatatagggtattctctgaattatctttttattgtttcccaaaatcaacttgctgaaaaggaactatgttggaaaacagttactatcttaaaacacttttctgttttcaaaagtttgaaaaaaatggcatatttaaacaacaaattcttaaacttgagattcatatgatttcctyttaaaggggatgaatttgcaaattgccaaagatggtttacagtgtctgacttgctgggacacctgtatttgctaagagaaatgttatttaaaaaacacctaatatatttggaagcacaaaaaaaaatgacgaagggaaagtggggtgcattagctccctgtgagggtcatttttatgtatcaact

SEQ ID NO: 501479 - DNA, 648 bp, Homo sapiens
atgatgtccacggttaatgtgtttttcatctcatggatgtcaggggtgggggtagatgcctttatctctgttatgaactcaaatcccttcaatttatctttatttttagggatttaaaaaattaccattaatttgagtaaaattctaataaaaacagtagatggccttttaatactaatattttctacaagtcaaaacaaaaaattaaaggaaaggccactcaatttcattgagtattctgtattaggtttcttggctccagcatttaaatagcttttgcttgctaaatatatagggtattctctgaattatctttttattgtttcccaaaatcaacttgctgaaaaggaactatgttggaaaacagttactatcttaaaacacttttctgttttcaaaagtttgaaaaaaatggcatatttaaacaacaaattcttaaacttgagattcatatgatttccttttaaaggggatgaatttgcaaattgccaaagatggtttacagtgtctgacttgctgggacacctgtatttgctaagagaaatgttatttaaaaaacacctaatatatttggaagcacaaaaaaaaatgacgaagggaaagtggggtgcattagctccctrtgagggtcatttttatgtatcaact

SEQ ID NO: 501480 - DNA, 610 bp, Homo sapiens
ttggttgttttgagctaagcctggaaagaaaacaggattaaagcagaggagtaagattgggtttgattaatgtttaacacaaaacaattttgggccyggcacagtggctcacgcttgtaatcctaacactttgggaggccaaagaagcggattacctgaggtcaggagttagagaccagcctggccaacatggtgaaaccctgtctctactaaaaatacaaaaattagttggtcgtgatggtgcatgcctgttatctcagttacttgggaggctgaggcaggagaatcgcttgaacccaggaggcggaggttgcagtgagccgagatcgtgccactgcactccagcctgggtgagagagtgagacaatgtctcaaaaacaaaaaaaaaattctgtacattcactcactcagcaaaaatcagttgataatcaacaacttgccaggcaccgtgtttagctctgggagtgcaaagatagagtcagcaatttatcaatttgttatggtgatatttcctgttagttttgtaggggacttatttttctcttttgttaggttcagccgttgattttaaaacagatgcttctgatctgtgggtgaatgtgcctttgag

SEQ ID NO: 501481 - DNA, 610 bp, Homo sapiens
ttggttgttttgagctaagcctggaaagaaaacaggattaaagcagaggagtaagattgggtttgattaatgtttaacacaaaacaattttgggcctggcacagtggctcacgcttgtaatcctaacactttgggaggccaaagaagcggattacctgaggtcaggagttagagaccagcctggccaacatggtgaaaccctgtctctactaaaaatacaaaaattagttggtcgtgatggtgcatgcctgttatctcagttacttgggaggctgaggcaggagaatcgcttgaacccaggaggcggaggttgcagtgagccgagatcgtgccactgcactccagcctgggtgasagagtgagacaatgtctcaaaaacaaaaaaaaaattctgtacattcactcactcagcaaaaatcagttgataatcaacaacttgccaggcaccgtgtttagctctgggagtgcaaagatagagtcagcaatttatcaatttgttatggtgatatttcctgttagttttgtaggggacttatttttctcttttgttaggttcagccgttgattttaaaacagatgcttctgatctgtgggtgaatgtgcctttgag

SEQ ID NO: 501482 - DNA, 605 bp, Homo sapiens
ccctctttccagagtttgcacctctctttccagccccctctattaaaacctagaaattcaggcatgtgatgaaaagtaaagatagaacaccttacttttgcagtgggaaatgtggcactgggagctggaaatgtgttagcaagatggaagaattacatcctagaataatctaagcaacaagaagttagacttgatgtttacacyctctgaaatacacagtgatacttaactagaggcaggcctttgaataattttttaatttttttatattgagagaaaaatatttcctgcttacagcttctgcctaggttctggcataaaccaattctgtgttaaaagaagaaaaaggcactgtatcatagggaggttataagaattaattgaatgattcataaaggagtgcctggcacctagtaagtgctgtgtattagtttaagattggtttgaaacttaaatagaagattggcccatagagaattacattttaataagatcacttgagaatcagggtgggtggaggatggactggaaggatgaaattgaaggtgggaatatgtgttggagggctgctacaggaatccaggagagagacgatggtggcctga

SEQ ID NO: 501483 - DNA, 536 bp, Homo sapiens
gctgggtttggccagtggggagcctcagcaggaggtgggacaatgtagggaagtggtgtcaggttatttgttcccacatctcactttctgcaaggtatcctcaaactcaggtttatgcttaatatggtttggctgtgtccccacccaaaatctcatcttgaattttaatcccctaactgccataatccccatgtgtcaaggacaggaccagatggaggtaattggatcatggsggcagtttctccatgctgttctcatgttaatgagtgagtcttatgagatctgatggttttataagcaactggcatttcccctgctttcacttctccttcctactgccttgtgaagaagatgccttgcttccccttcaccttctgccatgattgtaagtttcttgaggcctccccagcaatgcagaactctgagtccatttaacctctttcctttataaatcacccagtctctggcagttcttcatagcaacataagaaaggactaatacaatgcccaaagccaaaaaatacagaagttcaggc

SEQ ID NO: 501484 - DNA, 590 bp, Homo sapiens
ctgggtttggccagtggggagcctcagcaggaggtgggacaatgtagggaagtggtgtcaggttatttgttcccacatctcactttctgcaaggtatcctcaaactcaggtttatgcttaatatggtttggctgtgtccccacccaaaatctcatcttgaattttaatcccctaactgccataatccccatgtgtcaaggacaggaccagatggaggtaattggatcatgggggcagtttctccatgctgttctcatgttaatgagtgagtcttatgagatctgatggttttataagcaactggcatttcccctgctttcacttctccttcctactgccttgtgaagaagatgccttgcttccccttcacmttctgccatgattgtaagtttcttgaggcctccccagcaatgcagaactctgagtccatttaacctctttcctttataaatcacccagtctctggcagttcttcatagcaacataagaaaggactaatacaatgcccaaagccaaaaaatacagaagttcaggcttatatattcttcagaatttttgacctagtctccccatcaccatactttgcttag

SEQ ID NO: 501485 - DNA, 620 bp, Homo sapiens
ctggttcttgggtcttaaatattggttgggggaaatcttaaacactggccaaagaataataaatcttcactttatagaaagtgctttgtactgttcaaagttcataacatctataatttcatgtggtctctcatcagcccagtgaaagggtaagtgctattgtccccatttgaaaaaagtgtcctaaaccgagttaacccagaagccaactctgtctgagataagaattcaagtacaagtaggagggtggggaagtgaaccaaagaagagaaggaaaacaataaatcttgggttatggagaagattattgctatgggcaacgggggctcagtcccgctagagaatatgaaacccagggcagaacaccagtcagcccaaccwgggccaaaaggagctgtgatatttacctgctcgctcctgtcagtcattgaataagggctgctctaagagagtggcaattccctagctctttccgatcaccctgtctatgggctagagcagatggagaaagcatgaggagtggtgcgagtgctggcatttgggggttattaggtcagtatgcatgcaatggtgagtctcaagaggatacgggtgggccaccaataatgtatgccacattg

SEQ ID NO: 501486 - DNA, 628 bp, Homo sapiens
tgcgcaaggcggcctccctcgggagcggcaacagcagagctggtcccgggggatgtgtttgcgcgatctggaaagggttcattttcttgtgaaaacaacaatttgaaggaaaggttgtcagggacaacttggaatgacggagtgacagggttcttggagatttagattagaggcttgacattccctggggtgtttaaacctggctcctgggtcaagaaaaatttgagcatttcttttaactcaactctctcagtttatgggtcatgaaaccacagctcggagagtctagggttatttgacatttccagtccatatggaaagtaaattggatccactgtattggccataaataataatttcctcaacaccaccaaactttgcacttccgggcgcatcacaggggcccctggaggacaaaccaagatggcggccctccctcatgggggccaaacccttgagacaggaaataggaagaaagaagcacaaaatattctcatttctagacaatgtatttatttgagactcaagtaaaagtatatttttaaaatcctgacaacttagtaaatatggctatatttagctgtttrtatataagatctatagctgctatgtaagatctatagctata

SEQ ID NO: 501487 - DNA, 584 bp, Homo sapiens
gggtttgctgctggacatttcacggggccacatcgatgggtgggtggtggttctggggccatatcagtggatgggtggtcaccgctgagtttcattttgttttgttctggatattagagaggttaagcrcctgatttttggatccctagttcgtaatttaaactcttcacctaagttcacgcatgagattggtctcagtccttgatatggtttggctgtgtcctcacccaaatctcatcttgaattgtagctcccacagctcctgtgtgtcatgtgagggacccagtgggaggtggttgaatcacaggggtgggtcttttccatgctggtctcgtgatagtgaatgggtctcacaagatctgctggttttataaaggggagtttccctgcacaagttctctcttgcctgccaccatgtaagacatgcctttcgccttctgccatgactgtgaggcatccctagccatgtggaactgtgagccctttaaacctctttttctttataaattacccggtctcgggtatgtctttatcagcagtgtgaaaacagactaacacagtcttcatctaactccttccttggc

SEQ ID NO: 501488 - DNA, 539 bp, Homo sapiens
tttgagtctgcccagcccaggtgtcagactgtaaatgaagacggcagccagatgacactgccagccaccagcccctctgactgcaccctccaagagatccagagctcaaaccgccctggggagccactcccgagatcttacccccagaaaccatgaggtagagaatgattcttgttgctttaatcctccaagtttggggggtgatttgttgtgtagtcagagataacgaatacgccaccttcattctgagcattcatcatatgaagtaatacgtcttccttattgcttaagccagaggtyggtgaaaattttctgtaaagggcagacattaaatataattttaggctttccagatcacatggtctctattgcaatgactcagcttgccgttgttgcatgaaagcagccatcggcaatagaaatgggtgggcgtaactgcattcctatagaccttcattaacaaaaacaaggagccagaccataagcagcagtttgttgacccctggttaaagccatttttgagttaagttttctgttac

SEQ ID NO: 501489 - DNA, 576 bp, Homo sapiens
atacacatatatatttataaattttgataattatccctctacatttggatcggtagaatattgtcatttacgtggcctcaattctaaattgcgtgtgtagcacaagtacacagcacaggtactttctactccattgatttttttattttaaaatatttaccacacattatgttataccaaaaaccttgttcatattatcaccacaaaaacaaataattttgtcttcaaaattaaaccttttaactaactttaaaatagcattaacaacaatgtcaaataaacttccaaaagctttactttgattccaggacttggctgcaaaaaaaaaaaaaaaaaaatagaatcattactagaattaactgattttctacttaaaacacttgaggacactgatataaaatcrtcattttttaactatttgcaaagttcatttattaatggagctaataaattaacagctataagttcacatttcatacatgctcaagaaaactcagaaattcaaaattgtaaaaattatttagaatatccatctgatctaagcaaaaagttgtgcttctgtggagtaatacaaaa

SEQ ID NO: 501490 - DNA, 635 bp, Homo sapiens
taacaacaataactcataataaaatagaacaatgtaacaatatcttgttcactattttctagatagaagattcattcctatcatagaccttagcaacctcagcatatgatttttcttttcttattaagtcaagaactttaatcttttcacttaaaggaagcactttatagctctctttgacatattcgaattaccagcatcactactctcgtgcttgggaccattattaagtaaaataagggttacgtgaacagaagcactgcagtagtgcaacagtcatctgataaccaaggaggctaccaagggacaacaggcagggggcatagacaccatggatatgctggacgaagggacgattcacatcccgggtgggatggagcaggaaagcatgaaatttcacactactcacacacaaattgtttatttytggaattttccatttaatattttcagaccgtggctgaccacaggtaactgaaaccagggaaacaaaacctggcaagagccaagactaggagtacagccagccagggctacagtgccaaccttgggagggttatgccaggcaaaaggagcaaccgtgcatagacatggggttgaggacagagcgctggcctgtttttcacaaaaataac

SEQ ID NO: 501491 - DNA, 602 bp, Homo sapiens
aatgtgaaacataaaagagtagatggtgaaaagtaagtttcacctgccacccagttccctttcaagaggcaaccacaagcaccagttttccaagccttctttaaattaccgtttctggctctttacagggatactggctggatccactggttccacctgcaacttttgcatctgagaagacattggctgcttccagcttccaggtgctcatagcatttacgagcactaattagtacaagcaaaacgtatcccacatgtcctcagacaaatctcttctcccatagcttcgttccctgcaaagggctgacttatacaagcaaggcaggcaggggctcgtccagaggggaaaactgacactttgtrgggctgatgaagaggagactctgggaaacatgacagctttcttcaattatgcaaagggctgtaatggagaagagagattagagttggtctctgatgtcaaagggtaaaatgcaatggatggaaggaagccatggagcttgccccatgaaaagctattctaacagacacagctggctcaaatgaagtggaatccctggaggcctcggtctagggcaatgtaggcaacaattaaacaccaa

SEQ ID NO: 501492 - DNA, 569 bp, Homo sapiens
ttcccttgtcagatgttaaaacatactataagggctactataataaaatcaatgtgatagacaaatgtgtcaatggaacagaatggagactccrgaaatagatctcagtataagtaaaattttaaaatatgacaatgcggtatttaaattctgttgttaaaagagtagtatatttaaaatatatctactttttaaaaatttcaggggaaaaaagaatttgcagagtgtgttcatttttatcaacaatgcagataaatattcatggcatttgcgaataaattccacagaaaaatgcagaatctttgctgaagaatttctcagtggcggctcattttggtgtatttcagtgactgtgacaatgacagtcaagtcatttgctgacctcacaccataagtgctgacaagtctgagggaatatcccagtgggtcacttcttaatttcaaggcactacagatgacacagatggtacaagattaattacctaaaaacaaaagaaaattgtgaccttccattagtttcttctctcattagtccatgcacacggggcatttcctaaccgaatgcagct

SEQ ID NO: 501493 - DNA, 569 bp, Homo sapiens
ttcccttgtcagatgttaaaacatactataagggctactataataaaatcaatgtgatagacaaatgtgtcaatggaacagaatggagactccggaaatagatctcagtataagtaaaaktttaaaatatgacaatgcggtatttaaattctgttgttaaaagagtagtatatttaaaatatatctactttttaaaaatttcaggggaaaaaagaatttgcagagtgtgttcatttttatcaacaatgcagataaatattcatggcatttgcgaataaattccacagaaaaatgcagaatctttgctgaagaatttctcagtggcggctcattttggtgtatttcagtgactgtgacaatgacagtcaagtcatttgctgacctcacaccataagtgctgacaagtctgagggaatatcccagtgggtcacttcttaatttcaaggcactacagatgacacagatggtacaagattaattacctaaaaacaaaagaaaattgtgaccttccattagtttcttctctcattagtccatgcacacggggcatttcctaaccgaatgcagct

SEQ ID NO: 501494 - DNA, 620 bp, Homo sapiens
ttttgtgattcttttgcatcctggtactttgctgaatttattagttctaacaatttttaagtggagtttttagggtttcctagatataagatcattgcatcaacaaatagataattttacttccttctcaatttagatgtcttttacaggtacaccttgttttactgagtttcactttattgcgtttcacagattttgtgttttttacaaatggaagctttgtggcaaccctgcatcgtgcaagtctatcggtgccatttttctaatggcacatgtgctcacttcatgtctccatgtcacattttgataattctcacaatatttcaaactttttcattattaatatatctgttacagtgatctgtgatcagagatctttgatgttactattatactgttttgggagcaccatgaaccatgcccatataagatggcaaacttaattgataaatatgtttgttctgactgctccactgactggtcattttccatatttctctctcgctttgggcttccctattccctgagacataacartatcgaaattagacctaaatgtaaggctaaagtcttagaagaaaacagaaaagtttcatgacactggatttggaagaatttat

SEQ ID NO: 501495 - DNA, 572 bp, Homo sapiens
agatcagtcaagtgactatagtttacattgatctgtcatactttcagaatagctagaaagcaataattcaaatgttcccagcataaagaaaagataaatatttaaggtgatggatataccaattaccctgattatatgaatgtatcaaattgtatcaaagtatcccatgtacccccaaaatatgtatattatatattaaaaaaagaaaattagtctctagaagtaacatcttctatgcttagaaattctaaaaaaaccacagacttgcctacgtaaaaatctaacaccaatacactacaaaaaaaagcaawcaaaaaactaggaaaaaatatttttagcaaatatgattgttttatttttgttaagtaaattgatttttttaaaaagaagcattaagtcttaagaggtaagcaagtaatggataaaagcactcctgagcatcccctagaatagctcctcaatgtggcattccctgccctccagagcccaggcccactgtgccttccagccacccctccagcttcctccctatgcatccggtgctcttgccatattgaactgcttacaatctc

SEQ ID NO: 501496 - DNA, 191 bp, Homo sapiens
ggcaacagcaaagcccactggtggtgaccggccaggagtgaggacttgttctgtcatcctgtaccttctcctaccccytagacttccccttcctcctctgcagaggacaagagtctggagaagataaaagtataaagttaacagatatctccaccccagaaaggacatgagagcaaactactaggaggcag

SEQ ID NO: 501497 - DNA, 534 bp, Homo sapiens
ctgctctttctgagcactttacatgcattaactcataatctcaacaacccgattcttcagttacatttataatttctgtattacagatacagaaattgagggacagagagataaaagccacttgcttatagtaaaaagcaaacaaataaataagaacaaccatagcaaaacaattgctaaatgactgcacatttaaggccgcaactttcagattgcatagtttctttagacgtgttactcacccaaagtacttgtactaattttgtattttaaaaacccatcattggaaattaagaccctattccatttgaaaaatatatctgtgtattatgtggggcagaggtcacccacccaggagtttgcagatttccccaaattgcctttctagtattagaagagcttgacacaaatataaaaagtttgtcaggcttccttttctctcctggagaatgatctttccaaataattaacagtggagacctctgttcccacctcatgygagtggttgcttttttttctttcttttttgagatg

SEQ ID NO: 501498 - DNA, 554 bp, Homo sapiens
ctcgggaggttgaggcagggacaattacttgaacctgggaggcagaggttgcagtgagttgagatcgtgccattgtactccagtctgggcgacagagcaacactccgtctcagaaaaaaaaaaaaaagaaaagaaaaattatagaccgggaggtattctaggtaaactttttgtctttgtctctatccattttgttagtatcttaaagagatgggaggaaaggcaagattaagttggttctttcaactctgagggtaaactgccttccactggctaggcttctgtttttttccgtagtgtttttgagctcttaacatctagcagctaaaaagaattgagtaagtgtaaggtcttgttacatagtttaagtgaccctgtttttgtagcaatartggacaaaggtaatatttaaattataaaatgttgcctgctttacatatagatatgagttgaattttaaaaagcataacttattaaaattcacaagttcaaggggaaattttaacttttgaatataggtggcaggttttaagaagcaaatggcagatactgga

SEQ ID NO: 501499 - DNA, 562 bp, Homo sapiens
ctatgctgtacaatctaagtaaaaacagagtgcttgctatgcaaaagcagcttcaagacaagaatcctaacacccactctgtctttgtctttttgggctgctataacaaaatgccattgattgcatggcttatacacaayaaaaatttatttcttacagttctggaggctgaggtccaacatcaaggcaccagcagagtcagtgtctagtgagagcttctttctgtttccttctaactgtattctcacatggcaggcagtccaaggcaactctctagggcctctttcataagaatattaatgcaattcatgagggctccatcttcatgacctaatcacctcccaaagccccaactcctcataccagcacattggtgattagatttcaacatgagtttagggagtatataaacattcagaccacagcacccgccaatctgattcttgtccctaagtgctaccccagtatggaaattctagagccaccactaaccctgtcccctggtcactgatagatgacttctgctaaacttggaaacttgggctaaacttgggctggggca

SEQ ID NO: 501500 - DNA, 562 bp, Homo sapiens
ctatgctgtacaatctaagtaaaaacagagtgcttgctatgcaaaagcagcttcaagacaagaatcctaacacccactctgtctttgtctttttgggctgctataacaaaatgccattgattgcatggcttatacacaacaaaaatttatttcttacagttctggaggctgaggtccaacatcaaggcaccagcagagtcagtgtctagtgagagcttctttctgtttccttctaactgtattctcacatggcaggcagtccaaggcaactctctagggcctctttcataagaatattaatgcaattcatgagggctccatcttcatgacctaatcacctcccaaagccccaactcctcataccrgcacattggtgattagatttcaacatgagtttagggagtatataaacattcagaccacagcacccgccaatctgattcttgtccctaagtgctaccccagtatggaaattctagagccaccactaaccctgtcccctggtcactgatagatgacttctgctaaacttggaaacttgggctaaacttgggctggggca

SEQ ID NO: 501501 - DNA, 521 bp, Homo sapiens
tggagtttgacgtttgagggcaggtagcgtccagcaggggagaaagatgtaggctgggaggctaggcccattgtctctttttcacattttttctgcctgctttatattcgctggaagctaaggcaaattaagggtggatctgccttccccagaccattgactcaaatgttaatatttttggcaacaccctcacagacacacccaggattaatactttgtatcctttaatccaatcaasttgacactcagtagtaaccatcacacaaggattggtgatgatgctctttgttcaggcagtaccaggaggcaaacaagagacagacacctgagcacaactcaacagacctgacaatagaaccatctcagaaagtcagcttctaagaaaccaattctagttatatattttcccatctaaacctaattgacaagagaccagggaagacagaatttgcaggaccaagtcttggaagaaaaagaaaacctagatatgtgagcctggtatttggactctctttcccctt

SEQ ID NO: 501502 - DNA, 463 bp, Homo sapiens
cccttgatttgctgaaagaggatgaagccaaaataaaacaataaaccagcaaatctaggaaaaaggtacattcttttttttttttttcttttttgagacagagtcttgctctgttgcccaggctggagtgcagtggctcactgcaagccccacctcccaggttcatgtcattctcctccctcagcctcccgagtagctgggactacaggcgcccgccatcacgcccagttaattttttttaaaaatatttttagtagagatggggtttcaccatgttagccagaatggtctcgatctcctgacctcatgatccgcctgcctcagcctcccaaagtgctgggattacaggcatgagctaccacgcccggccagaaaaaggtacattcttagacttctgcaaatgagaccagtcatgaccaccttgggggcccttttacmttggtgtttaccagtgtcttttatg

SEQ ID NO: 501503 - DNA, 614 bp, Homo sapiens
tgaccgcaaactgtactttttttctctctctcccccmtaaaaaaaggttcttctgttagaattctaggcatggcacacagtactgggagataacacaaagagtcaggtggaaactattctgtttaatcaagaatgaactaaatgtcagagactcaatgttctagatcaacaatttccaggattgatatatcttaatcaagtaattaggtgactttttcggtagtgttttccacaccagagagaggaacagatttgccgctttgctccgatggctgctagcagcagtgttggttgttaacagagacatttacatggaaccaccagttggcagggcgaacactttattacttgctattcccacatgctgaggattgtgggaaggctgccaagctctctgtctcatgtagctcttcagtataataacaacagcaacaaaaagacttggaaaaaacaaaacaaaaagaagaaaagtgagtaaaggaaacgatggaacaaagtccccggcttcagactaaatatggatgaaataaaagacttttagcggtgcttttcttttactttctttttcctctccctccctctcattcttcctttctctctctctctctctgtct

SEQ ID NO: 501504 - DNA, 614 bp, Homo sapiens
tgaccgcaaactgtactttttttctctctctcccccawaaaaaaaggttcttctgttagaattctaggcatggcacacagtactgggagataacacaaagagtcaggtggaaactattctgtttaatcaagaatgaactaaatgtcagagactcaatgttctagatcaacaatttccaggattgatatatcttaatcaagtaattaggtgactttttcggtagtgttttccacaccagagagaggaacagatttgccgctttgctccgatggctgctagcagcagtgttggttgttaacagagacatttacatggaaccaccagttggcagggcgaacactttattacttgctattcccacatgctgaggattgtgggaaggctgccaagctctctgtctcatgtagctcttcagtataataacaacagcaacaaaaagacttggaaaaaacaaaacaaaaagaagaaaagtgagtaaaggaaacgatggaacaaagtccccggcttcagactaaatatggatgaaataaaagacttttagcggtgcttttcttttactttctttttcctctccctccctctcattcttcctttctctctctctctctctgtct

SEQ ID NO: 501505 - DNA, 569 bp, Homo sapiens
gaactactggaggcttaaactagcagaaacacatagatagcaatgtgctctttcagctataagtcactgttattctagtggagtcttgctggtgtggtggtaaggtagggcragggaagtgttctgtaatctactaataaaatctctgttttcagcaggcctgagttctggggctttgacctttgcaaaggttccatagttttgttctcttctaagctaagacaggaagtcagacaaatgtccttcctccaggtggtttttaaagctctggtcaagtctttcccccaccaactggagagtaggcttttgtcatggagaatgctctgacggtgttttactatgattgtccctaccagaaccatgaggggatttttcttgtctcttcaccatgaaggcttgttggggtttctaaatgtaaaagtgaggaggccctcctaagactgcaactgccaggattttctcaatcaaaagctagtacatgttttgtctcctctaagtcatcaaaattactatttatgtgtttcttctagtttaaggctccagtagttcctgtccagataagcagatct

SEQ ID NO: 501506 - DNA, 571 bp, Homo sapiens
gtgaagaaacaagaactctcacatgctgctagtggcatggtgaatggttcaactgctatggagagtgatttggcaatgttgaagatatgcataacttagggcctggtattccagttctacatataaaaccctaaggaaattcgagcgcatgtgaacagagagacaagaatatgaattacagcactgtttccattaagggaaatctggaaacaacctatgcatcccccagtagaaatgggaaggaaatacagcaagcctagagcaagagttactccttggaagggaggccaaagcartggggaggggaaacaaaagactttcagttgtgtctatttatttatgagaaaataagggagggagggagaaaaagaaagactaaaaacgcagtccagtgtcatcactgagttaaatctgggtgatgtgtacataggagttcgttgtgttatttattcttctgaatgtttgaaatgctacataataaaaacaagctactgggaccacattcatttgcattatccttctgtatagtgcacacagtgaaactggttgcctacgaagagaatgttaaaat

SEQ ID NO: 501507 - DNA, 647 bp, Homo sapiens
atgcattttatgatccattagagcactacttaattatgcgtttttcagaagyatagtaaagagaaatggcttgagattcttcttagcttgttttatggaatgagaattaagcttctttctgacaacactccacgttgccactggagcaattagatttttgggtatggtttcttttttttcttgactaccccaagcaacaatagatattaataacagtgacagcagaaaatgaggaacttgcccaatgagttatgagacacatttcactgtcaaaaactataagctcatttgttctcccattaataatccagacccttgtcctgagacttgctgatactattagactttctccctctctgatgattcaaacccacatctgaacccgctgttggatcatgacgtcagttccttgcagttgtgaattggtctatgagccatggatacatggcttccagtaagtcaaaattctttagagatggttgagatctgatttttgtttctccactttcaagtcattcttttatctcatgcatggtttaatttcagtctctccagctaaagtggtgaatcatacattaaccagatgactggactgtgtcgcacgaccattgcaatttaccttccatatgggcatcgctttaaaaaca

SEQ ID NO: 501508 - DNA, 647 bp, Homo sapiens
atgcattttatgatccattagagcactacttaattatgcgtttttcagaagcatagtaaagagaaatggcttgagattcttcttagcttgttttatggaatgagaattaagcttctttctgacaacactccacgttgccactggagcaattagatttttgggtatggtttcttttttttcttgactaccccaagcaacaatagatattaataacagtgacagcagaaaatgaggaacttgcccaatgagttatgagacacatttcactgtcaaaaactataagctcatttgttctcccattaataatccagacccttgtcctgagacttgctgatactattagactttctccctctckgatgattcaaacccacatctgaacccgctgttggatcatgacgtcagttccttgcagttgtgaattggtctatgagccatggatacatggcttccagtaagtcaaaattctttagagatggttgagatctgatttttgtttctccactttcaagtcattcttttatctcatgcatggtttaatttcagtctctccagctaaagtggtgaatcatacattaaccagatgactggactgtgtcgcacgaccattgcaatttaccttccatatgggcatcgctttaaaaaca

SEQ ID NO: 501509 - DNA, 562 bp, Homo sapiens
tggctatgttattccccccatatctggctatgtgactcccctatatctggctgtgttactcccccatttctgactatgtttttgtacctttggctatgttattccccatctctagctatcttactcccttcatatctggctatgtaactcccccatatgtggctatattattctccccatatctggatatgttacttaccaatctctggccatgttactccctctataattggttctattattctcctcctatctggctaggttactgctctccatatggctatgttactcccacatatgatgttgtgttactctccccatatctggctatgttattcccttcatatctggctatgttactctcctataagagcctattttgctctccccatctctggctatgttattctcttcatatctggttatgttactctcctatacgagcctatgttgctctccccatctctggctatgttattcccttcatatctgactatgttactcccccaatatgtggccctgttactctccctgtgtttgrctgttaaacccctcatttctg

SEQ ID NO: 501510 - DNA, 531 bp, Homo sapiens
aagagagaactgtaactcctattactgcatgcattagacaatgtagtatgctgttttctaaaaattatcttattttctttaattctcataataawtcattgagtaaatattatatctatcccgcagatgagaataacaagatttgctgaatatcatataagcaattggtgaaaattgcaccatcattagggacaaagaagaggaaacttttcttctgagggctccactattgtccttcggtgaccacagctctgtccactgtccataagtcttgggtagcaagagaatttttttttagggtcattacactgtagtccatgttccaggtacccaggaccacagtgttccctgcccaaaggaccacagcctaattctttggccagtatgggctttttccttctcctaagggtggtccatattatgcatgtttttcacctcagttctatgggtgcttgactcttcagtgggttcagcttggttgtacaggtgggcgtttccatgtgcatgcacgcaatgctccttatggtgcag

SEQ ID NO: 501511 - DNA, 531 bp, Homo sapiens
aagagagaactgtaactcctattactgcatgcattagacaatgtagtatgctgttttctaaaaattatcttattttctttaattctcataataaatcattgagtaaatattatatctatcccgcagatgagaataacaagatttgctgaatatcatataarcaattggtgaaaattgcaccatcattagggacaaagaagaggaaacttttcttctgagggctccactattgtccttcggtgaccacagctctgtccactgtccataagtcttgggtagcaagagaatttttttttagggtcattacactgtagtccatgttccaggtacccaggaccacagtgttccctgcccaaaggaccacagcctaattctttggccagtatgggctttttccttctcctaagggtggtccatattatgcatgtttttcacctcagttctatgggtgcttgactcttcagtgggttcagcttggttgtacaggtgggcgtttccatgtgcatgcacgcaatgctccttatggtgcag

SEQ ID NO: 501512 - DNA, 507 bp, Homo sapiens
acaaaattgaaatatgtcagttatctgaaggataacttagccaagagcctaaattttggtaaattttctatttcataaaaggcctttgcatctagtagagagtagagctgacaatcttttctatccaaaacataattttcatgagacccatgatcactgagccacaaaataagtgtcacaatgtaaattccttggagtatacgygctttacctgtatttttacttggcttttttttcatccaattatagttggtttacacatatgtttgaaagcttggaatacgactgaagttataatttaaaagtagatatgcctatagcaagaattgtaataataataatgagagctaccagaacctgatattagcaaattccagactaaaatgccccagccctcactcccttacaaattcaatgatttaacaactgccgatggaaacaaatagccctgaaagaactccagtatataatcaagaatatgtttcaactcagtggagcacaaaaacc

SEQ ID NO: 501513 - DNA, 403 bp, Homo sapiens
gctgcccccagagacaacatcttaccaaagcatggtacatcatcagaaccagaaatttgacattgatataatactaacatatgggcacaccctacttccaatcctaaaayttgacaattgtggaattgtcttcattattgtaattttgacatttgaagaattttatatgtatgaaacgataaagtatataaactattttaagagtttaactgagataaacctcagatcataaaattcatccatctagaataaataagtcaatagattttaatatattcacagagttgtgcagccatcaccacaatctaattttaaaatatttcttcaccgcaaaaggaaactccatacctattaccagtcactcccagtgccctgacctcaaagcccacacagcactagacaa

SEQ ID NO: 501514 - DNA, 625 bp, Homo sapiens
agctgcctatgcatgagaggggctgtgagaagatgctggctgcatgggccctgcactgtcagtgtggaggcaggagccagggcctttcttgtttcaataaacagtgtttcttcctcccacctgccatgatgagctggccagttccgtgggcatgttaatgagcttctctctggtgaccgagacacagcatacgacacagctcctctggcccctgaaggcaattaagtcccagtagtgtctgagagcctgatggctggcttctgggactccacacactcttgcatacatattctccttctctccatccccacaaatattgtagctgtctyaggttctaaaagcaataatgacttcttagtaaagacattctgaaaaacctaaagaaaatagaaatgattcaaaatcctaccgctcagaaatagctagtactcactttttggtgaacccaaggcccctctctcacacacatctctcatttaatgatctcatccttggagctgttgtgtaacctgctttttcacttaatcacctctcccagacatgttgttatatgtcgataaacacagacagccctgacactcctcacttccccctcttctcgcttcctgatggttttcctgcttca

SEQ ID NO: 501515 - DNA, 625 bp, Homo sapiens
agctgcctatgcatgagaggggctgtgagaagatgctggctgcatgggccctgcactgtcagtgtggaggcaggagccagggcctttcttgtttcaataaacagtgtttcttcctcccacctgccatgatgagctggccagttccgtgggcatgttaatgagcttctctctggtgaccgagacacagcatacgacacagctcctctggcccctgaaggcaattaagtcccagtagtgtctgagagcctgatggctggcttctgggactccacacactcttgcatacatattctccttctctccatccccacaaatattgtagctgtctcaggttctaaaagcmataatgacttcttagtaaagacattctgaaaaacctaaagaaaatagaaatgattcaaaatcctaccgctcagaaatagctagtactcactttttggtgaacccaaggcccctctctcacacacatctctcatttaatgatctcatccttggagctgttgtgtaacctgctttttcacttaatcacctctcccagacatgttgttatatgtcgataaacacagacagccctgacactcctcacttccccctcttctcgcttcctgatggttttcctgcttca

SEQ ID NO: 501516 - DNA, 625 bp, Homo sapiens
agctgcctatgcatgagaggggctgtgagaagatgctggctgcatgggccctgcactgtcagtgtggaggcaggagccagggcctttcttgtttcaataaacagtgtttcttcctcccacctgccatgatgagctggccagttccgtgggcatgttaatgagcttctctctggtgaccgagacacagcatacgacacagctcctctggcccctgaaggcaattaagtcccagtagtgtctgagagcctgatggctggcttctgggactccacacactcttgcatacatattctccttctctccatccccacaaatattgtagctgtctcaggttctaaaagcaataatgacttcttagtaaagacattctgaaaaacctaaagaaaatagaaatgattcaaaatcctaccgctcagaaatagctagtactcactttttggtgaacycaaggcccctctctcacacacatctctcatttaatgatctcatccttggagctgttgtgtaacctgctttttcacttaatcacctctcccagacatgttgttatatgtcgataaacacagacagccctgacactcctcacttccccctcttctcgcttcctgatggttttcctgcttca

SEQ ID NO: 501517 - DNA, 572 bp, Homo sapiens
ttcattatcacaataatccattagggtgggagaaaggattgtgggaccacagtgatatggacaaacctagttacgatctccaaattgggcctattcccttctcactgaagtagccctttactcactttcacctgatatttccaatcctatgcaagcccatgttgaaatctgatgggctggaaagaagggccaaaatattcaatcccagatcctgttgatgttttcacaggaaaaaaatcctttctatttagttttaggaaacatagaataatagcattttattgtgtcagcattttagtacagtgaatatgttgttggtgatttctaagctaccatacctggaggtgaaatttactgtgggatccttccaagtggtcccccccaacaattcattcttcgtagagcagccagagtaatcaagtaaatataaatcagagcatgytctccctctccctctccctctccctctccctctccctctccctctccctctccctctctccacggtctccttccacggtctccctctgatgccaagccaaagctggactgtactgctgccatctcggctc

SEQ ID NO: 501518 - DNA, 602 bp, Homo sapiens
ctgattatatttgtcagggtttatttctgggttttctgccctcttttgtttatcttcttttctttcccaaatattgcactgtcttgattactatagctttacattaagtcttagtgtcaggtggtatcaattctgtgaattgattcttcaatattrtattaccatctgggtcttttggcttttcatataggtgttagaataaattttctttttttaaaataacatgacttgttaggatttttattgtaattgtactgaatttgttattcaaattggggagaactgacatcttagcaatattgaggctgcctattcatggacgtggaatatctctccatttattcagatctttttttctatcattagaaatgtatagttttgcatagttttgtcatataggtctttctttttactgggtgctatataagtgctgttgtgtttttaaatttaaatcagttgctcattgctaatatacagaaaaataattggcttttgtatattaaccttacattgtaccactttgctataatctcattagctcagggagatttttgttggttcttttggattttgtacatagacagtcatgttatcgacaaata

SEQ ID NO: 501519 - DNA, 485 bp, Homo sapiens
aaaaaactgagcggtgtggaatggttttctaattttttgtatcgttaagttgacttgttctaatcactggattaatttgataaaacaattatgcctgcaccttggccagtaacattagagagtaatttcaaaattgctcagtgaaattatgccaggtgttctgatattacagatatcctaataaaactagagggaaactacctttattattggagaaataagtgttttcaaagcaaaagaggagatctctgtattaagtggaatctcaagaaaaggatcaacatttsatccttttgatgcgactttatggttgtcacaagtgattacaactagtgttattctcttgacaattcagagctggacactggggatcctctgttgagatgtaggtaatttatttttgagatggaaactaaactgaaagagagccagagccatttttatgtgatacagctaatagggtttggtaagcacaataatgccct

SEQ ID NO: 501520 - DNA, 485 bp, Homo sapiens
aaaaaactgagcggtgtggaatggttttctaattttttgtatcgttaagttgacttgttctaatcactggattaatttgataaaacaattatgcctgcaccttggccagtaacattagagagtaatttcaaaattgctcagtgaaattatgccaggtgttctgatattacagatatcctaataaaactagagggaaactacctttattattggagaaataagtgttttcaaagcaaaagaggagatctctgtattaagtggaatctcaagaaaaggatcaacatttgatccttttgatgygactttatggttgtcacaagtgattacaactagtgttattctcttgacaattcagagctggacactggggatcctctgttgagatgtaggtaatttatttttgagatggaaactaaactgaaagagagccagagccatttttatgtgatacagctaatagggtttggtaagcacaataatgccct

SEQ ID NO: 501521 - DNA, 501 bp, Homo sapiens
ttgaaagtccagagggttttgtaagacttccacttttataaataagaattgaatattttatgtccactgtcatggctctgtactcacattgtctgagtgattttcatactttcattttctctgtagccacacgttactcatcagcatgtttaagaaaagcaactgtatggcaatttattgataataacttttagaatggaagaatttagaactaaaatcaaatttaaagtatatttttatatgcacatattttaaatgtggtataaataattcttagtaagaagatacctaaattaggaaagtgaatggggatttgagtgattcattgataracttcatcactgaccttactatgtttttctctttctagttcctcagcaaataaataagaccaataacatactaccctgtgtggctttcaagaaaactgttattaataaataagaacatctctaactcctctggagaaagagcatcaggaagaggatttctggggaaatt

SEQ ID NO: 501522 - DNA, 577 bp, Homo sapiens
gtatgttaaagggagatagaagacaactgaaagaaacccagtggccaaacattttgagtatcaagagaaaaagaatattgggttacaaccccaacaataaaatatatatccatttttttcatatttgcatataaatgattgaataaatacatacatatgggagagtagataaatatttcatacagaagagtttaaataatttatataaatactcatccttaaggaagttgaacataacttttcagttgttaaatatgagctgggcataggggctttattccaaagagtacagtrtggaaaatgagaaaaaaaattaaaaagctgtatagtgaagaaacctaacaaatactatatcaagccatgtgatcacagttaacatcaacagtgatgagacatgctgctaatatgaaccctcaatatggtatgataaaaatagtactttatgtgtttgtcttcttccccaaaacaagaatagcaccagaagaatcccaaattaagatcagtcaacaagatatctaaccagcgctcttctcaaaattgtcagtcacaaaaaagaagaaatggctgagaaattatc

SEQ ID NO: 501523 - DNA, 502 bp, Homo sapiens
ctgtttctgctctcttagcctgatggctgattccccatttttccattttagaattgtgtgaaagggaatttgttttgttttgcaaaagggcttacttggcaaataacctccccctcctctcccttctcacaggcaccataataagcaccaccaaaagaggctaattttgccagacttggattccatcagccagcgcttcccaaagattgccatgttattgcaaaattagactttttattrctggaataaatactgtgcagtctttgtagccaccacttaatagattcctttgctaatcccactgaataacaaggattccttgtgaaaataaaaggcagacaaggtagagtaaaccagcaattacatataatgtgctgctgttagcctgccaaagcggttcataaacctgcagggaaagactggggcatttttcagggctttcaccccaattgccctgctgaacgcctccctcttggtgagctgtttacatggaggtgaatag

SEQ ID NO: 501524 - DNA, 651 bp, Homo sapiens
ggcaccaggcacctgccaatggctcaggaagggaggaataggaccaggtggcaaactactccgcacgtttgccaagaacacatccctgcctctaaatgcagttagccttagcctacattaattaagagcctgcccccttgctgtttctgctctcttagcctgatggctgattccccatttttccattttagaattgtgtgaaagggaatttgttttgttttgcaaaagggcttacttggcaaataacctccccctcctctcccttctcacaggcaccataataagcaccaccaaaagaggctaattttgccagacttggattccatcagccagcgcttcccaaagattgccatgttattgcaaaattagactttttattactggaataaatactgtgcagtctttgtagccaccacttaatagattcctttgctaatcccactgaataacaaggattccttgtgaaaataaaaggcagacaaggtagagtaaaccagcaattacatataatgtgctgctgttagcctgccaaagcggttcataaacctgcagggaaagactggggcatttttcagggctttcaccccaattgccytgctgaacgcctccctcttggtgagctgtttacatggaggtgaatagattctgcag

SEQ ID NO: 501525 - DNA, 433 bp, Homo sapiens
agtttgtcatcgcaagaatgttgctatattctgttcattatgccttactctccattattgaacagaactgggtgatctttatttcatttactttaatagaagactcttctaaaatgcttctggttaatatttggtttgaatgaagcactttattaaaaatgctggatgtttccacttaacatagcctgaatagctgaaagggaaataatggcacaagcataaaatggcataataaatcaaaggacacccttttccttctaaacrtgtccaaggttagttttcgtcttaatagaattgctgatctgtcaactgatcaactgtagatatgcttgtgacttgtttcaatggaaagacggatgccaaaaataatgagaaataatcctctgagtcttctctaaaagcatttttgttttgctgaaaatgctttgtatgc

SEQ ID NO: 501526 - DNA, 433 bp, Homo sapiens
agtttgtcatcgcaagaatgttgctatattctgttcattatgccttactctccattattgaacagaactgggtgatctttatttcatttactttaatagaagactcttctaaaatgcttctggttaatatttggtttgaatgaagcactttattaaaaatgctggatgtttccacttaacatagcctgaatagctgaaagggaaataatggcacaagcataaaatggcataataaatcaaaggacacccttttccttctaaacatgtccaaggttagttttcrtcttaatagaattgctgatctgtcaactgatcaactgtagatatgcttgtgacttgtttcaatggaaagacggatgccaaaaataatgagaaataatcctctgagtcttctctaaaagcatttttgttttgctgaaaatgctttgtatgc

SEQ ID NO: 501527 - DNA, 610 bp, Homo sapiens
ctgtaaaattcctctctgtactctttctctttatttctcagccgcctgacccttagggaaaatagaaagaacctaygttgaaatattgggggctggttcccctgatacatataccccttgtttatcacataatcaagaaataactataaaaatagccagccagcagccctcgaggctctctgcctatggagtaggcacccttttattcctttactttattaataaacttgctttcactttactctgtgaactcacccaaattctttcttgaacaagatccaagaaccctctcttgggggtctggattgggactccttcctggtaacaaatgtatgctttttttactaacatcttagtcctcacatttgattgacttgacagtctcgtcccattctcatctgctaaaccaaatcccctcagcccctggagctgcctgatttctccaagatcccaccccctggagatgggctggcttagaaagtgcacagattttcccacactaagaaagatagcttgcaacactccatctcagcctggtccacccagaagcattaacaaactaaaaaacatggatgtataccataactacaagtcaaaaggagaaaggttg

SEQ ID NO: 501528 - DNA, 612 bp, Homo sapiens
ggtaggaactcagtaaatgttttttggataggagagatattggtgagcaatttccctttaacaatacaatagtaaaaaagacattagagcatagtagtttaggctgggygcagtggctcacgcctgtaatcccagcactttgggaggccgaggcgggcggatcatgaggtcaggagttcgacaccagcctgaccaacatggtgaaaccccgtctgtactaaaatacaaaaattagctgggcgttgtggcgcgcgcctgtaatcccagctactcaggaggctgaggcaggagaattgcttgaacctgggagggagaggttgcagtgagccaagattgcgtcactgcactccagcctgggagacagactttgtctcaaaaaaaaaaaaaagaacataatagtttaattttcaaagcacctttataaacactagctgtcctctttatgttctgttaattgccagcatttacttttttctctaatgataatagctgttaacaggactatgtgtttttcagcttggaactgcagttggctttttgctaccaccagttttagtacccaacacacagaatgacacaaatctcctggcttgtaatatcagcaccatgttt

SEQ ID NO: 501529 - DNA, 612 bp, Homo sapiens
ggtaggaactcagtaaatgttttttggataggagagatattggtgagcaatttccctttaacaatacaatagtaaaaaagacattagagcatagtagtttaggctgggtgcagtggctcacgcctgtaatcccagcactttgggaggccgaggcgggyggatcatgaggtcaggagttcgacaccagcctgaccaacatggtgaaaccccgtctgtactaaaatacaaaaattagctgggcgttgtggcgcgcgcctgtaatcccagctactcaggaggctgaggcaggagaattgcttgaacctgggagggagaggttgcagtgagccaagattgcgtcactgcactccagcctgggagacagactttgtctcaaaaaaaaaaaaaagaacataatagtttaattttcaaagcacctttataaacactagctgtcctctttatgttctgttaattgccagcatttacttttttctctaatgataatagctgttaacaggactatgtgtttttcagcttggaactgcagttggctttttgctaccaccagttttagtacccaacacacagaatgacacaaatctcctggcttgtaatatcagcaccatgttt

SEQ ID NO: 501530 - DNA, 612 bp, Homo sapiens
ggtaggaactcagtaaatgttttttggataggagagatattggtgagcaatttccctttaacaatacaatagtaaaaaagacattagagcatagtagtttaggctgggtgcagtggctcacgcctgtaatcccagcactttgggaggccgaggcgggcggatcatgaggtcaggagttcgacaccagcctgaccaacatggtgaaaccccgtctgtactaaaatacaaaaattagctgggcgtkgtggcgcgcgcctgtaatcccagctactcaggaggctgaggcaggagaattgcttgaacctgggagggagaggttgcagtgagccaagattgcgtcactgcactccagcctgggagacagactttgtctcaaaaaaaaaaaaaagaacataatagtttaattttcaaagcacctttataaacactagctgtcctctttatgttctgttaattgccagcatttacttttttctctaatgataatagctgttaacaggactatgtgtttttcagcttggaactgcagttggctttttgctaccaccagttttagtacccaacacacagaatgacacaaatctcctggcttgtaatatcagcaccatgttt

SEQ ID NO: 501531 - DNA, 599 bp, Homo sapiens
gtggctcaagcctgtaatcccagcactttgggaggccaaggtgggtggatcatgaggtcaagagaccgagaccatcctggccaacatggtgaaaccccgtctctactaaaaatacaaaaattagctgggcgtggtggcacgtgtctgtagtcccagctactcgggaggctgaggcaggagaatcgcttgaacccaggaggcagaggttgcagtgagtcaagatcgtgcaactgcactccagcttggtgagagagcgagactccatctgaaaaataaaataaaatcctgtgcattgatgtattccgtttcttggagaagtctccgatgatgcacctccttggatgcctccctctgctctacctctttgtcccttgccactttgtttctggccttccttcctccacctggcctctagcccrttcattcttctttgggctagtcctccccagatcatcactgccccactgagctgctccccagcaagacctggaaataagtgaatttttgactcctcatttttcactccttcatccttgtgacttccctccagctctgcaaagggagggctggccccagaggatccggctctgtctccctca

SEQ ID NO: 501532 - DNA, 567 bp, Homo sapiens
cttttgattcttaattcaagatatctataaactttattttattttattttattttgagacagagtttagctcttgttgcccaggctggagtgcagtgacgcgatctccgctcaccgcaacctcygcctcccggattcaagccattctgctcagcctcccgagtagctggaattacaggcgtgcaccaccacacccggctaattttgtatttttagtagaggcagggtttctccatgttggtcaggctggattcaaactcctgacctcaggtgatccgcttgtctcggcctcccaaagtgctgggattataggcgtgaaccaccatgcctggcccggctgcatactcttaacagaaatacatttaacttagtctgtaagaatttcaaactcctgaggcagtctctgatttttttaaataaatattcctcaaaaaaagacaatatttttgtgttgcacttgataattacagaattattttacatatattgtatcatgtaatcttcataacagcttgctattgttatttacattttatcgatgagaaagctgtaaaggtgagagacagga

SEQ ID NO: 501533 - DNA, 567 bp, Homo sapiens
cttttgattcttaattcaagatatctataaactttattttattttattttattttgagacagagtttagctcttgttgcccaggctggagtgcagtgacgcgatctccgctcaccgcaacctctgcctcccggattcaagccattctgctcagcctcccgagtagctggaattacaggcgtgcaccaccacacccggctaattttgtatttttagtagaggcagggtttctccatgttggtcaggctggattcaaactcctgacctcaggtgatccgcttgtctcggcctcccaaagtgctgggattataggcgtgaaccaccatgcctggcccggctgcatactcttaacagaaatacatttaacttagtctgtaagaatttcaractcctgaggcagtctctgatttttttaaataaatattcctcaaaaaaagacaatatttttgtgttgcacttgataattacagaattattttacatatattgtatcatgtaatcttcataacagcttgctattgttatttacattttatcgatgagaaagctgtaaaggtgagagacagga

SEQ ID NO: 501534 - DNA, 420 bp, Homo sapiens
tgaaaggaaaagctcagtgcagaggctgaggccatgccawtttataggtggaaatatgagagttttcatctggaggctgctatttgtctactgaacttgttgggttctgttggatgtaagttttgaggcttgaagatgtagtgagagacggtcattgcagcatatgggggcacaaaaatttgaagcttattggatgtttggtgagtggagttgagttcccacttcagattaggggtcataaattacagccatattcatgtgcataaatgctgagttttcttcacaatgatatatatgccaaaaaagcgaatgtttggttttatcagtaggagaaaatctttacaagacaaaaagtaaacaataaaaaaaggtctgacaggaatcttgcaattaaccaaaaagtcaacatctacattttac

SEQ ID NO: 501535 - DNA, 464 bp, Homo sapiens
atcccggcctgcttcattaactctttacacaggctcgtcagtatagcacacaattttgtcatccagaagaaagaagaaagttatattttgtttgtttgtttgtttgtttgttttatgagagggtctcactctgtctccaaggctgtagtgcagtggtgcgatcttggctcactgcaacctccacatcccgggttcaagggagtcttgtgcctcagcctcccgggtagttaggattacaggtgcatgccaccatgctcagctaatttttgtatttttagtagagatggggtaccaccatgttggccaggctggtgtcgaactcctgacctcaggtgatccacctgctttgacctcccaaagtgctgggattataggygtgagccaccgcacccggcctagcagaaagttttttcaattacactatcttagtcctattctctagtcttaactgaacatagttctca

SEQ ID NO: 501536 - DNA, 640 bp, Homo sapiens
ccatatttcattacagtatatcaccacaatgtttagtaatagttttacaagaaaatagacttcaaagctttgtgcctttggtttctatgtagtgaatttctcattataactttttatctttgcttaaactgaaaagtgaacgaattgacctttatgagtcagtgtgcactccggtgttttaccaagaaataatacctttaaaatgatatatttgcgtatgcatagaatattccagaaagatatgcaaaactgattatmtctagagtggccgggagatgagagaaaggtggaaggggccttttcacttagacatttttgtgaattttatactttgtgcaagtatcatctactaatttttaataattatgttaaaacttttttaaagaataaacaaaaattcttgttaaggttcttaatccctgaatatatttcagcagtgaccaagattaaatagcaatgatttcccaagggtcaaaggcattggctccattctgatctagcctgtttcttattcccccgcaatgcatcatgtggcatgttttcttttaaatatccaaaaaagttaatttgaaaaaaaaactgagaattttatgtcatcattcaaaataactggagattcttagggtgtgccaaaaccaca

SEQ ID NO: 501537 - DNA, 486 bp, Homo sapiens
gccctccagggtcctatggttcacgctaacattgcacacagtccagtctgtccagtgagttcagcggcctagcctcccttatgcatgctgtacttggccagacaatattcctttgtctataacatcacagtgcccagagagcccttctcttgccagattgccaaatgcgggaggcctttcagaatatctccattcatccatccacccatctactctatagttttctcttttgctttgttccaggtgctgctttaggtgctggtggggatatctgtgctctgatgaattccatgttttagtggatttgcatggatagaagggacartagcaaacaaacaaatatatagtatgtcagatggtcatgagtgctttggagaaaaataaagtagggtgagagtgagatgtcctggaccggatggaaaggtgggaggctgttattttatatctgatggtcagaaaaagtctccgtgcacatatgcagaggat

SEQ ID NO: 501538 - DNA, 648 bp, Homo sapiens
gccactggctcaacccaagcccctctcctacagatgaggacaccagagtgcagagcaaagggcrggaccacgtgtgattccagggcttttaactgtagacaggcccctttcctctgttacagggaaggcagccaggcagctcctgcaagatgtcactaatcccttgcgtgcctcagttccttatctctacatgagcatagcaacctccatcttcctggctacttctgggatttaaattagacacagtaagtgccatgcaagtaccactaatatggatggaaagtttgtgtcctccccaaatccacatgttgaaaccctaaccaccagtgtgatggtgttaggaggtggggcctttgggaggtgattaggactagatgatgtcacgagggtgaaccctcataatgagattcatgcccttatacaaagaggaaggtaccagagagctctctctctctctctcttcatcaggtgagaatgcagggagaaggcaaccatctgtgacctagcaggagaaccctcaccaagagcctgacaatgctagaaccctgatctcagacttccagcctccagagctctgagaaatcaatgtcagctgcctaagctgcccagtctatacctgcccaggtattccattatggcagcctgagc

SEQ ID NO: 501539 - DNA, 214 bp, Homo sapiens
ggtcttccaggttttacaaaactttctgaatcattgtcaccactatctctggaacagttggaaaytcattctgaatattctttggccttcggaagagttttttagtggacacactgccttataggagacgtatatttatttcttaaaattaaattctgatatctcaaccactataaccctaacctacatcctagtgaacaaaagatgccacatc

SEQ ID NO: 501540 - DNA, 214 bp, Homo sapiens
ggtcttccaggttttacaaaactttctgaatcattgtcaccactatctctggaacagttggaaactcattctgaatattctttggccttcrgaagagttttttagtggacacactgccttataggagacgtatatttatttcttaaaattaaattctgatatctcaaccactataaccctaacctacatcctagtgaacaaaagatgccacatc

SEQ ID NO: 501541 - DNA, 214 bp, Homo sapiens
ggtcttccaggttttacaaaactttctgaatcattgtcaccactatctctggaacagttggaaactcattctgaatattctttggccttcggaagagttttttagtggacacactgccttataggagaygtatatttatttcttaaaattaaattctgatatctcaaccactataaccctaacctacatcctagtgaacaaaagatgccacatc

SEQ ID NO: 501542 - DNA, 565 bp, Homo sapiens
caggtgtggcatctgggtaaccattgtgtaaaccagaaccacacatccaggggcatctctgcaggaagatrtactcaatgtccggtttctgaccttggaaattatccccaaatgttaaaaaaaaaaaaatagacaagatagcactaatgactgagaagataccctgaaagtagatgcagagctgctacatgcagaggaaggaaactgatcatagctctgggatagcaaatgagcaaatgcttacagccagacactgaacttacgtgtgccaggaaactgaggcacagaaaagggaacaatcttgccctcatccctgaactaccaagtgagctgtcgggatttcctccctggggaacaagtactaagaactaagaagtctgtgtcaggcattgatatttttatgcagcacacgagatggtaactatttctgttatcatctctccttcacttttcccttctctccatatccaagaactacagatgacagttctccttttattcctacactttcacccagattttgtcatacataacagatcatactttctgaccaatcttacctgat

SEQ ID NO: 501543 - DNA, 565 bp, Homo sapiens
caggtgtggcatctgggtaaccattgtgtaaaccagaaccacacatccaggggcatctctgcaggaagatgtactcaatgtccggtttctgaccttggaaattatccccaaatgttaaaaaaaaaaaaatagacaagatagcactaatgactgagaagataccctgaaagtagatgcagagctgctacatgcagaggaaggaaactgatcatagctctgggatagcaaatgagcaaatgcttacagccagacactgaacttacgtgtgccaggaaactgaggcayagaaaagggaacaatcttgccctcatccctgaactaccaagtgagctgtcgggatttcctccctggggaacaagtactaagaactaagaagtctgtgtcaggcattgatatttttatgcagcacacgagatggtaactatttctgttatcatctctccttcacttttcccttctctccatatccaagaactacagatgacagttctccttttattcctacactttcacccagattttgtcatacataacagatcatactttctgaccaatcttacctgat

SEQ ID NO: 501544 - DNA, 565 bp, Homo sapiens
caggtgtggcatctgggtaaccattgtgtaaaccagaaccacacatccaggggcatctctgcaggaagatgtactcaatgtccggtttctgaccttggaaattatccccaaatgttaaaaaaaaaaaaatagacaagatagcactaatgactgagaagataccctgaaagtagatgcagagctgctacatgcagaggaaggaaactgatcatagctctgggatagcaaatgagcaaatgcttacagccagacactgaacttacgtgtgccaggaaactgaggcacasaaaagggaacaatcttgccctcatccctgaactaccaagtgagctgtcgggatttcctccctggggaacaagtactaagaactaagaagtctgtgtcaggcattgatatttttatgcagcacacgagatggtaactatttctgttatcatctctccttcacttttcccttctctccatatccaagaactacagatgacagttctccttttattcctacactttcacccagattttgtcatacataacagatcatactttctgaccaatcttacctgat

SEQ ID NO: 501545 - DNA, 634 bp, Homo sapiens
ttgaagggctttgcgtgactggtcaagagtgaattcaccagccatctctccaggctgctgtcagctctggccacaggggacaggccaccattgccagatcagggmaactaatgaaccaagaaaaaaggaactacccctttactgaaggcccaccacatgccaggggcataccacttgccaagcactctacacagtctagggatgcatagctaaaaggctaaatgcacacaccctggaaacagcctctctgggtttgaagcccaaatctgggctattggctggaggccttagtcaagtctcttaacctctccatgcctcagtttctcctctgcacaatgagggctgtaacactagcttcttcattgtattgttgtgggttgggatatacagagagcataaagtaattcctggtacacagtaagagttctctttctttaaatattaaccataattattactactgtctttttcgattcttacacccactctgtgagatagtggttctcatcctcttctggtagatgaggaaactgcagctcagagcaacaaggcaacagtggctggggaagtgactggaagagatgaatttagccctggtcaggcaaagcatgggcctgtggtctgcactccctca

SEQ ID NO: 501546 - DNA, 493 bp, Homo sapiens
ctgaaggcccaccacatgccaggggcataccacttgccaagcactctacacagtctagggatgcatagctaaaaggctaaatgcacacaccctggaaacagcctctctgggtttgaagcccaaatctgggctattggctggaggccttagtcaagtctcttaacctctccatgcctcagtttctcctctgcacaatgagggctgtaacactagcttcytcattgtattgttgtgggttgggatatacagagagcataaagtaattcctggtacacagtaagagttctctttctttaaatattaaccataattattactactgtctttttcgattcttacacccactctgtgagatagtggttctcatcctcttctggtagatgaggaaactgcagctcagagcaacaaggcaacagtggctggggaagtgactggaagagatgaatttagccctggtcaggcaaagcatgggcctgtggtctgcactccctca

SEQ ID NO: 501547 - DNA, 630 bp, Homo sapiens
gatattatacccaagaaatgtagatgttaggttccatttcatttcttcctgaataggtgaatggggaggtttgggaatttcagttcctaaattagggacagttacktttttaattgaaaaaaaaaaatagaggaaaaatctgaagctgcattgggttgcaataaattttcttttttttcttcaagacagtcaagactcccagagaaacagaacagcttgtctcattaatcactaaccatcaacaaaaaacaggaagacggtaggaaattcctctgcctttctcctcttgcaaccccaccttctctattcctcccactccattcccaggtcagagactcataaacctgtcctgcttcctctaaacatttaaatttttaacctataaattataagacatttttaagaatggagttttaaaaactggacataattatcatgccccaatcattataattcttccatgttcccctttaggtttttttttttttttcctccatatagctacaggaaacttgtttttaaatccccaaagtgaaaacctctagggacctcatactataaaaagctgagaacttccctttttggtcccttgaggaagaggtcaaacataaccagatcatctttttgaag

SEQ ID NO: 501548 - DNA, 515 bp, Homo sapiens
atccttgggctgtttgctgattcctgttttagtcactttccaaaggccacatagctaaaagtggaggatcagccaggagcagtggcgagggcctgtagtcccagctacttgggaggctgaggcaggaggatcacttcaggccaggagttcgagctgtagtgcataatgatcatacctctgaatagccactgtattctagcctgaacaacatagcaagaccccatttctaaaaataaataaataaaaatggtggctcccagcttcaggtccaagtgccatgactcttggggtctgcacacttaaccacaactatgctagcaaagcaaacaatttttgatggaaggaaaatgccccctccctccatkaaaaagccagttttgtatctatttgtaaattcattttaatattcccaatccatatatgtgtctgttctttggattttcctttgaactggttgtgccatcaacctgattccctcagtaaataatgagtgaaataatatcttttacatgtat

SEQ ID NO: 501549 - DNA, 466 bp, Homo sapiens
ccttgttggttcctgaaattcagatcctgcctaggctctggggaaatgctcaaaggatgtttctttgtcatataacaacaacacagtcaactcttaaatgtcatgactgtaattcattccttaatgatggtgcaaatgagttaaatctttcatattgtagacttttaactttgcaaacatcctttaaaaagccattacagggatatgctcactccaacagagaagtgctttggctgcagcatgaaatagctaattcrtaatttaaagtatgatgcctctcccttttcccctttttagatagtttataaaaagggaaactttctcctgtgtgtgctgaggggctggatttttcactggctgtttgccttccgagcactttcttcatggccagcacttatgagcaagcctggtgtgtttaacttagctggtgaaatgatcaacggtaaacgtcagttgctgacattag

SEQ ID NO: 501550 - DNA, 600 bp, Homo sapiens
agatagctcaagtctgtcagttctgcaaaacagaattatgccccaytcccattctctcactccttacctgagatgcagacagggcttagaaaggacacgccaagatttgctgccttgccacacaagctgggttttccctccctgggccctgccagcctggaggtcatatttcctttaccttttgtccatttttccctccctggggcctggcttgaaggacaattcttgtttagaagaaatcaagtctaagatgttactaatctggaaatgttgatctggtctgcctctaacatttgtggggcccaaagcaagagtacagactaaggtccccaaaccatgtgtctagttatttagaagttataaatcaaagctaacaaactgctgaataaaagatcctattctcctatctgataaatataccctccaaacaacccagaaacccaaggtaggaatgcggtggcacagggagtgctaactcctggctcacagcccatgctccctcttttcccacagccagccctccatgaatgaggaacttcctggggccactagtgcatgctgcagctcacacagtcaactccatccacacctccacaaaca

SEQ ID NO: 501551 - DNA, 512 bp, Homo sapiens
tgccttaagtctgttgtcatagtcaactaaaattcccaaaccattaaaatgcctggtattgtgctttttactaggaatgagtgattcactttgttgttgaatttttcatttcttaaaaatacctctcaagaagtaatttcagaaaaaaaccacaatttcaaatattttaactttaaataaacaaaaatgctacattaaacatagcttttatagcataaaaaggcatactattttttatttatggaaaattagttttattgtatccctactaaataatattgaacaattttacaaagaattttggcttaaagcagtgtcatatttttagcttatttgtattctctatcctacmcttttctaggtgggctctatcttcctcaacttcagtaaggaataatgagagttactaaagtttcaggcttgcgttatttctggaaatccaaaatactcacgaaaactatttggaaggcaagttttgtcataaacaatccatggcatttatcctgcatgaa

SEQ ID NO: 501552 - DNA, 557 bp, Homo sapiens
ttacaaagaacaaacaaacaaacaaaaaaactggaaaaagatctctctgtccagatatatggttttatttccacctcacctatgaacatccaattcccaaattgatatctatataggcatagatgatttaatatagtacacactttatttgaaaaaattgcatttatacattatagatgccaattaaaaattcccagatttcaaacacttaagttgaatgattcttatgaatttttttgttgttaatattttaagtggtttgataaggagaattaggaacaatgaggacaaatgttttgaagatctttttcaggcttaactcaggtacaaatctggtttaagttgtattgatcatcacagattagctataaactaaactctggctatgactaaatatgttggattgaatgacttataagtrccttttaatttttaaaagttgataaacaggatgaggagtgtaactgcccaataggttcaccttgcttgctgcctagacagagccgatttatcaagaaagggtaattgcaatagagaaagacttactcacacagagc

SEQ ID NO: 501553 - DNA, 602 bp, Homo sapiens
aagcaccccctcactccaaataaatcaaataatgacctatatgtgtaccagggatatacattagtttccaacactgatcaatgttgttcagtatctctctaaacaaaatctcatcctatatttgagatgtgtgagtagatttttaaaaggggacaagctgaataaacagaaaaaaattctcatgatgaaatagggaatttagcttaaagttatgaactgatcacattcttaaacatcaaatagaagtaaaagtaaattaattttagaaaatataaactcaggctaataaaaactcccagttattaagtaccaatgaatgtgaactaaaatttaaaaatcacaaaaatatacatgaaacaagtcatcatacgcaartgtcatcagaaataagaaactaaagaatcagacccacaaataatgcagatataggacttactggtttcaaaataagtttgtctaatatttttgagtaaattaaaagtgacgttacaagttgaattaatcagttagggctgccataacaaaataccacagatggggtggcttaaacaatggaaatctagtttctcacagttctagaggctgggaagttcaaggccaag

SEQ ID NO: 501554 - DNA, 635 bp, Homo sapiens
gtcacatacctgctttattaataactctgcttattagcaaatatgcattaatccatttttgcattaataactcttctttgatagggaaggcatgaaaggaagtagaaagagagtaataaaggaatcttaagatcttgtatgtagtacataattttatttctgcatgtattaagccattcttgctttgctctaaagaaatttctgaggctgagtaatttataaagaaaagatatttaattggctcatcattctgcaggctgtacaggaagcatggtgcaagcatctgctcagcctctggtgagatctcaggaagattttactcatggcagaacgttaagcaggagcaggtgtctcacatggcaaagtgagagcaatggagagacagggaagtgccacacatttttaaacaaccagacctcatgagagctaacccactatggtaatgaatgayagcaccaccatgggggatccacccccatgacccaaacatctactattaggccctaccaccaacacttgggattacatctcatcatgaaatttggaggggacatccaaactatatcattctgctcctggccccctaagtcttatgtccttctcacatttcaaaatgtaatcatcctttctcaatg

SEQ ID NO: 501555 - DNA, 585 bp, Homo sapiens
tatcaaaaaggagaaaaaggaaatagactaaaaactgaaggatagaggaagaacagaacctgcggatgacaagtagaaggaaggatggagacatggaaagtgtaagagtgggatctaaattcacacaggctaagaacaggctttaccttggaggcagaataaagaggagaacagaagggattattyaaatcatatctgagcagtcctggtacccccaatggagtcattccaagattttcagcatgataaaattgcctgaactatataaaacttgaacatataaaactcttctaatagtatctattttatgccataacactcacacataacaacaaaatataattgtacatcaaaatcatctttgcaccttatttaatggaagctggccgaaacagagtccagcagtgcacctaggacagaagggggctgtaatgcaaggtgatgtctcaagccagagaaaggcagagaagaatcaggagcaagccgttatggcgaaggagtgaggacacagcctgtaccctgaaagcaatgctaaactaagaaacaaacagatgttgagatggatgtatagcaagtattcataga

SEQ ID NO: 501556 - DNA, 640 bp, Homo sapiens
tgcaaagacaggtgtgcaacccagagacccagatggataagtttacacaagccacctattatgatggcagctccaacttccctccccacacctttttaccccacccagaccactctccatcctttgtggcctgtatatcatctttataggctcgggtactaaaaaccaggaaattattaaarccaggtctggtaattccactgaacttgacagctcattaagaagattcattctaaatacattccgatcagctctggctccttccccgggcctgaaagatagcagctagtcacacaaagaagagaaaaacctggctttgttatatcagccccctcagcctacctctaaggctgccagggactcctattgagtttctttggtatacaaccctcagaggaggagctggaattgtaaatcccagtagccagtcctctcaccttgcaacatctcttctttaaaagatacttttgaagagttgtgtgtaacttacatatggcttgcttatttcttgcatgtaattgactaattttctgtcagttcttagtcacttctcaaattgatgttttagcactatttttcctttgagggttgtgtgtcttgattttatttcttagagtctatgtattataaatgaccataa

SEQ ID NO: 501557 - DNA, 502 bp, Homo sapiens
gtcaaacacttgaatatgaaccagacatttaaatattcagtgaaaattcaaatgtattgtataaagcgctcagcaaagtggaaagccctctgaccaatttcaaaataatccaagcaaacagcaattagggatatattctacttcttcccatttgttcatagctccscaggacataatgtgatctcccatgcatattgtgagggaaatggacagcacttagatttttccttactttgatgtgtgactgtcagggttgcaaataatgtgcctgcaaaagaaaattgcctcctggttcacctgaagatggaattttaaaaaatgtttcttcttccttccttttctctttctatttactcagcattacgtgagttggctgttaagcacctgaacagaggaagaaattgtttataggtgccccaatgggatgagtctagactaagagaaaacagccaacatagcaaagaagtgtttacagcatttattaggtatgtatttattaagc

SEQ ID NO: 501558 - DNA, 502 bp, Homo sapiens
gtcaaacacttgaatatgaaccagacatttaaatattcagtgaaaattcaaatgtattgtataaagcgctcagcaaagtggaaagccctctgaccaatttcaaaataatccaagcaaacagcaattagggatatattctacttcttcccatttgttcatagctccgcaggacataatgtgatctcccatgcatattgtgagggaaatggacagcacttagatttttccttactttgatgtgtgactgtcagggttgcaaataatgtgcctgcaaaagaaaattgcctcctggttcacctgaagatggaattttaaaaaatgtttcttcttccttccttttctctttctatttactcagcattacgtgagttggctgttaagcacctgaacagaggaagaaattgtttataggtgccccaatggsatgagtctagactaagagaaaacagccaacatagcaaagaagtgtttacagcatttattaggtatgtatttattaagc

SEQ ID NO: 501559 - DNA, 545 bp, Homo sapiens
tagtggttgcccctccaaagccaaggctcattgttccccacttacaacgtgagcatttagaattatggagattaaccacagctatgactggtatgagagtttgggctggaaaaagtgttataagtaaatccaccttgtcaccttgaaaactaagacaacagattaatttacactactatttccaaacagccaaaaatatcactatggcaatcatcaaaaggtcaatccaaagatgggacagtaaagattatgaggacttatacctccccgttgctaatgtccccccaccacctctcatacaacctattcccccaccccacattcacaaacaagagtaccatcctgaaatatatayactatctatatggaaactgacaaaactataccacttaaaagttgtgttaaaccaccatatatgtttttagtaggaaagatgcatattagttcaaaaaccaacataattacctgtgttaattgttacttgtatgcttgtattgactcatcctttaatcaatatcatagtattttaatactcagagccagag

SEQ ID NO: 501560 - DNA, 531 bp, Homo sapiens
ctgcaaagcaggcaccggttaggctgggaggaaagagaagaaattcacttacacttagaagtcttccttgtggtggggagaaaggaaagtttggggtaaagttttaaatgtagcaaacrctcaagagaagatgcttagggtggacaaaaagaacataagaacatgtaggatgaggtataattattggaacaaaagtcagttcagacagaagctctgggttgacatttactcctctataagattaatgagaggaaaaaatgggtagctagacgaagaggtaaaactcttactcttttagtcctcaataaagggtgctaaatccccttacccatggcagtgtttagggctttgcccccctctctctgatgcttacttttcaaaggcaataaactgacaaaagctgccatttccaagtacctgtaactgcccagccctctctaatcctggccctttcaggacaggaagagctggggctaatggctcttgtataaaagcagtttgatggaaggaaagaaacaacaagggagctct

SEQ ID NO: 501561 - DNA, 572 bp, Homo sapiens
taggattgttgtagggattcaatgaatcaacatttgtacaacacagagagaatgcttagcccgtggtaaatgctatgtaatttttaataaataaatatattgaagaagaggtataaacttttagctggcatatattctgattcttcaatctttgcacagggattggtaagtgtctcgtgttgcctcaggatttgtacataccttgactatagcacaaatcaggctcttctatgagtagtgaaatccagatctgtttatcctgctatgtgcgagcttctcaaacaaatatattcaaggtcattgaatgtattatctttgtaaccytgacattagcatagtttctgattcatagagctttattggtacatgatttttaaataaatcagtgaacaatagatgtgcatatttttctgttttgtgtctttgatggtaaaaatgcatcttttgataaaagcattaattatttttccataatctttgtttcagattttctcctttatgtggtcttatgcttattcaaagacagaataaatgtcttgttcttgttggttttgctgtcatcttaagtaatt

SEQ ID NO: 501562 - DNA, 587 bp, Homo sapiens
ctttctttcttccccaacttgtggagtctgcacaccagattcacaccctcccctgagttctggccaggagacttcttgatcagttcaaattgttacaaagttcaactggaggtttccttctccatgtggactttgcccagtgcctctggcagccctgcttaaggacccctgtgagaccaggcagaaatggcttagggattttcccgctgcttcctctaccyctgtattttgctcggctctctaaattgactcagctccaggtaaggtcagaatcttcttctgtaatctagaccttcaggttccctggtgggtatatgtgctcggggcggacaatctccctttcccatttcatggtttgggcactcacagtatttggggtgtctcccaggtcctgcaggagcaatccgcttccttcagagagtctgtgggttatcctggctttcctaatgtattcctacccatttatttgactatatgaagtactattaatctaccaatttggatgatagaatttgattgtatttatttttatacctgtgaggttaagatgaaatgaggttaagagaaatgttactaatgaaaaacat

SEQ ID NO: 501563 - DNA, 594 bp, Homo sapiens
tcccacattcgtgtgtaatacaccattcttgaaaagtacttttcaatcatttattagttcataagaaatttaatgagaagtgggaaacataatttctgcctcatagaatgagatgagattgtttgcagaatatttatgatcttcaaatggcgtaatacatgcaataatgttaccttgcaataatgaacttttattattcagtagctatcagaggttactctatgagaaaatggtaaatgactaaaacttaattttaaagggaggaaaatgaaccaatattatctcgtatgccttgtttagttacttttgcatacattttcctgaaattgtaagtgtcttgtgttatgattatctgaacttatcttatttttctaattcagatctatttaggtaattaattgatctgtgtagtaaatgtcacagacgaatatgagtcttcagttttctcaatgaaaacagattgagcttctggcttagtctgttttctgttacttataacagaatacctgaaactgggmaatttataaagaaatggaacctatttctttatttctggaagctgagtagtccaaggttgaggggccacacctggcg

SEQ ID NO: 501564 - DNA, 215 bp, Homo sapiens
ggcctaaatgtacattcttattgctgtccttccgtcttagtcttttgggatctcctcgtgttaacttgtgtgcattcgggccctttacagattggaagcckttcggggaggttcttatcacttttgctggcctataaagtgtcctacttgtgcacaggccctcagaacactttgtaaacattaactttgtaaatagcatgctttgtgtgcagcag

SEQ ID NO: 501565 - DNA, 672 bp, Homo sapiens
tgtacacatacctctcccagttactcaggcattaatctaggcattgctgtgaagggattctgcagatgtcattaaggttccaaatcagttgaccttaagatacagagatgatctgagcaggcctgacctaatcccgtgagcctcttaaagctgagtctggagatcagagacagaaaagtcagagcttcaaagaacaaggatacaacatgctgttgctggcttgaagatgaaaggttccatgtagcaaggaatgtgggcagcctctaggcactraggttggccccagatgacagccagtaagaaagcagggacctaggttctacagttacaagacactgaatcccaccacccacaggaatgatctgggaattttccctggaggttccagacaagaactcggtccagatgacaccttgatttcagcctggtgataccctatgcagagaacccaactacagcatgtccgacctctaacctgcagaactgtgatctaataagttggagctgtctttaagcttctggtcgtttgttacacggcaatagaaaacaagtacaagccttaagcaacaactcagggatagtctgggagcacaagatgattcttaaggaagaatcgatgcaattgcagaatgcaatgatttttaagaccccctactgcttttgtacgttcaa

SEQ ID NO: 501566 - DNA, 672 bp, Homo sapiens
tgtacacatacctctcccagttactcaggcattaatctaggcattgctgtgaagggattctgcagatgtcattaaggttccaaatcagttgaccttaagatacagagatgatctgagcaggcctgacctaatcccgtgagcctcttaaagctgagtctggagatcagagacagaaaagtcagagcttcaaagaacaaggatacaacatgctgttgctggcttgaagatgaaaggttccatgtagcaaggaatgtgggcagcctctaggcactaaggttggccccagatgacagccagtaagaaagcagggacctaggttctacagttacaagacactgaatcccaccacccrcaggaatgatctgggaattttccctggaggttccagacaagaactcggtccagatgacaccttgatttcagcctggtgataccctatgcagagaacccaactacagcatgtccgacctctaacctgcagaactgtgatctaataagttggagctgtctttaagcttctggtcgtttgttacacggcaatagaaaacaagtacaagccttaagcaacaactcagggatagtctgggagcacaagatgattcttaaggaagaatcgatgcaattgcagaatgcaatgatttttaagaccccctactgcttttgtacgttcaa

SEQ ID NO: 501567 - DNA, 583 bp, Homo sapiens
ctcgggaggctgaggtggaagaatcacttggacccgggaggcagaggttgctgtgagctgagatcactccactgcactccagcctgggtgacagagtgagactccatctcaaaaaataaaaataaaaataaataaacaaataatttatttaatattttgggaaaattcattttattgtctggataataatccgttatataggtatattataaattatctaatcactgaattggaaatccctcatagggccaagcatatggtaggtactcaataactatttgctgaatgaattaatgaatgattgaatggatggatggatatattgatggatgctgtcttgatcataagtcagttgaacagagaagggccatccycttccccttttctttttgctaatataaatagcactgcaataaatttccttgcacctagacatttgattatctctctgattatttctttagaaaaacttcctaaaagtaggtttaatgggtcaaagggtatggcttgagactcttggtacgaatttccaaattgctattgagaaaggttataccaattaatattcctataaatactatat

SEQ ID NO: 501568 - DNA, 425 bp, Homo sapiens
agctgagtttggtccagttttgttttctgatgtaacaagggtagcactgagtccaatgcctacaatttgctgagttctccctctccctatctcccagaaatgctctccacaccatgccactgctaccgggggttgggagaggggtgatgtcagtgattcaagactatttttcctatatcttcagtgcctctttcagtgatatgaagttaaaactaggtcctgtaagtgctctcctcatttttggtatatatgaagatgtgtgtgtgtgtgtgtgtgtgtgtgcatgtctgtgtgtgtgtgtagatagttgttaaaytggtgttcctgatgattagtagagccttttattctgccatcttacaccacctggagtctccactctgtaacttttaaatccacctcactttatgtgtctaaatccaaag

SEQ ID NO: 501569 - DNA, 529 bp, Homo sapiens
aacagtattcaaactcaggacaatcacattccaaaaaatgtatgaaaaaagctatgtcttaaaagaagttagcctttttaagtctatggacagaattcctatattataacagtaggtaaaattggaaatggatttattatgttcccttctttaaaattcctcactagtctttaactatgtatttctttctttgcttgatggattttggctgttatgaaaggaaatagtaacctggtatattatattaggattaacatataattatttacctgataactgcaaatcttttgtttttgtttgctggactctgttggtatttggagaacaaaaccagacgtaaagctatgtgatacaaagagaatagctatgaatattgaattatcttaggcttgctagaaaaataattttacstaagtgtaaaataacatgttactattcttatcatgctttatccctaatatagatttgatatgttgatggatttcattgttaataaataagaaggaaacattttagccttgtttattat

SEQ ID NO: 501570 - DNA, 529 bp, Homo sapiens
aactgtagtttgaacttgtgatgaaccagaatcctgtgaagctacacctatatggatagacacaagcatatctgagtggtgcaagggtgagctgtgttgcatacttttgctgtcttgcccagtcagttgccctttattgggccaaggaatgcaccctcaattgcattcagtgttggcaggcaaagatcacagttttctcctttgccagagaattgtcctctgcagaaaggcagcagatttccctgkgaagttatatgccccctccccactgtagggaagcctgaagccaataagaagtttacatggtggtaactaaggtcagccaccttgactgaggtaggggcaaatatgagagcaagttatgctccagagctccgcatgggatcagactgcaggtagattccacctgagaacacgtattatttactttgttgccctgccttatcctgtttctctcattgccttttgcttgagagcatcatctcaataaatcatatgtacacaagtacttatctagagctttaattca

SEQ ID NO: 501571 - DNA, 529 bp, Homo sapiens
aactgtagtttgaacttgtgatgaaccagaatcctgtgaagctacacctatatggatagacacaagcatatctgagtggtgcaagggtgagctgtgttgcatacttttgctgtcttgcccagtcagttgccctttattgggccaaggaatgcaccctcaattgcattcagtgttggcaggcaaagatcacagttttctcctttgccagagaattgtcctctgcagaaaggcagcagatttccctgggaagttatatgccccctccccactgtagggaagcctgaagccaataagaagtttacatggtggtaactaaggtcagccaccttgactgaggtaggggcaaatatgagagcaagttatgctccagagctccgcatgggatcagactgcaggtagattccacctgagaacacgtattatttacyttgttgccctgccttatcctgtttctctcattgccttttgcttgagagcatcatctcaataaatcatatgtacacaagtacttatctagagctttaattca

SEQ ID NO: 501572 - DNA, 467 bp, Homo sapiens
cacaattccaaacatttcctgcagagaggggaagttgtaccacctctatttgaggatgatgaagctggctattgcaataatctaggctttagttttcagagtgaagagatgtayattgcagcaggcatacatgacatccattggaatatgggaagaaaaaattacctctttgattcccatttttttttcaatttctattttagattcagagagtacatctgcaggtttgttgtacatgggtatattgcatgatactgaggttttaggtgtgaatgatcccatcagccaggtactgagcatagtacccagtagtttttcaacccttatctcctcccctccttctctgctctactagtccccagtcgctattgtaccacctttatgttaatgtttagctcccacttataagagaatatgcagtatttggttttctgttcctgtattaattcacttaggatagtggcccc

SEQ ID NO: 501573 - DNA, 632 bp, Homo sapiens
gtcacagaagtcagaaagcatggaagcaaaatatcaactctactactgatagagactggatgagagtatacagcttcagtaggcaatcgcaatgggttttccgtcacttcacccagaattaacatacctagatagtcattaagaaaaaaagcaagagatatgttggccacctctgcggggcaaagactgcccttaaccrtaccaccatatggctgagaacagataaaaaacaaaacaaaaatacattctctgcaggcagaaacatttaaaagaatgtcagaaagactgagctaagcttgtttttgtcctttctcttgaactcattgatgaggtaagtggcttttcctcctttggtgactgtgagtcacatcaagaaaagtcagaatgtccctccctggtggtttcttgcacttgactgtggccaagtgcatgagctgaccaccaggcagccagcagttcactcagcaaatccttgctctggtaagacactcaaagggaaatgaaggctctactgccacactcatgaatcagataagccaccccttccttcaaagagagggaaaagacatccactgtccctcagagtagaaattcgccctttgctatgactacatggaggcagagcagatatg

SEQ ID NO: 501574 - DNA, 633 bp, Homo sapiens
atttattttatttatttgttttttccacctttattttagtttcacggtgtacrtgtgcaggtttgttacatggacaaattacatgttgttgaggcttgcatcacccaagtagtaactaatgcttcttattaatcaagggaaaggcgtaccttggtaatggagtgttttcacagaaaccacctgaatcaagtaattcattttgggaaaatgacaatatttactgatttaaccatggaatggatattaaaaacacaagttctacagcattcttgcaaaaacaaaacaaaacactgagttgtatcaaaacaattattagaaaatactaatagtggaagatactagtaaacaactcacccagattactcaaatatgtcaataatctaaaacataaacacagacaggaaaatgctctgattaaggagactaaagaagcgtaaaacctcagtaccatatatgatttttaattggtctctagatttgaaaaaaagctatgaaggacatcttgggtacaattaggaaaacttgattatgtacttatacattaggtaatattataataccatatcagtaataaatatttgggatatagtaatggtatattaccactgttcttaggagatgcctgctgaagta

SEQ ID NO: 501575 - DNA, 646 bp, Homo sapiens
ctcagccagggatgaaagcaaacgtgtgccatttcttttgctttctctccttactcttaaaatttacattatttagtattctctgcatcctcaggcccattatggggttagaatggtaggttttataggttattctcattattcagagccaaggttttttatttctttctacttcctaagttgaaacaaaagttctcagtctacttttaagcttttctttctccttttttcctttggcagtcagcagttttgcttggtttggtttggtttcctgcccataggtatggctctatttgtttatcttggttggtgtttctctgctgtattcatatgttgaatttcttgtatttgcagactgttgtttttccttatttatgtaraattctcaatcattattcttttaaattttatttttgccccatacagtctctcatttctggaattccatatatatgtatgctagaacttcttaacacatcttgcatgcttctcactctgttcttttcttttcttctcttttcttttcctttgtgctttcctatgggtattttctattaccctatctttaagttgcaaggttctgtgttctggggtatctgaaatgttgttaaactcacccgtcttgttcataatttcagatatttta

SEQ ID NO: 501576 - DNA, 545 bp, Homo sapiens
actaaccgaggtgggatgactgctcagtctggatcacagggatgggaatcttgcttttcagttcctactgacataaccarttgagatcagcagcaccttgtttttggcttttgcaagaattgcagagcaaggagtagctacatcttgagcttccaaaactaacccttagtccaacagagaacaaaattgagtgagattttgcattttagaactttataaagctcacttcacagagggactcctcatacaactatgtcaccgtactgtttacacaacaggatctggaagtactttaaagccggcagtgtaaatcaaattctaggtgttatgtacatgtctgagtctaatggctggtcatccaccctccttgacttggctttagagtagtccttaactaaaacgagttctagggtcatgcaaaaccatgcacaaggatcctttagcttagtgaaaataggcagtgctttctaattctggccataggtcactgtcatttggtggtcacggtgaattggttatttaacaaattctgttttcactagttg

SEQ ID NO: 501577 - DNA, 545 bp, Homo sapiens
actaaccgaggtgggatgactgctcagtctggatcacagggatgggaatcttgcttttcagttcctactgacataaccaattgagatcagcagcaccttgtttytggcttttgcaagaattgcagagcaaggagtagctacatcttgagcttccaaaactaacccttagtccaacagagaacaaaattgagtgagattttgcattttagaactttataaagctcacttcacagagggactcctcatacaactatgtcaccgtactgtttacacaacaggatctggaagtactttaaagccggcagtgtaaatcaaattctaggtgttatgtacatgtctgagtctaatggctggtcatccaccctccttgacttggctttagagtagtccttaactaaaacgagttctagggtcatgcaaaaccatgcacaaggatcctttagcttagtgaaaataggcagtgctttctaattctggccataggtcactgtcatttggtggtcacggtgaattggttatttaacaaattctgttttcactagttg

SEQ ID NO: 501578 - DNA, 545 bp, Homo sapiens
actaaccgaggtgggatgactgctcagtctggatcacagggatgggaatcttgcttttcagttcctactgacataaccaattgagatcagcagcaccttgtttttggcttttgcaagaattgcagagcaaggagtagctacatcttgagcttccaaaactaacccttagtccaacagagaacaaaaytgagtgagattttgcattttagaactttataaagctcacttcacagagggactcctcatacaactatgtcaccgtactgtttacacaacaggatctggaagtactttaaagccggcagtgtaaatcaaattctaggtgttatgtacatgtctgagtctaatggctggtcatccaccctccttgacttggctttagagtagtccttaactaaaacgagttctagggtcatgcaaaaccatgcacaaggatcctttagcttagtgaaaataggcagtgctttctaattctggccataggtcactgtcatttggtggtcacggtgaattggttatttaacaaattctgttttcactagttg

SEQ ID NO: 501579 - DNA, 490 bp, Homo sapiens
ttgtgaggatgatgagttaaggtaggttaagtgatgaatgcattgtaaattcccaataaaattatgcatgtgattgaattggctctgaatgtttggcactgttcktcaagcttggctcgtttaacctaagtggggactaggtcagttactctttcacaggtcatcctttaaaaaattcttcctagttccctttgagaaaaatattttgaatctccaggaaatgtgactttcctggagcttttaaagtatcccttgttttggttccactaatgaacaatttccatccctgggagtgtcattagccaaaagaggcaagaaagaccttttaaaggataataatatcatctcgaactggaatttggagcctatgatcagtgcaacttttgtcgtaggggtagtttctgatgctctggtcttttgggtatgctaggaagtatgggttggtggcaatgcttcctgtaatggcattatgggcccaggaaagggtata

SEQ ID NO: 501580 - DNA, 544 bp, Homo sapiens
ccaatgccttgatttgacttctgacctccagaactgtgagaaaattaatttgggttgttttaagccaccaagtttgtggcaatttgttatggcagccaaaggaaactaatgcaagcaccttattcatgcaaaagtgataagaaaggaatattcccattatggctattcatgttgctgtggggtgggggagcttgatgtacctgggaaagtatgagatgctgccacatattaacgaattgcattagaaaagtcaccaaactttccatttcccaatatatatagtgggggaaataatacatctctacttcctccaaatagtttgtagtgagmctcaattgagataatgtatattcctgtattcaataaatatttaatgatgcctagtatatgctaggaactattctaagctctttatctcttgctgtccaatacattccctatccagaatctagtcatctttttaatgtgaagttttttgtgtgtgtttttgttttgttttgtttttgagacacagctttgctctattgcccagactggagtgcag

SEQ ID NO: 501581 - DNA, 591 bp, Homo sapiens
ccatttttatactcccaccagcaatgtaagagagttcgtttttccacatactagtgaacacttggtatggtcagtttttgtaattttagacattctaaagtatgtaaaatggtatctcattgtggtttaaattcgcatttctcttatgactagttttattgagcatagtttcatgtgcttatttggccagttggaaaatttctttcataagatatctgtttaaatcttttgcccatttaaaaccagttggaatgacttgttacttggaaataaaagagttgtcatcaagagaaaatctacatgtgccgmtagcctaaagtaactgacactggtgttgagtatagataaatgggtgtttatcaaaatatagaaggtgactctagcagagggagcagagtgggcaaagctacagaagtaaggaacagaatactttgttcagtgaatgaatcataagtagtggagtgtggcggagaatgggatgtggacagcaggaactagagttttaaagcacagtgagacatggagctggagagacaggcattgttggctttatataccatgctaaggcatttgaactcttctaaagatggt

SEQ ID NO: 501582 - DNA, 563 bp, Homo sapiens
tttacagtgacaggagactggctgtttacaggggatgagtcagccccacttccagatacccaagtccagatggcgggtaggattggcacctctccaggtgtttacagggtactgaggtcctggcaagctgggcttctctcctgcggccacctctagccagggtggggaatgagtcccctgaaggctgtgggacccatgatcctggttagattctccttctgcttgtccctggctgtgctgcctcaggcacattacttaacctttctgggcctctgccacctcatctgtaaaatgggcatgatgatgaagccaggttgccagataaaatataggctactcagctaaatgtgaagttcagatcaatattgaatttggttttactgtaagtatatcccatgcaacatttgggatatacttatactaaaaaaaaaattattcattgatgctatggtttgaatggtcccccaaagttcatatgtttgaaacttaatcctcaaagcagtcctttcaaccttgtcaacctgtyggcgcggcctctggtgcagtggcggcggctcctgttc

SEQ ID NO: 501583 - DNA, 538 bp, Homo sapiens
ccactgctcctggccatatttgttgtttttttagagacaagttctccctctctctcctagattggagagcagtggtgtgatcagggctcacttcagcctcagcctcctaggctcaagagatcctcccatctcactctcctaagtagctggaaccacagtcatgaactaccatgcctggctaatttttatgtagagatgagggggtctcactatgttgcccaggctggtctcgaactcctgggcttaagtgatcttcctgccttggcctccyaaaatactggaattacagggtgagccaccgtatgtggcttgtgtataaatcttgactttttgatcataatataccaggcttagctgggacctgcaagtgtcccctaattcatatttagggattcagttgcttaccctggacagggtggattttcagggcccattaactcacatacgtgtgggctgcccctcgccaatccctacctctgcttccagttaaatatgagcctcctctgggagacatcaaggtgtccaagttggccgggca

SEQ ID NO: 501584 - DNA, 522 bp, Homo sapiens
gggtcacatgaccattgctagagctgaggtggggtcactgcactgtcaaccacaccatctgtgaaaagagggagggaaatttcccaaagacagatgggagtgytcttcctaagaggggctgaatgggagtcagtgcggcagactccatcctcaaatcggtctcaggatatatggagtctcgctctgtcacccagcctggagtgcagtggcgccatctcggctcactgcaacctctgattcccgggttcaaacgattctcctgcttcagcctcccaagtagctgggattacaggcgtgcgcaaccaagctcagctaatttttgtatttttagtagagatggggtttggccatgttctccaggctggtctcaaactgctgacctcaagtgatccacccgcctcagcctcccaaagtgctgggatgacaggtgtgagccactgcacccgtccaggtctcaggatgttagagaatttaaccagcagtgacctggtccgttccatcctgctgtggatgggaagtaga

SEQ ID NO: 501585 - DNA, 238 bp, Homo sapiens
gaatggctattccatagacagagcagccgattttctctctttctttttactttttctgttgtggctaccagacaagtttaagttgcatctcgttcacrttattgggcatggtggtttagactctgggccctagcgagatctcctgaggctggaaaatcaagaaggagggactttttcttagaaaacctgaaaccttccctttggatgaggcagaggttaaaaacacccactcagaagc

SEQ ID NO: 501586 - DNA, 597 bp, Homo sapiens
cagctgaatagtaatacagagctaggagctttcaatgttttatttttcatttctatggaaaagaggtgaagtggacagaagggatgtctgaaattctatcctgaggctttaatattkcaaatattgttttgcatctttttgtctgttttctttaaaaaaaaaaaaaaaaaaggaaaataaactgctattagcaaataccaagccaacagggaaaattctcccaacaccaacatccaaattaaccccatctccacctcttccagatcacaggacatctggacaaaggtttaaaaagacaaataattttgacttattgacagccattgtggaaataacttttcagaaagtatgaacttacaaatgggtacttataggtaatgaccaaacccaagaacaaatgcaactgtttcaattagcaacaaggacaatacagtaatgaaagccttgaattgttagtttgttcactttcaaatatattccctaattttgtgtttgtaatcctaaaactcccattttagagaatacaaaacaagttacatattagatcaagtcatgtaaattcaggtgtggtaaaatcagattaaagattaggagatt

SEQ ID NO: 501587 - DNA, 597 bp, Homo sapiens
cagctgaatagtaatacagagctaggagctttcaatgttttatttttcatttctatggaaaagaggtgaagtggacagaagggatgtctgaaattctatcctgaggctttaatatttcaaatattrttttgcatctttttgtctgttttctttaaaaaaaaaaaaaaaaaaggaaaataaactgctattagcaaataccaagccaacagggaaaattctcccaacaccaacatccaaattaaccccatctccacctcttccagatcacaggacatctggacaaaggtttaaaaagacaaataattttgacttattgacagccattgtggaaataacttttcagaaagtatgaacttacaaatgggtacttataggtaatgaccaaacccaagaacaaatgcaactgtttcaattagcaacaaggacaatacagtaatgaaagccttgaattgttagtttgttcactttcaaatatattccctaattttgtgtttgtaatcctaaaactcccattttagagaatacaaaacaagttacatattagatcaagtcatgtaaattcaggtgtggtaaaatcagattaaagattaggagatt

SEQ ID NO: 501588 - DNA, 597 bp, Homo sapiens
cagctgaatagtaatacagagctaggagctttcaatgttttatttttcatttctatggaaaagaggtgaagtggacagaagggatgtctgaaattctatcctgaggctttaatatttcaaatattgttttgcatctttttgtctgttttctttaaaaaaaaaaaaaaaaaaggaaaataaactgctattagcaaataccaagccaacagggaaaattctcccaacaccaacatccaaattaaccccatctccacctcttccagatcacaggacatctggacaaaggtttaaaaagacaaataattttgacttattgacagccattgtggaaataacttttcagaaagtatgaacttacaaatgggtacttataggtaatgaccaaacccaagaacaaatgcaactgtttcaattagcaacaaggacaatacagtaatgaaarccttgaattgttagtttgttcactttcaaatatattccctaattttgtgtttgtaatcctaaaactcccattttagagaatacaaaacaagttacatattagatcaagtcatgtaaattcaggtgtggtaaaatcagattaaagattaggagatt

SEQ ID NO: 501589 - DNA, 148 bp, Homo sapiens
aaaatgaaagaaaacagcataaataactaaaatgggaaccctcttaacatgtcagtgattttattagaggaatagtttcattttgtatacccatcttcaatttacctcagggyagttgagtataaagtaacagtttacacattataat

SEQ ID NO: 501590 - DNA, 501 bp, Homo sapiens
tactttgattctctgctttcattatctcccatcctgttctaaaattcatctttgtaaaattaatatcagatcatgtcatttaccccttattcaaaaacaaaacttttaatgactctgtattatctacagtatagagatacagtgacttagtatgacattcaatattcttgataatctagcccccacctaacttcatcttatggttttccctcttgcttcctgatttatggttatgcctgaccactaccacatccagaatcaatcacatagagttcaytcatgtctatatgcatgctggattctttccttctgcatgtcatcccaattcaccagcattcacctgtcttctgactctcagcacaattaactgctttctcttagactctcatgccattttatccatatatcttttagagttcattccacctggtattatgggcctttgtacatacatcaggctacattgccaggttaaaactccttgaaggtctgaactgtaca

SEQ ID NO: 501591 - DNA, 424 bp, Homo sapiens
aaacctggatcaccaatctctgattagacatttcattttgtgagataattaaagatcttcatttcttaagccgctgttatttaggcatgttagttgtccctgcagccaggtgcttgctaactcaatcaaactttatgagtctaagaaaatcactaactttgggtaggtatgatatacttcatataaaacatgtcttcctgaaaagatgcatgtaaataaaattgctgtaggttgaattttattccaaacgcgtgaatgaaattattatccagagaacatcttgagtattgtgttccattgtaggtcctgcatttaaagaggaagctggaaatttcccagaggaaaacaactagggtgatgggaawtctggaactcatgtgaaaaagggactgggggaagctactctgagaagagaaacctagta

SEQ ID NO: 501592 - DNA, 534 bp, Homo sapiens
taaatgtctcatcctgcatccttaggtcttttcctcacttccctgcccctcaaaatccttctctttctttcaagacttctctcatacgttaccactacaataaagcctcagccactgcccacaaatgtaattaacttcctcctcytagctcctttcatctggtcaaagcagcatcctacatgtctccaggatgttttagagaccttgttgaattcttccagttacaatttcaagttcattctgtgtatagtttttgagcacctggacccaggtatatgatgaaaagaaaataatctccttccttattactttcctcctggtgcttactcagcacttccttcctatcctttacggatgccatttcaaaaatgtcaaactgctgcccagccacattctagtatgtgtagctggacatgtcacaataggattagatgttttctgatgattttaagttcttctgaggcatttaattatgaccccatggatacaggttcaaattgagggtaggctgactttttccctggaactgagaac

SEQ ID NO: 501593 - DNA, 534 bp, Homo sapiens
taaatgtctcatcctgcatccttaggtcttttcctcacttccctgcccctcaaaatccttctctttctttcaagacttctctcatacgttaccactacaataaagcctcagccactgcccacaaatgtaattaacttcctcctcctagctccttycatctggtcaaagcagcatcctacatgtctccaggatgttttagagaccttgttgaattcttccagttacaatttcaagttcattctgtgtatagtttttgagcacctggacccaggtatatgatgaaaagaaaataatctccttccttattactttcctcctggtgcttactcagcacttccttcctatcctttacggatgccatttcaaaaatgtcaaactgctgcccagccacattctagtatgtgtagctggacatgtcacaataggattagatgttttctgatgattttaagttcttctgaggcatttaattatgaccccatggatacaggttcaaattgagggtaggctgactttttccctggaactgagaac

SEQ ID NO: 501594 - DNA, 534 bp, Homo sapiens
taaatgtctcatcctgcatccttaggtcttttcctcacttccctgcccctcaaaatccttctctttctttcaagacttctctcatacgttaccactacaataaagcctcagccactgcccacaaatgtaattaacttcctcctcctagctcctttcatctggtcaaagcagcatcctacatgtctccaggatgttttagagaccttgttgaattcttccagttacaatttcaagttcattctgtgtatagtttttgagcacctggacccaggtatatgatgaaaagaaaataatctccttccttattactttcctcctggtgcttactcagcacttccttcctatcctttacggatgccatttcaaaaatgtcaaactgctgcccrgccacattctagtatgtgtagctggacatgtcacaataggattagatgttttctgatgattttaagttcttctgaggcatttaattatgaccccatggatacaggttcaaattgagggtaggctgactttttccctggaactgagaac

SEQ ID NO: 501595 - DNA, 640 bp, Homo sapiens
agggagagtgaatgtgcaggggaaactgccatttataaaaccatcacatcttgtgaaaactcactcaactatcacaagaacagcatgggggaaactgtccccatgatccaatcacctcccaccaggttccttcctcaacacctggggattacaattaaaatgagatttgggtggggacacagagccaaaccatatcacctaagcttggaaagcattgttttgaggagttctttgcgtgaaattccattccttgtcctttattttttattttttgagaatctcgctctgttgcccaggcttgagtgcagtggtgagatttcgactcactgcaacctccacctcccaggctcagatgattctcctgcctcagcctcctgagtagctgggattacaggcatgcacyaccacacccagctaatttttgtatttttatccattcatcagttagtagacatttgggttattccagtctggagctatcatgaataaagctactatgaatattccaactcaggtcttgctgcagacatgtgttttcatttctcttgaggaaatacccaggaatgggattgctgtgtcatatgctatgtgtatgcttacctttatcaaggtgtatgcttactctttgtcaatcaagaga

SEQ ID NO: 501596 - DNA, 562 bp, Homo sapiens
tcatttccagaactttttcattttcccacactgaaattatacccgtttaaccataccccctctcttgttagcaatgaagaaatcaaaaaggaaagggactagcccaatgtcatgcagttgggacaggggtctacaatcttagaatccagtgctctgttccttatacaacctatctgatttcttaaaataagtattttcaaattacacacacacacaccccaagtattcaatttcctgcccctgggagccacactttcagaacgatgttggcaaacaagggtgtatccagaaacagccgacaggatggtgagggacctggaaaactgatcctttataaatggaaagaactggtgatggtgattcagracagttatgggtatcttcaggggttttcaagtatagtgtgtagtgtggaaaagagattcaattcacccgacttcaaagggcaggaccaggatggagggtgcaagtggcagcaaggtcatttctattggaaactggaaggatgttttcattactcagctagagcagcagtgatgagctcctggctgctggagatgtg

SEQ ID NO: 501597 - DNA, 562 bp, Homo sapiens
gctgatctcaggatgcccaggartgagggcctggggcaggggaggcctgacatggacaccagttagctgagtggaatgcctggcccattgcctgtctcagtgttctcaactaaattgaaagtacagatacaaaagctttcatttctatggaaaaataagtgtgagtgtgtgtgtgtgtgtgtgtgtgtgtgtgtgtggtgagcaaggagaaagacaggaagcaggcagaatcatttggcctcattttagttaaaatacccgaatgggccatttagccacagacaccatttctcccttctgatgaacaagtgaagattttagacagaatgattaactttcttttccttgtttctccactacaacccatacactagggttagacagccactgatttatgagtttttcttaccttagatatctgtactcaaagtgaattcagttatttgtgaaaatgctttgtttcattttatctttgtgaaaattcagtctaaatgtatcccaatttaaattttttaaaggatggagagaaggaagttctttttaaattggtactttaaaatat

SEQ ID NO: 501598 - DNA, 513 bp, Homo sapiens
ctggtgatcaagctaaataagttagatagcacactcatttaccaaatagaaatgtcaatgtgtttagctactttactcccaattagacttctaatttactgtggctttaaatttaatgagctatatagttaacagcttattcactttataaatatttactgggcacctaccctgggacaggtagaattctagtaataagtactaaggatgcagcacccaacaagatataaaaggtccctactattcttccagatcttactttctaaagtgtatgcatgttagaaggggacagggaaagaaagataacaaacagttaaaatataagtgccgtgataaaagacaaatggaggaatgtgatagggagtgaccaagtggctrttcggaatgggcggtcaagaaaggtcttcctaggaacgcattcaagctgagacctgagtgacaaaacgtggtcagacaactgaaaatctggagaaggtccattccaggcaaagggaagaacctggggcaggacca

SEQ ID NO: 501599 - DNA, 670 bp, Homo sapiens
atgtctgtccttgactagattctaatgactaagaaaaatgtgtgtgtgtgtgtgtgtgtgtgtgtgtgtgtgtgtgtgtgtgtgaatagtttatgcaatgaatgagaagtacaaggtagtagaaggtagtggttgaaaatgtgagttcccaagtcatactttatgggtttgtgctgcagttatctcaactgtaaaattgaagcatcaatagtagaaattttacatagccaaaataagaatataatgtgtttgaatttgaaattaaattttgcttgaaaaattgcattgctaaagttggtattgattttttaaattatcatttttattttagaatagttttagattttcagcataattatgatgctggtacagagaataccattatatcccacactattttccctattattagaatcttatattgtaattgtacatctcccagaattgaatgaactaaatgaaaagatattgatatgttcattaactaagttccagctttatttaractccttagttttatccaatattctcattctgttccaaaatatcatacaggttgttactttgcatttaattattatatctccttagatagtttctcagactttcttggatttaattaccttgacagttttgaggaataccagtcagaaagtttttagaatgtccc

SEQ ID NO: 501600 - DNA, 509 bp, Homo sapiens
ttcaaggtggcataagcagtcctaggtagttcgtgtattccgggcaccagagaaaaaaaaaaaaacatatatagcaccaattcagaaaataaattgaaaatcaagaatacatttctaaatatctcaaagataacaggataaattgtaatgcaaattttaaagacacagaaaagtaaaacgtaatttcaacactactgcattttgttaaatayggtgaatttgggtagataaaagtaaatttataacttcagatgcttaaattagaaaataattacctaaaagaaaataaaaagagcttaaaattaatgagtgtctaactcagaagttaaaaactaagaaaacaacagatgtaaacttagaagataatttttaaataaatgaacaaacacaatggcaaataaacccaacacaaaattaagaatcagcaagtccacacttgaaatgtataataaaatatcaaactttcagtgagattaaagagagagagagaacctggagagagagatgga

SEQ ID NO: 501601 - DNA, 511 bp, Homo sapiens
acagaggcaaaaaacaatgaataaataattataatgtaatagggttcatggcacgacagcagtatacacaggtcctctgcagtgcagtgtttaggtgcacagatcctgactccaagctttctgaaaatttaatccartgttaccacttagaagactaatggcttttgccaaacttatctgcctcagagttcatatataaatgaaataatatttcctaccatgcacagatattgtgagaattaaatgactttatgtacataaagcccttagagaatgtctcttataaagtaatgcttttataagttggagacatttataggagtttgtaggaagaacattaataacccatcctggatagtggcttccatgaattctgagcatagacaaggaagaggtgtgtgaccatactatgtatgtggagaagcatgtgtggctcaggattttggcaagtgaaatagcaaggcacagagtggggtcatcatgaggactttctttgccatatttaagaggt

SEQ ID NO: 501602 - DNA, 591 bp, Homo sapiens
aagtaatatgggaattgaaaattgctgattgcattgaatgacttgaagacctgtggagaagacttgactgaaatgacttaagtggaaaataggcagaaaattaacaactgagaaatgaatagttatgcaaagcattttgctgtcaaaagaagctaagaactagtgtgcagctggtggaagaaagggaagtagaaaatgatgttttaaatacaggaaatataagaggatgcttgtatgctaatgagaatgaactagaaaaactactgcaggaggaaaagggataattgctgtggtaatgaccctgagttaygagagggcccttcctttgactcaggggcagaagtcatgtgaaaggcatagatagaggctggatttgcctagctgtcactcaaaattccttttaatttgctgttgtttttattattttggtatgataaaacattcattaagttaccagctatgcttcacttaaacacacacataacacacacacaaacaccccttagatatattgtttcaactgtaaaatatattaattctgcaaatgctgaaaacattcctttggatttgataggtttattgttttaagtg

SEQ ID NO: 501603 - DNA, 479 bp, Homo sapiens
ctgctggcaccgtggttgggagagtgcatgccaaagaccctgatgctgccaacagcccgataaggtacagacggatttattttaagagcttggatggggaattttasagtcaagaggttctgggaaagccctgtaggaaccacgtttttcaatttcaaaaagggttcaagtttatcaggttcaatagaatgtaaacaagattaagatttagaagacatgagcttcccttcacctctgttcctgactttttggataggattgttcaagctacatgactttgctctggagcagattcccccaggcatactaggtgacagagccctgagctgggcctgtctgcctcaggggactgtggggaaatataaataattattgtgaaataattatagtaattgcaatttattaaataccttcccattctctggttactctatgaggaggttaggtatgtgatctaatcaatcccctcaacttaatcg

SEQ ID NO: 501604 - DNA, 479 bp, Homo sapiens
ctgctggcaccgtggttgggagagtgcatgccaaagaccctgatgctgccaacagcccgataaggtacagacggatttattttaagagcttggatggggaattttacagtcaagaggttctgggaaagccctgtaggaaccacgtttttcaatttcaaaaagggttcaagtttatcaggttcaatagaatgtaaacaagattaagatttagaagacatgagcttcccttcacctctgttcctgactttttggataggattgttcaagctacatgactttgctctggagcagattcccccaggcatactaggtgacrgagccctgagctgggcctgtctgcctcaggggactgtggggaaatataaataattattgtgaaataattatagtaattgcaatttattaaataccttcccattctctggttactctatgaggaggttaggtatgtgatctaatcaatcccctcaacttaatcg

SEQ ID NO: 501605 - DNA, 659 bp, Homo sapiens
gaatgagtacccctgattgtttgtgggtctctttgccacaaaaaatcttaggtttctaagaactgttcttttatctagaaactgagtctagaaactgagtttttcttttttttgtctaattataggctatgatggaattcaactaattaaccaacctattgtggatattaaaataaactagtttaattagaatgcaataatgtcagtgttccagggtcagttatgtgcttataaaattcaatgaaacctagaggacttcaaattctagttctgttattttccatgtgcttgtgagaaattgcttccctcttagtttctcagttttgtttcttataagatatgggatattataatctttgcacagtttgaaaaattgtctgggataatgtatgtaaaagtaacaaacaacarcgtttgcccatattagcagttcaatcaatgttgcttagttaatttgcttcaatttaaataacagaataataagatagcaagatgaagatatttagcaaaagcaaaatctgcaatataaatataagcaacattagaaggagttggagaatatggaaactagaaatggaccatgagataatgaatcagtaaactctgactgtgtggaaaagtcagactgatatgagattcattggaaagcacagcattca

SEQ ID NO: 501606 - DNA, 660 bp, Homo sapiens
taaaccctgttttacaccttgatttattttttgaggcagagtctcactttgtcacccaggttggagggcagtggtgcagtcttggctcactgcaacttctgtctccgaggttcaagcgattttcatgcctcagcctcagtcccagagtaactgggactacaggcatrtgccaccacggctggctaattttctgtatttttagtaaagatggggttttgctacatcggccaggctggtctcgagctcctggcctcaagtgatctgcccgcctcggcctcccaaagtgctggaattacaagcctgagtcactgcgcccagccaccttaattttaaaaggaaaaatgtattaagtttttccctttgttttgcttgtattcatttgatttaaaacttttttaagttttaaaactatccaaacctacagaaaagttgcccaaataacacaataaattcttatgaacacttcatcaggagacactgaattttaaaaaatcattttgccatgttctatgcaacaattttatgaatttaatccctaatcaaggtacagcttggatgtcagttacctggagaccagagtgcagttcctctccccagcattgatttactgagataacataagatgttctcgaaatcaataatgtgttcctctcattgtca

SEQ ID NO: 501607 - DNA, 593 bp, Homo sapiens
ctgtaaaccctgttttacaccttgatttattttttgaggcagagtctcactttgtcacccaggttggagggcagtggtgcagtcttggctcactgcaacttctgtctccgaggttcaagcgattttcatgcctcagcctcagtcccagagtaactgggactacaggcatgtgccaccacggctggctaattttctgtatttttagtaaagatggggttttgctacatcggccaggctggtctcgagctcctggcctcaagtgatctgcccgcctcggcctcccaaagtgctggaattacaagcctgagtcacygcgcccagccaccttaattttaaaaggaaaaatgtattaagtttttccctttgttttgcttgtattcatttgatttaaaacttttttaagttttaaaactatccaaacctacagaaaagttgcccaaataacacaataaattcttatgaacacttcatcaggagacactgaattttaaaaaatcattttgccatgttctatgcaacaattttatgaatttaatccctaatcaaggtacagcttggatgtcagttacctggagaccagagtgcagttcctc

SEQ ID NO: 501608 - DNA, 476 bp, Homo sapiens
gcataatggtttccctgcccgtgcattagcatgggccttttgggcctgctccggcttgcctgacccatctsccagcaggaaaggctgtgcatctgtaatactctggaaaattggggctgacatgtagttcagtacccaaagtggtttcactcaagcaaacgcggagaataaaagccatgcgcttaaaatgcttgagtaggtatcaatcagaagaacattccaataatccatgtttatgaagcctgttagtatgaatttttgaaatagcacttaatccactttattcttgacaaatggtgtttgtagccattgagatattttatttcaattatgtgcggatgttgtagggaaaaggtttctgacagtatcaaggcataagacattttttattgtgcttttatcactattcccattgctacactcgactggacagttcattaagatgaaaaattaacagcacatactatggagagaat

SEQ ID NO: 501609 - DNA, 315 bp, Homo sapiens
gggatggagttctcctcggtcttcatcaccagggtgtccatggcgtaaaagctgttccacggcagccacacagtgcgctcctggctcatgaacggggctcgctcaaagtgtagagtcaaggaagcacctccatttgcgatcaggtcgaacctggagagggagtaaatgagctgatgagggggtagactcacttttagacaaggcaggatgcctctcctcctcccctgatggccatgsgatgggcagagcacagaggagaccatgggctttggaggcagacaggtggggctggaacccaaactctatcacttacta

SEQ ID NO: 501610 - DNA, 407 bp, Homo sapiens
actttcccacaaatcccggtttccaaccagctacccctgggaaagtcctataaagccagagagatgctacaatattgtgctcaaagtccatggagggagaatgtgcatgcctcctctcatctgaattctcttgacttcacagagaaatgggacaatgagaagctccatttctgcaccaagcccccagcagactgggcaatttggcaaaagaagagaggttctcaggctcccagcatcctggacacactcccagtttctgaactaggtgatcaactgacccgtcctttgycacaatcttgtcaaagtcggctcgatttttggatgcacttacttttgcattcctgggtgtcctgaaaaccggagggatgctgtctccacgcatctctctttttattagcaataccccc

SEQ ID NO: 501611 - DNA, 407 bp, Homo sapiens
actttcccacaaatcccggtttccaaccagctacccctgggaaagtcctataaagccagagagatgctacaatattgtgctcaaagtccatggagggagaatgtgcatgcctcctctcatctgaattctcttgacttcacagagaaatgggacaatgagaagctccatttctgcaccaagcccccagcagactgggcaatttggcaaaagaagagaggttctcaggctcccagcatcctggacacactcccagtttctgaactaggtgatcaactgacccgtcctttgtcasaatcttgtcaaagtcggctcgatttttggatgcacttacttttgcattcctgggtgtcctgaaaaccggagggatgctgtctccacgcatctctctttttattagcaataccccc

SEQ ID NO: 501612 - DNA, 366 bp, Homo sapiens
cctccctcttgttggagttggtccctggttccacgtctctcgagttgtggaggccacaacgtcaatggtgcaagctaagggcccaatcagaacaagtcacgccatgcccacgtggtkacattaggacagcttgaggcggaatgtggctcccagtttccctcgacagccgtgtgattcttttttctaactgcctttagacttgttcttactttcatcagccaggtacccagagccgattagaagttaagcttttataagaacactggttttattcttcttttcttcccactacatacctgaaaacaaagggctgtcaatcccctctcttcaaaacagcaaccagcagagggagggagggggaggaag

SEQ ID NO: 501613 - DNA, 619 bp, Homo sapiens
gatttttatcagaaattgacaagttaattctctaatgtgcaaagaagcattcaaggtaggacacattagtcatttgtggcaaatattcatgcaattctgttcaaaaaattattgaacttctatattattccaataggcatagtaaaagaggaaacagaagcataacaaagtggtaagacagccctgggtttaaatcttaactctttgcccatgacctttacacatccaccagaacttatrgaattctttaggggaagggtagggtagggatgaaggatgggtaaaatttgaaaggacatcaaagcttagatctaactcacccacctccacccctactcaaagtactggataaagaaacactgttctaaataattttttaaagtgatactatactattaagttggaagggaccttaaatagtattatatttacccaaggcctaaatagagtgaagtgctttgctcaaagttacacaagtatcaaagtgactattatttatcacagtcagaccagagcccaagcccaatagcccaaatgtggatacaaattccagatcttccaccagccagctatgcagcctatagttaaacctctgaaatttggaactcttccttgaaaa

SEQ ID NO: 501614 - DNA, 665 bp, Homo sapiens
cttactctaaatcttctgttctctgggttacctagttccactaaggattcctctttttccttaagcagttatttattgagtactatgttggtttgctaggacagccataacaaaacaccacagatgggtggtttaggcagcaaaaatttattttcgcacagctttagaggctgaaaatccaagatctaggcaccagaggatcgctttctcttgaggcctctctcatgggcttacacataactgccttcttcttgtgtcctcayatggccttttctctgtgcctgcacatttccagtgtctctttctctacttgtaaggacactagtcctgttggattagggccccactcttatgactctatttaatttaactttacctccttaaaggccctatctccaaataggaatttgagctttaacatgaatttagagggatgcaaatcagtccataacagattcatatgcaaaaacagcagggaaaaaatagaacacccttggcccagtggacaaatgacacccaaggtaatactagttagtggcagagccaggggcagaactctggatggagtaagacttatttcctctctctttatggaatttatatccctatttattttgcccaatataacatttactcttgtggaagatctgttgacataaaagaga

SEQ ID NO: 501615 - DNA, 517 bp, Homo sapiens
caaacttccaggaaatagcgtctgaaattcagcatcaccttttaaacttgggcgtttggtttaaatacgagtatatattttctttattaaattaaaatgcaccctgtgtgatacaggaagaatgaggtggtagcctttgctgaaggaacaagtagaactaaaggaagcttaaaacaatctgcctttaccctacctgctgtgtaatcaggtatgttgaaaggtaatgaagcagcttaattattatcttttaaatatctgtttaaaatactattatttctttgaaattgctctgattaaacatttctttgatctcagyaaataaggaggtttgtaaaattccctttggggcaggagcctacaaattcctctatcaactggcaaatgattgtgcgaaaggagcagagagaagagtctgtctcaatatgaagagataaaatttccatagttatctattagtggaaatggacatctctgaaaggagctctttgtcctcagaggagttcaaatggaagacatg

SEQ ID NO: 501616 - DNA, 517 bp, Homo sapiens
caaacttccaggaaatagcgtctgaaattcagcatcaccttttaaacttgggcgtttggtttaaatacgagtatatattttctttattaaattaaaatgcaccctgtgtgatacaggaagaatgaggtggtagcctttgctgaaggaacaagtagaactaaaggaagcttaaaacaatctgcctttaccctacctgctgtgtaatcaggtatgttgaaaggtaatgaagcagcttaattattatcttttaaatatctgtttaaaatactattatttctttgaaattgctctgattaaacatttctttgatctcagtaaataaggaggtttgtaaaattccctttggggcaggagcctacaaattcctctatcaactggcaratgattgtgcgaaaggagcagagagaagagtctgtctcaatatgaagagataaaatttccatagttatctattagtggaaatggacatctctgaaaggagctctttgtcctcagaggagttcaaatggaagacatg

SEQ ID NO: 501617 - DNA, 387 bp, Homo sapiens
tgggggcgatgccgtaccctgcaaagccactcgggcagagctcctgatgaccatgggagccaccccttgcatcagcatgacctggatgtgaaacatagagtggaaggagatcattgkgaaatattttccttacaagaggataacaagcttaacttttattttgttgatgtattctaataatgaggaaagacgagggaagtgaaaaccaagagcaatgttgacccttcacagattccaagttattgcctgaagggcttttttgtcttgccttcttataagagtgttgtgaaaataagttccacggtgtcatgcaggagaagtcgccagatgacccaaactcttcttctctttcctgcttataattctcaagaacaattgtagaatatg

SEQ ID NO: 501618 - DNA, 620 bp, Homo sapiens
tgcactccagcctgggcaacaagagtgaaactctaagaagggaaaaaaaaaaaacagaagtggtgtatttgagagtcggtgtgtatttaggaatcagaggtacagggtacagcgttcaggggacccagaggtggcccggagattgaggaatacacacttacaggccaagtaaattggactcaaaggtgctaggggctcaggagggtgcacctgttgtccaggtgtgttgccatgaaaatgctggtgcacgaaagttgctaagtaagacaggctgaggcagacacacaaaaaaagccagggggagccagggcacagctccactagggctgggggcggggtggagacgtcgggttggggaatccacggaatgagcagcccggagacgcccactcctcccacatcgggtctccgccccgctccacccctaagaccccttggaaatcaaatagaggtgaaggggtgcaggcgtggagaattgcaggcatgtcgcgggtatcgctgcgctgctgttgtggcttctggtgctggcgccggcgtggtgggggtagggtgggtgccgcgctcagatgcgggggtccctacctccccggcccaggcygctcccattgctggggaacttg

SEQ ID NO: 501619 - DNA, 495 bp, Homo sapiens
gtctcatccttgtaatcccatcacttgtcaacatgcatgcgtttttaattgaatcatagagaattccagttggaagagacaatatatattacctggtgttaatcttacctgctcactttagcaaatttgaatgcatcatgcagaattcatggtacattttattggcagtatttttgatctttggtctggtaatgaattcataaataacttgttttgatattttgctattctactctgctttttcattaagggctgttgaggggagaagagagagagaggtagcaagtgagaggggcttgggctctgaagtcaaatcccacctttgccactgactttctttgtgccttaatttctgagcctcaccaattttcactttctactggtgtaaaatgacaacaatgatagtcatggaaacayggtaagtgacgtgacaggtatgtcacatgtaagggcttattacatagtaagtggttcaattctgctggatataaagaa

SEQ ID NO: 501620 - DNA, 440 bp, Homo sapiens
ctttgtagttaatcagtattttcagtctggtaactttcattacttttaaaatacaagtgatgttttatatttgaataatggtgtttggagggattctgtatgcctttttattattttatactttttgtgtctgtgtcctatattataaacacatttcaaacacagttcctaattctgtaatttaaaaaatgttgtctgtttatgctttttactgcatattttctaattaaaaaactttttttatgtccagaatttttaattgactttttcatagctattattcttttagtttcagaatgtgtctttttttcatgaaatgccaygttttgctttaatctcttgagtatcaaaaatatccttatattaaagccactttttacattttaaaattattatttttgtcactgggggtctcttaattagggattgttctcagggtc

SEQ ID NO: 501621 - DNA, 516 bp, Homo sapiens
ccagaaaacacagtcatggttagtccccaccctacaaaaccactcctcagcttggagcttcacccactaccctgctgggaacagcagcattagggagaaacacagttagattggaattcaccagccccggggaagatgcacgagctaccgcctgaagtgatcactctccacttaactcttttcagctcctcataagcacacaaaatctggamctctctgatgtgccttctgtggccgtctggaccaggggccacagttgccacggttttgggtgcagacatgatctgagtgaagaaaatgactgaaaattgcaagttgagctccggctgctcttgccccaggccgaatccacctctccatgagtttaaaatagcattgccccctacctccatttcagggggctttacctccagagttcaccagcttaattttggccaaggaagctgggcatcatgctcattcagcatttgttggaatcagaatcctctattctatacaaataatatatttaaaaat

SEQ ID NO: 501622 - DNA, 516 bp, Homo sapiens
ccagaaaacacagtcatggttagtccccaccctacaaaaccactcctcagcttggagcttcacccactaccctgctgggaacagcagcattagggagaaacacagttagattggaattcaccagccccggggaagatgcacgagctaccgcctgaagtgatcactctccacttaactcttttcagctcctcataagcacacaaaatctggaactctctgatgtgccttctgtggccgtctggaccaggggccacagttgccacggttttgggtgcagacatgatctgagtgaagaaaatgactgaaaattgcaagttgagctccggctgctcttgccccaggccgaatccacctctccatgagtttaaaatagcattgccccctacctccatttcagggggctttacctccagagttcaccagcttaattttggccaaggaagctgggcatcatgctcrttcagcatttgttggaatcagaatcctctattctatacaaataatatatttaaaaat

SEQ ID NO: 501623 - DNA, 561 bp, Homo sapiens
gaaggaagctccctccaggaagtaatctggtggcatgcagagctctggtggaagagggtgaagtgtctgagtcctggtcaaacagtgacagcccttcccccacaggggcattggtccttcccaagtaaccccaccccttagcatctttgcctcttcctgatggaattaaacagctaccacacttccatttcacagcgggagaaatggagactaagtgcctgtgacacctggtcactggtctaagtgctgatgatacaatgcccctgccctcttggagctggtagttcatgggtstattttagttcctacattagctcaggtgcattcacagaaaataagtaatgatgctttagcaagacaggtttatttctttctcactgagagcctacgttggttggctatctgaggggcaggtggctttgttccacaagtcatccaggggctcaggtttcttccaccctgctctgccagctcccagcattctgtcaaccacatgatcaaagctgaaaagaggacagtgtagggcaggcagtatccttcaagggcctgacctgagggctg

SEQ ID NO: 501624 - DNA, 636 bp, Homo sapiens
tccctccaggaagtaatctggtggcatgcagagctctggtggaagagggtgaagtgtctgagtcctggtcaaacagtgacagcccttcccccacaggggcattggtccttcccaagtaaccccaccccttagcatctttgcctcttcctgatggaattaaacagctaccacacttccatttcacagcgggagaaatggagactaagtgcctgtgacacctggtcactggtctaagtgctgatgatacaatgcccctgccctcttggagctggtagttcatgggtctaytttagttcctacattagctcaggtgcattcacagaaaataagtaatgatgctttagcaagacaggtttatttctttctcactgagagcctacgttggttggctatctgaggggcaggtggctttgttccacaagtcatccaggggctcaggtttcttccaccctgctctgccagctcccagcattctgtcaaccacatgatcaaagctgaaaagaggacagtgtagggcaggcagtatccttcaagggcctgacctgagggctgcacacaagtcaattctgctcacatcccattagtatgatcttagtcacatggtcacatttagctgcaagggaatctgggaaatgt

SEQ ID NO: 501625 - DNA, 618 bp, Homo sapiens
agctgaggagtcagcactgattccccctatccatsctaggcccctccatttcagaggaagaatcctgtttagtatcatttggagcaccccttgtgtatctgtcaggtgttagcgtctgggacaaagcctgtaccttcaccgagaggacattccaggagacaggttacaagaaacaagcacaccaatacataccacagttcacagtagagatcaatgctttgcaaaaaatactaataataaagtagtaaaatgatagagcatggttggcgggagaggtggtttctctagatggggtgggctgggattgtcactctgagaaggaacatttgagtaaagactaaaataatgtgagtgggggagggcaagtagatacgccgagatgagaataagctagacattgtcaaggaacagaaagaaatgcctttctattccttagttgtatttggagacctagagaagttgtgggaaatagcaagtttggcatcctcacttgcagcatgtgctagcgttacctacactacagtggacatgaaatggttaaagagcaacctccctctaccccacacccatgcaaatgtcagcagccaagggggacacttggtcatggagcagagagag

SEQ ID NO: 501626 - DNA, 625 bp, Homo sapiens
gtagatgaggacagtgatggctgctcaggtctgagacatgggccaggggtcatcaagacttcctgttggcgtggctgtcctcagccccctgacctttcactttgtaattttttggtgatagagattggatactatccatgttgattgtctgttttcttggcttctgggaacacwgtgctcaggatcctgggaggcaggttcatggtggacacgtgttccagtcaccgtgccagcctttctcctgcagaccaggggttggcagtggacttggctcctgttgtttcaagagtcccttctccacaccaccactatcaggaagtcccatttcagacagcattttctactttgagatcctgccttcagtacacgggtatcactgagggttgtgacactgccatgcctttctaaaagtctatttcttgacatttcaggacatagaacatcttccaaacactcccagagcactctgtcctagccagctccctttcccaggactggaggtttcttcctccaccactccatcattttccatggcaggtttagcatttccactctgccagtgtgggtcactgcttcctcccaagagccaatttagcagcgccttgccagaattttaattcctgtg

SEQ ID NO: 501627 - DNA, 625 bp, Homo sapiens
gtagatgaggacagtgatggctgctcaggtctgagacatgggccaggggtcatcaagacttcctgttggcgtggctgtcctcagccccctgacctttcactttgtaattttttggtgatagagattggatactatccatgttgattgtctgttttcttggcttctgggaacacagtgctcaggatcctgggaggcaggttcatggtggacacgtgttccagtcaccrtgccagcctttctcctgcagaccaggggttggcagtggacttggctcctgttgtttcaagagtcccttctccacaccaccactatcaggaagtcccatttcagacagcattttctactttgagatcctgccttcagtacacgggtatcactgagggttgtgacactgccatgcctttctaaaagtctatttcttgacatttcaggacatagaacatcttccaaacactcccagagcactctgtcctagccagctccctttcccaggactggaggtttcttcctccaccactccatcattttccatggcaggtttagcatttccactctgccagtgtgggtcactgcttcctcccaagagccaatttagcagcgccttgccagaattttaattcctgtg

SEQ ID NO: 501628 - DNA, 654 bp, Homo sapiens
cgttcatcacaattcttcaatcccaccagaaaaatatggcattcttgagggacccttgtttttcatagacctaggggttacagagtcacatggttcagcaggccaggcatttgatttatttgacaatacaactctctcaaaaacatastaggcttctgatctactttcttctggtcagttctatgcttaagttataacaatctaagattttattagttgtgtttttaagactgagcactcttttcttttcttactgctctctgtattctgccccccgccagacccaccttaatggcaactgtcctgagcctaggtgaaccaataagctgttggcaaagaaaacactcctaatctaatcttacacccttaatttaatctgtgctgctagactggctcttactgtctagcagaacactcttaacagaaagtgactgaaaaagctatatgagccttatctccttctaaggctgttactcaaattcacaatttctaactccttcaatttggggtgcagagacagctaacatcaaacatgcaaggacctaaattgcatcaacttaattgcaggtaacaggcagagtgcctcccctagctaatctcactaagggtacgtatgtgttctgcagagagctgtgggtatccctgctgcatagt

SEQ ID NO: 501629 - DNA, 654 bp, Homo sapiens
cgttcatcacaattcttcaatcccaccagaaaaatatggcattcttgagggacccttgtttttcatagacctaggggttacagagtcacatggttcagcaggccaggcatttgatttatttgacaatacaactctctcaaaaacatagtaggcttctgatctactttcttctggtcagttctatgcwtaagttataacaatctaagattttattagttgtgtttttaagactgagcactcttttcttttcttactgctctctgtattctgccccccgccagacccaccttaatggcaactgtcctgagcctaggtgaaccaataagctgttggcaaagaaaacactcctaatctaatcttacacccttaatttaatctgtgctgctagactggctcttactgtctagcagaacactcttaacagaaagtgactgaaaaagctatatgagccttatctccttctaaggctgttactcaaattcacaatttctaactccttcaatttggggtgcagagacagctaacatcaaacatgcaaggacctaaattgcatcaacttaattgcaggtaacaggcagagtgcctcccctagctaatctcactaagggtacgtatgtgttctgcagagagctgtgggtatccctgctgcatagt

SEQ ID NO: 501630 - DNA, 557 bp, Homo sapiens
ggtttcagggagtatctagtccaattgcttaattttgcaactgagaaaacagagcaagtccacttgtcctaagcagcagaggtccaggacctagtatatctcatcctgggatgagataaaagtgagaggagsctagtcctgtgggattattcttaacatttccaccagaagtttctactacttgagttctccctcatcgtgtgaccctattcaccacaccagtgaataagcttcctcagaaacatgtcctggtttgtgcatgaatttccctgatttatacctggaagcctccaatctggactagacatccttagttgtaatggactctctggttgatgtcaccccaacttcccaggcttctatcaatgacctctactttttattaatgttaccatgcgtctacttggtttgtcatactttctgaagtactagaacttgacggagctgggtatgcactaacatgttatacttgtccttgtgtggctgcttattgaggctgtaggtctgccgtttggtagaatacaattaacaagatcgtagaataggggaaagaacac

SEQ ID NO: 501631 - DNA, 557 bp, Homo sapiens
ggtttcagggagtatctagtccaattgcttaattttgcaactgagaaaacagagcaagtccacttgtcctaagcagcagaggtccaggacctagtatatctcatcctgggatgagataaaagtgagaggaggctagtcctgtgggrttattcttaacatttccaccagaagtttctactacttgagttctccctcatcgtgtgaccctattcaccacaccagtgaataagcttcctcagaaacatgtcctggtttgtgcatgaatttccctgatttatacctggaagcctccaatctggactagacatccttagttgtaatggactctctggttgatgtcaccccaacttcccaggcttctatcaatgacctctactttttattaatgttaccatgcgtctacttggtttgtcatactttctgaagtactagaacttgacggagctgggtatgcactaacatgttatacttgtccttgtgtggctgcttattgaggctgtaggtctgccgtttggtagaatacaattaacaagatcgtagaataggggaaagaacac

SEQ ID NO: 501632 - DNA, 557 bp, Homo sapiens
ggtttcagggagtatctagtccaattgcttaattttgcaactgagaaaacagagcaagtccacttgtcctaagcagcagaggtccaggacctagtatatctcatcctgggatgagataaaagtgagaggaggctagtcctgtgggattattcttaacatttccaccagaagtttctactacttgagttctccctcatcgtgtgaccctattcaccacaccagtgaataagcttcctcagaaacatgtcctggtttgtgcatgaatttccctgatttatacctggaagcctccaatctggactagacatccttagttgtaatggactctctggttgatgtcaccccaacttcccaggcytctatcaatgacctctactttttattaatgttaccatgcgtctacttggtttgtcatactttctgaagtactagaacttgacggagctgggtatgcactaacatgttatacttgtccttgtgtggctgcttattgaggctgtaggtctgccgtttggtagaatacaattaacaagatcgtagaataggggaaagaacac

SEQ ID NO: 501633 - DNA, 545 bp, Homo sapiens
gtcaggcagaggggttggggccaaaattagagagcagagcttagagggaacagcaccagcaaagtggagggagtgggactggggactcagatactggagtgagatgttcaccttcactactattttcattctgtgcccataaatgataaaattcatctgcaggaggtcaggagttaccattggatcttggccaaataagatgctgggattacacacagagttaacactaccacacagagacctcaccctaggtctgtggtagaaatgggactgggasgaagctcctaaaaataggagttagtggccttagaggtcagtcttagataagggaagggaagcctgtgacagaaagaagagtcacttggaaagagtctggaagagtctagaggcaatggggatgctactggcattgggacagtccttcattgtgtggactgtttgtgcattgcaggaggctgggcaccctggccttcattcactgaagaaatagggccatccccacccctgccctagtcagaaggtgacccaacccaacagcacacatc

SEQ ID NO: 501634 - DNA, 614 bp, Homo sapiens
tcaggcagaggggttggggccaaaattagagagcagagcttagagggaacagcaccagcaaagtggagggagtgggactggggactcagatactggagtgagatgttcaccttcactactattttcattctgtgcccataaatgataaaattcatctgcaggaggtcaggagttaccattggatcttggccaaataagatgctgggattacacacagagttaacactaccacacagagacctcaccctaggtctgtggtagaaatgggactgggacgaagctcctaaaaataggagttagtggccttagaggtcagtcttagataagggaagggaagcctgtgacagaaagaagagtcacttggaaagagtctggaagagtctagaggcaatggggatgctactggcattgggacagtccttcattgtgtggactgtttgtgcattgcaggaggctgggcaccctggccttcattcactgaagaaatagggccatccccacccctgccctagtcagaaggtgwcccaacccaacagcacacatccaatcatccctatggatggaaagtatcctcatttggaaagcaccagatccaatgcctaactaacagacgg

SEQ ID NO: 501635 - DNA, 671 bp, Homo sapiens
gtcaggcagaggggttggggccaaaattagagagcagagcttagagggaacagcaccagcaaagtggagggagtgggactggggactcagatactggagtgagatgttcaccttcactactattttcattctgtgcccataaatgataaaattcatctgcaggaggtcaggagttaccattggatcttggccaaataagatgctgggattacacacagagttaacactaccacacagagacctcaccctaggtctgtggtagaaatgggactgggacgaagctcctaaaaataggagttagtggccttagaggtcagtcttagataagggaagggaagcctgtgacagaaagaagagtcacttggaaagagtctggaagagtctagaggcaatggggatgctactggcattgggacagtccttcattgtgtggactgtttgtgcattgcaggaggctgggcaccctggccttcattcactgaagaaatagggccatccccacccctgccctagtcagaaggtgacccaacccaacagcacacatccaatcatccctatggatggaaagyatcctcatttggaaagcaccagatccaatgcctaactaacagacggtggagggctataacccaccaattctctcctgctgcaggaaagtggaactgtggctt

SEQ ID NO: 501636 - DNA, 485 bp, Homo sapiens
gacttcctgtgccagtaccttcccagcagcttccttgagaaatcggcaggcaccatcttcccttcccctgggaaaaytaaaggagtgatccagaaagatcaagacactatgtcccctaattccctccctgttaattttcctgtgagagagaaacttctcaaagacagtgtttgccaaggaaaatcaagagggaaccttgccccatgggctatttttctaagggaaagcttagagagtatgtgaaaccacctgacttttaagcctagaaatcaaatttgaaatgtagtataagaaatgtaggatttccttaggtgaggaattatgattttattttaaacaacttttgaataagtaatgcagtcacatgggtcaaaatttaaacagatagacaataaatggtctttcatgccaccctatgctgtagccactcagtttcaaccttcttgtgtatccattcagagatctttcatgcattcacagcacat

SEQ ID NO: 501637 - DNA, 485 bp, Homo sapiens
gacttcctgtgccagtaccttcccagcagcttccttgagaaatcggcaggcaccatcttcccttcccctgggaaaactaaaggagtgatccagaaagatcaagacactatgtcccctaattccctccctgttaattttcctgtgagagagaaacttctcaaagacagtgtttgccaaggaaaatcaagagggaaccttgccccatgggctatttttctaagggaaagcttagagagtatgtgaaaccacctgacttttaagcctagaaatcaaatttgaaaygtagtataagaaatgtaggatttccttaggtgaggaattatgattttattttaaacaacttttgaataagtaatgcagtcacatgggtcaaaatttaaacagatagacaataaatggtctttcatgccaccctatgctgtagccactcagtttcaaccttcttgtgtatccattcagagatctttcatgcattcacagcacat

SEQ ID NO: 501638 - DNA, 634 bp, Homo sapiens
gaacacaggtcaagtgaactttcctgttcctcagctggtaattgtagtaggcatattgtagataggaaaataaacctaaacttaaaattaaaatctattttagtgaggacaaattactgccttccatatgatagaaagaatccagcaaaaataggcaaatgggattgtatcaaacaaaacatattctgcacagcaagggaaacaatcaatagaatgaaaagtcaaactacagaatgggagaaaatatctgcaaaccrttcatccaagaagaaattaatattctgaatatataaaaaactcaaacaactcaacagctaatgaagcaaataacccaacttttaaaacaggcaaatgaactgaatagacatttctctgaagacatacaatatccaacaaatacatatataaatgttcaacatcactaatcatcagggaaatgtaaatcaatactacaatgagataccatctcaccctagtgagaatggctattaacaaaaagacaaaaagttccaaatgctggtgaggacatggagaaagggaactcttacatgctgttggtgggaatgtaaactagtacagccattaaggagaacagtatggaggttcttccaaaaaacacaaatggaactaccat

SEQ ID NO: 501639 - DNA, 535 bp, Homo sapiens
aaatatcataaaaccctattcaaatggagttacatagtaaagaacgcattacaacacataacttggagtctrgagattggtaactttcactgattcatgcagagcctcaatgatattgaccgagttctgacattccttctgcctttctgtcctatgctttgcagatgccagtagaagaagctggggctttgtgcttccatacgcttgtctaataggagagacccacattggttcaggtctgcccatacctagcaattcactgtggaggagatggagtttcttattcactggttaaagccttatacagctacagcagagtgggtgctgggaagaggacactatgcccaccacagatatgtccttattaatcctcttaatgctctcatgaagtaaacactattatgatctgcatttcacagatggaaaaacaagacaccaagaggttaagtggttttaccaaggatacgtggcttgttaagtgccaagctctccatggcatattatgctgccttccaagtgccttaggctgtgtgtt

SEQ ID NO: 501640 - DNA, 613 bp, Homo sapiens
tgggaccacaggcacgcaccaccatgccaagctggtttgttggtttttttgggggtttttttttgttttttgtttgtttgttttttagtagagacgaggtctagctatgttgcccaggctgatcttgaactcctgagctcaactgatcctatagcctcagcctcccaaagtgctgggattacagacatgagccattgcacccagtcctgagcttagtttcttaagaaaagatgacaatggagtcaagcataaargcacctaacagagagcgctgtttttatcatcagcgttttctataaagatcatgtcttatactcacctcctaaaacgccaaatttttgcctaaatgtgaacttcaagaattcaattctcctttacttcactgaacttgacctactgattaatactacagcatactgactagtactgtgttgtaagagatgcaggttagcagaaaccctccacatgagatctgctttaagactgacccaagcctgaaacgctctctccctaagtgatccatgtccctgcagtaataccataaccactaagctaacacactcactgtaaaagtgttgcttctccatgaagcaccaagacttgatgaccattt

SEQ ID NO: 501641 - DNA, 621 bp, Homo sapiens
cacccttttacattcccacattccgctttttgatacattcactagtcagcccatgactcaggttctctgcatagtaaactcatactcagctataaataaacacaactttctatattttaccagtgaatatttataatggttcaagacagagtatgtgatatggtaacttactgcttccacaaaccaaataccacaagaacacttcgccgtcctttattagagacaggaaaggacaacataagaacatggtcacaccacatcttctttaacttcctcttgcacaaatgctcaggatcttggaaccataatacaaatactaacagtttyatttagaaatattggtgctggggtatccagcaaatctgggaaactggttaaaaactcttttacatgtgaagggaactcttctaatattagcgaaaattacaaaactgccttcacaaaataatgttttaaggatcacctatatagcaccatggatatattgttcctttttgttgctgaacagtattccattgtacgaatctaaaacataccagatgcccaagagagagtggcatgcaactttagagaccacagtagcaaatcactaagggatacactgccttggggatgacagca

SEQ ID NO: 501642 - DNA, 621 bp, Homo sapiens
cacccttttacattcccacattccgctttttgatacattcactagtcagcccatgactcaggttctctgcatagtaaactcatactcagctataaataaacacaactttctatattttaccagtgaatatttataatggttcaagacagagtatgtgatatggtaacttactgcttccacaaaccaaataccacaagaacacttcgccgtcctttattagagacaggaaaggacaacataagaacatggtcacaccacatcttctttaacttcctcttgcacaaatgctcaggatcttggaaccataatacaaatactaacagttttakttagaaatattggtgctggggtatccagcaaatctgggaaactggttaaaaactcttttacatgtgaagggaactcttctaatattagcgaaaattacaaaactgccttcacaaaataatgttttaaggatcacctatatagcaccatggatatattgttcctttttgttgctgaacagtattccattgtacgaatctaaaacataccagatgcccaagagagagtggcatgcaactttagagaccacagtagcaaatcactaagggatacactgccttggggatgacagca

SEQ ID NO: 501643 - DNA, 621 bp, Homo sapiens
cacccttttacattcccacattccgctttttgatacattcactagtcagcccatgactcaggttctctgcatagtaaactcatactcagctataaataaacacaactttctatattttaccagtgaatatttataatggttcaagacagagtatgtgatatggtaacttactgcttccacaaaccaaataccacaagaacacttcgccgtcctttattagagacaggaaaggacaacataagaacatggtcacaccacatcttctttaacttcctcttgcacaaatgctcaggatcttggaaccataatacaaatactaacagttttatttagaaatattggtgctggggtatccagcaaatctgggaaactggttaaaaactcttttacatgtgaagggaactcttctaatattagcgaaaattacaaawctgccttcacaaaataatgttttaaggatcacctatatagcaccatggatatattgttcctttttgttgctgaacagtattccattgtacgaatctaaaacataccagatgcccaagagagagtggcatgcaactttagagaccacagtagcaaatcactaagggatacactgccttggggatgacagca

SEQ ID NO: 501644 - DNA, 634 bp, Homo sapiens
ctgatttttttcaattgtactttctcctggccacttatcgggaaactatttagggcttccatggtatttgaagctataacttaataacttctttgccaaaaaacattctgtttacatggaactagggttagaagtgatataagcacatttagaaagggacaaaaacctacagcaaaactgtacagtaacatttacatcacagtacttggcataatcaaaaaygcattatgctatgtgaaagagactagactcaaatggctacatactatatagcctttatgattccatttatatgacattatatgacattccatttatatgacatataggatagagaacacatcactgtttgccaaaagtcaaggctggtgggaggagctgactacaaagaagaagaatgagggcactcagggaggtaacacaccaattcagtatcttgattgtatctggttacaggactaaattccatattatctgaattcacagaactgtacactaaatgagtcaatcttactatacatttttaaaacacaacaattaaattttagcttaagcctcatctcacctactcctcatacctatttcaaacctcttgacatgctctacacaatgaccccaccccctccacctagct

SEQ ID NO: 501645 - DNA, 624 bp, Homo sapiens
gctgggtgtggtggctcatgcctgttaccccagcactttgggaggccaargtggaaggatcacttgagcccaggagtttgacaccagcctaggcaacatagtgagacttagtctctacaaaataataatataaaaatgtaaaaaaaattatatatattatatatgttatctggcatcttaagaaagtttgctgactctagcctaaatgatctataaggttcatttaacattcttacatgctggcgatgaaaaaaagagctgcaataaaacacttttaaatggaagacagcaataaaaaaggaaaaaggcatgatgagagagaacaattcatacaagatcaaaattcacctcccagtgataacactaacttctctttttaagtgcgtggcttatcttccagtcactgaaaccttctattccaagaatatacaagattaaacaagcattagcgatttaacactcacctgccttccttaactctttctgcattccctcgacatatgtagtattcaatgtaaccatcgctgcagttgatttttgaccaatctggatcacaaacatccaagaagtgaggccgcagtctgcctattgaatacttggcaatgtcagtcagggactgactag

SEQ ID NO: 501646 - DNA, 624 bp, Homo sapiens
gctgggtgtggtggctcatgcctgttaccccagcactttgggaggccaaggtggaaggatcacttgagcccaggagtttgacaccagcctargcaacatagtgagacttagtctctacaaaataataatataaaaatgtaaaaaaaattatatatattatatatgttatctggcatcttaagaaagtttgctgactctagcctaaatgatctataaggttcatttaacattcttacatgctggcgatgaaaaaaagagctgcaataaaacacttttaaatggaagacagcaataaaaaaggaaaaaggcatgatgagagagaacaattcatacaagatcaaaattcacctcccagtgataacactaacttctctttttaagtgcgtggcttatcttccagtcactgaaaccttctattccaagaatatacaagattaaacaagcattagcgatttaacactcacctgccttccttaactctttctgcattccctcgacatatgtagtattcaatgtaaccatcgctgcagttgatttttgaccaatctggatcacaaacatccaagaagtgaggccgcagtctgcctattgaatacttggcaatgtcagtcagggactgactag

SEQ ID NO: 501647 - DNA, 572 bp, Homo sapiens
gaaaacagcaaaagatggtggtataactccaggttagcaacgtcaggaagccattatcatctccaggtctaaaggggctagggaagggttattagaacccagaaagatgtgtaactatagatggctggcagagagggccattattgaatacaagttgtgaactactcacagaacagctttggcaacactaaatccagcaagagggaactagcttttagggagatcctttctgatgtccctcccactgggcaaagctaatctgaaaccaaaaaggaagggctcagttgatgtaccccatgtaattcatttcccagaagcacagagcagagtggagaaaagatctggaagggcaaatggaacacacacagcacagaaagatattctaaatgattgtcaaaaacagcaaaacacaggtataaggaatcaaagttttgtcagttccagctaaatcttctagatattgtgggactgcccgcaartaagtcataaacattggtacttacttgggttcctactgccctatatcaagttggaaaagaaaaaaaaaagcagcagcagctacgagtaattcc

SEQ ID NO: 501648 - DNA, 583 bp, Homo sapiens
ggctcacccctgtaatttcagcattttgggaggccaaggtgggtggatcgcctgagcttaggagttcaagaccagcctgggaaacatggtgaaacctgtctctaccaaaaatggaaaagttagctgcatgtggtgatgcgtgcctgtagtcccagctacttgggaggctgaagcatgaggatcmcctgaacccaggaggtcgaagctgtagtgagccatgattgtgccactgcacaacagagtgagaccctgtctcaaaaaaaaaaaaaaaaaaaaaaaaaaaaaaaaaaaaaaaagtttaaatcgtacaaaagtacataaattaaaaggggatacccccttccctactctctcaaccactgcaaatatatagaagcaaatccttctacaactttctacgtatgtatatacagacctgattaatggtatagtttggtttgttttatatatgtgggtttttttttttgtttgtggagatggagtctcactttgttgcccaggctagagtgcagtcgtacgatcttggctcactgcaacctctgcctcccgggttcaagtagttctcctgcctcagcctcccgag

SEQ ID NO: 501649 - DNA, 589 bp, Homo sapiens
acccgacactgggcaatttatgaaagaaataggtttaatggacttacagttccacatagctagggaggcctcacaatcatggtggaaggcaaggaggggcaagtcacgttttacatgggtggtgagaggcaaagagagagagagcttgtgcaggaaaactcctgtttttaaaaccattagatctcataagacttattcactatgacaagaacagcatgggaaagacctacccctawgattgaattacctcccaacgggttcctaccacaacacgtgggaattgtgggagttacaattcaagatgagatttggggtggacacagccaaaccatatcatatatgaactatgtgatactcctcaaaaccctggattacagtcagattaggactatttctgagaaataaagtgtagtcgttaatcctcaattttgtgtcaaaatgctagttacaatggaataacattgttgcccacttcaagctaattgctttttgaggaaatgattgcatatatatttccacatgtacatcattttatctctgaaatatatgaccacccaagtatctggagaaacactcttcattattaatt

SEQ ID NO: 501650 - DNA, 589 bp, Homo sapiens
acccgacactgggcaatttatgaaagaaataggtttaatggacttacagttccacatagctagggaggcctcacaatcatggtggaaggcaaggaggggcaagtcacgttttacatgggtggtgagaggcaaagagagagagagcttgtgcaggaaaactcctgtttttaaaaccattagatctcataagacttattcactatgacaagaacagcatgggaaagacctacccctaagattgaattacctcccamcgggttcctaccacaacacgtgggaattgtgggagttacaattcaagatgagatttggggtggacacagccaaaccatatcatatatgaactatgtgatactcctcaaaaccctggattacagtcagattaggactatttctgagaaataaagtgtagtcgttaatcctcaattttgtgtcaaaatgctagttacaatggaataacattgttgcccacttcaagctaattgctttttgaggaaatgattgcatatatatttccacatgtacatcattttatctctgaaatatatgaccacccaagtatctggagaaacactcttcattattaatt

SEQ ID NO: 501651 - DNA, 639 bp, Homo sapiens
taaaggacagaatttgaacgtttacataatatgagggggaaaaaagaaaacgtttagcttctttggcaagctatcgataaaatagctgaaattcaagaagccttttagttaggagggagagattgtgaacacaacaggaagaagccccaggctgagtggcaaaggttgagattttctatcgtaagcctcacccaaacccttcctccctgaaagctgctgamggagctttggcatgggctcatcctcccgttggctgataagcgaagccctgtttcatatttaactcgctgcagtgcaggcggggtaggggtggagatgcgtcgtttataaggggagctgtgacaatcttctcgccagccctcttcctgtcacttggctcctcttacggagtcctcaagccaccccccttgtttccgcattcatcctgagtggctggtggcaaagtgaaaaaggacaggaaaaggcacgagaagccagagacgggtgtgggaaaagcgaaaacaggctgccaaatcaggggattccttccaatttaaaaaagaagtctgctggctttagtcaaattcaacatctttttatgtgtaacacttgacttgggaagcaaaactgaactttgcggagagagggctctaagagata

SEQ ID NO: 501652 - DNA, 639 bp, Homo sapiens
taaaggacagaatttgaacgtttacataatatgagggggaaaaaagaaaacgtttagcttctttggcaagctatcgataaaatagctgaaattcaagaagccttttagttaggagggagagattgtgaacacaacaggaagaagccccaggctgagtggcaaaggttgagattttctatcgtaagcctcacccaaacccttcctccctgaaagctgctgaaggagctttggcatgggctcatcctcccgttggctgataagcgaagccctgtttcatatttaactcgctgcagtgcaggcggggtaggggtggagatgcgtcgtttataaggggagctgtgacaatcttctcgccagccctcttcctgtcacttggctcctcttacggagtcctcaagccaccccccttgtttccgcattcatcctgagtggctggtggcaaagtgaaaaaggacaggaaaaggcacgagaagccagagacgggtgtgggaaaagcgaaaacaggctgccaaatcaggggattccttccaatttaaaaaagaagtctgctggckttagtcaaattcaacatctttttatgtgtaacacttgacttgggaagcaaaactgaactttgcggagagagggctctaagagata

SEQ ID NO: 501653 - DNA, 576 bp, Homo sapiens
aatacaatgattttttaaaagtatttgccaatggttgagggaagggcaatattctgaagaatatccaccttaaagagattctaaaaattcattaaagtgaaagtgagtcaagatttttaaaacattattgctaaaactttaaaactgcttcttaggtcataaatacaagagacattttatgtgagtaaaatcatcaaaatatttataaaataaatgaaataaaattttacacatattaggaaggctaaaaattggaactatgtagtttccattaataagtttttattatgtacttcgtaagtctaataaagcattatgtacacaaatactctcactctttgagtcattttactgtaccagttaattttgccataaaatatataccagagagctgcccttctgaagctcagttgatttaattttcattggagaatatgaaatgacggcaaaatcagtgatgaaggctgatgctyagttcagttctcactgagaattgctgttcccaagtttgtatgtttcactgggagcagtttaagctctcacattacacaagatgctaccagttctgtactgcac

SEQ ID NO: 501654 - DNA, 441 bp, Homo sapiens
gaaaatcatttggaaggattggagyctttggaatgtttctctgaccacaccctccttcttcccattttctcactgtattatgcaggatttccagctgttcccttccctaaaagaatttccctctactcaaactccaaagtatatgttttcttctctccaagatttggcttttccttgtcagcatttgaattatgcttacttagcatttcccaaagtatgtactgcagaattctagttgcgtggggatcttagtagatattaccagaaaaatggcaggggagagattctgtggctaaatcactttatgcaataataccaaatacaaaatgatctgttttggattttgttttttaattatggaagtttttagagactttttttttaagagatgaagtccaggctgggatagaactcctggctcaaactcatgagttcatgagt

SEQ ID NO: 501655 - DNA, 340 bp, Homo sapiens
gctgtgatagtcatttaggtatccagactgatggagcagctgccatctcaaatgctgtgggcaagagctctggatggtgtcaaattggcaattaaatggkcgagcccaaaagtgacacatgttgcatgtgctcatagctcattggtcactaccggtcacacagcatcatccaatcttaagggcttggaggtgtgatcctattgtgtgtgcagaaggcagaggctgatgaatacttagtgagcactactgattccttttgtcagccttgtggaaactgagtggtgggatgtaattcctgcatatgtgagattgccttgggtcacctgtgaacaccttatct

SEQ ID NO: 501656 - DNA, 340 bp, Homo sapiens
gctgtgatagtcatttaggtatccagactgatggagcagctgccatctcaaatgctgtgggcaagagctctggatggtgtcaaattggcaattaaatgggygagcccaaaagtgacacatgttgcatgtgctcatagctcattggtcactaccggtcacacagcatcatccaatcttaagggcttggaggtgtgatcctattgtgtgtgcagaaggcagaggctgatgaatacttagtgagcactactgattccttttgtcagccttgtggaaactgagtggtgggatgtaattcctgcatatgtgagattgccttgggtcacctgtgaacaccttatct

SEQ ID NO: 501657 - DNA, 340 bp, Homo sapiens
gctgtgatagtcatttaggtatccagactgatggagcagctgccatctcaaatgctgtgggcaagagctctggatggtgtcaaattggcaattaaatgggcgagcccaaaagtgacacatgttgcatgtgctcatagctcattggtcactamcggtcacacagcatcatccaatcttaagggcttggaggtgtgatcctattgtgtgtgcagaaggcagaggctgatgaatacttagtgagcactactgattccttttgtcagccttgtggaaactgagtggtgggatgtaattcctgcatatgtgagattgccttgggtcacctgtgaacaccttatct

SEQ ID NO: 501658 - DNA, 340 bp, Homo sapiens
gctgtgatagtcatttaggtatccagactgatggagcagctgccatctcaaatgctgtgggcaagagctctggatggtgtcaaattggcaattaaatgggcgagcccaaaagtgacacatgttgcatgtgctcatagctcattggtcactaccrgtcacacagcatcatccaatcttaagggcttggaggtgtgatcctattgtgtgtgcagaaggcagaggctgatgaatacttagtgagcactactgattccttttgtcagccttgtggaaactgagtggtgggatgtaattcctgcatatgtgagattgccttgggtcacctgtgaacaccttatct

SEQ ID NO: 501659 - DNA, 462 bp, Homo sapiens
aatcaagcaatcaaggagattactattgccacagatcctcttgtgagtatcccagacaagcataagcgaaatagaagatattagaggccaaaagaaaaaaaaaaatcaagaaatacagaaaggggtggttgtctgtacctgaaacttgaatctcagttctccaaatatgaaagtctttaagaacaacaccaaagggcaagcaagaacactttttggaagactaccaagagctttattattttatttctcctgacactactctgcaagatagttttatttgttcccccacctctttttttttttttttttttttttttttttttkgggttttgagacagagtctcacttgtcgcccaggctggagtgcagtggcataatctcggctcactgcaacctctgcctcccaggttcaagcaattctcctacctcagcatgctgagtagctgggactacaggtgcgtg

SEQ ID NO: 501660 - DNA, 621 bp, Homo sapiens
ctggttcccaactgaagttttggggggaaggggaaggagggtgatttctaggataggggaaatatgcckttggttgaatataggattttacttatctcgatatgtcttggaaaatttccttaggtttcagaagactcagaaccctccagagtttcaatttcagaggctaagtctttgagggtcccatcaagaaatataaacagtacagcctgctggtgataaaaacaatggcagtagtgaggagaggagtatacggagggaaatgtttcttcttggctcatgatagttcctttctgtgaaagggtgcattggacagcaacagtggggcttcacctgtagcatcactttctctaccttagcaaggaggagggaattatctggttggaaaatttcagaaaaaaaaactagctcttccttattgtcctcttagatgttaactcatcagcagaaatgtgagttcttgccagcttctccatgttgtaagtcttatgtggcaccactgcctgggttggctgtgttaatctacctgccagagggttgagggtgggagtacctgaaaccgttgaatcctgcaaatacaaaccacagcttccatttagtctttatctgtcatacaggtta

SEQ ID NO: 501661 - DNA, 601 bp, Homo sapiens
gcatttaatcacaatcaacagtaagtgatagcttgagtcattgtgaggtcactttctggaaatcaccagcatcacatttcccattggtaaggagctcagcactgccccttggataaccaaacctatgcccaaatcccatgtgtgtgggtctagctcctgggacccttcctagcatcaattctgtatttgtaggagcccaatcgggggatataaaccactcaaaagtttaaagtggtaaaatttaaaataaaaaaattattataacagggcaacagcataatgagagatgggctaccaaaaagtaaagagaacactagagaacacaggactagcagatgccaggcatggtagctcctacttataattccagcaatttggaaagccaaggcatgaggatttcttgacgccaggagtttgagagcagcctgggaagcayagtgaggccatctctaaaacaaacaaacaaaaaagctccatctcaaaaataaataataaaaaaataaaataaaataaaataaaattagcttttcatgctcttgtacatctgtagtcccagctccttgggaggctgaggtgggagtattgcttgagcccaggagtt

SEQ ID NO: 501662 - DNA, 457 bp, Homo sapiens
acccctgatttaattgcaatgcttcttactccattggatttaatccagattcctttccatggcctagaaggtgctccatcctcatctgaatattacttgctcctctaggctccactatgctccagccaccctgaccagctttatggtgcttaaacactatgtcaagtctgtttacatctcaggtcgctgcacttgacattctacccagcaggaccagaccagatcttgaccagatcttcttcaagctgcctcagctcaaatgtcagagaggtcttcactgcccaccccaataggtcagtacccattccaatgcccaaacattctaactcccatagctctatttattttcttcaaattacttatcaccatctgaaaaaaatatcatttgttgcatgtwtatagcctgcttccccaccaccacaccaccacaagaatggaacctccccgagaatagaga

SEQ ID NO: 501663 - DNA, 614 bp, Homo sapiens
tcactatgttgcccaggttggtctcaaactcctggcctcgagatccttccaccttggtctcccaaaggtgctgggattacaggcgtgagccaccacgcccagccagtttttataattagttgcttgtattgcatgatcataggaaacccatgatttcttatcccttcattttcactgatgagaaaactctacgtaatacaaatgcttacagttctacaaacctggagtatggcacgctacctagctattcagagccatgtcccatggaaagytctgctgtcctgtggagatctgatgcaacaggaaggcattggctcacatcaaggaagcagttccgtggtttgcaggcccactgcataggagtcaaactcttttttaatgcatcttcctaaaatccattttattttacattagttacaagctaaaattttacttcaattcaaaagccaataagaaaatgtagaaaaccctttaatgatcacagaaaaccaggttcctaaccagatgataaattttgataaatcaatgatatccagatcacgactttaaattcccattggtccactggacaatcaacattatcacacacatgcctgctcactttggctgaccca

SEQ ID NO: 501664 - DNA, 614 bp, Homo sapiens
tcactatgttgcccaggttggtctcaaactcctggcctcgagatccttccaccttggtctcccaaaggtgctgggattacaggcgtgagccaccacgcccagccagtttttataattagttgcttgtattgcatgatcataggaaacccatgatttcttatcccttcattttcactgatgagaaaactctacgtaatacaaatgcttacagttctacaaacctggagtatggcacgctacctagctattcagagccatgtcccatggaaagttctgctgtcctgtggagatctgatgcaacaggaaggcattggctcacatcaaggaagcagttccgtggtttgcaggcccactgcataggagtcaaactcttttttaatgcatcttcctaaaatccattttattttacattasttacaagctaaaattttacttcaattcaaaagccaataagaaaatgtagaaaaccctttaatgatcacagaaaaccaggttcctaaccagatgataaattttgataaatcaatgatatccagatcacgactttaaattcccattggtccactggacaatcaacattatcacacacatgcctgctcactttggctgaccca

SEQ ID NO: 501665 - DNA, 614 bp, Homo sapiens
tcactatgttgcccaggttggtctcaaactcctggcctcgagatccttccaccttggtctcccaaaggtgctgggattacaggcgtgagccaccacgcccagccagtttttataattagttgcttgtattgcatgatcataggaaacccatgatttcttatcccttcattttcactgatgagaaaactctacgtaatacaaatgcttacagttctacaaacctggagtatggcacgctacctagctattcagagccatgtcccatggaaagttctgctgtcctgtggagatctgatgcaacaggaaggcattggctcacatcaaggaagcagttccgtggtttgcaggcccactgcataggagtcaaactcttttttaatgcatcttcctaaaatccattttattttacattagttacaagctaaaattttacttcaattcaaaagccartaagaaaatgtagaaaaccctttaatgatcacagaaaaccaggttcctaaccagatgataaattttgataaatcaatgatatccagatcacgactttaaattcccattggtccactggacaatcaacattatcacacacatgcctgctcactttggctgaccca

SEQ ID NO: 501666 - DNA, 522 bp, Homo sapiens
agtgtggctgtttctaagtaagcatcctgactggcaactcagtcaagctggatacctccctcactccttttaraacatgccctttgctttcctgactcataaaacactgcctactgttgcttccatccagaattctcctctgccttcactattggccaaaatccttcccaccctttaatgccttggtacagcctttctgaagggcaactttgccttgttcatctaataccctgaaagtgtgcatttcttaggactcagaattccactgctggaagtttattcaaagaaaataatcagactagtatgcaaaaatgcatgtaataagagtagtcttaagagttactgagtacatactatgtgccaggcattaaactaaaccctttaaatgcagaatttcataacccttagactaaacattgtaattggctttatttcacagatgagaaaatgaagacttgcaggttaaataatttgtccaaggttaagggattatagatgactttttttaaagtgtggggacta

SEQ ID NO: 501667 - DNA, 522 bp, Homo sapiens
agtgtggctgtttctaagtaagcatcctgactggcaactcagtcaagctggatacctccctcactccttttaaaacatgccctttgctttcctgactcataaaacactgcctactgttgcttccatccagaattctcctctgccttcactattggccaaaatccttcccaccctttaatgccttggtacagcctttctgaagggcaactttgccttgttcatctaataccctgaaagtgtgcatttcttaggactcagaattccactgctggaagtttattcaaagaaaataatcagactagtatgcaaaaatgcatgtaataagagtagtcttaagagttactgagtacatactatgtgccaggcattaaactaaaccctttaaatgcagaatttcayaacccttagactaaacattgtaattggctttatttcacagatgagaaaatgaagacttgcaggttaaataatttgtccaaggttaagggattatagatgactttttttaaagtgtggggacta

SEQ ID NO: 501668 - DNA, 614 bp, Homo sapiens
gctgggattacaggtgcctgccatcatgccttactaattttttttgtatttttagtagagatggggtttacgccatgttggccaagctggtctcgaactcctgacctcaggtgatccacccgcctcagcatcccaaagtgctaggattacaggcatgagctaccagggctggcctgctttaaccttttaaaaatartctttaaaaggcttctttacaacagtgggtctcaaagtgtggtcccagaccccagcatcacctgggatcttgtgagaaattcacattcttaggccttactgcaaaattactgaatcaggaaatctggggatgggcccagaaagctgggttttaataagctctccaggtgattctgatacacacagcagttcgagagccactactttacaataacatctcactgttgcaattatgaggccatgtcattaataataatctagttaaaatgtgtgtacctcttttttttttttttttttgaaacagggttttgctcttgtcacccaggctggagtgcaatggtgcaatctcggctcactgcaacctctgcctcctgggttcaagcaattctcttgcctcagcctccaaagcatctgggatt

SEQ ID NO: 501669 - DNA, 614 bp, Homo sapiens
gctgggattacaggtgcctgccatcatgccttactaattttttttgtatttttagtagagatggggtttacgccatgttggccaagctggtctcgaactcctgacctcaggtgatccacccgcctcagcatcccaaagtgctaggattacaggcatgagctaccagggctggcctgctttaaccttttaaaaataatctttaaaaggcttctttacaacastgggtctcaaagtgtggtcccagaccccagcatcacctgggatcttgtgagaaattcacattcttaggccttactgcaaaattactgaatcaggaaatctggggatgggcccagaaagctgggttttaataagctctccaggtgattctgatacacacagcagttcgagagccactactttacaataacatctcactgttgcaattatgaggccatgtcattaataataatctagttaaaatgtgtgtacctcttttttttttttttttttgaaacagggttttgctcttgtcacccaggctggagtgcaatggtgcaatctcggctcactgcaacctctgcctcctgggttcaagcaattctcttgcctcagcctccaaagcatctgggatt

SEQ ID NO: 501670 - DNA, 606 bp, Homo sapiens
gggactattttttaagatggcaatttaagtcagggaaaaacattccgcctgtcatctgctaccatttaaatgtctgtagaaaggagaaagaaacctacccgtagttacctagagaagaagaaaatatggattttccttgttagcattaaattaaaactttctgacagagagctgtaggaaatgctatatcagaaaagagatatcagacctattatataagtaaaattactctgtcacgtggagagtactgacagttgctagtataaatcatccttatagcattcttaactgggaaatttaatataaacctttcttgcaaatcagtaawattgcagacacaaggctgaaatctccagggaacaattaacagttgcaatgaaatcacagaaactctagcataccaaaccaataatactcattcttaaagtctacattggggagggaagcgtaactgacaatatattccatcaaaggcttttatcttagactgtaagcaggaatggctgcatttttgagagtcaatcagacactttggtttctggccagcccaccgtctctcactacgcattgccttctgagcagttttacacctcaacagagactggc

SEQ ID NO: 501671 - DNA, 615 bp, Homo sapiens
ttcacaacccagctctgtcttgcttacatctgacgtgctacttcactggtgtgacctccagtgtgcttagtggataatgacactgcataatccccatgctgccccacaatgaccctgagtgatgtctagactttccagtaatcaagtcttataattcaatgcaatgcaataaccttttatgtattgttggggagaatagggaatatatagatgcactgataattactaggcatttgatatatggcctgtgatagagataagggcaggaaactaaagggtacagaggaagctatgtggcccagcctgatgtgaaacaatggatgtatggttggataacatttatatattttcaaagtgtgattatatatttcatcccttagtctccctgtagtcacggggaagtatagatagcatttgcattatttgttcttattatatagagagagaaattgaggcaaatgagggtggtccgggacatagatctggtttcagtggctgtcttggtctgttctgtgctgctataacagaatgccagaggctgggtaacttataaagaaaaaaaatttatttctcacrtttctaaaggcaggaagtccaatatcaagttgctggcat

SEQ ID NO: 501672 - DNA, 488 bp, Homo sapiens
cacatgcattccatatataaaggaaaaaacttaggtatctgcataaatggaatcataatacacattgttacatagttttccacatccttgacgatttctcatgtcactgactcttttgaacraaacatgcacaatagaatatttgaatgtggcataatgagatagtatagaaagagctatgtgtttcacttcccaccaaggccttagaatgaggccagggcagaagaggtttgaaaaaaaatgtggtctaaggaaggttcttcttggaaccatctattcagtagagtgtgctggaacattaaaatctgttctcattgatttcttatgcattcttatgaggtaagtataattgtagtcaagtcaccagaggaaatattcaaacccagatggcttattggcctgaaacagaagcagcaacaatgaggtgtgaactagagttggtgaaaccaaggcttacccaggagcaactgttctgtggaggtctggct

SEQ ID NO: 501673 - DNA, 488 bp, Homo sapiens
cacatgcattccatatataaaggaaaaaacttaggtatctgcataaatggaatcataatacacattgttacatagttttccacatccttgacgatttctcatgtcactgactcttttgaacaaaacatgcacaatagaatatttgaatgtggcataatgagatagtatagaaagagctatgtgtttcacttcccaccaaggccttagaatgaggccagggcagaagaggtttgaaaaaaaatgtggtctaaggaaggttcttcttggaaccatctattcagtagagtgtgctggaacattaaaatctgttctcattgatttcttatgcattcttatgaggtaagtataattgtagtcaagtcaccagaggaaatattcaaacccagatggcttattggcctgaaacagaagcagcaacaatgaggtrtgaactagagttggtgaaaccaaggcttacccaggagcaactgttctgtggaggtctggct

SEQ ID NO: 501674 - DNA, 514 bp, Homo sapiens
ttccgggatggatggaagagaccatggacttgataagcatgatagggtgatggaagttcaggcactgagaacagcaagaccagagtcatggggttagggtcaggccaactgaggctgaggtgcagcaggtccggagacctctctcccagggcccaccctgcacttcccagagctgagagatgcacctcctttcatgtctcccctgggcacttccccagcctccccagtcagctgtgagtcagagcactgggaccaccaaaggcaggccaggctgtgacccctgccagggggcagtggggcttggggattcatgaatgttcccagaaatggctgtgtgagcagtcacatcatcggctgtractccaacctgccagggcagggccgctcactcccacacaggatggacggatggacagtcggcctacacaggcctgtagggaggggcttggctccatctgtgttgacagagggtcaggagtaggaggagagctctctcttgatttgggggctgttt

SEQ ID NO: 501675 - DNA, 625 bp, Homo sapiens
gtgcgtcgtcagggtgaaagggactactgccctacattcctgccaagccacggtcattcatgtcaaagaaggtccactccaaagtagacaccagaagtggttgtattgagccagatccacccctctgggaacctggaacagctaggtgaagaaagcctattgaacaggtcaatatgtcaccaccagaggtggaaaacctgcgctggaccaggggccctggggctaagcctgagctccatcactcagcaagccaatagctatggaagactttcctaggccccctaacgcttggatcttgggttcctcacctatacaagagaggaagggaacaaacttaacttagaaaagcaagtatctatttggacagctcttaacacttttttctccttgaactgtctaataaaacacaacaacatttttgtggcttgccagataataaatgagatcaaacagaccaagatttcatattgaggagtgctttaggtctcagtgaagtacaggttctgtagattttattgggagaaactgaggactaggccctgcttcacrggcaatgaacagtggggcacacacgagacatgttccctctgggttgggctcccctgacatcaggctatgaagcaga

SEQ ID NO: 501676 - DNA, 432 bp, Homo sapiens
agcgatcctcccgcctcagcctcgcaagtagcggagactacaagtgcatgccaccatgcccaactaattttttgtatttttgtagagacagggtttcaccatgttgcccaaactagtctggaactcctgagctcaagcgatccacccgcttccgcctccgcctcccaaaatgctgggattaggggcgtgagccaccgggcctggcccaattactttcttcagtctgagcatgagggctggaagaaaagctctcacttgcatataattttttagagacagagtctccctctgttacacgggctggagtgcaatggcgcaatctcagctcactgtaacctcaacctcccgtgcttgatcgcttatataatctcagctcactgtaatctcaacctcccgggctcgatcgcatrtatatacacacatatatttgtt

SEQ ID NO: 501677 - DNA, 386 bp, Homo sapiens
atggaaaagacacagataccccaggcatggtggctcatgcttataataccagtactttgggagggggtggtggggggattgcttgaggccaggagttccagaccagcctaagaaacaaagcaagacctcgtctctagtaaaaataaaaaaataaaaataattggccaggcatagtggcacgtgcctatagtcccaactactgaggtggaaggatcacctgagcctaggaggtcaaggctgcagtgagttgagactgtgccactacactsaagcctaggagacagagcaagacttcatctcagaaaaaaaaaaaggacaataaagaaataaagctaataagctaacataaggaaagataaaatatgtgacaaataggctgggggcat

SEQ ID NO: 501678 - DNA, 386 bp, Homo sapiens
atggaaaagacacagataccccaggcatggtggctcatgcttataataccagtactttgggagggggtggtggggggattgcttgaggccaggagttccagaccagcctaagaaacaaagcaagacctcgtctctagtaaaaataaaaaaataaaaataattggccaggcatagtggcacgtgcctatagtcccaactactgaggtggaaggatcacctgagcctaggaggtcaaggctgcagtgagttgagactgtgccactacactcaagcctaggagacagagcragacttcatctcagaaaaaaaaaaaggacaataaagaaataaagctaataagctaacataaggaaagataaaatatgtgacaaataggctgggggcat

SEQ ID NO: 501679 - DNA, 513 bp, Homo sapiens
taaaaaaaaaaaaaaaaaaaaaaasttcatataaccattttggaatgaagccacagccagaattttgggattttccaaccacaatacatagctgctttacactctagataagtcatgccatgttgattagccctggcaagtttcagcaggggagatatcaaagaaaaacagatctgaggctgtttgaagagataaatgaccaaagttggcactgacagaatgagaatagcaaaggtttaaagagattggtagacaggccagagaggagcacagtgataaggaaatggagcaggtattagagaagttgttttcaataccatatatttttacctactatgaaaagaaagtgtcaatagtaatagtgatgatgatgatgattatgatgatgatgaagcttaaggaatgcctactatgtgccaggaactgttaaaacactttatatgcattaactcttaatccttattgaaagtgcgtgaggcagaaactattcttagccccatttcacagatatgg

SEQ ID NO: 501680 - DNA, 471 bp, Homo sapiens
tagcaaccaggtcagtgtggctagagcagagtgagtgagggtaagagcagtaacttaagattggagaggtggggagagtgaggtgaccagatggtgacccttactggtcatcataaggtctttggcttttactctgattgagatgcaaaatcaatggagggttartgcactagaacatattactgagaggtttccatgttcttcacatattttttaaatgtattagcaactttaataaattatgagaaagtgcattatgtcaaactcccaattgctaaatactgctgatctcatacagatctccatttaggactgcccttgtgatcacagagcaggtcagagcctgggagagcataaagggcttacatgtaagaagcccaggtgtagtgggccacactatttccagtgtgcctgcctcagaccttgaaagaatgtgtgtggctatccctgaagcctacagctcagccttaa

SEQ ID NO: 501681 - DNA, 545 bp, Homo sapiens
tttttcctctgaggtcatgtaccaccctggagctcttctacagcaaccagcttgcagtcaatgcccataaaccttggacctgcccatctgtctgccaagacccatgcctgaaaagagttctataaacatggctacatcctcagcctcctctctcagctctcccccaggctgcgtccctgaacctcgcagcttgtctgtgcccagagaatacacactaactgtgatgttagggtaaaaccaacaaataaacccaaaacttagtgtttcaaarggaaatatattttttttttttgattttttttttgttttttttttttgtaactctgcttttaaggaaaaagggggaaagcgaaattctgcagagtcaggaaacaggtttccttgctagagatagagacagtgagataaaggcatggggcttcccccacaccctgcagctcagaagtgtgggacaggagtctaaaacttcctgttgttggctggtatttacagctttttagatgatatgtccattttccccaggcactttggggccaaaactcagt

SEQ ID NO: 501682 - DNA, 575 bp, Homo sapiens
agtagcttgcaactccaaagtcaaccactgaacaatcacttcttatgcacaaaagcaaggatcctgtgtgtgtgtgtgtgtgtgtgtgtgtgggtgtgcgcgcgcatgctcatgtgtttgttggggaaaagtgaatcaaacattacatgattatcaaggttgctaatcttaagaacatgttaagtagagaagcttcctgaggatttttccctccctccctccctctctctcttwctctctttctctttctttccctccctccctccctcccttacttactaccttaactccatccacccggtcgtgccaccctttcttcctttcatattcaaaaccctgacaaaagattccaaagaagtgtgactgctgaaaaaaaggaaaggtccttcccctacacagtatggaaggtaaacagaagggcatatctattgtgggctatcagaaggagtctttgaacttgctatacatttggctgtacatgctagagtgatgtccaaatatgaataattatgtaacaaatatgaggagcagagaggaataagaattttaaatgtgtgttccagattacctacaac

SEQ ID NO: 501683 - DNA, 575 bp, Homo sapiens
agtagcttgcaactccaaagtcaaccactgaacaatcacttcttatgcacaaaagcaaggatcctgtgtgtgtgtgtgtgtgtgtgtgtgtgggtgtgcgcgcgcatgctcatgtgtttgttggggaaaagtgaatcaaacattacatgattatcaaggttgctaatcttaagaacatgttaagtagagaagcttcctgaggatttttccctccctccctccctctctctcttactctctttctctttctttccctccctccctccctcccttacttactaccttaactccatccacccggtcgtgccaccctttcttcctttcatattcaaaaccctgacaaaagattccaaagaagtgtgactgctgaraaaaaggaaaggtccttcccctacacagtatggaaggtaaacagaagggcatatctattgtgggctatcagaaggagtctttgaacttgctatacatttggctgtacatgctagagtgatgtccaaatatgaataattatgtaacaaatatgaggagcagagaggaataagaattttaaatgtgtgttccagattacctacaac

SEQ ID NO: 501684 - DNA, 575 bp, Homo sapiens
agtagcttgcaactccaaagtcaaccactgaacaatcacttcttatgcacaaaagcaaggatcctgtgtgtgtgtgtgtgtgtgtgtgtgtgggtgtgcgcgcgcatgctcatgtgtttgttggggaaaagtgaatcaaacattacatgattatcaaggttgctaatcttaagaacatgttaagtagagaagcttcctgaggatttttccctccctccctccctctctctcttactctctttctctttctttccctccctccctccctcccttacttactaccttaactccatccacccggtcgtgccaccctttcttcctttcatattcaaaaccctgacaaaagattccaaagaagtgtgactgctgaaaraaaggaaaggtccttcccctacacagtatggaaggtaaacagaagggcatatctattgtgggctatcagaaggagtctttgaacttgctatacatttggctgtacatgctagagtgatgtccaaatatgaataattatgtaacaaatatgaggagcagagaggaataagaattttaaatgtgtgttccagattacctacaac

SEQ ID NO: 501685 - DNA, 613 bp, Homo sapiens
ggagataaaaatattgactctctgatagaaatatttgagaaggttaaatgggtaatatgcataaaacattcatcatagtgcttggcatttagtaagccaaatatctcagtaaacattagcttattattattaatattatcattattttacataggctataaatgaatttcaaatagctgtagaaaatcttttaaatctttaaaaataagttatgagatcaataacaatatatacttgtagaaaatataaatattagacatcaattttaagtatataaaagcaaattaaaaaataagttcaatcttacatttcaatcacatagttcagtcgtagggttagtattttcaatgaaaaaaagtagtttttagaaatagaaagatttccaatgaactccaaaatgtcatcctatactaaaaataatcactaccctttttgcaatgaagacattttccttaaccaaatcctgcatttttgaacatctagtccaataaatctacatacacacaattcttaarataaatttggtcatttggatttctttctacttggttagaaatatgaagggaaaacacaacagaaatatgaatagaaaatactttctaaaaatgtagga

SEQ ID NO: 501686 - DNA, 550 bp, Homo sapiens
ttgtatatccaagaaacttttattttttttttgagaaagactcttgctttttccgcccaggccagagtgcactggggcaatctyggctcactgcaagctccgcctcccgggttcacgccattctcctgcctcagcctccccagtagctgggaatacaggcgcccgccaccacgcccggctaattttttgtatttttagtagagacggggtttcaccatgttagccaggatggtctcgatctcctgatcttgtgatctgcccgcctttgcctcccaaagtgctgggattacaggcatgagccaccgtgcccggccccaggaaacatttttaaaaaaagagataacaaagaagaagtatcagcaacaaaaatacaggtacctctcatggagacatgctctgtgccaggcaatacactaaacccttcatatgctgaatagctcctagtgcttggaaacccttttgaagtagacattattatcacctccattttacaaatatgaaactgaatgtaagacggcttaaataactcaaaaaaagatcatattataag

SEQ ID NO: 501687 - DNA, 590 bp, Homo sapiens
taacttctagtcacatctttgctttacatagtgatttgaaactccaaagatcttaagtaaagacatgcattttgaacaatgaaatgccgtggactggtagggccaacaagaaggagatgtttagccagagcagcttcccgtggtcctttgcatcataatagctagtccatctttggttgatgcaaaagttgtacttaagagaaagcatgggaacagggttctcttttaaaagcatactccaaatagctacyttaaggggaaatgaatgggaaccctggcactatggtgggttaatcttgatgttctccactcatcccttacgcctgttacccatgttagtctgtttcttactaattggaaattacttttacttatgattaagaaactgttatagtcctggacttgtatgtagaggataggattacagttcaacaagtagccaagtaatatatgaccaactaagatccctggaatttggctacctagggtttaatgtgtctagcaaactatttcctctgtagtgagaaataacatgacaccaaacctttcagaatcaggccaggaactgaaatgggggggaagttgaacca

SEQ ID NO: 501688 - DNA, 590 bp, Homo sapiens
taacttctagtcacatctttgctttacatagtgatttgaaactccaaagatcttaagtaaagacatgcattttgaacaatgaaatgccgtggactggtagggccaacaagaaggagatgtttagccagagcagcttcccgtggtcctttgcatcataatagctagtccatctttggttgatgcaaaagttgtacttaagagaaagcatgggaacagggttctcttttaaaagcatactccaaatagctaccttaaggggaaatgaatgggaaccctggcactatggtgggttaatcttgatgttctccactcatcccttacgcctgttacccatgttagtctgtttcttactaattggaaattacttttacttatgattaagaaactgttatagtcctggacttgtatgtagaggataggattacagttcaacaagtagccaagtaatatatgaccaactaagatccctggaatttggctacytagggtttaatgtgtctagcaaactatttcctctgtagtgagaaataacatgacaccaaacctttcagaatcaggccaggaactgaaatgggggggaagttgaacca

SEQ ID NO: 501689 - DNA, 592 bp, Homo sapiens
tgtaaccccaaatggaacacaccatcatttcctctttatttaaacgttcaagtttggatacaccagcagtatcgttgtggccaagccaggacaattcaatgagactctactaagagctcgaatttaaccacagcaatggtcacagaacagcatacacctagatgagggtctaaccttccctggctcttaacctgctctcacatggaagtttgtgacttatttcaggacattattatctgtatatccaaagaaaaatggagacatgtacaccaaactctcagcagagggtctgggagattaaaatgtgagaaattttgctctttattttaggtgtatgaattatataatacatgtgtacccatatatgcaggttgactttttaattttactttcatcaaatgaattctataatatatataattttgcaacctgctttttttctatttacccacttatcatgacaatttttaaaaatcagaagattgaattccaccttttttactgtcrgcatagtatttcatttgggtgaatgcatcagaatttatttaactgccttctattgatgaacaatcacaacatatgatttttgtta

SEQ ID NO: 501690 - DNA, 592 bp, Homo sapiens
tgtaaccccaaatggaacacaccatcatttcctctttatttaaacgttcaagtttggatacaccagcagtatcgttgtggccaagccaggacaattcaatgagactctactaagagctcgaatttaaccacagcaatggtcacagaacagcatacacctagatgagggtctaaccttccctggctcttaacctgctctcacatggaagtttgtgacttatttcaggacattattatctgtatatccaaagaaaaatggagacatgtacaccaaactctcagcagagggtctgggagattaaaatgtgagaaattttgctctttattttaggtgtatgaattatataatacatgtgtacccatatatgcaggttgactttttaattttactttcatcaaatgaattctataatatatataattttgcaacctgctttttttctatttacccacttatcatgacaatttttaaaaatcagaagattgaattccaccttttttactgtcagcatagtatttcatttgggtgaatgcatcagaatttatttaactgccttctattgaygaacaatcacaacatatgatttttgtta

SEQ ID NO: 501691 - DNA, 652 bp, Homo sapiens
tagattttgccctgtataactttgaacatattgccaataattaagtttaaatcaaactttttgtttgctacttttatctgtaggtacatattataaacaatttatagagtacaaaggccctcaaagacatacagcttgaaaaatytccccttctaaagcagagagaaaataccttacctcttgtcagttgttaattgaaaaaaaattcaaaatttagctaagcagtgttcgattgataataatctttatctcatactttattttcttaaatctccaggttggtgaggccaacccaaagctgcagaaagtacttgatgccctccaagcaattaaaaccaaggtaaacacactaaataagtagtttaaatcagagaacaagaatttacagatctatggaaatcatttaatgaagtattaaaactggggagtaggaaggccatagtaaaagctaccaactgaaaatcaaggtgctacttcaatactgcctacctctgagaaagtctctaatgcagggaattgttttggttttctgtttttcatagttatggtttatttatttcagcagaatatggcctgtagaaaaccagattacatagccatttaaatttgcttgaaaaactatatctaacaaaattgtgattttccatttgat

SEQ ID NO: 501692 - DNA, 626 bp, Homo sapiens
tgtgatcctataggattgacctgcattgctgacactccagcctagcacacccaagccccactgatgggtggtaggacacctcaactctctattatctcatcagattacttcaactcccacttacatactaaagaatcacaaatttatgtctctagctgtctcttagaaacatccaccagtatgtctcacaagaacttcaaatttcacacatcccaaactgatcacctcatcttaactccatatgtgtgtgcctcctccaatattctctttctttataaacggatttcttgtcattcaaaccagttgtgtttttgcttcagtaatgytatggtctgaatgtatccactcaaaattcctatgttgcaatttaattgccaatgtgatagtattaagaggtggggccttcaggaggtgattaaggtgtgaaggtagatccttcaggaatgggattaatgaccttataaatgaggtacaagaaaactgttagccttttcagtcatgagaggacacagaaaaggcactctctgtgaggaacaggccctcacaagacattaaatctgctggtaccttgatcttggactttctagcctctggaactataagaaagtacacttctattattttta

SEQ ID NO: 501693 - DNA, 627 bp, Homo sapiens
ctgcatactcttaacattccrgtgttggagactggaattcttttcactccaagtactttaagttaggaaggaaagaaggaaggaaggaaggaaggaaggaaggaaggaaggaaggaaggaaggaaggaaggaaagaaagaaagaaggaaagaaggaaagaaggaaggaaggagggaaagaaggaaggagggaaagaaggaaggagggaaagaaggaaggaaggaaggaaggaaggaaagaaggaaggaaggaaagaaggaaggaaagaaggaaggaaaggaagaaagagagaaaggaagaaagagagaaagaaagagagaaagaaagaaagaaagaatgaaagaaagaaagaaaactaagaagttatttatgctttgtacaacagaatgggcacacaaggattctaacaaggatttcaattctaatatcagcacttagcccctcaatgtctttgagcatgttaagttgcaaagcccaaacggccttatctgataaggtgtcattatcccttctttgcaatgttcttgttagagttagaaataatagatgtagtgcaattgtcaccataggccctcaataaaagatggttgttgttgcagctgttgcaatatgatcgaggtctttact

SEQ ID NO: 501694 - DNA, 649 bp, Homo sapiens
caccaatatggcacatgtatacatatgtaacaaacctgcacgttgtgcacacgtaccctagaacttaaagtgtaataaatatatataaataaaaataaaaaaataaaaataaaaaagaatgtttgtggccgggtgtggtggctcaagcctataatctcagcactttgggaggccgaggtgtgcggattgcctgaggtcaggagttcgagaccagcctgacctacatgatgaaaccccgtctctattaaaaatacaaaaattagctgggcgtggtggtgygcacctgtagtcccagctactcgggaaactgaggcagaagaatcacttgaacccgggaggcagagattgcagtgagctgagatcgcgccactgcacgccagcctggggggcagagcaagactctgtctaaaaaaaaaaaaaaaaaaaagtttgcacagtgaaatcaggtagaccccacagagattggtcccatgggtgagtcatggaatgtgcaaaattcaaggaggctggagaaattctctccaccacataacttaagggaagataaactgcttcctgtgcaggagtatgggaagaggagctatagttagttaccttgccttccaatttatgggacaggggatgcatgatccagaaagggttgaaatat

SEQ ID NO: 501695 - DNA, 508 bp, Homo sapiens
ctacttcttatggatgggagaggggaagaagtgaagggcacaggagtaagcttcctgatcartcgggcattggagaggggcagtcatgtagaaggtgaatgaaggaattaaggaaggaatagcattcagtcttaaaagcaagggtcaggcttatttattttgtataagagctttattgagatataattcacatatcacaaaaaattcatcctttaaagtgcacaattcagtgctttttaaaaaagtcttcattgagctgtgtagatattgccaatatctaattttagaacatctcattgatacatacaggaggcagaaaggcaggatccctggtgagggctccaccttcaagcctggacccacgaccctaaatgagaacaggaattcttgtttttgtgtccaaatgttgcctttttcaagaccactctggcccaccccaccacctgtcccgtgcccataagaaccccaaaccccaggttccatgagcagaagagcgacagagcagcag

SEQ ID NO: 501696 - DNA, 540 bp, Homo sapiens
ctaccattggtgactggagaaaaacatgtagtaactctttatagcctgtcttattawctcacttggggcagcaacagtcatcatttgatgactcagttccctttctggaagaactctggccttggagtatgaagttctgttctcagatctggttctgttacttccaagctgtattaggttatgaagctttacaaacatcagattcctcatcaactaaagaaaagtcataatattcctacctcatacgcttcttgggaggactaaaggaggtcttgtatatgaaggtgttaagtgtattttaaagtaccaaacaaacataagatattatcattagtatcaccatattacttacacaattaaaattgacatagaattccagtgtactgaataatggaatttaaattcatagaaaattacattataaacaaggtagactaattttaacttgatattttgactacaccctttgccattaaaatgtgaatcaatttagcccagtacaaaacagagaaattattttatatgtacacaattgtgaac

SEQ ID NO: 501697 - DNA, 540 bp, Homo sapiens
ctaccattggtgactggagaaaaacatgtagtaactctttatagcctgtcttattatctcacttggggcagcaacagtcatcatttgatgactcagttccctttctggaagaactctggccttggagtatgaagttctgttctcagatctggttctgttacttccaagctgtattaggttatgaagctttacaaacatcagattcctcatcaactaaagaaaagtcataatattcctacctcatacrcttcttgggaggactaaaggaggtcttgtatatgaaggtgttaagtgtattttaaagtaccaaacaaacataagatattatcattagtatcaccatattacttacacaattaaaattgacatagaattccagtgtactgaataatggaatttaaattcatagaaaattacattataaacaaggtagactaattttaacttgatattttgactacaccctttgccattaaaatgtgaatcaatttagcccagtacaaaacagagaaattattttatatgtacacaattgtgaac

SEQ ID NO: 501698 - DNA, 540 bp, Homo sapiens
ctaccattggtgactggagaaaaacatgtagtaactctttatagcctgtcttattatctcacttggggcagcaacagtcatcatttgatgactcagttccctttctggaagaactctggccttggagtatgaagttctgttctcagatctggttctgttacttccaagctgtattaggttatgaagctttacaaacatcagattcctcatcaactaaagaaaagtcataatattcctacctcatacgcttcttgggaggactaaaggaggtcttgtatatgaaggtgttaagtgtattttaaagtaccaaacaaacataagatattatcattagtatcaccatattacttacacaattaaaattgacatagaattccagtgtactgaataatggaatttaaattcatagaaaattacattataaacaaggwagactaattttaacttgatattttgactacaccctttgccattaaaatgtgaatcaatttagcccagtacaaaacagagaaattattttatatgtacacaattgtgaac

SEQ ID NO: 501699 - DNA, 563 bp, Homo sapiens
attacagaaatgtggtagaaactttggttcatgtccataaggagttatgtgttaatacttattgaacgattggagatacattaatagtaatcaacagcgcctatctggagtttttcactgactttgtcatttataggtcacatttttcaatgaccttgtcaagtagccaagcaaaagaattattactttgcagatcaggagactgagactcagagagattaagtaacctcttaacattatttagtttaaaacaggcagaaccagaatttgcaaacaggtcttctaactagcttagttttytattacagcatataaccttttcttatgtataagagtaaaaagactgtgcacctgcttatttgttttattccaaatgccatgcatggaccataaggaatttgattatctgagtaacaaagaacaacaccagttttctcccagggagggagaaccaggcccagacccccagacctaccatgtggttgacactggtgaatggtgtgttgtcagtgatggtttcaaagggagaccgggccccattgccatcaggtggggcagccacc

SEQ ID NO: 501700 - DNA, 629 bp, Homo sapiens
ctggctacaaattcagggttctcactaccctctcaggttgaatagcacactagaatgacacagaactcaagaaagtgctgtgttcacaaatgcgatattatcataaaggaaacaaatcagggccaatcmaatgtggagactgcatatggagatatttggaagggtccagtggaagcttccactctcctgaccattgatatatcattaccaaccagcaagctcacttgattattggtagccttagtttttattggggtttcgttatataagcatgattggttgaaccattgttcatgtgattgaaccagtccacctacactccccagaggtcaggctgatattgtggctcaaagcctcaaccttttaatcatatggttgatctttctgatgtgaccagcctttattctgggtcatattgttagcataactgagctgtagtccaagagaccaaccatgaataacaaggacacacctatgacttgggaaatccaaaggatttagagtttacctcccaggaatcaggaataagaccagcccaattctctactattcaatggccccatagaaccctctccaagtactttaagggagccacagtttctctgtttgtgtctcacagaggtcagttg

SEQ ID NO: 501701 - DNA, 629 bp, Homo sapiens
ctggctacaaattcagggttctcactaccctctcaggttgaatagcacactagaatgacacagaactcaagaaagtgctgtgttcacaaatgcgatattatcataaaggaaacaaatcagggccaatcaaatgtggagactgcatatggagatatttggaagggtccagtggaagcttccactctcctgaccattgatatatcattaccaaccagcaagctcacttgattattggtagccttagtttttattggggtttygttatataagcatgattggttgaaccattgttcatgtgattgaaccagtccacctacactccccagaggtcaggctgatattgtggctcaaagcctcaaccttttaatcatatggttgatctttctgatgtgaccagcctttattctgggtcatattgttagcataactgagctgtagtccaagagaccaaccatgaataacaaggacacacctatgacttgggaaatccaaaggatttagagtttacctcccaggaatcaggaataagaccagcccaattctctactattcaatggccccatagaaccctctccaagtactttaagggagccacagtttctctgtttgtgtctcacagaggtcagttg

SEQ ID NO: 501702 - DNA, 629 bp, Homo sapiens
ctggctacaaattcagggttctcactaccctctcaggttgaatagcacactagaatgacacagaactcaagaaagtgctgtgttcacaaatgcgatattatcataaaggaaacaaatcagggccaatcaaatgtggagactgcatatggagatatttggaagggtccagtggaagcttccactctcctgaccattgatatatcattaccaaccagcaagctcacttgattattggtagccttagtttttattggggtttcgttatataagcatgattggttgaaccattgttcatgtgattgaaccagtccacctacactccccagaggtcaggctgatattgtggctcaaagcctcaaccttttaatcatatggttgatctttctgatgtgaccagcctttattctgggtcatattgttagcataactgagctgtagtccaagagaccaaccatgaataacaaggacacacctatgacttgggaaatccaaagratttagagtttacctcccaggaatcaggaataagaccagcccaattctctactattcaatggccccatagaaccctctccaagtactttaagggagccacagtttctctgtttgtgtctcacagaggtcagttg

SEQ ID NO: 501703 - DNA, 322 bp, Homo sapiens
tgggcagattgcgtgagccaaggagtttaagaccagcccaggcaacatgacaaaacccmgtctctataaaaaataccaaaaattggccaggtgtggtggtgcacgcctacagtcccagctcctcaggaggctcaagtgggaggatcacttgagtctaagagattgaggccacagtaagccttgatcatgccactgcactccagcctgcgtgacagagtgagaccttgtcttggaaaaaaaagaagaattgctaaacacctttcagaggactgaaaaagcaaaaagggaacaaaaggattcatgcaggttataaccccccaga

SEQ ID NO: 501704 - DNA, 348 bp, Homo sapiens
tgagccaaggagtttaagaccagcccaggcaacatgacaaaaccccgtctctataaaaaataccaaaaattggccaggtgtggtggtgcacgccwacagtcccagctcctcaggaggctcaagtgggaggatcacttgagtctaagagattgaggccacagtaagccttgatcatgccactgcactccagcctgcgtgacagagtgagaccttgtcttggaaaaaaaagaagaattgctaaacacctttcagaggactgaaaaagcaaaaagggaacaaaaggattcatgcaggttataaccccccagacctgagacaacaaaggaaagaggttgaggctatcagaaa

SEQ ID NO: 501705 - DNA, 499 bp, Homo sapiens
aagaaaaattagaggaagtgaaagaaaacttgaaattaatagtgggaacttacaattattgaataattataatattttaatttactaaacttaattggttccaagaaacataattttaatataataatcccaggacatcctacaataggataaatagatagggatagataatatgtgtggatttgtctatctgtctatctaccagcttaattaatttcaggatcacaatgttactaagtaaaagagaaacttaacattttaaaaattgctttaactatttgtacctccttttttattttcattagaaaactgggactttaaagaaactgtaaattgatcaggcattggggctcacacctgtaatctcaatgctttgggaggctgagataggaggattgcttgaagctataagtttgagagcagccagggcaacatagtgagacctcatcagtataaaaaataaaatwaaattaaccaagtgtggtgtcatatgcctgta

SEQ ID NO: 501706 - DNA, 650 bp, Homo sapiens
gtatccagaacaactcaatacaatatataaggggacaaacaacctaataacaaataggcagaarttttgagcaacattaattatgtgaatggcaaacatgaaaaaatgctcattagcctttggggaaatgcaaattaaaaccactatgagaaattatgacccacacattagattggctaaaactaaagaagactgaaaataccaagtgttggacagaatgtgcaataactggaattcttgtaaactgctagtgaaaaacagttgggcggtttaaagttttgcatatacttactagaacatgagtaattttactactaggtatttattcaaaagaaataaaaatgtatgtctgcacaaacacttgaacaactaaaacatccatcaccaggagaatgaataaggacattttgttattttcaacaatagactatttctcaaaaataaaaaaaaaagcaacacacactacagaataatggaacagggtaaatttaagaaaatactattttattaaattgcattaaactggttataaggtaaatcaatgctacagttattcttagtatatccaaaactttcagatattctatgtcctgtgttgatttcccaaatgacgttttgagatgctttctgaatttaacaggatgaagtca

SEQ ID NO: 501707 - DNA, 520 bp, Homo sapiens
ctgtaagactcctactgtgcaaagttctcaggaccaaaaagaaaaattacttcgggggtctctcactgactgggtccgggacccaagtctctgaggctcagggcagccctctctgttggcagcctcttggaggggacagtaggaacactgtatcatcgccactgtgaacacagaatgtcacatgagcaaagacacttgtcaaatgcctttcctttacacgcaccctcaccatgacctgtgttaatgaagttaattgaatttaagatcaataatggttaattattgcaatttgacattcagagataaatggctttaagacagagaagtatgtgtgtatgtgtgagcacgygagagagtgtgtgtgtgtgtgtgaattctctccaaagaaggtgaatgcattacaagcctaagagggatcccacaagccttccattgattctggtacattgtgatcgacttcatcctctgataaatgtgggcttttcagagctacaggtaaatgttctacgagactactcta

SEQ ID NO: 501708 - DNA, 665 bp, Homo sapiens
ttacgtatgcaaaataaattcactcaaggcttcattaatattaatttaaattcaaaacccatttacattaaattgttcattaaaaattgcctattttatgcaacatgcatttctcaaagaactcagaggaaactgaatacataggactagatttaatgatgggaatggaaaatcaaaagtaaatgaattggagtcatttcacgtatattaccaaacagccctttgctctccattaaggatgggttccactttgggaaacaaatatattttctgaatattgtgttttccattgctataaacttgtaaacatgaccttctggcctaccacagaggaaaaagaagaaacacagagaaactggtggaagggagagggcagccaatccaaaacctggctaacattaaaacagggatggtttgccttcggatctcacctggattcacagtgcattgagagttaggcttgcgtttttaaaaatgtacgtaagttagcatctgccagtgcccatcttgatctagaactaacagtgtctctctcccctacactctaccctttacaatcctttattctctyagcgaggtgaccaggaatgcgatgacaaggagttggtaagttccttgtgccctccctcccgacaacaatctgaacttaccctgtttccccaaca

SEQ ID NO: 501709 - DNA, 665 bp, Homo sapiens
ttacgtatgcaaaataaattcactcaaggcttcattaatattaatttaaattcaaaacccatttacattaaattgttcattaaaaattgcctattttatgcaacatgcatttctcaaagaactcagaggaaactgaatacataggactagatttaatgatgggaatggaaaatcaaaagtaaatgaattggagtcatttcacgtatattaccaaacagccctttgctctccattaaggatgggttccactttgggaaacaaatatattttctgaatattgtgttttccattgctataaacttgtaaacatgaccttctggcctaccacagaggaaaaagaagaaacacagagaaactggtggaagggagagggcagccaatccaaaacctggctaacattaaaacagggatggtttgccttcggatctcacctggattcacagtgcattgagagttaggcttgcgtttttaaaaatgtacgtaagttagcatctgccagtgcccatcttgatctagaactaacagtgtctctctcccctacactctaccctttacaatcctttattctcttagcgaggtgaccaggaatgcgatgacaaggagttggtaagttccttgtgccctccctcccracaacaatctgaacttaccctgtttccccaaca

SEQ ID NO: 501710 - DNA, 608 bp, Homo sapiens
gggagtcctctgttcactgagaggcagcctgaaccacggaaaggagagacctgggtctctccagctaaatacccccattccctcctgctgtgcccatggctgtggcaccagggcctcctgccagcaggaccaccatgccctctgtgtcctctgaacacctccactcagagctgactcagttcagcaaaggcggagcatgaacttgtgargagagacactaagcaggctggagtagctgaaacatcactttccactgctccctgggaaacggccagaaagattcctgccaggcccggaatccctgcatgcacttgatccccaagacctcaggaccctcttgccctccctctctgcacgacatttgctcttctctctggaaccctctacccttgggcatctcggagttggcttctgcttatgctgtttttcggatctcagcttgaaggatacttccttaaggatgactttcctgcccacacccaggccaggccactctgttgcaagattttgcacacttattcattcatgtatttagtattttggggcgtttgttgtttttgaacagcacttgcttattcttcctgactggatgtcacctatggccccag

SEQ ID NO: 501711 - DNA, 492 bp, Homo sapiens
cctggactctagttgtatcctgcagaggtgtaggagatgagccagtgaggtgccattctggagaggttccttgtcggctgttcatgaacacaattgctctttcacagctatcagtccctgagcagccacccttcaccaggtttggggccaagtgccttacacttgttaccttatgcaattctcaccctaagcctgcgataccacaatttttataatttatcatctacaggtgtgaaaaccaaggtggaacattttagggactctcagctagtaagtggaggcttcctttcctgccccttttttattccattatggacagagctgactgtatctctgcattcactgcaagtctgcgttgctccctcaatctttgatccacttctttctcctgaagggcactgaaatactggccrtttatggctcctgaaacttgggatgggaggacccagagagctcttttcaccaagagtgtgacctcagcagctttcattc

SEQ ID NO: 501712 - DNA, 606 bp, Homo sapiens
tggttttatgtaggggcagtgaagacatggtttaccacaagtcgtggctttcccaatgctgattcctgaactgtggccacactgttcctctttcagaggtgtttgacaacacactcttccatgtgcagatcttacttaccracgctaccttcattacaacatttcttcagccccagccataaattgagttgtggaaggcccaagccatgccaggattttaggacggctggggttggtatcaggtggagctgaggctaggaaaccaaaataggatgtgagctggacctgaaggtagtggagcagtcaggatcccgatgtctgaggtgtgtgatgagcagaaggccatgattgaggatctcaagaatgaccccagtttgccagacgccaggtccaaggccactgacagattccctggtagatttcaaatggactcaagagcctaaagacaaagaccttatgactccatgtagaaagcctgggactgagctgcccgtgggtgcccagccaggtgcaggggaaaaaaaagaatgctaactgaaaattaactgatagtctaaactgagcaatgagtttggagactccaattgcaaaagtaatgggaacaat

SEQ ID NO: 501713 - DNA, 483 bp, Homo sapiens
acatttattgagcacttactgtgtgcagtgttctaggcactgtccatgtgttaactcatttcactcttatgagtggctgctgtgtttgtccccattctattgctgagaaagctcaggcaacaggaagttaagtcccttggtctgacaaccaagagtggtcaagcaaagactcaatctggtctgcctgaccctagagtccacgtcttccagcttttggacagctccagcctttacaaaatccttgagtaacttgaattaaaatttcttcctagaacgtgtgcccctcggtcctggttctgcatttagggytctctctgcagaactcaaccccctccagtgagacagccgtgtccagggatgtgttcagctcccagtgcccccacccagctcctctgctccagactgcaaatgccattaatatttagcattagaaggatctggtgaagcccataaatctgcatatgttaaaaaaaaaaaaaaaaa

SEQ ID NO: 501714 - DNA, 483 bp, Homo sapiens
acatttattgagcacttactgtgtgcagtgttctaggcactgtccatgtgttaactcatttcactcttatgagtggctgctgtgtttgtccccattctattgctgagaaagctcaggcaacaggaagttaagtcccttggtctgacaaccaagagtggtcaagcaaagactcaatctggtctgcctgaccctagagtccacgtcttccagcttttggacagctccagcctttacaaaatccttgagtaacttgaattaaaatttcttcctagaacgtgtgcccctcggtcctggttctgcatttagggttctctctgcagaactcaaccccctccagtgagacagccgtgtccagggatgtgttcagctcccagtgcccccacccagctcctcygctccagactgcaaatgccattaatatttagcattagaaggatctggtgaagcccataaatctgcatatgttaaaaaaaaaaaaaaaaa

SEQ ID NO: 501715 - DNA, 341 bp, Homo sapiens
agacaggcacatttccaccccaggatatttgcactgaatattccctctgcctagaacattcttctcccagataaaytcataggtcaggaggccagtagggctggaatgcagtaggtgaggaggaatatagcaggaaagaagttggggtggaatccagaacagccagattataggtgagtggtgggaaggttataaatttgtaggcctgtttttggtcatcacaaagattgggggtgttaatggcatttagtgggtagaggcccacatgctagaacctttgtgatgtgtggacagctcctcacacaaagaattatccaacatatatcaaggcaggtaaaaaa

SEQ ID NO: 501716 - DNA, 336 bp, Homo sapiens
tcctcacaaatctcaggctgggctgcacagttctgctggtctgaggcaggattggctgatcttggttgggctcatgcgtgcatctggagaccaatggcaggctgctgggtgctgggtgctggctgctctgagatggccttaactgggacaccttggctgggttctacatggcctctcatccagcagcaggccaacccaggcttgttcacatggtgatagcaggggccygagaaagcagaagctgtcaggccccttggaaagcctcttcctctaggcttagaactggtataccagcactcctgctatgttccattggctgaagcaagtcacaaggcc

SEQ ID NO: 501717 - DNA, 256 bp, Homo sapiens
gttcatagtgccccaaggtagagaagccctgctctcaggaggcacctgctctccttcagagagggtgagctctggggttccgggtaattcgattctcaggacaacgcacatcctggctgggcggrcctctccgcgcggcagcctccagcacctggagctgtctgcccctgacgcggagccctccctcgcccgccccttgtcacagcatccgcggatccctgcggatttgtatgaagcaattgacctgtgactaagg

SEQ ID NO: 501718 - DNA, 256 bp, Homo sapiens
gttcatagtgccccaaggtagagaagccctgctctcaggaggcacctgctctccttcagagagggtgagctctggggttccgggtaattcgattctcaggacaacgcacatcctggctgggcggacctctccgcgcggcagcctccagcacctggagctgtctgccyctgacgcggagccctccctcgcccgccccttgtcacagcatccgcggatccctgcggatttgtatgaagcaattgacctgtgactaagg

SEQ ID NO: 501719 - DNA, 256 bp, Homo sapiens
gttcatagtgccccaaggtagagaagccctgctctcaggaggcacctgctctccttcagagagggtgagctctggggttccgggtaattcgattctcaggacaacgcacatcctggctgggcggacctctccgcgcggcagcctccagcacctggagctgtctgcccctgacgcggagccctccctcrcccgccccttgtcacagcatccgcggatccctgcggatttgtatgaagcaattgacctgtgactaagg

SEQ ID NO: 501720 - DNA, 634 bp, Homo sapiens
ctgtggctacctttgaaaatggaggaatggggctccaagccaagggatgcaggctgcctcttcattggagtactgccagcaagaaaacagcccagcaattgcaaggaaattaattttcccaacagtctgaatgagcaagaaaatggactctcccctgccacgccctgagttcagccttgtgagactctaagcagatacccactcaagcccacaggacgtccaacccataacaattgtaagataataaactgggatagttttaagtctccatgtttgtggtaatttgtcacagcagcaattgaaaatatagcagccattgaggtttccttctgaggccctcgacatcagggaacagagacaagctctcttcccactcctgacctgcagagggggtgaacaaatggctgttttctgccgccaatttaggtattgcgcagctctagtaactgaatcgggggcttccaacccctttcccagaaggaactgctgtgtcctctgaaatcaccaagccacagtttcttcacctgtraaacaagagtatggaccataaaagaggcaacttgtatgtgctgctataaaaaggcaccaggctggactttttaagtgaaggattgatgaccaacgtacaccatac

SEQ ID NO: 501721 - DNA, 442 bp, Homo sapiens
ggaagtcctgctctagcctttggctatcgagccataaaatccgttgcttggaaatatgaaacccttttggctacttaatgttttctccaattcctctaactcagggaaaaggatcatggaaagaaaccaaggagggcaaagcaaggagaaaggccagaaatccaaagaggaagaccagaaacaggaagaaaaaatacaacataaaattgtgggagaaaaaaaaatgctcayagggagactggatgctcccagggtgaaaatgatgaaaaatctgtgcgaaagagcatgcccaagcagttagcaaagacctttgtgaatttatgtacaaaaccacaaattacacacatgcttcccaggaacaacaaatgctgcccataaaaataaatacctgccattaaaataaataataaggaggggaaggagagagagggtcagggaaata

SEQ ID NO: 501722 - DNA, 651 bp, Homo sapiens
cacacccttattttcagaaaataagcctctgaggcactcccaacatagggacatgcagccaggacgccaagtggtatgctttggtagaaagaattaaaaacaacttagtataaaaacgttagggtatttgttggatttaaaaagtttagctaatgtacatgacagcagacctcaaagcaccagaagactcccttgtctgtaatagagcttcagatagaacacacctcttgaaataatactaatatctattttgggataatataaggtattttctccaaaacacatatctctttcacataacgggagacatataagtaaacagaaatatctctgaagacaactaagtgttgtttaagcactaaaataacaatctaatgaattagtaagataagaaaaaatctatggggagaggaatattatttagtttgggaaaataaatatggtttgcaasgcatatgaaatatcactgggacagaggacaggaaataatactgggcctgggacaggatatgagaaaaacaagatgaaatggaagatgtgagaattcagaatagacaaagaaaaaggacatggcggagcaatcctgggcgctaatgattttctaagaaaccagcaaatccgggtttgttcctgaggatgttccaagtggag

SEQ ID NO: 501723 - DNA, 651 bp, Homo sapiens
cacacccttattttcagaaaataagcctctgaggcactcccaacatagggacatgcagccaggacgccaagtggtatgctttggtagaaagaattaaaaacaacttagtataaaaacgttagggtatttgttggatttaaaaagtttagctaatgtacatgacagcagacctcaaagcaccagaagactcccttgtctgtaatagagcttcagatagaacacacctcttgaaataatactaatatctattttgggataatataaggtattttctccaaaacacatatctctttcacataacgggagacatataagtaaacagaaatatctctgaagacaactaagtgttgtttaagcactaaaataacaatctaatgaattagtaagataagaaaaaatctatggggagaggaatattatttagtttgggaaaataaatatggtttgcaaggcatatgaaatatcactgggacagaggacaggaaataatactgggcctgggacaggatatgagaaaaacaagatgaaatggaagatgtgagaattcagaatagacaaagaaaaaggacatggcggagcaatcctgggcrctaatgattttctaagaaaccagcaaatccgggtttgttcctgaggatgttccaagtggag

SEQ ID NO: 501724 - DNA, 506 bp, Homo sapiens
acttgcataggccttccttccacctttccgtgtgcaaacggatactgtgattttgagaatgaaacatgatagctcctgcatccactactaacaaaagcaagtgactgtcaatgagggtaaatcaggcctcccttgagttggtccttgaaggtgctatcaaattaacgtatgtctaacaattctgtctccattcaaatcaattcgcctaggtagctaacctgctcactgtttctctaacaaggtaaacaatggattagtaaaaactacacatatcagacctggtttcttacarcattaggctcaaaatgcaagatttacataaagagaacatctatggtgagaaataatttgcttagacaggaaattttatcactgccattcagttagttggaaaatgaagatttagagatttggggaattctctaatgttctacataagcatagggtaaaataaaaacttcgtatttctttgaattaatatccaattctcttctagaggaaatttt

SEQ ID NO: 501725 - DNA, 641 bp, Homo sapiens
cccccaccaggaatgaggcaccaacaccagtgggagagttttagattccttagaaattctgcttatataagtgagtacatcaaatgatctttgccacaaaaatgatgaatgtttcttttgaaatgcagaccatggttccaagaagtttatgctcacagaatcaggagccttgcattgaaaaggtgtaagtcttgctaatagcctaaaaktctatttttttcacccaactgcagcattaaatattggaggtaagactacagacctaaagagcagactgggaagcaacaaattatcttattggtggtgatgttccttatagtaacaatgatgaacttttatagagcacttcctgtatgccagacaggaacccattaactcatttaatctttacagttgtttaagtactcatcttatccacattgtgtggatgaagaaactgaagtataattagataaatttacccaaagccacactattgagattctacttgagggcattgtaggtctcattttggacatatgaactctggtagttataaatacagtatatgtttttctagttgtgtcttcacctagaatcttcaagaccacaagctaaaggtttgagtgtaggtaagcttaggtttagggtctgcatttgag

SEQ ID NO: 501726 - DNA, 641 bp, Homo sapiens
cccccaccaggaatgaggcaccaacaccagtgggagagttttagattccttagaaattctgcttatataagtgagtacatcaaatgatctttgccacaaaaatgatgaatgtttcttttgaaatgcagaccatggttccaagaagtttatgctcacagaatcaggagccttgcattgaaaaggtgtaagtcttgctaatagcctaaaagtctatttttttcacccaactgcagcattaaatattggaggtaagactacagacctaaagagcagactgggaagcaacaaattatcttattggtggtgatgttccttatagtaacaatgatgaacttttatagagcacttcctgtatgccagacaggaacccattaactcatttaatctttacagtygtttaagtactcatcttatccacattgtgtggatgaagaaactgaagtataattagataaatttacccaaagccacactattgagattctacttgagggcattgtaggtctcattttggacatatgaactctggtagttataaatacagtatatgtttttctagttgtgtcttcacctagaatcttcaagaccacaagctaaaggtttgagtgtaggtaagcttaggtttagggtctgcatttgag

SEQ ID NO: 501727 - DNA, 553 bp, Homo sapiens
cagcaagttatccagaatatctagctaagatcactgatgaaggtggctatttaagactagattttcagtgcagacaaaatgtagcttagggtccctgggtttttgggtatccactgtgaaaaagcactcacttgtaagtgttataccttgagcttttgttatttcaaaaaaacttccaggaagaagcttagccccagaaaaaccagttggatctagagatgcgtcagttgcagatgaactttggcaaactcccttcaatgcatactaaaatccctgcccagagagaagcttagcccccattttctatacacgcagcatatatagaagcatcatcagggactgctcgggtgctgcctttactccacctcaacatacaatgactcagttaaccagcccaataaaagcttgttttcaccattgttcaggaaggttttgctttgggaactatcctcagcattcttcttatyacaagtaataaaatctccttgttgaatcctcgattatggtaaatggactgtcatccaccaagcaatcaaacccacccattgtgtgg

SEQ ID NO: 501728 - DNA, 582 bp, Homo sapiens
gcaaggctgttttggcctgcagaaaggaatacatttttctaattcacacaaaatgccatgaatgttaataaaggctctgaagacaaccatgtaataccatatttcattgactataaaataaggtgcaccatcactttacaaaccaactgagaaaagctcactaaattaggctgtaatatagtgatttcttatcacacaaaaattatattactcttcttgaaaggggtctcttgataagtgtaacagtcatgtttgctatatatcacacttgagcacaaagaaaggattacatgaacaaaaaaagaattactaaaacttcttcacacttggagtttaattcttctgaatcatttttcagctcagagataattgtttttccacaaaatgtagtcctttgtgccatcaagarcattgttgaggtagtgtatcttgaaatttctctccacaactgcccctggaattttcttccaaactgctgacattctttttgcaagatttttaaagaatgcataactacaactaactcacaataactacttgtcccaaagtaattgatatcagaaaggttaaaatatgtaaaaa

SEQ ID NO: 501729 - DNA, 260 bp, Homo sapiens
aacattaaaatgtctttctcccatcaggataaagttgttctcatctttgaccaacacagaattatgcagtagaactcaaccatttgggtaacagttatcacctagcctaataaagattataactaggatcaagttacagtgttattctaaatcaacaatctgaatataaattttaactgstcagtgtgcactagaattcccatattttataaacacgacttttacactaaactttctaaagtctctcaaaaattttaata

SEQ ID NO: 501730 - DNA, 575 bp, Homo sapiens
tgctttttcccctcagctttctatatgctggatttcaggatatcacttttagccttgtggttctaacatggaatacaaggctttatgattacatcatttgtttattggcacttttcaacccataatttgatttaaagggaaattgagaagtttttaattaaatacctacttgcatttttcaaccattgctgctgaaacagatttttgtaaaatagtcattagcaagcagcccataaatagttgtaggtatatgagagatgacaaaaccactgtggccagaccaattaactatgctctgtgtgttaagcttctatttctagcacataatttacgtatatctagcctattatttccttcattttccccaaacctaccacacgatgatctgggagtgtcatataagtggaccacatagaaagaaaacaaaacaaaacaaaaaataaaccatgtcaaatacttcttccatcaccaggcaagattggaagaaactactcatccctagctactactgattcagtgcatattgatttaycgtcactcagtctgctacatgcagtccttgaaaagtagcagga

SEQ ID NO: 501731 - DNA, 575 bp, Homo sapiens
tgctttttcccctcagctttctatatgctggatttcaggatatcacttttagccttgtggttctaacatggaatacaaggctttatgattacatcatttgtttattggcacttttcaacccataatttgatttaaagggaaattgagaagtttttaattaaatacctacttgcatttttcaaccattgctgctgaaacagatttttgtaaaatagtcattagcaagcagcccataaatagttgtaggtatatgagagatgacaaaaccactgtggccagaccaattaactatgctctgtgtgttaagcttctatttctagcacataatttacgtatatctagcctattatttccttcattttccccaaacctaccacacgatgatctgggagtgtcatataagtggaccacatagaaagaaaacaaaacaaaacaaaaaataaaccatgtcaaatacttcttccatcaccaggcaagattggaagaaactactcatccctagctactactgattcagtgcatattgatttacygtcactcagtctgctacatgcagtccttgaaaagtagcagga

SEQ ID NO: 501732 - DNA, 612 bp, Homo sapiens
ccgctccagaaaaaaactcagctcacaactatccttagataaggacaccttagtgaatgattctataacttgaggttgaatatatgacaccttttttgactagaactgagaatagccacacacataggataaaagaataattttaatttgatgttttaaattttttcctccccaagccagcatggtgttgcacacaaaatttttcccagactcacagtttcttcagaatggagagagttgaaaatgtacactcaggcttttcttttccattttgcaattcttcacatgatgttctctctagtcttacccagtgggaaatattgagggtatcagacaaccggggtcagttagaaacaaactacatggatggggctcacattgaccataaaagtaatcttacacttgcattccagccagcagaggtgcaccatcagggaaactaggcaacagcatcactctgcagcaaccaaccatggttgatgcatctgccatgctcaaatcattagccaactkccatatcccaacctggctttctctgcaaaacttcccaagctgtgacaaagaggcaactaggtgattatccacagaaggggcatgtgaccccacccaatc

SEQ ID NO: 501733 - DNA, 504 bp, Homo sapiens
ggtgcccgagcctgattcatgaatgcatataagctggtttcagggcaccattcctgattgtgagctctggctagcrtcacaattaatgtcaccattgtctagcaaaaagttcctgcatcttggcaatgcaggaggcctctgtggaagtgcatccacaggggactcttgcctgtcttttctgtggatccatgggatagttccataatcctgggagagggcaagtgggagccagcctgaagaaatgtcaagcacagccccaggaataaaccacaaaatccctgagcgtccaaaaatatcagaaggattattcaggcctgcctacacattgtaggggtgagtgtttttgaaactttccccgctgtgatttctaggtgcagcccacctgtgttccctggggttgctctctcttaggtggggcttcctacagaatgacacagcctctagagctgcctcactgtgtgtttctgtgggagtgttgcaaatgttggatgtctgcgtgtgtgt

SEQ ID NO: 501734 - DNA, 504 bp, Homo sapiens
ggtgcccgagcctgattcatgaatgcatataagctggtttcagggcaccattcctgattgtgagctctggctagcgtcacaattaatgtcaccattgtctagcaaaaagttcctgcatcttggcaatgcaggaggcctctgtggaagtgcatccacaggggactcttgcctgtcttttctgtggatccatgggatagttccataatcctgggagagggcaagtgggagccagcctgaagaaatgtcaagcacagccccaggaataaaccacaaaatccctragcgtccaaaaatatcagaaggattattcaggcctgcctacacattgtaggggtgagtgtttttgaaactttccccgctgtgatttctaggtgcagcccacctgtgttccctggggttgctctctcttaggtggggcttcctacagaatgacacagcctctagagctgcctcactgtgtgtttctgtgggagtgttgcaaatgttggatgtctgcgtgtgtgt

SEQ ID NO: 501735 - DNA, 614 bp, Homo sapiens
tcttttggttgttctagtatgttccttcagtggttcttggagcaaaagttcacaatgtgagtctccacatgctgttctgtctgtccaaatgggagctgcatgttagtcctgtctcctatccatcattttcctcctgtcttgaagattttaaattaacaatagcctcctacagattctaagaattcttttttctttttcttttttttttctgagacagagtctcactctgttgcccaggctggagtgcagtggtgcgatctcrgctcactgcaacctccagggttcacaccattctcctgcctcagccttctaagtagctgggactacaggcacacaccaccatgccaagctaattttcgtatttttagtaaagacagggtttcaccatgttggccaggatggtctcgatctcttaacctcgtgatctgtttgcctcggactccaaaagtgctgggattacaggcatcagccaccgcatccagtggattctaataattcttactaaaatatttgaatttgttgaaattgaaggtactcgatatctggccacaaaatcatattatttatgttacccatagaagcaccattagatttctaatttaattttgtttggc

SEQ ID NO: 501736 - DNA, 629 bp, Homo sapiens
cctcttccttaagttttggagaattaggtgctaccatagaattatttttaaaatgcagcagagaatagagcaaggctgccatatataggcattttctcccgcttattccaaaatcattatctttaattattattttgaataatgataatggtgcatactattattgtactctcaagttgtcatgaaaattcacatttggaacttaagactactggagagtcatagactaaacccgtggaggtgtctaggggccttctcagtgtagctacctcactagaacatttcaggacttgtcttagcaaatgaactcattgtgccttgttacagacttagaagagataagtttcattaaacaaagactagygtgtttctgattactactgctccagaacaggcctcctctaacttatttgattatgctcatggattttgtgaatcagaaacgcagatagggcctagtaaagatggcttcccctgctacgtgatggccagggcctcacctgggaagatggtgtctaggggtaaatagataactagaggatgaattcatttgcagagatctttactcatacatctgcgggtagctgctggccattagccggagcatataagcatggcttgtccccatg

SEQ ID NO: 501737 - DNA, 627 bp, Homo sapiens
aagtcaaccttcccagaagctaatctgtcattctcaagtggccttgcttctgaaattgrtttgatgctctagcagtaaagagccccagtggtagtgcaagctgtacagtttaacaaccacttggggtggggcttgtccgattgccatggaaactatgactttgtatgtctgctctggagacaagaaagacaaatgacttgtgtattaatctattgaggatgtgaggatcccagataaaatgagtcctacagaacacggagaaggttctataaattaatggtgtgggtttttgggttttggttttaggttttaatatgtcgatgtcaatgaagggtcaaaagaattatgtctccacctgatagctttcctggagaagtatttgctttatatttttataaaaactctttgattttagccataaatgtaaaagataaacataacattctgcaagaccttcaccactccaggtgatatgtggctgttgaaggaaggtactgcacatttacataacaaaatgaggctattaggggacaagtcacttgtttatttaagagaacgaagggcaggacaattatattaacatgattctcataggaatgcacattgtcaatgttaacaaatggtttt

SEQ ID NO: 501738 - DNA, 627 bp, Homo sapiens
aagtcaaccttcccagaagctaatctgtcattctcaagtggccttgcttctgaaattggtttgatgctctagcagtaaagagccccagtggtagtgcaagctgtacagtttaacaaccacttggggtggggcttgtccgrttgccatggaaactatgactttgtatgtctgctctggagacaagaaagacaaatgacttgtgtattaatctattgaggatgtgaggatcccagataaaatgagtcctacagaacacggagaaggttctataaattaatggtgtgggtttttgggttttggttttaggttttaatatgtcgatgtcaatgaagggtcaaaagaattatgtctccacctgatagctttcctggagaagtatttgctttatatttttataaaaactctttgattttagccataaatgtaaaagataaacataacattctgcaagaccttcaccactccaggtgatatgtggctgttgaaggaaggtactgcacatttacataacaaaatgaggctattaggggacaagtcacttgtttatttaagagaacgaagggcaggacaattatattaacatgattctcataggaatgcacattgtcaatgttaacaaatggtttt

SEQ ID NO: 501739 - DNA, 615 bp, Homo sapiens
atagatgtgttgattaatcaagatagtctacaaaaagtatctaacacagtgcttagcacattatagatgctcaacaaatgtgaacttctttcttttcagttaaaatacaggttcaaaagtcatacctggccactttgaattaatagacaaaggatgktgatgcctgcaggtctagctactatacagtaattgctttaattatatccaaaaattgttaattattgttttagctattaaataccaacatcaggaaatgtatatggaaagatggaatgtaacctcaaataaaatttttctactttatattttatagtaacctttcctcattgaaatgttctcattagtattatatatccgaagtttctattttgatattcatgagattagagctatgcaaattcagaattacatgtcttgtgattgtaagttcattagactaagaacaagtaccaactaataggcaatactacacaaagcagtacagaggctaataatctataaaatccagttattgttttatgtagtagcatgcattacaaaaaattagatatttgattagtcaatataataattatttgtaattactttaagtcctatgagctatatattgataat

SEQ ID NO: 501740 - DNA, 399 bp, Homo sapiens
ggcactcagatgtgtggatgcatctgactcagccagcagagggatattttcatccttggaaccttgccttgtccaagccaggatcttctgcccccgcatcacccttgtcttccctagcaagtgtgcagatctctgccttgataacgcgtgttcttttgtacgtttgctgagatccatgtacaactattctcagggtttttaagcagctataaaatgaggtttttacaattcagtttgaatcttctcatacaataatcatgttcatgattcagcacaggtttttacatgttgcattcytactcaagggcagggttttttttcccctccttttgtccactgaaagaatgccaacaggaataaattgagtgggatgagccttcatggttaccttttttcttc

SEQ ID NO: 501741 - DNA, 399 bp, Homo sapiens
ggcactcagatgtgtggatgcatctgactcagccagcagagggatattttcatccttggaaccttgccttgtccaagccaggatcttctgcccccgcatcacccttgtcttccctagcaagtgtgcagatctctgccttgataacgcgtgttcttttgtacgtttgctgagatccatgtacaactattctcagggtttttaagcagctataaaatgaggtttttacaattcagtttgaatcttctcatacaataatcatgttcatgattcagcacaggtttttacatgttgcattcctactcaagggcaggkttttttttcccctccttttgtccactgaaagaatgccaacaggaataaattgagtgggatgagccttcatggttaccttttttcttc

SEQ ID NO: 501742 - DNA, 470 bp, Homo sapiens
ataattttaaaatcatgtattaagcaacaatacaataaagtctcaattagctagaaaccaagcaaacccacagttagccaatatgtttccaaattacacttttagaaacaagaggtagatacctatraaagtgctgttatcggggtgaggtggggggtctgtcagaaaaatagtgagaaaccaaaagaactcaatttcgtcctttttttctacaaagtactcaacagtgagtcatgaaaatctcaaaagtttttttttttaagttaaatatccattattccttcttttcaagatggatgagacctttattactttctagaaggattttcaaacacaaggattgaaacaaaaaaggctttcagtaaacctttggctaatcagcttaccactcggttcttctaagactgtgattttcagaaactttaatcaggttcagtttacttgtatcgatttgcacgccttagccacaa

SEQ ID NO: 501743 - DNA, 638 bp, Homo sapiens
ttgaaaggcactgtgctgtgaacctgcggcttatttacagacgtgtccaaatccgttctctggtcctgcgtgcagtggccacgcccttcatagtctgaacgtgggtgactgtgtatacctgatatgccccagatatcctcctctgaggcgggcaggaaagccacgagacacaggtatagaaggaagaactgcagggagaagcagccagtgccctcccacagacacctgcttagggctccaggacagatgagcagcctcagagacggtgttccctcccgtggagaagatggytgcaattcatatgaactctccaagcccacgtgtccttgggtatggaacaaggacgctgaactccttgatctccaagggcccctccagggtgaacgcccactctagaaacttcctcgttgtcatcctgcccaacagggtcctgtccctgggtacagactttcaggttggaactttccaggctctaggatcttgtccagaggatgactattactacctcagaaaaaagatacataaaactctgacaaatgatgtagactcagacacaagcggcatccaaaggcagtggtgccgggccaattagacacctgcgagcaaataaaattgaatccataccccacgtgatggct

SEQ ID NO: 501744 - DNA, 613 bp, Homo sapiens
ctagtcacagagaatggagaatgtctgtcttccaaacagttaggttacttcactgagacctatttcctctgggctacatatgtataaaacagcaaataggtgagaggtgtccaaagggtgttcctgctctgaattccaaggtggtttaggcactattaactcrgggatctggttttgctccatagctgttgtctcctggaggtgtcccagccagggcatcagaaactccctccctcagatattggtgaaccttgaaggctggaaaagtgatttatagttaaatgccatttcagtgatccttcttcattgctctgatattttattaataattaacatttgctgagcacttaaccattgtttagatattttgctaagcatgttccaagtattaacttatttggtccttgaaatactctcatgagataggttctcttattagccctattttacagatgaggaaactgaggcataaggtttaaacaagatcacacagttagtggtgtactggaattaaatgacttgtatttattgtgcatataaaaatatgtgcatacatgaatgtatgtacagtatatagaaaatatgtataaatttctctcttctacctatatgc

SEQ ID NO: 501745 - DNA, 613 bp, Homo sapiens
ctagtcacagagaatggagaatgtctgtcttccaaacagttaggttacttcactgagacctatttcctctgggctacatatgtataaaacagcaaataggtgagaggtgtccaaagggtgttcctgctctgaattccaaggtggtttaggcactattaactcggggatctggttttgctccatagctgttgtctcctggaggtgtcccagccagggcatcagaaactccctccctcagatattggtgaaccttgaaggctgsaaaagtgatttatagttaaatgccatttcagtgatccttcttcattgctctgatattttattaataattaacatttgctgagcacttaaccattgtttagatattttgctaagcatgttccaagtattaacttatttggtccttgaaatactctcatgagataggttctcttattagccctattttacagatgaggaaactgaggcataaggtttaaacaagatcacacagttagtggtgtactggaattaaatgacttgtatttattgtgcatataaaaatatgtgcatacatgaatgtatgtacagtatatagaaaatatgtataaatttctctcttctacctatatgc

SEQ ID NO: 501746 - DNA, 609 bp, Homo sapiens
gccacacacgagaggttttggaggttcctcacattcattggtatgttctctgccataaatgcttaattattttacacatacagagtttttttttttttttgcctcccccccattagcattggctcaagcttcaagtaccatacaatgctaaatagaagtgcygaaaataaaccaccatattttatttctgatttcaagggaaatttttaatcattcaataggccacttgctttaactttttaataggtaactttgtcacattaagttcctttctgttcctacgtggaagccgggtgaggcctgtgactgctggctttcccctacttccctggcaacctgtataactcagcagaggcagtcatagtcctcctggaaacaaaactccattggtctgagaaccacaccccaatcccccacagcagctacagcaagccccacccaaggagagtctgagctcagcctatccctgaccccacctgatggtctttctctacctgccctggttgctgaagaccaaggacataatctcttgagagctctatggccttgcctactgcctgagaaacctgaatatttaaacaggcgagtttgcttcctccctatacaaaa

SEQ ID NO: 501747 - DNA, 609 bp, Homo sapiens
gccacacacgagaggttttggaggttcctcacattcattggtatgttctctgccataaatgcttaattattttacacatacagagtttttttttttttttgcctcccccccattagcattggctcaagcttcaagtaccatacaatgctaaatagaagtgctgaaaataaaccaccatattttatttctgatttcaagggaaatttttaatcattcaataggccacttgctttaactttttaataggtaactttgtcacattaagttcctttctgttcctacgtggaagccgggtgaggcctgtgactgctggctttcccctacttccctggcaacctgtataactcagcagaggcagtcatagtcctcctggaaacaaaactccattggtctgagaaccacaccccaatcccccacagcagctacagcaagccccacccaaggagagtctgagctcagcctatccctgaccccacytgatggtctttctctacctgccctggttgctgaagaccaaggacataatctcttgagagctctatggccttgcctactgcctgagaaacctgaatatttaaacaggcgagtttgcttcctccctatacaaaa

SEQ ID NO: 501748 - DNA, 614 bp, Homo sapiens
agtgttagaagtggaacattagagagaatgagttggaaagataagaactttyggccggagaatgagatatttaaaactgagattacagaagtgtttcagttaatggtaatgacattcgttaagtggctactggtgatggaagacaacatcattgcatgagagtagatcagggaaacatgagtaagagtaacaaagtaatgaacatctttctgcatgttgtcatcatccatattatggcaggagttattaggcattgaggaggccatagaagaactgatgatggcatcaaacagggattagcacatagctaatttgataacatgagattttttaaaagagaaaggagaataacctagaaacagcagtgaggagcaagagcccttgctccacctccacaaagtgtagatcagggtgcattagaaaaaaaagaaagtgtcattccttgagagagctgcaagaaaactaatatcatcagaaatttgctttatttcatatagcaggaatgtaaagagaaatttcacagaagatttgaggattcttttttgtttttctctctttttattttttttaaatttttagaattgcctgctcatgacattaccaactatcctatt

SEQ ID NO: 501749 - DNA, 592 bp, Homo sapiens
aaataaagaggagtaagacatagtaaaatacttctgcaaaatatttggcaayatttgtcaaaatcataaatgcaaatcactcataaatatcatttctaatgatgtgttttacaaatataatcacaaaataactatataacaaaattattggcatttgttgttgtttaacaaaacactggtatgatgtatgaaaaatgactacagattctataacactcctgctattgagaatcaagaacttttctacttctgcttgaatctgacctggtctgtgactgctctggttacaggttatcaaagaaatgatgctttgcctgtctgaggcattgcctctaacaaggttggaagcatccacctaggtattatgacctctgagttgtttgtaggaaggtcaactaccatgctgtacgtactatatggaaaagcctctatctcatttggaaaaggccaattaagcgcaggcctctggctatgtccatcagggccccagacctgtgagatcgtccgttctctataatccagcctggcccgaacatcatctaaatattaatgagttactccagttgatacaatatgaatcagaaaaatcaac

SEQ ID NO: 501750 - DNA, 564 bp, Homo sapiens
tacttctgcaaaatatttggcaatatttgtcaaaatcataaatgcaaatcactcataaatatcatttctaatgatgtgttttacaaatataatcacaaaataactatataacaaaattattggcatttgttgttgtttaacaaaacactggtatgatgtatgaaaaatgactacagattctataacactcctgctattgagaatcaagaacttytctacttctgcttgaatctgacctggtctgtgactgctctggttacaggttatcaaagaaatgatgctttgcctgtctgaggcattgcctctaacaaggttggaagcatccacctaggtattatgacctctgagttgtttgtaggaaggtcaactaccatgctgtacgtactatatggaaaagcctctatctcatttggaaaaggccaattaagcgcaggcctctggctatgtccatcagggccccagacctgtgagatcgtccgttctctataatccagcctggcccgaacatcatctaaatattaatgagttactccagttgatacaatatgaatcagaaaaatcaac

SEQ ID NO: 501751 - DNA, 469 bp, Homo sapiens
catcttggcatttgctggacattgtaggtcaaaagaatgacatatgcaaaggcagggaggcacaaagagttgagaaggagcccttaaccctgacacgtgagctgctggaggtcccttggctcaacacattgctgggaggccaactccagggtcctgcatatgctggctcctttctggtgtggtaagaatgttttttctctggatagactctcttttagcttaratgcacaaaatgttgtatctcttatatctgccagtcccagatgtgcgtgccacccaatacacctgggaacaagatgtcagacttgtggttgtgttttaagagcgtgtgctataccatttacttggaagtcccaaaaggttgatctttatcttttgggcaaagatgaaactggtcagtctcaatgcacctcctggttaatctccaagttagtttaacgtgtgatgattatgtgtgtggagtaagagt

SEQ ID NO: 501752 - DNA, 604 bp, Homo sapiens
gcaaaaaaaagttaagttgagagaagcaattaaatagagtctttttgcattaaaatgttgggcttgtgttgtatatatacttagtttctaagactctgcaaatcagcttataagctctatgtcaaggtgaaaagaacagagtttgccaaactccagagtatctttctcacttgacctgcagaaattaatcaatgtgaggaatgaccacatgatgtgttatatagttactgcctggtgccagttggcaagaaggttcatcaagctagagagytgagaaaatgagacaggtagggatgaaaatgtatacacaatgcctgcttgaccaagggcacacaccttagactatgttctttccccagaaagtctgtggcagaagtggctagaaaacactttcatctacaatggtgtttcttatcagatctggttgacaccgtcttcctttatgatgacggagtgcaaaggagctggaatttaagtttggagctctgggctaaagttgtaggtagcccagcaagctacctaaccctctccaagactcaacttccttgtgtataaaatgagaagagaacatctgccatttaagagagctgtggagagcaattga

SEQ ID NO: 501753 - DNA, 593 bp, Homo sapiens
ctgccatcaatgcccaagccctgcctcctttgacatgagggcctgggaggctgcttaagcacctgcctgaatttgatgggatgaaggatccccaaaaccatatccactttattcaaaaattttttatttcatgagggtttcctttgtcttattccaagttcctgaatccatttgctgttgaacttctgtattcctactgtggggaggccactcatgtatgcagagtagttgcaaaaacaatgcgaactttaaggtccaacaggtttttcaagttcaaattcccatttgtgcatttctataccttgtaacttggaataattcacgtaagtctttgtatcttattttctttatctgactcataatgtggttcaraagctaacgttcaatgtaaaaaatttagcccaatgcctgccatttgttaggtgctgaacaagtgggatactacttttctgaatcactgtaggcaatgtgtgttgaattggataagagctccttctctaccagttttgcccccatatttttgcttatgatgaataaggttaatttcagttccaaaacgtgctaacttctcttcctgagaatttacaagacag

SEQ ID NO: 501754 - DNA, 580 bp, Homo sapiens
tgactgtgaaggctctgaggtatcttaaggggaagccccttcgccaagatcacggaacaccctggggayctggcctggattaaggcatccattattgagttcccactctgtgcaaggcacaatgtcaagtgctgtggggaattacacagaagaggaaaaaaatctatcaaccagtaagcaatattcaccactgactacaaacagggcaatgtactaacttctgacaatacaaacagctctatgaaatcatctctacctttgagaaaagtatagtccaaatgagaactcaggaatgagacacgtttcaagggtgatgtaagaatgggacacttgctttcagaaacaaaacaaaccaaaacatatggtataagctataaatactgtaggaataccaaaaagaaaggaggaaaatgagatccaagtcaaggaagagttctggacaaggtggagtgtgagtttaggcattgaagatgagtaagatttgcaagcatgggagagtagggcaaagggcagaggtgggaacagtcaggtgccagatggtgaggccagaacagagaccctgctttttggtatttgagtc

SEQ ID NO: 501755 - DNA, 564 bp, Homo sapiens
aaaatgaatcaacctgacatctgtattctattagtgtcattaccaaagttatcagtcatatatgaggtaattcttattacagaaatatgtattttggaagaacaaaatatttctaggaataaatctaacaaaatatgtggaaaactttatggagaaaaaaatgaaaatacatgggaatcattaaaagacacagaaacattttgctgaatagaaagaccagctattgtaaaatgtcagtgatctccaaattggttttattcattgcaattctaattttagaaatcttatgaatattttaactgttgtttgttgttggttctgtggcgcttagtaaattaaatcaaaattcacaataaagggctaaaattagccaagactttactggaaaccactgctagattttcccaatcagatattaagatatgttttaaggctttatagttaagacagatcagcacaggaaagtgaataattttacamattgaagagatgtgttctattcaaagcatttgttgctaaaccattgttatgacagcaaacgacatatttatggacagcacgggg

SEQ ID NO: 501756 - DNA, 512 bp, Homo sapiens
ttttgcctggctgtcttggagcactcacttatgttagaagtctgtaagaagtgakatataagaagggtaaatactctgaagccagtatgctttgaggaagcccaggctacagtgagagaccattcataagtgctttcttcagtgacctcagctgaatttccagcggacatctagcatgaatcaccagatacacaagtaaagacacatccatattatacctgctcctggctataacatcatccccaggcattgggtctccaagcaaagtcccagaaatcaggaaatgagacaggggcaaaatattagttaaaataagatttgtttcatgctactgaattttagggcagattgttatgcagcattaatagctagaaaatattccggttcacagcaggatcatacaaagcatatgaacaacatgactattctgttgatagccagcctccttccacaatctcccacacccttgcttaatggactcaagaacagtgtgactatgatgcaggtatgga

SEQ ID NO: 501757 - DNA, 512 bp, Homo sapiens
ttttgcctggctgtcttggagcactcacttatgttagaagtctgtaagaagtgagatataagaagggtaaatactctgaagccagtatgctttgaggaagcccaggctacagtgagagaccattcataagtgctttcttcagtgacctcwgctgaatttccagcggacatctagcatgaatcaccagatacacaagtaaagacacatccatattatacctgctcctggctataacatcatccccaggcattgggtctccaagcaaagtcccagaaatcaggaaatgagacaggggcaaaatattagttaaaataagatttgtttcatgctactgaattttagggcagattgttatgcagcattaatagctagaaaatattccggttcacagcaggatcatacaaagcatatgaacaacatgactattctgttgatagccagcctccttccacaatctcccacacccttgcttaatggactcaagaacagtgtgactatgatgcaggtatgga

SEQ ID NO: 501758 - DNA, 334 bp, Homo sapiens
ctcatatagatcaagagtttattaaatatattcttggtgaggattaaaataatagaggattttaaaattatttgttttcaattgttgcctccataagattgctggttctatcttgaaaccacatgtttctaaatttcactatagtgaataattttgargggggtccaggattttttctaattcacaatactgaaataatatgctactttctatgtaataagaaactccactaactcagaaagagttttttctccgcactgctagaatagctcaaaatcctgctgaaagatttactttagatatacttgcatatatgaatataaattgaaaatga

SEQ ID NO: 501759 - DNA, 459 bp, Homo sapiens
aagtctgacaataccaaatgttggcaggaacatggaacaatggaaattctcctgccctgcttatataaagaagcataaattggtttggaagatagtgtggtattgtgttgtatcagtgtgacccgcaattcctctccttgaaaaactctacagaaatgcatgcttgtacacaccagggtgcatgtcctaggattctatgtagcattaaacatcaatagcctcaaagcgaaaactacagaaatgtccattaatggtaggactggtataagaaattgtggtattttcataaaataggatgctgcacacaattaagataaactacagcaatatgcaacaacagggacacatcttagaaacacaattattatataataatgtagcattacctgyttaaaattcgaacacatgtaaaataaaattttggttagggatagttccttaggaggtaaattataaagg

SEQ ID NO: 501760 - DNA, 629 bp, Homo sapiens
tgcctaccttaaatcacatctstcaccaatgtggttcagggaatgatatatgctgatcggccagacttggatcatatgtctatcattggaggtaggggtttggtgtcaatcccaccagagaggatagggtaatactctataggaaaaactacagtagctactaaaaagggggaacagatactgcataagcatatgcagatttcactgaataggcagcagatttcactgaatggacaactgtcatggaactcagaatacattttctcacagaaacaaggcagatagaaaattgtggccagtttcccaaacaagtctcatgagcctgtttaggaccaatgggaaggaaactctggcaatgacaataatagtcttaattctaggaagaagcccaattttcctaatttcctttcctcatggaagtttcctacagacacagcaagtgacaaaatttcaaaagtttgtctctcagcatcctcccacatctgtacctccctctcacacaccagtgagcctctgcagtgacactatgggtcccctactcttacctcttataccccctccactcccatttattccattctcagaaatagtttcctcctgctgccatgttctcatcctctcaatataaa

SEQ ID NO: 501761 - DNA, 548 bp, Homo sapiens
atacacccaacattccatcctcactcttcaatgcctagttgaccttgtaaaatgtttgttcttggtctttttttcttaaaaaccaataaaattggatacctttttgtaagtatctccataagtttcaaaaatgtgattatcttaataatyttttaaatttacctaaatacataaagaattaaacacatttttatcccctctcctgtctccaaagccctactaaaatggtaatgaaggaatttttaaataatggaataaagaatcagaaagaaaataggagagaatagcaaatcaagaataacacaattttagaagaagacatatagatggagagttaactagacttaccaaaaataaaaagctgaaatctagagcctgcatacagttagcaaaaaaaggtttaaaatatagatattctatccatgaaataaaaatatgatgccatacaaaaaatgattaacagattgaagtaagaaggggaaaaataacttataaattatcctatgtgtttgtgtagaaaatagcattcactagcattttaaagatta

SEQ ID NO: 501762 - DNA, 588 bp, Homo sapiens
atatttttggatgatcataaaacatgtttatataggttactaatcttttattctggttgtatttaagaataaaaaacctcaaaatccataaataccaagaaagaggagcctgagaatgtaagaaccctatggaagaaaagctttatattttttatttttttgagagagagctatgaagatgaaaatattacatataataaaggacaatgtacatagtacatgtttattacatagagcaaatggaaaccaatgtaaacccatcagtatgttaaacatagttgtgtggacagggmaaatgggtgcataaagagataaaacatagaaaagagaataaatggaaaaaacatagaagtaaaaataagaaagggtaaatgaaaaaggcaaaagaggaagaactgaggagtgagaataaaaaatggaggattattttttatttttatccttctctaaagctaactagaattatggaggatatatccagagagaaatagaagatacaaaaaggaagggaaagagaaaggaagaaggaggactgctttgaagattctaaattgaatgcactgtcacactgtaagcttctagagctgt

SEQ ID NO: 501763 - DNA, 588 bp, Homo sapiens
atatttttggatgatcataaaacatgtttatataggttactaatcttttattctggttgtatttaagaataaaaaacctcaaaatccataaataccaagaaagaggagcctgagaatgtaagaaccctatggaagaaaagctttatattttttatttttttgagagagagctatgaagatgaaaatattacatataataaaggacaatgtacatagtacatgtttattacatagagcaaatggaaaccaatgtaaacccatcagtatgttaaacatagttgtgtggacagggcaaatgggtgcataaagagataaaacatagaaaagagaataaatggaaaaaacatagaagtaaaaataagaaagggtaaatgaaaaagrcaaaagaggaagaactgaggagtgagaataaaaaatggaggattattttttatttttatccttctctaaagctaactagaattatggaggatatatccagagagaaatagaagatacaaaaaggaagggaaagagaaaggaagaaggaggactgctttgaagattctaaattgaatgcactgtcacactgtaagcttctagagctgt

SEQ ID NO: 501764 - DNA, 518 bp, Homo sapiens
ttcctttacattttaaagaactaattttaacccacatttctttatcaatagcaaaatttaaacattatccactaccttcccacagactgacaagttgtttaaaacctgtaattcccaacattgtcttttctgttctgttttctctccagcccagttttatggagaaaggtggtgggtgggtactataattcagtactttgggtttcagcagtgttctctctcttattcgtcatctttattgcattatttttggtgtttttatatcagtaattaggtttttaaattatctagcaaatatttaccaattgcttcctctatwccaagcattgtgtgatataaaattgaggtaagaattttaaaaattgaataaacacaatattatcagtattttcataaaaatgtattttagtagaataggggatggggggaaggtaaacaaaaaataaataaaattcttgcaaaattaagtgccaggaagaatacaaataaggtactgagataaagtttagtagaaggta

SEQ ID NO: 501765 - DNA, 566 bp, Homo sapiens
tctccagtatatctggaaattattgaaacctttttttttccagaggcaaaaaagatcaatacctttttctctcagtggcrtaaaacatctcaggttactttgtccctgtttattccagcaactccaagttcaaagtaaacgttaaagtcatgagggtaaaatcatattttcagagtaaatgaggacactttgaaattggctaaaatgtttgcttcaccagcttttgagatatcaagctgaaggcctctgctctagggatagaggcaaaggaagaggcgaatgattgaatgggggttttctgtttttcaagcagagcagccaaaactgctagacaaagccacaagctaagcatctatgaaacacgatagagataatttgtcttatctctgggaggaacaacacagcaatttctgtgtgtttctctccataaaatgggttttcaaaatttgctgctttttcccaggatgttgaaagcaaaatatcatattaacacccaaaaagataaatgccacttctatggaaaatgttgtgagatgtcaccaaatgtaaaagcagaggccttctct

SEQ ID NO: 501766 - DNA, 566 bp, Homo sapiens
tctccagtatatctggaaattattgaaacctttttttttccagaggcaaaaaagatcaatacctttttctctcagtggcgtaaaacatctcaggttactttgtccctgtttattccagcaactccaagttcaaagtaaacgttaaagtcatgagggtaaaatcatattttcagagtaaatgaggacactttgaaattggctaaaatgtttgcttcaccagcttttgagatatcaagctgaaggcctctgctctagggatagaggcaaaggaagaggcgaatgattgaatgggggttttctgtttttcaagcagagcagccaaaactgctagacaaagccacaagctaagcatctatgaaacacgatagagataatttgtcttatctctgggaggaacaacacagcaatttctgtgtgtttctctccataaaatgggttttcaaaatttgctgctttttcccaggatgttgaaagcaaaatatcatattaacacccaaaaagataaatgccacttctatggaaaatrttgtgagatgtcaccaaatgtaaaagcagaggccttctct

SEQ ID NO: 501767 - DNA, 510 bp, Homo sapiens
gtatgatcataaaggattttaaaagttgaaaataattactagtaaacttctttaattctggcactactcactaaatagtaaaatgaattcatttcatatgggctataggctttcttcctatccatgtatgaattactcacaaaaaattcatggccccaacaaaagaattcctaggactcatccacaattttagttttgctttcaaatttgagaaattgtaagtattttagaaaaatgtgtgaacatttcttatagggaaaaatggaaaaacccattgcacgttaaaaattatagtatcttaaaatatgagggctctttattttgcctagtgtgttttaaactatgctttctgttttgggcagagaacgctttcaaggtctaactcaatatgcaaagcagatagaagtagagcagctctggtatagaaagtgggacatgrgacccatgtttggttctaagaaacacatttggagacttttttattctactgctgtcattttactcttgaac

SEQ ID NO: 501768 - DNA, 516 bp, Homo sapiens
aagaatggtcgtatttatgggcacaaaatccaatttcactaatttctcttaatatccaccctagaggattcatacccaactgttatttccagggagagagacaaaggcgagaaaaggtcgggggaaattgcacttaatgtttgatttgatttctttggatagagatgcaggtactgctgtacaaatttcgcacacacacacacacacacacacacacacacgacacacgaatcaacatccgtgccttacgttgctttctgtttaccttcacagcaaccttcgagatgtgtgagtttaagcagatgcaacaccctttgacaacaaagacgcagcacactgggttaaagtggattgaaatcagacaygtcacattttaggagagaatgcatgcaagtagggcattagtccaattcttttgtactgagcatttcaaagttgagacccagtgggtggggcgaaaataaatcaagccctcctatggcgagaatgtacacggactccagcatctccaatctg

SEQ ID NO: 501769 - DNA, 516 bp, Homo sapiens
aagaatggtcgtatttatgggcacaaaatccaatttcactaatttctcttaatatccaccctagaggattcatacccaactgttatttccagggagagagacaaaggcgagaaaaggtcgggggaaattgcacttaatgtttgatttgatttctttggatagagatgcaggtactgctgtacaaatttcgcacacacacacacacacacacacacacacacgacacacgaatcaacatccgtgccttacgttgctttctgtttaccttcacagcaaccttcgagatgtgtgagtttaagcagatgcaacaccctttgacaacaaagacgcagcacactgggttaaagtggattgaaatcagacatgtcacattttaggagagaatgcatgcaagtagggcattagtccaattcttttgtactgagcatttcaaagttgagacccagtgggtggggcraaaataaatcaagccctcctatggcgagaatgtacacggactccagcatctccaatctg

SEQ ID NO: 501770 - DNA, 609 bp, Homo sapiens
gcacaggagcacaatcatctttctctcatcaccttcaggcttctcttcatgacattctttaacttaaaattctgatgcccaaactttctccccgtcaaaggaaaccccttgatataacaaagatagaaaaaagatttgaccagaaacatcccctttttctgttgtcaccttttgctaatggaagagttagaaagactacgcactgcaaagtttaacttcattatttcctgaggaataagtgaggtataggtagccttgcttagaaacacgaagaacaagcccaccccaaatactacagataccaaaggagaaagtkactttctgccactccctcaaaagatacccctcaaagccacataaaatactaaacacaaaactgaaaccctgccccagtgaaatcaatgacttacttatgaatgtaatcaatgagtcgtcccacttcacgctgcctttgctctggagttagtcttgtatgaacggctaagtctttcatcacgttaaaatcattacgcattttatcagttagacctttaaataagacatttaaaggcatatggttaaagaaataataatcaggtctaaataactggagtatagggtgatggtgag

SEQ ID NO: 501771 - DNA, 611 bp, Homo sapiens
gctaatattttctttttactttttaagagacagggtcttactagtcatcctcgtctttaagaacgaagcaaaacaagggtctcgaagagatatttgtacccactgttcatagcagcattgttaaagagttaatatgtggacccaacccaagtgtgtttccattgatgaataatgagcagaacggggtcatccgtgcagtgggtattaccagccttagaaaggacgggaatcccgacgcaccctgcaacatggatgaacctagaggacattaagctcagcgaagtaagccagtgacgaacagacaaatatcattccacttctaagaggcacttagtgttgtcaaagtcaaggacagacagtaaagcagggttgctggggctgggggaggggaacggggttggtgtttgatggggacagtgtttcagttttgcaagatggaaggagctctggtgttggtggtggttgtctgacattacgacattatgaatgtatttcataccattgcgctgtacacataaaaaggattaaaatggcaaattttatgttctgtgtattttgccaccataaaaacagttgrgggggagaaaaagaagtaaaacaaaaatgaatcc

SEQ ID NO: 501772 - DNA, 505 bp, Homo sapiens
tgttcatacccacattcttgattattctgcagaatagattcattttgaagtcccttaaaagcattaatacatcacaagggcataaattctctatttctcatgtatcataacctcaaaaaactgaattcttattaattttttactttgtctttcttgattaaaaaaaaaggatgcttctttttaatcctataggcggaacstaagatatgtgttcagtattgaagtgggttattcagtgtcctatttgagcaaccacatttgaaatgataggtttttcatcatttcagtgcttcagataaacagttgtctattagcagtgaagatacaaaatagggcagagatccaaccctgccctcaaaacacttacagtcaatatcagtcaaggttcttaatgtcaagccacagaaagccactctggctaatttaagcagagaaaggatttactaatttaagcagaaaatagttattggtaaattaataaagttagaaagtagaatggtgtttt

SEQ ID NO: 501773 - DNA, 505 bp, Homo sapiens
tgttcatacccacattcttgattattctgcagaatagattcattttgaagtcccttaaaagcattaatacatcacaagggcataaattctctatttctcatgtatcataacctcaaaaaactgaattcttattaattttttactttgtctttcttgattaaaaaaaaaggatgcttctttttaatcctataggcggaacctaagatatgtgttcagtattgaagtgggttattcagtgtcctatttgagcaaccacatttgaaatgataggyttttcatcatttcagtgcttcagataaacagttgtctattagcagtgaagatacaaaatagggcagagatccaaccctgccctcaaaacacttacagtcaatatcagtcaaggttcttaatgtcaagccacagaaagccactctggctaatttaagcagagaaaggatttactaatttaagcagaaaatagttattggtaaattaataaagttagaaagtagaatggtgtttt

SEQ ID NO: 501774 - DNA, 505 bp, Homo sapiens
tgttcatacccacattcttgattattctgcagaatagattcattttgaagtcccttaaaagcattaatacatcacaagggcataaattctctatttctcatgtatcataacctcaaaaaactgaattcttattaattttttactttgtctttcttgattaaaaaaaaaggatgcttctttttaatcctataggcggaacctaagatatgtgttcagtattgaagtgggttattcagtgtcctatttgagcaaccacatttgaaatgataggtttttcatcatttcagtgcttcagataaacagttgtctattagcagtgargatacaaaatagggcagagatccaaccctgccctcaaaacacttacagtcaatatcagtcaaggttcttaatgtcaagccacagaaagccactctggctaatttaagcagagaaaggatttactaatttaagcagaaaatagttattggtaaattaataaagttagaaagtagaatggtgtttt

SEQ ID NO: 501775 - DNA, 505 bp, Homo sapiens
tgttcatacccacattcttgattattctgcagaatagattcattttgaagtcccttaaaagcattaatacatcacaagggcataaattctctatttctcatgtatcataacctcaaaaaactgaattcttattaattttttactttgtctttcttgattaaaaaaaaaggatgcttctttttaatcctataggcggaacctaagatatgtgttcagtattgaagtgggttattcagtgtcctatttgagcaaccacatttgaaatgataggtttttcatcatttcagtgcttcagataaacagttgtctattagcagtgaagatacaaaatagggcagagatccaaccctgccctcaaaacacttacagtcaatatcagtcaaggttcttaatgtcaagccacagaaagccactctggctaatttaagcagaraaaggatttactaatttaagcagaaaatagttattggtaaattaataaagttagaaagtagaatggtgtttt

SEQ ID NO: 501776 - DNA, 545 bp, Homo sapiens
tagatacacaataagtatgtatggatggtgagcaagattttgttgattcaggtcattttttaaatagtaaatacattcaacgaccaatcttccacggtgagggagagcgtgtgctgtgactgaaagccacatgtcaccaccagtcccattygaatactgatcgtcagcgctgtgaactaaagcagaactaatacttttacctttcactcttctcctgaccccatttgccaagataaagatggaaagaccccggcattgtccagtgggagggaaaaatgaagctccgcagaacttttctaaattggattagcatctcctgccgtatgcgcttatttattcagggaatttccaagtcagtgttgcagacatgaatgtggcaggggattgcacgctttcaggatgaaagtatttgggcttcctaagtgcgtcgacgagaagagaccagttacctcacgtttcttcttattttatctttagcctctaaacatagcacacagtaaatcatcttggacatctagggatccctttcttcagatgattataaa

SEQ ID NO: 501777 - DNA, 545 bp, Homo sapiens
tagatacacaataagtatgtatggatggtgagcaagattttgttgattcaggtcattttttaaatagtaaatacattcaacgaccaatcttccacggtgagggagagcgtgtgctgtgactgaaagccacatgtcaccaccagtcccattcgaatactgatcgtcagcgctgtgaactaaagcagaactaatacttttacctttcactcttctcctgaccccatttgccaagataaagatggaaagaccccggcattgtccagtgggagggaaaaatsaagctccgcagaacttttctaaattggattagcatctcctgccgtatgcgcttatttattcagggaatttccaagtcagtgttgcagacatgaatgtggcaggggattgcacgctttcaggatgaaagtatttgggcttcctaagtgcgtcgacgagaagagaccagttacctcacgtttcttcttattttatctttagcctctaaacatagcacacagtaaatcatcttggacatctagggatccctttcttcagatgattataaa

SEQ ID NO: 501778 - DNA, 676 bp, Homo sapiens
tctaccataaagacacatacacacatatgttcatcacagcactattcacaatagcaaagacatggaatcaacctacatgccaccaatgatagactggataaagaaaatgcagtacaactgctcagatgatgagtgccctaaaatctgagaaatcaccactaaagaatctattcttgtaactgaaaaccacctatacccccaaacaattgaaataataaaaaagaaacagcctaaaaaataagaaaaagtggaaagaaaagaaaacgtggtacatatacaccatggaatactatgcagccataaaaataacaagatcatgtcctttgcagcaacgtggatggagctggaggctgttatcctaagcaaactaacacaggaacagaaaaccaaatactgcatgttctcactcgtaagtgggagctaaacattgaatacctacggacgtaaagaagaaaccagcagacaccgggtgaagggagggaagagggtgaggatggaaaaacgacctatcaggtactatgcttataacttgggtgatgaaataatctgtacaccaaatccccgtgacacacaatttacctatataacaaacctgcacatgtamccctgaacctaaaacaaaagtaataaaaataaaaataaatctcacaccttcttggaccttgctctcccgtcc

SEQ ID NO: 501779 - DNA, 569 bp, Homo sapiens
gtaaaagaagaaccacatggggaggagttgccttagcagatattaagacacacaacaaggtcatgaagtagaatgggagtaggaaggcctgggaggtcttgcaggggtagaggcatctgatgcatattatctcaatacatttcttcacaaccccgactttacagtggacatttcaacctcgccccatggctttcttaagcattctttcactatgtggtcccctctgttacacatcctagactgctctgagaccctgaagttgcgcaccatgctcagaagaatgaacaggaaaaaagagaaatgggcagagcaggaatgtgagaaatgacccaggcttggatgwctttcctgtgatcttcccctctgggatctgctctctgatggaatacttaatctaacacctgacatgctcaaagactgtgcaggtggcatgggctttcaggtattggtaagattatggttcatcattggagcagaatgttaggagagcaggccttacctatcaatgcacccttttcctacatctttttttctgcattgatgctgggaaactaaacaaggaggagagc

SEQ ID NO: 501780 - DNA, 418 bp, Homo sapiens
ccggagcgctggtggggattgggcaaagacrtcaacaccagggctgtggaaggaggcgaggggccttcaggtgccgagggtggtgcgcacccagggatgctggtggggattgggcaaagacgtcaactccagggctgtggaaggaggcgagggccttcaggtgccgagggtggtgcgcaccccgggatgctggtggggggtgttcacctttgttgccagaagtgtttgctcatccaagatggagtgctgggggtggcacctgcgggtaccagccctgcatgttcctggctgccacaccagtgtggggctcactccaggaactgttttcctatctgggaagtgagggggaatcttaaagagtcccctgtcaccatgatgccccacgcagtcctcgcagcaaagacatgccaccatgaca

SEQ ID NO: 501781 - DNA, 523 bp, Homo sapiens
acatagatacatgctcagcaaatcttggatgaatagatggccctgagagagagtggatgagtggtggatggatggaggggtggatgaataggtgggtgggtgggtaaatgatgaaagggtggatggatggatgggtggatgggtgggtggataaatgggtagatggatgggtacatgtatagatggataggtgagaggacggatgggtgggtagatgcatgggtgggtagatggatgggaggatggatgtgtgggtggatggatgaatgggtggatggattggagggtgrttggatggatgggtgggcagatgaggaaggggtggatggatggatgaggtgggtggccagataaatgggtagatggatgaatgggtgggtggctgggtagatggatgcatgaataggttgagtggtggatggatggatggatgggtgggtggatgggaggatggatggatggatgagttggtgggaggatggatatagatgcatatgtggatggaggaatggatggatgaata

SEQ ID NO: 501782 - DNA, 463 bp, Homo sapiens
tctgccgcactctggtttcctctctcggctttggagcccccctccctctgtctctgtatggggaggcttcttccttctttctttactattaaactctccactccttaaaactactccatgtgtgttcatgtcrttttatccaattcggcccgagactaaggatcctggtgttcctccagtcctcagagctgtaacactatgcaatcacagaaccttgagccgtgtgcattctccttttaactcaactcctatcactctcgatatgtccatcctctcctattacctgggctgcaccagcaatcaatagcctcatatgtgaccccaatgcttccattctctcttcttctgtgcaatgcattttattgaagcagaatttggatgcttcatcccctactggaaaaaaaaaaaaaaaaaaagtagtagtttccagggacatctggaagtctggggtgccaaaaaatgt

SEQ ID NO: 501783 - DNA, 391 bp, Homo sapiens
ttatgagtacctcagtgacaaagactaaataatacttatctatgtgttcctaatatcttcagcccaggttgcctgaaaagatggaaatcccaagacaagaaaagggcacagttcagtttctctgacttcttttattaaagatttccatggagagaactcattatgctcttgtagttaattttttttttagctgtactatttgtcaaaagcatcactttccagaaaaaaaaaaaagattgccaagagacaagaggctgaggtctagaactacctctgccaccaactagataggtaacctagatagtccagctcatgtccctatgtccctcarcccaatctctcaccagcaattgagaaatcaggactcaatagtctttatggattgttaagc

SEQ ID NO: 501784 - DNA, 435 bp, Homo sapiens
ggaaaagtaacaggagacaaggaaagatacaaaaccatgaaagtattaccagttgattcacaacattccatgagtagatagaacagatcactcagcacatgagttgcctactgacatgttgcaaagatcaaccatgattccaagaggtcaataaaaggaagaaatggggaataatttctaactgtatctttcctgtcttctgtttctagttggtcagagttcatctctcagagtattaagcccttctctatatcatagttgctttagtgactcaagatgccacaatccgaactttcattgtgaggttctgttcaagtctagaaatggctgttaagaaccaggaactccagtcttgctactggccagcctagctactcagaaacagcattagagaaggagtytggcctttccagaacaagtgactggtcagccccc

SEQ ID NO: 501785 - DNA, 620 bp, Homo sapiens
ccacttgaccggcggtgaggtgaagactttctcatgacaccttgcacacatctctacttgaccacttagcactctccactagaattctatgctacatattttagcatgtatgaaactayagatttctggagtgcaggagcaatgcttgcaaatgtacctttttatcctttacactgagcaaaatacctggcatatatgagcctgataaatacatgttgattgaaagaaaatgaatgaattactcactaatttctctcccacacacttttagcaaaatagcatgtgagctgttatcattctctgagacacactatagtgatgatactggagaaaaagaaacaaaagatcagagtactagctgggcatctttctcttaaagcccatccctgagggtaacttcattttccctattaatggcacccctctgatacaatgttagggtccaatcaggtcacagcattaaaggtcttagagagaggtggtggtctgtgctacaaagagctcaggcttttcaatcagatggtcctgtgatcgaatccaggcatttctaccagcagcaactggagctggaaaaatgttcagaatctagctgaatttcaggtctctccttgataaaatga

SEQ ID NO: 501786 - DNA, 620 bp, Homo sapiens
ccacttgaccggcggtgaggtgaagactttctcatgacaccttgcacacatctctacttgaccacttagcactctccactagaattctatgctacatattttagcatgtatgaaactatagatttctggagtgcaggagcaatgcttgcaaatgtacctttttatcctttacactgagcaaaatacctggcatatatgagcctgataaatacatgttgattgaaagaaaatgaatgaattactcactaatttctctcccacacrcttttagcaaaatagcatgtgagctgttatcattctctgagacacactatagtgatgatactggagaaaaagaaacaaaagatcagagtactagctgggcatctttctcttaaagcccatccctgagggtaacttcattttccctattaatggcacccctctgatacaatgttagggtccaatcaggtcacagcattaaaggtcttagagagaggtggtggtctgtgctacaaagagctcaggcttttcaatcagatggtcctgtgatcgaatccaggcatttctaccagcagcaactggagctggaaaaatgttcagaatctagctgaatttcaggtctctccttgataaaatga

SEQ ID NO: 501787 - DNA, 602 bp, Homo sapiens
acgtttcttcaaaatattttttgccttagccatggtaagaatttctttacacacagaatttctataggtttcaaaaagtacaaagataagaaatctaaaaattgaactttgtagtaacactcataaatattttagatattatttttcaacaacacacagaactaagaatccttgatagtgattaatcatctaaatatgcctaattattttgtatatacaccaaatatttaaaagcatggcatgaccacaattttcttcaatttctatatttttaaagctttgttgaccccaaaatttattattcaaaattacctttccgtgamtttacttccttttaaaaccttttttattgtttaatcttggtagaataaaccaaatgttgactgtctatatgacctatggtaaactaactgctatataacagattgtttccagaatgtataatggttcaaacacaataaaagttgacgtcttactcaggtaacattagttagtagttggatacgtcagtgggtgatccatctcctcacagtcatttaaggatttgtgttaataaatatttgtcatctactatgtgtggcttctaaagtcaacctagggat

SEQ ID NO: 501788 - DNA, 438 bp, Homo sapiens
tattcataggattaatttacaaatgtaaattgtgaattatgttatacacaggaagtgtgtggagcacggtaattaatcaaaatgttagctcatgatgttatgattgttgtagtcgttatgccttttctttgcattttggaagtttacgtgtctaaaagtttgcatattaaggtaagcatacayacacaatccaccctgacatttagtcttgatgttgaggactttgatattggtgaccaactttgagacccacttccaaaaataaagtacataaaaaacctactgttaatgttactgaacggatcgtgggtctgccgactagacgcagcgaaaccaaacactgacattgagattgcagcgagagaaagtgaggcgtttactgcagggcgccaggcagggagacttgtgccgctcattcctaagactgcaactccccag

SEQ ID NO: 501789 - DNA, 438 bp, Homo sapiens
tattcataggattaatttacaaatgtaaattgtgaattatgttatacacaggaagtgtgtggagcacggtaattaatcaaaatgttagctcatgatgttatgattgttgtagtcgttatgccttttctttgcattttggaagtttacgtgtctaaaagtttgcatattaaggtaagcatacatacacaatccaccytgacatttagtcttgatgttgaggactttgatattggtgaccaactttgagacccacttccaaaaataaagtacataaaaaacctactgttaatgttactgaacggatcgtgggtctgccgactagacgcagcgaaaccaaacactgacattgagattgcagcgagagaaagtgaggcgtttactgcagggcgccaggcagggagacttgtgccgctcattcctaagactgcaactccccag

SEQ ID NO: 501790 - DNA, 630 bp, Homo sapiens
agagaggatctttaaagtagggagggttgttttaaataaagggatagcctgaagaaaaacatatttatgggtagaaaggtcaaaatcagagtgatatcaaaaggaaagcaggcttggaatgaaatagataatgaagaaacatctggcatccttatggagcatgcataagcatctctggcagctcatttgtcaagctcaattttcacaaaacaataattgtgtttgattagagtttggggagcaggaatctcagaatgcaggatggagccatttggggcaatactgtacagtttttaaaattttttaattgatacctaatagataatcatattttcaggatacatgtgataaattgatacattcacataatgtgtgaagatgaaaccagggaaattggggtatccatcaccttaaactstattcaggaacacattgtttaatttccaatatatttgtgtaatttccaaagttcctcttattattcatttctggttttattccatggtgatcagaaatgatacttgatatgatttctactttcatgaatttgttgagactcgtttgtggcctaagatatggtctattctggagaatgttccatgttctgatgaaaagaatatgtatgcaaca

SEQ ID NO: 501791 - DNA, 630 bp, Homo sapiens
agagaggatctttaaagtagggagggttgttttaaataaagggatagcctgaagaaaaacatatttatgggtagaaaggtcaaaatcagagtgatatcaaaaggaaagcaggcttggaatgaaatagataatgaagaaacatctggcatccttatggagcatgcataagcatctctggcagctcatttgtcaagctcaattttcacaaaacaataattgtgtttgattagagtttggggagcaggaatctcagaatgcaggatggagccatttggggcaatactgtacagtttttaaaattttttaattgatacctaatagataatcatattttcaggatacatgtgataaattgatacattcacataatgtgtgaagatgaaaccagggaaattggggtatccatcaccttaaactctattcaggaacacattgtttaatttccaatatatttgtgtaatttccaaagttcctcttattattcatttctggttttattccatggtgatcagaaatgatacttgatatgatttctactttcatgaatttgttgagactcgtttgtggcctaagatrtggtctattctggagaatgttccatgttctgatgaaaagaatatgtatgcaaca

SEQ ID NO: 501792 - DNA, 637 bp, Homo sapiens
cctggccaatactgtcttatattgtaagaatttccaatgatttttacctacatgtgtaatttttttataagagagatacaaaatagccaactaaatgccaaaaacatgtattttggaaaccaatttagttcaacagacggtcatttcaacttagcttttttcttaagcagattactgacttcagggtgaagtcyattaacatatagtacaatgaaagcattttctgtgcctggactcagaatgaatagctctgaaaaagcagcagatctgcttaacctgagggcttaacttttataaacacattatccagccttctttctccttcagggcaggatagtaactacggaaagacattatagcagacttcatttttcttattgtttgagtttatcttttcttttctttttttggcaggagaccagagtttcattattactcaaatcagtctcccagagcatttggggatcctgttttttaaggacagcttggtggatgggcggaacccagtgagccaggaatctgatcggtcaagtcagagatgaaatcatagggagttaaagctgtcttcttgtgcttagtcagttcctgggtgagggccacaagatcagatgagccagtttatcgatctgtgtggtgc

SEQ ID NO: 501793 - DNA, 637 bp, Homo sapiens
cctggccaatactgtcttatattgtaagaatttccaatgatttttacctacatgtgtaatttttttataagagagatacaaaatagccaactaaatgccaaaaacatgtattttggaaaccaatttagttcaacagacggtcatttcaacttagcttttttcttaagcagattactgacttcagggtgaagtctattaacatatagtacaatgaaagcattttctgtgcctggactcagaatgaatagctctgaaaaagcagcagatctgcttaacctragggcttaacttttataaacacattatccagccttctttctccttcagggcaggatagtaactacggaaagacattatagcagacttcatttttcttattgtttgagtttatcttttcttttctttttttggcaggagaccagagtttcattattactcaaatcagtctcccagagcatttggggatcctgttttttaaggacagcttggtggatgggcggaacccagtgagccaggaatctgatcggtcaagtcagagatgaaatcatagggagttaaagctgtcttcttgtgcttagtcagttcctgggtgagggccacaagatcagatgagccagtttatcgatctgtgtggtgc

SEQ ID NO: 501794 - DNA, 452 bp, Homo sapiens
gccaaataaccgatgcaacgaactatgtgcacgactcgctgattacaatatttatataatattgaattttgaaactttgttatctgmatttgtccatttgggacaaaataacttgttgtctatgtgtctatgaagaagaaaatattttacatagattgaagctgatgaaattataacagttggcaacaatgccagagaaaaataagtatcttaactggaaaaaatgagttttaaaaaatagatgagaataatatttccgaaaaggaatgaagatttcgagtgaatgtcgcgtgtggcagcatccacagctcacgatccctgagaacacactattaactgcctacttcagtccttccctacttgaatagaccctcagctcagtttcagtctctctgaggtcacttctgactgtaagccagatactcattttcacatctcacctttccccaaaa

SEQ ID NO: 501795 - DNA, 631 bp, Homo sapiens
taaaaaataataaaccacagagtaaacagtgtcaatatttaatacatgaaagcagaaaaaargcagcataattgttgttgttgtttcttaatttggaaataaggatgtaaattccagaagaaacaaataagcttgaaagacgtaccttcttgctgtggtagcctctttggggaggagtggtacaagggcctgctgtttgataatggaactttcccttaccaattggtgtatatactacgtgcatgcgtttctttgatatagataattcactgaaaaatatagctagaataaaatgccagacagagctggtctctggatgggcaagttctttttctatactttcctcaattgaataaatgacacagaagatattgttatgaatgaattacaaaggcatttaaatttcagcatgtcatgaaagattgtaagaaaaattaaaaactagtataatatttgtaacaaaaagataacaaatatcgaaagaaaacactaagtctttgttatagaataaaggaaaaaaggtaatattatggctttcttacaaatataaaatggacagatggcaagatttttatctaactaatgagggaatcagtaagatttttaaaatcagttcaaaggaaaactcgaa

SEQ ID NO: 501796 - DNA, 631 bp, Homo sapiens
taaaaaataataaaccacagagtaaacagtgtcaatatttaatacatgaaagcagaaaaaaggcagyataattgttgttgttgtttcttaatttggaaataaggatgtaaattccagaagaaacaaataagcttgaaagacgtaccttcttgctgtggtagcctctttggggaggagtggtacaagggcctgctgtttgataatggaactttcccttaccaattggtgtatatactacgtgcatgcgtttctttgatatagataattcactgaaaaatatagctagaataaaatgccagacagagctggtctctggatgggcaagttctttttctatactttcctcaattgaataaatgacacagaagatattgttatgaatgaattacaaaggcatttaaatttcagcatgtcatgaaagattgtaagaaaaattaaaaactagtataatatttgtaacaaaaagataacaaatatcgaaagaaaacactaagtctttgttatagaataaaggaaaaaaggtaatattatggctttcttacaaatataaaatggacagatggcaagatttttatctaactaatgagggaatcagtaagatttttaaaatcagttcaaaggaaaactcgaa

SEQ ID NO: 501797 - DNA, 631 bp, Homo sapiens
taaaaaataataaaccacagagtaaacagtgtcaatatttaatacatgaaagcagaaaaaaggcagcataattgttgttgttgtttcttaatttggaaataaggatgtaaattccagaagaaacaaataagcttgaaagacgtaccttcttgctgtggtagcctctttggggaggagtggtacaagggcctgctgtttgataatggaactttcccttaccaattggtgtatatactacgtgcatgcgtttctttgatatagataattcactgaaaaatatagctagaataaaatgccagacagagctggtctctggatgggcaagttctttttctatactttcctcaattgaataaatgacacagaagatattgttatgaatgaattacaaaggcatttaaatttcagcatgtcatgaaagattgtaagaaaaattaaaaactagtataatatttgtaacaaaaagataacaaatatcgaaagaaaacactaagtcyttgttatagaataaaggaaaaaaggtaatattatggctttcttacaaatataaaatggacagatggcaagatttttatctaactaatgagggaatcagtaagatttttaaaatcagttcaaaggaaaactcgaa

SEQ ID NO: 501798 - DNA, 631 bp, Homo sapiens
taaaaaataataaaccacagagtaaacagtgtcaatatttaatacatgaaagcagaaaaaaggcagcataattgttgttgttgtttcttaatttggaaataaggatgtaaattccagaagaaacaaataagcttgaaagacgtaccttcttgctgtggtagcctctttggggaggagtggtacaagggcctgctgtttgataatggaactttcccttaccaattggtgtatatactacgtgcatgcgtttctttgatatagataattcactgaaaaatatagctagaataaaatgccagacagagctggtctctggatgggcaagttctttttctatactttcctcaattgaataaatgacacagaagatattgttatgaatgaattacaaaggcatttaaatttcagcatgtcatgaaagattgtaagaaaaattaaaaactagtataatatttgtaacaaaaagataacaaatatcgaaagaaaacactaagtctttgttatagaataaaggaaaaaaggtaatattatggctytcttacaaatataaaatggacagatggcaagatttttatctaactaatgagggaatcagtaagatttttaaaatcagttcaaaggaaaactcgaa

SEQ ID NO: 501799 - DNA, 545 bp, Homo sapiens
tagtgtatgcgttagaaagactgctatttaagaagaacattcagacaatgagtggctcacagaaatttaaaaaatgatagtacaaatagatctttttacagaaggactgaaacgtaaggtttacagaaatcttcgtatctgctagcacactccccttcaaacaatgccacacaatctcctacctcagggccttcgcacctgctgttccctatgtcctcaatgttctcccatgtggcccatcactttgagtatttgctcaaaagtctcattaaaggagaagccctccctgtaaaatcacactcctgttaactaatgtcattctctyatgctgctttatttttccacaccgcacctatcactgtgttatattcatttcctcccttcctgcctcctttcctttcccttctgtccccccctcccttcttcctttattgtctccccattagaatataagctcctcaaaaacactttgcctgctgtgcttattgctgtagtcccagtgctaagaatagtactcaatagatatttgttgaataaataggtta

SEQ ID NO: 501800 - DNA, 626 bp, Homo sapiens
attatccaaaatgggtgagggacaagaaaagttttgaagagtatgagagaaaaacatttcctgctgtttgctactgctggagactcactttactccctatttcatctgactgcaccaaaatgtagcctctgcaaaatttttataatgcttttaaaagcatagttttgacacacaaatgctggttagcattttcatacccatgtgtaaagtggtagaaaatataaagctaacactatgtttcactgtgtatctgaacaattttttacatatcatcaattctgttgaccttatatttgcttctagaaatatactaagaaagatgtcaatgatttttatctaaggcctcctatggcttaacactttgctggaaacattctctcataatacagagtttattctgtatgctcacttatccttccttaagtctctgatgtatacttatttaccagcttatttggtttgcttctttcttattccccctcaggggagaaatctagactagaaccaccaccgcarcaataagtacaaagaataaacacagataaaacttcaaaccatgaaaacattgccaagttcccagttaattttatcccaaaagggaaaacaaagaaaaactacccttaaag

SEQ ID NO: 501801 - DNA, 627 bp, Homo sapiens
gtaagctccatgaagtcagcgacatcagctgttttgttcattcctctttccacagtgcctagaacaatgcatggccaagagcagttttgcagtacatgttataratgaatgaagtgtagcactttttacaatccactttgcatttctatcgccataaatactaagaaaatgtctatatcttggtcaaccttttatcctcacagagcctcacacagtgatttgaacatacataaaaaatgttgattaacaattgtcctaccaattaaattgtctgtttaccaattggcctattagatgtatgggaacaatattaaaagatcacagaccatttctaataccatttttgtaaatacatctagtgaattcaagaaatgaatgcttcctgactctaaatttttctagctctgtgatgatagtcattcaaagcactgtaaattctagatgtttggctgcatttatactgaaacaccatattcctttggctgttcttcagtatgtctcactctttgtgttggacttgtctgcctcaactcacaaggaaaagttccataatattgcactggcataattggctactatatctgagccagctaaaatttcagcagacgacgaaaagaagatgtattt

SEQ ID NO: 501802 - DNA, 627 bp, Homo sapiens
gtaagctccatgaagtcagcgacatcagctgttttgttcattcctctttccacagtgcctagaacaatgcatggccaagagcagttttgcagtacatgttatagatgaatgaagtgtagcactttttacaatccactttgcatttctatcgccataaatactaagaaaatgtctatatcttggtcaaccttttatcctcacagagcctcacacagtgatttgaacatacataaaaaatgttgattaacaattgtcctaccaattaaattgtctgtttaccaattggcctattagatgtatgggaacaatattaaaagatcacagaccatttctaataccatttttgtaaatacatctagtgaattcaagaaatgaatgcttcctgactctaaatttttctagctctgtgatgatagtcattcaaagcactgtaaattctagatgtttggctgcatttatactgaaacaccatattcctttggctgttcttcagtatstctcactctttgtgttggacttgtctgcctcaactcacaaggaaaagttccataatattgcactggcataattggctactatatctgagccagctaaaatttcagcagacgacgaaaagaagatgtattt

SEQ ID NO: 501803 - DNA, 691 bp, Homo sapiens
caagatgcagacagctgggagtcccttgtgaagtatctctgttggtttaccataaaacgagggccactagggaacaatggccactagggaacaatgctcatgttatccccactcccgagcttccaaatgtttttaagtaactttctcgtaagtrtgagtagataggcaataccagtggacattcagataaagcttctatcataacaacagagacaaaaccgaaacaagaaaaaaattggtgcttcgagaagaaaagtagaaaaaacaatgtcattgatatcctcaaagctattggaggggatattttattgatgaaacaagaacaggagaatatatttaaaaaatacgtaaatcactaaatacctcttggaaattataatatgataatagaaataacgcaaaaagaagtttgaaagataaaccaaaggaactttccattaagatagtaaaacaacaataacaataccaaagaaatagaaaatagaaaagacaaggaaatttaaaaatctatccaggagatccaaattcaagtaatatttccacaaataaaaaatggaaaaattaaatggaagaaattttcaaaaaatcattcaacaaatttccacaaaactgacatgaatttccaaattgagaaggctcatcaaaacccagcacaaggcataaaccacatcaggcaggcaatcaaacaaga

SEQ ID NO: 501804 - DNA, 589 bp, Homo sapiens
tgtttgagagggtggcagcttgccgaccaagaaaaaggaacatatttggaagacragaaaatgaacccagactttgctctggactcctggttttctgaccattgagaggagggccagtgaagtgtccacaccacataagcaacattcattcataggttgattgacttagtctgtgcattcattcaacaaatatttatgttcatcacttcacttttcttgataaagaggaaaataaagacaagtccctattctcatgtaacatattctaatggaagaaaaacacaacacatggtcagctaaacatgtcacacagtgtgaggtagtgagatgaacatggaaaagaactaaagcagggtgaagaataaagaaacgtagggatgctggtctagtttctgtcaccagtgaaggactttctgagggattagagctgagcagatgcgtaagtgaagtagaaaatctgtgggcatctagagggaagagcatgtgcaaaggccctaatgcaggtgcattgtctgcctgggagttgataggagctgggcagatagagggacagagattaaaaaggagtccaggagataggaaggggcca

SEQ ID NO: 501805 - DNA, 589 bp, Homo sapiens
tgtttgagagggtggcagcttgccgaccaagaaaaaggaacatatttggaagacaagaaaatgaacccagactttgctctggactcctggttttctkaccattgagaggagggccagtgaagtgtccacaccacataagcaacattcattcataggttgattgacttagtctgtgcattcattcaacaaatatttatgttcatcacttcacttttcttgataaagaggaaaataaagacaagtccctattctcatgtaacatattctaatggaagaaaaacacaacacatggtcagctaaacatgtcacacagtgtgaggtagtgagatgaacatggaaaagaactaaagcagggtgaagaataaagaaacgtagggatgctggtctagtttctgtcaccagtgaaggactttctgagggattagagctgagcagatgcgtaagtgaagtagaaaatctgtgggcatctagagggaagagcatgtgcaaaggccctaatgcaggtgcattgtctgcctgggagttgataggagctgggcagatagagggacagagattaaaaaggagtccaggagataggaaggggcca

SEQ ID NO: 501806 - DNA, 625 bp, Homo sapiens
tacaagggactagacacatttcctagagaaaggctggtgggatgaatgcattcttgaaacttccatctcacatttatttttctaccagtgataatayactgttattatctaaactgttgtctgctcagttgtattgattagatatagttctatttggaaaaattaaatggaaacaaggaatatccacctatcacatattgagagccacccaccacttaaagtatctgcaacaaaacttaggtaatatattccaaagctctccttacccattatccttcaactgtataatcctaaggagggcataataggatttgtatatattatcagtattgctttgtaaaggtttacattaaacatacatcctacaatgaacctccccttggtcacatattaaacctaaaatcagaaaagaattatgatgttcacttctcatttcataactgatcaggaactgatcagttacatagatcacaactcatctatacacatatataccaatatcccacatctcaatttgtatctatttatcttctcttcaaggaatagtttcttgaaaacattacaattcagtgaataatattcagatgcaaattagagactttaattttgtcatgctctgaaggca

SEQ ID NO: 501807 - DNA, 625 bp, Homo sapiens
tacaagggactagacacatttcctagagaaaggctggtgggatgaatgcattcttgaaacttccatctcacatttatttttctaccagtgataatacactgttattatctaaactgttgtctgctyagttgtattgattagatatagttctatttggaaaaattaaatggaaacaaggaatatccacctatcacatattgagagccacccaccacttaaagtatctgcaacaaaacttaggtaatatattccaaagctctccttacccattatccttcaactgtataatcctaaggagggcataataggatttgtatatattatcagtattgctttgtaaaggtttacattaaacatacatcctacaatgaacctccccttggtcacatattaaacctaaaatcagaaaagaattatgatgttcacttctcatttcataactgatcaggaactgatcagttacatagatcacaactcatctatacacatatataccaatatcccacatctcaatttgtatctatttatcttctcttcaaggaatagtttcttgaaaacattacaattcagtgaataatattcagatgcaaattagagactttaattttgtcatgctctgaaggca

SEQ ID NO: 501808 - DNA, 625 bp, Homo sapiens
tacaagggactagacacatttcctagagaaaggctggtgggatgaatgcattcttgaaacttccatctcacatttatttttctaccagtgataatacactgttattatctaaactgttgtctgctcagttgtattgattagatatagttctatttggaaaaattaaatggaaacaaggaatatccacctatcacatattgagagccacccaccacttaaagtatctgcaacaaaacttaggtaatatattccaaagctstccttacccattatccttcaactgtataatcctaaggagggcataataggatttgtatatattatcagtattgctttgtaaaggtttacattaaacatacatcctacaatgaacctccccttggtcacatattaaacctaaaatcagaaaagaattatgatgttcacttctcatttcataactgatcaggaactgatcagttacatagatcacaactcatctatacacatatataccaatatcccacatctcaatttgtatctatttatcttctcttcaaggaatagtttcttgaaaacattacaattcagtgaataatattcagatgcaaattagagactttaattttgtcatgctctgaaggca

SEQ ID NO: 501809 - DNA, 589 bp, Homo sapiens
tgtttgagagggtggcagcttgccgaccaagaaaaaggaacatatttggaagacaagaaaatgaacccagactttgctctggactcctggttttctgaccattgagaggagggccagtgaagtgtccacaccacataagcaacattcattcataggttgattgacttagtctgtgcattcattcaacaaatatttatgttcatcacttcacttttcttgataaagaggaaaataaagacaagtccctattctcatgtaacatattctaatggaagaaaaacacaacacatggtcagctaaacatgtcacacagtgtgaggtagtgagatgaacatrgaaaagaactaaagcagggtgaagaataaagaaacgtagggatgctggtctagtttctgtcaccagtgaaggactttctgagggattagagctgagcagatgcgtaagtgaagtagaaaatctgtgggcatctagagggaagagcatgtgcaaaggccctaatgcaggtgcattgtctgcctgggagttgataggagctgggcagatagagggacagagattaaaaaggagtccaggagataggaaggggcca

SEQ ID NO: 501810 - DNA, 520 bp, Homo sapiens
tcagatgttttgctgttagtttgttgcattttatcattaatgtaattcattttcacagagtaatgcctacattcataaaaagaaaaatcactacttgaaagacttgatgttgtcatgtttgttgaagaatgttcctgagacaatcttggaaatgtgagtgagaagtgggatttggcagaatctggaaagttggtcttcaatctgattgtaatccacttggaaagaagaacatcaaccagtgaaagacttaatgcatctgcatgaatgtaaatcaatcaaatagatatttaagaaacttgttcctktgctgccatttcaaaagtcaataccatgtaatattctagaacaggtcatgacaaagttcaacataaaaggaaataacgttttactaaatgcataaagatttatataatttaaggcttttgcaaacgtatagttttcacagtgatgacctgcatattatagatttgtgaaattttaagttttaatgtaatcacaaatctataatatacaagtcatc

SEQ ID NO: 501811 - DNA, 589 bp, Homo sapiens
tgtttgagagggtggcagcttgccgaccaagaaaaaggaacatatttggaagacaagaaaatgaacccagactttgctctggactcctggttttctgaccattgagaggagggccagtgaagtgtccacaccacataagcaacattcattcataggttgattgacttagtctgtgcattcattcaacaaatatttatgttcatcacttcacttttcttgataaagaggaaaataaagacaagtccctattctcatgtaacatattctaatggaagaaaaacacaacacatggtcagctaaacatgtcacacagtgtgaggtagtgagatgaacatggaaaagaactaaagcagggtgaagaataaagaaacgtagggatgctggtctagtttctgtcmccagtgaaggactttctgagggattagagctgagcagatgcgtaagtgaagtagaaaatctgtgggcatctagagggaagagcatgtgcaaaggccctaatgcaggtgcattgtctgcctgggagttgataggagctgggcagatagagggacagagattaaaaaggagtccaggagataggaaggggcca

SEQ ID NO: 501812 - DNA, 617 bp, Homo sapiens
caattgaaaaaatagtccctacatattttctgtagtattktattatctcatggactatgattagcaaaggctgctttaggagttacaatattttcccttaatcacaatctgctcttcatataacataaagatgctctaacaacagagtttcatttatcccgtcatttgtgttattattgtattatttgtgtatattactccagcaacattatcatcctcttaataaggtggcattacttcgtttaaacatttaggttcctttttgaaaagttaagagaataaaaaactttatatttgatcatatttataatttccagagtttttcattccttcctacaactattagcttccatctgctgtaactttcctttacccagaagagcattagtatttcttgtagagctgatctaactgcagaaaattccctcagtttttatttatgtaaaaatgtcttcatttcatctagatttttgaagatctttggaatgtatagaatttagacggactgttattttctttccgcgtttttaaaatgtcacattgcattctggcattttttttttgaagggaaatcagttatcatttgtatttttgttcccttcatgtaatgtgtcatt

SEQ ID NO: 501813 - DNA, 630 bp, Homo sapiens
tttagccaccattaactaacatggcaattcagaagttggatcttatttttttagaagccatggggtaactaaaaacaaaaaaggtattaaataaggaaaaaagcttaagcattactaataagtgaaagttactctattccagagccacaaataaaaacaaataaataaaaataaatgcatgccaatggggggtgggaggtgaattagtcacatttagtagcacaactttttataaagttaactgattatgatacacatatattgctttatggttagtggattgtttcaaaaatgcatgatggccattaaattctttgctaaaattattgtgtacagaacaccaaagtaccgtatccatcttttactccagattacttgttttcctactgaaatggtcagtttggtgctgctagaccatatctgtaggttattygttttattattgcaatggtcccctttatttgtctaccaattttacaatttaaggcaatcatccttatgaaatttgagcatcctagtttgtcatggtccagccaatagcaggagttttagagggtctaggtctggggacaagttccttgcttcggcgaaagcagaatggttgaggaggtcaccctgtcagctccaaaa

SEQ ID NO: 501814 - DNA, 606 bp, Homo sapiens
aggccatgatcctaagagaattaatacaggagcagaaaaccaaatactgtgtgttatcacttataagtgggagctaagcagtggatactcatggacatgaagatgggaacaatagacactggggactactagagtgaaggaaaaagggagggagcaaggcctgaaaaactaytgggtactatgcttagtacctgggtgatgggattaattgtaacccaaacctcagcatcatgcaatatacccaggtaacaaacctgcacattcccccatgaatctaaaataaaagttgaaattattaaaaacaattctgcttccctgtaattttcttccaggatcctgcttctgtcctccagagttacagtgaacacattcttttatgtgcttgttctttaaatatgtgaagaagtaattagactccgaagcctttccttctctaggccaaacacctccaagttctgttaatggtacctcatgtcacatggtttacacatttctcatcactttagaggcctcgctggatgatccctagccagtgtcatctttgtaggatgacaacaaatcaggcacaatacttcaaataatatttaatctacacagactgtagaa

SEQ ID NO: 501815 - DNA, 568 bp, Homo sapiens
tgcttgaagagttttcttgctgcttgactgtgttgatgtctcagggtccagggtgatagaagaggtgacatctatttctttgtgtcaagggaactgatgagtgtgctaggaatagacctcaccaaaaatgagggcaaggcactaacgtgcattaagtggctgcccaaaataatggcttcagggagtggagctgggagttgcagtcaccttggaccatgcgcaagtggtgtaaacatgctcagccttggttgccttccttgttactgggaacaaccatgacaccctaagacaattaggaggcttatgggagatgatacatgcaaagtacctgggccacagtagatatagaaatatgtatgttccacagttacctttcaagaacacgcataggtagagaatcctttactcctgggctkgtctaggtcctgggatttggagacctgaaaggaagtggtgagaaatactctccttccacccctgtgccttgactgcagccggttctgaccccagaccttggagcctgagaagtttctgaggaagcgaatgctcccaggtatactaagttcct

SEQ ID NO: 501816 - DNA, 616 bp, Homo sapiens
acaacaatcgagattgataaccacatttaattcagttctagtcagtaagacggaggttttctagcaccagctgcsaagattaaaaaatgtgcatgtcctagctctgggaagtgtctggtatgattgatgcttggtacttgttcatctaaatatgaatttactactgggaaagaaattaaacttctagatattcatttggtagatcggtgaggtgactgaagtgtggcaaacctcacaatgattatgaataaactttattaagaaaaactgaggcaattaacttatttgttcttcaaaactgaggaaatatttgtcctcacatatatgatagaatattgtttgctgctggtaaccaatctttgctttcttctactaacaacttgtttgtcaatatgtcttatttctcactctaataagactatgtctaaataacttctctcctaagggttaaaaatacaaagaattttcacacataaccaagtaataaagaatgtatattattgaatgaatgagtaatttacaaaagaaagtgttgagaagtagaatacataatttcagatttatgaaatatgaaatttcagattcaggatctgtccagtggagttgtgtttttact

SEQ ID NO: 501817 - DNA, 664 bp, Homo sapiens
acactttgaatactgtttgcactgttatctccaccatctgaaaactcacccatttaaaagtattttattgccaaatgaacatgtttattcttgaagatcaacacacacacatacacacgtacatgtacacacatacataygtatatttattgttttctgcatgaggctttgactccactatatgaagagtttgcaaagtaataaagcatcaattactttctttgtgacactgtgttgtcaaacacacaaaacactgaaaaactgacttcattcccctaaagaaaatatgagaccctgagttgaaccaagttagtttaaagcaaccagaagtttaaacacatcatccccaaagttaaagcttctgattaagggggctctcgcaggtagcaggaatgggcaatacccaccgtcttgctgaggtagctcgtgctggtgttcatgcactgcagcccctcactattgcagcaacccccacatctgtagacggacacacatggaggtttaaagaaggtgtttgtcgcgactccaaactccttccccacatctatacacacctcccgtggcatgcattgagtctttctccactcattatcaatacctgtcaagtcatagggaaatcagtaagttttacggaaaccaccaagataaaaaaagcccacagcag

SEQ ID NO: 501818 - DNA, 442 bp, Homo sapiens
aaagacttaacaaaatttacagttttacaagacttacaaaactagattttaatggctggtgtttttttccttctatattttctttcatcattgaaggctcaaaagtctgggtagttaaccaatggttgttatttcttacccagtaaaaattcatgttctctaacttgaatattgctttctgtatctttagtcattccttgatatgacaactcagatatcaagagaaatgtatgcatgatgtggccaaaaccaacaatcaagcacacttttccctatgagtgccaacctgctagtaccaaycgtttgttatgaaatacttgatttcgttcataactggactcaaccactaactgaatttttatgtgaaagagaacacaacagagcaggtaaccaaaatcaaaacctccctggaaagaaaggtttctgcctccactgaaatcat

SEQ ID NO: 501819 - DNA, 442 bp, Homo sapiens
aaagacttaacaaaatttacagttttacaagacttacaaaactagattttaatggctggtgtttttttccttctatattttctttcatcattgaaggctcaaaagtctgggtagttaaccaatggttgttatttcttacccagtaaaaattcatgttctctaacttgaatattgctttctgtatctttagtcattccttgatatgacaactcagatatcaagagaaatgtatgcatgatgtggccaaaaccaacaatcaagcacacttttccctatgagtgccaacctgctagtaccaaccrtttgttatgaaatacttgatttcgttcataactggactcaaccactaactgaatttttatgtgaaagagaacacaacagagcaggtaaccaaaatcaaaacctccctggaaagaaaggtttctgcctccactgaaatcat

SEQ ID NO: 501820 - DNA, 442 bp, Homo sapiens
aaagacttaacaaaatttacagttttacaagacttacaaaactagattttaatggctggtgtttttttccttctatattttctttcatcattgaaggctcaaaagtctgggtagttaaccaatggttgttatttcttacccagtaaaaattcatgttctctaacttgaatattgctttctgtatctttagtcattccttgatatgacaactcagatatcaagagaaatgtatgcatgatgtggccaaaaccaacaatcaagcacacttttccctatgagtgccaacctgctagtaccaaccgtttgttatgaaatacttgatttcrttcataactggactcaaccactaactgaatttttatgtgaaagagaacacaacagagcaggtaaccaaaatcaaaacctccctggaaagaaaggtttctgcctccactgaaatcat

SEQ ID NO: 501821 - DNA, 315 bp, Homo sapiens
cttactcttttgcacagaaatttttaaacrtctggcaggaaagccattcttaatcttttacaattgtagattaatatcttaaatttgtaccaagaaggcaggaacctatgtgaaaagaagttgagtgtgttagtcattctgactcatcactaaataggattattgaggacttaatcaacttaaatttatctttagaatatgccaaaaatttcctttaactacatatggccttttataggttatttttttcatggagacaaaagttgagaactcaagtccctggttatctgtatatagccaactggctgtaagtca

SEQ ID NO: 501822 - DNA, 543 bp, Homo sapiens
ctgctatcctttgcttcatttagtctctgctcaaatgttaccttattgccagttctctctctgttcccctagtcctttgcttttcttctaaatacttatcactgtgtgacatatttcatttgtgctatctatgtatttatttgttttctgttttctctcttgctctataaaccccaccacactttttctttttcagctacttgctcttgccacaggacctytgcacatatttgctctacctggaatattttttttcaacctctccctctgtacctactttctgcctttttacctacttaactccttctagcctttttactttagcatgaatattgcttcatcaaggatgccttgcctgatccataactctcatcaatgtcctttatttattccttcataaaaacatgactcttttattcataggatgcatctacatctcttactatgcgcttatacaatatgattatttgtatatgattatttggccatcacccccactaatttattgcttaactttgtggtatcctctgtgtttagctcata

SEQ ID NO: 501823 - DNA, 595 bp, Homo sapiens
tctgtctacatctattagctcatttgaggtcatcaaaaggattgcaaaacgtccaagacatcttagaccttagacatcttctaattctcaccatctcaattttatagacatacaaaagggagacctagaaagacaagagggctttctaaaggtcacacggctagttgatgatatacctggtctccttggcagctctactaaccctgctagtttctttgcccccactctggcccattaaatccattaacacacaayagtccggtttacacctccagtgctgctgacatcataaccttgccctgcccaaaagcttgagtggctcttcactgatgtcagaatcatctccagccctcttagctggctttcaggtctctccatttcatggggttccaacacccacatctgcaaacttgaatctgatgggaggggccagagcgcattccataaaacatcacatctatcatcaacattagctccatcagcaatgagggattcctcttgtccatcacaatctttatgaaaagacccccctcggctgcccagttctgtgttgtacctgagatcttccaagaggcagcacgtacagaggttaagt

SEQ ID NO: 501824 - DNA, 497 bp, Homo sapiens
aggagctgggtgcagatgtggtcactgactgctgggctcagatactgaacagactgtgtatggcaagagtccagaggggagagtgctctggaacctggaggagagaaaccccttctggyggcagtgttcttccaacatcttctgctaacaagggtccacattgtgccagctagcaaaggggaaatacagggccagctccgttgacccagaacaatgaagggtgaatttggagcagagaggcaataaattgataactgacacagatcatggcattttacagggaacattgggctctaggcccagcatggggacatatggcctcagacaggtctcattctctgagcctcaactctcatggctacaaaatgggatcttatatacttatctttcaaggccgggatcaaataagacagagggtggaaattgtcatgaataacaggagtcacagcttcaatatgtataatgacacctatttcactgacaattttaaagtaatt

SEQ ID NO: 501825 - DNA, 620 bp, Homo sapiens
ctaggaaacgtatatacaaatgaactggaaatcacacctaaaaagcctacaattaaatagcagagggacaacaaacagcatgctaaataaagaaagatttcaaagactagggaagtgcaaatgaaggaaaaatgttttgactggagatgaaggtattaattattaagaaaagaggccgggcgcagtggctcacgcctgtaatcccagcactttgggaggccgaggtgggcggatcacaaggtcaggagattgagaccatcctggctaacacggtgaaaccccgtctctactaaaaaatacaaaaaattagccgggcgtggcagtgggcacctgtagtcccagctactcaggaggctgaggcaggagaatggcatgaacccaggaggcaggagaatggcatgaacccaggaggygagatcgccactgcactccagcctgggcgacagagcaagactccgtctcaagaaaaaaaaaaagaaaaaagaaagaaaaaaaaaaaaagaaaaggctgcatagggtgggtatctggaaatattcttacaggcctagaaagacatcacagtttgatgtcagcaatgagaaaagggaagaaggcatgaattataaaactaatctggtgg

SEQ ID NO: 501826 - DNA, 620 bp, Homo sapiens
ctaggaaacgtatatacaaatgaactggaaatcacacctaaaaagcctacaattaaatagcagagggacaacaaacagcatgctaaataaagaaagatttcaaagactagggaagtgcaaatgaaggaaaaatgttttgactggagatgaaggtattaattattaagaaaagaggccgggcgcagtggctcacgcctgtaatcccagcactttgggaggccgaggtgggcggatcacaaggtcaggagattgagaccatcctggctaacacggtgaaaccccgtctctactaaaaaatacaaaaaattagccgggcgtggcagtgggcacctgtagtcccagctactcaggaggctgaggcaggagaatggcatgaacccaggaggcaggagaatggcatgaacccaggaggcgagatcgccactgcactccagcctgggygacagagcaagactccgtctcaagaaaaaaaaaaagaaaaaagaaagaaaaaaaaaaaaagaaaaggctgcatagggtgggtatctggaaatattcttacaggcctagaaagacatcacagtttgatgtcagcaatgagaaaagggaagaaggcatgaattataaaactaatctggtgg

SEQ ID NO: 501827 - DNA, 654 bp, Homo sapiens
tctgcctagcatgacttcctttgttgaaggttacaatcaagggctcccccaaaaatctattttaggttggagtcacgtagacatgaatggaaagtggcaggaagactgttccccactgctgacaccaggcccacaaaccagctattggcaaagagttgcagttttgaaaagctcaaactccaaagtagatacgggcatgtgattccgtggtcaggagacactgaggtcactgtgcaggccaaagattcagagaggaagcaaaactacagaaatgaaagctcctttctaaagacttgtgaagaaacaagtggagtttcgctgtgttgtcaagtttgtgccctctctttgcctgtgcgtggacaggtctgacatccatggttcggcagctccccccgcccccctgcaccctgccctcaagtccttytggggagggaactggcctgtgggggcgtccactcaaggtaagcaaacaaccctcttaaatcatgccctgacagcaggccaagaaccacgcagatagggggacagaaagagaaagaaaaacaacctggccgaatgacctggtcaaattatgcctgaaagtccctgtgaaagttttgctctctgaaattttgcctcaagatctggatttcttgaaagatggctgcatctggg

SEQ ID NO: 501828 - DNA, 483 bp, Homo sapiens
aacaggtatggagtctcagcttggggagataaaaaagttcagggaaactgttagacaacgtgaatacacttaacatgactgaactatatactttaaaatggttaagacagtaaaktttgttatgtgtttttcatcacaattttaaaaatttttaaaaggcggtgggggtgggagggggacaactgtgaaaacagatactacaagagcacagagaaaagtgtggctaggccaggcacagtggctcatgcctgtaatccctgcactttgggaggctgagacgagaggattgcttgagcccaggagatcgagaccagcctgggtaacaaagtgaaacgcccatctgtacaaaaaaaaaagaaaagaaaagtgtgggtagaagcagacgtagcacacggaagaagagtctacatgatgaggggaagctggccgttacctgggctgggcttcacaagaagagtggagggcagaggagacagggtgtgc

SEQ ID NO: 501829 - DNA, 483 bp, Homo sapiens
aacaggtatggagtctcagcttggggagataaaaaagttcagggaaactgttagacaacgtgaatacacttaacatgactgaactatatactttaaaatggttaagacagtaaagtttgttatgtgtttttcatcacaattttaaaaatttttaaaaggcggtgggggtgggagggggacaactgtgaaaacagatactacaagagcacagagaaaagygtggctaggccaggcacagtggctcatgcctgtaatccctgcactttgggaggctgagacgagaggattgcttgagcccaggagatcgagaccagcctgggtaacaaagtgaaacgcccatctgtacaaaaaaaaaagaaaagaaaagtgtgggtagaagcagacgtagcacacggaagaagagtctacatgatgaggggaagctggccgttacctgggctgggcttcacaagaagagtggagggcagaggagacagggtgtgc

SEQ ID NO: 501830 - DNA, 625 bp, Homo sapiens
cacccgtgcttcctacgtgccggcactcagctaagtgctgggggcacaatactggcgaggagcagcccctgccctctgcatctgtcctctcccctcaacaagcagaacaactcagtaaaaagggaagaacaggaggaagtacawgatgtcctggaagcacagagatggagtctccttcccacctaaagcagacagggcaggcttctctgaggatgcaatggccaagtggaagctggaagaccaggaattaccattataaattgagggaacaggggcagagttgggagaaaaaggaagaagtgcttgagcagggggcagcaagtgaaaaccacggacagaaacactaagaagagccaaaggcagtttcatcgatcagaagacaggtttggggcaggataagaaggctagagagggaggcagtggtgagaaaacagggagctccgtgagcccctggaaggatgagctggtttgaacctagatctgaaggttctgctcttttcttttcttttttttgagacggagtctcactctgtcacccaggctggagtgcagtagcacaatctcatctcactgcaatctcggcctcccgggttcaagcaattctcctgcctcagcttcccgagca

SEQ ID NO: 501831 - DNA, 625 bp, Homo sapiens
cacccgtgcttcctacgtgccggcactcagctaagtgctgggggcacaatactggcgaggagcagcccctgccctctgcatctgtcctctcccctcaacaagcagaacaactcagtaaaaagggaagaacaggaggaagtacatgatgtcctggaagcacagagatggagtctccttcccacctaaagcagacagggcaggcttctctgaggatgcaatggccaagtggaagctggaagaccaggaattaccattataaattgagggaacaggggcagagttgggagaaaaaggaagaagtgcttgagcagggggcagcaagtgaaaaccacggacagaaacactaagaagagccaaaggcagtttcatcgawcagaagacaggtttggggcaggataagaaggctagagagggaggcagtggtgagaaaacagggagctccgtgagcccctggaaggatgagctggtttgaacctagatctgaaggttctgctcttttcttttcttttttttgagacggagtctcactctgtcacccaggctggagtgcagtagcacaatctcatctcactgcaatctcggcctcccgggttcaagcaattctcctgcctcagcttcccgagca

SEQ ID NO: 501832 - DNA, 647 bp, Homo sapiens
gactaatccaggactcagcaaagggcaggctcctgatgatgacaggtttgctgggggttctaagraaagtttcctcatctgaacttctaaaaatgatctgctcttcttctggattttttggtgtgaataaaatcctggagctgcagtagcctcttgctgctggtctaaggagaaaaccaatgcgtggaaagtgcaaagccaggagaatcacaaaaacaggaagccagaaccttggaacggcagccccaaagcccaccctccttctgaacttccagtcatgtgagcccaaaatctccagaccacagaagctactccgagttatttttacagcccatagcatcctatggtacctacgtcaggccacacaaataaagactacacttctaaacatttttacaagttataaaacttcagaaaatagaaggcatgtgactttctctgggggcagaaggggcctttttttagcaaaaggggaaacctacaagcaaccaagaaaaatacccaccgttgatgatataaaaatttaaaatcccaaatgccaagagacatcataagcacaatcaaaggacagaggacagacttgaaacaatactggcaacacatgtcacaaaaacaaacagactttctgtgcaaaagcttcattacat

SEQ ID NO: 501833 - DNA, 647 bp, Homo sapiens
gactaatccaggactcagcaaagggcaggctcctgatgatgacaggtttgctgggggttctaaggaaagtttcctcatctgaacttctaaaaatgatctgctcttcttctggattttttggtgtgaataaaatcctggagctgcagtagcctcttgctgctggtctaaggasaaaaccaatgcgtggaaagtgcaaagccaggagaatcacaaaaacaggaagccagaaccttggaacggcagccccaaagcccaccctccttctgaacttccagtcatgtgagcccaaaatctccagaccacagaagctactccgagttatttttacagcccatagcatcctatggtacctacgtcaggccacacaaataaagactacacttctaaacatttttacaagttataaaacttcagaaaatagaaggcatgtgactttctctgggggcagaaggggcctttttttagcaaaaggggaaacctacaagcaaccaagaaaaatacccaccgttgatgatataaaaatttaaaatcccaaatgccaagagacatcataagcacaatcaaaggacagaggacagacttgaaacaatactggcaacacatgtcacaaaaacaaacagactttctgtgcaaaagcttcattacat

SEQ ID NO: 501834 - DNA, 640 bp, Homo sapiens
caatacagcaagctggattcctgcctaaggcaaagacattccatttagtttactttgtggccttgtgacagatactaaatggatggttacttagatgttttctgactgtttttcaatggcttgtgggttcctctgggtccttgggcctccaggaggggccactgccgcacacacacacctggaaggatcctgtatccatagacccctgcgcttctgcctccttaaaaaaaaggaggggaccggaagtgcccacaacggggaattctgagacttgtcttccggcacaagtttggtcatgggctggctgtgtgctgttgggccattcacccaactgctctgaccttagcattctcatctgtaaaatggtttggcctggatagcttcaggtgtccaagactggaccagcagctacggaatcacatattggaggaaaatgactcaccyctctctctgggcctcacacactctcattggtacagatgacacctcagggccccaagatttgaaaatgctctttctggagactcaagattgatgtcttggccaagtgcggtggctcacacctgtaatcccagcacctcgggaggctgaggtgggtggatcacctgaggtcaggagtttgaggccatccatggccaac

SEQ ID NO: 501835 - DNA, 486 bp, Homo sapiens
ggccaagtgcggtggctcacacctgtaatcccagcacctcgggaggctgaggtgggtggatcacctgaggtcaggagtttgaggccatccatggccaacatggcggaaccccatctctactaaaaatacamaaaattagctgggcgtggtgacaggcgcctgtaatcccagctactcgggaggccgaggcaggagaattgtttgaacccaggaggcggaggttgcagtgagccaagatcatgccattgcactccaacctgggcaacagtgcgagactctgtctcaaaaaaaaaaaaaaaattggtgtctcgagtctcaaatagaaagcagtgtcttcattgtgacccagttaatgaggtttaaaaaaatgattccagaatcatacatccaaagagcattgttcctcaaagtagccttggaaactgaatttctcccagaagacaagctgctaatgactgggaagttagcacccctaagtttccaaca

SEQ ID NO: 501836 - DNA, 508 bp, Homo sapiens
tgtagccccgaagcaactgaaaacctgtcagaaaacccacccagcacacaggtgtgcagaggcagcagtgatgctcaccagccttggaggcttccagggaaccaggggaagcagagaagccccactccacctccctcacctgaaccaggttggccactcacaggtccttccccgtgctgcccacctgccaatcatctatgcaaaccaggtactgcaggcccagcccacgcaagctgctctccataggcctgaagacacctatgagtggaatattgtacaaggtcagccacagcaaccccacatcctgcagacaaaatgactactgtacacttgaaayagcagacactacgaaggccctcagcagttattttttgttgtcgttgttggttgtaaacaagacaatttagtcaatattctggaaagttctgaaagcttttactccccatttctgttactgacttgctcagatgctgacagagccaatgcattcaccacgtctgcatcggat

SEQ ID NO: 501837 - DNA, 445 bp, Homo sapiens
ttgttaacttgacagggtgaagctgtaatttttcaaaaacagtaaaagctggtttctcctaaactattttccttgtggtagtagagatcagtgggtcagaaacaactcctgaccacttggtttccttttgagccgcgtcatwaggaggcaatctgtaaaactagcacaggtctcccgctgttccactggctcacccacatgattagcagagtgcacgaaaaaataaaacttctattaaagaatcatgctgagcacaagatcagagaggttgtgacattgcaaactcgatagatgcagggggcctgggagactggcgttctccaaagggctcccaacaccgtctctcctctgatttctgtgacaaatgtggaaagctacttgcttggaggtactgggggaactgatgggggaactttcatcctgttaggaactccgctttccattc

SEQ ID NO: 501838 - DNA, 578 bp, Homo sapiens
aacttaaaatcatttatggggatttggattcaaaacataggcagatgcgcacacatgtgtgcgcacacacacacacgaactgatctgtgaacaaaataatttacaattcaatattaaagtttttggtacagaagatatataccgaaggaattggagggagaaaagagagatcagtgaggggtgaagttgttaaaaaggtcctctaggccatgtgyggtggctcacgcttgtaatcccagcactttgggaggccaagatgggaggatggcttgagcccaggagttcaataccatcctgggaaacatggtgaaaccctgtctctacaaaaaatacaaaaatgagctgagaatggtggcatgtgcctgtagtccctgctactcaggaggctacagtgagagcccaggaagctcagggctgcactgtactccagcctcggtgacagagaccctgcctcaaaaaaataaataaataaataaaaataaaaataaaaaaataaaaaaaagattctttaatgaatactgaaggaggtacaaaaggcctgaacagacatatataataaatgtgaatactgcactgat

SEQ ID NO: 501839 - DNA, 546 bp, Homo sapiens
ggtatggtggcacgcacctatcccagcgactcaggaggctgaggcaggagaattgctcgaacctgggagatggaggttgcagtgagccaagaccacatcgttgcactccagcctgggcaccagagtgaacctccatctcaaaaaaaaaaaaaaaaacaaatttttttaaaagagagtatagggccaggcgcagtggctcacgtctgtaatcctggcactttgggaggccaaggtggctagatcacggggtcaagagatcgagaccatcctggccaacatggtgaaaccccatctctactaaaaatacaaaaaattagctgggcgcgatggcgcacgcctgtagtytcagctactttggaggctgaggcaggaggatagtttgaacccgggaggcagaagctgcagtgagctgagatcacaccactgcactccagcctgacttcatctcaaaaaaaaaaaaaaaaaaaaaaaaaggagtataaaaaaatctttacagactaatgacaatatagaaaaaatacagaaaaaatagaaaagtctccattt

SEQ ID NO: 501840 - DNA, 546 bp, Homo sapiens
ggtatggtggcacgcacctatcccagcgactcaggaggctgaggcaggagaattgctcgaacctgggagatggaggttgcagtgagccaagaccacatcgttgcactccagcctgggcaccagagtgaacctccatctcaaaaaaaaaaaaaaaaacaaatttttttaaaagagagtatagggccaggcgcagtggctcacgtctgtaatcctggcactttgggaggccaaggtggctagatcacggggtcaagagatcgagaccatcctggccaacatggtgaaaccccatctctactaaaaatacaaaaaattagctgggcgcgatggcgcacgcctgtagtttcagctactytggaggctgaggcaggaggatagtttgaacccgggaggcagaagctgcagtgagctgagatcacaccactgcactccagcctgacttcatctcaaaaaaaaaaaaaaaaaaaaaaaaaggagtataaaaaaatctttacagactaatgacaatatagaaaaaatacagaaaaaatagaaaagtctccattt

SEQ ID NO: 501841 - DNA, 545 bp, Homo sapiens
tggtgatctaccacctcatgtaacctttcccagtgagatcataaagcaaaaatgtaactgtgaaaccagtatcaatgagttttacacaatggttcctaaaagcacaagatgaggtgtctgcatactagggagytggttaaaatataaattcctgggtcccttaagcataggttgatagatgtcctctagcatacagtaactagcagccatcagctattatgaagataaatactttatttgtagaataaaattatttacatatatatacacgagattttattactaattatattgtgcaagtatttctgaatctgaaggtttctattaaagatttctccaatgatttttcataaatgagacagtcccacagaaaagtaagtgggctctgtgtataagaaagtattttaagatcacttgatgaaagaatctgtggttcaaagtacataaaatctagtgataaaaataaaactaagacattctactatcaagataataaaattttgtttgatgttaatatacaaagttgttcacacatatgtgatatt

SEQ ID NO: 501842 - DNA, 577 bp, Homo sapiens
ctgatattatggtgaattatggacacattattgttacaccttgacaggtcagtatgggtgtacctccatagtctataaaatttgtatttgaatttcagagttcttactagaatcgatcaggaagttattatagcattatggaacttcagtgaactcatttaatctgttgtccagcctagtttgttataattaggtgagaatacgttttatttttaaaacatctttagttcattagccgggcgtgttggcgggcgcctgtagtcccagctactggggaggctgaggcaggagaatggcgtgaacccgggaggcggagcttgcagtaagccgaggtagcgccactgcactccagcctgggggacagagcgagactctgtctcaaaaaaaaaaaaaaaaaaaaaaaaaaargaaactttagttttccttagtaatctgttcaagcatttgctatttaaccaaactcttgtaaacggtattttatcttgttctgtcatcagtacagatggagatcagccatgtttataatatcctgcaagacttattaaatgtttcccccattttatctaggcttacatag

SEQ ID NO: 501843 - DNA, 463 bp, Homo sapiens
gcatggtgctcattctgggtcttgggggcagtcaggtccgyacctccctgctacccccgcccccttgcccatcacaaaatgccttcctcttcctgggttcctgcaccctgcctgcccacgcctattgagaaagcctttccgccagggccaggactagagtgaaacatgtgaggcattcactggttgcaaaatttaagaagacactaaacctcagcaatcaagataaataatattttattttgtttatttatttttgagacagggcttggctctgtcacccagactggagtgcagtggcacaatcttggcttactgcaacctccacctcctgggctcaagccaacctcctacctcagcctcccaagtagctgggattacaggcacacgctaccacaccggctaatttttgtattttttggtagagatgaggcatgcccaccatggccagctaatttttataatt

SEQ ID NO: 501844 - DNA, 463 bp, Homo sapiens
gcatggtgctcattctgggtcttgggggcagtcaggtccgtacctccctgctacccccgcccccttgcccatcacaaaatgccttcctcttcctgggttcctgcaccctgcctgcccacgcctattgagaaagcctttccgccagggccaggactagagtgaaacatgtgaggcattcactggttgcaaaatttaagaagacactaaacctcagcaatcaagataaataatattttattttgtttatttatttttgagacagggcttggctctgtcacccagactggagtgcagtggcacaatcttggcttactgcaacctccacctcctgggctcaagccaacctcctacctcagcctcccaagtagctgggattacaggcacacgctaccacaccrgctaatttttgtattttttggtagagatgaggcatgcccaccatggccagctaatttttataatt

SEQ ID NO: 501845 - DNA, 421 bp, Homo sapiens
acacagccgagcgcgggtgcccgctgggggcacctcggagggtcaccgcgtcggggccaccgtgccgcaccaccgtccacgcggagtctgctgagcagaaacgggcaaaggagaggcatcactgggcggcagaggccagcagcaagaggcaaagcrgaccttttatgtgaattaacgtttaattgaaatttacattactgcatgtttgccgtgatttgaggagttggacctgtgtaacaatgtactgagccagaactcagcctctaagagaaagcatattggaagaactgatgaccaaacttttgcgacgtcacgcctaaaaatgtatcatgtaagcaatgactttttagttgttgaaaccatttttttatatcaacacaagcatggggccaaactgttactacctggacctttatctttt

SEQ ID NO: 501846 - DNA, 421 bp, Homo sapiens
acacagccgagcgcgggtgcccgctgggggcacctcggagggtcaccgcgtcggggccaccgtgccgcaccaccgtccacgcggagtctgctgagcagaaacgggcaaaggagaggcatcactgggcggcagaggccagcagcaagaggcaaagcggaccttttatgtgaattaacgtttaattgaaatttacattactgcatgtttgccgygatttgaggagttggacctgtgtaacaatgtactgagccagaactcagcctctaagagaaagcatattggaagaactgatgaccaaacttttgcgacgtcacgcctaaaaatgtatcatgtaagcaatgactttttagttgttgaaaccatttttttatatcaacacaagcatggggccaaactgttactacctggacctttatctttt

SEQ ID NO: 501847 - DNA, 654 bp, Homo sapiens
tgacctcagcatttctgagttttggtgttttcaatttataatataataggtggttggtttattttaaccaaacttaaaaagcaatgatgcctgcaaagcctctgattggaccaaaagtcaccatttatactctgacattgaggccaggcacgstaactcacacctgtaatcccaacaatttgggaggccaaggtgagaggatcactttagcccaggagttcgagaccagcctgggcaacatagcaacaccccatctctacaaagaataattgtaaaaagaaaaacaaataagctgaacggtggagtgggcctatagtctcagctacttgggaggatcaaggctacagttagctgtgatcatgccactgcactccagcgtgggcgacagagtgagaccctctctctaaaaagaaaaaagaaaaaaaattatgatgttttattcttttctctccctaggtgtgatagcagtggtgatatttattttgctttgcatcactgccatagccatacgcatctatcaacagagaaagttacgcaaagaaaatgagtcaaaagtctcaaaaaaagaagagtgctaggacagctctaaacagtgagctcgatgtgcaaaacgcagtccatgaaaaccagaaagagcgagtcttctgattggca

SEQ ID NO: 501848 - DNA, 654 bp, Homo sapiens
tgacctcagcatttctgagttttggtgttttcaatttataatataataggtggttggtttattttaaccaaacttaaaaagcaatgatgcctgcaaagcctctgattggaccaaaagtcaccatttatactctgacattgaggccaggcacgctaactcacacctgtaatcccaacaatttgggagrccaaggtgagaggatcactttagcccaggagttcgagaccagcctgggcaacatagcaacaccccatctctacaaagaataattgtaaaaagaaaaacaaataagctgaacggtggagtgggcctatagtctcagctacttgggaggatcaaggctacagttagctgtgatcatgccactgcactccagcgtgggcgacagagtgagaccctctctctaaaaagaaaaaagaaaaaaaattatgatgttttattcttttctctccctaggtgtgatagcagtggtgatatttattttgctttgcatcactgccatagccatacgcatctatcaacagagaaagttacgcaaagaaaatgagtcaaaagtctcaaaaaaagaagagtgctaggacagctctaaacagtgagctcgatgtgcaaaacgcagtccatgaaaaccagaaagagcgagtcttctgattggca

SEQ ID NO: 501849 - DNA, 654 bp, Homo sapiens
tgacctcagcatttctgagttttggtgttttcaatttataatataataggtggttggtttattttaaccaaacttaaaaagcaatgatgcctgcaaagcctctgattggaccaaaagtcaccatttatactctgacattgaggccaggcacgctaactcacacctgtaatcccaacaatttgggaggccaaggtgagaggatcactttagcccaggagttcgagaccagcctgggcaacayagcaacaccccatctctacaaagaataattgtaaaaagaaaaacaaataagctgaacggtggagtgggcctatagtctcagctacttgggaggatcaaggctacagttagctgtgatcatgccactgcactccagcgtgggcgacagagtgagaccctctctctaaaaagaaaaaagaaaaaaaattatgatgttttattcttttctctccctaggtgtgatagcagtggtgatatttattttgctttgcatcactgccatagccatacgcatctatcaacagagaaagttacgcaaagaaaatgagtcaaaagtctcaaaaaaagaagagtgctaggacagctctaaacagtgagctcgatgtgcaaaacgcagtccatgaaaaccagaaagagcgagtcttctgattggca

SEQ ID NO: 501850 - DNA, 592 bp, Homo sapiens
gtggctgtctctatcatcgtgactgtggacttccctgctgttgccatcagggtgcacacagcaggtgcagtgctgtcacctggctgaagacctgcagcctcggagcctctgggaggtccctttctccctyggtgaaacacagtcctccacatcaatttccaaacaatgaattaggtatggccattcatcactgttcagtagtttccccgtccaaaggctctcttccaaaactgaagtttgatctgtgttaataattgtggggttttagatgagaaaatgactataaagctgtggccctactttattttttaaaaatgacagaacttttgttcagatgtaaaagacaaaattgcactttaatgttttttgttacttgaaaacatatctgggatccctttttttggtcctctgctgatatttataaaacaagaaatgcttcttggactaccttcactggcatttccatagtcctggaatccagagccaagtggcctatctaaaattcacagcccttttattctcctgtgtgatggttaatacaacacagttgaagcctggaaacactaccattatttttggtgtattgcttttt

SEQ ID NO: 501851 - DNA, 592 bp, Homo sapiens
gtggctgtctctatcatcgtgactgtggacttccctgctgttgccatcagggtgcacacagcaggtgcagtgctgtcacctggctgaagacctgcagcctcggagcctctgggaggtccctttctcccttggtgaaacacagtcctccacatcaatttccaaacaatgaattaggtatggccattcatcactgttcagtagtttccccgtccaaaggctctcttccaaaactgmagtttgatctgtgttaataattgtggggttttagatgagaaaatgactataaagctgtggccctactttattttttaaaaatgacagaacttttgttcagatgtaaaagacaaaattgcactttaatgttttttgttacttgaaaacatatctgggatccctttttttggtcctctgctgatatttataaaacaagaaatgcttcttggactaccttcactggcatttccatagtcctggaatccagagccaagtggcctatctaaaattcacagcccttttattctcctgtgtgatggttaatacaacacagttgaagcctggaaacactaccattatttttggtgtattgcttttt

SEQ ID NO: 501852 - DNA, 592 bp, Homo sapiens
gtggctgtctctatcatcgtgactgtggacttccctgctgttgccatcagggtgcacacagcaggtgcagtgctgtcacctggctgaagacctgcagcctcggagcctctgggaggtccctttctcccttggtgaaacacagtcctccacatcaatttccaaacaatgaattaggtatggccattcatcactgttcagtagtttccccgtccaaaggctctcttccaaaactgaagtttgatctgtgttaataattgtggggttttagatgagaaaatgrctataaagctgtggccctactttattttttaaaaatgacagaacttttgttcagatgtaaaagacaaaattgcactttaatgttttttgttacttgaaaacatatctgggatccctttttttggtcctctgctgatatttataaaacaagaaatgcttcttggactaccttcactggcatttccatagtcctggaatccagagccaagtggcctatctaaaattcacagcccttttattctcctgtgtgatggttaatacaacacagttgaagcctggaaacactaccattatttttggtgtattgcttttt

SEQ ID NO: 501853 - DNA, 477 bp, Homo sapiens
gaaccattcacattgcagaggattggyatatgtgacagctatattttatcaacactattagtgagatcattagacatttttatccattccttcagtttcacttctcggtggagttagagagcttgtaattgggacagaagtcctccagggtccactcaaaaccagatcgcaggatacccgctgattggaagcagcactgcgcacctcccccgcggccaggcttccaggagcccactcccggttttcctcactgctgttctcacttctggggctctctcatcacaggctccttgtttataacccggtctggctcatctgttcttgcactccatttatttaaaggtgatagctctggaagtctttcctttagtttgcttacttactgttttatcactgttgtttatttttccccttgggaaaaatatattttgctatattgcttttgaaactattctaacgtaggagctacacagatta

SEQ ID NO: 501854 - DNA, 477 bp, Homo sapiens
gaaccattcacattgcagaggattggcatatgtgacagctatattttatcaacactattagtgagatcattagacatttttatccattccttcagtttcacttctcggtggagttagagagcttgtaattgggacagaagtcctccagggtccactcaaaaccagatcgcaggatacccgctgattggaagcagcactgcgcacctcccccgcggccaggcttccaggagcccactcccggttttcctcrctgctgttctcacttctggggctctctcatcacaggctccttgtttataacccggtctggctcatctgttcttgcactccatttatttaaaggtgatagctctggaagtctttcctttagtttgcttacttactgttttatcactgttgtttatttttccccttgggaaaaatatattttgctatattgcttttgaaactattctaacgtaggagctacacagatta

SEQ ID NO: 501855 - DNA, 639 bp, Homo sapiens
ctgatgtgtgtgcatatctgtaatccactttatggggggataaagttttgtttgggctcatgtcggaactgacggagttgtctcttcattagaaactggatggtctagtttaaaactacactgtaaagacgtgatgtggccttagttatggcatttaaatagtgggtttaactcatcaaatttccctaataatataacactaatatatttagctagtccacagaaacacatatttttgtagattttcttttttttttttttttttcggagatggggtctcattctgtgtcccagtctgtaatctgtagtgcaaaggtgcaatcacacccattgcagcctcaacttcccaggctccggtgatcctcccacctcaractcctgagtggctggaaccacaggtgcatgccaccatgcctggctaatttttttttctttgtagaggtggagtctcactatgttgcccaggctggtcttgaactcttgggctcaagtgatcctcccaccttgacctctcaaactgctgggattacaggtgtgagccaccacacctggacatgtagatgttcaataacaagaaatgtaaacagtaaagatatagtattagagacaattatctattttttaagacctccagacagc

SEQ ID NO: 501856 - DNA, 484 bp, Homo sapiens
agctgtatatttcttgacctcatcatttaggtgggtagctgcctgctacaacagagargcagggcttcttgccacagaggagtgcttgttagttgactaatgaattctggcaactgattttcccaagaaaatacatttttaaatgttttccttttatatattggaacaactattttcctgtttttatacagaacacatagaattgtagtaattcttaaaatggaattcccataattaacattatatatccatatgcacaatttggaatgaattgtctttttgtttttgtgtgaaacttacacattttaataacctcattcaatgtaattagtaaatagttttcttgaggatgatgtccagaacccagagacaccagcttaactgtggttctccttattggctatactcaataattccatcagtgaacccatcagtaattcagaataacatggaatgtatatgaaaacctgtgtctattgtcctc

SEQ ID NO: 501857 - DNA, 634 bp, Homo sapiens
tgacctcatcatttaggtgggtagctgcctgctacaacagagaagcagggcttcttgccacagaggagtgcttgttagttgactaatgaattctggcaactgattttcccaagaaaatacatttttaaatgttttccttttatatattggaacaactattttcctgtttttatacagaacacatagaattgtagtaattcttaaaatggaattcccataattaacattatatatccatatgcacaatttggaatgaattgtctttttgtttttgtgtgaaacttacacattttaataacctcattcaatgtaattagtaaatagttttcttgaggatgatrtccagaacccagagacaccagcttaactgtggttctccttattggctatactcaataattccatcagtgaacccatcagtaattcagaataacatggaatgtatatgaaaacctgtgtctattgtcctcaaatagtcttgtctctttgtgtcataaggcccaactcactcttcctcacttcaatgacagtgtctttggaaatagccccatagaagttagggtgaggaggagggattcttctgaacaccaaggactggcagataaaaggtagcttaatattcagaacgtgttag

SEQ ID NO: 501858 - DNA, 316 bp, Homo sapiens
caataaccaggtcttttttctttttcctgttgagcagcacttaaatgtcagtttctccatggacagaaactttaggtagagggctgttccatttatctccttcctcttttcatttctttttcatcttgtcaaaggaaactgcgctctgtggagccttgttatcactcttccctttggtgtttcctttttcatgtatcttgatggtatttttcatttttatgatctcagcagggtgctgttcatagtaaaacttacacttcaaacccawctttttttttttttctcctttaccttcttggaaagttcatgggcttca

SEQ ID NO: 501859 - DNA, 493 bp, Homo sapiens
tttttccccttttctcatgctaacctaagtgatgtattcattgtgtggtctggtgacacacagtcagagatattttcaggttttggtcctgcaacccatgagccaactcctccagcacataacaggaaagaaaacatgttyccaacaatacaaataaatattcccatgatgtgctgctgagatacactgacaactaaacatgagctttccctttaacccaacttagatatttcaaactttaaacattgaaagaagtttattaactgatttggaagtatttccagttgattagggaatagatcattagggactgccattgcaaaatgattggtctcctgtggataacaacaccaaaaacacgtgagacatatgaattctgatttccatgtaaaaatagaaagttactttatttcatataaaaatgaaacaatgatgtcccatgaggcatatttactttataactttttatgcataataaaaattactatattag

SEQ ID NO: 501860 - DNA, 482 bp, Homo sapiens
tttctcatgctaacctaagtgatgtattcattgtgtggtctggtgacacacagtcagagatattttcaggttttggtcctgcaacccatgagccaactcctccagcacataacaggaaagaaaacatgtttccaacaatacaaataaatattcccatgatgtgctgctgagatacactgacaactaaacatgagctttccctttaacccaacttagatatttcaaactttaaacaytgaaagaagtttattaactgatttggaagtatttccagttgattagggaatagatcattagggactgccattgcaaaatgattggtctcctgtggataacaacaccaaaaacacgtgagacatatgaattctgatttccatgtaaaaatagaaagttactttatttcatataaaaatgaaacaatgatgtcccatgaggcatatttactttataactttttatgcataataaaaattactatatta

SEQ ID NO: 501861 - DNA, 618 bp, Homo sapiens
ctaatatttgagctatttttttttagttgactaacaaagttttcttcccgaaaaggttttttctggattattgcaacctatacatttctttttctcattctatgtttactattactctccaacagcagtattgrtcttctaaggcatgtgaagtacagttcctggaatgtttccctcaggcaaatagaatagtaaaaaacttatcaagtaaaagagacataaagcaatgaccttgaaactcttttgttctttagctaataccttgattttttctttattgtaatcgctagtgcttgtatctagaaatttaagaatatacttatagctcattatgcatattttaaaataaaagcagattaatgaattgtaaatccaaactttctaaaaatcataaaacattctatgatttatgaagtcaatacataaaaatatgaaacaaaaaatgatgtttgggatggaaagcattgagttcaataagtcaacagtaatgagcccaccaagatcagcactggagagggacaactcccatgtagtccctcttgaataagatcctcccactggagaagcaaaatttcaagtcttggtctttagaagtaatgctaaaaggtaaactctctt

SEQ ID NO: 501862 - DNA, 468 bp, Homo sapiens
ttctgtttatcaggccaagcatcctgtgggtagaagttcagcctttcagaacccaaaagtcactcactggactcaggcatgactaaagattccrtcatatgaaaagcaagggaagataacccaactcttctgtagactcagtcccttcatccacagcatgaagcgattgaatgaggagacctatgatgtcatctggcctcgacaggctatgatgaaataactttaaattgggaaattctctgatttgaaaaggggattttctgctctgacataagcctgccagacacttttgtttaagttgggacactttcctcatgccaaatgcctgccatgtaggtattacaccattgtaatagacagagctgcatgcagacatcctagagaaacaggtcatgctgaagctggcctacctcaagaggttctactgtgactgtcacagtagatacgggcatgggacctggacaggga

SEQ ID NO: 501863 - DNA, 468 bp, Homo sapiens
ttctgtttatcaggccaagcatcctgtgggtagaagttcagcctttcagaacccaaaagtcactcactggactcaggcatgactaaagattccgtcatatgaaaagcaagggaagataacccaactcttctgtagactcagtcccttcatccrcagcatgaagcgattgaatgaggagacctatgatgtcatctggcctcgacaggctatgatgaaataactttaaattgggaaattctctgatttgaaaaggggattttctgctctgacataagcctgccagacacttttgtttaagttgggacactttcctcatgccaaatgcctgccatgtaggtattacaccattgtaatagacagagctgcatgcagacatcctagagaaacaggtcatgctgaagctggcctacctcaagaggttctactgtgactgtcacagtagatacgggcatgggacctggacaggga

SEQ ID NO: 501864 - DNA, 566 bp, Homo sapiens
tgaagaaattctctgacctaccttgtttgatagcagatcacaagaccctggttccagagcggtcctgctttacaccgarggaaaggaatgtcatacagaaaggccaagaagaatctgaagagatgtccaatcacctttgcacgtggctgcccattcttcattgaacctaagcattaaaatagacagtttcccctgggtctttgggtcttcatttctgaagactccatgtcatgtaaaactttgattaaatgaatgtatcatgcattacttttgctaacctgtcttttgttataggagtgtcgcctgtgacctttatgatgggtaaggaaagatttcacatctttttacccctacattatcatactgtgaaattttattatatgctgtcttgccctcatagaaagagaattttggagtttgaaagaatcctgctaatcatgaaatctggtcctttatttaacagaaaaattcccagagacatgaaatgattagtactgtttcacagagaagcagagggagagccagaccctcagtcagtccaggctctgctgtctttggaggtgggg

SEQ ID NO: 501865 - DNA, 566 bp, Homo sapiens
tgaagaaattctctgacctaccttgtttgatagcagatcacaagaccctggttccagagcggtcctgctttacaccgagggaaaggaatgtcatacagaaaggccaagaagaatctgaagagatgtccaatcacctttkcacgtggctgcccattcttcattgaacctaagcattaaaatagacagtttcccctgggtctttgggtcttcatttctgaagactccatgtcatgtaaaactttgattaaatgaatgtatcatgcattacttttgctaacctgtcttttgttataggagtgtcgcctgtgacctttatgatgggtaaggaaagatttcacatctttttacccctacattatcatactgtgaaattttattatatgctgtcttgccctcatagaaagagaattttggagtttgaaagaatcctgctaatcatgaaatctggtcctttatttaacagaaaaattcccagagacatgaaatgattagtactgtttcacagagaagcagagggagagccagaccctcagtcagtccaggctctgctgtctttggaggtgggg

SEQ ID NO: 501866 - DNA, 566 bp, Homo sapiens
tgaagaaattctctgacctaccttgtttgatagcagatcacaagaccctggttccagagcggtcctgctttacaccgagggaaaggaatgtcatacagaaaggccaagaagaatctgaagagatgtccaatcacctttgcacgtggctgcccattcttcattgaacctaagcattaaaatagacagtttcccctgggtctttgggtcttcatttctgaagactccatgtcatgtaaaactttgattaaatraatgtatcatgcattacttttgctaacctgtcttttgttataggagtgtcgcctgtgacctttatgatgggtaaggaaagatttcacatctttttacccctacattatcatactgtgaaattttattatatgctgtcttgccctcatagaaagagaattttggagtttgaaagaatcctgctaatcatgaaatctggtcctttatttaacagaaaaattcccagagacatgaaatgattagtactgtttcacagagaagcagagggagagccagaccctcagtcagtccaggctctgctgtctttggaggtgggg

SEQ ID NO: 501867 - DNA, 547 bp, Homo sapiens
  misc_feature (1)...(547): n = A,T,C or G
ggaggcaggccttgggccatagtctcctgcatccctccagagcctgcagcaggagctgggcccaaggatgctgckgagtgagtccacatgactgacatacactgctctggaagcaccattccggcagactaaccctcttcttcccatgtaatccaagaagggtgttatagatagtccagatttttctagataatcttgtaacatattcacattcaacatacatnnnnnnnnnnnnnnnnnnnnnnnnnnnnnnnnnnnnnnnnnnnnnnnnnnnnnnnnnnnnnnnnnnnnnnnnnnnnnnnnnnnnnnnnnnnnnnnnnnnnaggccagcaaaatgttttcgatctcaggggttaaatggattcaaaacagaaatcagtaaagctgtcattgcagatttctgtaatagagaggcaagtataacaattgattaagaactctatccctttatatctatagaacatataaggcccctggatacccctggacctcaacgctccacattccccatttcagaaatccaggaggacgtgtggcaccgtgaggg

SEQ ID NO: 501868 - DNA, 547 bp, Homo sapiens
  misc_feature (1)...(547): n = A,T,C or G
ggaggcaggccttgggccatagtctcctgcatccctccagagcctgcagcaggagctgggcccaaggatgctgctgagtgagtccacatgactgacatacactgctctggaagcaccattccggcagactaaccctcttcttcccatgtaatccaagaagggtgttatagatagtccagatttttctagataatcttgtaacatattcacattcaacatacatnnnnnnnnnnnnnnnnnnnnnnnnnnnnnnnnnnnnnnnnnnnnnnnnnnnnnnnnnnnnnnnnnnnnnnnnnnnnnnnnnnnnnnnnnnnnnnnnnnnnaggccagcaaaatgttttcgatctcaggggttaaatggattcaaaacagaaatcagtaaagctgtcattgcagatttctgtaatagagaggcaagtataacaattgattaagaaytctatccctttatatctatagaacatataaggcccctggatacccctggacctcaacgctccacattccccatttcagaaatccaggaggacgtgtggcaccgtgaggg

SEQ ID NO: 501869 - DNA, 547 bp, Homo sapiens
  misc_feature (1)...(547): n = A,T,C or G
ggaggcaggccttgggccatagtctcctgcatccctccagagcctgcagcaggagctgggcccaaggatgctgctgagtgagtccacatgactgacatacactgctctggaagcaccattccggcagactaaccctcttcttcccatgtaatccaagaagggtgttatagatagtccagatttttctagataatcttgtaacatattcacattcaacatacatnnnnnnnnnnnnnnnnnnnnnnnnnnnnnnnnnnnnnnnnnnnnnnnnnnnnnnnnnnnnnnnnnnnnnnnnnnnnnnnnnnnnnnnnnnnnnnnnnnnnaggccagcaaaatgttttcgatctcaggggttaaatggattcaaaacagaaatcagtaaagctgtcattgcagatttctgtaatagagaggcaagtataacaattgattaagaactctatccctttatatctatagaayatataaggcccctggatacccctggacctcaacgctccacattccccatttcagaaatccaggaggacgtgtggcaccgtgaggg

SEQ ID NO: 501870 - DNA, 619 bp, Homo sapiens
ttaggaactcaggatgagcaagtggaactgaggactttgcatctctgtttccttgaagacccagggatgggcgaaatattcctgaggagaagttgctcagaaacgtcagtagagatatacagaaagaaaactctaaaagttaaaaacaaatargaaaaaaaacgcttttcagattctgtgatgttctaattataacaggttagaggtcaataaaacggcatggcctttgaaattcacagagggtgattcttcagtaaagacagatgatttttaatatggcagaggcagttgagaagtgttagaatatgccatcccttagacattgttcttacacttaaatgtctaccagaagcatgaggaaggttggttacaagagactcggggccccatctccagcgattctgatttagtaggtttgggtaaggcctgagagtctttacttgcaacaggttcccaggggctgtgggtgctgctggtgcatggaccaccaatcaggcatcctggagccaaggctgtggagccaacctccttagctcaactcctcatcttcccacaaactagctgggggccaagttacttaacctctttctgtcctcaactctgcaatgaagataataag

SEQ ID NO: 501871 - DNA, 619 bp, Homo sapiens
ttaggaactcaggatgagcaagtggaactgaggactttgcatctctgtttccttgaagacccagggatgggcgaaatattcctgaggagaagttgctcagaaacgtcagtagagatatacagaaagaaaactctaaaagttaaaaacaaataggaaaaaaaasgcttttcagattctgtgatgttctaattataacaggttagaggtcaataaaacggcatggcctttgaaattcacagagggtgattcttcagtaaagacagatgatttttaatatggcagaggcagttgagaagtgttagaatatgccatcccttagacattgttcttacacttaaatgtctaccagaagcatgaggaaggttggttacaagagactcggggccccatctccagcgattctgatttagtaggtttgggtaaggcctgagagtctttacttgcaacaggttcccaggggctgtgggtgctgctggtgcatggaccaccaatcaggcatcctggagccaaggctgtggagccaacctccttagctcaactcctcatcttcccacaaactagctgggggccaagttacttaacctctttctgtcctcaactctgcaatgaagataataag

SEQ ID NO: 501872 - DNA, 669 bp, Homo sapiens
gctgctttagggttaaatgagttaatatatgcaaagcaatagcagagggctgacataagtactcaatacattaatacttttacaattattcactttacaatcatcatcaccaccaccaaagaaaatcacagtcattgtaagagatcttaaaggtcctctagtttctagctgatatcccattacctcttcaaaaatcttgccatgtacaatcccatgattgcatcatcccagtgattgttaaaaaatctttaaataccttaaatgyaacattgacagcctggcaaggggttgtttttccacctttctttgactgagaagattctcagaattaaaattatggtccaactcaagtaatggaacaagctgttaacatcatgcatttttaatttaatttagtttctaccttttactatatctgattctcctagacttatttccccattgcttgccagtttctttttttcaatcctatgtgtaccacgtatttctgtgcactgtctcaacacccttgtattaaataaggtggattaaaagtaaactagaaattgagtgctgaaatatctcttctgatgtgtttgcatgattgaaaatatgcagatacatataaacaactaatcaaaatgaaatgacaaagagatgctgacagaaatgagagggaggtgtgaggct

SEQ ID NO: 501873 - DNA, 540 bp, Homo sapiens
aaagcaatagcagagggctgacataagtactcaatacattaatacttttacaattattcactttacaatcatcatcaccaccaccaaagaaaatcacagtcattgtaagagatcttaaaggtcctctagtttctagctgatatcccattacctcttcaaaaatcttgccatgtacaatcccatgattgcatcatcccagtgattgttaaaaaatctttaaataccttaaatgtaacattgacagcctggcaaggggttgtttttccacctttctttgactgagaagattctcagaattaaaattatggtccaactcaagtaatggaacaagctgttaacatcatgcatttttaatttaatttagtttctaccttttactatatctgattctcctagacttatttccccattgcttgccagtttctttttttcaatcctatgygtaccacgtatttctgtgcactgtctcaacacccttgtattaaataaggtggattaaaagtaaactagaaattgagtgctgaaatatctcttctgatg

SEQ ID NO: 501874 - DNA, 669 bp, Homo sapiens
gctgctttagggttaaatgagttaatatatgcaaagcaatagcagagggctgacataagtactcaatacattaatacttttacaattattcactttacaatcatcatcaccaccaccaaagaaaatcacagtcattgtaagagatcttaaaggtcctctagtttctagctgatatcccattacctcttcaaaaatcttgccatgtacaatcccatgattgcatcatcccagtgattgttaaaaaatctttaaataccttaaatgtaacattgacagcctggcaaggggttgtttttccacctttctttgactgagaagattctcagaattaaaattatggtccaactcaagtaatggaacaagctgttaacatcatgcatttttaatttaatttagtttctaccttttactatatctgattctcctagacttatttccccattgcttgccagtttctttttttcaatcctatgtgtaccacgtatttctgtgcactgtctcaacacccttgtattaaataaggtggattaaaagtaaactagaaattgartgctgaaatatctcttctgatgtgtttgcatgattgaaaatatgcagatacatataaacaactaatcaaaatgaaatgacaaagagatgctgacagaaatgagagggaggtgtgaggct

SEQ ID NO: 501875 - DNA, 594 bp, Homo sapiens
tgcatttttaatttaatttagtttctaccttttactatatctgattctcctagacttatttccccattgcttgccagtttctttttttcaatcctatgtgtaccacgtatttctgtgcactgtctcaacacccttgtattaaataaggtggattaaaagtaaactagaaattgagtgctgaaatatctcttctgatgtgtttgcatgattgmaaatatgcagatacatataaacaactaatcaaaatgaaatgacaaagagatgctgacagaaatgagagggaggtgtgaggcttacaggaatggcaggtctcgcccgtatagcctgtgcccagacagtcacaggagaaggtgtcccacgactgggaacactcgcccccatgctcacagtagctgggcaagcacctaaaagaaaacagatacaactgctgtttccctttttcaatcatcaaaaaataagtgtcttaccaaaaacaggttaatgtgaaagagcagcatacgcaagataaccctacatgacgtgattactgggtctgccatcaaggttctctaattatattgacaaactttagataaatatatccattagcatgca

SEQ ID NO: 501876 - DNA, 442 bp, Homo sapiens
taaaagtaaactagaaattgagtgctgaaatatctcttctgatgtgtttgcatgattgaaaatatgcagatacatataaacaactaatcaaaatgaaatgacaaagagatgctgacagaaaygagagggaggtgtgaggcttacaggaatggcaggtctcgcccgtatagcctgtgcccagacagtcacaggagaaggtgtcccacgactgggaacactcgcccccatgctcacagtagctgggcaagcacctaaaagaaaacagatacaactgctgtttccctttttcaatcatcaaaaaataagtgtcttaccaaaaacaggttaatgtgaaagagcagcatacgcaagataaccctacatgacgtgattactgggtctgccatcaaggttctctaattatattgacaaactttagataaatatatccattagcatgcag

SEQ ID NO: 501877 - DNA, 594 bp, Homo sapiens
tgcatttttaatttaatttagtttctaccttttactatatctgattctcctagacttatttccccattgcttgccagtttctttttttcaatcctatgtgtaccacgtatttctgtgcactgtctcaacacccttgtattaaataaggtggattaaaagtaaactagaaattgagtgctgaaatatctcttctgatgtgtttgcatgattgaaaatatgcagatacatataaacaactaatcaaaatgaaatgacaaagagatgctgacagaaatgagagggaggtgtgaggcttacaggaatggcaggtctcgcccgtatagcctgtgcccagacmgtcacaggagaaggtgtcccacgactgggaacactcgcccccatgctcacagtagctgggcaagcacctaaaagaaaacagatacaactgctgtttccctttttcaatcatcaaaaaataagtgtcttaccaaaaacaggttaatgtgaaagagcagcatacgcaagataaccctacatgacgtgattactgggtctgccatcaaggttctctaattatattgacaaactttagataaatatatccattagcatgca

SEQ ID NO: 501878 - DNA, 442 bp, Homo sapiens
taaaagtaaactagaaattgagtgctgaaatatctcttctgatgtgtttgcatgattgaaaatatgcagatacatataaacaactaatcaaaatgaaatgacaaagagatgctgacagaaatgagagggaggtgtgaggcttacaggaatggcaggtctcgcccgtatagcctgtgcccagacagtcacaggagaaggtgtcccacgactgggaacactcgcccccatgctcacagtagctgggcaagcacctaaaagaaaacagatacaactgctgtttccctttttcaatcatcaaaaaataagtgtcttaccaaaaacaggttaatgtgaaagagcagcatacgcaagataacccyacatgacgtgattactgggtctgccatcaaggttctctaattatattgacaaactttagataaatatatccattagcatgcag

SEQ ID NO: 501879 - DNA, 431 bp, Homo sapiens
tgaattttcaacacatttcttttyttctttgtcccaagtgacacaataacttgacatgtggctagcaaaaccaattacatacataaaactatgaaatatggcatgctcagttactatattgtggtcatttttaaaagaaagaaggggaaacagggaggaagatacagaggggagaagaaagaaacaggaacagcttcagtcacatagtgacagaggttcagaaattttgaagaacatttaatttaggtcatcttgtcgccttttagatttgcaataagcagtcggttattgctttttaagcaatcttaacactgggaatatgtcaatatgacccaaagcaatccacaaattcaatacaattcttattaaaatctcaatgcctttttttgcagaaaacaataatccatcctaaaattcatagggaacctcaa

SEQ ID NO: 501880 - DNA, 484 bp, Homo sapiens
attttcaacacatttcttttcttctttgtcccaagtgacacaataacttgacatgtggctagcaaaaccaattacatacataaaactatgaaatatggcatgctcagttactatattgtggtcatttttaaaagaaagaaggggaaacagggaggaagatacagaggggagaagaaagaaacaggaacagcttcagtcacatagtgacagaggttcagaaattttgaagaacatttaatttaggtcatcttgtcrccttttagatttgcaataagcagtcggttattgctttttaagcaatcttaacactgggaatatgtcaatatgacccaaagcaatccacaaattcaatacaattcttattaaaatctcaatgcctttttttgcagaaaacaataatccatcctaaaattcatagggaacctcaagggaccctgaaccagccaatgttgaaaaagaacagttggaggtctcacactttcag

SEQ ID NO: 501881 - DNA, 484 bp, Homo sapiens
attttcaacacatttcttttcttctttgtcccaagtgacacaataacttgacatgtggctagcaaaaccaattacatacataaaactatgaaatatggcatgctcagttactatattgtggtcatttttaaaagaaagaaggggaaacagggaggaagatacagaggggagaagaaagaaacaggaacagcttcagtcacatagtgacagaggttcagaaattttgaagaacatttaatttaggtcatcttgtcgccttttagatttgcaataagcagtcggttattgctttttaagcaatcttaacactggkaatatgtcaatatgacccaaagcaatccacaaattcaatacaattcttattaaaatctcaatgcctttttttgcagaaaacaataatccatcctaaaattcatagggaacctcaagggaccctgaaccagccaatgttgaaaaagaacagttggaggtctcacactttcag

SEQ ID NO: 501882 - DNA, 484 bp, Homo sapiens
attttcaacacatttcttttcttctttgtcccaagtgacacaataacttgacatgtggctagcaaaaccaattacatacataaaactatgaaatatggcatgctcagttactatattgtggtcatttttaaaagaaagaaggggaaacagggaggaagatacagaggggagaagaaagaaacaggaacagcttcagtcacatagtgacagaggttcagaaattttgaagaacatttaatttaggtcatcttgtcgccttttagatttgcaataagcagtcggttattgctttttaagcaatcttaacactgggaatatgtcaatatgacccaaagcaatccacaaattcaatacaattcttattaaaatcycaatgcctttttttgcagaaaacaataatccatcctaaaattcatagggaacctcaagggaccctgaaccagccaatgttgaaaaagaacagttggaggtctcacactttcag

SEQ ID NO: 501883 - DNA, 484 bp, Homo sapiens
attttcaacacatttcttttcttctttgtcccaagtgacacaataacttgacatgtggctagcaaaaccaattacatacataaaactatgaaatatggcatgctcagttactatattgtggtcatttttaaaagaaagaaggggaaacagggaggaagatacagaggggagaagaaagaaacaggaacagcttcagtcacatagtgacagaggttcagaaattttgaagaacatttaatttaggtcatcttgtcgccttttagatttgcaataagcagtcggttattgctttttaagcaatcttaacactgggaatatgtcaatatgacccaaagcaatccacaaattcaatacaattcttattaaaatctcaatgcctttttttgcagaaaacaawaatccatcctaaaattcatagggaacctcaagggaccctgaaccagccaatgttgaaaaagaacagttggaggtctcacactttcag

SEQ ID NO: 501884 - DNA, 451 bp, Homo sapiens
gagcacccaagtgcccctcaccatgggacccagagaagtaacagaagagggactgggaggttgtgacaggcctcctggctgtggtggaaggatgaccagcagagaactggggtatgaagttgacagaaagccccaggggcctgtatttggcctcgggagagatcctttgaggggaacctgaggggctgggaagaatccgcagcattccctmccctccccatgcccccagccccctatcctggctctccagcactgcaccaccagctcagggccaagacttccataattacatggtgttaatgagcatttagtctgcattcagagaagagttaggggccatgagaatcacaacttttcaagtatttcaaaggccaaggcatggaaaagcctgtgtgaactgatcagaagagggggagctggagcgacaggcaaggttggctggggtgggggc

SEQ ID NO: 501885 - DNA, 561 bp, Homo sapiens
ctgcacgttttatttatttattaaaaaggatttggatttttatacaatatttaaaaaccacaaaatgaaaagggatcaatcaacgtataycttggaggtccttccaagagtctcagtatctaacagccatggaggctgtgacctttttccttcttttctcagcctgcttgtcatttaagggtcaccagagatgactcatgctctagttcttaaaatcaaacttgttccaccaaatccaagatgctgaatttgtacaaatgtaaaaacatcctcttgccacctgtccaccaaaataccttctattcaagtgaacaacagctttaattgctgactcaactctcaaattctaaaaaggtctgtgcttcatcatcagggacaccaagaatttcacatatcacacattttctaactttgccatatttttcatggcaaaattgggaaataccatggactttatccatcaagcctgttttctctgagccaatataaattgacaatggaaaagaaaaagaaacataacagaatgaactcattatgaaaactagattaactatactcttt

SEQ ID NO: 501886 - DNA, 561 bp, Homo sapiens
ctgcacgttttatttatttattaaaaaggatttggatttttatacaatatttaaaaaccacaaaatgaaaagggatcaatcaacgtatatcttggaggtccttccaagagtctcagtatctaacagccatggaggctgtgacctttttccttcttttctcagcctgctkgtcatttaagggtcaccagagatgactcatgctctagttcttaaaatcaaacttgttccaccaaatccaagatgctgaatttgtacaaatgtaaaaacatcctcttgccacctgtccaccaaaataccttctattcaagtgaacaacagctttaattgctgactcaactctcaaattctaaaaaggtctgtgcttcatcatcagggacaccaagaatttcacatatcacacattttctaactttgccatatttttcatggcaaaattgggaaataccatggactttatccatcaagcctgttttctctgagccaatataaattgacaatggaaaagaaaaagaaacataacagaatgaactcattatgaaaactagattaactatactcttt

SEQ ID NO: 501887 - DNA, 561 bp, Homo sapiens
ctgcacgttttatttatttattaaaaaggatttggatttttatacaatatttaaaaaccacaaaatgaaaagggatcaatcaacgtatatcttggaggtccttccaagagtctcagtatctaacagccatggaggctgtgacctttttccttcttttctcagcctgcttgtcatttaagggtcaccagagatgactcatgctctagttcttaaaatcaaacttgttccaccaaatccaagatgctgaatttgtacaaatgtaaaaacatcctcttgccacctgtccaccaaaataccttctattcaagtgaacaacagctttaattgctgactcaactctcaaattctaaaaaggtctgtgcttcatcatcagggacaccaagaatttcacatatcacacrttttctaactttgccatatttttcatggcaaaattgggaaataccatggactttatccatcaagcctgttttctctgagccaatataaattgacaatggaaaagaaaaagaaacataacagaatgaactcattatgaaaactagattaactatactcttt

SEQ ID NO: 501888 - DNA, 576 bp, Homo sapiens
tttaacctgctccctcagttttatagatgagacaaagataaggttgtaagagctactctcttcaagtaggcagtactagtaagttgtcatgcgtggactgaactcctggcacttctctctcttaacttcaatccatagagaagcccaccttcctgccttcccagtattatttagcagaggagaaaatcrtattaggctgtttgatactctgtttgcctagactgaccaataattctggatctttgttcacatcttctctgaaagaatatttgatgggaaatcttttttattttttaatttttgtgtacatactaggtgtatatatttatggagtacatgaaatgttttgatacaggcatgcactgtgaaataagcacatcatggagaatggggtatccatcccctcaacatttatcctttgtgttacaaacaacctgattacactctgtattttaaaatatgcagttaagtttttattgactatagtcaccctattgtgctatcatatagtaagttttactcattctttctactttttttgtacccattaacctatccccacctctgccccaccat

SEQ ID NO: 501889 - DNA, 506 bp, Homo sapiens
gtatgataaatattattttttttaaaatcttgagttctaaattctcccactcagtcataaagacaagtatgaataaattactatttggtagtataatgaaggttataaggaacattttaaagtaattcttcagaactgttttagactatgctgttaggaaattgtagtctctctcaaatttaacaggcattttaccaagcayatttttataatttggagatgaagattttttccaggagcagtaacgtagactctaataacatgagagcaagcatgagaacagtatgtaaagccaaagtcaccatctctcctcctaccccctcttggtgattattcttaatttcagagtcaaaaataactgccatctttgcagttgagaagcctaaaagacattcctgactcttctgtcttcctcacattcatgtcttcttaatcaagtcaattttatctctagaatttatctgtattaaccaccatcaactccctgggcacagtgacaccatcat

SEQ ID NO: 501890 - DNA, 389 bp, Homo sapiens
cattttaaagtaattcttcagaactgttttagactatgctgttaggaaattgtagtctctctcaaatttaacaggcattttaccaagcatatttttataatttggagatgaagattttttccaggakcagtaacgtagactctaataacatgagagcaagcatgagaacagtatgtaaagccaaagtcaccatctctcctcctaccccctcttggtgattattcttaatttcagagtcaaaaataactgccatctttgcagttgagaagcctaaaagacattcctgactcttctgtcttcctcacattcatgtcttcttaatcaagtcaattttatctctagaatttatctgtattaaccaccatcaactccctgggcacagtgacacc

SEQ ID NO: 501891 - DNA, 389 bp, Homo sapiens
cattttaaagtaattcttcagaactgttttagactatgctgttaggaaattgtagtctctctcaaatttaacaggcattttaccaagcatatttttataatttggagatgaagattttttccaggagcagtaacgtagactctaataacatgagagcaagyatgagaacagtatgtaaagccaaagtcaccatctctcctcctaccccctcttggtgattattcttaatttcagagtcaaaaataactgccatctttgcagttgagaagcctaaaagacattcctgactcttctgtcttcctcacattcatgtcttcttaatcaagtcaattttatctctagaatttatctgtattaaccaccatcaactccctgggcacagtgacacc

SEQ ID NO: 501892 - DNA, 590 bp, Homo sapiens
gctgaagaggacatgatcctcctctttgttctggctgcatagtattccatggtgtatatgtaccacattttctttattcagcctgtatgataaatattattttttttaaaatcttgagttctaaattctcccactcagtcataaagacaagtatgaataaattactatttggtagtataatgaaggttataaggaacattttaaagtaattcttcagaactgttttagactatgctgttaggaaattgtagtctctctcaaatttaacaggcattttaccaagcatatttttataatttggagatgaagattttttccaggagcagtaacgtagactctaataacatgagagcaagcatgagaacagtatgtaaagccaaagtcaccatctctcctcctaccccctcttggtgattattcttaatttcagagtcaaaaatractgccatctttgcagttgagaagcctaaaagacattcctgactcttctgtcttcctcacattcatgtcttcttaatcaagtcaattttatctctagaatttatctgtattaaccaccatcaactccctgggcacagtgacaccatcat

SEQ ID NO: 501893 - DNA, 502 bp, Homo sapiens
gtgtggaagggacattagcttttgccactgtgggagtagttaarataacctggttaggacccatccatttaggttggagaggttaggaggagcagcctgcaatccaaatgcagctctctggttgtagggacagggaggagtgtttggaggatggacttttaaactggggcaagtaagcatttgcgtgctgtcttattaaatgttgagtgaggtgtaatgccagccaagtatcctgtacataagggggagcagatacagggagattctggaggataaaatggcatttgtacatgagtttaaatgggcttaggctgaggggcttttggggaatggctcgcaaacgcatgagggccaatgggagaagtgaagtccagaccatgttaacctctaaggagagtttggttagttgttgttttaaaagggcattggcccatttaattttacctaaagattgggtggagtaaggaatatgaaaagctcatttaatgtttacagcctttgc

SEQ ID NO: 501894 - DNA, 511 bp, Homo sapiens
tttttgtgggggagggtgtgaaaggtggtaaaatgtttgattccaaagtaaaataacagatttgggcgactctgattacttaacctaatatactgtttmtctgtaataaagtgatatctaactgttcagaaattaaaactgacatttcaggtgtctcctataatatataacaccgcatatgtctttaagtcaaatccagacttctttcttgttgaaaaactatgttctagctgcctaggtaagttagtatagacctagcaaacagagcagtaggtttcagtattttttgcagttcactgagtgaagattaattatataaatgaaaggtgctggtgtaattgtatagtcttatttgaaaaccacagtacgtgaaattgagcctgttttaaaggggctctgtgtgtgtgtaggtatgtgtggatagagttttctgagtttaaggaatttttgtaaataaacaacacagacctatattcttgctgttgctaaattgtggtttatattttagaga

SEQ ID NO: 501895 - DNA, 553 bp, Homo sapiens
gctgtccctcagggggcaaccagatgggagaggcaggcaggatactggaggctgcaggagaaagttctgtaagaagagcagaatcacaggatggattatgggtgtttctcattaggtttaactgtaaaggaagaggctttacagctccactgaaaagtatgcagaaagaattagtgaggggtacactgaacactgagcaagttaaagaatgcggcacttgggctgggtgtggtggctcacgcctgtaatcccagcactttgggatgctgaggaggacggatcacctgaggtcaggagttcgagaccagcctggccaacagggtgaaaccctgtctctactaaaaatacaaaaattagccaggcatggtggtgcatgcctgtaatcccaggtactcaggaggctgaggcaggagaatcgcttgaacccgggaggcagaggttgcagtgtgtggagattgcacaactgcactccagcctgggtgacagagtgagacttcgtctcaaaaaaaaamaaaaaccaaaaaacgaaaaagaatgtggcacctacttacta

SEQ ID NO: 501896 - DNA, 545 bp, Homo sapiens
atacttttaccaatatatttcatcccacttttgtttttcagaaaaggttactcatacatttaagatttctctataatatctaacatagtaatttaaaaaatctgtcatcccatgggttttgaggtatagttatagtaaacatgttctgagaatactgtatarttaatataatgatgttttagaccagtgtataaaaggttcaaagggcttggatggaaacaccccccaaacccaccccaaggggtactgacaatattttataacattcataaaatacctataatttcatcttttctaatagttgtatattaaagaaggttatcattgttttaataagattttatttatttaaagataattcctcatccaagtccagatattttgtgactggatgattaggtagctaggaataggctgacagtgcttacctccgcattctttcacattccccaaagctattatagtaaattcttaaatgatttttttttgtaaacaactcttggcacaccttgatacacttattatctctgagtaatattttaatc

SEQ ID NO: 501897 - DNA, 621 bp, Homo sapiens
tggaaacatacaaccaagtatagacccagcaggacagaaaactaggtttaactttcacagaaactgatgaaataaaatggtttctttcaagttaaaactgtttctttcaagttgaaactgtttttttcaagtttcatatttcagtggacaagtgtgttaaatgctgtaactttcccctggataacactggggaaagttatctagtgactttcatatctattgtgtgtaggtatgcatgtgtacatataaatgtgcatatcaaggcaatccccataaacagcaggaggactgacaatgactgacttctgatgaaatttagtttacaagcttgtctagttattcacacagtgatttggtaataattcaggtagtaatttgcccatagcctcaatttctttcctaataaatgatagttggaattactgacttcaagaattgaaaattgggattattaaacctataggaagctgtgctaagatgaactcagttgaaaacaaagttcaaagttctgtatctgcaagaattakattttgtccaacataggtgaattttattacaaacaagtttgtctatcgtgataaagttgtcatgtttttagcatttatggtgttttacagatta

SEQ ID NO: 501898 - DNA, 612 bp, Homo sapiens
gtgtttcatggtttgtatggagaaacatattttgtctgattggcttgattacttttttttaagtgaaaaacaactttgccataattcttcattttatagagaaaccacaggaagaaagcttgtgtggactcaagctacccygtagtacctttctaacaactagattaatgtttgccattagaaaatctttccattaaattaatggctacctttttggattagacactcaccttccatttggcactcagagtcatttccttgtcacttgttccaaaagaaaatcacttaggataactgaagaccttagggtaatgagcttttattaagtctgtcctgatccttccttttgtacaaaatttatgaattctccttgctcttccatatcaagtcgtgtatcttctctttggctttcagcctgatcccaccccatctgtgccatcctgatctcaccctatttatatgccatcccgttttcctcaactcttcaataccagttatgttaatttccttgtagttatcaaatacgttatattcagccaatctttatgtctctacccacgttgtacttgcctttccttttatccatgtggaatacctttcccctttacccat

SEQ ID NO: 501899 - DNA, 612 bp, Homo sapiens
gtgtttcatggtttgtatggagaaacatattttgtctgattggcttgattacttttttttaagtgaaaaacaactttgccataattcttcattttatagagaaaccacaggaagaaagcttgtgtggactcaagctaccccgtagtacctttctaacaactagattaatgtttgccattagaaaatctttccattaaattaatggctacctttttggattagacactcaccttccatttggcactcagagtcatttccttgtcacttgttccaaaagaaaatcacttaggataactgaagaccttagggtaatgagcttttattaagtctgtcctgatccttccttttgtacaaaatttatgaattctccttgctcttccatatcaagtcgtgtatcttctctttggctttcagcctgatcccaccccatctgtgccatcctgatctcaccctatttatatgccatcccgttttcctcaactcttcaataccagttatgttaatttccttgtagttatcaaatacgttatattcagccaatctttatgtctctacccacgttgtacttrcctttccttttatccatgtggaatacctttcccctttacccat

SEQ ID NO: 501900 - DNA, 668 bp, Homo sapiens
tacatccggttggtggtgtgtggagccctcttttcccaggccttacatgaggcctctggtccatgggcagtgctgctgctgtctgatcctccttatggagaaaggacaaaatgtccatgtaycagagctgcagaagaaagtatttgtcttccccctccctttgcacagcacccatctgtgtgtaatcttattattatatattttttgagacagggtctcactgcgtcacccagactggagtgtagtggcgcgatctcggctcactgcaacctccgcctccagagttcaagcgactctcccacctcagcctctatagtagctgggactacaggcaagcgccaccatgcctggctaatttttgcatttttttagagccaaggtttcaccatgttggcccacctcagcctcccaaggtgctgggattacaggcgtgagccaccgcgcccggcccatttatgtgtaatcttaattcaacacttattgagcgcctactgtatgtttggcataaaatggtggtccctaatttcaaaagatttggagtctagagggcagaaattgaagaggttggtgctctgcacgtctgagtccgcccacagactgaataaataagctctgcgtcggcgcccctcacctttctttcatggccagacttttctctggcggttcca

SEQ ID NO: 501901 - DNA, 667 bp, Homo sapiens
attatgttagaaagcaatgagtatacaatacagaatttataactagtaagtagattttgtcattatagtgggagggttgcccagagcttttcttttttccatagaacactaccatccttaaagtcattatagcagtccttagaagaggggatgctcctaggaacatattgggattagaagtagttgaaagggctgttctatattggcaagtttaaattgagctggaaatctaattgaaaaattttccagattaagaaagaaaaaaggtatccctagggctaatgtttctagatttctacctgcttctctccatcatcatatgctcagccaccaccaccacgaacataagsctgtttttttctcattgccaactgtctttgactcaacaataagaattagaattaagagagaatttgcttggtgttattttgagggttgggctgcagttcttcatagccccacatttgggtgtcatcatgtgattggtacagtggttacagatacctgctactctgctttgcacatgggagatctcagtaaacacttactgagttgaattatcagtgtaaataaggtcatttgacatcatttactttcattgtcacaaacttcacactgaagctgggaaaactatctaagaagccacaaatgtttggcttcttgactc

SEQ ID NO: 501902 - DNA, 614 bp, Homo sapiens
agtgtaaggtgctccctggggagaagtgggagrttcagtaggaatggagacttgaggttagcccatggggccctgaaatgacaggccaaggagtttggattggggaccttgagtaccgagatccccttgatggcaaggtggagggaggaagtattagagagggtgagatcaagtcagggaggccagttgggaggctgttgaattagtaggaatagaaatgtggaggatgtagtattgataagacttcagagttgatggtgggaggggagctggtctcaagcatggctaagtactgttaacagaaatagggaactctggagaaggggcgagtttgggatagaggaatatgatttcagtttcatgaacatcaagtttgaagtacagatgggacaacccaagagaagtgttcctctgatagaaattcagaactggatgccaagcagagttcaatattagagataaattcagagagtcgtttccagatgtgttagtgttaacgacatggaatatatgcagttccctgaaactgggcctggagactcaaaaaagacccctcaatccttggcttgtggtagctaagggaagagctataaaatgctggactggagggatgc

SEQ ID NO: 501903 - DNA, 543 bp, Homo sapiens
ctgaataaattccaagacagaagcctgcgtatccgttctttgatcagccccttgtatgttttatttttaatcatcagagaagtctgagcttgctgctctggaggactgcctatcggtatatttaacaataggaagccaccgttagactcacagaaaayatgccatagatcaatcatggactgtctacccttagattaagtatcctgtttcagttcaatctgctgtagccagttaggatagggttacatggtatagaatatgaccatccataccatttttctcctgggaaaaaaatggcagttctggaattataacaacaaaaagcaaagatgtaacctaattcctaagtaaaggcttgagtggttttcaatttattgcaagaaaaattggcaattctaatatgaataaaacaagacgacaggatgtgaaataaggggagtataagatgaaaacttatactacaaatacatgttacattctgggtttttagcggttgtctttgtgttcacctttacttgagctatcttgagtggatctttgatc

SEQ ID NO: 501904 - DNA, 643 bp, Homo sapiens
gatcacagagaattgatggagaaagaaaagaaccctgcagctcagatcactatacgttcatgctgtctaaccctgtttttgttttctctattacttgtcatttcctctagcagctatatcatgcttcctgcttacagagaaaaccaaatcttcccaccagggctatccttatgcaccctcatatacaaattgcacctctgtctataactctyggcatcccttctctttcccaaagatgctgtcccagaccctgcactctcaattgtctgatgttggagcagcagataaagcaaataaataacactaatacatcataatctagagtattagttagctattgctgcataacaaattatcccccaaaatgtagtggcttaaaacaatcaccagtgattatctcagtttctgtgggtcaggaaatcagaagtggcttaccaagtggttctggctcaggttttgtggcatggcagtcatgatgctggctagggctgcagtcatctgaaggtgtggaaggggctaaagatctgcctccaagatggctcactcacatgcatggcaagttgacactggatgttggtgagaggacccagttcttcgccatgtagttttcaccataaggctaagtgagtgtccttatgacatg

SEQ ID NO: 501905 - DNA, 643 bp, Homo sapiens
gatcacagagaattgatggagaaagaaaagaaccctgcagctcagatcactatacgttcatgctgtctaaccctgtttttgttttctctattacttgtcatttcctctagcagctatatcatgcttcctgcttacagagaaaaccaaatcttcccaccagggctatccttatgcaccctcatatacaaattgcacctctgtctataactctcggcatcccttctctttcccaaagatgctgtcccagaccctgcactctcaattgtctgatgttggagcagcagataaagcaaataaataacactaatacatcataatctagagtattagttagctattgctgcataacaaattatcccccaaaatgtagtggcttaaaacaatcaccagtgattatctcagtttctgtgggtcaggaaatcagaagtggcttaccaagtggttctggctcaggttttgtggcatggcagtcatgatgctggctagggctgcagtcatctgaaggtgtggaaggggctaaagatctgcctccaagatggctcactcacatgcatggcaagttgrcactggatgttggtgagaggacccagttcttcgccatgtagttttcaccataaggctaagtgagtgtccttatgacatg

SEQ ID NO: 501906 - DNA, 538 bp, Homo sapiens
agccaccgcgtccggcctagaaaacttttaatrattttactctaaattttataacttagagaaagtcttcattaatttaaactctattaattcacactttgctttatttcagaagtgactggagtggtgtttaatattactcaaaaaatcttttctttgtggataataatggaagtgtttaatgcaataatgtgaaaacaagattgtaagaatagtgcttaaaatgttaaaagaataatttgtttttgaacatctttaaagtctttaaacatagctctttacatataaattttgcacatgccaaacaaaaattgttttatctagcctttcaagcaggtccccagaagaagtgttttgtagcaaatccagctcacatactatgagttaccctcagaatttaaaagtaatacatgtatccccacttttgatgttttagactggtctttttccttagtttgatgattacggtttgacaacataaccagtcccagctagtgggttcctggaccctgaatgaaaggtagatttgtaaggcagc

SEQ ID NO: 501907 - DNA, 633 bp, Homo sapiens
atatttttcttgaaaaaggctaagtttttcatttgcgagagcagtgtgattaggcactttctccctagaatcagtgattttataaattagggattgtataaattacatcattgttattaacctttccgtgtctcaattttttcatcaataagtgagggtaacaatgatacctatctcataagtgtggctttgtttttaatgagtaattgttcacagaagtccctggcgcatagcaagtgtgataagcttattactgccaatgcctctatactactactattaatactactgtattcttttcctttgctcttagaaaatatttttaaaattttcagtggacttcttaaaactttgaaatatatttttaggattttatgtttgtttatattacattwtatggtctattcatgtgtacaagacagtacagaattctgcatgtagaaaggtatctggagaatataaaaaattgtctaggctgggcacggtggctcatgcctataatccaagcagtttgggaagccaagatgggtggatcacctgaggtcaggggttcgagaccagccgggccaacgtggcgaaaccccgtctctactaaaaacacaaaattagccaggtgtggtggcgcatgtgtgt

SEQ ID NO: 501908 - DNA, 582 bp, Homo sapiens
ttactggttcatagataaggatggcagctttggattgagaaacttctattttgtcatattacacctctgctacattatgagggagaggatgcatttcagtgtaataattatgactaacttataatgtgttttgcttcttgtaaactgttactgccctaaataggatgaatggaacaaagagcataaatgaattcacaaaagacacctaagctgctctgaggatatgggagggacttaaagaggcagcaaggaaacaaatcgaatttggggtaaatggaaaattagggaggggaaatgggtaaatatgatacgttagaagccatccgttctcttttataaagtgactttttatttaaaagaagaaacaaaagtcttcctttgaatttcagcccagcccttaaacgatttccccacaacagaaaattgrtatttttctaaaatattttgtgactaaatgctatttggaaaaaaaagtggtatttctttaaattagtgctttgaaaggaacacatacttagcctgaatcacttttgcctacatatgtgaattatgggtctgtgtttagaacttaggaaacagctg

SEQ ID NO: 501909 - DNA, 577 bp, Homo sapiens
atatagatctctgtaatgtggggaatrttttgtttatctggaatttaagtcaggttgaaagggctaaaaagaatggatattgagaatgaggtatcaagagagattgttctgagcaaaaacatgacccaggagaaggttgagagagcaacctattagcaaaggggccagagaaatggatgaaggagtcacaggcagtaacataagacagatgagtgcaaggttgcccgctatggttgaatatttgtcccctctgaaaatcatgttgaaacttaatcctcaatgtgacagtattgagaggtggggcctttgaaaggtgactgggtcatgagggctctgccctcaggaatggattaatttattcattcatggattactggattatcatggagtgggcctggttgctttataagaagaggaattgagacctgagctagcacattagcacactcagctttgtcgccatgtgataccgtaagtaccctggcactctgcagtcaccactagccagaaggccctcaccagatgtgacctctcaactttggacttctcagcctccataattgtaagaagtaaattc

SEQ ID NO: 501910 - DNA, 540 bp, Homo sapiens
gctgtttcttccccatcagrcatggaaagatgtgaatgggaaactgactccagattgtttgttccagggactgctcatctgacctctgataggaagaaagaggtcagaggtgactgctttgttctgaatctccatgtttttccaccttttctgtttcctgtcactgttgtggcaaaaacatggctgacctagcagagagggccttctgggttctgctctggtattatctgcaggctattgcatggagaggtactaatttcaggagggaagaaaatattttctgactaatgtggcattgtgtaaggattcgagggagtacattggtgtcggcttcgagtttgaatcctggctgccaagcttgctgggtgacctgaagtaacttatgtaacccataagcctctgatttctcaggaattacttgggaggattcaatgagacagcgtatgtgaagttcttggcttcgtgtctgcactcactggttcttaataaatagtggctgctgttactaattttagaagatttaaaacagtgggaatgggg

SEQ ID NO: 501911 - DNA, 528 bp, Homo sapiens
acttgggatacagcatagtggcycaaggtggagacgccaccaccaggcacacctgtgccagtctccagatgtggcaccctgggcaagcctctcaacctcagcttcctcacctactagccacccccttgggggatataaagatcatagtgacttcttggaaagcgcttagcacagtgcctggtccattatgtatcataatacaatttaattgccagtgttatcgaatgaccattctgaattttttcattcagcctgtttattaaataataatattggcaactaaagtatgttgaggagtagtgacagctcgcatcagttcaggagagtgagagatgggggcttttgaagacttgacggaagttcctgagtactttgacctgaggattgacctgagtccggagtgcagtcaagtgagactgtcattagtgtgtagaaaatgaatatggaaggcatggtgttaggaaggctggcccacccagtgatgcacaggctggatcattgagcggggtactggagctggcaaataca

SEQ ID NO: 501912 - DNA, 601 bp, Homo sapiens
cggaacagcctctccaggttctttaattaacttaatccatctaaccatggtttttaaataattaagtgccttggtaacccgtgttcaaacatttgaagaatgtgagttacaaccatattttaaccttttaattctagtttaaaacactttatttcccttcctgttatttacaagctgtggcttcataaaaaatacagtatttgagggaaataaagaagatgtttagatgatcaataatgagcaaggagccagccctgttatactcatgggatcatttcaaacagtaaagcaacaaygcagtaaaaatgaaaatcactcaggtgtttttctgagagtcacatgaaaatcctcccatcagtacaaactgtaaaaatcgtcaatgtgtttatttgaacctgacacactcctaaaatgtttagattgtttgtgaaaaaaaaaatcatgttttacttacttacttcctaaaaacagaaaccacctagattcattccttggtggctttatttaatattagctactccttaaaagagtactggagatatttatttattctttgaattacataaaatataattttcattaaacgattatatcaaatact

SEQ ID NO: 501913 - DNA, 601 bp, Homo sapiens
cggaacagcctctccaggttctttaattaacttaatccatctaaccatggtttttaaataattaagtgccttggtaacccgtgttcaaacatttgaagaatgtgagttacaaccatattttaaccttttaattctagtttaaaacactttatttcccttcctgttatttacaagctgtggcttcataaaaaatacagtatttgagggaaataaagaagatgtttagatgatcaataatgagcaaggagccagccctgttatactcatgggatcatttcaaacagtaaagcaacaacgcagtaaaaatgaaaatcactcaggtgtttttctgagagtcacatgaaaatcctcccatcagtacaaactgtaaaaatcgtcaatgtgtttatttgaacctgacacactcctaaaatgtttagattgtttgtgaaaaaaaaaatcatgttttacttacttacttcctaaaaacagaaaccacctagattcattccttggtggctttatttaatattagctactccttaaaagagtactggagatatttatttattctttgaattayataaaatataattttcattaaacgattatatcaaatact

SEQ ID NO: 501914 - DNA, 601 bp, Homo sapiens
cggaacagcctctccaggttctttaattaacttaatccatctaaccatggtttttaaataattaagtgccttggtaacccgtgttcaaacatttgaagaatgtgagttacaaccatattttaaccttttaattctagtttaaaacactttatttcccttcctgttatttacaagctgtggcttcataaaaaatacagtatttgagggaaataaagaagatgtttagatgatcaataatgagcaaggagccagccctgttatactcatgggatcatttcaaacagtaaagcaacaacgcagtaaaaatgaaaatcactcaggtgtttttctgagagtcacatgaaaatcctcccatcagtacaaactgtaaaaatcgtcaatgtgtttatttgaacctgacacactcctaaaatgtttagattgtttgtgaaaaaaaaaatcatgttttacttacttacttcctaaaaacagaaaccacctagattcattccttggtggctttatttaatattagctactccttaaaagagtactggagatatttatttattctttgaattacataaaatataattttyattaaacgattatatcaaatact

SEQ ID NO: 501915 - DNA, 464 bp, Homo sapiens
cccactgggctcttctacggaagaacagggtagattctttgttgaaatccgcatcctttaaaaatcagtagggttgccactgttctactgagttctcrttttgtgtgtgttttatccatggtgaagaggccaggttagacatcaagcttcttgaaagtaaggaaatgctgcctttgtgaaggtaaaccaaggtgagcactgtcaacagattccttggtcagaatgggcacctagactccaactactccccaagattcagtgtctagtaattatattgttaacactttcaggaagccttcaggcagagagtgagagcacctttaatactgtcctgcttaccttgctgagatcatgatgctagcacagacctttttgttcctatataattttacttcactgatctgaatatctcttctagttccagaatggcatgtctttattattgtcactttctaatgccctca

SEQ ID NO: 501916 - DNA, 596 bp, Homo sapiens
ggaggttggccctagcggccccatctgctaacactcagggctgggagaagatagtgctttttatctctgcagagagttcaagagtttatccccacccggggcagtggggagcctggtgcccattcttggagggtgtcccatgacaggagagatggaaggcacttcctctcccctcgagcactcactcctctccacaccccagcatcaccagaggccagcgggaaatgtcttggaccaagcccttggacacgggtgctgggtccagtggaaaatatctgcctcagggtccagggagggctgggtaccaagcagccagagcrgcctgtaaaagggtcacagctctggaggtgggcaccccatgggcggtggggatgggggtgcacttctagctccgccaccttctgactgtgtaacctgggacacagtacttcaccatcgagcctgtttcctcctgtcgaaagctgaattcccattcctgctttggagcgttgttgtcagggttaaaacaggaaagatcaagtattcagtacctgcctcacagtctgacttatagatggggctctgaaatgacccctttcctgtatgcaccacatgaa

SEQ ID NO: 501917 - DNA, 594 bp, Homo sapiens
gagcgagctcaccctcctcctccagccaccttccttttcccaggtcctccacattttccccrtgccctactgaggacagagcacacccctcagccattcaggaccccccatgagtatctggctacctgtctctagcccccaagtgactcattctccctgaacaaagcaggccctatctttgtcccccagtgcatccttcaaggcccagatcatccgctgcctcctctctgaagccgcccccagatccctgagggagaatgaatcacttgctccactgtgctccgacagttctgagctcattctgctttgtgttatgggtatggatttgtgtatctgcctctccagcagactgggatcatggtcttctaaaatgcctggcacaaaatttgtaaatgttatttaattaattaattaatcatacagaatatcctagaattagagcatctcagagctagaagatcttaacaatcatctggtccaaatgccttactcaatagttgaaggggcctggagctggaaagtgggggagggttgacatgagggtagagaagaacaggtccaaggtcgcacagtgagctagcagcagaggataca

SEQ ID NO: 501918 - DNA, 607 bp, Homo sapiens
tctattttaatgaagcaagagacaaaacagcctgttgcaatacagtgacgacgggtgygaacacatgtggtgtaaggcttaaattttgggttggaatcttctgaatttaagtccagctccattatttggcagttgtttgaccttaagcaactcccttaacctctctgagcttttgttccctagtctgtcaaatgtggataaggatagtgcctttctcccagggatgaggtgaaaaatagataaggtacatggtgcctggcaaagaggaagccctcagtaaatagtaggtgtaattatgattatggtgtgccatgctagaagagatttacagggagtagagactacttgtctacctgcgggtgggaggctgtgggtgtcagagcaggcttcttgcaggatgccaaagctgcctcctgaggcatgagtaggaattttccaggtggataaagagagggcattagcagggttggacagtgtttttcggaggcccctttcactgtgactgtatcacctgctgcttccaactcggactctgccttgcattttgagaggaagggagtaggctcttttgagtaccatcttgaaggttctccaggactcaggagat

SEQ ID NO: 501919 - DNA, 464 bp, Homo sapiens
ccccccagtctgaccctgcccactgctggcccatgtcctgcagcttccctaatgggcccttctccacctgtgtggattttcttgtcattcagccaatgtgcagaaatttctcctgcttccatttcgtcaccctctgtgagatgttatttcttactttcctccacctgtacttgacctccaagatttggcaaagtgcttcctcttcctggaagccttccttgactgacctggtccccagtaattagctgttccagccctgcatgcctcacccagccctctgctgctgccctcagtcacagtgctcatcccacgcctggtcccctccttcagtgttcccccacctgtctggaagtcccttgatgccaggggcatgtttgatccatctttrtgcttccagggctcccaacagtagtggactccttagtggatgttggagtgttgaatgaatggatgaaccaatgagt

SEQ ID NO: 501920 - DNA, 499 bp, Homo sapiens
attgaaacgtatacatgttattgggtaacagaaactgaaataaacaggctttcagtgtgaggatgcatattagtctggctaggagttgagctgtatttaatatttggagtaggtacaggtactagagccttcaaattcctcatgtccttgtttttgtctttcctcttgacttgaggcttccttaagtactcctcctcagagagagagtctgtgtctggcatctcttacaactgtaatccactgttacaatattaaagtcctggtggtatratggcaaggtttaatgagggagggtcctatagtcttaaaattaagtatcagtcttttaattagtcctgtgtttctgggctgtgacttcacaagtgtttttccagtgatatagatttcccctactcccactcccttctccattcactggctaccgagtttttaatctagttgccccaagccctgactcctattgactatgttccccaccctcttttaggtgagaaaaaaa

SEQ ID NO: 501921 - DNA, 507 bp, Homo sapiens
caaactgtcctatggcttgtggctgtgatgatgcatggcagcactggggtgcttccgactggtctgctaaagactattaataatttttctatatctgccaataggaatcttatttatttttgtctgtggctgtgtttcctgttcttcagggcacagtgaagccccatttgcctcaagttgtttttctaatgattttcctttgcccatatcctgaaccaatttctggtgtatcaaatttccacagaagactgtactcaagatggcagaccaaagcacacatgctgatctacagctccccttgagagtctattaatattatagtaatttaaaatgaaaaaaagaattttccagcaataataataataataataataaaatggcaagggacmcttccactgataagagagctcaacacatttctgaaatgtgtgaagagaatggcgagtgttggccatgaagcagacaggaggcaggagccacctagaaaataggcagtgagggctgcag

SEQ ID NO: 501922 - DNA, 614 bp, Homo sapiens
gctacttgggaggctcaggcatgagaatcacttgaatccaggaggcggaagttgttgtgagtcaagatcacgccactgcactctggcgtcggtgacagagagagactctgtctcaggcaggtgatcacttggggtcaggagtttgagatcagcctggacaacatggcaaaactctgtctctactaaaaatatagaaattagctgggtgcggtggccacacgcctgtaatcccagcatgctygggaggctgaggcaggagaattgcttgaagctgggaggcagaggttgcagtgagccgagatcacaccattgcactccagcctgggcgacagagcgagactgtcttaagaaaaaagaaaaaaaagaagaaaaaagaaaatatatctgaacatcagaacttgtatgaactacatctatgtagatatatatatatctacatagatgtatgtacactcatgcatttgtaaatataaacaaactcctaaaattaatttacaggcttatgtgcaggtttcctccatcagatagcaagatctttgaaggcaggaatttatctttacctccaatatacagcataatgacagaaagcagaagctctataaatatgtgttcag

SEQ ID NO: 501923 - DNA, 525 bp, Homo sapiens
gcctccaagcctcaactctctttttcctgccccaccatccatgtgtattcacaagagactgactctccatcagtcacctcacctcctacctcctgtcccartggccatcttggtggtaaccatttttaaaagtgtaggagaaaaatctgttcataaatcttgcttcctatgatcagttcccctatgccatgtggttgcccactcattcttttttgattcaaagaattatccacttcctcatgcctactaaatacacagaagagagtctccaacattcctacatgatttagttacattatgttcagcctgcgttcacactgcagactctgtggtcatctccagactttaaggtctgtatggacaacctttgtgagcaccaccctctctggtttctgcagtggctggctctctatagttcctacacatctgaggaccacactgagcaccattggaaactcctccagccccgcgattggccctcagaggtctccctgtctacacaccagcagcgtctccaacttgcac

SEQ ID NO: 501924 - DNA, 590 bp, Homo sapiens
gttgggaggctgaggtgggagaatcacttgaacctgggggacggaggttgtggtgagctgagatcacaccattgcattccagcctgggcaacaagagcgaaactctrtctcaaaaaaaaaaaaaaaaaaaaaaaaaaagttgttttagctggagaactattaactttttaaagcttcattcattgatctttttccaatgaaattctcaatattcatatgtaggaatttatgaatttcaaaatattaatatttaagccctctagtgaaaaagattctttggtacttgtatgttgtatgtttgtattttataaaataaaagacttgttataactattaaaaccactgaaataattgtctaatgttgaatataaattctgagaatattagtatttttgcataaatgttgaacaatattcacttattaatatcaagaaaacctcaaaagtgtcaacagcaatggtagatccatatgactaggccttcattccacaatattgggcctctattatttgctacgaattatgttaggttctggagattcaagaacaaatcacaaacacttggcatattttcttacagagccaagtcta

SEQ ID NO: 501925 - DNA, 590 bp, Homo sapiens
gttgggaggctgaggtgggagaatcacttgaacctgggggacggaggttgtggtgagctgagatcacaccattgcattccagcctgggcaacaagagcgaaactctgtctcaaaaaaaaaaaaaaaaaaaaaaaaaaagttgttttagctggagaactattaactttttaaagcttcattcattgatctttttccaatgaaattctcaatattcatatgtaggaatttatgaatttcaaaatattaatatttaagccctctagtgaaaaagattctttggtacttgtatgttgtatgtttgtattttataaaataaaagacttgttataactattaaaaccactgaaataattgtctaatgttgaatataaattctgagaatattagtatttttgcataaatgttgaacaatattcacttattaatatcaagaaaacctcaaaagtgtcaacagcaatggtagatccatatgactaggccttcattccayaatattgggcctctattatttgctacgaattatgttaggttctggagattcaagaacaaatcacaaacacttggcatattttcttacagagccaagtcta

SEQ ID NO: 501926 - DNA, 625 bp, Homo sapiens
tgtttgttaatttagatgttggcatagaattcattactgatggattgctcttggggtaatgaactatattttgtatagctctttctcatttaatggtgcccttggggtaaaagagctgcctgtgttctcaccccaggtttctataagaattagagataacaaaaaaaaagcctgtatttttaaggctcttatctggtaaccgttgaggcatagctcacatgaaatttatgaattgtgttaaacattcagacccaaacatcctttcattaggaatgcatccttccatcaggaaaggtacatgttaaagatctttatgataaatgccwtgtttgcagtttctgcagtgttactcttataatttggagctcaggttaaccatgcttcttgcatactctattcattctctagccatagcatttaaaacagaaagttttcccctacttccagtgcttcaattataattcaatatcacttactttcttctgggaaaaaggaatggataatttaccatgagcccatatgaaataatttaccaaaagcaaggcagaggaaagcttctttagtttcccttcctgccttcttggagccccagggaagaacatcaaaggtaacaatatgaaatgtc

SEQ ID NO: 501927 - DNA, 593 bp, Homo sapiens
ctgtctctatttcatcgaatccaagaagaaagtcaagtatattcacagataataatctagagttcagaggagagtctaaaaatgggaatgtaatagcgtaagctgtcagcatatgtggatgaataaaaacaaagtagtagtcactacttgttgggtgaaagtgacaaaaaaaactagataaaacaaaaaagcaatttcttgactcaaattgaaaaagaacagaggttgagttttaggcacacctgctgcctgatggttaaatgatgagttctgtctgtctcaatgtgatgtagtttgaccgtgtcctcatacaaatctcatcttgaattcccacgtgttgttggagggacccggtgggaggtaagtgaatcacgggggagggggggtgggtctttccagttctgttctcatgatcgtaaataagtttcacgagatctgatggttttataaagggaagtttccttgcacaagttctcttctcttgtctgctgccttgtgagatgtgcctttcaccttttgccattattgtgaggcctccccatccaygtggaactgagtctgttaaacttctttcttttgtaaattgcccactc

SEQ ID NO: 501928 - DNA, 601 bp, Homo sapiens
cacacattgtggacagaaccaagtttatggaccagccttccctgtgaaatttgacttttccctctttgctgaattggtcaggttaacaatggttacccctggattacaggaagggcatgtgctaaaagcctccttggagacccacatggccctcagatgagcaattgttcagattccttttctttttcttttccatgggaataagctttcctctctccaaagtacatgttttaggcttttttattttcttgctactcccaaggacctggtgatatttttctttaccatgcattaaacagaatctgtgagtcttttctggaaaaaaaaaaaggcaggagggaacatactarttaaaaagtttctgggtacactaccaagatgtacctatttattgatatacaaatggcataagttattgaatgcttgctataggcattctctaagaactttgtaagaattgacttacatgagctacttcatagcagttcgatgatatacatgttgttattatcaccactttacagataaggaaatagagacatgacatactgaatgacatgctcaacgccactccactagcaagtggcagaaccaagcttga

SEQ ID NO: 501929 - DNA, 589 bp, Homo sapiens
ctgctagtgtggtcagaataatattaggcagaggaacgtggacagactagagtggctgagtcttctggcctttatttttctcctatgctggctgcttcctgccctcaaacatcagactccaagttcttcagctttgggaatcttgggcctttgatgacagactgaaggctacactgttggcttccctactttcgaggttttgggacttgaactggcttccttgctcctcagcttgcagacagcttattatgggacctcaccatgtgattgtgtgagtcaatactccttaataaactcccctttatatatayatctatcctattaattctatctctctagagagccccaatatataaggtgagtaaaaaaaaatcccaacaataaagactcaattatcagtgacatattaatcacagaagaattaaacaactgtataaaaattaacctacctatatattagcaatacatttcatttcacccaacagattcaaaatactttatttatttatttttattatactttaagttctgggatacatgtgcagaatgtgcaggtttgttacataggtatgtatacatgtgccatggt

SEQ ID NO: 501930 - DNA, 498 bp, Homo sapiens
ctctggcaactatccctgtgattagcatgacaattgaaggtagaaactcctgttcatttcttccctttccttggccccattctaaatctcattttgcttccatctgcacctctgctatctggtcaagagatagcactcaatatatagtaagggttcattaatttttgtttattatcttcacttgctttcattgttcttcctcttccctctacatccttgtcttaactgaaagttggttgcatatgtttctcaatatcataaaattgaagattagtttcattctttcaaaaaatgttgagaaactgtaatatattagccactatgctaaagatgtaactctaatagctcctgctcccaggtagcttatgttctaatgagtgaaattcagataaaaaagcaaatacrataacttaaagtcacaataaaagtatgtaaggacacaaacaagaagctaagaccaacagattttggggtgattgcagaagtccttttagaaat

SEQ ID NO: 501931 - DNA, 428 bp, Homo sapiens
gttatcggtcagtgttttctggggaaagcacttcaacataggcaaagtctttctaacctaaagaaatttaaatatagggaatwaagtaaatcaaaacaacattttgatattttgtgtattttgtgtttctttttttacctgcaatgtatgaaatgtgtttcctttgttttgatttcttgggcagactgaagggtaaaatatccttgctgaaatatatcactgccaaacaaattcactaaatccagctacaggagatgcatagggttttgactgacacagattcatctgattccttccaccttgaagtctctgatgaagtagcaaggcaaaaatgttcaatctttctcccatcttcttcggattcattaacatatcatatccttgaagtaattgctgactcattgatgtctcatttgatttatctaaaa

SEQ ID NO: 501932 - DNA, 428 bp, Homo sapiens
gttatcggtcagtgttttctggggaaagcacttcaacataggcaaagtctttctaacctaaagaaatttaaatatagggaataaartaaatcaaaacaacattttgatattttgtgtattttgtgtttctttttttacctgcaatgtatgaaatgtgtttcctttgttttgatttcttgggcagactgaagggtaaaatatccttgctgaaatatatcactgccaaacaaattcactaaatccagctacaggagatgcatagggttttgactgacacagattcatctgattccttccaccttgaagtctctgatgaagtagcaaggcaaaaatgttcaatctttctcccatcttcttcggattcattaacatatcatatccttgaagtaattgctgactcattgatgtctcatttgatttatctaaaa

SEQ ID NO: 501933 - DNA, 643 bp, Homo sapiens
tggttaaggaaaatcgatgtcccratgtagggagcactgtccaaatatccggatcaatggcagtcaatgatatacaaaagtggtggtaacaatgttccaatgtgatatcaatgatagccaaagtcccactatagaaatggatgggagttcatgtcccagtgtagacaccagcttgccaatatgaagatcaataggacacctatttgtgacttctaggcttcccttggagcttttctactatttgctctaaaggggtgacagttcccagggtccctactctggctaagtcctccactgcagaaaatttgggcatctgccccaacacaccccagcctggttatccacagtagttcctcttggagttccccttggacttctgtagccaatctccagagacagcttgcaaatgagtccaaaagatcccagcagcctggaagaggctacttactttccagggattatttcctgcagggagaccaggcctctggctcttccagactcagcccaaaccagtagcaagtgagatatagtcacaaccagtcacgttctcactccttggcttgatatgtgtctaaaatccacagttatccatgttactattgcatctgtcatttgagtgattgcttccccacattttacagct

SEQ ID NO: 501934 - DNA, 623 bp, Homo sapiens
ctggtggctgggaccacactagtcacataatcagtgggaccgagttcctcaagaattatggtcccatgactggcccatttctctcacaaatgtcccatcagctactcctgttcctctgccattctccatcctgtatctctgagggcttggactgccccrcacccccagagctctagccccttctgtgaagctgggagaggaaggggagaggaggggaggaaggggagaggaggggaggaaggggagaggaggggaggaaggggagaggaggggaggaaggggaggctttcttggttgccatggtgattctccacctcccagtctgtggggggaggcagcttcattgtgagcctccagccaaggcctggagggcagcaagctgtcctgggctgggaggatgcagaggggtgggaagaggactctagccactggggagaggggaacaggggaagacaggctggggacaaggaggaggaccctcggcccagggcagccggagcagagagccagcccctccagatgctggggctgccagccttcagcccagggggcggagaggggtgtgtgcaggagctgaggctgacagggcctgatgctccctgagcccagagctggcagaagac

SEQ ID NO: 501935 - DNA, 623 bp, Homo sapiens
ctggtggctgggaccacactagtcacataatcagtgggaccgagttcctcaagaattatggtcccatgactggcccatttctctcacaaatgtcccatcagctactcctgttcctctgccattctccatcctgtatctctgagggcttggactgccccgcacccccagagctctagccccttctgtgaagctgggagaggaaggggagaggaggggaggaaggggagaggaggggaggaaggggagaggaggggaggaaggggagaggaggggaggaaggggaggctttcttggttgccatggtgattctccacctcccagtctgtggsgggaggcagcttcattgtgagcctccagccaaggcctggagggcagcaagctgtcctgggctgggaggatgcagaggggtgggaagaggactctagccactggggagaggggaacaggggaagacaggctggggacaaggaggaggaccctcggcccagggcagccggagcagagagccagcccctccagatgctggggctgccagccttcagcccagggggcggagaggggtgtgtgcaggagctgaggctgacagggcctgatgctccctgagcccagagctggcagaagac

SEQ ID NO: 501936 - DNA, 622 bp, Homo sapiens
ctgcattgttattacatacgtttttctgcaccttggttttctcacgtaatataccttggagatccttacatatcagtacacggagggctgtcctggtctttttaacagcagtatactcctccataataacgggacatttacattatttctgctcttttgctcttactaaaaatgttgagcacctactaaatgtgcccagcacatttattgagcacctgctatgtgctgggcagcattccaggtgctagagatagaacagtaaacaaaacaggcagaagtccctgccctcatggaacatgacttctattgtgaacrtgtgagtacatcttcaggatgcattcctagaggtggaacagcccaaacaaagcatctgtgcatttttaaaatttagtagataaagccaaatccccatccccaccaagacagagtctatcaatttacccttgcaatgtatgagagtgcctattttcccacacttttaccaacaaaatgttatcagatatctttatgtgtgccaaggtgacaggtgaaaaacaactgtgattttaatttgcatttctcttatgatgagtgaggttaagcatcttctcatatatttgagagcaatttcaaggctgggcat

SEQ ID NO: 501937 - DNA, 653 bp, Homo sapiens
tgtgttaggcagaggtaagagccagtggaaagtttctgaacaagaaggagtttgtggagtctgaggagcagatcaaagaccactgaacaaaagcaggagcagtgggtgatgagggctcagagctcggcagaagtcagaccatgtagggccttgcagttcttggtaaggagtttagatgtaattctaaggaaagccattacaagaagggaagcagttctgcctttagactgaactagaggggcccctgtcctggsctccatgctttagtaaaacacacacacacacacacacacacacacacacacacacacacgtgcatgcacatgagattcttcaggctctaggcattgtttaacagtgaaaatggtgatacaaatgataatctataatcttacattaaaatggttttaatactttctgcaaagcaataattatatgcagcctcattaaaacattttaatgtagtaaatacaatttgagatttatttttgaatctaaatgttaacttaagaattttattggctgggcattgtggctaacacctgtaatcccagtgctttgggaggacaaggtgggaggatcactcgaggccaggagtttgagaccagcctgggtaacacagtgacatcctatctctaaaaaaaaataatttt

SEQ ID NO: 501938 - DNA, 653 bp, Homo sapiens
tgtgttaggcagaggtaagagccagtggaaagtttctgaacaagaaggagtttgtggagtctgaggagcagatcaaagaccactgaacaaaagcaggagcagtgggtgatgagggctcagagctcggcagaagtcagaccatgtagggccttgcagttcttggtaaggagtttagatgtaattctaaggaaagccattacaagaagggaagcagttctgcctttagactgaactagaggggcccctgtcctgggctccatgctttagtaaaacacacacacacacacacacacacacacacacacacacacacgtgcatgcacatgagattcttcaggctctaggcattgtttaacagtgaaaatggtgatacaaatgataatctataakcttacattaaaatggttttaatactttctgcaaagcaataattatatgcagcctcattaaaacattttaatgtagtaaatacaatttgagatttatttttgaatctaaatgttaacttaagaattttattggctgggcattgtggctaacacctgtaatcccagtgctttgggaggacaaggtgggaggatcactcgaggccaggagtttgagaccagcctgggtaacacagtgacatcctatctctaaaaaaaaataatttt

SEQ ID NO: 501939 - DNA, 546 bp, Homo sapiens
cacaattgcaatgtggcatgagaaatattaagatggagaattactatgatctatagagcacatgggaggagcacccagcctagttgagagcagcgtagggtcagggaatacatgcgattccaatgtatactttacagagtaaatggcattgaagtaaagtgtgtgttagaattagatgagaggtgattaatgaagaagggtgagggcaragagtgatgagcatcttctttctcacatgtaactgccaggtcatccatctaagagtgatagtgttttctaaataagaaataaagacacattgtgtcaaaggtacaaacatatttagagagatgaagactgtgccaagaaatttaggctgtatcatcaccatctcttttccctctgctcttctcttaggaaactaaacagccagtctcataagtgggccctgctctcagggctgaaagggaatgaagaaattgcaccaatagttggtcagatgcttttcttatttgctcagttaatcctcactaccattccatgaggtcagtactatttccaatgtat

SEQ ID NO: 501940 - DNA, 509 bp, Homo sapiens
gggtgtccatctccgttttcttttctgccattcccatgggataatttccttgttcctatgtgagtccagccctcatcaccacgggccatccaaccatcatgcacccaggaacagcttcaggaaatgtaccctgccagctgcctatcagcctccacctgcacagtgatcattccttcagctttcactcaggccggagggctttccacccaaaagggcctttcacacccactcccagcacagttctaggacccygtatacctcccagatacaggtacatatccttcccctttgttgttaattttgtttaatttatttaaaattcactgggaaatcactgatgatgggagtgaccagcctgtccattccattttctgtccaccatctgacggcaccacctgtgaggttggccaccctagtgtgctgtgctcatggggccatctggacatacacaaacaccaggtgtgtgagttattagaggaggcccgggatcagcaggtggctgtgcccca

SEQ ID NO: 501941 - DNA, 604 bp, Homo sapiens
tgaatccgcttggctttccatcagaagataccacagactagsttgtttcaaataacaaatattaattttcttattgttctggagtcttgatgtccaagatctgggtgcagaaagggatagtattttgttttttgagaggcctcttccaggcttgcaaagggccaccttctcatgcagtgcatccccacatggcctctcctctgtgtgcatgtggagagagaggtctctgatgtcttccacttcccataaggacaagagtcctactggattagggtcccacatttatggccacagttaacttatttgccctcttaaaatccctcactccaaatacagagccactgggattggggtttcagcatatgaatttaagagaaggacacgatgcagccaatgacgtcaatcaagggatagtgagaagccttgaaatattttatttgtcaagaaggtaaaatgggccttgtgggaatttgttgaaaaaaaggtgccagtgactgttaaaaccttaatggtaaacagagaaatttctcccttctttcttgcctgcagtgaggatgtgaggaagcagaaccacaaacaataaagaaagaggagccctggggac

SEQ ID NO: 501942 - DNA, 525 bp, Homo sapiens
gtacctcaccaaagattatttgaacatttttaagtaggaactttttattagggacatgtacgtgtaaataaaaattagataccattactcacctattaggatgtttaaaacacacaattctcataatgaaaaatggcaatatgaatgtgraaaatcaagaaccatcatgcattgatggtgggaattcaaaatgctacatgcacaaaatgaggttttggggggcatttttaaaatagagataaaagtagagttaaaatttgattcatttgtgtgttccaaaatatttacaacagtgattcagaaattgatgtttacaaagatacctacaaaggaagttctgtatcagttttattaattcaatccctgaaatttgcttacagaataaatgttgtatgaaaaatctttcaaataattaaaatttctcaaatacacatttatattgttccttttctttagtgacttaatgttattttctgagaaagtcttcaatctaataatctttgtcatctcctccatgccagcaca

SEQ ID NO: 501943 - DNA, 665 bp, Homo sapiens
caggagataggatgagaagattgcagtgatgagacccacaragggcagcagccatctcttaagggatcaacttggagaccaaatccatcacttcttggaggtccagtagcccctgcaccctctgcgctttgcagagacatcctgcagttcagggaagaaacggagctgaagggcatgtggaagaagaatgtcacagagatgcaaggggttggattattggttggcttaaggtcaaatcattatttgctgcctgaagaaaaaaaaagaccttgcttagggacagaagtacttgttctggtcttaggtcagatgagggggtaaagcaactcttccaactgtcatggaattgggtattttgccaccaaaaatttcatgatccaataatgatgatcataatcagtgaatgctggattaaactgaaaatagtacaggacttctctgagcctttactatgaatttgcccattaaattccctaaaagagaaggagaagctatgcgtattgaatatctgttagtacctggaaaatccagttttctgtttttcagtatgggggagaacagaaccccgcttgagggttgaaacaaattcctctgaacacagtatggggaattcagaagagattaaaagaacatatgattggaattattcagatctggatgagaag

SEQ ID NO: 501944 - DNA, 551 bp, Homo sapiens
tgtgcgacctcaggtcaataacagccttatgragcctcaggtccctcatctgtaaaacgggaggaaacccttgttgcatggcaggcttgtggttcagactgaaaattctaattactactgtggctgctgttgttcaatccataggccctggaagtctggaagcaagaactccacaccccaacagtggtttcaaactttggtgtgcactgagatgaccagggttactagcaaaaatgcagattcctggccaggcacggtggctcgtacctgtaatcccagcacttagggaggccgaggccagtgtatggcttgaggtcaggagttggagaccagcctggccaacatgatgaaaccccatctctactaaaaacatagaaaattagccaggcatggtggtgcgtgcctgtaataccagctactcaggaggccgaggcaggagaatcgcttgaaccaggaggtggaggtttcagagagctgagatcgtgccactgcctgggtgacagagtgagaccctgtctcaaaaaaaatgcggattccaaggtcctacccct

SEQ ID NO: 501945 - DNA, 535 bp, Homo sapiens
tgcgacctcaggtcaataacagccttatgaagcctcaggtccctcatctgtaaaacgggaggaaacccttgttgcatggcaggcttgtggttcagactgaaaattctaattactactgtggctgctgttgttcaatccataggccctggaagtctggaagcaagaactccacaccccaacagtggtttcaaactttggtgtgcactgagatgaccagggttactagcaaaaatgcagattcctggccaggcacggtggctcgtacctgtaatcccagcacttmgggaggccgaggccagtgtatggcttgaggtcaggagttggagaccagcctggccaacatgatgaaaccccatctctactaaaaacatagaaaattagccaggcatggtggtgcgtgcctgtaataccagctactcaggaggccgaggcaggagaatcgcttgaaccaggaggtggaggtttcagagagctgagatcgtgccactgcctgggtgacagagtgagaccctgtctcaaaaaaaatgcggattcc

SEQ ID NO: 501946 - DNA, 552 bp, Homo sapiens
ctgtgcgacctcaggtcaataacagccttatgaagcctcaggtccctcatctgtaaaacgggaggaaacccttgttgcatggcaggcttgtggttcagactgaaaattctaattactactgtggctgctgttgttcaatccataggccctggaagtctggaagcaagaactccacaccccaacagtggtttcaaactttggtgtgcactgagatgaccagggttactagcaaaaatgcagattcctggccaggcacggtggctcgtacctgtaatcccagcacttagggaggccraggccagtgtatggcttgaggtcaggagttggagaccagcctggccaacatgatgaaaccccatctctactaaaaacatagaaaattagccaggcatggtggtgcgtgcctgtaataccagctactcaggaggccgaggcaggagaatcgcttgaaccaggaggtggaggtttcagagagctgagatcgtgccactgcctgggtgacagagtgagaccctgtctcaaaaaaaatgcggattccaaggtcctacccct

SEQ ID NO: 501947 - DNA, 551 bp, Homo sapiens
tgtgcgacctcaggtcaataacagccttatgaagcctcaggtccctcatctgtaaaacgggaggaaacccttgttgcatggcaggcttgtggttcagactgaaaattctaattactactgtggctgctgttgttcaatccataggccctggaagtctggaagcaagaactccacaccccaacagtggtttcaaactttggtgtgcactgagatgaccagggttactagcaaaaatgcagattcctggccaggcacggtggctcgtacctgtaatcccagcacttagggaggccgaggccagtgtatggcttgaggtcaggagttggagaccagcctggccaacatgatgaaaccccatctctactaaaaacatagaaaattagccaggcatggtggtgcgtgcctgtaataccagctactcaggaggccgaggcaggagaatcgcttgaaccaggaggtggaggtttcagagagctgagatcgtgccactgcctgggtgacagagtgagaccctgtctcaaaaamaatgcggattccaaggtcctacccct

SEQ ID NO: 501948 - DNA, 525 bp, Homo sapiens
ctgtttggctttccacaatcattatctattttcagcctccgtgtcctgatgtttaaaatacagcagctaaaatatctggtggtcttttcttcctcttctgagtgcagccacgacatgccacatctctgcccatggccttcttgcctttgtctctagagggtgccatcagggatggatctgtccatgcaggaaggagcctgaaccccagactcttggacctcagactgggagagggtgtgggtgaaggcacgtggaccagtgattgattaattgattgactgatttatagacagagtctcactctgtcaccaggctggagtgtagtggcacgatctcggcttactgcaacctcygcctcccaggttcaagcgattctcctgcctcagcctcccgagtagctgggactacaggtgcccaccaccacacccagctaatttttgtatttttagtagagacggggtcttgccatgttagccaggctagtctcgatctcttgacctcatgatctgcccaccttggactccc

SEQ ID NO: 501949 - DNA, 525 bp, Homo sapiens
ctgtttggctttccacaatcattatctattttcagcctccgtgtcctgatgtttaaaatacagcagctaaaatatctggtggtcttttcttcctcttctgagtgcagccacgacatgccacatctctgcccatggccttcttgcctttgtctctagagggtgccatcagggatggatctgtccatgcaggaaggagcctgaaccccagactcttggacctcagactgggagagggtgtgggtgaaggcacgtggaccagtgattgattaattgattgactgatttatagacagagtctcactctgtcaccaggctggagtgtagtggcacgatctcggcttactgcaacctctgcctcccaggttcaagcgattctcctgcctcagcctcccgagtagctgggactrcaggtgcccaccaccacacccagctaatttttgtatttttagtagagacggggtcttgccatgttagccaggctagtctcgatctcttgacctcatgatctgcccaccttggactccc

SEQ ID NO: 501950 - DNA, 587 bp, Homo sapiens
tattagcagaataaaatttaggtgttgtagtttgggtggcaatccagtgaatgaggtttaacagtaatgactggtagctaggttaatacctggtcacagggcttttttgtacttcttgagttcacagatatgctctgcagtgatatggagtgatacggttccctcaacagatctgcttgtaaaacttgagagagctccctctgatagctggtgctgtgcccacatttcttttgttagtttttctgagccacatggtcttcttgggcagaagctgtggcagggagatatgccacatgctttttggactggacctgagaagggaggcatgttccactcttaccccagctcaggaatccgtgcatctcacccctctcayggctctgagattgggggctctttctctgtttgagtgccagccacaaatcttggttccatactcccaagctgcacactacagccctggggacactgggatatcccatggcttgggtttgggttcttgctccactgggggatacagtgtgctccagggtcatgaagaaaatatgtgggtgcaactacacactcaggctgaccttccagggctg

SEQ ID NO: 501951 - DNA, 587 bp, Homo sapiens
tattagcagaataaaatttaggtgttgtagtttgggtggcaatccagtgaatgaggtttaacagtaatgactggtagctaggttaatacctggtcacagggcttttttgtacttcttgagttcacagatatgctctgcagtgatatggagtgatacggttccctcaacagatctgcttgtaaaacttgagagagctccctctgatagctggtgctgtgcccacatttcttttgttagtttttctgagccacatggtcttcttgggcagaagctgtggcagggagatatgccacatgctttttggactggacctgagaagggaggcatgttccactcttaccccagctcaggaatccgtgcatctcacccctctcatggctctgagattggggsctctttctctgtttgagtgccagccacaaatcttggttccatactcccaagctgcacactacagccctggggacactgggatatcccatggcttgggtttgggttcttgctccactgggggatacagtgtgctccagggtcatgaagaaaatatgtgggtgcaactacacactcaggctgaccttccagggctg

SEQ ID NO: 501952 - DNA, 587 bp, Homo sapiens
tattagcagaataaaatttaggtgttgtagtttgggtggcaatccagtgaatgaggtttaacagtaatgactggtagctaggttaatacctggtcacagggcttttttgtacttcttgagttcacagatatgctctgcagtgatatggagtgatacggttccctcaacagatctgcttgtaaaacttgagagagctccctctgatagctggtgctgtgcccacatttcttttgttagtttttctgagccacatggtcttcttgggcagaagctgtggcagggagatatgccacatgctttttggactggacctgagaagggaggcatgttccactcttaccccagctcaggaatccgtgcatctcacccctctcatggctctgagattgggggctctttctctgtttgagtgccagccacaaatcttggttccatactcccaagctgcacactacagccctggggacactgggatatcccatggcttgggtttgggttcttgctscactgggggatacagtgtgctccagggtcatgaagaaaatatgtgggtgcaactacacactcaggctgaccttccagggctg

SEQ ID NO: 501953 - DNA, 572 bp, Homo sapiens
aaaacacttggaatttctctctgatccctggtctgtactcataagttgtttgccackcactaccctttactcatgccttccccgacagtacagcagcagaagggctgcagagaaattaacttcatcttaggttccacttgccattgagattgcccgccctccaccaaatttattttcttaaaaatggattaaaagtaacaagaagctatttctcctcctttgtaataaaaacttactgaggatgagtaattatgtcttcttttcttattagaaccatagatgatgctgggagatatcagatagcgacttaattacccataccttttgtgcacacattcaagtgtacacacagtgacttaattatcagacttacgcattatctaccgcatttctttaatcccagcttggctgttaccacttagcacagaaggtgtagtgtatggacattcatggaatgggcattcgtttaaaaggaggtaaatcttgcattggagcccttttttggttgcggggggtgggcaggaaggtccacataatttgaacatggctaattcagaatttaggatctgtta

SEQ ID NO: 501954 - DNA, 572 bp, Homo sapiens
aaaacacttggaatttctctctgatccctggtctgtactcataagttgtttgccacgcactaccctttactcatgccttccccgacagtacagcagcagaagggctgcagagaaattaacttcatcttaggttccacttgccattgagattgcccgccctccaccaaatttattttcttaaaaatggattaaaagtaacaagaagctatttctcctcctttgtaataaaaacttactgaggatgagtaattatgtcttcttttcttattagaaccatagatgatgctgggagatatcagatagcgacttaattacccataccttttgtgcacacattcaagtgtacacacagtgacttaattatcagacttacgcattatctaccgcatttctttaatcccagcttggctgttaccacttagcacagaaggtgtagtgtatggacattcatggaatgggcattcgtttaaaaggaggtaaatcttgcattrgagcccttttttggttgcggggggtgggcaggaaggtccacataatttgaacatggctaattcagaatttaggatctgtta

SEQ ID NO: 501955 - DNA, 497 bp, Homo sapiens
atttacatagaaaccaggtggcaccatggcagaggctctagccaaagcaggaaaggtgcaacctttcaaggggacatacgtgcacatttatctccattgtcaagggtgtggctctgcaggagaggactcacgttggcacctatcctcttcttcactagaagatcaaggactaaagaggatattagttagttagcattttaattcttttagccatatctttttgtgtgtttgacttcttttgagtggttaacacacataataggacagtattataggggtggtttgaactgttttgagtagtgtttttttttgttgttgtttttgttttgagacagagtctcactgtgttgtgcaggctggagtgcagtggcatgatcttggctcactgcaacctccatctcttgggtttaagygattctcctgcctcagcctcctgagtagctgggattacaggtgtgggctaccacacctggctagtttttgtatttttagtagag

SEQ ID NO: 501956 - DNA, 526 bp, Homo sapiens
cagactccctggggaaaactaaatataaagacccaggatcaaacagggacacaaaagcaagtatcatgggaggaacttgaaatctctgtggacagcagaagctgacttcaactctgataattgtggcatccataaattgcaaatatagccctgaatagatacacacaaatgtctataatgaaggcccagcagaatggaatgtgtgaccatcttcaggaagaaaataatgaatacatgagtacaagaaaataaattacaaataaaagtcaaacttgaattctatatgtattaaaaatttcatttaaagagaaagtcaaatgaataccctgtaagacaattcgattctgagaaaatttattgccagtgcattcatccttcagtaggtgctttggcaaawtttctgccagggtgagtagccatatgatatacatctgaaacatgaatctatccaaataaaacaggtggtcaagaatgaaaaaatgaagttgaaatgtagtttttatatttttaattgttctaatatatg

SEQ ID NO: 501957 - DNA, 500 bp, Homo sapiens
atccaaatgattttaattgcgtttatatatatatacacacaattcaattatatttttttaccttctagaaaataatagctgattcacttgaagaaaatctgcgtttagctcaagagtatcaacagctacagattacattcttaaaagaaaaggacaattatttcaatatatatgataaacagctatcacttgatacttcaattagagataagaaacaggtattggtttttctaattgttttaaggggatgatttatgtcatatatgcactacaaaagtaaaaagtagtcagtttgggtgcctctgatctgaygatgatatccacaacatggcctattttctctgtgtagttttgttgtatatttatatcaaccttttaaaattgaattttgaaagaatattggagaaatgaaaaacttagtttctaatccactattctatagtaatttgattttgattaatatgatgagaaatgccaattttttatctgtagatttaaat

SEQ ID NO: 501958 - DNA, 571 bp, Homo sapiens
atatcacagaaaagttttcacttgcttgacattttattctacaatgatttttagtttaagtttaaagaatggctacattcagatttattttcacaactatagtcctgctaaactgcctttgttgaaaactcagtttttataataaataaaaaatatcaaagcaaaaaaaaaagagccttcatgataaatcaccattcttactgcactttaagcagataatcatgccagagactaaactgactttgcaaataaattagttttattattattatctttgkgggtaaaagttgggatgactgtagaagagaaaattatatttcagaagaaaattataccatacttgttattagattctagtcttgataattgtttttttgagtttttgttatttgcctacaatttgggctgaatcctgaattccttcctgggtacaagtctccaaactaatgtttcctaatttttctaccatttttctgtcttggaatcaccaagccctgcaggctttagctagacaacttgatataaactttggaagaaataatgacagcaacttaatatatgagcagtgttc

SEQ ID NO: 501959 - DNA, 609 bp, Homo sapiens
ccaatagccctccactgctctgaataactaaaccatttcagtcttttctacctgtcttccatgctatatgcactctattgtcctggctttaataaccaataatttagatataaaactttgtgtctatatgtgtttgcacattttgcaaaagattggccatacttttcataagatttacaaactggcccagtgcagtgacggatgcctgtaatcccagcactttggaggccaaggtgggtggatcactggagcccaggagttcaagaccagccagtgcaacatggagaaaccccatctctacaaaaaatacaaaaattcaccgggcgtggtggcacatgcctgtggtcccagctactcagggagctgaggcaggaagatcacttgagcccaggaggttgaagctgaagtgagccatgattgtaccactgcactccagcctaggtgacagaatgagaccctatctggaaaaaaaaaaaaaaaaaaaaaaaaatttacaaaggggggtcaaacccaaaaaagcctaaaacctggagagatcaatagcacaatagactaggagtctgkctactttctcattttgctcttttattgggattatttatttattct

SEQ ID NO: 501960 - DNA, 643 bp, Homo sapiens
ctgggtttgcatcctcaggaggtaaaagccctgtcctagcccctctccttgctactgagacagtgtctgggggcttcccgccctagccaggctacccactaatctccctcctcaatttctattaaatgcttccctggctctccctgggtttcagtttctatccatgccctgtgagcaaaaagtcatgtggattccactcctgaggtgcctctcaggcccatttaaaaaaaaaaagaagaaaaaaccccacatgtaaatcggcttgttatataccagacactgttcaaatctctttgcaaataaaatatatctactctaagttgcttacatgtattagattcatttaatccttacaaaacatctatgagtagtagttagcctcaatttacagatgaataaactgaggcacagagagtttgcatgacttgccttaacttcacagaactaggaagtggcagagctgggattttaaccccggccctgtgcctccagagcttggacactcaaccacttcacgctctgcctttcctcactgagggcctgttactgcrctgggctcagcttcagtgcatcctgccagagttacttcacatgacagtcctactttttaaaaacttgcagttatgtaatgtatatatattaa

SEQ ID NO: 501961 - DNA, 580 bp, Homo sapiens
ttgcccagaggtaccagctaactgttagactcatgaaaaataataagtggttctgattttagatcacttaattttggagtggttcattacacagcaaaaggtaatgactcaagggagtagcatattcaaaatcctgcccatcttaaaataattgtatctgcacataggctcccggggcccttgacaaagtacttgcctttattttccttgacagaccaaatagtggatgtggaggrgccccaggcaagacacaggagcactgggatacatcgtgatgagcataaaagaaaggttcagaaattttttttcataaagcctgatgaagaccatgacgaggatgatcccagccactgtttgcgtggtcaccatgtagcaaatatgttgcgtatattatctaatttaatccttgaaccacagcatgggataggtgttcttatcactcttttacagatgcaaataatgaaatttggagagagtaagtaattggctgaataccgcatacatagtttcaagtcaaaaaatcttaattctaacccagttctgtgtgattccaaagcccacactgttttctgttattgcc

SEQ ID NO: 501962 - DNA, 580 bp, Homo sapiens
ttgcccagaggtaccagctaactgttagactcatgaaaaataataagtggttctgattttagatcacttaattttggagtggttcattacacagcaaaaggtaatgactcaagggagtagcatattcaaaatcctgcccatcttaaaataattgtatctgcacataggctcccggggcccttgacaaagtacttgcctttattttccttgacagaccaaatagtggatgtggaggagccccaggcaagacacaggagcactgggatacatygtgatgagcataaaagaaaggttcagaaattttttttcataaagcctgatgaagaccatgacgaggatgatcccagccactgtttgcgtggtcaccatgtagcaaatatgttgcgtatattatctaatttaatccttgaaccacagcatgggataggtgttcttatcactcttttacagatgcaaataatgaaatttggagagagtaagtaattggctgaataccgcatacatagtttcaagtcaaaaaatcttaattctaacccagttctgtgtgattccaaagcccacactgttttctgttattgcc

SEQ ID NO: 501963 - DNA, 634 bp, Homo sapiens
gtaagctgaatgattcccgaagatcatacaggaatgggagacaacttcacactgatcaagccaaaaggggatactttgttgaatgtctgaggcattwaaaagaaaatgcagagggtacttcatagtagggctactatatgccacccttaaaaagatgagagataaagttcaaaataatgcacaaatgattaaattttctgccaaaatatacttcaacactctttacatgaagacagcaagatccacacacttatcaccataatttcacaatgtccaatatcatataaaaactactgaacatgaagcaggaatttatgactcataatcatgagaaacgtgatagaaccaaacaaattagagatgatggaagtagcagacaagtacattaaaacattatacatagtcttaaggatttaaaagaaaacaaggtactagagcagtggaagacttgggaaaacaaatgtacttcatagagttgacaagcataatatttgggagaaaaaattaaatggatggactttgtagtagataacagaccatataataaaagaccaatgaacttgaagacatagcaacgaaagtatgcaaacaaaaatactgaaaggaaaaaatcttgaaaaataaatacagtctc

SEQ ID NO: 501964 - DNA, 634 bp, Homo sapiens
gtaagctgaatgattcccgaagatcatacaggaatgggagacaacttcacactgatcaagccaaaaggggatactttgttgaatgtctgaggcattaaaaagaaaatgcagagggtacttcatagtagggctactatatgccacccttaaaaagatgagagataaagttcaaaataatgcacaaatgattaaattttctgccaaaatatacttcaacactctttacatgaagacagcaagatccacacacttatcaccataatttcacaatgtccaatatcatataaaaactactgaacatgaagcaggaatttatgactcataatcatgagaaacgtgatagaaccaaacaaattagagatgatggaagtagcagacaagtacattaaaacattatacatagtcttaaggatttaaaagaaaacaaggtactagagcagtggaagacttgggaaaacaaatgtacttcatagagttgacaagcataatatytgggagaaaaaattaaatggatggactttgtagtagataacagaccatataataaaagaccaatgaacttgaagacatagcaacgaaagtatgcaaacaaaaatactgaaaggaaaaaatcttgaaaaataaatacagtctc

SEQ ID NO: 501965 - DNA, 550 bp, Homo sapiens
cagaaagcaataaagttctttgttcaaacgactaagacctccacaaacaatgattcaaattcactttctatcactcaccagcaaataatcagacatgtggaaatgaccattacggaattcaaagctagaagtgatgcagaaagctcctctccttagaggggcagcttgagactttattttcctcaatttgatgtattctgattcatcaggtgatagctggaagcttcgagtcttatacctcagcctgtctaacccttgtttgggatagtgatgtactctctttcgggtatcctctgttctgtttagtttctctcttccttggcatatggctttcacttaratttacaattactatttttctcaacaggaatgtccttctctgacatcatttctccttcttttactattctccagcattgttttaggtgccaggaattcttatgtgattaagaccggaaacaatgtgaccctcttggagattacttcctgttggtggaggggccatacatgagaaaaaaaagagggccttcaggccttctggagaggactg

SEQ ID NO: 501966 - DNA, 560 bp, Homo sapiens
tatcaaacataaattctagagttaataaccaggatttcaagaaattgagaaaaaagcacaaagatgatcgcatgaataaaaattctgcaagggagggaatattaagatggaatattaagaatcccagccacgaaccaacactggggtgtatcgcaagtgaaattctaagtatgtaattaaaaattgtgcccatggagaagaaaaatgttcatatgcttcaggcaatctacamatctgggctaagagctcctgggtacatgtatagttgcaaatcagaaacacaaaagaggccgagcacggtggctcatgacttgaatcccagcagttagggaggccaaggctggcagattacctaaggtcaggagttcgagaccagcctggccaacattgcgaaactccgtctactaaaaatacaaaaattagccgggcatggtggcgggtgcctgtaatcccagctactcaggaggctgaagcaggagaatcacttgaaccaggtgggcagaggttgtagtgagctgagactgtgatcatgccactgcactccagcctaggcaaaggaa

SEQ ID NO: 501967 - DNA, 560 bp, Homo sapiens
tatcaaacataaattctagagttaataaccaggatttcaagaaattgagaaaaaagcacaaagatgatcgcatgaataaaaattctgcaagggagggaatattaagatggaatattaagaatcccagccacgaaccaacactggggtgtatcgcaagtgaaattctaagtatgtaattaaaaattgtgcccatggagaagaaaaatgttcatatgcttcaggcaatctacacatctgggctaagagctcctgggtacatgtatagttgcaaatcagaaacacaaaagaggccgagcacggtggctcatgacttgaatcccagcagttagggaggccaaggctggcagattacctaaggtcaggagttcgagaccagcctggccaacattgcgaaactccgtctactaaaaatacaaaaattagccgggcatggtggcgggtgcctgtaatcccagctactcaggaggctgaagcaggagaatcrcttgaaccaggtgggcagaggttgtagtgagctgagactgtgatcatgccactgcactccagcctaggcaaaggaa

SEQ ID NO: 501968 - DNA, 623 bp, Homo sapiens
ctggaccaattcctaggacacagattttacacctgagttaaaatgttgtctttcgtgaatatcttgttcacagaagaaagaggattaattagaaaagcagccgtgaccatctgggagagtcaaaaccctcctgggtgaaaagtcttgccagtcaaacaaaaatttccaaatgttgatcccgaatggggtaataatgatcccagagaccgggcccaaatgcaggacctcagggacctaataagtaaaaggataaaatagtcaactctttggacacagaatgtctcaaaggcatttgaagttcaacaagaaaaagaggaaacttctgctgaattcctgtagaagttcagagatcagatgagaaaatactccaaattagatctggaggaccccayagggaaaggtcattttaaggttagctttgtaactaagagctggcctgacattacaaaataattacaaaagattgatggatggaatgataaaacaattgagaaattactgagggaagctcagatggtctttgtaaagagagaagagagtcagaaacagaaagcgaaaatcatggtttgcactgtggatgaggtagtcagaaaaaggttaaatcaagatccccctcaaaaaag

SEQ ID NO: 501969 - DNA, 529 bp, Homo sapiens
aaatctcagatttcactaacaggcaattcacccatgtaaccaaaaaccagctgcaccccatgaactactgaaataataaaaactatgaaaggaaaaatgagacaaataaagagagtcaaactttcggtaatctttgtggttttgaatggtttttgtttttgaaggggtggccttcgatgtttattattcaaccagttaaaagtagagtccaaaattttttaaccataattaattacagatattttaactaaaatttatctcctctctctttccttatcaccaacatttaacctgtggatagtaataatgtccttatttcaaaaagtgcctgaagtactatcattcctgtaatttctaattccaaaattctaatctaaatracatttcttgatacttagattatcacctctcatcactaaatcatttgtcatcctccaccataaacattatcagcctggctttcatgggcttcattatttgccaactacatgggtatctactgttttctatctcacagacaccattatct

SEQ ID NO: 501970 - DNA, 272 bp, Homo sapiens
tgtgcttttaagaaagaaagttttttgttttstcttgttttattactaaagactaaagacttcagttggcataccactaacttgctctgtttttgtttttcctagggcattaaaggcatggcagggcagcctgtatattctgtatgtatctccttattcatgaaagaaaactcaataagttcactgggaaataaacacagttactcaaaagtcactgtacttgcatttcttttctctctcctttttcaacatttacagcaatgtgatctgat

SEQ ID NO: 501971 - DNA, 324 bp, Homo sapiens
tgcccttcctagggccaccacatccaggcactaagtgggaagggagttctcccttagtccagctgtttcaggctgaagctggacagctctcatgggcgaaatttgcttcaragctctctgctaggtttggagctttgtttagcctatgtcactatttgagttatttggtccatcttgctttccccatttattttacaggtgtggatccctaataaacatcttgcatcccaaactccatctcaccactacctcaaaaatgtaggcataggaaatgagaataaaacagcctccacattcataggaaaagactgtagtcttagtaat

SEQ ID NO: 501972 - DNA, 626 bp, Homo sapiens
tggtaccaaagccaggtcggttctgactcctattccagaacttccctgactcatggtggtgaattgccactgggagtttaaatatgtgtccttctccaagtctcaaagtcagtgtcacctcccaggggaagtcttccctgatcccaatggagagcactgtgaaacctggtcacagggaattgaatccttggcttggagggcccacagtgccacctgggtcatctatagacagaatttctcaaacttcaataacttttatgtgcatgagagtcacctgggaatattgcaaaaatgcggattctggcttagtaggtggagcctgagattctgcattcctgtcaagctcctaaatgacatcaataccacgggtacatgggaccacattatatgtagcaaggatstacaagtctggaggcaaaagcaggatggaataaaagagaaagaagggcctctgtccccagacagacctgagtgcatatcaaccctgccattttattctgttacaataaatcatcctttggacagagttcaaagcccaccttgtcctgaatcctgctctgagaagcaaagcggcttcccccaggctagaccgtcaggctgctgctgcttagatgtgcagacagcac

SEQ ID NO: 501973 - DNA, 544 bp, Homo sapiens
ccactaattcctggacaaccctgtttctttagctgcccgctctgggcctctagtgcccatccagaaaataagggagatcataagtcaggatttttcaactctagctgcacattagaaatcatctggggaaattttgttttttaatgctaaagcccaagctcaacccccagagattctgatttcactggcttggggtcaaaccaagcatgggtattttttagctggagtcactgatatatgcagtctttcttaggatggacattctaggagcctgtgttgtcaaaaaaagtaacaagtcagtgaccttgaggtccagggtcaygtgtttccatgtttagatttttgctatcaattatttgtacttgctggattatttgtactgtctctccccagttaagtttcctcttaccagtgaatgttggagaactatacgctaggagacaggagacttcacttctggccttttttgtattagctctgtgatatgggcaagtcagtgttggctccctgggcctcaatttcctcatccccagctaatgagaaa

SEQ ID NO: 501974 - DNA, 544 bp, Homo sapiens
ccactaattcctggacaaccctgtttctttagctgcccgctctgggcctctagtgcccatccagaaaataagggagatcataagtcaggatttttcaactctagctgcacattagaaatcatctggggaaattttgttttttaatgctaaagcccaagctcaacccccagagattctgatttcactggcttggggtcaaaccaagcatgggtattttttagctggagtcactgatatatgcagtctttcttaggatggacattctaggagcctgtgttgtcaaaaaaagtaacaagtcagtgaccttgaggtccagggtcatgtgtttccatgtttagatttttgctatcaattatttgtacttgctggattatttgtactgtctctccccagttaagtttcctcttaccagtgaatgttggagaactatacgctaggagacaggakacttcacttctggccttttttgtattagctctgtgatatgggcaagtcagtgttggctccctgggcctcaatttcctcatccccagctaatgagaaa

SEQ ID NO: 501975 - DNA, 650 bp, Homo sapiens
taatcgctgtggccagaccctttggtggtattcagttttcaaagaacgatcttgtctatatgattttttgtacacatgcagcatatctgtagcttaagaaatagcaagtatttttttaagtgaccactcaaatccatggtaattagtctggtataaatagtgatgtatgaatctgtaatgcgttttttttcctagtgtgaattaaacattactgtgctgaagaacaaataataaagcaaatggaggaaaatattaataagaggtgacttaggtagagggtatattggtgttctttgtcccattatttgtagcattcttgcaacttttccctaaatttaagataatttccaaattaaaagagttaataagttactctagtgaagcatccagaaaatcaagtttgaggataacattttgacatgcctgaaatcttatattattaattataaacaccttagtccatcctgctatttagagcctttcgttttctatttgatttytgagaatttaccatagtggcacatgcttacaatgggaagtgaaataaaacactacaaagatcaataaaggcaaaataaattatctgactcctccacccccccgtccctccgatcccccctcctcttgatgtaaccagtgttaccagcctg

SEQ ID NO: 501976 - DNA, 630 bp, Homo sapiens
aatcagggaagacttcatgaaggaggtgataccttctgaaggatgaatagaggtcaactagatggagaagaggggaaataggtctaccaggctatgggcaaaaactgtatgggcaaaaacctgggggtaagaggaagctgggtgcatccaaagcctgcatgaggcttgacggtgctagcctattggtttggggtagcagaggtatatagttattggaaaggcttcagccagattaaagaacttcacttttgtcccractgaagtatttcatccaagaagggaagccaagatggtatgatcatgtccgagatatacattttaagatgatcacattggtgacagtatgaggacagggacaggggaggcacaactggaggtagagagaggattataggtttgatagaaagtcctggaccagtgttccctgaccttttgagtttaacatcctaaaaatccacccagctctcctcagcagcccagagccacctctggaatagttgcctgagcctccttagcagttctgatgttcttagctggtggacttcacctccaagccccagagtgcatgttaatgaaaccattagcaattgatggaaatggttttggagaacttgcatcaagaaataggtt

SEQ ID NO: 501977 - DNA, 562 bp, Homo sapiens
aattcaaggactgtctcctgaaatcaaagggattttttgcctttagaaacaacttggggtgggaagagcacagtctttgaatacagatctgagtttgaatcctgaaactatcatcttattagctgtatgacattgagtaggccrctttaacctctctgagcctcagtttccccatatgcaaagtgggaaaaattggtacttgcaccttcattacattggtctaaaagttaactaaaataaactgtaagatggtacctgaggccagtgtggtggctcatgcttgtaatccccgcactttaggagcccacagcggtaggatgacttgaggccaggagttcaagatcagcctagtccacatagcaagaccctgtttccacaaaaataaaaaattagacgagcatggtggcatacacctgtagtctcagttacttgggaggctgaggtgggaggataacttgagcctaggggttcgaggttgcagtgagctatgattgtgccactgcactccagcctatgtgacagtacaagaccctgtctcaaaaataaataaataagataagat

SEQ ID NO: 501978 - DNA, 591 bp, Homo sapiens
cagctgcccctccacacctcttcattcattccagattgagtttgccttggtggttaatccccatgatgctgttccatcatccccttcaggaatggccaggatagagccaggtgggcagggcaggttttagggactcggttggatgggcctccaatgctactcaggtggaccagaagcatgcacatccaaggggcatatgtgaactttagctaaataggtgagctgaggtcagcattcagaagtagcttcaagcaacaggtttgaaggataagaggaaggctaagtctggtcagggaataggagygagcaatcctcattccaaattgtagcaggagagaggcaaagcagacaaagacaaaaagctgtgagcccctcggagaggctgagagcccagatgggtcctgcccaggtgatccagggccagggacaaccccacttacacgttcagggctagaccaggctgacctaaaaggctctcctccaggaagcttcccctaacaaagtccctttattcttctacactcagaggacttctgctccctcttctaatcctctctgatgtagttccgtgattcttaatagattccactg

SEQ ID NO: 501979 - DNA, 633 bp, Homo sapiens
gcctacagatgacacttttgtatcacagcaatatcagtttgttcctctgtaaactctctcttcttcmaaaatatgtattctggccatccccatctgattctgatggcatatctgatctgaaagttgttgatactctgatcttagaaagtgaagggtttaatcttctcttggaacccctcccagtgaaaattattttgccactttgaaatggcacgggcatccactgtgaactcacatccataaatctaagtctactgctcaggaaagcagatgaggtttgattctgcttctcagcacagtctcacagagaaaattatggaaagaatttgatttatagaaccacctcaaaggctctggagtgagacgcatgttgattcactttattaccatttattttacactatctctttacgctccctgcacatggatttgaaagatgatttggataaatgcttatgacctgtcagattgcatagccctgttgaggcacatggctgccaacatctcgggttgggggatcctcataccagttttgggggtcaggcccagcctctaacaaacagatgtggaggttctagcccagagttcttgtctgaactttcccagctctatgtttgtatggtacttggtgtg

SEQ ID NO: 501980 - DNA, 583 bp, Homo sapiens
caattacaacataccattctataaaagatatgttctgcccaacaagtctaatcaaaaaataatgtcaagttcttgactattctttattattttattttattttttgtgaaaatgaatgtttcagtttaaggagaaaacacctaggtctggttgaggagtacaaagaaaggtttcaagggcgttattgatactaaaaaactaaagcatataagtctctcactacataatattttaagctatgaattaagaccagaaccacccaaggatctaataatttcaccacgttgttcacattttgaaagccaacacatgttcatactttctatattctttgttgaaattaattatttcaatcgtgtctcagagcccaaactaggaatacaagctaagcccagttaatttccaacatatcgtatttcaaatatattatgaaggttaatccagaattccttccatatgtttagaataaattttttataaatatgttcaattttgcctgagtgatttaactattaacatataaatatttcaagtgcctaccataattttcaaacactaaaygttcttattagtttatttcaat

SEQ ID NO: 501981 - DNA, 644 bp, Homo sapiens
tcaggtctgatgactcagttcatggatactgtcctggaatatgggactatagggatatccctagtgctgggttttattgtggtaggcccagtggtagagtccacggcaaaatcttgtgcttgcttcccttcatttccacaaagtggatattatctctctctatgctgcactgtcttgtgttggggaatgggtaacatggatgatgtaaaacagtcttttctaatttcttcaatgagtgttttcttattattttcctacaaccacatactttgatctctaagttggtttctgttgctcttgtgaatgtagttttcttgggtgtatagttactcaaattggtatttctgcaragagaaagttgctggagggtcctacttcacccctccccctcatatttttaattttaaaagatattccttcatatgtattttgctattgtattttttaaagtccatattgttcatttatttacagtagccaattgacaaataaagcacctgcttctatgtgagcaccaaaaatattttagatccatcaattcatagtttataaaacactaaatttcatgtcatttttgcttgtttcccaaatttcttagaaattacctaattaaaaatctttctttataagtatcttcttttttg

SEQ ID NO: 501982 - DNA, 582 bp, Homo sapiens
ttaatttttttctgagtaaaggaaatagagctaaaactcaaattggacagtttattttattattttcttttcacagtctaaattagtacttggtaagtggacaggtcgaatccattggctaaagtgattctttaaagacaaattttatttttaatcacctatgctatctatttcacaagaccaagaaaaatgattggtgcataacattttatgggtaaagttcatatgaaaacgatggtatggaaatgtcctagttattcatccttaattaatatagtaatatttatattaatacataataagattaggtaaaataaatattgaagataaaataattagtaatccataatcagtcacatttaagcatggccaaaggtaataaggcagacattgttgatggtggatggctcctgctatgtttctttcattttctttcacctagtcagtttcattgattccatgctcaggaagagagaccatgttggaagaggaaatcggtraaggagctgcataggtcacctaaggaaaggtcatgtttcttcagccataaccatgcagcctccattttgtgaactcagcaca

SEQ ID NO: 501983 - DNA, 624 bp, Homo sapiens
aaaaaatctcctgcagctagctcggtgtctgccaaatggccacccagttttgtgcttgaaacccagggccctggttgtgtaggcacctgagaaaatcttctggtctgtggtttgcaaaaaccatgggaaaagcgtaatgtctgggctggatagcactgtccctcatggcacagtccctcatggcttcccttggctaggggaaggagttctctgaccccttgtgcttctccttgaggtgacaccccaccctgcttctgctggccttctgtgggctggacccactctctaaccagtcccaatgagttgaactgggtacctcagttggaaatccagaaatcacctgccttctgtgtttgtctcgctgggagctgcagacgggaactgttcctattcggccatcttgcccagctctcccctgcagtctatcatttgaatgtgttctgatttgcttaatcagtaattacctagacatagaattatttctattgttttggctattataaattatattgtgatgaacactcttgttcataatttttacttgcttggtttccttgagaattacttgggaaargataaagacattatttgggttaaattgacttccatacctctttacagaaa

SEQ ID NO: 501984 - DNA, 400 bp, Homo sapiens
cttggtgtgcagtcagatgaccagatatctcacactatttcattggaacaggcttytaagcttacaattgccgagtgtggtctggactttgcaatgaattacgtctggtagagtaactatatctcaataaacactctcttggtatcaaaaacatttgtgacctttcagtatttcttactgttgattatttatttgtaaaatggtttgagttcctattgtatgggcaataacaaaaaaattgatattatatgtatcagccaaagcctgtattagagaaaatgccaaataattcattttttaatccaaaacagattgctcactttacctgccatcaagtttattgagacaaaacaagaactcaatttttactgtaattaaattaagaacaaattagcaagct

SEQ ID NO: 501985 - DNA, 583 bp, Homo sapiens
agctttccaagcaggatattggaagattctcctctaaagaaactaaacatataaatcttgacttcttttttgtggatgaaggggaggagaggtgaagagatcaattaacaagccctgctgtccacacagaactttcaattggctttttagtgccatgttaaccaatatgcttcagacacttgggaaatgtctccagcctgacaattcacactaatttaaaaagaaaaaaagaaaaagggggaaaaacaaatttgacaggaatagaaactacagggagcagaatagaactaaaaaattgtaaaacaagaactattgtaaataaaatactcaagagagctaagagaagaaattctgtttgaaataaaaacaagattytaagaaacaggagcagtcagagaagttgagtgaaagcttgagaattaaaatgtgatagaaaaaattagaaaaacgttcagtaaaatgtttggaaggtaaagtagaacaaggagtcaaataatttgttctcctgtcttgaagatatgtaaaaaaaattataaaaagaagtgaaagaaatggacattaaagaaactataataacacagag

SEQ ID NO: 501986 - DNA, 616 bp, Homo sapiens
aaatcttaacacactaggaaagggaaataatattttcctacatcttaaaatatttaaccagaaaaacgtaatgatctaatttcgtgtatagtgtataggtgtgttttaaacttccctctactctctagatgtgagaatttgagtctctggaaaaaagtgacagcagactgatcaacaggagaaaaggcatacaaatttattacatgcatgtgcagagcctcacaaactataagacttgaagaagggccaatgattgaagtttgtatagcatcagaatagggtcttggggattcttaggggaggtgtccacaagctatgggaaggtgagggaaagaaatgtatggtgaacaaaggctgtcttgctatgtaggtaaagtctttcaggyaaagccgctctggggtgatgtcaacatttagcctcttttcctgttatatatctttcctggatgtcttcaggcagatacgggaacctcagagaaaacctctgcttatagctgctgttccccacaattccccaatcaaggtaccaaagaatcatattttggggttttgttttctgagccccaacatctccataagaaaataaagtaggaaatgatcccggacatggtcacag

SEQ ID NO: 501987 - DNA, 597 bp, Homo sapiens
gaaattatgctaagtgaagtaaatcagtcatagaaagacagatagcacatgatctcactcacatgatcrcactcaaaaaagttgatatcatagaagtagagcagagaatgaagataatcagaggctaggggtggctagggagtcaggggcttgaggagatactggtcaaaagacatataattgtagctagacaggaagaatcagttcaagaggtctactgtatagcatagtgactatagttaatgatgatatattgtacatactgtattcttgaaaaattctaagaatggatattaagcgttctcaccacaaaaaaatgataggtatgagaggtaatgcatttattagctagatttaatccttccacaatgtatatatacttcaaaatattatgttgtatgtggtaaatacaatattatgtggcaatctgaaaaataactaattgtttttaatttcactgagcttgagttctttctatattaagcacatcatgcaagacacagtagtggggggggatagatccttaaaagtgttatacaggtggtacacagggttagggagcctgggtgaagtacagacagcctctcctgggactgt

SEQ ID NO: 501988 - DNA, 597 bp, Homo sapiens
gaaattatgctaagtgaagtaaatcagtcatagaaagacagatagcacatgatctcactcacatgatcgcactcaaaaaagttgatatcatagaagtagagcagagaatgaagataatcagaggctaggggtggctagggagtcaggggcttgaggagatactggtcaaaagacatataattgtagctagacaggaagaatcagttcaagaggtctactgtatagcatagtgactatagttaatgatgatatattgtacatactgtattcttgaaaaattctaagaatgratattaagcgttctcaccacaaaaaaatgataggtatgagaggtaatgcatttattagctagatttaatccttccacaatgtatatatacttcaaaatattatgttgtatgtggtaaatacaatattatgtggcaatctgaaaaataactaattgtttttaatttcactgagcttgagttctttctatattaagcacatcatgcaagacacagtagtggggggggatagatccttaaaagtgttatacaggtggtacacagggttagggagcctgggtgaagtacagacagcctctcctgggactgt

SEQ ID NO: 501989 - DNA, 487 bp, Homo sapiens
aattctttcagcattcttacattttcttatcatgtctcagggaaaatcctagcctctcagcacccagggatctcatttttaaagatataattaggaagtccagtcaaatcgttcattaaaaaattccattttctgaaagtattgctctgtagtaacaaattttataagttgctgttttgccacgtctctcttaagatttgtatgaaataagttctttttaagtccatacgggatgggsagatggttttttcacactttctacatgttatagtttactgtggaggaaaggaagatttgatgagcgttgctttggaactgagaaactgagagctgccttttatggtgcattttcaagtagcaaaggcaatacttggcctggagtaccaagaagagctgggcagtggtagtgagactttgctgcacattcagagtctgcttgggtttcatacatggaactataaatgagaaactcaaatttcaaaatata

SEQ ID NO: 501990 - DNA, 475 bp, Homo sapiens
ctggggcagcttaacttacagtttaatttttcagtttaattgcttagtttataggttacacacgaggcctgttaacttccaatttggaagagtttcattattctcactacatttgactatataagttattgtctaaaatagagtactttgacaataaaagggggtactactattaattattctaggacaacagcatacattaggattgtccacagtaggcctgagtatgtggttacattgtcttcatttaacccttacgtgtattcctcatatctctgagttttctgagcagatccacaaatacagtcaagaatggattacgttgctaagatttgaaggacataattttagaattttgataagttagtcagaagttgggytaaatcaggctagcatgatgctgtcaatgaagaaaagtttgatcaagcaaatagcgtaacatggagacttgtatgagaaaaatccaggtaccatt

SEQ ID NO: 501991 - DNA, 542 bp, Homo sapiens
taggtaagttacacttatggtcaaagattgaaaaggcattaaaaagtaaaaaatatttcattcatttttttcacacttatgccttttccccatgtacccccctctcacttcatacacaacaattttaatgtatacyattttgtatgtgttcgaaatgaacattactgttttgtatgaatgtatttttattgttgtaaaatacacacaacatactgtttatcataaaaaagtgaaaaatatgcagttattcagaaaaaatatattattccaattgaattatgcctttaaaatttccctttaaaggaaaaacattgtatgaactttgagaaattggttctcttttttattaattaattattaattagttttttattaattattgatgttttcccttgccagattgagcatacacagtgaacaaattcacagtctatgtttttagatttaatttaagttgctggtagttatgtttttaataaacatagcaatcattcgaagcatgcaaattaataaagagtaaatgttcttatatttttaataga

SEQ ID NO: 501992 - DNA, 477 bp, Homo sapiens
tagagtcagcaataaattcaaaaaattcagttgaacaaagaaacgtatattgtcaagaactgcaatttcagttttgyttttgttgcaaactttctggttgacttcattctgtgtttaacaaggtccagtattgtcctggaagtccatgttacaagacggactttattagtgaaaacttttcctaacattttgctagatttatacattgcactgatttactctaatgaaaacttagctgtcctcttaggatactgcttcccctgcaatcctctcagttggaggctcttttttttccctcacacagtattcataccagtctagaggtgtatggtaggtatatgtatgcctgctacacattctatgtaacttatttaatcacacttgttggttattgtctgtctctcctcactagcccataagttccataaggaaaaggatactgttttgttcccttatgtatccgaagctcctttaaga

SEQ ID NO: 501993 - DNA, 625 bp, Homo sapiens
tgttaagcactcagtaaatatatttaatactcaggaaatataaggactcagtaaatgttcattgcactcagcaaatatttattaaactaatggacaaaccaattccaattcagtgacagaataataagcacacctcactgcaaagagtcattctaatacctaagcatgatacaaatgtcattgttgcaaatgaatagaaatatatcacattgttttatgcaaactgatgactaaatctctcaggtattcaaagtcttatcattcacttctccataacacagcattttaatgtcatttagtataatatgctaataattcatttcataatataatggaaacctgctgtttcaaaattaaacccagcccctctgactaatgctaccaaccaacagaccaatatatctgggggaggtatttgcaggcgatsttatggtagacatggaaaattatcttggaagttaaataacttgaaattgcttggtgagcatggcatcaaagcaaaaggagagaaaacaggtttgaaatatacatattctccaaataatgatgaaatctaactcataataatctgaatagttccgttaaatttctaccaaatttccggttctttgggctactctgtgcc

SEQ ID NO: 501994 - DNA, 625 bp, Homo sapiens
tgttaagcactcagtaaatatatttaatactcaggaaatataaggactcagtaaatgttcattgcactcagcaaatatttattaaactaatggacaaaccaattccaattcagtgacagaataataagcacacctcactgcaaagagtcattctaatacctaagcatgatacaaatgtcattgttgcaaatgaatagaaatatatcacattgttttatgcaaactgatgactaaatctctcaggtattcaaagtcttatcattcacttctccataacacagcattttaatgtcatttagtataatatgctaataattcatttcataatataatggaaacctgctgtttcaaaattaaacccagcccctctgactaatgctaccaaccaacagaccaatatatctgggggaggtatttgcaggcgatcttatggtagacatggaaaattatcttggaagttaaataacttgaaattgcttggtgagcatggcatcaaagcaaaaggagagaaaacaggtttgaaatatacatattctccaaatwatgatgaaatctaactcataataatctgaatagttccgttaaatttctaccaaatttccggttctttgggctactctgtgcc

SEQ ID NO: 501995 - DNA, 514 bp, Homo sapiens
tttgtcaagtaagtgtaaagatgaactgaaggcattgttaacttatatacatcttttctcatcaagttattggagaaaaaaaaccaccaaaataaggcgtaaattaatgaagaggttaagatgagagtcaagaaatggaggctttaacacatgagacatgtaaattgaatctccaaaataytggtgaagggagctccctaaatgataactgcacaggcctaatgaaaaaatttgttcagattcgagcacattggcaggctttgggagagatgtctccaagaatattaaactgaaagcatctctaatgcatctgaatgtattcaaaggcaatttagacaatagtggggggagcagtttggagctaagttaattataagtacatagaacataagaaaacaaaaacatccaacaattattaacttcagataaaaaaattttcttaagaaaataagtatagcagattcatttttaaagtctcaattgtccacattattctctatattcaaaaagagaa

SEQ ID NO: 501996 - DNA, 482 bp, Homo sapiens
tcaacaagattttacatagttacaataatgtaaatgctgatattcacacaatgaaaattataacagttgatattatgtaaagaatagaaagttagcttgtatgtggtgataatgggataggatggtgaaagatcgttaaatctttatcttccctagttggacgtcaatagaatgcctaaaattaatacatcaaaatgtaacaatatagcccttttttktgtgtgctatggttatgggtcccagataaagatagttgtttctgggaagcaagatatggtcttggggatgtgtgaggaactatgggactttggaaattaaacaaatagtttcacatataatttcactctttaaattgtatgtctgtataaattttataaaatgaaaaatgaaaattagaatatatgtaagttaccaaataattgcaaagacattttaggtttttagctcctttattttatgggccatttgtttctaaatcctgt

SEQ ID NO: 501997 - DNA, 523 bp, Homo sapiens
tgaattctaccctctctttcagctcccactctcacttagcaaggacttctttttagtatcaaattaagagaaagtgctatgaagcataaaagatgtaatagacacagattctgccctcaaggaaacctctgtccttggagatgaaggagacatttacataaatatgtacttgttgaacgaataaaaaaatttgcagaataaggttaaaagtgacacttttcagaaaaaagagctataaaaaaattgcagtggaaatggggcaggaaaagtttccctctggataggttaaargagtcataggaaagaaaagcagtgataccaactttttttttttgaaacagggtcttgctctgtcacccaggctggagtgctcaagcaatcttcctgcctcagctccccagcagctgggaccacagttcccaaggtctctacacctcgtggcagagacagggtctcactatgttgccctggtcagttctcaaattcccgggctcaaacaatcctcctgcctcagcctcccaaa

SEQ ID NO: 501998 - DNA, 547 bp, Homo sapiens
ccaaagggtcccctccctggaaagaaagggtagtcagcgtgcaaaagtttctcacctcatcggcaccagcagtaccaaattgattgttatgtacactttgtgaactgataggtccagaacagacttagacacattccagaatatgaactttaaataagcttgctttttacctggaactgagagtcattatcagtaatattatctgcagggcatgtcacartttaccaagtactctcccgagagtcctcatatttggaattgatgcctccaatctctcatgcttaactgaagtgtggttgagattccactgttttatagtcaattgccacatacacagtctttggaataaattatctaattctagaacattaagtatgcaatatgattttatacatcattctataatatgatgtggaggactgctagccagtctgaaaatctcactgttattgttatattcacacaaggaacagtgtcatatctttaaaactgccctaagatttatatagctcattgtacaaacacagaaacccagagtccttctcac

SEQ ID NO: 501999 - DNA, 523 bp, Homo sapiens
ctgccatagcattaacaaaaactcacaaaaattagagtttctctgtacgttttccctggattggttgaagaggaatggcattttccctgaatgttgttcccatagatccttctagtatgttccatttattacatttttctatgaaaaggaaaataagaggacaaacagcatactggtaattgctatggtctgaatgtttgtcccctccaaaactcatgttaaaatttaacttccattataatggtattaagaggtaggacaataaggggtgattaggccatgagagctctgctcccatgaatggattaatgttgttataggagtggattgttataaatgtgagcttggccctctcttgyccccccgctttgggatgacatagcacaaaggtccttaccagatgccagcaccttgatattaaacctcctaacctccagaactgtgagaaataaatttcttttctttataaattacccagtgtgtggtattctgttatagcaacaaaatggaataagacagtaat

SEQ ID NO: 502000 - DNA, 620 bp, Homo sapiens
gttttaaagcttcccaggtaatcctaatgcacagccaggtggagaaccactgtcttaaccaatgtttctcagcatagcccatacgcactgctaccacactggaggtgacagaaacacacagatgtctgggcctcatccaggatccattatgacacgccagcaaagcacacatggtctcatgtaacttgcacaaaactcccaggagcctgtaaatkattcccattttatagataaggaaactgaaactgagacctagaaagcttcaagagcttgacaaatcactccatttgactgcatccaaaagagggaagatggggcagggctgttgagggggtgaataatctggtaggtgcccaaagtgagcatcagtggtgccaggatagaggagaaaggggtgtggaaggttctgcagtggcagaagggaagaggtgaggctgggaatagatgggacctgtaggcctcacgggtgcagcccaggagaaatgctggtttccactggaggagtttacagtatgcctgggtggaagagagaaggacagacagacatgggagggaaatctgaggctgagatggggcaacaggctctgaggcaccagcaaaggtaagtgtggctggagccg

SEQ ID NO: 502001 - DNA, 322 bp, Homo sapiens
catccaaaagagggaagatggggcagggctgttgagggggtgaataatctggtaggtgcccaaagtgagcatcagtggtgccaggatagaggagaaaggggtgtggaaggttctgcagtggcagaagggaagaggtgaggctgggaatagatgggacctgtaggcctcasgggtgcagcccaggagaaatgctggtttccactggaggagtttacagtatgcctgggtggaagagagaaggacagacagacatgggagggaaatctgaggctgagatggggcaacaggctctgaggcaccagcaaaggtaagtgtggctgga

SEQ ID NO: 502002 - DNA, 546 bp, Homo sapiens
ccatggggagaaaacagatgacggagttattgaggaatataggtaataatttgcaagagggaatttaagagattttattgtagaaatattgctttagaattcttgccacattgagatttgagcatcattgctcctaaatttctttacaactgattcacttgtaaattaaactgatttccttgaagtaaaatattagcttcagattgttgggaaataagccctgaaataaagtttgttattttttttaccatcctataacacaacaatattaaaacatgtcaccattattttatgtgtctgtgtgtgtgttaaatagaaatgtgctgggcttttaaataaaaaaaaaatggaygagaagataaaattcacttctttagctgggaatattattgatactaaaataaacttcacacccagtaccaattctcaatttaagtgtcactgaagaatcaagagggaaagaaaaacaacacaacctctgcctggaacaatggtgctcttgggaaatgctcttggattgtctgtgctgggaaaaatgaagatacc

SEQ ID NO: 502003 - DNA, 651 bp, Homo sapiens
ctaatctcttaattcttgattcaaatctggaaatataagtgatgatggtgttgttactgaaatttacttggctttctaaacaaacagcatagttaggtctttgaacaagatagattctcttaattgcactaaaagacaggtatttggttcaagtatgccatttcttgaaggctggccaccacatttgcctaacaattgccaccctaattgcttctgctgcttcarattccctctttctccagcaggcaaacaagaaagctttatttgtgcttggaaatatatcaaatcactctaatgaaacttcacttttcagaagtgctgtcaaaaaggtaaaaagtgagtttcttctcttaaaaatgaaagatggacagatgaaagctcaagttgtacgagtgaagagtgcctagcctttcttttgctcttcagctccatttcctaaaacacattctttttatatctgatacaatctgaaaactctctagagagagagggagaaaaaaataatagcctcatttttgatactataaaattttcttgagtttttcacatttctgcctgtttctgaatacctggaaaaatttaaaaatctttaatatttaatttatagcacaatttttagctatattttttaaaaataatgttcaaaaaatg

SEQ ID NO: 502004 - DNA, 641 bp, Homo sapiens
tctcaactcaaggcaggctctgtgtctggcggcttcaaggamgtgtcccttggccatggctcttccactacgggagcaagcaggaggcacccaggtctccctgcccacccagagtccctgcaggaggccctccagatctctcagtaacgggccctctttcttctttttttcagcctggggactcctcgggatggaaaggccttccggatctttgctgtcaggcagtgaatttccagcaccaggggagaaggggcgtcttcaggagggcttcggggttttgcttttatttttattttgtcattgcggggtatatggagagtcaggaaacttcctttgactgatgttcagtgtccatcactttgtggcctgtgggtgaggtgacatctcatcccctcactgaagcaacagcatcccaaggtgctcagccggactccctggtgcctgatcctgctggggcccgggggtctccatctggacgtcctctctcctttagagatctgagctgtctcttaaaggggacagttgcccaaaatgttccttgctatgtgttcttctgttggtggaggaagttgatttcaacctccctgccaaaagaacaaaccatttgaagctcacaattgtgaagcattcacggcgtcgga

SEQ ID NO: 502005 - DNA, 581 bp, Homo sapiens
gggccagggtctcagggcattgtttrtgtcactctgcagattcccttctggctctaaagctggtgaccatgcccggagctaatgttcactgagcactggccagatgctggctgggccctccccggcatgcatttttctttcttttcttttctttttttttctctctctctttctttcttttttttttttttttttgagaggaagttttgctcttgttgcccaggctggagtgcaatggtgtgatctcggctcactgcaacctccgccgcccgggttcaagcgattctcctacctcagcctgggattacaggcatgcgccaccatgcccggctaattgtgtatttttagtagtgactgggtttctccatgttggtcaggctggtctcaaactcccgacctcggtgatctgcccgcctcagcctcccaaagtgttgggattacaggcatgagccaccgcgcccggccatccccagcattttcttctgtcaacctcccatttgccttcggaggcatgattggccacatttcacagatgaggaagaaggctcagagagggtaagggccctgcccaggctcgcaca

SEQ ID NO: 502006 - DNA, 593 bp, Homo sapiens
gtgacaggtcaccccgccagccttggagctactctcagaagcctctggccaacgctggwactgccttctagggaccttacagcgcttccaagaacggctggtagaaggtgcacctcaaactgaggcctgcttccatcctaagtgagcaagtaggccttgatcattctggaactgacccactgcggggttaatgggcttcgtctgtcgagtgtattctctgtgcggtttggtctcattctctccctgtttaagcactgggaacctaaggaaaaaacatctttgtgtagcaataaactgtgtgatttgtgaaatcgtactttgatcatttccttattgtaaccacacaaaacgatccctaacccccaatgtatttctttcgtgtgtgtgtgtgtgtgtgtgtgtgtgtgtgtgtgtgtgtgtgtctcgctctgtcactcaggctggagtgcagtggtgtcatcttggctctctgcaacctctgcctcccagggtcaagcaattctcctgcctcagcctcccaagtagctgggactacatgcatgcgccaccatgcccggcaaatttttgtattttttttgtagagataaggtttc

SEQ ID NO: 502007 - DNA, 593 bp, Homo sapiens
gtgacaggtcaccccgccagccttggagctactctcagaagcctctggccaacgctggtactgccttctagggaccttacagcgcttccaagaacggctggtagaaggtgcacctcaaactgaggcctgcttccatcctaagtgagcaagtaggccttgatcattctggaactgacccactgyggggttaatgggcttcgtctgtcgagtgtattctctgtgcggtttggtctcattctctccctgtttaagcactgggaacctaaggaaaaaacatctttgtgtagcaataaactgtgtgatttgtgaaatcgtactttgatcatttccttattgtaaccacacaaaacgatccctaacccccaatgtatttctttcgtgtgtgtgtgtgtgtgtgtgtgtgtgtgtgtgtgtgtgtgtgtctcgctctgtcactcaggctggagtgcagtggtgtcatcttggctctctgcaacctctgcctcccagggtcaagcaattctcctgcctcagcctcccaagtagctgggactacatgcatgcgccaccatgcccggcaaatttttgtattttttttgtagagataaggtttc

SEQ ID NO: 502008 - DNA, 593 bp, Homo sapiens
gtgacaggtcaccccgccagccttggagctactctcagaagcctctggccaacgctggtactgccttctagggaccttacagcgcttccaagaacggctggtagaaggtgcacctcaaactgaggcctgcttccatcctaagtgagcaagtaggccttgatcattctggaactgacccactgcggggttaatgggcttcgtctgtcgagtgtattctctgtgmggtttggtctcattctctccctgtttaagcactgggaacctaaggaaaaaacatctttgtgtagcaataaactgtgtgatttgtgaaatcgtactttgatcatttccttattgtaaccacacaaaacgatccctaacccccaatgtatttctttcgtgtgtgtgtgtgtgtgtgtgtgtgtgtgtgtgtgtgtgtgtgtctcgctctgtcactcaggctggagtgcagtggtgtcatcttggctctctgcaacctctgcctcccagggtcaagcaattctcctgcctcagcctcccaagtagctgggactacatgcatgcgccaccatgcccggcaaatttttgtattttttttgtagagataaggtttc

SEQ ID NO: 502009 - DNA, 593 bp, Homo sapiens
gtgacaggtcaccccgccagccttggagctactctcagaagcctctggccaacgctggtactgccttctagggaccttacagcgcttccaagaacggctggtagaaggtgcacctcaaactgaggcctgcttccatcctaagtgagcaagtaggccttgatcattctggaactgacccactgcggggttaatgggcttcgtctgtcgagtgtattctctgtgcggtttggtctcattctctccctgtttaagcactgggaacctaaggaaaaaacatctttgtgtagcaataaactgtgtgatttgtgaaatcgtactttgatcatttccttattgtaaccacacaaaacgatmcctaacccccaatgtatttctttcgtgtgtgtgtgtgtgtgtgtgtgtgtgtgtgtgtgtgtgtgtgtctcgctctgtcactcaggctggagtgcagtggtgtcatcttggctctctgcaacctctgcctcccagggtcaagcaattctcctgcctcagcctcccaagtagctgggactacatgcatgcgccaccatgcccggcaaatttttgtattttttttgtagagataaggtttc

SEQ ID NO: 502010 - DNA, 627 bp, Homo sapiens
ctgcttcggcccctgcccgctcccccaccctctctgtgcatcttcctcctacatttccacctcactggcctctctgctccttgactgcaccaagatcatgcacacctcagtgcttttgtagctgctgtctggtaccctctgggctctcatacgttcctgggctgttttagactgaaatggtccctccctaggmagcgttctccaccatccagcctgcacttgtctcctgctccctgatggatctgtgtcatttcccctgactcatcaccttctgaaactgtttcttgcatatgttttgctacttctcaccccaccccagactgtaaacttcctgaaggcaagagcctcactggtcttgttaaccccacagccctgatgctgcccagcacttggcacatagcaggtgctcagtaaacactggttgaatgagactttgctgagttgagcaattggttcagagttggttgagggcttttatttctcacttatagtcccagttgcaccactgcactccagcctgggcaacataagtgagaccctgcagcctcaactgcagtgagctgtgactgcaccgttgtactcctgggctcactgcagcctcaactgcagtgagttgtgattgcacca

SEQ ID NO: 502011 - DNA, 534 bp, Homo sapiens
acaaaaagtgctccattcactcaatggaacattatttggccatgaagaaggaatggtgttcaggtatgtgtgacaatgttcaygaccttgaagacgtggtgctgagtgaaagaagccagacacaaagaaccacagactgcatgatgccatttataggaaacatccagaacaggcaaatccagagagactgaaagtggattcacggttagcaggggctggaggaagttggggaattggggatgatggttaaggtacaggggtttttttggggggaaataaaatattctaaagaggattgtagtgatggctgcacacctctgtggatacactaaaaaccactgtactgtgggcttttaacaggtgaattgtgtggtatgtgaattatacctcaaaaaaaagctgttaaaaaaaaaaaatccatgcttctcccatgagattctctagagctattttaattgttaatgagagaaaacaggtgcaccccatgaacattataatttttcccaaactgatccctaagcaaaagagtttaga

SEQ ID NO: 502012 - DNA, 534 bp, Homo sapiens
acaaaaagtgctccattcactcaatggaacattatttggccatgaagaaggaatggtgttcaggtatgtgtgacaatgttcatgaccttgaagacgtggtgctgagtgaaagaagccagacacaaagaaccacagactgcatgatgccatttataggaaacrtccagaacaggcaaatccagagagactgaaagtggattcacggttagcaggggctggaggaagttggggaattggggatgatggttaaggtacaggggtttttttggggggaaataaaatattctaaagaggattgtagtgatggctgcacacctctgtggatacactaaaaaccactgtactgtgggcttttaacaggtgaattgtgtggtatgtgaattatacctcaaaaaaaagctgttaaaaaaaaaaaatccatgcttctcccatgagattctctagagctattttaattgttaatgagagaaaacaggtgcaccccatgaacattataatttttcccaaactgatccctaagcaaaagagtttaga

SEQ ID NO: 502013 - DNA, 675 bp, Homo sapiens
cccatctgtcagggttcggggagctacgtgggagatgcgtgccaggagtctctgctctcattgagtggccctcactgggttccactgtcttccttcacctcctcgcccctcccacagcagggcctgccattctagtccacccctcctgcctcaagtgctctgtctctctgttctgtgattcctttaatgtggccagtaaatcagcttatcgacggtagaagtgcaggctacccagatttggtctgccctaggggatttttctggagggattttagcttatagatctgtatttaacactggggctaaaagagcaggagggtaaatggaaatatttaaaataaattacttgatttccaggattgtgaatttacctagtaatcaaaacttagaagagcaatgatttcatacttaaggatagttctgagtgacagaacttgatgcgtcaaatgttacgctccaaaaattaatcataccctaagaaatatgacacaygtctgtcataaaataaatcactttttctaatcagattttattacctttcagatccgatcacataggacagtatgcaccttaagatcctgaagaaacggcacaaaatgttcaagtgatgtttagaaataacttgtgaggtaagagtgtgattatttagggtccaatcactgtttcctttctcac

SEQ ID NO: 502014 - DNA, 589 bp, Homo sapiens
cagcacggtccagggctccgggacaccctgggggctctggggttgcagccaagtcctcagggggcgatgtcagcatgtcagcatggccccagagccgagcaaggcaagctcctgggtattgtgtggggcagggagggggaggtgaaggaggagggaaccttgcagagagaggcaggcggctgtctcaacgtgcctgctccccgccccccttccccagaaccggtttggctagtctggggtacaagaggggggctggaacaatgggagtcctatgcccaagtgaggctctraaggaccctacacccaggtcctaaagacgggggaggcagtgcttctgctcctaggagacaggtcaccactcttctggagcttcccaaacatgagcatgctcaggggacttcttggagctggggagcatcctgggagcttcacagagagcctcccaagccctgcactccttagggaccctgagaaccctgatgaccctctctgatcctattactacatctatcaaattggaacactcatccctatgattgggagacagaaatcagtcctgaaagttgatgatgtgacatgtggcatcatc

SEQ ID NO: 502015 - DNA, 578 bp, Homo sapiens
tgcagcgcttggtgaggcatatcccttctctggggcttgggcttctcttctgtaaaatggggtagcaaatgcctgctccttccatctactccagggcgtggtgagaatccagtgagacaatggaaattaacctgcccacttacctaaagcagcattcgttagtccatgttaattagccagagcaggcggagcacgtcccagcrtgcggaagttcccgggagcagagggaaggacgcagcctgatgaagagcagggggtctgggccagacctcccccagtcttcgtagaattgctttgcctctgagagtattcagtttctcgttggtaaaatggccttttcatctatcagcccaatgatggcactgcacagagcagttctaagattgtccccacgttataaatgaggaggtggaggcgaagtaagtaatctgcccgaatcacactgactacaggaggcagagcccccgttcatcaggacccagtgccctggcccttcaggctctgcacctgtctgataatcgggtaacatttctgaggctggagactgccctgggtgacccttgtcctcaagttactga

SEQ ID NO: 502016 - DNA, 578 bp, Homo sapiens
tgcagcgcttggtgaggcatatcccttctctggggcttgggcttctcttctgtaaaatggggtagcaaatgcctgctccttccatctactccagggcgtggtgagaatccagtgagacaatggaaattaacctgcccacttacctaaagcagcattcgttagtccatgttaattagccagagcaggcggagcacgtcccagcgtgcggaagttcccgggagcagagggaaggacgcagcctgatgaagagcagggggtctgggccagacctcccccagtcttcgtagaattgctttgcctctgagagtattcagtttctcgttggtaaaatggccttttcatctatcagcccaatgatggcactgcacagagcagttctaagattgtccccacgttataaatgaggaggtggaggcgaagtaagtaatctgcccgaatcacactgactacaggaggcrgagcccccgttcatcaggacccagtgccctggcccttcaggctctgcacctgtctgataatcgggtaacatttctgaggctggagactgccctgggtgacccttgtcctcaagttactga

SEQ ID NO: 502017 - DNA, 609 bp, Homo sapiens
ttggaacatcccaaccttaccagagcttaccccttcctgggctcccagatcccccaagatgaagttgggttcattttccaagggcccctcccccatggaatagtgtgaccttctgttgtgaagtgagcagtgggcacagggaggaggcagcagccactttggggacaggycaaatattttatgagtaatttaatatctggagcgcgaaccactgagcggagaactcgtcagctgccgggagtgagagctggtctggtcctcataacgcaggggcaggggtggtgggctgacagggacggacctggggccacagggaagttaaccctttcagggtcctgggatggagctaggaaggggcaaggccgtggacctgccgcgcaccagatcctgagccatgcggtttgggtggcttgagcactttgaacctgggaaggaagggttggcccattggacaggcactggcttttaaacggggggacctgagtttggctcttgctagctatgtgaccctggactagtgtgagcctgtgtgagcctcagttccttatgcatgaaatggggatgatagtaatgagatctatgccattcctaccacggtaagaattgagc

SEQ ID NO: 502018 - DNA, 609 bp, Homo sapiens
ttggaacatcccaaccttaccagagcttaccccttcctgggctcccagatcccccaagatgaagttgggttcattttccaagggcccctcccccatggaatagtgtgaccttctgttgtgaagtgagcagtgggcacagggaggaggcagcagccactttggggacaggccaaatattttatgagtaatttaatatctggagcgcgaaccactgagcggagaactcgtcagctgccgggagygagagctggtctggtcctcataacgcaggggcaggggtggtgggctgacagggacggacctggggccacagggaagttaaccctttcagggtcctgggatggagctaggaaggggcaaggccgtggacctgccgcgcaccagatcctgagccatgcggtttgggtggcttgagcactttgaacctgggaaggaagggttggcccattggacaggcactggcttttaaacggggggacctgagtttggctcttgctagctatgtgaccctggactagtgtgagcctgtgtgagcctcagttccttatgcatgaaatggggatgatagtaatgagatctatgccattcctaccacggtaagaattgagc

SEQ ID NO: 502019 - DNA, 609 bp, Homo sapiens
ttggaacatcccaaccttaccagagcttaccccttcctgggctcccagatcccccaagatgaagttgggttcattttccaagggcccctcccccatggaatagtgtgaccttctgttgtgaagtgagcagtgggcacagggaggaggcagcagccactttggggacaggccaaatattttatgagtaatttaatatctggagcgcgaaccactgagcggagaactcgtcagctgccgggagtgagagctggtctggtcctcataacgcaggggcaggggtggtgggctgacagggacggacctggggccacagggaagttaaccctttcagggtcctgggatggagctaggaaggggcaaggccgtggacctgccgygcaccagatcctgagccatgcggtttgggtggcttgagcactttgaacctgggaaggaagggttggcccattggacaggcactggcttttaaacggggggacctgagtttggctcttgctagctatgtgaccctggactagtgtgagcctgtgtgagcctcagttccttatgcatgaaatggggatgatagtaatgagatctatgccattcctaccacggtaagaattgagc

SEQ ID NO: 502020 - DNA, 609 bp, Homo sapiens
ttggaacatcccaaccttaccagagcttaccccttcctgggctcccagatcccccaagatgaagttgggttcattttccaagggcccctcccccatggaatagtgtgaccttctgttgtgaagtgagcagtgggcacagggaggaggcagcagccactttggggacaggccaaatattttatgagtaatttaatatctggagcgcgaaccactgagcggagaactcgtcagctgccgggagtgagagctggtctggtcctcataacgcaggggcaggggtggtgggctgacagggacggacctggggccacagggaagttaaccctttcagggtcctgggatggagctaggaaggggcaaggccgtggacctgccgcgcaccagatcctgagccatgcggtttgggtggcttgagcactttgaacctgggaaggaagggttggcccattggamaggcactggcttttaaacggggggacctgagtttggctcttgctagctatgtgaccctggactagtgtgagcctgtgtgagcctcagttccttatgcatgaaatggggatgatagtaatgagatctatgccattcctaccacggtaagaattgagc

SEQ ID NO: 502021 - DNA, 638 bp, Homo sapiens
gggcgaggagtatcctgattccaagcaggggcaattgcatctctctcctgggaactggggattggagatgttagactctgtgtcacttctatgaaagatgggggctaacttgggggtccagacgtcatctgggggcatccgcttgccttcacagttgagagggcagttctgcagagagagatgcagaaaagagaggtctcagagtaatatcccagtccgggtctggggggcacccaggtctcaaccctgtgtccactgagactgagcagctcccctgctcctgggttcttctgattactcccttttttctcccaagtttgtttgaaggggcttctgtcacttgcaagtaaaagggttctggcatgttgagggatgggggtcaggatcaagggggtgcatgaggttcaagggtcayaagcctgaggagagccacttcccttcctttccctgcccaactgctagcccaggcagaagatttgagtcccactgcctctgagaatgggaccaaggggaaaaggaaggtgtctgggcagtgataaaacaggtgagctaccaggactcatctcagatcacttctgggttcccacactgttcttggtccaggttcttgtaatgaaacctcactcatctccccagag

SEQ ID NO: 502022 - DNA, 587 bp, Homo sapiens
cacaatgtatttgtgttttaagctaagtgaaactgtaaaagattaagtgacattataaagatcccaaaagttttaaaagattaaaaagtttataagttaaaaattacagtaaactaaggtttatatgtaagcaccttctatagcattcacacaaaaatcacctaacgatccatttctcagaaggtatccctatcgttaagcaacatacaagtatatatgcaacaacaaaaggtactgacacaatgtctttgtatcacttcrcactcttatttcatgatgattaaaagaaacttttaaactttaaactctttgaggaaggtgagccgccactgcagtggggctggccactcctgcacttgactcacagctcacggagcaactcgttctggactaggaacaggttggccaggaagccttgccaaagccttggcctttaaagacaccagaaagacacgcatggagccagaggtggggagtcacagaactgaagtcaagctatccagccgcaaaggaaaacccctggagaaggtgtggctgacttgatcagaggcgcaaaagagaagatcctcaaagtgaaagggcctgtc

SEQ ID NO: 502023 - DNA, 587 bp, Homo sapiens
cacaatgtatttgtgttttaagctaagtgaaactgtaaaagattaagtgacattataaagatcccaaaagttttaaaagattaaaaagtttataagttaaaaattacagtaaactaaggtttatatgtaagcaccttctatagcattcacacaaaaatcacctaacgatccatttctcagaaggtatccctatcgttaagcaacatacaagtatatatgcaacaacaaaaggtactgacacaatgtctttgtatcacttcgcactcttatttcatgatgattaaaagaaacttttaaactttaaactctttgaggaaggtgarccgccactgcagtggggctggccactcctgcacttgactcacagctcacggagcaactcgttctggactaggaacaggttggccaggaagccttgccaaagccttggcctttaaagacaccagaaagacacgcatggagccagaggtggggagtcacagaactgaagtcaagctatccagccgcaaaggaaaacccctggagaaggtgtggctgacttgatcagaggcgcaaaagagaagatcctcaaagtgaaagggcctgtc

SEQ ID NO: 502024 - DNA, 646 bp, Homo sapiens
atctatcttaaaggggtacattccarataatcctatagatatattgtatcgtagaagactgtaatggaaacatttatttcctggctttacctcattttaacagaacaggtgtttaatttttaaaaatgattatggaagaaattctacgattgcaatttaaaactttttagatatcatggtaaataactgggaaaattttatattgtttgctaggcaggttttatggtacttcataaagtatcttcagtatacttcataaagtatatttttcacatactttaccaacatattccaatgactttatataacaatagtaaaattattaagggacattttcaaattacattttctataaatatcatttagcttaatttttaacatacatgatacccaataaacacacttttatttaattttcttaacagaaactccaaatagacatactgaaaatcacctttttgtatatgtgaagtctgaaaatgatcagaattctgcaagggtataataatgcttttgattacttgaaactttctctcattagaaaagactaataaagcttcaaagatatagaattcagaatgaaaaaatatgtcatttttagaataaatattttcattccatatctaatgatttaggcaagctttta

SEQ ID NO: 502025 - DNA, 420 bp, Homo sapiens
aaaacattgttttttttttttttttttagagacggtcttgttctgtcacccaggtttgaatgcagtggcatgatcataactaaatgcaacctcaaactccccagctcaagagatccttccacttcagcctcccgagtagctaggactacagtcatgcgccaccacasccagctaaatttatttttttgtaaagacagtctttcaatgttgcccagactggtctcaaactctttgtcccaagtgactctcctgcctcgacctcccaaagtgttgggattacaggcgtgagccaccatgttaaatgagaaaataaatttacgcagttttaagccatccagcttgtgatacgttgttatgggagccctaggaaattaatacaccattattttcaaagtgctgctaatttataagacaacattg

SEQ ID NO: 502026 - DNA, 523 bp, Homo sapiens
caaatgcttactggtacatactaaaaagtattcagggcaatgctgcttcatataaacttgctaactaccaatcaacagactactcaaatgcttgtttgacaaacaaaagctacaattgtaattagcatgtttttactgatttcctttatactgcarcattttttcaactaatatatatctaacatatatagtaaaatacataaatcttaagcatatagcattataatttttatgtctatatatccctatcatcagcacctaaatcaagcaaaatatggactacttccagctcccacacccctgtctcttgccctttctcaacaagttacgcaccaaaggtcatcattatcgtgaagtctatcacgatggatttgcctgctcctcaatttcatataaatggaaacttgctgaatgtattcttttgagtctgacttctttcacttagttgaaatttgtgagaatcatctatgttgtgtgtagcagcagtcctttgtttttaaatgctgtgtggtattccactgcg

SEQ ID NO: 502027 - DNA, 489 bp, Homo sapiens
agagcaggagccttatagatcctgatagagagaatcgtgacatggtgtactgaggggaaaagcagtaacagggaaagccatgctgagttttagtgctgctctgccaaatgaagggggaccacagggattcttactstagagcaaagaagaccacgggattaaacagaggacccgattactttgtttcagggtattcctggagaagacggctaccgaggctatcctggtgatcagggtggacccgtaagtaaaaattgttttagtccctaaaatttcaccccctccttgatccttacccattgggattgcattgtggatttcatcatttgttcagttgctgatggctttccctttgggagaaaaattaatttatacttttcttaacaactttgcctggatgtctaagtacgataattgaagtatgacaaatgtgggcatgaagggtgggatttgttcttactctgtttcagaaggagggattaattggtt

SEQ ID NO: 502028 - DNA, 652 bp, Homo sapiens
aacatataatttctgtttggctaattgaaatatcaaaaaaacgactaccttggtggatggtttctccacgccctttatgcttcagatgaagaaagagagctcagagaggtatgcccagtgacagggccacagagctagtagcagaattgtctgatgtttccaatatgcagacatcttggaatctggacatttcaagggggacaagcctttaagagtgtattttagggtgccatgtggagaaaggtactcttcccattcccagtcttccttggagtagcctcttttaagttgattcagcagaggagtaactgttgcttaaaaaaatctggaaagaaaaaggagagaagaaaaaaacaaatacgaaaagttctgccaaaccttctcccaaaggcaaattgttagtcttgtaggggtctggctgcattcagcatagtatgatcctactgttctcctgaagtttaaactcatgaawtacagagaaacatttgagaattgcaagtggccagggaaaagtacaatgggaaatgtttctgtaaaaccccctgtgtgtgctatacattaggttttcaggaacccagagcatcaggaattggtcactggaaggaagagctcatggctcggtttaatttcaaaattaaaaattgaacagcag

SEQ ID NO: 502029 - DNA, 573 bp, Homo sapiens
tgccaggttttctgctcctctcttgcttggcttgtgccaatagtgcagcaccctctgagccatcagagcagccgggcagtgcttggtacagtttcagtataatatggaacgagcagtctttaaacaygggcagtgcacgcacagtggctcagctaatcacatttagatcatccaagagccccgaccctgactgtcctggataacagcaagtctgctgtatgaaggctgcctgagaacctcctttctatcagctttgagataaattacaatttgtcataaccagtccgaaaagactgcatgttctctgtaaaagaaatgagttcctgtgaatccacgatggtctctgcctggagagtgttttggggttttatgctgggctcaatgcccaccgccttccgtgccttcttctcccagttgttactctctcttctcatcagcccgtcccccatgccacgctggtgaaaaggacaaacaaaaccctcctggattcttttccaggagtttgcacatgaatgttgcaatttagaaaatcattccaccgaaatctcaaaggtgaagtcagcatgttgcagc

SEQ ID NO: 502030 - DNA, 423 bp, Homo sapiens
tggtttctctttcttgaccttacctttggcctttaggaaacaaagtggattcaaggtcttttgcatttggagatctctgtaatgagtgtaatttctatttagagtattgtatgattactggagccaaggagttaagtatattctaagactttgatattcaaagtttggtctgtcacagtgctctaagattgccctgagaaccattgcctagctatacatttcattgatgtatactttagccattattttctctttcatgtttttctattgataaatacaaaagttaattttcctgagcagtttatcttatgtatttggaatgcacaaatcarcatttatgtcttaaataaatgcctagtacagaattttaaattggtctgtattgtctctgtaaaggagttcaggaagacttataactcaaga

SEQ ID NO: 502031 - DNA, 532 bp, Homo sapiens
caaccaaaaattattagacatgtaaaaacatatgaaagtgaaatatactaaaggaaaaaaagcattcagtgaaaactaaatctgtatgggcccagatacttgattagtcaagccttcaataagacttcataacaaatatattcaaagaaataaaagtaaaaaaaaaattaaaaatgactcaataaaagagaaatcacaatagaaaattataaagtataaaaaaagagccatcacacttcattcttcctaagtcctacaccagagttgctttaaatgtgtgtatttaatggttaaataagacctgaaaagggagttggcctaaaaatatttttaccgtraaacatcaatttcttcagagttaatgagaattatatgctaaccataccaaaaaccttgattagaatttttagcttagatgtattgattgatattaaaaagggaaagttgaggccacatacagaaagcaatggcgaaggacactgcctccaacagaaaatatgaaccaaaaagcataatggaaaaacatttacat

SEQ ID NO: 502032 - DNA, 412 bp, Homo sapiens
ctgggactacaagcacccaccaccacgcccagctaccattaccgcgtttctgatttgacctacttctcctctgatataggacaaacagcccttagtactcaatggtacagtcataacagttgttaawatatttaaatatttcatatatatatatatatatatatatatatatatatagagagagagagagagagagagagagagagagagagagagagagagagcctggttgttaaacagttgcgtaatccataaactcctatcccactatagcccatcccttggggatcttacatgacctgctagagactaaatatttaatccaatacagcaggaggcttccaggactttgcagcaccagctttaaggttaaacctggcatctgtacaactgattgatgcccttgctagtc

SEQ ID NO: 502033 - DNA, 412 bp, Homo sapiens
ctgggactacaagcacccaccaccacgcccagctaccattaccgcgtttctgatttgacctacttctcctctgatataggacaaacagcccttagtactcaatggtacagtcataacagttgttaatatatttaaatatttcatatatatatatatatatatatatatatatatakagagagagagagagagagagagagagagagagagagagagagagagagcctggttgttaaacagttgcgtaatccataaactcctatcccactatagcccatcccttggggatcttacatgacctgctagagactaaatatttaatccaatacagcaggaggcttccaggactttgcagcaccagctttaaggttaaacctggcatctgtacaactgattgatgcccttgctagtc

SEQ ID NO: 502034 - DNA, 412 bp, Homo sapiens
ctgggactacaagcacccaccaccacgcccagctaccattaccgcgtttctgatttgacctacttctcctctgatataggacaaacagcccttagtactcaatggtacagtcataacagttgttaatatatttaaatatttcatatatatatatatatatatatatatatatatatagagagagagagagagagagagagagagagagagagagagagagagmgcctggttgttaaacagttgcgtaatccataaactcctatcccactatagcccatcccttggggatcttacatgacctgctagagactaaatatttaatccaatacagcaggaggcttccaggactttgcagcaccagctttaaggttaaacctggcatctgtacaactgattgatgcccttgctagtc

SEQ ID NO: 502035 - DNA, 339 bp, Homo sapiens
aatgctgttgtgaacattaatgaacaagtatctgcttaagtctctgctttcatttctttgtggtatgtatgtaagagtggaattgctgggtcatatggtaagtttatgtttaacattttgaggaaccaccaaactgttttccacagtgaatgcaccattttacattcctaccagtaaagcgtaagggtttcaatttttycatattatcagtaatacttattattatttttttaaaattatagccatcctagtagtatacagtggcatctcattgttgtttttctatctgtgtttttgcattaaaacaattaattaattgcattaggcaaggaacttaaa

SEQ ID NO: 502036 - DNA, 304 bp, Homo sapiens
tactacatttaaggtagtaaaattgaagctgatggtggcaccacattattcattacatcaaatggagatgcctttaaatttatattaaatgcaatttaaatgccatcaaaaccatggttgacaaagtactgacagatgaatattttagtatgattcaatagcagtaaactttattttcttaccttgaggcaaggtgatggggtwtttatatgcagtgggttgaactgggtttgtagtaacatggctcatgatttccataaagtaaaattttatctttaaaaaaatgattttgaagggtttaact

SEQ ID NO: 502037 - DNA, 501 bp, Homo sapiens
cttttaggaggcactcaagttggtacaagtagaatgacttcatcccctttcgccccaggggacattctgttccctgaaatatgccacgaattctttatccaggcctggagtggtggccgtggaggaggcttgcagtcttgcactcctgcaaaccatgctccagggctgcctcgtccccgcttccccaacacctgtgtgctgggtgccagggagcacgcaccttctgcgctttcagatgcggccaaatgtctcccgaatttctctatagaaatttaagctgcaccgcagggagagtttgaacagggcacatcctaggcctttctgggtgccatcgattggtktgaagaggcatctgctgttgtctagagatagacaaccagtgaatgtgcgcattctcaggcgtctcctctgcgtggagggctgccccatccctgcccctttatttccctgggtgcctcgtcttcacccattggcagtcagaattcctcctggtgctgtaga

SEQ ID NO: 502038 - DNA, 559 bp, Homo sapiens
ccagactttgcggagcagaaacaagccctccctactgtaacctacctgaatgccttacccacaaaacctgtgagcccataaaatggttgttgatactaccacatttcagggtgtgttgttgtgaaacagtaactgatacaaggcatgaaaagatggtcccttcaacacaggggttgtgctaaaacaatccacccccagaaaagccacctctggaaagctctctatagtgcaagagtgtgccccaaaagctgtggcattatctggactgcttctaccaggaaagctaatcccatagtagcagtgatgaacagatggttgtcgttttcagacaccaaagaatcctaacgttcagataatgtgtagagacaggcaggaacccataggcaggtacagatgggagttcctgaaatggtgacagtttcatgagtttgaggcagtgtttgaagaagagcatggggtctcagctcyctctaaactttctcttggccaaagtgattgggctaaaatgagagaggggtagggggttatctcctacagagcctctctggggtgccgggcc

SEQ ID NO: 502039 - DNA, 606 bp, Homo sapiens
ctgtacttactttatctggtctctggcgcagggtgggcgctgcagccctccgttcccagcaaaccgcagccgattcgcctcgctgtcaacgggtgaatggaattatttatttatttatggcccctgacgtgtcctcgcccgccacagccagcggagaaggaggcggtggcgggaaggggaggcgcggctgctgaacgcccttgtgggtgcggaggagcgcgcgccaggggtgggggccggacaggctgcggtggaggccggcccggggggtggtgggggggagccgcctcccggtgcctggagaccgactgagcatgctccaagcggctgtcaaagctataggcactttctctatcgctcggggcactccacttcggattttagttttgaccaaggaagaaagccaaaaggcaggtagatctgtcyttccagatgggtcgtaacttgctgtatccgaagtactctgtagcctgacctagaagacagatgtgcggtagctctgtgcaacccaagcatgggagaggaaagcatgcaaaaaaagaagagtctggccgaatgcagggagaataggagatcctcattgtgagcttgcagggaaagtgttga

SEQ ID NO: 502040 - DNA, 559 bp, Homo sapiens
tatttaactttagaatattttgtaataatactaactaaattaactatacatatgggagccttttaaaattattattcttgatgtaataaataacattaactgaataaagttaataatttctttacataaaattgagtcttattttcatattatcaatataaaaaaagtagttgataaagcaaacaatattgaaattttattcttttaccctttttaaaaaagaaactactttgaggtatatgtacagggtacaaaatgaagttattcattggttaatcacttatatyacattttagtaattttaccccaaataaatgtattgaacacttactagccacgaagcaccttgtttcgttgggacaaagaagcatttgaagagttctcagtaaatatatagactgcttttggttgtcagatgtactatataattgtgaaatccatagtataattttttcactgtattaaaacctcagtttatgtctgattttgtactaggtaaaatttctttatgcttttatttcattttagtttttaagcttaagttttcagtagaaatgaa

SEQ ID NO: 502041 - DNA, 581 bp, Homo sapiens
attaaattagaacttttaaatacaggcaaaagagaaaataactattattaaaatgttccaaccaaattgctgcttatcttacactatgctaattagtaacagcacccaaaattcactcttccacaataatcagagaaaaccggagattatagaaaggctgtgggaagagggaggtggtggggtgctactagttattagaaaggctcaataataaccattaaggtttgagttcaaattccatcctttggggtttgtgcctggattctgaacacctttatcctcttcccgttactcttaggacagccttttaatatttgcatgataggtttctcatacaattaaatcccctccgacccattctttgcactgcagatagaatgagtctagtaacacacaagtcatatcaggtccttctgctacttccaactctccgaagtcttcccattgcccttytgagagaaaaatgcagactccttaatatgaactgcctgtcccattgcagtcctatcctgctcatttctcaagtgtaatccatcccctgtgctgtctgccttcaccacactgggtctatttagtgctca

SEQ ID NO: 502042 - DNA, 572 bp, Homo sapiens
ctgttggtggaaggggcagcagtcagggaaggctttccagagggaatgtcacaacagctaggtctagagttatgatttagccatttggagaaraggagaaaggaattatctggcacacagcacaaaatatgcaaagtcaagaaatgtcagggggctcagtgtcagtttgaaaaatctggcgcaaagagttcatatggaagaatggtgggagacgatgttggaatgcgaggtaagcagcctgtgttctacaacagagcatttgatttttaccccatagatcatggggagcaaatgaaagatttaaaaacagaagtagcctgatcagatatgcattttagaatgctcactctaaggaacagaaagcagtaaagggagttaaaatgcattcatttaacaaatatttagtgacatcttctgtgtgcctggcacacatttggcaggcacagtttctgccaaccagagcgtgcagtcaagtttagagacaagaggaagacttggaggccaatataaggcagtgtgaatgaatagaagaatattgatttgagaaatatttcgaaggcagaattaataag

SEQ ID NO: 502043 - DNA, 531 bp, Homo sapiens
ctgtcccactcacctcccttagaccattaaccacttattatcttttcagtaagaccttccctcctaaactggcaaaccacataygctaccacaaggtttccccctcttttactttatttatttattgatttttttgccagggtaatcatcactgtctaacatactgcctgatttattcatttggattgttcattgcatgttgggctcactagaaggtagactccatgatggcaggaatccttttctgtttcattccccgtggcttccctttagtctagaatagtgtctctcccacatgttcttcaattaatattcgtgattctactgcagtcatgtgcaggggaccctgtaaagagtgtttttgttgttgttgtagttttgttttattttttttcctcagctttcaccttcccttccaatctatcttctctccaggatctgtgtcttctctcctccttccctttctaccttcctactggactaaagcagcatctttactccagtctcaaacaaaggaagaccctttacaag

SEQ ID NO: 502044 - DNA, 531 bp, Homo sapiens
ctgtcccactcacctcccttagaccattaaccacttattatcttttcagtaagaccttccctcctaaactggcaaaccacatatgctaccacaaggtttccccctcttttactttatttatttattkatttttttgccagggtaatcatcactgtctaacatactgcctgatttattcatttggattgttcattgcatgttgggctcactagaaggtagactccatgatggcaggaatccttttctgtttcattccccgtggcttccctttagtctagaatagtgtctctcccacatgttcttcaattaatattcgtgattctactgcagtcatgtgcaggggaccctgtaaagagtgtttttgttgttgttgtagttttgttttattttttttcctcagctttcaccttcccttccaatctatcttctctccaggatctgtgtcttctctcctccttccctttctaccttcctactggactaaagcagcatctttactccagtctcaaacaaaggaagaccctttacaag

SEQ ID NO: 502045 - DNA, 640 bp, Homo sapiens
gtcccactcacctcccttagaccattaaccacttattatcttttcagtaagaccttccctcctaaactggcaaaccacatatgctaccacaaggtttccccctcttttactttatttatttattgatttttttgccagggtaatcatcactgtctaacatactgcctgatttattcatttggattgttcattgcatgttgggctcactagaaggtagactccatgatggcaggaatccttttctgtttcattccccgtggcttccctttagtctagaatagtgtctctcccacatgttcttcaattaatattcgtgattctactgcagtcatgtgcaggggaccctgtaaagagtgtttttgttgttgttgtagttttgttttattttttttcctcagctttcaccttcccttccaatctatcttctctycaggatctgtgtcttctctcctccttccctttctaccttcctactggactaaagcagcatctttactccagtctcaaacaaaggaagaccctttacaagttattcctcaccctggaaggactttctccttcctggtgtcaggaacctcttttgtatcatatcctgtgttcattccacattcgtatttattttgaaactttatgctcagac

SEQ ID NO: 502046 - DNA, 651 bp, Homo sapiens
aaacataagaaaagaaacccytttccctgctccccttgctggaacattatgcttacttggctgtaggctggtggtaaattcctctgtatctctcccttgccaaggaactctcatagccctgagacagagggtagttgagttgagtgagaggggtttacaatcttcttcccagggagaagttcaagtaatgctggaggatgataagctaccttctgagaagagcgggctgatcagtggctgagtatttgctttgatgagtgagatgtatacaggagggaagcacccagctaactcacagcccacgcagggctcaacactcttcaaaatgaatattgaacatttaaagactattggttttgaagtggcatcaggttgttcagctttactgaggaaaagttgggggcaggcaggcacttatgtgtctcctttggtcctctgtggagccctacctggtataattataatagctgacataaaatgaactctatgtgccaggcactgggctagtttatgaacaagatcagcattgatcataaaaccaatcctataaggaaggtagtgttatgactccatattacagatagagaagctgaggcttcaaggggctgagaaatgtgcccaaagtcacatgactaggtaagtgatgcagct

SEQ ID NO: 502047 - DNA, 663 bp, Homo sapiens
ctcttaattttcttacttcattttattgatttttggtttggcttagtagtgtctttattgcaaaaaataatacttgcctcatgggattattatgagaaataaggaaagaatctgataatttcaaatacagaggtgaatttatagacttcatttctatatcttgctcaagtttgataaggctagagctagaagccacattggtagaaagttagtgcccagcaatggtgtttaagttgcataggacagtggatttcaaatattttggtctcaagatccttttacagtcttaaaaattacttaggaccccaaagagctgttgtttatgagaaataaatccctttatatttaccatataagaaattaaaaattagaaaaattatatgtattaatttattaataacaataataaacccattacatgttgctataaataacattgtatgagaaaatgtctatattttaaaaacaaaaaaattaatgagaagaatggcattgtgtgactttttttggaaatctttttaatgtmcagctcaagacttccagattctcagatctgcttatgcattcaatcagttgctgtatgtttttttgtttcaagcacataaagaaaatttggctgtacataaatatgtagctggaaaaaagatatgtagctccatgaac

SEQ ID NO: 502048 - DNA, 588 bp, Homo sapiens
gtttgctcacttctgggtgtcacagccagccttggtcatcaaaaggcctgtttgccacagggcaaaacaaagtccaggtaagcagttagagtatgttcagcagttgggaatacatgactcctagccctttcaagtttgaggctaaaatggattttgtttgttttcaaaatccactcccataccctaagcagatttctggaaaagaactctagttcccctacctcctaccaatagtgcagccaagcattcctgaaagtgttgcttgcaatttaaagcatagccatatttaattttttcccatgcttttctatttgaccttgtttccttctttccctagagaaaaatttgagattccagaggaatcatcatgtctttggcatagtatttctcagccctttcattcttgcytttaaccctgcaatttagctccttacctttgcaaataaaatatgcttctgagagctttgcttcttaaaaggtcctccctagaaagcctttgagaattttctttgtgtgtactatgtgtgtttgtgtaaatatgttcttttaagtaagaccatattgatataaaagaaaggcaactccttt

SEQ ID NO: 502049 - DNA, 491 bp, Homo sapiens
taagaggagctgggctctgtgaatcaatgctggagtaatttctccacattcggctctcagaatcctcgctacyatcgtctggcagattgcaggtgcttctcttgggattgggagcctgccagccccccgtgtatgtggtgctttggattgcagctttcctccaagtctctcttttcaccaaataatgcctttgacttcctgtttcccatgcctattagctgcagaccaaccccatctccctttttctctttcctagccttgagaggggagcttaggacaaccaccttggggttttggctggaaactgcttaaataagaaggactgagacacaaaggagggactctttctttctttctttctctgttcttcttttcttcttcttcttcttcttttttttttttttttggagacaggagtctcgctctgtcacccaggctggagtgcagtggtgcgatctcagctcactgcaaattctgtatctcaggttcaa

SEQ ID NO: 502050 - DNA, 491 bp, Homo sapiens
taagaggagctgggctctgtgaatcaatgctggagtaatttctccacattcggctctcagaatcctcgctaccatcgtctggcagattgcaggtgcttctcttgggattgggagcctgccagccccccgtgtatgtggtgctttggattgyagctttcctccaagtctctcttttcaccaaataatgcctttgacttcctgtttcccatgcctattagctgcagaccaaccccatctccctttttctctttcctagccttgagaggggagcttaggacaaccaccttggggttttggctggaaactgcttaaataagaaggactgagacacaaaggagggactctttctttctttctttctctgttcttcttttcttcttcttcttcttcttttttttttttttttggagacaggagtctcgctctgtcacccaggctggagtgcagtggtgcgatctcagctcactgcaaattctgtatctcaggttcaa

SEQ ID NO: 502051 - DNA, 491 bp, Homo sapiens
taagaggagctgggctctgtgaatcaatgctggagtaatttctccacattcggctctcagaatcctcgctaccatcgtctggcagattgcaggtgcttctcttgggattgggagcctgccagccccccgtgtatgtggtgctttggattgcagctttcctccaagtctctcttttcaccaaataatgcctttgacttcctgtttcccatgcctattagctgcagaccaaccccatctccctttttctctttcctagccttgagaggggagcttaggacaaccaccttggggttttggctggaaacygcttaaataagaaggactgagacacaaaggagggactctttctttctttctttctctgttcttcttttcttcttcttcttcttcttttttttttttttttggagacaggagtctcgctctgtcacccaggctggagtgcagtggtgcgatctcagctcactgcaaattctgtatctcaggttcaa

SEQ ID NO: 502052 - DNA, 637 bp, Homo sapiens
agaattggataataatcattctgcctcatatatttattattgttttgcctcatatatttattatttattattagggttattgtgaagattaaattgaggtgatatatgaaacacacagaactgatctggtaccaaatttctaacttggggttgaagttccactaacagccaatrgtggtggttaggtagtcaggttgagaaggagctatttccaggcttggaaagttctccttgggaaggatttgttctggagtttcctgttgctgtatagcctttttaaggtcttgatcagtcctaaattccccaaagacaactccagagagtcacaactatggtggaatgtggacatgagagaatgaaatgaaaacagagctgttcctttctcctgggggtcctgggctgctacggaaatgctgggcccaatctgaatgaaaactggtttcaaaaggtaaccccttaactcagtttgttaagctcattttctgacttcaaatggtagacagagtttctttcttcaaaagtagaaaacactctgtttaaagtgaaagaccactgaaaagtaaacatgattagttcgccttaatcaagaatgttcaaaaaacttttcagaaattgcaggatctaatcccacaggggg

SEQ ID NO: 502053 - DNA, 611 bp, Homo sapiens
tatatttattattgttttgcctcatatatttattatttattattagggttattgtgaagattaaattgaggtgatatatgaaacacacagaactgatctggtaccaaatttctaacttggggttgaagttccactaacagccaatagtggtggttaggtagtcaggttgagaaggagctatttccaggcttggaaagttctccttgggaaggatttgttctggagtttcctgttgctgtatagcctttttaaggtcttgatcagtcctaaattccccaaagacaactccagagagtcacaactatggtggaatgtrgacatgagagaatgaaatgaaaacagagctgttcctttctcctgggggtcctgggctgctacggaaatgctgggcccaatctgaatgaaaactggtttcaaaaggtaaccccttaactcagtttgttaagctcattttctgacttcaaatggtagacagagtttctttcttcaaaagtagaaaacactctgtttaaagtgaaagaccactgaaaagtaaacatgattagttcgccttaatcaagaatgttcaaaaaacttttcagaaattgcaggatctaatcccacagggggca

SEQ ID NO: 502054 - DNA, 622 bp, Homo sapiens
atcattctgcctcatatatttattattgttttgcctcatatatttattatttattattagggttattgtgaagattaaattgaggtgatatatgaaacacacagaactgatctggtaccaaatttctaacttggggttgaagttccactaacagccaatagtggtggttaggtagtcaggttgagaaggagctatttccaggcttggaaagttctccttgggaaggatttgttctggagtttcctgttgctgtatagcctttttaaggtcttgatcagtcctaaattccccaaagacaactccagagagtcacaactatggtggaatgtggacatgagagaatgaaatgaaaacagagctrttcctttctcctgggggtcctgggctgctacggaaatgctgggcccaatctgaatgaaaactggtttcaaaaggtaaccccttaactcagtttgttaagctcattttctgacttcaaatggtagacagagtttctttcttcaaaagtagaaaacactctgtttaaagtgaaagaccactgaaaagtaaacatgattagttcgccttaatcaagaatgttcaaaaaacttttcagaaattgcaggatctaatcccacagggg

SEQ ID NO: 502055 - DNA, 611 bp, Homo sapiens
tatatttattattgttttgcctcatatatttattatttattattagggttattgtgaagattaaattgaggtgatatatgaaacacacagaactgatctggtaccaaatttctaacttggggttgaagttccactaacagccaatagtggtggttaggtagtcaggttgagaaggagctatttccaggcttggaaagttctccttgggaaggatttgttctggagtttcctgttgctgtatagcctttttaaggtcttgatcagtcctaaattccccaaagacaactccagagagtcacaactatggtggaatgtggacatgagagaatgaaatgaaaacagagctgttcctttctcctgggggtcctgggctgctacggaaatgctgggcccaatctgaatgaaaactggtttcaaaaggtaaccccttaactcagtttgttaagctcattttctgacttcaaatggtagacagagtttctttcttcaaaagtagaaaacactctgtttaaagtgaaagaccaytgaaaagtaaacatgattagttcgccttaatcaagaatgttcaaaaaacttttcagaaattgcaggatctaatcccacagggggca

SEQ ID NO: 502056 - DNA, 611 bp, Homo sapiens
tatatttattattgttttgcctcatatatttattatttattattagggttattgtgaagattaaattgaggtgatatatgaaacacacagaactgatctggtaccaaatttctaacttggggttgaagttccactaacagccaatagtggtggttaggtagtcaggttgagaaggagctatttccaggcttggaaagttctccttgggaaggatttgttctggagtttcctgttgctgtatagcctttttaaggtcttgatcagtcctaaattccccaaagacaactccagagagtcacaactatggtggaatgtggacatgagagaatgaaatgaaaacagagctgttcctttctcctgggggtcctgggctgctacggaaatgctgggcccaatctgaatgaaaactggtttcaaaaggtaaccccttaactcagtttgttaagctcattttctgacttcaaatggtagacagagtttctttcttcaaaagtagaaaacactctgtttaaagtgaaagaccactgaaaagtaaacatgattagttcgccttaatcaagaatgttcaaaaaacttttcakaaattgcaggatctaatcccacagggggca

SEQ ID NO: 502057 - DNA, 615 bp, Homo sapiens
gatataataagcagatctataaaaatgtctgtattttgacaagtagtacaggaaatgacattacagaaaatatgtatatatgtatattcatacatactgtaggtctaggtgttatcgataggttcttggaaactgactttaagcaaaacaatgtataacgaaacatttttttctcatcaacattataattgaactgtgttgaatgaaacaaagtcatttgaggaccttctgtacattgttttgcttgaagtagcagtttccaagaacctattggtgacattaaatgaggacttaagtctaggtatataaatttggacaaggaccgacctgcaaatggagcagtatatgttattcaggagaataaygtttacgtgagtggtattgaagtgttggatgtggatagggagaagggagagaataaaatatggcagaagctaaggtcagaaaactagttaccagctccatagtgaagaattcccaacagctaagtgaattatttagacatggttctctctttatctgggccttacaaagatgactccccatcctaaactcacacaggccccacagaggaatagtagatgataagatcaaggtcttacagactttatcctg

SEQ ID NO: 502058 - DNA, 614 bp, Homo sapiens
cgtggtgggagaaccactgctctcttcaaagctcagatggaaatgcagaaatcacctgtcttctgtgtcgctcacgctgggagctgtagacccgagctgttcctattcggccatcttggctcctcctccttggctgttgttttaattgacttctcccacaactggcagctcagttcagctcttgctggccatgagaactcctgtttccacagagcttcactaaaagaacatgctaatatttttaatgccagtctaataagtgagaaattgtatctcaatattgttttaatttgtgcctgtctaattatacatgcatttaaattttttcatatggtgagaataattttttgtctggtttgttgattgcttcacttctccatttttctatttgatatttggctcttcttccttcaatggttctttacatattagagatattagccctttgtgctagacattgtgaatattttctcctatttttgtcwgttgcattttgacttcatttacaatatttttgccactttttaaatgtgtagacaaattagccaatcatcaaggggaattcatccatttccttttgatacttttatgttttcaattttatctagatcccc

SEQ ID NO: 502059 - DNA, 588 bp, Homo sapiens
taaggtaactttaaaaaacttaattgaggtatgatttatgtgcaaaaagctatacacatataatgtatacaacttgataaattgggacataagtatacacccacaaaactattaccataatcaatgccatcatcataagataacttacttgttaattggtctcctatccccatcttttctctagtgtgtagatatgctcttatgcattagaaatatttttggcttctcattagtcttcaaaccaagttttgtcctttatcttggtactccaagggctccatacagagggcttatatcacttaaggctattttctaccattcacctttaagaatccatctccagagacacgcctataacttatctattccttgatgtgttagagtttaaccttgacctcagaatatttactcagaatctactcttcacatgaaatgccctctttgatttattctkctatccaaatcttactcaatttttatgagatctgattctcattatgaagacatcctcaactttctgatctgcaagataatgactgtttgtgtgatgcaaagagctcttaattgtacttcactcctgtgttcatt

SEQ ID NO: 502060 - DNA, 465 bp, Homo sapiens
agacagctgacataaagacaggtagctgacataaagacagacagtgtaagagagctgctgaccagaaagctgctgaataaaactacatttcacctgcctacaccaccccrccgagtgtctttcagctatctgccacccgcccacttccccggaacctcagcatgggctggaacctaaccctgggcatgacatttagcatagtcgtggacctaaccaccacaaagttagaaattatggcactagagtcttgcagccagaggctacaaggttcctaacctccccaattgctcctatgacaacatttttattataaaacatacctacagcatgaactgggtagcgataaattgcaagattgctttgtctagtaaaatttatcatcagatatcagctcacctggaagctaagctgttatgtccggaatttaagctgtagttcgcatgaggaggacaacttcacttggag

SEQ ID NO: 502061 - DNA, 620 bp, Homo sapiens
cgggtgttggtaaagcactgataggctcacaaaacaaaaaacatggcaccaatgccaaacaattttgagtgaaaggattcagacacaaatgggtacatactctttgagtctacttatataaagtccaaaaagaagcaaaacctggccggacacagtggctcacgcctgtaatccctgcactttgggaggccraggggggcaatcacttgaggttgggagttcaagaccagcctgaccaacattgagaaaccccgtctctactagaaatacaaaattagctgggcatggtggtgcatgcctgtaatcccagctactcaggaggctgaggcaggagaattgcttgaccctgggaggcagaggttgtggtgagccgagatcgcgccattgaactccagcctgggcaacaagagcgaaactccattcaaaaaaacaaggaagaaacccacttatggtgatagaaatcagaataacgtttatctctgtgggtgtgggtgacagttgggggcataaggaggatggggagagtgctcagagtggtctgtctgttgacctggttggtgtgtttggtttatgaacattgattgagttgtgtattttgatatgtatgttattcctcatta

SEQ ID NO: 502062 - DNA, 656 bp, Homo sapiens
ctctcattccttttcatcttcgcctatctgactgttgcaaagagtatctgcatacctttagaagtgtatttacataaaacaaacacgtccttaaattgaggttgccgtcttcagctttaaacatttctttttaacatcagtgcgtgatgttctactccttgactgtaggtttgggcttaccaatttctgtgtatggttttcttcaaaaggggaaaattcatggctgtgtttatacatttagaygatggctttcaaaaggatataaattatgcaaatctcttaaaagtcctctgatctgaaagtcaacttgagttcttacccattactcatctcctatctccccatgatccctgctccagtgagcagccctggcccccctctctctttgaacatgtcaagcttgttcctccctccggggctcttttcccccacttggttctcagaacacggcttggcatcaagtaggtattcaggagctatttgctaagtgaaaagtgaatttcacagattttggagaagtgtcttggggtacagaaaagcaaatgtgctcaggagtccaacacctgggttcaagtcctggccccagctcttcctagtaaagtgcttggacaaattgctccttctcagagagtgccagctctccccctctgaagagc

SEQ ID NO: 502063 - DNA, 477 bp, Homo sapiens
caaccacactgcaggtggattttgagttgtttgtttatgtttgacgttatggttgtcattctattcrtgtcactgactttatagccttagctggcttttatctttgcctgtccgatcggacgggcctgttacatttacatgaagccgggctgtctcttacctctgctccctgagtctcagtcacagtattccttcaagttcataaacaaagccccaaaacgccttctccaggtttgatgcagctcaagtgaagcatgtggtttgcaagactgtcacatgggcctcgggcttgactgtcatcctccagtgatttggccaacggagggctgcaaggcaaagcccagatgaagcttcgatcctttgtagaggctgagtctctgggaaccaggtgcagctctaagtcaaagccatctgtccacggcagtaggatgtgatgtcaggcctgccgcggatgcatgtcgcctgtgggaacggccc

SEQ ID NO: 502064 - DNA, 440 bp, Homo sapiens
taccctggcattagcccctgtttttctagatgtttaggtttcctagaataaccagagttttatagttcccacacctgaaattattagccagcgtctgatcgtttcattctgagtaaagttacacctcattgatcagatatgttgcttaaaaacaaacattaaatttgtcartcaattttggagtcaggctcagagccaaaggcaatagtattataagagaaagcatatacttatctactctcctctcttccctcaaaagaaatttcccctctagcttttttagggtcagtcagtctagtccctatgatgaaaactgctgaacatcttactaaaagatttcatattcacatataaaactgtttctgtataagttgcattccaattatattatgatcctaaatttcttatcccccaacttacgatagcttcaccttcttttt

SEQ ID NO: 502065 - DNA, 440 bp, Homo sapiens
taccctggcattagcccctgtttttctagatgtttaggtttcctagaataaccagagttttatagttcccacacctgaaattattagccagcgtctgatcgtttcattctgagtaaagttacacctcattgatcagatatgttgcttaaaaacaaacattaaatttgtcaatcaattttggagtcaggctcagagccaaaggcaatagtattataagagaaagcatatacttatctactctcctctcttccctcaaaagaaatttccyctctagcttttttagggtcagtcagtctagtccctatgatgaaaactgctgaacatcttactaaaagatttcatattcacatataaaactgtttctgtataagttgcattccaattatattatgatcctaaatttcttatcccccaacttacgatagcttcaccttcttttt

SEQ ID NO: 502066 - DNA, 440 bp, Homo sapiens
taccctggcattagcccctgtttttctagatgtttaggtttcctagaataaccagagttttatagttcccacacctgaaattattagccagcgtctgatcgtttcattctgagtaaagttacacctcattgatcagatatgttgcttaaaaacaaacattaaatttgtcaatcaattttggagtcaggctcagagccaaaggcaatagtattataagagaaagcatatacttatctactctcctctcttccctcaaaagaaatttcccctctagcttttttarggtcagtcagtctagtccctatgatgaaaactgctgaacatcttactaaaagatttcatattcacatataaaactgtttctgtataagttgcattccaattatattatgatcctaaatttcttatcccccaacttacgatagcttcaccttcttttt

SEQ ID NO: 502067 - DNA, 440 bp, Homo sapiens
taccctggcattagcccctgtttttctagatgtttaggtttcctagaataaccagagttttatagttcccacacctgaaattattagccagcgtctgatcgtttcattctgagtaaagttacacctcattgatcagatatgttgcttaaaaacaaacattaaatttgtcaatcaattttggagtcaggctcagagccaaaggcaatagtattataagagaaagcatatacttatctactctcctctcttccctcaaaagaaatttcccctctagcttttttagggtcagtcagtctagtccctatgatgaaaactgctgaacatcttactaaaagatttcatattcacatataaaactgtttctgtataagttgcattccaattatattatgatcctaaatttcttatyccccaacttacgatagcttcaccttcttttt

SEQ ID NO: 502068 - DNA, 496 bp, Homo sapiens
ggcatggtaccctggcattttttttatactttcatagtttctctagcatatgcccacagaaaaagtaagtcccactctgaccttgattgtttgtggaagaaccagttcaggaagcatgctgtcctgcgttcattcacctgtttctccaagcctggcaccacttcccgagtgctgtgttgatggaccctcaaaagggtatacctaagccaaaatgtcattttcatcactgggaaacaatgcctagtgagaaagcaacttcctagggccccttaaaaaggtgctgcagtaataactcatgactaataatagtatctttcctaattattttagatgcagaattcagcttttttttaatacttctgaaggtaaaatcgttttcatatctgcatttgaggtcraactacccacttcaagttgcaaaatgaatgatgttgcttgctgaatacttaataaacatatattctttgttgccaataaagatggtggtgcttggatg

SEQ ID NO: 502069 - DNA, 520 bp, Homo sapiens
caattctgacagtgtcaggaaaacatccccctggcttccccgtgcccaggcttgaagacccaggggctggatacacagccacggacacaacagaattcacttttaacgaggcttcagaaaacaacgtttaactatataaacacctgtttttggaaaatgctgcagatctatttccaaatactgtcttccagcccactctcgctcccactgaggcagcatcccacgggacccaacgtcaccacttttccagtccaaaaaatgtgctttcgatgtcctgatttgaggctgctcttcctctaacctgtgcggctctgtgaaaagccaattttaagatgcgatgcctcctccagaattcgcctgtatgcagaagaatgatgcagaaggaggcagaaaagccggagcagttgggggcaagatgaaaacagtctagtcattatcagttaaactgtaactgcgtgcggcagcgtgctgagcgagacaatcagcrgagcccgtgaaatgttgctggttttccagatag

SEQ ID NO: 502070 - DNA, 429 bp, Homo sapiens
ggggctcaaaaggacaaataggtgtccttttaagacactttgactacttggatcaatacactagctattctcaaaccaacataatgcatgaatacagcagccaagtagaaggatctccaatgctcaagtcactctgagtctttgctggtgtcaacctacaatgccaccctcaaggaaagcacagtggttcacagacagggatgattcatcattttcctctgaaaatgaattctgcaggaagaaaccagagttgtggtaagatgttggagtcaagttttctcttcatctgatattcaagggttgtgatctttatgaataccattttacatgctaatcacaaagacaaatggagggaagatacagtgataacaccaagttggacattcaaatgctaagsgagccaagtaccagccctaccctgcttatttt

SEQ ID NO: 502071 - DNA, 601 bp, Homo sapiens
ttcttttctccttctgagtatggtagggttgtagatgatttttactttttatttatacttcttaatgttctaactgcttacagtgtcacttttgttataatcataaaatgaagctcttttcattttagaggaaaaagagaaaaaaggctctatagattctgaaggcagttccaagtaagtctctcaaatgctcttacgagactactttgcaggtcaaaatcccagaaaaatgtaaaatcttgtgatcagagaaaatggctttgctcactactctagctcggttagcagagtacgcagcaccttggcaggtgtgacacacacactctgaatgaagaaatgcggctgacttggatgttgagtttcyagagatttcagttttaaaatcattgttttatgatcctttttattctagttagctgaggatattttcaaatttttgtcaaaattcagtacattttagaggaaagtttaaaattagcaacaggattcaaactaccatgttttataacatggcttttaagaaacgatgaaccaaaacagaaaaatgggcaaagtggggactaaaaacggcttgctggccaaatagctggtagcagaagag

SEQ ID NO: 502072 - DNA, 478 bp, Homo sapiens
ggacagctggttccatattcagttggcaagatgttgcatgcacctaaggtgacatacattttcaactttgaaaatatacttcaaaatctcttatatttcaccttcatgacttataatcattgatttacagtcagggaatgtgcatgggttttttttttttttttttttttaacacagtaaggagggatagcttgctgacctgctagcagtaggagacttgattgattttctaagaagtgcttctgcttgaagacccctrcaacaaacgaatttcatcttgcaaaatgatgagctgagagtcccctgccagctatggccagggagtaaagtaccactcgttagcctccccaggattccagcctgtcgttttacatgtcttagctataaactttcagccaaagtcagggagcgcttttggctctgctcagggtgaaacagttggcattacacctgcatgggatagcttagtaaatattcc

SEQ ID NO: 502073 - DNA, 583 bp, Homo sapiens
tgggcagggcatagccgtgtctactctcaggctcaccatttaccaatggggttcgtggccataaagttcagaggccactgataatccaatgtcagactcggggatgagagcgagggttgtgcttcctgcggatgagacacagaaaacccgtaagcatttggcatgcggcagagcagccccacattcccatcgcaccctgagcacctggcatgggccccccagccctcctcttccrcggtcagcagccatcatctacactgtggtcatacccttggactatgatctgtctgttcttacatggagcctccgcaagagttgcatttgactgtaagagctagaaggacatgctgacacaggtaggatggtgatctggaaaaatttaaaggatggcttgaaggaagctgtgaggcgttaagctaagaacgaagtcaagggtaagagaattgacttggggtaaaaagaacacacacagacacacacacacacgcgcgcacacacacacacacataacaaggagaggatgggctagccacctggagccaatgtggagagcagggaagaggagacctagttctcatcctgg

SEQ ID NO: 502074 - DNA, 583 bp, Homo sapiens
tgggcagggcatagccgtgtctactctcaggctcaccatttaccaatggggttcgtggccataaagttcagaggccactgataatccaatgtcagactcggggatgagagcgagggttgtgcttcctgcggatgagacacagaaaacccgtaagcatttggcatgcggcagagcagccccacattcccatcgcaccctgagcacctggcatgggccccccagccctcctcttccasggtcagcagccatcatctacactgtggtcatacccttggactatgatctgtctgttcttacatggagcctccgcaagagttgcatttgactgtaagagctagaaggacatgctgacacaggtaggatggtgatctggaaaaatttaaaggatggcttgaaggaagctgtgaggcgttaagctaagaacgaagtcaagggtaagagaattgacttggggtaaaaagaacacacacagacacacacacacacgcgcgcacacacacacacacataacaaggagaggatgggctagccacctggagccaatgtggagagcagggaagaggagacctagttctcatcctgg

SEQ ID NO: 502075 - DNA, 709 bp, Homo sapiens
ctgggattttaatagatcactgctctgaatctgtaaatgaatttgaggagtactaccatcttaacaatattaagtctcctgatccatggacatgggatgttttcttcacttatttaggtcttctgtaatttctttkaacaatgttttgtattttccagaatataatttttgcattgctctgttaaatttattcctaacaattctattttaatgctgttgtaaacgcaactgttgataatttcatttttaaattgctcactgtttaagtgtgtaggataaaattgatttctgtgtatgctgaactcattttatttgatagttctttacattctttaggattttctatgtacaaggtcatgtcatctgagaatagagacagtgtttcttcttcctttccaatctgaatgccttttatttcattttcttgctgaactggcatggctaaaatataatatttcaaaggaaaaaaatctatgcaatttagttaaactcatgatatgttgattaaaaacaacattggctcccaaaagtcacataacaaaatataaattatataatttatcaagatgattctagccagaaagaactccaggttaattttgatattatggtcatttggtatcaaagtccagtaaaaggtcaccagagaaaagcagaaagaatgcaaaaatcaggcaattgcatacaaaaaaatcacatcaactttatc

SEQ ID NO: 502076 - DNA, 608 bp, Homo sapiens
ctgcgcctgcctgctctttccctgtgctctggcggcctgtcctgggccttacaccaacgcgatgaacaggggaaacggggtgctgagcctctgcgtgaaagggggcttgtttagtctcctacctgcccgcttagaaaatgttctcaaaggtcaggcacggtggttcatgcctgtaatcccagcactttgggaggccaaggcggctggattgcttgaggctaggagttcgagagcagcctggccaacatggcaaaaccccgtctctactaaaaaaaacaaaaaaattagccgggcacggcggcacatgcccgagatcccagctattcgggaggctgagacacgagaatcgcttgaacccgggagatggaggttttggggaaaaaaagaaaatgtcctcagagtctgccctgccatcaccttgagagtgacctgtgcsccagttttctcatctgtgtagtggggttaagaacagaacccacctcgtaggttgattaggcaggttcagtagggtgatatttgtaaagagcttggaacatgccaggtgcataataactgtacatatgtgtttgataaattaatcaaaataaaatacaatatctgtaaacgat

SEQ ID NO: 502077 - DNA, 561 bp, Homo sapiens
tatatgattgcatgtcagggctttcagctaaactgtgtagggaaatcctctccatgctccctataaatacagcaatgaatacccattttaaataaagactttaaaagtctttgaaaggacaaaagttcaccaggtagcagagtgtaggaatcacctatagtcccaaccgagamaaagttttaaccatttattaatattctgcaattatttgctgccaaattttttctccagcaaattcttatctttagaattaaagaaaatttagtcacaatccatgttcactgaatattaaaactactattataaaccactgttatatacatcagttttaataactcaatattccagagtagagatggtataatttttggcaatttcaataatgagatacattgatttttttttcctcctcataaatctcttctattgacaagaggacaaagcacacctttctgcataaaggtttgcccacaattaggacaggtaatttgaagccacctttgtggccagatacagaagagtgcatattgggtaattcctctcatttgaaggtcaaaatag

SEQ ID NO: 502078 - DNA, 561 bp, Homo sapiens
tatatgattgcatgtcagggctttcagctaaactgtgtagggaaatcctctccatgctccctataaatacagcaatgaatacccattttaaataaagactttaaaagtctttgaaaggacaaaagttcaccaggtagcagagtgtaggaatcacctatagtcccaaccgagacaaagttttaaccatttattaatattctgcaattatttgctgccaawttttttctccagcaaattcttatctttagaattaaagaaaatttagtcacaatccatgttcactgaatattaaaactactattataaaccactgttatatacatcagttttaataactcaatattccagagtagagatggtataatttttggcaatttcaataatgagatacattgatttttttttcctcctcataaatctcttctattgacaagaggacaaagcacacctttctgcataaaggtttgcccacaattaggacaggtaatttgaagccacctttgtggccagatacagaagagtgcatattgggtaattcctctcatttgaaggtcaaaatag

SEQ ID NO: 502079 - DNA, 609 bp, Homo sapiens
tacaggcacgcacccccatgcccagctaaattttgtatttttagtagagacgggatttcaccatgttggtcaggctggtcttgaactcctgacctcttgatccacccacctcagcctcccaaagtgctgggattacagacgtgagccaccgcaccctgccttgaagtatactcttaacaatcttctcttggtaatcaaatttctcaatgtttttacttttgaatatattttaatttactcttatttatgaaaggtactttagctaaatatccaatttyagcttttatactatgcttgttcattagaacctccctgactggaaatatgtcaatttggattttacatttaatttagaatttattttaaagggttttaaatgaaatttacatgtaattagatactatatggttacacaatattttcccacatgtgctataattgacaaataaaaattgtatatatttaaggtatacaatgtggtttatgtatatgtaaatatatacaataaaatcactacaatcaagctaaataacatactcatcacttcccatagttactgttggtgtaataagaatatttgaggtcttctttattaataaaatttaccta

SEQ ID NO: 502080 - DNA, 462 bp, Homo sapiens
taacactgtctgaacacctgaaaacacgttgaacactgacgaattttaattttytgttttagcccaaggtcagtaagcatcttctgtaaagggctagattgcaaatattttaggttttatggaacataaggtttgggtgcaactattaagctccagtgatggatatggctgtgttgcagttaaacttgatttacaaaaacagatggcaagaccaatttagctgtggatcatagtttattgactcccgccttttcctgacaaagtagagtttctttacctggcaaccaaagcagttagtcttaactaataccccctgtatcaggcactggattaacacatttttaagccaaaaatttgaaaaataatcatttataccttttctctgttcccttgcagcataaatacaacatcagaaagtatgtttctctcaaatgtttccttggtctatttactctttccatt

SEQ ID NO: 502081 - DNA, 462 bp, Homo sapiens
taacactgtctgaacacctgaaaacacgttgaacactgacgaattttaattttctrttttagcccaaggtcagtaagcatcttctgtaaagggctagattgcaaatattttaggttttatggaacataaggtttgggtgcaactattaagctccagtgatggatatggctgtgttgcagttaaacttgatttacaaaaacagatggcaagaccaatttagctgtggatcatagtttattgactcccgccttttcctgacaaagtagagtttctttacctggcaaccaaagcagttagtcttaactaataccccctgtatcaggcactggattaacacatttttaagccaaaaatttgaaaaataatcatttataccttttctctgttcccttgcagcataaatacaacatcagaaagtatgtttctctcaaatgtttccttggtctatttactctttccatt

SEQ ID NO: 502082 - DNA, 462 bp, Homo sapiens
taacactgtctgaacacctgaaaacacgttgaacactgacgaattttaattttctgttttagcccaaggtcagtaagcatcttctgtaaagggctagattgcaaatattttaggttttatggaacataaggtttgggtgcaactattaagctccagtgatggatatggctgtgttgcagttaaacttgatttacaaaaacagatggcaagaccaatttagcygtggatcatagtttattgactcccgccttttcctgacaaagtagagtttctttacctggcaaccaaagcagttagtcttaactaataccccctgtatcaggcactggattaacacatttttaagccaaaaatttgaaaaataatcatttataccttttctctgttcccttgcagcataaatacaacatcagaaagtatgtttctctcaaatgtttccttggtctatttactctttccatt

SEQ ID NO: 502083 - DNA, 609 bp, Homo sapiens
tgcattctttgtttctatckcctatgtaatctaatttcaaggaagtatcaaagtgtcggggtggagagaggataagaatcactagcatgaaatctaaagtgcagtcatccggttgcctgatgtcttctgaggtggttcacccagattcacaatacagataattaaattcagagctgcagagatagggaaaataagatgtggaaatagacttcttctgaagtattattcaggtctcctccttttcttccaaatgccatcccccccatcagtatactcaaggcatctgatggcattgatgagcaactgaaaaatcatttaattaatcatcaggttctttatccttagttaaaaatgtagaggcacaaaagtcatgtgtcaaaatatgctcttttttaatagagtatggtccactacccactgtgtgtcctcttaacctttccagagtaggtgtccttacagcataaatttagcataaaattagacacgttccagtataaaataaaatgaagacataataagccaatactgaattctttagtgaatctagaaaattcactttaattttttttctagaaaatggatttattttagtgtatttatttgtttttg

SEQ ID NO: 502084 - DNA, 609 bp, Homo sapiens
tgcattctttgtttctatcgcmtatgtaatctaatttcaaggaagtatcaaagtgtcggggtggagagaggataagaatcactagcatgaaatctaaagtgcagtcatccggttgcctgatgtcttctgaggtggttcacccagattcacaatacagataattaaattcagagctgcagagatagggaaaataagatgtggaaatagacttcttctgaagtattattcaggtctcctccttttcttccaaatgccatcccccccatcagtatactcaaggcatctgatggcattgatgagcaactgaaaaatcatttaattaatcatcaggttctttatccttagttaaaaatgtagaggcacaaaagtcatgtgtcaaaatatgctcttttttaatagagtatggtccactacccactgtgtgtcctcttaacctttccagagtaggtgtccttacagcataaatttagcataaaattagacacgttccagtataaaataaaatgaagacataataagccaatactgaattctttagtgaatctagaaaattcactttaattttttttctagaaaatggatttattttagtgtatttatttgtttttg

SEQ ID NO: 502085 - DNA, 609 bp, Homo sapiens
tgcattctttgtttctatcgcctatgtaatctaatttcaaggaagtatcaaagtgtcggggtggagagaggataagaatcactagcatgaaatctaaagtgcagtcatccrgttgcctgatgtcttctgaggtggttcacccagattcacaatacagataattaaattcagagctgcagagatagggaaaataagatgtggaaatagacttcttctgaagtattattcaggtctcctccttttcttccaaatgccatcccccccatcagtatactcaaggcatctgatggcattgatgagcaactgaaaaatcatttaattaatcatcaggttctttatccttagttaaaaatgtagaggcacaaaagtcatgtgtcaaaatatgctcttttttaatagagtatggtccactacccactgtgtgtcctcttaacctttccagagtaggtgtccttacagcataaatttagcataaaattagacacgttccagtataaaataaaatgaagacataataagccaatactgaattctttagtgaatctagaaaattcactttaattttttttctagaaaatggatttattttagtgtatttatttgtttttg

SEQ ID NO: 502086 - DNA, 609 bp, Homo sapiens
tgcattctttgtttctatcgcctatgtaatctaatttcaaggaagtatcaaagtgtcggggtggagagaggataagaatcactagcatgaaatctaaagtgcagtcatccggttgcctgatgtcttctgaggtggttcacccagattcacaatacagataattaaattcagagctgcagagatagggaaaataagatgtggaaatagrcttcttctgaagtattattcaggtctcctccttttcttccaaatgccatcccccccatcagtatactcaaggcatctgatggcattgatgagcaactgaaaaatcatttaattaatcatcaggttctttatccttagttaaaaatgtagaggcacaaaagtcatgtgtcaaaatatgctcttttttaatagagtatggtccactacccactgtgtgtcctcttaacctttccagagtaggtgtccttacagcataaatttagcataaaattagacacgttccagtataaaataaaatgaagacataataagccaatactgaattctttagtgaatctagaaaattcactttaattttttttctagaaaatggatttattttagtgtatttatttgtttttg

SEQ ID NO: 502087 - DNA, 410 bp, Homo sapiens
aaagggaatggaacactctgcctttaccatcttttctctcctagtgggatgaggtcagagccagggcagactctccttacagagaaaaggtatgcaggaggccctyagcaacacaaattaaaatgtggacacccacaatctttgctcctggagatcactgtagtccttacaggtcctaggcccagcctgaggagttgcctggagttcacatgtctatgttactccaaacaaggagctatattgtgtctcatcctgccctattatcgaagctgctgcagtgtaatgacatcttgagactgaagccactgctagggtgccttctcatttgggggccagtagccactctatcttcccatatcctaggcttcactgccactacaccacacctactcatggtagcgcaccattct

SEQ ID NO: 502088 - DNA, 649 bp, Homo sapiens
tacatgccagctcttctcagaaagatcaaagttaccagtgaatgaacaagttttgaatggaaaatatagagaagtgaggacctgttggagtaaccacgcgaagaagttgaagcccagaagaagaatgcagcaagactctggctgatatcaacctctgagcaacacagagctcagccaaaatggtaggtagaagttgcttctttctacacccctctgacsacctgccgagtgctaaacggttggggagcccctttgcccttgctagccagggcaacacaatcagtgatgattagagaatttcctgagaacacagaaccagtggccagctcgcacagccatacccactctccccttggacctgaactgagatggtgggcaccatactggttgtgcaccagtgtgtcactttccttcccaaggatcctctgcccttaagtcattgcaccaccagaccacctgcaaatatactccacaacctgctctgactttggcaagcacaggggaccagtgggtgcctggggtattgtaggttctctggagatcttactctcagcatggagccaccctttaaggagctggggagcacagcctgcgaaagtactccctgggacaaacgaaatacagatgtggcaccaactgaggaatgaga

SEQ ID NO: 502089 - DNA, 649 bp, Homo sapiens
tacatgccagctcttctcagaaagatcaaagttaccagtgaatgaacaagttttgaatggaaaatatagagaagtgaggacctgttggagtaaccacgcgaagaagttgaagcccagaagaagaatgcagcaagactctggctgatatcaacctctgagcaacacagagctcagccaaaatggtaggtagaagttgcttctttctacacccctctgaccacctgccgagtgctaaacggttggggagcccctttgcscttgctagccagggcaacacaatcagtgatgattagagaatttcctgagaacacagaaccagtggccagctcgcacagccatacccactctccccttggacctgaactgagatggtgggcaccatactggttgtgcaccagtgtgtcactttccttcccaaggatcctctgcccttaagtcattgcaccaccagaccacctgcaaatatactccacaacctgctctgactttggcaagcacaggggaccagtgggtgcctggggtattgtaggttctctggagatcttactctcagcatggagccaccctttaaggagctggggagcacagcctgcgaaagtactccctgggacaaacgaaatacagatgtggcaccaactgaggaatgaga

SEQ ID NO: 502090 - DNA, 649 bp, Homo sapiens
tacatgccagctcttctcagaaagatcaaagttaccagtgaatgaacaagttttgaatggaaaatatagagaagtgaggacctgttggagtaaccacgcgaagaagttgaagcccagaagaagaatgcagcaagactctggctgatatcaacctctgagcaacacagagctcagccaaaatggtaggtagaagttgcttctttctacacccctctgaccacctgccgagtgctaaacggttggggagcccctttgcccttgctagccagggcaacacaatcagtgatgattagagaatttcctgagaacacagaaccagtggccagctcgcacagccatacccactctccccttggacctgaactgagatggtgggcaccatactggttgtgcaccagtgtgtcactttccttcccaaggatcctctgcccttaagtcattgcaccaccagaccacctgcaaatatactcyacaacctgctctgactttggcaagcacaggggaccagtgggtgcctggggtattgtaggttctctggagatcttactctcagcatggagccaccctttaaggagctggggagcacagcctgcgaaagtactccctgggacaaacgaaatacagatgtggcaccaactgaggaatgaga

SEQ ID NO: 502091 - DNA, 621 bp, Homo sapiens
agctggcctattttttaaaattgtgcttaaaacacacacacacacacacacacacacaaaacataaaaatataccatcttagtcattcttgagtgtacactcagtagtgttaactagattcaccttgttgtgcagcagatccccagaatctcctcatcttgtaaaattgaaactctatacctaccatacaacaactccatgataatgtcttttggtagatgaggaaaccaaagcccacccagggaaaggaacttatttccttcagagtaggctcatcaagacacttacactgtttgtttgttgtctacctatgaaattgcctgaggccccttcctccttcaaccctcacttagccatttcctcctcaggtcttacgactgtctctacccccacttccctactttgttatcctctctgccccaaytcatgactcagcatcttacactaaactatttcaagactctggtagctgggctcactgcctcaattccagctccctccagtccacatgacagccagagtatcctttccaggcacagatctgaccattttatcttcttttaagataccattccatggcttttccctagctacagaataaagttccaactctacagcgtg

SEQ ID NO: 502092 - DNA, 494 bp, Homo sapiens
caagctgtgccaggcattgagtatggctgacagactagtggagcacacacaggtaaatagatcatttctatttaatatgataactgctaagaccaagacactctcagggtgttttggaaattcagatgaggcatgattattattattactattattattattacaggatgaggcaacacrtgagctgatcactaaagatgaataggagttctcccagtgaggtggcagagagggacgaagggcgttccaagcagagtaaagaaacgcacaaagccacagagatgagagaggatatagccagtggagaaggagggtaaatcatgtgcataagccaaatggagaagcccttgtctgctgtccaaatgaacctggatttcatccaggagatggaggccagtgcctgaaggagcctcagcagaagagtgccagggaggagaggcagagactatgattggaatacagagggggagcaggagaacagagtgtcgtcatag

SEQ ID NO: 502093 - DNA, 494 bp, Homo sapiens
gtttgctgagtgggctgagttaatagcgtggatcctgggaggcaggcagggagcaggagctgaggaagggagcggggagtcctctgtgaggtgtcccccttaaaaatccatcacccaggcccgtttgcagatgggacgaggccttgcctgctscaggaagcagagagaagccctggcagaggctgctcaagtgcctggaccggcacctggtcttgcgtggacttggacgctgaccctcagccaatcccaagtgtgactgggctgttgctttctgtttctgagcttcaaagtgttgcagagggacaggataacatggtctggtacaaaatgaaaatgtggggtccccttttccaaaattattaagaatttactatattttttaaacttttgttttagtattttagtttttttttaagtattgctttttatttttcttattttccagaaactgctaaacaggagagtattaaaccaagtgcagggctcgtctaagc

SEQ ID NO: 502094 - DNA, 494 bp, Homo sapiens
gtttgctgagtgggctgagttaatagcgtggatcctgggaggcaggcagggagcaggagctgaggaagggagcggggagtcctctgtgaggtgtcccccttaaaaatccatcacccaggcccgtttgcagatgggacgaggccttgcctgctccaggaagcagagagaagccctggcagaggctgctcaagtgcctggaccggcacctggtcttgcstggacttggacgctgaccctcagccaatcccaagtgtgactgggctgttgctttctgtttctgagcttcaaagtgttgcagagggacaggataacatggtctggtacaaaatgaaaatgtggggtccccttttccaaaattattaagaatttactatattttttaaacttttgttttagtattttagtttttttttaagtattgctttttatttttcttattttccagaaactgctaaacaggagagtattaaaccaagtgcagggctcgtctaagc

SEQ ID NO: 502095 - DNA, 648 bp, Homo sapiens
cagtttgggaggtggctagacatggaatcagggggttttattttggtggtgttctacctggttcattcagggatgaccctattaacactaagttttaaccaaagtcaccaccaccctgggcaggaagccacacactcacttttctggaaatgcatgcagcctgattctcttgtgggctatgttgaatggagagagaatacctggatgtgagggttatagagatataagaaagaagtggggcatggattagcatcattatatactaattagccatctgtctgtgagtcttctagaataragtaaccaggccaggcgcggtggctcacacctgtaatcccaacactttgggacgctgaggtgggaggatcacctaacatcagaagttccagatcagcctggccaacgtggtgaaaccccgtctccactaaaaatacaaaaattagccaggcgtggtggtgtgtgcctgtaatcccagctactcaggaggctgaggcaggagaatggcttgaacctgggaggtggagattgcagtgaggcaagatcgagccactgaactccagcctggccgacagagcaagactctgtgtcaaaaaaaaaaaaaaaaagaagaaagtaaacgaggaataatctctttccaggtccactctt

SEQ ID NO: 502096 - DNA, 648 bp, Homo sapiens
cagtttgggaggtggctagacatggaatcagggggttttattttggtggtgttctacctggttcattcagggatgaccctattaacactaagttttaaccaaagtcaccaccaccctgggcaggaagccacacactcacttttctggaaatgcatgcagcctgattctcttgtgggctatgttgaatggagagagaatacctggatgtgagggttatagagatataagaaagaagtggggcatggattagcatcattatatactaattagccatctgtctgtgagtcttctagaataaagtaaccaggccaggcgcggtggctcacacctgtaatcccaacactttgggacgctgaggtgggaggatcacctaacatcagaagttccagatcagcctggccaacgtggtgaaaccccgtctccactaaaaatacaaaaattagccaggcgtggtggtgtgtgcctgtaatcccagctactcaggaggctgaggcaggagaatggcttgaacctgggaggtggagaytgcagtgaggcaagatcgagccactgaactccagcctggccgacagagcaagactctgtgtcaaaaaaaaaaaaaaaaagaagaaagtaaacgaggaataatctctttccaggtccactctt

SEQ ID NO: 502097 - DNA, 600 bp, Homo sapiens
cagtaaaaaacaacacaaggcagatccctcaagtgttaaaagcatctacccaacattccagggaaygtcagaagtatatgctgagggtggcatgatggaaaggaggataaagtgccaggctgctcagttcatatttggtcgttcattcattcatccattcgttcatcaaatccgaactgatgaattttttctttttttgagacagggtctcactctttcacgtacagtggtacaatcttggctcactgaaaccttgacttcccgggctcaagtcatcctcccatctcagcctctcaggtagttaggactacaggcatggaccatcatgcctggctaattttaaaatttttttgtagacacagggtctccctatgttgcccaagctggtcttgaactcctgggcttgagcaatcttcctgcctcagtctcccaaaatcctagaactataggtgtgagccaccgtgcctagctgtgagcaccaattttgtgccacacattctgctggatgctagggatacagcaatgagcaaaacagatgaaactccctgccctcatggagcttactttctagtgggggaaagcatgggcagaggctcagaa

SEQ ID NO: 502098 - DNA, 651 bp, Homo sapiens
attatgatatgcttactaactttatgtgtcgcctctccaaaaaatatagatagggccaggcatgggagtggacacctgtagtcccagctactcagtaggctgaggtgggagaattgcttgagtcaaggagtttgaatccaacctgggcaacrtcgcaagacactgtctcaaaaaaagtcgagagctatagatcaaacatatcaagcataatacaggtatgtagatagtttctattttaagaaaggttttagagttacattccaaaaaatggcttctgagaaactttttaggaagtaattctttcttacaagaggagaaaattccttcccaattcattgcgattacaaaatatttttttaatcctcccactgcttttgggatgcatcgctgaaagcagagacatcagtattagtaatggtacttttagctaaagtaatagaaaacacaactaaaatggcttaaacattaaagatatgtattatttcacgcagtgtaaagtccagagatgcagcttcaaggcagtgggtccatggctcaatggcaggatcaaggagatagatccctcatcctgctcggcctcctcagtgttggcttcatcctccaactggcagcaacaaggcttcacagatcccagagtcacatgtccacatg

SEQ ID NO: 502099 - DNA, 335 bp, Homo sapiens
taaaagtttaaagagaataaaggaaaaaataggaacagatctgttgcaatatggccatcttacttaatggccatattgagtggtacttaatataccacttacctcagtggtatattcttgacagtcatctcttaaagtgagtgaacgttttttggcaggaggaatgtggtcatttttatcaagcctgcattgaaatctcttcctagatacaagatccaaattatcaggmggctttttagaattatctcttccagaaatagataaacccatggcatcttgaccaactgaagttgctggtaaacaaatactgcatagaaaagaaatacatactaaat

SEQ ID NO: 502100 - DNA, 509 bp, Homo sapiens
atacttattttttatttgtattatttgttatagttgtattgttatttttatgttttatttttcaaatatttctgatccttgatgggctcaatctcaggatatggaacctgctgataaagggggactggctgtatttatgtgcatcttattcagacaccccctaaccataactcccaagagggcytggaggacactcttttctttaaagtcttggtaacagaagcatcagcctctttaaagagctgatgcagccactatgatggttgtcctttgcagactggagatgatggtgagaggtactgccaaggaattaggccccttgacctcattgggaatactggaagaagccaggcagcaatgccgaactgttttagaccaggtaggcacaattactgtaataagccatagcaaaggattgacatagtgtatttttacatgtggggatctgtgatgatggctaattgatcccaaggttcctgttagactgacagccttctaaagtgttgcat

SEQ ID NO: 502101 - DNA, 509 bp, Homo sapiens
atacttattttttatttgtattatttgttatagttgtattgttatttttatgttttatttttcaaatatttctgatccttgatgggctcaatctcaggatatggaacctgctgataaagggggactggctgtatttatgtgcatcttattcagacaccccctaaccataactcccaagagggcttggaggacactcttttctttaaagtcttggtaacagaagcatcagcctctttaaagagctgatgcagccactatgatggytgtcctttgcagactggagatgatggtgagaggtactgccaaggaattaggccccttgacctcattgggaatactggaagaagccaggcagcaatgccgaactgttttagaccaggtaggcacaattactgtaataagccatagcaaaggattgacatagtgtatttttacatgtggggatctgtgatgatggctaattgatcccaaggttcctgttagactgacagccttctaaagtgttgcat

SEQ ID NO: 502102 - DNA, 620 bp, Homo sapiens
ctgtttgtctgactgaaaaatacatatttttctaattcatggtgatgtaacattagtcctaattgaaaaactagtatttaaacataattatttataaagatgacacatcaaagggcttatttatttttaaattttttatttaaaaggatattcagttttagctatttttacccctcagattgtagataaagaaggcattaaatttatgtttgtctcctttttctgtttaattttaaagatatttaaaatgatataactaaaaatgtttagctggtgtatatgttttgaatacctttttcccctcagtttagtatattgactttgtactgtaaatttttctgcttttcttggataatctcaggattttcatgaggatagggggaactcaactttatttatgagacaaaatttccatacaaagctcaatctcctttatayacccacagacataatattagtttttaaaaagccaatttcttcatagttttttcccattaaattctcaaggaacacttggatctttaagcacggaacataatcatgatgttaaaaacagagaaaataaggctttataaagttaatgattatcatcagtatgaatttaaggtttgttttaattt

SEQ ID NO: 502103 - DNA, 650 bp, Homo sapiens
ggcacagtggctcacccctgtaatcccagcactttgggacgccaatgcaggcagataattcaatccaggagttcatggcaaaaccctgtcaagaacagaaaaattagccaggcatgtagcacacacctgtagtttcagctactctggaggctgacctgggaggatcacctgagcccggggtgtggaggttgcagtgagccaagattgcaccactgcactccaacctgggcgacagagcaagaccctgttctcccacccctgaaaaatgctgatttttatttctcatttaaaaagaatatgaacatgacaccattagcagggttacataaatatgaaattatatttttgatttatattaaaaagatgttcaatatataacggtttgtggttacataaattaaaacagattggtcggatgcagtggctcacacctgtaatcccagaactttgggaggtcaaggctggcggatcacctgaggtcaggagttcaagaccagactggccaacattgtgaaaccccgtctctactaaaaatacaaaaattagccgggcatgatggcacgcgcctgtaatcccagctactcactaggctgacacaggagaattgcttgaatytgggaggaggaggttgcagtgagccgaggttgtat

SEQ ID NO: 502104 - DNA, 604 bp, Homo sapiens
aaagaaatgaactctcaattggttcagggtttacctactgctgggcctaggctctcattaagttcccagaggctgacagagtgccaagtcacaggatgggagggcatctgttactcagtgtctccctctatccagatggcactgctgggatgtttttattcccatctggtctttartcattgggctatggaggtagatgctgactcatcctttgtactaaacactaaaccttttcaattgatcatctgctttcctgccctttccatacccttttgggttttagtaaactatggatctgactagggtcattatcactttggtactactctgggatgtacagaatcatactgtccccttggtatggaaaactctgtcccttggtatggaaaactctgtctcctgtatctccatatttttacatgtagagatcaagctgactgtaatctgtacaactaccacatagagattttgtgcatattaaaaaatggaaccccctctgggcagatcagccctgcgagcagaaatgcccttctgtggatgtgcttcctccaggtgagtatactatcactcaaggtacatgcacatggcttgctgagtggaaatg

SEQ ID NO: 502105 - DNA, 620 bp, Homo sapiens
aaacttgtaaaattgattattctaagtaaactttctttaacgtttctatttctagacctctccattatgtttctttatattgcaagtgtctgcagaaacactttactaatgtaacactgttatttcagactttttaagctttaaaaggattcttggaactgttgctgtcrtacgctaaataataattatcaacatctttactttcatttcttgtgtaaaataaaatcattcccagtaatactttattttaatttgctgaagataaagattgatgtgaataaacattggtttgtgaaaatatttgttatctaatctattttagtttatgagaatttataaaaaaaaataaaattaccacacataaaaacaaataaccacacatacttatattctgttcacaggatctgtaaatcttccactgaacctcaaattaattataaattgtaaaagtttttttctgttacttttctagttaaatcaaaacacattcataaacaaaggaagacaataaaagtgtacttaaagttatggttgttattataagcattgcagacataggcattcagcaatatcttcattgtatttagacatctgtttaataacaatgtcaaaacttggtc

SEQ ID NO: 502106 - DNA, 276 bp, Homo sapiens
ttctcaacctaactcttaatcattgagttcccccttctgactgcatgcccttttcctaaatcttcaattcctcttctagtaacactgtgaaccaactacagagcaaggtaaaaagtgattaaggcaagaaaggctcagatgaaggacaaagggaatcaagaaaaggcagagattccttctaactggaggagctcaagaaaaaaagtactattaaaaagtaccrtttgtgctgtgtctggatgggtaggtggaacttgaggatagagaaaggaagga

SEQ ID NO: 502107 - DNA, 620 bp, Homo sapiens
ttgcatttaaaaaagtgaaactacatactatgtttctagctcagtaaacagatgaacctgatgtctttaaatgacataacaattgagcattgtacagtacattttatgaagacccgtaaattaaagaactactggtttaaagttagtgattatgaaacaaaaacatattcatagtttcagcttcttttttcttcctcgaccatcaggtgcgccatccattttacgtttctgtgtctacaaacagacagaaggattacttttcmcaagactaatataaacatgaaatatagttgcagacacattataacactttagtaataacaactactacaaagtaataggtatgagacttttcccccaggctatataaatctttcaaagcaaactataaagcctccaaataatcttacctacttattttacttacagaataaaaaatgttaatgttaataatgacgttataaaactaatgcacaattaacagtagtagatcaatatcaaataaatgcaagcttcccaaaatagtaagaaacacttgagtttttaaaaggcagttacataagtaccaaatattatccagagatactcatttattcatgactttataaattaaccatttt

SEQ ID NO: 502108 - DNA, 595 bp, Homo sapiens
ttgcatttaaaaaagtgaaactacatactatgtttctagctcagtaaacagatgaacctgatgtctttaaatgacataacaattgagcattgtacagtacattttatgaagacccgtaaattaaagaactactggtttaaagttagtgattatgaaacaaaaacatattcatagtttcagcttcttttttcttcctcgaccatcaggtgcgccatccattttacgtttctgtgtctacaaacagacagaaggattacttttcccaagactaatataaacatgaaatatagttgcagacacattataacactttagtaataacaactactacaaagtaataggtatgagacttttcccccaggctatataaatctttcaaagcaaactataaagcctccaaataatcttacctacttattttacttacagaataaaaaaygttaatgttaataatgacgttataaaactaatgcacaattaacagtagtagatcaatatcaaataaatgcaagcttcccaaaatagtaagaaacacttgagtttttaaaaggcagttacataagtaccaaatattatccagagatactcatttatt

SEQ ID NO: 502109 - DNA, 492 bp, Homo sapiens
aggtattgttacagctaagccttgtatatgctttaaataatcacctaagttcatagctaccttttagaacaagagcgaacggggtatggataagtgtatttgcttggccaaagcaacattcgcattgtcaacctctttctccttttagaagatgtacaattcccttctacccaccgctgaagcctggtgtctgtgctggttgttctccttcagccttctttttctatggagtcacttcttggtctcytggggaagcgcttctggcatctcagctaacaggatctctcctccccctcattcactgccccaggatttccatctgtccctgtaatcagcaaatgccctaagaaaaggcatagccatagtgatcaaactcagaattctggctcaactgtccctccacaggaagagcaattttctccctgccaaaaaaagcctctctaacttctccaccatcttttcccaaacaatagtggacttgcctgagttaca

SEQ ID NO: 502110 - DNA, 294 bp, Homo sapiens
aaatccagctgaagagcttgtgtgtttattcaccactctctgtcctctccatgagagcagcacacactarcagcttctagttagccatcttggcactctcctcccctttttttcattcttttttaagttttcagacagggtcatttctcactgtgtatgtatccatgaaaccaagagtgaataaacccatttggttaggtggacttctttgcctgtggtttgaaagagaaatttagattcctttagataaacctctttgcataaaagtaatgacgcctctgctagctgtctggt

SEQ ID NO: 502111 - DNA, 628 bp, Homo sapiens
gatatagtctgcatatataggccaagaaacccttgtctactgttagcccaggttttgcttctttgctagactttcattttcccaaccagaggaaatatttttctaaactacctgataactcttgacctcacttctccctctgtaaaatgagaaatttggactcaatttctgttaagatctcttccagttctgtctgattcctgtctgagtgcatatccaccaacagaaaatcaccctccctcaccttgcaatttgcccaaccaccaggggcaaaacwcttttaaactcaaattcaacaaatagttattgggcttcttcttcaggtcaaagagatatgtccccttcacacacattagaaaaaaagtaatagaaaaactacacatggaccaagataactctcagatatacctaagagaccccacagatcccctggtttgggcctcaaatgaagcaacaactgaattccctgctgagtacctgtgtgcccaggggaaatacacattgtcggcattatggaggaatctgttttgaactcaaaattaattccagtctttcagtgtttttcagaaaatcactctttttctctctcattgtatttttttgttacttaggtacattcagatgaatg

SEQ ID NO: 502112 - DNA, 656 bp, Homo sapiens
ggagacttggtagaaatagccaactgaagaaaaatatataaagaaaggagttaaatgtgataaaccaacaagtaatttaacatttaatatggagaaaagaccatttctccttcaaaactaaagataaggacaagatggcagagggagatagagatgctgaggtaagatgtggtttgatcctgaggtgtggcctttatagatagcccactaacacacacacacatacagacacacatatgcactggacacttgggtccttgtcttactgaagttttctaaggcaagtgctgactcctgtccaatgtctcctcctagaaggattttccttctttgtttcctatgaaatgatcctccttggattctcattctctcttaaaccttgtcaatatcctttctttctggttgtttcagaaaagctggtgttctcctggcttccagtcttggtccttttctgccatttttacatgcctgggtgagcttgcctagcttcccattgcttcaatttagtctcgaatattggtaattccaagatctatgtctctggacsaaactcttctccagcactcaaagacttcttatacaactaattggttacaggttgtctctggctaaatgtctttcagtcttaatatgtccaagatagaactctatattca

SEQ ID NO: 502113 - DNA, 586 bp, Homo sapiens
gcattagcactgtcattactcagcatcctccacagtacttaatattgtccaactaaaaaggtttgctaatctgataggggcaaattatatttcttattgtctcaatttgcttttcctccattactaacgtgattgcacatctttttatacatttcttggccatttgtacttcctgttttgtgaattggctttacatgtatctatccttcacccaactgaggtcaagagagttaagcctcctggtcatctctgtgcttggtagggtttttctaatgtattccttcacagaggatataaattttagggatctttggtatatgccagagtttcagttcatatgcttgcttactagttttcagcattccctttgtttctgctttatattttaaaatrtatttgttctgttttgttttattttgtggttttatttatttatttttgtaaagggatttttaggatcatttctccaagctatttctggaactggaagtctgttaaatttacttgtaggttattataaaattcttatagaattcattaaacgatagagcctagttacttatgtctctaagaaagcatctgcata

SEQ ID NO: 502114 - DNA, 614 bp, Homo sapiens
taaaatatacttccttgattctgggaatggcaaacgtaaaataagaagaaaaagtactccccattccccccattcctatatttcttaattcctgataatatgctttttcttctctattttctctttgtctttgcctatactgtctcatttaaaccttaagttaattttaatatggcaataaatttacattgttattaatatccaatgtctactctgaactttgttctactctgactcttaacagtacktttttgcatgtatctcctattttaaacagatgtatttgacatttagttgctaattaaaccaatcattatcagaattcacaatcatttcttaaacatcattaaaaaagcaatttgtgaggtataaaatgtaaaggtgagattgatttggatgagttattttaatacaaaaatctcagacttaggtcctggagaaataaaaatcagtgatgccaaataagcattttcttacagcgtaaaatgtcctctttaagcttaaattttgaaaggcattacatagttttaagtgggacttctagccttattttcacatgctatatgtgtaggttatattagttttctatgctgtatgacaaattatcacaaacc

SEQ ID NO: 502115 - DNA, 475 bp, Homo sapiens
tgcagttgcaaaatacatcacctaaactataggtagggactggtgatggccagtgctcactcttggaaatattttctttagtgtttgactaggagttatccaactgtttttataaggcacctccaatttggcttagaatagagccaaaaagttaaatactagctcaagctcccacaatatcttggttttctatgtggcaagacaacaggattttcactttgccacattgcccatggagctgtaccaccctcttgccaaggtyagaaggccccctggggcaaaagcaactgtcctgtttctgtttgtggttggactgaagatgttcacatggctaatgacccctgtgcccaaaagaaaagcaggtgacattaaggttcatgcaatattgatgtgttaagagggttttcacaactcaggaagctctcttagctgagttggttctccgaaaatgttgagtcctgttttccgtggcatg

SEQ ID NO: 502116 - DNA, 568 bp, Homo sapiens
gctgcgtctgttacacagggttctatgatgggagacttgatgggaaaagtacagaagtgctttgctgtatccaygtggacgtgtgggtgattagcaacatgacatctctgctgaggtgtagcttgtactgtagtcacaagcatggattctggaggtagctctgcattcaaatcatctttgttactagttgggtgaacttggttgagttatttaatttcttagtgcttgtcaccccatctgtgtaaaatgaggatggtaataataaaacctacctcaagtgtgtgggtgtcaattttgaaagtgaatacgcacaaagcatttacaacagagccaggcacaaaataagcactcaagcactccttatttctggtcatgatggagatgcatattgccttttaaaatttacatatgtagaaaaatcttcctagcgaatttttttcactagaatgctttctcttacattccacaaccaaattctgctcttccaaacccaggatttcacatatatcttaacacgtaatctactcaaattttgaattcaaattttaagaggtgaaagtttataaaa

SEQ ID NO: 502117 - DNA, 568 bp, Homo sapiens
gctgcgtctgttacacagggttctatgatgggagacttgatgggaaaagtacagaagtgctttgctgtatccatgtggacgtgtgggtgattagcaacatgacatctctgctgaggtgtagcttgtactgtagtcacaagcatggattctggaggtagctctgcattcaaatcatctttgttactagttgggtgaacttggytgagttatttaatttcttagtgcttgtcaccccatctgtgtaaaatgaggatggtaataataaaacctacctcaagtgtgtgggtgtcaattttgaaagtgaatacgcacaaagcatttacaacagagccaggcacaaaataagcactcaagcactccttatttctggtcatgatggagatgcatattgccttttaaaatttacatatgtagaaaaatcttcctagcgaatttttttcactagaatgctttctcttacattccacaaccaaattctgctcttccaaacccaggatttcacatatatcttaacacgtaatctactcaaattttgaattcaaattttaagaggtgaaagtttataaaa

SEQ ID NO: 502118 - DNA, 605 bp, Homo sapiens
ataaactttatgtatactccaaatacataatcagtgtataattgaatcactcaataatgtagacaattgacttgaccttaagacctggtttactgagagccagaattgggattatttctattaaacaataattcaacatctcattcaggcttcttagttagattcactgatgactcaagacaaatttcttttaaaatgataacttgtccactattctattgtttgtattacaactattttctacattatttacattattacattatttctaatacatttattttctataaaacatgattctgtttgtctctatattggaaaaaatccagaatgctattgtatgattcaaaataaagtcataaaattctgctctgaatgtccctcttacaattcagaattttatgatattatgcacctcttaatttcattagatttaatatcattttgttggcttacatatgtaacaaaagcytagagagatacctgattcctagatgggctggttgcagtattaatgtttgccatgtaacaatcatgtttaaattagccgtttacgctgtgtaagagcaagtcgtttattggtgcctcatcaaatgtgcattatt

SEQ ID NO: 502119 - DNA, 605 bp, Homo sapiens
ataaactttatgtatactccaaatacataatcagtgtataattgaatcactcaataatgtagacaattgacttgaccttaagacctggtttactgagagccagaattgggattatttctattaaacaataattcaacatctcattcaggcttcttagttagattcactgatgactcaagacaaatttcttttaaaatgataacttgtccactattctattgtttgtattacaactattttctacattatttacattattacattatttctaatacatttattttctataaaacatgattctgtttgtctctatattggaaaaaatccagaatgctattgtatgattcaaaataaagtcataaaattctgctctgaatgtccctcttacaattcagaattttatgatattatgcacctcttaatttcattagatttaatatcattttgttggcttacatatgtaacaaaagcctagagagatacytgattcctagatgggctggttgcagtattaatgtttgccatgtaacaatcatgtttaaattagccgtttacgctgtgtaagagcaagtcgtttattggtgcctcatcaaatgtgcattatt

SEQ ID NO: 502120 - DNA, 475 bp, Homo sapiens
tgggtaatttataaagaaaagaggtttatttggctcagcgttctgcaggctgtacaagaagcagggtgccagcatctgcttctgataaggggctcagggctcaggaaacttccactcctggtggaaggggagccagtgtgtacagatcacatgctgagagatgaagcaagagagagggggaaggtgccgggctctttttaacaaccagttctcaggggaacaaatagaatgagaactcactcattaccgcaaggatggcattcatgaagcatccaccaccatgaccctaacacctcccattaggccccacgtccaacactggggaacaaatttcaatatgagatttggagggtcaaatatccaaaccactgcaacagcacagcaactggggacctggttccattaaactcccggtagtgggagaggagcgaggtacattytcacagctaccacacttcccaaatgtcagttgctt

SEQ ID NO: 502121 - DNA, 508 bp, Homo sapiens
gcttcttgtgggctgatgcaggagtgagtctactgtgaaggcactccatatggtggaaaaaatattcaacttctgctcacgttattcagtgtaagaactgtgrgttcaggaggactttctgcatataataccattatggcctgggggaggagtatcacagtcacagagtactgtttcccttactgtccaagcatggttttactcctctttgcagtccaaaggggcttcattgactcactcatgtattcagggttcattagctcttgtaaaggtaatttcatatgtggatagttgttcatataggtgtgtccgtaggggtatgattactggagagatctactccactaccttgctctgcccaaatccttccccttcccaacaagagtttgccaccttctagttttcttttttcttaaccaaactaagtttagccttttaatccttcaccctcctccacttcaaatgccattgcttctttgtatgcttattgtattttcaatgctatatg

SEQ ID NO: 502122 - DNA, 250 bp, Homo sapiens
tctgtaagatgctcctgcagtatagttctatgtctttctgcacagattcagtggatyctgtgatttttttacatggaatagcccctttatattttgcagagaagctagacaattcacagtaacctatggcctagtaaattttaattcttgatcaacacaactctttatagatgcttgtggtccaaaaatgcagattcctaatcatccccacgaataagggggccattgcaaggcaacctgggagggagtt

SEQ ID NO: 502123 - DNA, 250 bp, Homo sapiens
tctgtaagatgctcctgcagtatagttctatgtctttctgcacagattcagtggatcctgtgatttttttacatggaatagcccctttwtattttgcagagaagctagacaattcacagtaacctatggcctagtaaattttaattcttgatcaacacaactctttatagatgcttgtggtccaaaaatgcagattcctaatcatccccacgaataagggggccattgcaaggcaacctgggagggagtt

SEQ ID NO: 502124 - DNA, 250 bp, Homo sapiens
tctgtaagatgctcctgcagtatagttctatgtctttctgcacagattcagtggatcctgtgatttttttacatggaatagcccctttatattttgcagagaagctagacaattcacagtaacctatgrcctagtaaattttaattcttgatcaacacaactctttatagatgcttgtggtccaaaaatgcagattcctaatcatccccacgaataagggggccattgcaaggcaacctgggagggagtt

SEQ ID NO: 502125 - DNA, 250 bp, Homo sapiens
tctgtaagatgctcctgcagtatagttctatgtctttctgcacagattcagtggatcctgtgatttttttacatggaatagcccctttatattttgcagagaagctagacaattcacagtaacctatggcctagtaaattttawttcttgatcaacacaactctttatagatgcttgtggtccaaaaatgcagattcctaatcatccccacgaataagggggccattgcaaggcaacctgggagggagtt

SEQ ID NO: 502126 - DNA, 514 bp, Homo sapiens
gttattttgctcgttagttgatgcagtttctttgtagcctcaatggtctttacaatttggcatgtttttgcagtggctggtaccagttgttcctttccatgtttagcgcttctttaaggagctcttttttttttaacattgtttttctytttatttaaacgaggttgaccttaaaaatcaaagcaatatgagagtgattttacactagcaatattatttttagttattcagatgaacaaaaagaacattcatccgttgaagctatgattaaataattctttatctatttaaactgaatagtatacacttgcattatcctaatacttatcaagcagagcaaaaaataaaactcactctaaacttaagtcatataactacaggttatttctcatctttgtttttggtttttttaaatttttttattattattatactttaagttttagggtacatgtgcacaatgtgcaggttagttacatatgtatacatgtgccatgctgctgcactgcaccca

SEQ ID NO: 502127 - DNA, 514 bp, Homo sapiens
gttattttgctcgttagttgatgcagtttctttgtagcctcaatggtctttacaatttggcatgtttttgcagtggctggtaccagttgttcctttccatgtttagcgcttctttaaggagctcttttttttttaacattgtttttctctttatttaaacgaggttgaccttamaaatcaaagcaatatgagagtgattttacactagcaatattatttttagttattcagatgaacaaaaagaacattcatccgttgaagctatgattaaataattctttatctatttaaactgaatagtatacacttgcattatcctaatacttatcaagcagagcaaaaaataaaactcactctaaacttaagtcatataactacaggttatttctcatctttgtttttggtttttttaaatttttttattattattatactttaagttttagggtacatgtgcacaatgtgcaggttagttacatatgtatacatgtgccatgctgctgcactgcaccca

SEQ ID NO: 502128 - DNA, 585 bp, Homo sapiens
ggttattttgctcgttagttgatgcagtttctttgtagcctcaatggtctttacaatttggcatgtttttgcagtggctggtaccagttgttcctttccatgtttagcgcttctttaaggagctcttttttttttaacattgtttttctctttatttaaacgaggttgaccttaaaaatcaaagcaatatgagagtgattttacactagcaatattatttttagttattcagatgaacaaaaagaacattcatccgttgaagctatgattaaataattctttatctatttaaactgaatagtatacacttgcattatcctaatacttatcaagcagagcaaaaaataaaactcactctaaacttaagtcatataactacaggttatttctcatctttgtttttggtttttttwaatttttttattattattatactttaagttttagggtacatgtgcacaatgtgcaggttagttacatatgtatacatgtgccatgctgctgcactgcacccactaagtcgtcatctaacattagatatatctccgaatgctattcctcccccctccccccaccccacaacag

SEQ ID NO: 502129 - DNA, 604 bp, Homo sapiens
ttatgtgttaaatgaagcttgttggttcatgaaaataaatttttctctccctctttgatgggaccataaaaatcttgcttatatattcattagtgtgcatatatgttactgcttttttcatgaaattttaagccacttcaaagcatgagaccttgatttactgatatttcaatttcagcatagtttttcwtacataataagaaccttaaaatgacagttcaattcatttaacttcattttacaaaccatatttagaagaaactttaagctgcattacttcagtatgatcaaatatgtatctgactggtggtagatataaaaggtcaattaatatttaaattccttgatattataagtatgctctatgataaaatgatagtttgatattacaaatgttttctgcatgagataatggttagtcctttaaaagaaaatgtatgtttttatattatatatactactgtatcttagttctgattcatttgttcattttgcactgaattttaacttacaagcatttaaaagaatataaaacactcatttttaaaatcttaggagtagatcaaaaaaacttttgtaaattttacatatgaaaactttgcag

SEQ ID NO: 502130 - DNA, 528 bp, Homo sapiens
ctatgagttggatccatgtatgtgagataaggcccccaaggagaggtaataakctgggaatgccatcagctcatctttcttcaggcctatatggggcattgtcacttgtagaagcaggacagccctggcattgggattggtagtaacagagagtatcaaagggaaagctgaacttccctaatttttggaaaaaagcagattggaaacagatgggctccaacgttttccatgtgtgaggtcattgtcccaggtagtcttgctcaggacatttcttgtcagcaaaacagaagtcaaacgatatttctaccttccaagagaatagaacataatgtcagattttctcatgggttcccataagttcgagaaacttccatggccttatttaactgcttaagctgttcaactaaaaaattatttgtcttcaaatacaaggaatctgtttggaaaaattttaaccagaaaacgttggaattctaaagtaaaaaatgcataaggccataaaaaatttttacatcttttaatttatat

SEQ ID NO: 502131 - DNA, 528 bp, Homo sapiens
ctatgagttggatccatgtatgtgagataaggcccccaaggagaggtaataagctgggaatgccatcagctcatctttcttcaggcctatatggggcattgtcacttgtagaagcaggacagccctggcattggkattggtagtaacagagagtatcaaagggaaagctgaacttccctaatttttggaaaaaagcagattggaaacagatgggctccaacgttttccatgtgtgaggtcattgtcccaggtagtcttgctcaggacatttcttgtcagcaaaacagaagtcaaacgatatttctaccttccaagagaatagaacataatgtcagattttctcatgggttcccataagttcgagaaacttccatggccttatttaactgcttaagctgttcaactaaaaaattatttgtcttcaaatacaaggaatctgtttggaaaaattttaaccagaaaacgttggaattctaaagtaaaaaatgcataaggccataaaaaatttttacatcttttaatttatat

SEQ ID NO: 502132 - DNA, 466 bp, Homo sapiens
agctgagtctatgagttggatccatgtatgtgagataaggcccccaaggagaggtaataagctgggaatgccatcagctcatctttcttcaggcctatatggggcattgtcacttgtagaagcaggacagccctggcattgggattggtagtaacagagagtatcaaagggaaarctgaacttccctaatttttggaaaaaagcagattggaaacagatgggctccaacgttttccatgtgtgaggtcattgtcccaggtagtcttgctcaggacatttcttgtcagcaaaacagaagtcaaacgatatttctaccttccaagagaatagaacataatgtcagattttctcatgggttcccataagttcgagaaacttccatggccttatttaactgcttaagctgttcaactaaaaaattatttgtcttcaaatacaaggaatctgtttggaaaaattttaacca

SEQ ID NO: 502133 - DNA, 466 bp, Homo sapiens
agctgagtctatgagttggatccatgtatgtgagataaggcccccaaggagaggtaataagctgggaatgccatcagctcatctttcttcaggcctatatggggcattgtcacttgtagaagcaggacagccctggcattgggattggtagtaacagagagtatcaaagggaaagctgaacttccctaatttttggaaaamagcagattggaaacagatgggctccaacgttttccatgtgtgaggtcattgtcccaggtagtcttgctcaggacatttcttgtcagcaaaacagaagtcaaacgatatttctaccttccaagagaatagaacataatgtcagattttctcatgggttcccataagttcgagaaacttccatggccttatttaactgcttaagctgttcaactaaaaaattatttgtcttcaaatacaaggaatctgtttggaaaaattttaacca

SEQ ID NO: 502134 - DNA, 466 bp, Homo sapiens
agctgagtctatgagttggatccatgtatgtgagataaggcccccaaggagaggtaataagctgggaatgccatcagctcatctttcttcaggcctatatggggcattgtcacttgtagaagcaggacagccctggcattgggattggtagtaacagagagtatcaaagggaaagctgaacttccctaatttttggaaaaaagcagattggaaacagatgggctccaacgttttccatgtgtgaggtcattgtcccaggtagycttgctcaggacatttcttgtcagcaaaacagaagtcaaacgatatttctaccttccaagagaatagaacataatgtcagattttctcatgggttcccataagttcgagaaacttccatggccttatttaactgcttaagctgttcaactaaaaaattatttgtcttcaaatacaaggaatctgtttggaaaaattttaacca

SEQ ID NO: 502135 - DNA, 466 bp, Homo sapiens
agctgagtctatgagttggatccatgtatgtgagataaggcccccaaggagaggtaataagctgggaatgccatcagctcatctttcttcaggcctatatggggcattgtcacttgtagaagcaggacagccctggcattgggattggtagtaacagagagtatcaaagggaaagctgaacttccctaatttttggaaaaaagcagattggaaacagatgggctccaacgttttccatgtgtgaggtcattgtcccaggtagtcttgctcaggacatttcttgtcagcaaaacagaagtcaaacgatatttctaccttccaagagaatagaacataatgtcagattttctcatgkgttcccataagttcgagaaacttccatggccttatttaactgcttaagctgttcaactaaaaaattatttgtcttcaaatacaaggaatctgtttggaaaaattttaacca

SEQ ID NO: 502136 - DNA, 528 bp, Homo sapiens
ctatgagttggatccatgtatgtgagataaggcccccaaggagaggtaataagctgggaatgccatcagctcatctttcttcaggcctatatggggcattgtcacttgtagaagcaggacagccctggcattgggattggtagtaacagagagtatcaaagggaaagctgaacttccctaatttttggaaaaaagcagattggaaacagatgggctccaacgttttccatgtgtgaggtcattgtcccaggtagtcttgctcaggacatttcttgtcagcaaaacagaagtcaaacgatatttctaccttccaagagaatagaacataatgtcagattttctcatggrttcccataagttcgagaaacttccatggccttatttaactgcttaagctgttcaactaaaaaattatttgtcttcaaatacaaggaatctgtttggaaaaattttaaccagaaaacgttggaattctaaagtaaaaaatgcataaggccataaaaaatttttacatcttttaatttatat

SEQ ID NO: 502137 - DNA, 528 bp, Homo sapiens
ctatgagttggatccatgtatgtgagataaggcccccaaggagaggtaataagctgggaatgccatcagctcatctttcttcaggcctatatggggcattgtcacttgtagaagcaggacagccctggcattgggattggtagtaacagagagtatcaaagggaaagctgaacttccctaatttttggaaaaaagcagattggaaacagatgggctccaacgttttccatgtgtgaggtcattgtcccaggtagtcttgctcaggacatttcttgtcagcaaaacagaagtcaaacgatatttctaccttccaagagaatagaacataatgtcagattttctcatgggttcccataagttcgagaaacttccatggccttatttaactgcttaagcwgttcaactaaaaaattatttgtcttcaaatacaaggaatctgtttggaaaaattttaaccagaaaacgttggaattctaaagtaaaaaatgcataaggccataaaaaatttttacatcttttaatttatat

SEQ ID NO: 502138 - DNA, 558 bp, Homo sapiens
aagcattagcaaatatttgaatctcctgcagaaagatatctgcataaattagagttgccagttctcacctggatargttcctcaattttggacaggtttacctggagaaggagaaaattgctggccatttgggtcatgtcagacacagagctcacagggctgagtcacctgttttggtgttttgaaaagatttacccctataaacaaatgagaaattaacagaaaccaagaatcacttctagggtgaaaagaatcatgaaagtgctgaattatattcctatgattggtacttggcattagtaatttattaccatcattcagcagccagaggggccctggactgaaatgcaatccatggcccatttttgttcttctttagagtgttctggcccagttctatgtatgctgaccagcacacccataagcttcattggccctttcagtgcaggggccttggctgtggcatctacaagggcatttccttttatatggtcagtctctcttttgatgtcctctgcaattaattttagtcactttttggcagcaaagcagcattct

SEQ ID NO: 502139 - DNA, 558 bp, Homo sapiens
aagcattagcaaatatttgaatctcctgcagaaagatatctgcataaattagagttgccagttctcacctggataagttcctcaattttggacaggtttacctggagaaggagaaaattgctggccatttgggtcatgtcagacacagagctcacagggctgagtcacctgttttggtgttttgaaaagatttacccctataaacaaatgagamattaacagaaaccaagaatcacttctagggtgaaaagaatcatgaaagtgctgaattatattcctatgattggtacttggcattagtaatttattaccatcattcagcagccagaggggccctggactgaaatgcaatccatggcccatttttgttcttctttagagtgttctggcccagttctatgtatgctgaccagcacacccataagcttcattggccctttcagtgcaggggccttggctgtggcatctacaagggcatttccttttatatggtcagtctctcttttgatgtcctctgcaattaattttagtcactttttggcagcaaagcagcattct

SEQ ID NO: 502140 - DNA, 558 bp, Homo sapiens
aagcattagcaaatatttgaatctcctgcagaaagatatctgcataaattagagttgccagttctcacctggataagttcctcaattttggacaggtttacctggagaaggagaaaattgctggccatttgggtcatgtcagacacagagctcacagggctgagtcacctgttttggtgttttgaaaagatttacccctataaacaaatgagaaattaacagaaaccaagaatcacttctagggtgaaaagaatcatgaaagtgctgaattatattcctatgattggtacttggcattagtaatttattaccatcattcagcagccagaggggccctggactgaaatgcaatccatggcccatttttgttcttctttagagtgttctggcccagttctatgtatgctgaccagcacrcccataagcttcattggccctttcagtgcaggggccttggctgtggcatctacaagggcatttccttttatatggtcagtctctcttttgatgtcctctgcaattaattttagtcactttttggcagcaaagcagcattct

SEQ ID NO: 502141 - DNA, 433 bp, Homo sapiens
tcaaaatgaggggaaacatcttgcaattaagtggtacagccttattaaatttgatttggtttccattgtaattaatttaatcacatgtgttctagagtttgtcctcagtcttcccctagtttaggcccatgatctgttgaatttgctcagctccctgctcaacagcaggaaatcagaatcatttaaaatcatcattgtggctgggagtgatggctcatgyctgtaatcccagcaatttgggaggccaaggtgggcagatcacttgttgtcaggggtttgagaccagcctggccgacagagtgaaaccccatctctactaaagatacaaatattagctgggtgtggtgattcacgcctgtaatcccggctacttgggagactgaggcaggagaattgcttgaacccgggaggggcaggtttcagtgagccaaga

SEQ ID NO: 502142 - DNA, 433 bp, Homo sapiens
tcaaaatgaggggaaacatcttgcaattaagtggtacagccttattaaatttgatttggtttccattgtaattaatttaatcacatgtgttctagagtttgtcctcagtcttcccctagtttaggcccatgatctgttgaatttgctcagctccctgctcaacagcaggaaatcagaatcatttaaaatcatcattgtggctgggagtgatggctcatgtctgtaatcccagcaatttgggaggccaaggtgggcagatcacttgttgtcaggggtttgagaycagcctggccgacagagtgaaaccccatctctactaaagatacaaatattagctgggtgtggtgattcacgcctgtaatcccggctacttgggagactgaggcaggagaattgcttgaacccgggaggggcaggtttcagtgagccaaga

SEQ ID NO: 502143 - DNA, 594 bp, Homo sapiens
atcaggaccctcttttccagcaacatctttcagcaacaccatgaatggacaccaagacaagacccccactccaaggaaaacaatccacacaraatcaatcagctgacacctggcaagtgggctgtcttttagattcgtgaagccattctggtgggcaagaatgattatccactattatcatactcagattagaggccaagcccacagagttagaggccctggggaatattgagaagaatggatttggctaaacagatgtttgccactttctctttttggactgtccatcttgtgctctctgtccctcacctgagtgctctacatcttgtcacctttctgctcaccgcctctgttttgtagtagcctggaggctgccccaggacagaggccccaagcagtttagcttttactttcctcagcgatcctctgactcttaactgaatgcctgtttaatttgccactggtccaagtgacactgaaaaaaagaattgtcttggaacctagtatttttgtaccttaattattcgaaaagatcagcagtaacctcgccatcattatgactagaagtggaaatgtggtatttaagagctctac

SEQ ID NO: 502144 - DNA, 594 bp, Homo sapiens
atcaggaccctcttttccagcaacatctttcagcaacaccatgaatggacaccaagacaagacccccactccaaggaaaacaatccacacagaatcaatcagctgacacctggcaagtgggctgtcttttagattcrtgaagccattctggtgggcaagaatgattatccactattatcatactcagattagaggccaagcccacagagttagaggccctggggaatattgagaagaatggatttggctaaacagatgtttgccactttctctttttggactgtccatcttgtgctctctgtccctcacctgagtgctctacatcttgtcacctttctgctcaccgcctctgttttgtagtagcctggaggctgccccaggacagaggccccaagcagtttagcttttactttcctcagcgatcctctgactcttaactgaatgcctgtttaatttgccactggtccaagtgacactgaaaaaaagaattgtcttggaacctagtatttttgtaccttaattattcgaaaagatcagcagtaacctcgccatcattatgactagaagtggaaatgtggtatttaagagctctac

SEQ ID NO: 502145 - DNA, 594 bp, Homo sapiens
atcaggaccctcttttccagcaacatctttcagcaacaccatgaatggacaccaagacaagacccccactccaaggaaaacaatccacacagaatcaatcagctgacacctggcaagtgggctgtcttttagattcgtgaagccattctggtgggcaagaatgattatccactattatcatactcagattagaggccaagcccacagagttagaggccctggggaatattgagaagaatggatttggctaaacagatgtttgccactttctctttttggactgtccatcttgtgctctctgtccctcacctgagtgctctacatcttgtcacctttctgctcaccgcctctgttttgtagtagcctggaggctgccccaggacagaggccccaagcagtttagcttttactttcctcagcratcctctgactcttaactgaatgcctgtttaatttgccactggtccaagtgacactgaaaaaaagaattgtcttggaacctagtatttttgtaccttaattattcgaaaagatcagcagtaacctcgccatcattatgactagaagtggaaatgtggtatttaagagctctac

SEQ ID NO: 502146 - DNA, 586 bp, Homo sapiens
gttgcccaaaatgtctcaggcagccgagcacagtggctcacatctgtaatctcagcattttgggaggcagaggcgggcagatcacctgaggtcaggagttcaagaccagtctgaccaacatggtgaaaccctatctctactaacaatacaaaaatttgccggtcgtggtggcaggtgcctgtagccccagctactctggaagctgaggcaggagaatcacttgaacgcgggaggcggagattgcaatgagccgagaccatgccactgcactccagcctgagtgacagagtgagacttcatctcaaaaaaaaaaaaaaaaaaaagtctcaggctatgactgaactaggagggtagaaagratagtcattttggttgccacaaaacgtcaaaacaaagatgcagatcattgatgtaaaattacagttagttccttcccactccttttcagctactcttcgttaccatgagccagcgtctccagggtcagttttcagtctattgcctcccagctcctagtgcacctttcaatatgtgcactgtgataatctgggaaacactgttcaatataccttctggaagtgaacat

SEQ ID NO: 502147 - DNA, 505 bp, Homo sapiens
gctgctgactttaagttgaagccaatactcactttcctttctgaaaatattgggaccctaaataattacactraatttactctgcctgtgctttataaatgaaataacaaagcccgaatatcaacatatcttttttcccccttaattgtgctcataaatacttcaaaatttagaattaaaaaaaaaatacttgagaagtgaccaaatggaaattataataaagtggcagtttaagtttacaatacttattgattcttcaagtcatttaaggcaccttaatatatttataaatattaaatatacatttttactttataacacagtacataaatcttgaacaaatttagtgtcagttaccttgtgttgattaatattcctttgaaataagcagtaattaactcaaaagctatttttatatcataattagtttagcataattgtactgaactaagtaaaaatactgacaatttctgatatcatgttcttttatgttgctcagtgagga

SEQ ID NO: 502148 - DNA, 505 bp, Homo sapiens
gctgctgactttaagttgaagccaatactcactttcctttctgaaaatattgggaccctaaataattacactaaatttactctgcctgtgctttataaatgaaataacaaagcccgaatatcaacatatcttttttcccccttaattgtgctcataaatacttcaaaatttagaattaaaaaaaaaatacttgagaagtgaccaaatggaaattataataaagtggcagtttaagtttacaatacttattgattcttcaagtcatttaaggcaccttaatatatttataaatattaaatatacatttttactttataacacagtacataaatcttgaacaaatttagtgtcagttaccttgtgttgattaatattcctttgaaataagcagtaattaactcaaaagctatttttrtatcataattagtttagcataattgtactgaactaagtaaaaatactgacaatttctgatatcatgttcttttatgttgctcagtgagga

SEQ ID NO: 502149 - DNA, 621 bp, Homo sapiens
catgtaactaaattttactatctccagcactgttaatcaacttagaacagcccctgaattctactcttagatagatctcagtcttcaaaattgtagccagagcctctaagggtaaattgagtgaaacttcttatcagcatttatcagatttctacactcaggcatttctcctctggctgctgaaactgttcctgtttcttactctgtggctacttggggaatttctcctgagctctaaactcaaatccaaaagccttctattgaacgaagcagaacagaaattgctgaaaaattagagcactacagtccctcattaagaatttacagaattattattcacagaaatatagaagttcccttttttttaaattmagtttggttttctgccagttgtacttcaggggggaaattcatgaaaggtaggactgcctgatataccaaatgcctgaaagaacccatgatataatgtacaaaatttaatgaaagatttggaacattttggctatagtaaagcatattataaccccagagtacctttttaagaaaaaaaagttgtttttgtctgcatgtattcctgcaattcaccttttgtgtaagggttctactttttattaataaaat

SEQ ID NO: 502150 - DNA, 621 bp, Homo sapiens
catgtaactaaattttactatctccagcactgttaatcaacttagaacagcccctgaattctactcttagatagatctcagtcttcaaaattgtagccagagcctctaagggtaaattgagtgaaacttcttatcagcatttatcagatttctacactcaggcatttctcctctggctgctgaaactgttcctgtttcttactctgtggctacttggggaatttctcctgagctctaaactcaaatccaaaagccttctattgaacgaagcagaacagaaattgctgaaaaattagagcactacagtccctcattaagaatttacagaattattattcacagaaatatagaagttcccttttttttaaattaagtttggttttctgccagttgtacttcaggggggaaattcatgaaaggtagractgcctgatataccaaatgcctgaaagaacccatgatataatgtacaaaatttaatgaaagatttggaacattttggctatagtaaagcatattataaccccagagtacctttttaagaaaaaaaagttgtttttgtctgcatgtattcctgcaattcaccttttgtgtaagggttctactttttattaataaaat

SEQ ID NO: 502151 - DNA, 585 bp, Homo sapiens
aatatttcttattcagaggctgctcctgtggaagacggcagcagctccaggaaatttgagtatattagcttcaaaggacctgtctgccacccttctgacagtgcactctgcaaagaaccttccgatctcctgctccctgggcagttttctctgcatcttaaatatgtattttcggcattacatacaaacttcagcaagttctatgttttaatattaatttacataagcacaaaaacaagctatagatttgcatgyaattggcactaggcctttcggtaaatgacattaaaaccatgaggagagatggcagacaatgagtctaagataaaattgtcagtagaaaaaatcaaaacaacagaagaaatgagaatttttaccaattacttataacattaaaatagtacttttcttttaaaaatgttaaataatagtttcaattattatttgataataataatacaggagatctcagagaaagtcagttatttgccaaaagatctataattatttctgtacttctggaagtgtgcaaactgctttaaaacatcccatctgcattttccttttctattttgtattttctcc

SEQ ID NO: 502152 - DNA, 585 bp, Homo sapiens
aatatttcttattcagaggctgctcctgtggaagacggcagcagctccaggaaatttgagtatattagcttcaaaggacctgtctgccacccttctgacagtgcactctgcaaagaaccttccgatctcctgctccctgggcagttttctctgcatcttaaatatgtattttcggcattacatacaaacttcagcaagttctatgttttaatattaatttacataagcacaaaaacaagctatagatttgcatgtaattggcactaggcctttcggtaaatgacattaaaaccatgaggagagatggcagacaatgagtctaagataaaattgtcagtagaaaaaatcaaaacaacagaagaaatgagaatttttaccaattacttataacattaaaatagtacttttcttttaaaaatgttaaataatagtttcaattattatttgataataataatamaggagatctcagagaaagtcagttatttgccaaaagatctataattatttctgtacttctggaagtgtgcaaactgctttaaaacatcccatctgcattttccttttctattttgtattttctcc

SEQ ID NO: 502153 - DNA, 561 bp, Homo sapiens
gctgaggtcatcacatccaaaggattgtcttagcatctttttacaaacttacttttttgtgctttataaaggaattgagttcaggcagaatttgccttgctttgacagaaaaaaaatactcttaatcccaaacacaacacaaagacatctttcagaaatgtactcatgtgttgagcatgaatcaattattgcaatgacaaatgcaaatttccctgaaaaaatgtgtcatctgttggaccaattcrtagatgaatcttactgcacagtgttcataagcttgtgcaagtcttatgcaagctagtgaaacaaacagcagcaacaacaaaaaaacctacaaattatctgaggtctgacaataaaaagaaaggctatgaaccacaggctttgcctttccactgatctgtgtttgggggaattgttttgggaagaagaggtggtattttgtttttagtatgatgacaatagcgatcccttccatcccttgaaaacgcctttggagttttcaaaacggactcacgtacattctcactttgatcctcacaacagccctgtgatggaggc

SEQ ID NO: 502154 - DNA, 561 bp, Homo sapiens
gctgaggtcatcacatccaaaggattgtcttagcatctttttacaaacttacttttttgtgctttataaaggaattgagttcaggcagaatttgccttgctttgacagaaaaaaaatactcttaatcccaaacacaacacaaagacatctttcagaaatgtactcatgtgttgagcatgaatcaattattgcaatgacaaatgcaaatttccctgaaaaaatgtgtcatctgttggaccaattcatagatgaatcttactgcacagtgttcataagcttgtgcaagtcttatgcaagctagtgaaacaaacagcagcaacaacaaaaaaacctacaaattatctgaggtctgacaataaaaagaaaggctatgaaccacaggctttgcctttccactgatctgtgtttgggggaattgttttgggaagaagaggtggtattttgtttttagtatgatgacaatagcgatcccttccatcccttgaaaacgcctttggagttttcaaaacggastcacgtacattctcactttgatcctcacaacagccctgtgatggaggc

SEQ ID NO: 502155 - DNA, 427 bp, Homo sapiens
cctttaaagaaatgtcttccaaaagaccgaattatgtcttatcmatctgaatatgagactgtgtatttaaaattatctaagagtattttgttcctggcaaaattgcatggaaacagaaccaactttgggacaacagagcaaacaagtcagtagacagacttggttctaacttccatttcaggtatctccgattccttttcctttttgaagccttattttcctgatctataaaagatagacgacaacattcccttccttgttgttgttgtaggattaaatgaaataaagcatggcacataagagatatttaataagttactttcctctttatatataattccaacaagttcattcgatctgcaaaacgtgtctatcaagtgaggaactgaggaacttcagcaagatcacgcagcttgtgaaagagtca

SEQ ID NO: 502156 - DNA, 581 bp, Homo sapiens
caaggacaatatctaaaatgaaagttggaggcactccataatacttgttaaaaaatgaatagtttttttaaagtagtgaattaacacgacctctgaactttcatacaaaaacaataatgaaataattactttcaattcaaatagaaagtgaaaagtacacagagtaaaaataatatgtcagtgttggaaatgggtttatgacatcrgtaagaatccacaccaaggcaatgatcactcagcaaggctaatttactttctgcagaaagggtacaactcaccaacagtctcaccacgagagcacgccaaacaaaggagacagggacatttataacttacataacctgatgcaatcgccctatggcagtgtcctatttccattggtcagaatgggacctcacattctaagcttgacccaattggttaacagcttggaaatttcccaaataggcaaaagagaaagaggacaaagcaaagaggaagctagtcatgagatggccagaagggtttccaaataaggaatggcatgcactgtggtcaggggctttagtcctgtccaggtgtgccgggggaagttagagcag

SEQ ID NO: 502157 - DNA, 553 bp, Homo sapiens
acctcatcaataactcctattctcaggtttttgcacgttaggaaataacgtctcagaaaagttaaaataacaaaaccacaaccccaaaaaaaaccctaccataaaatcctaaaactccaattttccttcttcagcactcacatgcaaagaaacattaactctgcatagggatgtgtatgctcaggattttaataataaagccatcagaaactaatattatctttttctgtactatggtcattagagggagaaccatgaggctacttaagccttgttctacctcacaaaatgttctttgttttatgcaaatgtactggctgtgggagatattagatgtcattttcatgagtatgacatgagtaagtgttagaggtaagttgacaatctccttgtaaagatattagcaaaacagtattattatgaccccgcaacacyttagaaatattttcactataatccatcttgtgataattacacctgttttactggaatttgacctgaaagaatagaacttggtcaacaagtttccaatcttgttgaaagggtacatttt

SEQ ID NO: 502158 - DNA, 611 bp, Homo sapiens
ctcactttaaattatcttcaaaggactgggcacagtggctcaggtctgtaatcctagcactttgggaggccaaggtgggcagatcacctgaggtcaggagttcgagacccgcttggccaacakggcaaaaccccttctctactaaaaatacaaaaattagctggctatggcaacgcacacctgtaatcccagctactttggaggctgaggcagaagaatcacttgaacccaggagatggaggttgcagtgagctgagatcgtgccactgcactccagtctgggcaacagagtgagactccatctcaaaaaataaattaattaattaattaattaaattaaattaaattatcttcaaggaatctgcttctctaattagtaaatagacatctgttcatccagagaaaaatctggaagaacatacaccaaaatgtcaactgtggttccatctggggagcataagcatgggaaacgagctaccttccacactgtatattttgatgttgtttgaactttatacgatgagcatgtgccacttttgtaagcagaaaaagtaattaagaccttttttttttttaacgtaaaaggaagaataaagaggagggtgactcag

SEQ ID NO: 502159 - DNA, 611 bp, Homo sapiens
ctcactttaaattatcttcaaaggactgggcacagtggctcaggtctgtaatcctagcactttgggaggccaaggtgggcagatcacctgaggtcaggagttcgagacccgcttggccaacagggcaaaaccccttctctactaaaaatacaaaaattagctggctatggcaacgcacacctgtaatcccagctactttggaggctgaggcagaagaatcacttgaacccaggagatggaggttgcagtgagctgagatcgtgccactgcactccagtctgggcaacagagtgagactccatctcaaaaaataaattaattaattaattaattaaattaaattaaattatcttcaaggwatctgcttctctaattagtaaatagacatctgttcatccagagaaaaatctggaagaacatacaccaaaatgtcaactgtggttccatctggggagcataagcatgggaaacgagctaccttccacactgtatattttgatgttgtttgaactttatacgatgagcatgtgccacttttgtaagcagaaaaagtaattaagaccttttttttttttaacgtaaaaggaagaataaagaggagggtgactcag

SEQ ID NO: 502160 - DNA, 549 bp, Homo sapiens
atacaccaaaatgtcaactgtggttccatctggggagcataagcatgggaaacgagctaccttccacactgtatattttgatgttgtttgaactttatacgatgagcatgtgccacttttgtaagcagaaaaagtaattaagaccttttttttttttaacgtaaaaggaagaataaagaggagggtgactcagcagctggcaacagaggccccaccttccttcctgtgctcctttccacctytccccacccacatgcacacaccctaactggaaaaacctgggctcctgccggctgcgtctgtccttcccgtctctcctcctagtggttgaactgggccaccgctaatcccagggcaataatatctccccctcacctttattagtggcttgtggtttatgggatgcctccagtgccagctcatgtttaatcctccccatgatgctgtgaggtagctattctcatgcccattctacagacatggaaactgaggctcagcaaagctaagctccctgccagaggtcacatagcatgtctgcgattgtgcctg

SEQ ID NO: 502161 - DNA, 459 bp, Homo sapiens
ccacctgtgtcagatcctatcgctgctgttgtaaatccttagcgaagcttgtaggggaagtgacagtcattgctggtggtgagtcgggtgactgatgtgctcccaaggctctccttgatacaggcacttcatgcaccacgtcatcatgctaggctagtagtcccaggaggctgagtcatggggtgatgtcgggatgctcccctcggtggggctgtgtcttgtgagtggtcgcgttggtggggatggcggctctcttgctgggaggcaacagacctctgtgcgtgggcgggaggtggcacaggcttctcatctgggagaccagattgaatctcaaattgctgcctgccttccrcacttaaaactgcttcctcactcagcacttcgtgagtgaggctcaagttcaaagtcctgaatgaaagccttgataatgaatctgacccgacgatgatacaaagcttc

SEQ ID NO: 502162 - DNA, 459 bp, Homo sapiens
ccacctgtgtcagatcctatcgctgctgttgtaaatccttagcgaagcttgtaggggaagtgacagtcattgctggtggtgagtcgggtgactgatgtgctcccaaggctctccttgatacaggcacttcatgcaccacgtcatcatgctaggctagtagtcccaggaggctgagtcatggggtgatgtcgggatgctcccctcggtggggctgtgtcttgtgagtggtcgcgttggtggggatggcggctctcttgctgggaggcaacagacctctgtgcgtgggcgggaggtggcacaggcttctcatctgggagaccagattgaatctcaaattgctgcctgccttccacacttaaaactgcttcctcactcagcacttygtgagtgaggctcaagttcaaagtcctgaatgaaagccttgataatgaatctgacccgacgatgatacaaagcttc

SEQ ID NO: 502163 - DNA, 429 bp, Homo sapiens
ctagggtttctcaaatgagattagaaagaagtagttccctcactgtggtgggggaccatgggagaaatctcaacttcctgtcccagagaaataagtccataatttaggaaggccacttagaaaataacttgagggctgtgtttcattttaaataggcctccacctaatccatctctttcctccccagggagatgtctcaaacgggttctcatggttgactgtccagaaatcttggggttgcatctggaactccccgtacaatgcagataattttgccaagagaaaatactctagtatctgtgtgtaatatgaaattatgaacacacacactcggccatcccaccagacacagtcagtcattttggggtttgccatcaagggtcatctgtccattgcttkcctttgctagcaaacaaatactcagactcg

SEQ ID NO: 502164 - DNA, 429 bp, Homo sapiens
ctagggtttctcaaatgagattagaaagaagtagttccctcactgtggtgggggaccatgggagaaatctcaacttcctgtcccagagaaataagtccataatttaggaaggccacttagaaaataacttgagggctgtgtttcattttaaataggcctccacctaatccatctctttcctccccagggagatgtctcaaacgggttctcatggttgactgtccagaaatcttggggttgcatctggaactccccgtacaatgcagataattttgccaagagaaaatactctagtatctgtgtgtaatatgaaattatgaacacacacactcggccatcccaccagacacagtcagtcattttggggtttgccatcaagggtcatctgtccattgcttgyctttgctagcaaacaaatactcagactcg

SEQ ID NO: 502165 - DNA, 494 bp, Homo sapiens
gggcaaggaatggtttcatcagaaatacctccagaacactgcagctaatgatgcagagggaagattatttgtgttacacaggaagtgcagggaatcaattttcacatgcagtgaagggggcattgttgtcaaaaaacagaaccaatcaggaggtcccagttctagccstgaagtatttaaaaggaacttccctatgctgtacaagctcagggcaacgggtaattctacatgtcatcttcactgagccatggggtgcccagattagatgctgtttctgggtgtgtctatgaggttgtttccagatgagatcagtattcgaatcactagactctgaagactggcttcctcaatgtgggcgggcaccatccagtaagttgagggcctgagtagaacaaaaaggtggaaggaggttgaattcccccttttctttcttcccgcctgctagagctgggactctggtcttctttcgccttggactggcgtgtacaccattg

SEQ ID NO: 502166 - DNA, 341 bp, Homo sapiens
tcctgtccaggagcccacatggcattaaccatcaggtttccttcagctcctttgtgctgggagcctgttggcctccccttgtttctgacgaccttgacagtgtgaaggaggccactcaggtgttttcagaatgttcctcagctgggattgggctgctgtgtgctcatggttagacagggctccgtgttattttctgatgaatttcctagtcacsctatgcaccctttttgtccagtagaaaatggagaaaatgagaccatacccacaccacagaggggttgtgacacaatggggaggggcatgggttctgggtcacctgcctggacttgaatcccagctcc

SEQ ID NO: 502167 - DNA, 469 bp, Homo sapiens
gaaccccattcccccacctgtgggggacgtttagtctcataccyctttactcttcatgaatacatgcattttttttctccctgagttttgagatgtttaaaaattcctttatcttacttcttgaatgcagcattcaatacattgcaataggtaaaatgttaccgccgtcgatcgtgaattccattgcacaatataaaagccctcatttgctttccttttggattggatttcgaaatgggtcaaatgtttacagaaatggcccaaactgtacaaataaactgtagctctagtgagggaggcagtttacattactctcagtcagatgaatatggaagctgcagcctgtcctttgaaaaccacttcaagcactgtgcgtgtgagttctgtgccccgtctgggatccctcaattccatcaaaaagcttcgggaaaggcatggcgatcctataaatccacacatccatccacac

SEQ ID NO: 502168 - DNA, 531 bp, Homo sapiens
gttagtacatttggttatttggtctttgatgtcagcacatactagaagcagaaaagtaaaaggaatacaaggggaatacaaggtcagtattaaaaaaggggatgttgagtttttaattcattgggattccttgacagattttacaatttacttttagatatttgactaagtaaagaggttctggcrgtcaaggggtggttctatttctgctacattctgatttagctgggttttgctagatcaacttgggaccctaaaaaccgtgtcaaccgtggtgatgcagggatgctctcatgatgaaaataacctgtgctctgagagtctgtcctgctccccctcagacagccagctacagcaggatggcactgtgacaaccggccctgagcacctcctgtgtacagaataaaggactgccccccctgctacaaccccaaggcactgacttttgctctctagggctctggggggaacccctcactccacgcctgaaacagcagttgggcagggaggccaatctgggccccagatggc

SEQ ID NO: 502169 - DNA, 531 bp, Homo sapiens
gttagtacatttggttatttggtctttgatgtcagcacatactagaagcagaaaagtaaaaggaatacaaggggaatacaaggtcagtattaaaaaaggggatgttgagtttttaattcattgggattccttgacagattttacaatttacttttagatatttgactaagtaaagaggttctggcggtcaaggggtggttctatttctgctacattctgatttagstgggttttgctagatcaacttgggaccctaaaaaccgtgtcaaccgtggtgatgcagggatgctctcatgatgaaaataacctgtgctctgagagtctgtcctgctccccctcagacagccagctacagcaggatggcactgtgacaaccggccctgagcacctcctgtgtacagaataaaggactgccccccctgctacaaccccaaggcactgacttttgctctctagggctctggggggaacccctcactccacgcctgaaacagcagttgggcagggaggccaatctgggccccagatggc

SEQ ID NO: 502170 - DNA, 531 bp, Homo sapiens
gttagtacatttggttatttggtctttgatgtcagcacatactagaagcagaaaagtaaaaggaatacaaggggaatacaaggtcagtattaaaaaaggggatgttgagtttttaattcattgggattccttgacagattttacaatttacttttagatatttgactaagtaaagaggttctggcggtcaaggggtggttctatttctgctacattctgatttagctgggttttgctagatcaacttgggaccctaaaaaccgtgtcaaccgtggtgatgcagggatgctctcatgatgaaaataacctgtgctctgagagtctgtcctgctccccctcagacagccagctacagcaggatggcactgtgacaaccggccctgagcacctcctgtgtacagaataaaggactgccccccctgctacaaccccaaggcactgacttttgctctctagggctctggggggaayccctcactccacgcctgaaacagcagttgggcagggaggccaatctgggccccagatggc

SEQ ID NO: 502171 - DNA, 566 bp, Homo sapiens
agaacagcgttcactcccatcccagtctcctgttccatactattaggttgttggcaggtttcactgttacattattgcagggaacattctgtcacatacacatccatgccgataacatatgcatttgtaagcattctccagaaaattgacttagtggatcaattttactagctattgccaaattactgtagagagagagtgctctgaggtacatttccaccgcagtagacacaggtcacttggtgtacctatgaagtgttctcacatttctgagttktttcagtatgatgagcctgaaaagttacctcatccgttttttaaattatcacttccctggctattggtgaggatacgcacctttgcagcaatgtattatttgtttctatcttctgggaattgcctggacatgtcctgcatactttcatttggttgtcttttattattgatttgtataaaaatatattttgaacttggataattacaatactgacaacccctactgcctataatgtagtaaatgctctctaaacccattgcagatgtcatccaatataatccacagggca

SEQ ID NO: 502172 - DNA, 566 bp, Homo sapiens
agaacagcgttcactcccatcccagtctcctgttccatactattaggttgttggcaggtttcactgttacattattgcagggaacattctgtcacatacacatccatgccgataacatatgcatttgtaagcattctccagaaaattgacttagtggatcaattttactagctattgccaaattactgtagagagagagtgctctgaggtacatttccaccgcagtagacacaggtcacttggtgtacctatgaagtgttctcacatttctgagttgtttcagtatgatgagcctgaaaagttacctcatccgttttttaaattatcacttccctggctattggtgaggatacgcacctttgcagcaatgtattatttgtttctatcttctgggaattgcctggacatgtcctgcatactttcatttggttgtcttttattattgatttgtataaaaatatattttgaacttggataattacaatactgacaacccctactgcctataatgtastaaatgctctctaaacccattgcagatgtcatccaatataatccacagggca

SEQ ID NO: 502173 - DNA, 603 bp, Homo sapiens
tgtccccgcctcagaccactggaggcagaaaccctggggtacagcctgggcatcagactctgcggagcccccgctgactgcaatgtgcaaggtcgagagctcctggtccaaacatctgccttcctctgggtccaagtagcagggcagagtctccaggaaaccggcacacaggtggggactccgtgccgcaggaggaggagcttcggccctcagtgtgtgttctgctgcggaggtgagtgcacctgcagaacaggacaggaagtagtccaaagcattgagggctgagggctggtgccccaggccttagtgggggccgtgggggcctgaaaggagggtcgtggaggcggggccagcctgggagagaagctggaggattcccacctctggccagaaagccttggcaactcgcccacagtcccagagcagccagggcagcagccagtctggggagacccyacagagcccctggcctcactcctccgctcccccgacttcctgctggacccccattggcagaatcaagggtgctgtcggtgcagttggaagaggtcagcttccagggcccacaggcttatccactctggaggctctgatcatcacctt

SEQ ID NO: 502174 - DNA, 594 bp, Homo sapiens
ctgcgaggaacagacgtgctggactgcagagtctgaacagaaaggatgctcaggctgtggctgataaatgggaggcacaggaggaaatttcacagggatgaacaaccctcctccatttagattccaaaattccaacccatgaaaagagcagagagagcccggactgaagtcaggcagatccgggaaggaatccatacctgcgcgtcccctgggcagcacagggtgggaggccccagatccctggcttcctcacctgcggaaaggatgagactcgcccagcgttcacccagtgaatatgctttcagcctctgctgggtaccaggcatagttttgggcactgggaataaaggggtgaggaaatagratttttaaattcctaaagaaatcagatttttaaaaatccttgtggtgatggaaatgttccgtatcatgatagtggggatgatacaggaacctacacatgtaataaattgcatagaaacacacacacacgcacgcacacacacacacccctgcaggttaaaaataaggaaccgagtaaaacgggtggattgagtcagtgtcattatcctggttgtaacattctgtagttct

SEQ ID NO: 502175 - DNA, 594 bp, Homo sapiens
ctgcgaggaacagacgtgctggactgcagagtctgaacagaaaggatgctcaggctgtggctgataaatgggaggcacaggaggaaatttcacagggatgaacaaccctcctccatttagattccaaaattccaacccatgaaaagagcagagagagcccggactgaagtcaggcagatccgggaaggaatccatacctgcgcgtcccctgggcagcacagggtgggaggccccagatccctggcttcctcacctgcggaaaggatgagactcgcccagcgttcacccagtgaatatgctttcagcctctgctgggtaccaggcatagttttgggcactgggaataaaggggtgaggaaataggatttttaaattcctaaagaaatcagatttttaaaaatccttgtggtgatggaaatgttccgtatcatgatagtggggatgatacaggaacctacacatgtaataaattgcatagaaacacacacacacgcacgcacacacacacacccctgcaggttaaaaataagraaccgagtaaaacgggtggattgagtcagtgtcattatcctggttgtaacattctgtagttct

SEQ ID NO: 502176 - DNA, 482 bp, Homo sapiens
agggtgctcactgggggcagagggagctgtggcaatgggagctgttcagagacaccrtgcgatcggctctgaagatggaggaggggccaatagctgaggaatgcgggtggcctttggaagccggagaaggcaaggaacagattctcccctggagcctccagaaggaaccagccctccagacaccttgattttaggccagtgaggcgtatgtcagactttttacctccatagctgtaagagaataagtttgtgtggttttaaggcactaagcttgtggtcatttgtcatggcagcctaggaaactaatgaagtcataaagaggaaaaaggtttcccaaacttgcttaaccataattaactgctgattatcgatcacctaccagggtcagtctgcactgggccttacagacgttatctcattccattgctcattccgttgccccaactaccccaggacatgggtgctataatcagcatgtgcag

SEQ ID NO: 502177 - DNA, 482 bp, Homo sapiens
agggtgctcactgggggcagagggagctgtggcaatgggagctgttcagagacaccgtgcgrtcggctctgaagatggaggaggggccaatagctgaggaatgcgggtggcctttggaagccggagaaggcaaggaacagattctcccctggagcctccagaaggaaccagccctccagacaccttgattttaggccagtgaggcgtatgtcagactttttacctccatagctgtaagagaataagtttgtgtggttttaaggcactaagcttgtggtcatttgtcatggcagcctaggaaactaatgaagtcataaagaggaaaaaggtttcccaaacttgcttaaccataattaactgctgattatcgatcacctaccagggtcagtctgcactgggccttacagacgttatctcattccattgctcattccgttgccccaactaccccaggacatgggtgctataatcagcatgtgcag

SEQ ID NO: 502178 - DNA, 482 bp, Homo sapiens
agggtgctcactgggggcagagggagctgtggcaatgggagctgttcagagacaccgtgcgatcggctctgaagatggaggaggggccaatagctgaggaatgcgggtggcctttggaagccggagaaggcaaggaacagattctcccctggagcctccagaaggaaccagccctccagayaccttgattttaggccagtgaggcgtatgtcagactttttacctccatagctgtaagagaataagtttgtgtggttttaaggcactaagcttgtggtcatttgtcatggcagcctaggaaactaatgaagtcataaagaggaaaaaggtttcccaaacttgcttaaccataattaactgctgattatcgatcacctaccagggtcagtctgcactgggccttacagacgttatctcattccattgctcattccgttgccccaactaccccaggacatgggtgctataatcagcatgtgcag

SEQ ID NO: 502179 - DNA, 482 bp, Homo sapiens
agggtgctcactgggggcagagggagctgtggcaatgggagctgttcagagacaccgtgcgatcggctctgaagatggaggaggggccaatagctgaggaatgcgggtggcctttggaagccggagaaggcaaggaacagattctcccctggagcctccagaaggaaccagccctccagacaccttgattttaggccagtgaggcgtatgtcagactttttacctccatagctgtaagagaataagtttgtgtggttttaaggcactaagcttgtggtcatttgtcatggcagcctaggaaactaatgaagtcataaagaggaaaaaggkttcccaaacttgcttaaccataattaactgctgattatcgatcacctaccagggtcagtctgcactgggccttacagacgttatctcattccattgctcattccgttgccccaactaccccaggacatgggtgctataatcagcatgtgcag

SEQ ID NO: 502180 - DNA, 455 bp, Homo sapiens
ataaaggaaaatgcaggaaggacaggtacacgttggataatcgcacctcgcacgttttaggttgaaacatcgcacgtggagacgcatctttccaggaggcatgagtgggttgtggaaagtggtcttggtctaattctgtgggtcaggagaccgggttctaggggccaagcagccttgcttttactagaactgcttcaggtctcacctgggaagtggagatgaaatatctcccttgaggctgtgatgtcactggggtaatggctgyggacattgcccaagctccaaggaggagccatgcgcttgggcacagcagagaatggacagcagcccccgcccatcctgggtggcacaggttcactcgttggtccacctggaaggagaagagccctgggctctgggtcctacccttccctcacctggccaattacagccatgcctgggccacctcatggcca

SEQ ID NO: 502181 - DNA, 455 bp, Homo sapiens
ataaaggaaaatgcaggaaggacaggtacacgttggataatcgcacctcgcacgttttaggttgaaacatcgcacgtggagacgcatctttccaggaggcatgagtgggttgtggaaagtggtcttggtctaattctgtgggtcaggagaccgggttctaggggccaagcagccttgcttttactagaactgcttcaggtctcacctgggaagtggagatgaaatatctcccttgaggctgtgatgtcactggggtaatggctgtggacattgcccaagctccaaggaggagccatgcgcttgggcacagcagagaatggacagcarcccccgcccatcctgggtggcacaggttcactcgttggtccacctggaaggagaagagccctgggctctgggtcctacccttccctcacctggccaattacagccatgcctgggccacctcatggcca

SEQ ID NO: 502182 - DNA, 629 bp, Homo sapiens
cttaccactaaaataagatgcaagacatatttgcctacagccagtactatttttgattttgctacatttctttatctctttgaatgcaattataattcacttagtgtgttttaattaaagaagtcctcaaccttgaygggcataggttctagattgatatgtgccctactacttttactacatttttttcacactcttcattgttttgtagtagctttttcaaagaattgaagaaaaactatggtaaaaaacatatggggtcaggaaagagacaccgttttactcttattctgagtgaatagagagtgacgtaaatgtgtgcatcaggagaccagatttgggatcccatgtccccagagctcacagcctgcagaggcatttcctcattcatgcatatgagctctggatccatttcaaaggaacaaacattactctggatcaagtcacttagatgggtttgcaaacaatccagattttctactcacatgaccctctacaaaatgagcaaactaggagttgagagtcctgggctttgtgtgtgcctctgccattcataaagtggcagagccttacagcaagtcactcagcaatttagatcccattcttcatccctcctatagatcagtttc

SEQ ID NO: 502183 - DNA, 629 bp, Homo sapiens
cttaccactaaaataagatgcaagacatatttgcctacagccagtactatttttgattttgctacatttctttatctctttgaatgcaattataattcacttagtgtgttttaattaaagaagtcctcaaccttgacgggcataggttctarattgatatgtgccctactacttttactacatttttttcacactcttcattgttttgtagtagctttttcaaagaattgaagaaaaactatggtaaaaaacatatggggtcaggaaagagacaccgttttactcttattctgagtgaatagagagtgacgtaaatgtgtgcatcaggagaccagatttgggatcccatgtccccagagctcacagcctgcagaggcatttcctcattcatgcatatgagctctggatccatttcaaaggaacaaacattactctggatcaagtcacttagatgggtttgcaaacaatccagattttctactcacatgaccctctacaaaatgagcaaactaggagttgagagtcctgggctttgtgtgtgcctctgccattcataaagtggcagagccttacagcaagtcactcagcaatttagatcccattcttcatccctcctatagatcagtttc

SEQ ID NO: 502184 - DNA, 629 bp, Homo sapiens
cttaccactaaaataagatgcaagacatatttgcctacagccagtactatttttgattttgctacatttctttatctctttgaatgcaattataattcacttagtgtgttttaattaaagaagtcctcaaccttgacgggcataggttctagattgatatgtgccctactacttttactacatttttttcacactcttcattgttttgtagtagctttttcaaagaattgaagaaaaactatggtaaaaaacatatggggtcaggaaagagacaccgttttactcttattctgagtgaatagagagtgacgtaaatgtgtgcatcaggagaccagatttgggatcccatgtccccagagctcacagcctgcagaggcatttcctcattcatgcatatgagctctggatccatttcaaaggaacaaacattactctggatcaagtcacttagatgggtttgcaaacaatccagattttctactcacatgaccctctacaaaatgagcaaactaggagttgagagtcctgggctttgtgtgtgcctctgccattcataaagtggcagagccytacagcaagtcactcagcaatttagatcccattcttcatccctcctatagatcagtttc

SEQ ID NO: 502185 - DNA, 629 bp, Homo sapiens
ttttaactttcaaaaatgccaaatatacctaaggtaaaatacaataaatttctattcttccttttcatggtaattttgtttcaagtggaaatacaaatgaaagttcaataaatttggggttgaaaccatttctctttcctatgagaatgaatcactggggagaagagaaaaagcccttttcacactgtgaggcatgtstgcagaacagttcccctgtcatggaactgccactacctgtccgcatctttgtttgaataaaatggatctgccggcacgttatgtcactcacagaagacttaacattgtgcaaaatctccccctgaaaataaagagggcacaatatttgagtaatttgtacattggtaggtgagaattagtaatcttgtgaatagcacagtgataacccacttcggtgcttttaactgatgtcattctttcctacataactttccaattctggttgtctgagacttgtctcttcatgggctctgcagactgatcctctaccatattgtttcctctggtgtcgtccaagtttctgattttaggtcagcactctgctctccagaagccacactccttgtcctcagtgacataattatctttatgtcctctgggaaaggagaata

SEQ ID NO: 502186 - DNA, 550 bp, Homo sapiens
ttctagaaatacttgtggatttctaattgctcacatgtgtggtgagtctggctacagattgataagacacttttgccaatttcacctgtgaaaaaatatctcatttttttatagtcagcctttctaaagtgtctccagtgtgccacttttatctgccattctggaacagagaatgctctgattcctctctctggtaaaacagaagtcctcyttcttggagactgaatgaattttaggtggaagcatttctttcctcacttgtcccgtttgttctgatgacgtgcttctccatccaggtaacagcctgcccgacgcggatccgggaatacaaacaggctgtgcatatagttggagcctctcttcacacagcatttcatccttaggctcaacatgtcatcaacaaggctttttaagaccactaataatcaccctttgggttttggaaaaaccagtactcagattttggctaatatgattgtcatacatttgcttaataaagtttccgcctcagcatctatttttaagcctgacgtaagttgctggaagccca

SEQ ID NO: 502187 - DNA, 550 bp, Homo sapiens
ttctagaaatacttgtggatttctaattgctcacatgtgtggtgagtctggctacagattgataagacacttttgccaatttcacctgtgaaaaaatatctcatttttttatagtcagcctttctaaagtgtctccagtgtgccacttttatctgccattctggaacagagaatgctctgattcctctctctggtaaaacagaagtcctccttcttggagactgaatgaattttaggtggaagcatttctttcctcacttgtcccgtttgttctgatgacgtgcttctccatccaggtaacagcctgcccgacgcggatccgggaatacaaacaggctgtgcatatagttggagcctctcttcacacagcatttcatccttaggctcaacatgtcatcaacaaggctttttaagaccactaataatcaccctttgggttttggaaaaaccagtactcagattttggctaatatgattgtcatacatttgcttaataaagtttccgcctcagcatctatttttaagcctracgtaagttgctggaagccca

SEQ ID NO: 502188 - DNA, 473 bp, Homo sapiens
tgtccttgccttggccaaaagtgacaaccatcacttctacttataattcttagcaagaattggtaacatgccccaatccaactgcaagggaactggtcatctctgtgcccagtaagcaagggagaactgggtgtggtggacattggtgaggttgacaccttcccctcttgccaactcccacccatgcagagaggctaccatgagaccccaacatgctggkatgcacttgctgagtaccacctctctgtgtagctgttcacagttcatttccacattctctctggcttcaccactgaccttacttacattcaggctctccatggagtagttggggtaggggacggcagagtagccagcagtgccataggcctttgtatgtggtctttgcccatatcaggggctgaccccaggagatcaagagacactcatgggttgtcactgagtgacaacctatttacttgaatttgtgaagg

SEQ ID NO: 502189 - DNA, 473 bp, Homo sapiens
tgtccttgccttggccaaaagtgacaaccatcacttctacttataattcttagcaagaattggtaacatgccccaatccaactgcaagggaactggtcatctctgtgcccagtaagcaagggagaactgggtgtggtggacattggtgaggttgacaccttcccctcttgccaactcccacccatgcagagaggctaccatgagaccccaacatgctgggatgcacttgctgagtaccacctctctgtgtagctgttcacagttcatttccacattctctctggcttcaccactgaccttacttacattcaggctctccatggagtagttggggtaggggacggcagagtagccagcagtgccataggcctttgtatgtggtctttgccyatatcaggggctgaccccaggagatcaagagacactcatgggttgtcactgagtgacaacctatttacttgaatttgtgaagg

SEQ ID NO: 502190 - DNA, 603 bp, Homo sapiens
tttttttttaaaactttctgtagagttaggggtctcactatattgcccaggctggtctcaaactcctggcttcaatcaatcctcccgccttggcctcccaaagtgctgggattactggcatgaaccacccactgtgtctgtctacttcctgcttttgttaaatttaaaaaaaaaagaacatatwtatatatatatatatatatatatatatagacagagagagagagagatgagacagatatagctatagatagatagatagatagatagatagatagatagatagatagttagatgtatacacatatgttgagatggggtcttgctctgtcatccaggctgcagcacaatggcgcaatcaaggctcactgcagcctcaacctctcaggcttaagtaatcctcccacctcagcctcctgagtagctggggctacaggcacacgccaccatgcccagctaatttttttaaaaaattgttttgtaaaggcaggggtctcattgtgtggcccaggctggtctcgaactcctggcctcaagtgatcctctcacctcagccacacctggcttaaataaatatttaaatccctatttccaagacagaga

SEQ ID NO: 502191 - DNA, 603 bp, Homo sapiens
tttttttttaaaactttctgtagagttaggggtctcactatattgcccaggctggtctcaaactcctggcttcaatcaatcctcccgccttggcctcccaaagtgctgggattactggcatgaaccacccactgtgtctgtctacttcctgcttttgttaaatttaaaaaaaaaagaacatatatatwtatatatatatatatatatatatagacagagagagagagagatgagacagatatagctatagatagatagatagatagatagatagatagatagatagatagttagatgtatacacatatgttgagatggggtcttgctctgtcatccaggctgcagcacaatggcgcaatcaaggctcactgcagcctcaacctctcaggcttaagtaatcctcccacctcagcctcctgagtagctggggctacaggcacacgccaccatgcccagctaatttttttaaaaaattgttttgtaaaggcaggggtctcattgtgtggcccaggctggtctcgaactcctggcctcaagtgatcctctcacctcagccacacctggcttaaataaatatttaaatccctatttccaagacagaga

SEQ ID NO: 502192 - DNA, 603 bp, Homo sapiens
tttttttttaaaactttctgtagagttaggggtctcactatattgcccaggctggtctcaaactcctggcttcaatcaatcctcccgccttggcctcccaaagtgctgggattactggcatgaaccacccactgtgtctgtctacttcctgcttttgttaaatttaaaaaaaaaagaacatatatatatatatatatatatatatatatatagacagagagagagagaratgagacagatatagctatagatagatagatagatagatagatagatagatagatagatagttagatgtatacacatatgttgagatggggtcttgctctgtcatccaggctgcagcacaatggcgcaatcaaggctcactgcagcctcaacctctcaggcttaagtaatcctcccacctcagcctcctgagtagctggggctacaggcacacgccaccatgcccagctaatttttttaaaaaattgttttgtaaaggcaggggtctcattgtgtggcccaggctggtctcgaactcctggcctcaagtgatcctctcacctcagccacacctggcttaaataaatatttaaatccctatttccaagacagaga

SEQ ID NO: 502193 - DNA, 603 bp, Homo sapiens
tttttttttaaaactttctgtagagttaggggtctcactatattgcccaggctggtctcaaactcctggcttcaatcaatcctcccgccttggcctcccaaagtgctgggattactggcatgaaccacccactgtgtctgtctacttcctgcttttgttaaatttaaaaaaaaaagaacatatatatatatatatatatatatatatatatagacagagagagagagagatgagacagatatagctatagatagatagatagatagatagatagatagatagatagatagwtagatgtatacacatatgttgagatggggtcttgctctgtcatccaggctgcagcacaatggcgcaatcaaggctcactgcagcctcaacctctcaggcttaagtaatcctcccacctcagcctcctgagtagctggggctacaggcacacgccaccatgcccagctaatttttttaaaaaattgttttgtaaaggcaggggtctcattgtgtggcccaggctggtctcgaactcctggcctcaagtgatcctctcacctcagccacacctggcttaaataaatatttaaatccctatttccaagacagaga

SEQ ID NO: 502194 - DNA, 622 bp, Homo sapiens
tactaggagagagaagacaagaacacaaattaagggatcatttgcaatctttgaccaaaacaactgactctgagatgatccataaaaggtaactgctattgttgtctcttttttgaaaaactcagaaggtatatttgtttttgtttgtttgtttctgttgagacagaatcttgctctgtcacccaggctggagtacagtggtgcaatctcggctcactgcaacctctgcctccggggtttaagcaattctcctgtttcagcctcccaagtaactgggattacaggcgtgtgccaccacacccggctaatttttgtagttttaatagaaacggggtttcaccatattggccaggctagtsttgaactcctgacctcaactgatccacccacctcggcctcccacagtgctgggattacagtcatgagccaccctgcagggcctcagaaggtatatttgaaagatgcgcataaatgctgggtactgatatcgttctgcactggactttggaatcaacaaaatagagtttaaatttttatttcatgccttcctgggctgtatgacgttaggaaagttccttaacctctctgaaccctgctttcatcatttgctaagcaaggataa

SEQ ID NO: 502195 - DNA, 590 bp, Homo sapiens
ccttggagttttctgtgctactgtggacatagcayatagtaggtgcttaatccatacttaatgatttatgtcaggtgctagtctaggtactagaccccctgtgagcctaatggggatgacaggtcacaaggaagtaaatttgaaaaagaaacaacattgtgctaagtgaaagaagccagtcataaaatgccacagattttattccacttacatgaaatgttcagaatccgtaaatccatagagacagaaaataaagtaatgactgccaggggatggggcagcagggagtgactgctgataggtgcagaggttcttgttggggtgccagaaatgtttgggaatcagacagttgtgatggttgcataacatagtgaatacactaaaacccactgaattgcacatgttaaaatgaagtttttgttatatgagttgtatttcaatatttattttatttaatttaattaattaatttattttttgagacagtcttactctgtcacccagactggaatgcggtggtacgatctcggctcattgcaatctccacctcccaagttcaagtgattctcgtgcttcagcctcccaagcag

SEQ ID NO: 502196 - DNA, 590 bp, Homo sapiens
ccttggagttttctgtgctactgtggacatagcatatagtaggtgcttaatccatacttaatgatttatgtcaggtgctagtctaggtactagaccccctgtgagcctaatggggatgacaggtcacaaggaagtaaatttgaaaaagaaacaacattgtgctaagtgaaagaagccagtcataaaatgccacagattttattccacttacatgaaatgttcagaatccgtaaatccatagagacagaaaataaagtaatgactgccaggggatggggcagcagggagtgactgctgataggtgcagaggttcttgttggggtgccagaaatgtttgggaatcagacagttgtgatggttgcataacatagtgaatacactaaaacccactgaattgcacatgttaaaatgaagtttttgttatatgagttgtatttcaatatttatttwatttaatttaattaattaatttattttttgagacagtcttactctgtcacccagactggaatgcggtggtacgatctcggctcattgcaatctccacctcccaagttcaagtgattctcgtgcttcagcctcccaagcag

SEQ ID NO: 502197 - DNA, 530 bp, Homo sapiens
gatattctggaaccatgctgtggattgggggggatgacatgatctgctgatgaatgacacattggctgagaaacagaaactgcccagcttaaagtgagagagtgtgaaaacctcatgactgagtcatggtcctaggagtgggatgagggtggggaggtgggcgggaagagtggaatgggggtggttaattagccattcctttaagtgggctctctgcctttctgtctttttctctgagctcatcacttcctctcccacttcctacagtatggtctcaaacacttgcattttcggaaaaaagcatgatctcctgacctttgtacatgctgttccctttgcccagagcaccatttctggtaatttcctccctgtcacctggcaacgttcatccttgagttttcagcttagaggtcaacttctccaggtagctgtccgaattggggatcttctgtcttgccagtggggcatgtatgtcctctggatcaraaagcagcatctctctctctctctctctctctttttaatttttg

SEQ ID NO: 502198 - DNA, 619 bp, Homo sapiens
aacactgactgccccactaagcccacctcctagaagctgcaattttgacttggctgcctatcatctgacattcaattcctttgtttggcatatcaatctttactgcacaaagaattttaaaacacaatgatttggtttttcaaaacaaagggctttcaatctatgagttgctctttgcaawtcgctgttttcttttgttatttaaaaacagattagactgggctcggtggctcaaacctgtaatcccagcactttgggaggccaaggcgggtggatcatctaaggtcaggagttcgagaccaacctgaccaacatggagaaaccccatctctactaaaaatacaaaattagctggtgtggttatggacgcctgtaatcccagctactcgggaggctgaggcaggagaatcgcttgaacccagggggccgaggttgcagtgagccgagttcgcagtgagccgagttcgtgccattgcactccagcctgggcaacaagagcaaaactccatctcaaaaaaaaaaaaaaaaaaaaacagattaatcagttttgacctgtttgcagagatctaatgttgatataatttatatatttggttaatattaatctggatcctgaaca

SEQ ID NO: 502199 - DNA, 619 bp, Homo sapiens
aacactgactgccccactaagcccacctcctagaagctgcaattttgacttggctgcctatcatctgacattcaattcctttgtttggcatatcaatctttactgcacaaagaattttaaaacacaatgatttggtttttcaaaacaaagggctttcaatctatgagttgctctttgcaattcgctgttttcttttgttatttaaaaacagattagactgggctcggtggctcaaacctgtaatcccagcactttgggaggccaaggcgggtggatcatctaaggtcaggagttcgagaccaacctgaccaacatggagaaaccccatctctactaaaaatacaaaattagctggtgtggttatggacgcctgtaatcccagctactcgggaggctgaggcaggagaatcgcttgaacccagggggccgaggttgcagtgagccgagttcgcrgtgagccgagttcgtgccattgcactccagcctgggcaacaagagcaaaactccatctcaaaaaaaaaaaaaaaaaaaaacagattaatcagttttgacctgtttgcagagatctaatgttgatataatttatatatttggttaatattaatctggatcctgaaca

SEQ ID NO: 502200 - DNA, 360 bp, Homo sapiens
tgcactccagcctggcaacacagcgagactctgtctcaaaaaaaaaaaaaaaatctattttttttctgagcaggttaacacttaacatctacacatgaattggtttttcaggttgatttctaactacagactaggtggatgtgaggccagaataagaccatagttgagatgttttgaatagaaggaaagtatggagggaaatacttcacagaaagcatatatgagatgtctgcagtggaaaggggatggcaggaaggatgggatggggcctgggcagttcctggtagcatagtatgataaaaggagtgctgggcttgaagtcagacagacctggcrtagtcctggctttgccactggcca

SEQ ID NO: 502201 - DNA, 510 bp, Homo sapiens
ctagcactttgggaggtggaagcaggaggatcacttgagcccaggaattcaagaccagcctggctacatagtgagacctcatttctgttaataaaaaaaaaaaaaaaaaaaaaaaaaaaargtttttttttaaaactcacttgactttgtcaatttattttgaaaaaattagtttatttaatcctacccaggaatatgatatattagtctatttattcaaattttcttttacatatttaaattaggttttatagttttcttcaaataaattctagtataatccctgtcaggtttactgataggtgtttaataaggttttgttgcccttatctatctaactctctatctatctatctatctatctatctatctatctatatagattttttttttttttgagacagagtctcactctgtcacccaggctggagtgcagtggcacagtctcggctcactgcaacctctaagctccaaattcaagcaattcttctgcctcagcctcctgaacag

SEQ ID NO: 502202 - DNA, 452 bp, Homo sapiens
aatctcaatatttaaaatggaaacaagtgaatggaattcttaggcaatttacattttcacagttaggctgaaaatacaccattgtttgtggaatccatgaagcatcttctctggggctctaagggcctcctaagcaaatccgcaaaccatttttggaagaggacccttacaggaggacagtaggatagcgataaggagcattaactcggccctgagacggccgttcggtttcatgtttttaggaataaattagataacccagtaaacatgattagcacagtgtgaacagatggcaacccacagttttttttaaccctcagggaaggactccagattgggctcttccacttgrcagctggataacttaaagcaagtcatttaaccctgagcatcagctctatcttctgcaagcagatatcataacagaatctacctcatggattgttgtgagg

SEQ ID NO: 502203 - DNA, 633 bp, Homo sapiens
ggggtagggttgggtgtatacagcagccaggaacagggatctgcttgaaacactaccagcattaaccacatttggtgatggggcagtgggtggagggagacaaggatggctcccaaatttgtggtatgaacaactgaatagcttcttgtatataacagcaacactcccctcataatatcaaaaacctaagattttagaagaactattaaaagactcttcattttccaaacaaacaaaaaaaaattccccttagcttttacttttctaggttaaaaataacaactctttgacataattgcatgggatcaatttcccattaaaaacacataaactttttttmaagtattgctcttttagactttttccatttagtcggcttcctgttgaaaatagatacaaactggttctagtactctaatgatcgaagattcacctacagttccaatattatgttagctttttatttaaaaagtacgtatgcattgttgtgcattcatcctttagtccaggggtcagcatactgtggccagtgggccaaatctatcctgtcatttactctttatggcctgagagctacaagtttttacatttttaaaaggttgctttaaaaaaacaaaaaagaatatgcaacag

SEQ ID NO: 502204 - DNA, 546 bp, Homo sapiens
ctgtcccagcaaaacgctgccatgtcctgagtgtccagacagcggcctccatcctttctcgtatgttcactggggcctgctgggggactggggcacagccctttacaacccaggaactgggcattagtgccctgtggcagaggtgctaggattaccgaggacgcctggctggtaggtggtggaagcctcctcgagacaggagcagcggtcccctccgtctcatctggagcatgtggacacctgctccctctttttaaggctgtggacccagtgaaatgccatgtaaagcactcagtacagtagacrcggaccactgagaagggaaaggagggacgcatcaggacatgagccacgagggctcgggcacctgcggcacctcctcccagcatggaggagcctgcgccccaaagccatcatcctccactggcaggtgcagccttttccctccctgctccttgtgggcctgggatgggaacaggaagggggtttacgtcctctgggcaccagccctttggcctcgccaccaccctcacacatcccaggcgg

SEQ ID NO: 502205 - DNA, 546 bp, Homo sapiens
ctgtcccagcaaaacgctgccatgtcctgagtgtccagacagcggcctccatcctttctcgtatgttcactggggcctgctgggggactggggcacagccctttacaacccaggaactgggcattagtgccctgtggcagaggtgctaggattaccgaggacgcctggctggtaggtggtggaagcctcctcgagacaggagcagcggtcccctccgtctcatctggagcatgtggacacctgctccctctttttaaggctgtggacccagtgaaatgccatgtaaagcactcagtacagtagacayggaccactgagaagggaaaggagggacgcatcaggacatgagccacgagggctcgggcacctgcggcacctcctcccagcatggaggagcctgcgccccaaagccatcatcctccactggcaggtgcagccttttccctccctgctccttgtgggcctgggatgggaacaggaagggggtttacgtcctctgggcaccagccctttggcctcgccaccaccctcacacatcccaggcgg

SEQ ID NO: 502206 - DNA, 582 bp, Homo sapiens
tccatactttggcaggggagggtaagctgtccggagggctcagagcagaacacaaaagaggcgcttgtcgcggaaggggttctccgcggcgggtactggcgtcaccagcgggtcatctttggcatgcgtctcgcagaaagccaggagttccgctgctgcctgcgacacctgcgagcacccgggtggagatgtcaccgccctgcccggctccttggagccgcccacttaggccccgcctcttgccctgtcccctcctcccaccttgccccgccccatacaggcctttccccttgtcttactccgccccctcgtcctggcccctcccctgtcctaccccgcccctcgtcctggcccctcccctgccccatccctcccctcgtcctggcccctcccctgttctgcccctcccctcgtcctggcccctcctcctgccctgccccgccccttgcccagccctgttcccaggggcatccttgcactatggctccgagccgggccgacacagcccsggacagaccgcaggcccagaacccccgccctattccccaccccgacccagcaccttcatgcggtcgatgttca

SEQ ID NO: 502207 - DNA, 664 bp, Homo sapiens
gttatgagcccaagtgggagaatggagcttctgcctatgtaagagatttgtgagtctgaacaataccagggcttgctatctcctttctactatctttaatgcactcactctccctgtagttgacctctcacacatttgtatgtatacttgcttggcctgatgaaccactcaaaaggcactgcaacattcaaggctatattgggatttacatgcaagtatgttccctttggacaatcctatgaataaatacatagcyatggtcagccatacaaacagtattgagatttttttcagtaaacttttttacattttctttaattataaaactaatatttattcttaatgagttagtctcttttataccctatcctcctgaggtaacccataatacaaatttgtattcatctttccacactttctctattcccacgcaaatatgtctgcgcatattatatagaagtctcgttcttatgatcataccatcttaattaagaatatattatcaacatctttccagttcagcccatgcagattaattcattcttcttaatacctatataacatgtcataatatgaatatatcataattttatgctttcctttattgatcaacaggttttggttctttcattgttgttgcttcttgttttcttttgtttgctat

SEQ ID NO: 502208 - DNA, 664 bp, Homo sapiens
gttatgagcccaagtgggagaatggagcttctgcctatgtaagagatttgtgagtctgaacaataccagggcttgctatctcctttctactatctttaatgcactcactctccctgtagttgacctctcacacatttgtatgtatacttgcttggcctgatgaaccactcaaaaggcactgcaacattcaaggctatattgggatttacatgcaagtatgttccctttggacaatcctatgaataaatacatagccatggtcagccatacaaacagtattgagatttttttcagtaaacttttttacattttctttaattataaaactaatatttattcttaatgagttagtctcttttataccctatcctcctgaggtaacccataatacaaatttgtattcatctttccacactttctctattcccacgcaaatatgtctgcrcatattatatagaagtctcgttcttatgatcataccatcttaattaagaatatattatcaacatctttccagttcagcccatgcagattaattcattcttcttaatacctatataacatgtcataatatgaatatatcataattttatgctttcctttattgatcaacaggttttggttctttcattgttgttgcttcttgttttcttttgtttgctat

SEQ ID NO: 502209 - DNA, 664 bp, Homo sapiens
gttatgagcccaagtgggagaatggagcttctgcctatgtaagagatttgtgagtctgaacaataccagggcttgctatctcctttctactatctttaatgcactcactctccctgtagttgacctctcacacatttgtatgtatacttgcttggcctgatgaaccactcaaaaggcactgcaacattcaaggctatattgggatttacatgcaagtatgttccctttggacaatcctatgaataaatacatagccatggtcagccatacaaacagtattgagatttttttcagtaaacttttttacattttctttaattataaaactaatatttattcttaatgagttagtctcttttataccctatcctcctgaggtaacccataatacaaatttgtattcatctttccacactttctctattcccacgcaaatatgtctgcgcatattatatagaagtctcrttcttatgatcataccatcttaattaagaatatattatcaacatctttccagttcagcccatgcagattaattcattcttcttaatacctatataacatgtcataatatgaatatatcataattttatgctttcctttattgatcaacaggttttggttctttcattgttgttgcttcttgttttcttttgtttgctat

SEQ ID NO: 502210 - DNA, 664 bp, Homo sapiens
gttatgagcccaagtgggagaatggagcttctgcctatgtaagagatttgtgagtctgaacaataccagggcttgctatctcctttctactatctttaatgcactcactctccctgtagttgacctctcacacatttgtatgtatacttgcttggcctgatgaaccactcaaaaggcactgcaacattcaaggctatattgggatttacatgcaagtatgttccctttggacaatcctatgaataaatacatagccatggtcagccatacaaacagtattgagatttttttcagtaaacttttttacattttctttaattataaaactaatatttattcttaatgagttagtctcttttataccctatcctcctgaggtaacccataatacaaatttgtattcatctttccacactttctctattcccacgcaaatatgtctgcgcatattatatagaagtctcgttcttatgatcataccatcttaattaaraatatattatcaacatctttccagttcagcccatgcagattaattcattcttcttaatacctatataacatgtcataatatgaatatatcataattttatgctttcctttattgatcaacaggttttggttctttcattgttgttgcttcttgttttcttttgtttgctat

SEQ ID NO: 502211 - DNA, 624 bp, Homo sapiens
tgcatatcaactctggttgaaatgactcatgtaaattccattctcttgtccatgatgtaatgtcattctgtccagtaaaatgtgaggggaagtctggggtggatttctagtacagtttttctgacttttatgaaagaacataaggaagagatggtctatcttctcacctctggaagttattgttgaggatataaggttggagtaacttggggatgtgaggggccacgtaaggacaaacacgaacattccaaagatggcagaacaaaatgtggaaatgraatggatccctgagccattcattgagcccttgaagtcagtgatcttggaacatacaacaggacttgtcagacaataaagataacaaagccctcattgtatgagtcattttgcttgttttctgttacttgctggtgaggtcatcaggtgaactgacacatcgttcttccctgatcatgaggattcatggtatcattaaaatttcttttttatttaaacaaatatgagaaacgaaacacgctcagactttctagtaaggaaaaacaaaagcccacctcagaggacgaataagcaagccatttaccctaattcaggtgtgtggtatttattttaatatgtataaaaatt

SEQ ID NO: 502212 - DNA, 624 bp, Homo sapiens
tgcatatcaactctggttgaaatgactcatgtaaattccattctcttgtccatgatgtaatgtcattctgtccagtaaaatgtgaggggaagtctggggtggatttctagtacagtttttctgacttttatgaaagaacataaggaagagatggtctatcttctcacctctggaagttattgttgaggatataaggttggagtaacttggggatgtgaggggccacgtaaggacaaacacgaacattccaaagatggcagaacaaaatgtggaaatgaaatggatccctgagccattcattgagcccttgaaktcagtgatcttggaacatacaacaggacttgtcagacaataaagataacaaagccctcattgtatgagtcattttgcttgttttctgttacttgctggtgaggtcatcaggtgaactgacacatcgttcttccctgatcatgaggattcatggtatcattaaaatttcttttttatttaaacaaatatgagaaacgaaacacgctcagactttctagtaaggaaaaacaaaagcccacctcagaggacgaataagcaagccatttaccctaattcaggtgtgtggtatttattttaatatgtataaaaatt

SEQ ID NO: 502213 - DNA, 658 bp, Homo sapiens
ctgctgcagcgggaattctaaaaggacaaggcaggatggaatagagtcatttttaccaaactgtaattattcattggtggcttttccatgttgcgttatcacgtaatatctgtattttaaattattaaatggttttctatttttggctgtttttttagtctaaaagctttatgttctctttaaaccagctcatctttttgtgtgtacccaaataaacagtagaaagcaaaaaagatgtragagatgtctttgccctccaggagcttacaatatatgtaaattattggctgcctactagtgcccagcactgtgtttagagctgggagggaattaaaagagatgtaagatagaaagaataactaagattttagtatttgatagcacaactgggtgactatagtcaataataatttaattgtacattttaaaataactaagagggtatatataattggattgtctgcaacacaaggaaaggatgaatacctgaggtgatggatacaccatttaccctgatgtgattaatatgcattgtacacctgtgtcaaaatgtctcacatatcccataaatatttacacctactacgtacccacaaaaactagaaattaaaaaagagagatgtagtaaacactagggaagataatatatgtaaatata

SEQ ID NO: 502214 - DNA, 659 bp, Homo sapiens
agtttttgagagtgcagcttctacatgtcaactcccagccccgttcctcaccacatggttactatatcattaaattgtgcatatatacttgttaatttgctatgtgaaaagtggcattaatttcattgtaatcagactgacattttatgcttaattgatcatttgtatttcttcttttgtaaattactttaaaaatattgctgttttttcattgatttataagattctctctttgcatcaataacgtaaattttgtcatatatgttgtaaatgctttttctaattttcatgggttctttaataccaagtttcaaggtttatgtaacataatatatcaatctttgcctcatggcatcttcccttcttatattttaaatttctatagagagagggtcttgctttgttgttcagtctggagtgtagtggtgtgatcctagctcactgtaaactagtactcctgagctcaacccatcctcccacctcagcctcccaaaagtagctaggactacagacacgtgccaccatgcactgattttgtaattttctgtggaggtaaggtcttgctatgttgcctaggcttatcttgaactaytgggctcaagcaatcctcccactttggcctcccaaagtgcgaggattacaggtatgaaccatgatgc

SEQ ID NO: 502215 - DNA, 659 bp, Homo sapiens
tgtgcagctcagcactggactactctttgtgtacaagttcttttgtagtagggctcatgtgtcctttgcttctaagtctcatcaccctttatggatgatctcatgctaattgaagtgtaagcgaactggaaatctatgtatttaattcatcttttaaaaatgaacaatttctaaaagttagaaaaattggggtatgaaaggttacacttagaaaataaagtcaaagtccacaacaaaatgagtcatagaactttttgcgccaattcataataattacaataccgtaagctcatagaatgcttttgtctggagactcaaagtttcctacatctattcagtcatttctgtacaaatagttgtttcatttatttastggtattttcatagcaataaggaaaaggcaaaaagttatattgagaggaagtggttagaaagtgaaattattaaataagagattttggcttatttatctttctgttcacaatacttaggaagtgtctagcatatattaagttcttaaaaagcttatgctgttaaagaagatattttggaaaagagttattaaaaacctaatgtggtttactattaaacaacatgtattctgatgctagacagtagtgggtttgaaccgtaatccgactgcttactgtcttgatggt

SEQ ID NO: 502216 - DNA, 656 bp, Homo sapiens
agttggtcaattggctaggatagaagtttgttaggcaatggatctgataactttgacaggacatttttcctgggaatagtagagatttccatcacatcacatgctgtcatctgaagtatacctgcaaatacagatgggccgttaataaacttctttataggaagttattggactgtttacattcttgatttagctaaagtaccattaattttgccacctttgacctcacaataggtaaacttgaatttgaatcctggctttatcccttattagtttgtgactatagacaagttacataaatatataaagactcaattatataatgtgtaaaattatggaasgttatattcaaaagtacatggcaaatgttaaaatgatacaaggtaggcaaatcaattatttgttataaaatacatgttctataaattataacattattatcattgctattatttcaataattacatcccactacatggataaagttatactctttttgtgttaggtatcctattcttaatcagaaaaggtgctatttattccccaatttttcttccagacctctgactaaggaaaatttatacttaatctcttcaaaaggaacacatcagtttccagcaggctatgaccctggggatacatctatttttctatac

SEQ ID NO: 502217 - DNA, 586 bp, Homo sapiens
ctgttttgtcaatgacgtattgttaagtcagtgaatgtaaacggctacaaaatatgggaaaacacgaaattctrtcaattgtgactgtatcctagcctagagaatcaccattgctacagcactgagattgcatcttacttaatagtcaatgtactcttcttctttgggagccattttattcctaaaacgcatccttatttgggagtacttttcttaaataggcaaaacaatttttttttaccacctatccaaaatatggtgataagtacagcattagggaaacaagggcattctttaaactagaatgagtcacaactaagtatttcgtgcctctaaggatgattcaggatgtttagatccatagtctgaaacatgaaggtgaaagatcacttttaatctccttgctttatagggaattgtgcagatattaatcttgtcaaaaaattctagcaaggaaacaattcacacccttcttctttttgaaagtccttttgccttgtcaccctgtatcttctcaagggttttaaagcattttgacataattttgcaaactcagactcctaacagtctacacatatttacaaag

SEQ ID NO: 502218 - DNA, 453 bp, Homo sapiens
taagtggcagaggaaggggtgatttctttgcctccatgaccacaggctgcaggagcaggsggagggaaaggggattttcatctgctttggagaaaataatctttttgtgggggaccaactgcttcagaagtgaaaatgggctgttcacaggcttcattccacagggctgagaagaaaaattgaatactgatgagaaagaagatggataggagagagacatgcaactgggactctaacagaaatgccattctccctgggaagggactagcccagtcagcagccacctcactccatgagttggttctgaggcaccctctgtgccaggcagctcgggacacaaggtgaattagatccaacctcacagccatgtgaggcagacagagtgacacagactctgtcaccagaagagcaagcatttgaacgggctgtcagatggagagcccaagcactttc

SEQ ID NO: 502219 - DNA, 389 bp, Homo sapiens
ctgtcaaagcgtcagccccggccgcggccccatcgccctggaactccttccgcgccggctcggcctgggggtgccgccgccgccgcccgcacggccgcccgctctccgctcgctcgcgcgcccgcccggstccgcctgcgccgccctctgcgcctccagcaccgctgccgccgccgccgccgccgccgctggtctacttggagctcaaccgaacgtggctacccgggcgagggagcgaggcgggcggcaacgtcccgcgatggatggccgcctcggccaatcggcgcacgcgggggcgggcccgggccggctgggagggacgccctgacagcgccggccgcggcagtccccgctgcggccgcctccgcggagccgctgcctgctcctgc

SEQ ID NO: 502220 - DNA, 605 bp, Homo sapiens
catccacccttctccccactctccctggggccccatggggctgacagaatggaccgcacacaccaactctcttccctatgggttttggttgggtttggcctgtggggaggttgayggaggtcagagtaagaggggctaaagtcctctgcctcctttcctatggggtcgcatcaggctggctccctagacgcaaggtctcagctcttaagacagcccctccacatagccctctgtgtctctaggggcccagtaacagctcctcccttgtctctccagacctaggagaggcccctggccttggagtgtgcactgtgcctggtggtttccctgtccctgtaccctgtacgttgtaccatgtccactcctttgtaaacagctcctttagaaaacgccccctttgaatcaccctaatttgggcatgccttctgcttcctgctgggatgctgcctgataccttatttcttatttcttcacagcccccacatatctcatttcctccagggccttaactttggatgaagaaaaaaatctgttttccctctctctgcccctctcttacccagccctcacttcaggagtcagagcgggattttcatcttgtaggg

SEQ ID NO: 502221 - DNA, 652 bp, Homo sapiens
tcacatgaattttcaagaccttgattcaaaagtatcattgtaattaataggtgggagagttaagaaagtgacaacgggctgggcatggtggctcacgcctgtaatccagcactttggaaagccgaggcgggtggatcccttgaggtcaggagttcgagaccagcctggccaacacggtgaaaccccgcctctacaaaaaatacaaaaattagccgggcgtcatggcgcatgcctgtagtcccagctactaaggaggctgaggcaggagaatcactggaacccacgaggcagaggttgcagtgagccgagatcgcaccaacgcactccagcctgggagacagagcaagactctgtytggaaaaaaaaaaaaaaaaaaaagaagacagtgacaatggatttcctagaaatacgcaggaaactacttgacagatgcaaaaggagacaggcaggttataaactcatgtgggttcaaaagtaacttaaaatactctatcaaaattggatcacaaattcaggttagaaataaagcaattttatcacattctcagggaattttaatcatcaccttaaaataaactaataattaaaaatatgagaaatgtcttacaagaaaatctattaatatgtcaaaaattctaagtgcaatcactgt

SEQ ID NO: 502222 - DNA, 652 bp, Homo sapiens
tcacatgaattttcaagaccttgattcaaaagtatcattgtaattaataggtgggagagttaagaaagtgacaacgggctgggcatggtggctcacgcctgtaatccagcactttggaaagccgaggcgggtggatcccttgaggtcaggagttcgagaccagcctggccaacacggtgaaaccccgcctctacaaaaaatacaaaaattagccgggcgtcatggcgcatgcctgtagtcccagctactaaggaggctgaggcaggagaatcactggaacccacgaggcagaggttgcagtgagccgagatcgcaccaacgcactccagcctgggagacagagcaagactctgtttggaaaaaaaaaaaaaaaaaaaagaagacagtgacaatggatttcctagaaatacgcrggaaactacttgacagatgcaaaaggagacaggcaggttataaactcatgtgggttcaaaagtaacttaaaatactctatcaaaattggatcacaaattcaggttagaaataaagcaattttatcacattctcagggaattttaatcatcaccttaaaataaactaataattaaaaatatgagaaatgtcttacaagaaaatctattaatatgtcaaaaattctaagtgcaatcactgt

SEQ ID NO: 502223 - DNA, 298 bp, Homo sapiens
tggcattaggtgacctttattttttcttctttcttaccccactagtatcttgaggaagatgcataatatgagtaaagtgacagaagtcctagagaccaagtgggatgcccggtcccagactcagccccagatctggtgcagcaaccacacccggtctascccacatcactccctgagcagcacgtctccacagcttgacaaggaggaagtgcatccttcagtgactgtagtcagtgagtagccacatggctccagtttttgggggctcatgcattgtctaggccaagaggtggcatct

SEQ ID NO: 502224 - DNA, 585 bp, Homo sapiens
tgcccagggatgatcaggcttccctacctcctacctctcctatgtcttggtggtttgcagtaggggcygacctgctggaaaagaatcttgctgagatgcagaacctgcgccagcgcctggaggagtccatcagtctcaatgaccgcctgagggagaggctggagcatgtgcttagcaatggtgaccaaggaaaaggtagaaaggcagaaattttatgtttctgtccacgtctagggagtctcaaaagggcacatagcttcttggggcagagttttaccggtttaaagcacattggtgtgcatgatttcacttgttccttacaattagcccagatagggaagcagaagggtactattgctcccactgagtggtttgccccaagcagggataggtctaattctcaggactatctgaagtgatgtcattcttatatgtccttatactgcctggtgctgttcttgggcttgtggcctgactggcgagtggtagcaccaaggtttccatggtgcccacttcagcagaatgagagcaacgttccacctttatgccattactacatgcctttgatatcacctggctcttctc

SEQ ID NO: 502225 - DNA, 489 bp, Homo sapiens
tcagtaatttccatttctattacactgttgtttacccaaaaactatttttaatgactaagactcagagtttgccaragtgttttccacaaaacaactgttttgagatactccagatctgtaatcaagtaagtctgaaaaaccccaaatacctcactcacctcttggatacgcataaagcacactaatatataacgttctaaaaagccaatcattaaaactgttttatattgtttaagcatttcctagacatatttggctacaaatctaacatctaattaaacagtctgggaaatgccatcacataatgtaggaatattactagtcatttaagaaactagaaaatatttactatattctaggcagttggctagcagttggagttctagtctctaaacaaaatactgacttatttctgtgacttttttcttttaatgtgacatcactcttttaagcagctctgtgcttcacaatttttttttttcctggtt

SEQ ID NO: 502226 - DNA, 489 bp, Homo sapiens
tcagtaatttccatttctattacactgttgtttacccaaaaactatttttaatgactaagactcagagtttgccagagtgttttccacaaaacaactgttttgagatactccagatctgtaatcaagtaagtctgaaaaaccccaaatacctcactcacctcttggataygcataaagcacactaatatataacgttctaaaaagccaatcattaaaactgttttatattgtttaagcatttcctagacatatttggctacaaatctaacatctaattaaacagtctgggaaatgccatcacataatgtaggaatattactagtcatttaagaaactagaaaatatttactatattctaggcagttggctagcagttggagttctagtctctaaacaaaatactgacttatttctgtgacttttttcttttaatgtgacatcactcttttaagcagctctgtgcttcacaatttttttttttcctggtt

SEQ ID NO: 502227 - DNA, 489 bp, Homo sapiens
tcagtaatttccatttctattacactgttgtttacccaaaaactatttttaatgactaagactcagagtttgccagagtgttttccacaaaacaactgttttgagatactccagatctgtaatcaagtaagtctgaaaaaccccaaatacctcactcacctcttggatacgcataaagcacactaatatataacgttctaaaaagccaatcattaaaactgttttatattgtttaagcatttcctagacatatttggctacaaatctaacatctaattaaacagtytgggaaatgccatcacataatgtaggaatattactagtcatttaagaaactagaaaatatttactatattctaggcagttggctagcagttggagttctagtctctaaacaaaatactgacttatttctgtgacttttttcttttaatgtgacatcactcttttaagcagctctgtgcttcacaatttttttttttcctggtt

SEQ ID NO: 502228 - DNA, 271 bp, Homo sapiens
cctagcccttggaaaagccccatctccagtgcttggggagggagttgggttcaggtcttctaaccacagaagaacrgagaacctgaggcaggagggaatcccttcccttgctgggtctcttggcacagcccatctaggggtctgggtcagggtccaggtatcctctaccctccttgaggacctgagttttcaggtccccggggtttgtcaacgtagagtctttcccactgttcatctgggaactgtaggaatatcccatggggccctctct

SEQ ID NO: 502229 - DNA, 627 bp, Homo sapiens
ggtcagtttcaaaccaagaataaaatgggaaattaaagaactgaattggctactttctgctcaaatgattgttaaaaataaagtttaaaaaaagccccaaggactatgcagtgcagtgagcagaggctcccgatattaaaaagaaaacaaggaaaatggattcctggtgatagaagtggtgtgggggaagacaaatagtgtggctgcaaatggaacaatatgcaaaagaaaagtagctaaatatagctcttttttgggaaagagattgtgtctaagtccatcagtggaaaggcaacttaattgttgtataagtctgttcaggttgccataacaagataccatacaccaagtggcttaaactatagaartgtatttctcacacttctggaagttgggaagtccaagataaaggtggtagcaaagtggatttctttctaaggtctcttcctatggcctgtaagtggctgtagattcactgtgtgcccatgtgaccatttcttcgtgcaccagggggaaggcggacaagcaagctttctagtgtctctcttcttgtaatggcattaatctcagcatgaggacaccactctcataacctcttttaatcctgattacctctcaaaggcccca

SEQ ID NO: 502230 - DNA, 515 bp, Homo sapiens
gcagtgagcagaggctcccgatattaaaaagaaaacaaggaaaatggattcctggtgatagaagtggtgtgggggaagacaaatagtgtggctgcaaatggaacaatatgcaaaagaaaagtagctaaatatagctcttttttgggaaagagattgtgtctaagtccatcagtggaaaggcaacttaattgttgtataagtctgttcaggttgccataacaagataccatacaccaagtggcttaaactatagaagtgtatttctcacacttctggaagttgggaagtccaasataaaggtggtagcaaagtggatttctttctaaggtctcttcctatggcctgtaagtggctgtagattcactgtgtgcccatgtgaccatttcttcgtgcaccagggggaaggcggacaagcaagctttctagtgtctctcttcttgtaatggcattaatctcagcatgaggacaccactctcataacctcttttaatcctgattacctctcaaaggcccca

SEQ ID NO: 502231 - DNA, 627 bp, Homo sapiens
ggtcagtttcaaaccaagaataaaatgggaaattaaagaactgaattggctactttctgctcaaatgattgttaaaaataaagtttaaaaaaagccccaaggactatgcagtgcagtgagcagaggctcccgatattaaaaagaaaacaaggaaaatggattcctggtgatagaagtggtgtgggggaagacaaatagtgtggctgcaaatggaacaatatgcaaaagaaaagtagctaaatatagctcttttttgggaaagagattgtgtctaagtccatcagtggaaaggcaacttaattgttgtataagtctgttcaggttgccataacaagataccatacaccaagtggcttaaactatagaagtgtatttctcacacttctggaagttgggaagtccaagataaaggtggtagcaaagyggatttctttctaaggtctcttcctatggcctgtaagtggctgtagattcactgtgtgcccatgtgaccatttcttcgtgcaccagggggaaggcggacaagcaagctttctagtgtctctcttcttgtaatggcattaatctcagcatgaggacaccactctcataacctcttttaatcctgattacctctcaaaggcccca

SEQ ID NO: 502232 - DNA, 627 bp, Homo sapiens
ggtcagtttcaaaccaagaataaaatgggaaattaaagaactgaattggctactttctgctcaaatgattgttaaaaataaagtttaaaaaaagccccaaggactatgcagtgcagtgagcagaggctcccgatattaaaaagaaaacaaggaaaatggattcctggtgatagaagtggtgtgggggaagacaaatagtgtggctgcaaatggaacaatatgcaaaagaaaagtagctaaatatagctcttttttgggaaagagattgtgtctaagtccatcagtggaaaggcaacttaattgttgtataagtctgttcaggttgccataacaagataccatacaccaagtggcttaaactatagaagtgtatttctcacacttctggaagttgggaagtccaagataaaggtggtagcaaagtggattyctttctaaggtctcttcctatggcctgtaagtggctgtagattcactgtgtgcccatgtgaccatttcttcgtgcaccagggggaaggcggacaagcaagctttctagtgtctctcttcttgtaatggcattaatctcagcatgaggacaccactctcataacctcttttaatcctgattacctctcaaaggcccca

SEQ ID NO: 502233 - DNA, 570 bp, Homo sapiens
aataaagcagggagaaaatcatcactggctccgaatttsataatgacttcttgttgtatgtatgtaaatatcttctgaacaaattattgtacattttcctatctctggagaaaattaatgagttaggttaaacaatttcttaagtttaatggagcttctgttttccttggcttatgtatactagcacaggtaacttgctgaactgcagctcagaagaaaaaatctatagagaggtttagttctgaggtgaattaatggactttgttgctatgtcagaaggcgagaagcaagggaaggcaggcgggtaagagaatcgcataacgcaaaggacttcagtgcttcagaacaaaattgaagcgtttcaaaaatttgactgaagtaaagttcagtaatatttttaatcatgggaaatccttggataaatgtatatggtttgataattttggtttaaattaattatgttttttctctgattttatcacaatcttagaattaatgttagcatatttttctggtttataaaatattttaacttaccagagctttctagatgtcccctactcgatttaa

SEQ ID NO: 502234 - DNA, 610 bp, Homo sapiens
gactggataaggactataaataaatagcatatgaaagtctacaataaagcagggagaaaatcatcactggctccgaatttgataatgacttcttgttgtatgtatgtaaatatcttctgaacaaattattgtacattttcctatctctggagaaaattaatgagttaggttaaacaatttcttaagtttaatggagcttctgttttccttggcttatgtatactagcacaggtaacttgctgaactgcagctcagaagaaaaaatctatagagaggtttagttctgaggtgaattaatggactttgttgctatgtcagaaggcgagaagcaagggaaggcaggcgggtaagagaatcgcataacgcaaaggacttcagtgcttcagaacaaaattgaagcgtttyaaaaatttgactgaagtaaagttcagtaatatttttaatcatgggaaatccttggataaatgtatatggtttgataattttggtttaaattaattatgttttttctctgattttatcacaatcttagaattaatgttagcatatttttctggtttataaaatattttaacttaccagagctttctagatgtcccctactcgattt

SEQ ID NO: 502235 - DNA, 570 bp, Homo sapiens
tttggagtttactgcctcaatgttcactttcaatgaaagagcgtatttcttaacagaagaccagaaattcatgctgaaccaataaattgtcctctatagttytcatctgcaaggaggatttaaatatttctagctcagtagttcagccctgaagattatttcacccccactgctaatcccgacctaatctgtttttgtgttgttaatgctcctatatactagccaggtcagtaattctgtaacaggcttaatttcttaatattttaggccatgtgttaattttactatttcttagccattttttcctcaatagttttaaattgcatccctgcttactctcccttttactggacgggcttcctctgtttactaatacaattccccaaattgattcatccacttgttgaaatacctaattttaggccctgcactgacagcttgcctaggcttatacttgtgtttggtgttgcagtcttcagattctaaaaacaccatctagaccttacattacctccagccagggctattcccccagggcctgccttaagaagcagatttcttttcaagttt

SEQ ID NO: 502236 - DNA, 570 bp, Homo sapiens
tttggagtttactgcctcaatgttcactttcaatgaaagagcgtatttcttaacagaagaccagaaattcatgctgaaccaataaattgtcctctatagttctcatctgcaaggaggatttaaatatttctagctcagtagttcagccctgaagattatttcacccccactgctaatcccracctaatctgtttttgtgttgttaatgctcctatatactagccaggtcagtaattctgtaacaggcttaatttcttaatattttaggccatgtgttaattttactatttcttagccattttttcctcaatagttttaaattgcatccctgcttactctcccttttactggacgggcttcctctgtttactaatacaattccccaaattgattcatccacttgttgaaatacctaattttaggccctgcactgacagcttgcctaggcttatacttgtgtttggtgttgcagtcttcagattctaaaaacaccatctagaccttacattacctccagccagggctattcccccagggcctgccttaagaagcagatttcttttcaagttt

SEQ ID NO: 502237 - DNA, 616 bp, Homo sapiens
tgtatttggagtttactgcctcaatgttcactttcaatgaaagagcgtatttcttaacagaagaccagaaattcatgctgaaccaataaattgtcctctatagttctcatctgcaaggaggatttaaatatttctagctcagtagttcagccctgaagattatttcacccccactgctaatcccgacctaatctgtttttgtgttgttaatgctcctatatactagccaggtcmgtaattctgtaacaggcttaatttcttaatattttaggccatgtgttaattttactatttcttagccattttttcctcaatagttttaaattgcatccctgcttactctcccttttactggacgggcttcctctgtttactaatacaattccccaaattgattcatccacttgttgaaatacctaattttaggccctgcactgacagcttgcctaggcttatacttgtgtttggtgttgcagtcttcagattctaaaaacaccatctagaccttacattacctccagccagggctattcccccagggcctgccttaagaagcagatttcttttcaagtttcatcttcttcccatttatttcatttcatgacagttagagaag

SEQ ID NO: 502238 - DNA, 616 bp, Homo sapiens
tgtatttggagtttactgcctcaatgttcactttcaatgaaagagcgtatttcttaacagaagaccagaaattcatgctgaaccaataaattgtcctctatagttctcatctgcaaggaggatttaaatatttctagctcagtagttcagccctgaagattatttcacccccactgctaatcccgacctaatctgtttttgtgttgttaatgctcctatatactagccaggtcagtaattctgtaacaggcttaatttcttaatattttaggccatgtgttaattttactatttcttagccattttttcctcaatagttttaaattgcatccctgcttactctcccttttactggaygggcttcctctgtttactaatacaattccccaaattgattcatccacttgttgaaatacctaattttaggccctgcactgacagcttgcctaggcttatacttgtgtttggtgttgcagtcttcagattctaaaaacaccatctagaccttacattacctccagccagggctattcccccagggcctgccttaagaagcagatttcttttcaagtttcatcttcttcccatttatttcatttcatgacagttagagaag

SEQ ID NO: 502239 - DNA, 493 bp, Homo sapiens
ccatgactcccaccagcttcccagcagcaatgccttcctctttgatgcacaggaaggcccctyggctgtggaaacagccagtaagtgctcctttgataagaaaaataaagctccatcaatctctcagtagctcctacattctacatgctcaccacctctgtctaaactgagagatgttattctctgcaggcaggccctaaacattcactttaaaaaagtgattaggctgaacacagctctgggatcaactctcaagtacaggtccctggtgggtcaggtaatttgctctgttcctgtcctcacctcagtccctctggtccagaccggcatctgcaagccggtatactcaaagcaggccagaatggagagagtgaagagattatggcagactctctgccactactgccgcgcatgtacaaatctgtttaacagatcttcttctttaaaatgggacatctcatctttcctgaaatatatatattttttgagacag

SEQ ID NO: 502240 - DNA, 493 bp, Homo sapiens
ccatgactcccaccagcttcccagcagcaatgccttcctctttgatgcacaggaaggcccctcggctgtggaaacagccagtaagtgctcctttgataagaaaaataaagctccatcaatctctcagtagctcctacattctacatgctcaccacctctgtctaaactgagagatgttattctctgcaggcaggccctaaacattcactttaaaaaastgattaggctgaacacagctctgggatcaactctcaagtacaggtccctggtgggtcaggtaatttgctctgttcctgtcctcacctcagtccctctggtccagaccggcatctgcaagccggtatactcaaagcaggccagaatggagagagtgaagagattatggcagactctctgccactactgccgcgcatgtacaaatctgtttaacagatcttcttctttaaaatgggacatctcatctttcctgaaatatatatattttttgagacag

SEQ ID NO: 502241 - DNA, 572 bp, Homo sapiens
cttaccccagaatgtctatctctgtccagacgtcttcattactaggcagaattcatgctccctccaaaaatgtgctgttctctcatacttttattattaacagaaaaacctaggtaaacgttattttacccatgctaaagtattcycattttaaccaattctttcagcccaacaaaagtccctgtcttctcttgtggccttagccccttctgaactccccactttcccaaatactcctgaactttattgtctttaatcaaaattactgtacactgtactgtgaccttctttaatatttcatgaacattttcacttcagccagattgtaagttgcagaggtaacttacatgttttatgcattgttttataacctccattttatgtaatctataatcattagaataaattaaatgattagcaagacagtatccaggaaaacttgactagaatctcttagcatctagacaaaagtcagaacaacttcccaaagtctggctgaaaaggaacgtatttgatgttctaggaactgttaaccttcaaggacgtatctgtggacttcactcaggaggagt

SEQ ID NO: 502242 - DNA, 572 bp, Homo sapiens
cttaccccagaatgtctatctctgtccagacgtcttcattactaggcagaattcatgctccctccaaaaatgtgctgttctctcatacttttattattaacagaaaaacctaggtaaacgttattttacccatgctaaagtattctyattttaaccaattctttcagcccaacaaaagtccctgtcttctcttgtggccttagccccttctgaactccccactttcccaaatactcctgaactttattgtctttaatcaaaattactgtacactgtactgtgaccttctttaatatttcatgaacattttcacttcagccagattgtaagttgcagaggtaacttacatgttttatgcattgttttataacctccattttatgtaatctataatcattagaataaattaaatgattagcaagacagtatccaggaaaacttgactagaatctcttagcatctagacaaaagtcagaacaacttcccaaagtctggctgaaaaggaacgtatttgatgttctaggaactgttaaccttcaaggacgtatctgtggacttcactcaggaggagt

SEQ ID NO: 502243 - DNA, 635 bp, Homo sapiens
taaaaaaattaaaaaattagctgggcatggtgttgcatgcctgtagtcccagctacatgggaggctgaggtgggagaatcgcttgaggcgaggagtttgaggttacagtgaaccatgatcttgcctctgcattccagcctgggcaacagagtgagagaccctgtctgtaaagaataaaatgaaataaaagtaactacaccatttccccatgttttcagccatataagtaacatttgtctcttttatttttcttttctctaatttcagaatattttatggaacatgtagttattcactaataaatctagtggctcaaaactaaaagagattgagtatctgggatataactatcactatattcactgggaaaaggtttcacaagggatgtcaggtagggatttggtggggagaagaggctgttctttggcttttcatgaaaatacagttgcctgtatttctgtactgaggccttgtcagtggcttcagagtcaccccaaggctccaagtyttagccttgcattcctcagaagcaaaaagactttaagtacgctggagtgggagctgtgacagtggcttagatgattgggaattgccttttcccattttaaggccaggaagcaaacagtgtaacattt

SEQ ID NO: 502244 - DNA, 574 bp, Homo sapiens
aaatggtataaatagcaaaattcatcaaagtcaagtaattttatttctgaaatataaatgcctaaaggtagaaaggcataaccaaattcttgtccctaaaggacaaatttaattatgtgaaaaaagattagaggcatgaaatgagttcaagaaccactataaataatgtcatttgaaatatgaggtttgcattcctcccccacccaactgacttatggaacatttgaaaacatactttgacagaatatattttccayaggacaggagatacttttccccacagtatactttcaaacatcaagctccaaagtagcctactcaaatttaataaatattaagtgcaaaacactctactctgcaggaagaatgcagactaatgtctccactttcatttcttattttagtaaggaagaataagaagacattaaagacacctctccctacccttcaaggactaaaatattaggtagaaacatattttgaatcaaatattgctgtcatacagatacacatgtcatgcaatgggaataggtgagaaggaaaaagaatggcccccgaggggtcagagaagggt

SEQ ID NO: 502245 - DNA, 573 bp, Homo sapiens
atgagaaatacccacaggtgtggagaggcaggccaccccttcacatgacctctattaagataaaattagatcatctcaatggaatgttaatcataatgcaaacaccgcaaatggcgtgcaygggcagaagtcatgcaaattagggagttatggagttttactgctgtaagtaaccttgggagtattattttacagatgagaaaactgagatctgaagaaatgatcttttcaaaagtttcctgctagttaagggttcacttgtagcaggaacccagatgtaccaacacactgggacataatggaacctcagttatcccacttacaaggggtaaaaagagacagtataaaagtaagtttttataaaactaagaaaaaatacataatcttaaaatactatatcatcagctatttaaacagttttgacagtatattttcacactaccttcttggaacctatgatgacgatattttctaaaatctgatgaactctgcgctatcagtgaaatattgattaagtaataggattttatttttccaccccttcattaggtgacaagttataagaaaaatatt

SEQ ID NO: 502246 - DNA, 522 bp, Homo sapiens
gctcattgtggagttgggcataacaatgtttcctagcaaggtttttgtaagagtctcatgagataaaatacgtttgacatagaataagtgttcaataagtcacagyacattgtgatattagacttattaacagaagtcttgtatgttatgtgaacagaaatggcctagggctttactatactgtggtgtctgaagttacaagccagccctgattttttttttcagtttgatatatatttcttttcagtatttccttcctcatccagcatggaaaaaacccaaaggttgtgcccagtgtacagttatcagccctcttcctctcatggctgtgacccacactttcagcctgaacacctcctgactcttgtccctgtttgcataattgtcagtagtggtgctggtaactgcgctgttttcttcctctggggtcactactgctattgcatggctcacactgttcatctattggaccccgttgctgttgggggcactgggatcattgcctttgccacttcccacagc

SEQ ID NO: 502247 - DNA, 642 bp, Homo sapiens
atgtatggaagattgagtttgagggaaccatgcatgccagagttgagagatccagggctgactttgactgctgggctacaatagctttaaatacaccctgaggagtccaatgcaggagagtcagtgactccaatgagccctgcaccatgttgyactgaaagtgaaaatcagtggttgctggccatggtgggatcccatcgctgctggaggctgcagcccagctatcagcccaccagcctagcttgtccatcaggctgggaaaagggcctggagatggaacatgagcagttctggccatctctggtgtttagcaggagacacttcagattgttcattgctatttcccacagtaaaattttctcctgcccttttttgatttttagtgataacacagttattttggccctctaaaaaatggatcctctttccctcctaacgtgtaattttatcatttttcatacctacttccaggaatgtctattgtaggagactacctgtgcaaatatagagtagcgtcattaaccaaagcagcttttctttgagtttcttggttaaccctagatgaacactgagtatttttagagcaagctcaaataagttgatattctatgaactaatcatagagaatggctgattatacct

SEQ ID NO: 502248 - DNA, 495 bp, Homo sapiens
tgtttgttgggaaaagttggttctgggaggcaggggagttagggcctaccgggtaccttttgcctgccgggggaagaacctcaactaaagtcattgacagacccctccgccccacacccttaagaacacatgaccctgtgccatctgggtgcagtcctgacctctttcccatccctctcctccccagcatttgctactatggccggctcttctgggagtggggggatggcattcgtgtgcatgactcccagaagccccaggaccaggacaagctgtccaaggaggacgtcctctccttcatccagatgcacagggcctaagagcctcagaatgtgccacccctgcagaatgccctgtcattcctgagatggggccacctggggcccacagtgstggcttcttccccctcttgaaaagggactggggagcattgcacctggcatgaggagtgggtggcctcctctccatcccctgaagagctcaggcagggccctg

SEQ ID NO: 502249 - DNA, 629 bp, Homo sapiens
gatgggtgccagaagtgctcccagccaatgcatgtaacagggaagctaactcattttactgtgtagccccctagtgttaccaaaaaagtgagagacaccctctttagcctttggagagaaaagggggatctgttattactctgcagaattaactctgtgtaataggagtcagacgtaaacttaggacacagggcccagggcccttctttccttttttttttttttttgagacagagtcccgctctgtcatccaggctggagtgcagtggtgcgatcttggctcactgcaacctctgcaggttcaaacgattctcttgcctcagcctcctgagtagctgcgactactggtgtgcgccaccacgcccggctaatttttgtatttttagtagagaygggctttcaccatgttggccaggctggtctcgaactcctgacttcgtgatctgcccatcttggcctcccaaagtgctgggattacaggcatgagccaccgtgcccagccttttctttccctgatgttttgtgaagccatttgccatgcttagattgcagggaaggaacttaggtggtagactgggcgaagaaagcccatgggtgtccctaggtccaccccccaaccccgtcccccg

SEQ ID NO: 502250 - DNA, 603 bp, Homo sapiens
tgttttttttttcttggtaaccttactgtgaaatatctcaagaaaggtagctgattacatttcatctacaaaggacaggttggaatggtttctccacccagaattccttcctaggatttatttgagagtatttcttggtttcagtcattaggaaccacataaaaattaaattcagctatgtgtaataaaaaccaaaaatagggcggacgcagtggctcatgcctgtaatcccagaactttgggaggccgaggcaggtggatcacaaggtcaggagtttgagaccagccgagccaacatagtgaaaycctgtctctactaaaaatacaaaaaaaattagccaggcgtggtggtgggcacctgtaatcccagctactcacaaggctgaggcaggagaatcacttgaacccgggaaggtggaggttgcagtgagccgagttcacactattgcactccagcctgggcaacaagagcgagactccgtctctaaataaataaacaaataaataaataacagtgacttacacaggatgagaatttacttctccctcacataaatgcccaaaagtaggcaacccagggctagtaagatgactctgtttcac

SEQ ID NO: 502251 - DNA, 468 bp, Homo sapiens
tgtcctgccactacccatgggaccctctgtgagaggcacaggcactctgggccggagcttggggacctagcccccacccagggggtgctccagaggcttctaagagaggagaggcctttttgggaaggcacagcaccagctcaggcctcgcctcttctcctctctgtctgcctcaatattcccctgagtttctgcccaccagcgcaaacctgcctgtgacccattgctgctcatggttgttctttgagagagaaacaggcactctgggccagagccccaaccctgygggctcctctggggcctctagaaagggagaggctgccctgggaacatgcagcacccctcaggccttgccacttctttcctctacctgccttaatgtccacctgaatttctgcctgccagcacagacttgcctgcagccctgctgtcacccttgggggccgtcgaggagagacacagccaccc

SEQ ID NO: 502252 - DNA, 468 bp, Homo sapiens
tgtcctgccactacccatgggaccctctgtgagaggcacaggcactctgggccggagcttggggacctagcccccacccagggggtgctccagaggcttctaagagaggagaggcctttttgggaaggcacagcaccagctcaggcctcgcctcttctcctctctgtctgcctcaatattcccctgagtttctgcccaccagcgcaaacctgcctgtgacccattgctgctcatggttgttctttgagagagaaacaggcactctgggccagagccccaaccctgtgggctcctctggggcctctagaaagggagaggctgccckgggaacatgcagcacccctcaggccttgccacttctttcctctacctgccttaatgtccacctgaatttctgcctgccagcacagacttgcctgcagccctgctgtcacccttgggggccgtcgaggagagacacagccaccc

SEQ ID NO: 502253 - DNA, 625 bp, Homo sapiens
tgctgtcctgccactacccatgggaccctctgtgagaggcacaggcactctgggccggagcttggggacctagcccccacccagggggtgctccagaggcttctaagagaggagaggcctttttgggaaggcacagcaccagctcaggcctcgcctcttctcctctctgtctgcctcaatattcccctgagtttctgcccaccagcgcaaacctgcctgtgacccattgctgctcatggttgttctttgagagagaaacaggcactctgggccagagccccaaccctgtgggctcctctggggcctctagaaagggagaggctgccctgggaacatgcagcacccctcaggccttgccacttctttcctctacctgccttaatgtccacctgaatttctgcctgccagcacagacttgcctgcagccctgctgtcacccttgggggccgtygaggagagacacagccaccctgggccagagtctggggctctagcccccacccgggaggcatgcaagaggcttccgggaagggagaggcctccctaagaatacccagcacctgctcaggcctcagcacttatctcctctgtctgcctcaatgtccccctgagtttctgcctgcct

SEQ ID NO: 502254 - DNA, 608 bp, Homo sapiens
tgctgggcatggtggctcatgcctgcagtcccagctgagggacttactgggaggctagggtggaaagattgcctgagtcacagattttgaagctgtgttgagctatgatcatgccactgcactccagcctgggtgacagagcaagatcctgtctttaaaacaaaaaataagtaatttaagaggcattataatatttgcttctctatgtccatatcttaggtatacacgtagacattataggcagttacttttgaaatcaaagtactaattctgagcacactagatatttgttttactacccagaatggaaggtagagaagattctaaagtaagaaagattctatattccccaccaatgcagggattctgccagttgctcagtagtttttttccaattatacattttggaactgaggaaataaccacaggatgggttcagggacccactgtacccactatgggactgacctgaggtaaaactccttgatcacctgacctccactaactcctgctytgactggtgggccacagtgatgttttggatctcttggaatgtgtcagttcagggccagtaatccccaaatgtcggactgttgtttttttttttt

SEQ ID NO: 502255 - DNA, 605 bp, Homo sapiens
tttctctctgtctttcccactgtgtttaaagttcctggtgtgaggtgcaggctttagtattaaggcatgccagactttgggaagtatcatctgttgttacctgtccccacctagtgtagttatgtgtccctttgtttctaccactgctgattgatcgtggttctgtatctgttttggggtcaatacatccacatccctaatccccaaatgtgagaatgttttggtcctctggttctcacggccacttctgtgcccttcgtggaaacttaggtgcttccggctgctctctccacascacactggcatgaggatctgcaaggctgccctcagtcttccccacccagaaaatccccatggccatttctactctgtggcttgggtaccatgtaggtcaaagaacttctctataaatcgtacagactcctgggaactgtagcagtggctcccctgctctgggatttccctaaacttatttatggcttctttcatcatccttaccctagaccatagttattctgtttatccaggatcaacgtatacaagtgtaatggttttaagtgaccttaaataaatgcccctgaaaagataggccaatcagtgttcca

SEQ ID NO: 502256 - DNA, 569 bp, Homo sapiens
gagaacggagaaaccatgtggagatgcctgctggctctgccttcaggaagcagaaattagaataagcagtctaaagagtgattaatttcaaagagacaaatgtgtaagctggctgtggttatggtgactgaagaaagctatccccatatgagtgrctgaatgtcaaataaaggaaaagtgagaacgtgtcgctgtaaccggagcttccctggaatgccatgacggcttggccacacctggatgatgtcatggacgtaggtccctttcacaaaatgtagggtccagtctctaaggcagaatttgtttcctgctgtaaagaatgattcttcagaatatctcattctctttggatgggtttcatattagatcaaggaatctagatgctaacgctctcctgtagccctctgccacaagatcatatttgtttatcagctactctgatccaggcacagtgccagatataattactcaaagaagatgatgttcttgcaatatatgaatgcctccactccccagtcagagaatctattgctttgggaaggattgggatagttgcagcagaaacacaa

SEQ ID NO: 502257 - DNA, 644 bp, Homo sapiens
ttggtaagttatagttgtttcttggttttgttgaaaatggagatagtactcttattgtttattttctttgagttttgtgtgatatctaagaatggaaaggagaaaccacaatcttttactgacattttgaaactgggagtactctcctttcacaatattttgaagattcaaagcaaagacaaaataaatccaaagcaaatgaaaacaaaattttcctcggtttattacagaaaatcatattaagagttttttccttgtaaatcttcacaatactctctttattgctgcattttttatgggcctaatgttggcgtttcttctggttgctgacaggggacattttaatcagctaaattttagaatttgcatcaagaaggattggtgctatgttctaggtctccaccatctacttctrggggtctgaaaaattatctttcttaaacaaactttaagtttggtctctgtccttgttagaatgcaggtgtttagtgcaagttttctggatcttttcttgctctgtcagattctatcactaaacaaaagggtatgatgcaatttataattttttaaacagtggaattacatgaaatactatcgctttctacttgtgcttctaacagtcttcttgtctctgcctaggtttg

SEQ ID NO: 502258 - DNA, 709 bp, Homo sapiens
tccagagctcaacaatgttggtaacatatttcagactagataaactagaaaatatatttagaaagtgcaagccaagaaatttacattaatctcttccatttgattcaaaaacataaattgccactgcactatctcttagagtagaacttaattaaattattcctggtcacaaaagatctgattgaacaggaataatattcaacattttagaccttgagctgatgacatccatctggttaaaaccataacaataagctttctgataactggtaagttattcaagtgcatatctgacatgatttctgaaactgtaaaaattaaaagagcaagggaaaatccatatacataaaatgaatcatctgcaagttttygctagccttcagacacttaagtaaatataaaactcattttaagattcagagtttatgaattaaaaatgagtgagttaagaaagagccctggagatatggcttagttaggggctgggactgggaaaacataagatgagcctaaagtatcttgtagtaccaggatgaaaggaagtacttttaaaagaaggacaaaagaaaagagaaaaggaacaaagacagatgtcaaaaagatacagtagccaacatgatagagcttccagtggtcaaatctgaagaaatttgagcaataaaataaacaactatagcactgaattaaaatccagtgaatttaaaacaat

SEQ ID NO: 502259 - DNA, 591 bp, Homo sapiens
tctcttctccagtgcccgctgctcagacctccaggggagcatacagatggtcaggctgtgaggctctgatcccasagcagtgtctgggggtgaatgtttacagctcctgaagccccagtgggtgtgttcctctgctgatgtgctctctctcaacgtccagcagcttctgtccctgccttgctagggtctcaggtttttataggcagaggatggggcatggcaggccagagtggtcttgggaaatgcaacatttggacaggaaatgcctgttctcacctaggtccgtgggggtggagccctagccagggaccataccctcctctacccagcacttctgttccctgcttccctatcatttaaagggaccacactcttgccttcctagcactcacgtaccattttcaagcagagaaaagaacaagtagctacactaggatttgcctgacttccagaaggaaagagattcatctttccttggcaattgacatagaccaaaagtaagggaaaagtctggggtctacttgtcttagtatctcaaggcagcctccaagagaaacagatcatagaagaaagaggctgctagtattccag

SEQ ID NO: 502260 - DNA, 591 bp, Homo sapiens
tctcttctccagtgcccgctgctcagacctccaggggagcatacagatggtcaggctgtgaggctctgatcccagagcagtgtctgggggtgaatgtttacagctcctgaagccccagtgggtgtgttcctctgctgatgtgctctctctcaacgtccagcagcttctgtccctgccttgctagggtctcaggtttttataggcagaggatggggcatggcaggccagagtggtcttgggaaatgcaacatttggacaggraatgcctgttctcacctaggtccgtgggggtggagccctagccagggaccataccctcctctacccagcacttctgttccctgcttccctatcatttaaagggaccacactcttgccttcctagcactcacgtaccattttcaagcagagaaaagaacaagtagctacactaggatttgcctgacttccagaaggaaagagattcatctttccttggcaattgacatagaccaaaagtaagggaaaagtctggggtctacttgtcttagtatctcaaggcagcctccaagagaaacagatcatagaagaaagaggctgctagtattccag

SEQ ID NO: 502261 - DNA, 591 bp, Homo sapiens
tctcttctccagtgcccgctgctcagacctccaggggagcatacagatggtcaggctgtgaggctctgatcccagagcagtgtctgggggtgaatgtttacagctcctgaagccccagtgggtgtgttcctctgctgatgtgctctctctcaacgtccagcagcttctgtccctgccttgctagggtctcaggtttttataggcagaggatggggcatggcaggccagagtggtcttgggaaatgcaacatttggacaggaaatgcctgttctcacctaggtccgtggggrtggagccctagccagggaccataccctcctctacccagcacttctgttccctgcttccctatcatttaaagggaccacactcttgccttcctagcactcacgtaccattttcaagcagagaaaagaacaagtagctacactaggatttgcctgacttccagaaggaaagagattcatctttccttggcaattgacatagaccaaaagtaagggaaaagtctggggtctacttgtcttagtatctcaaggcagcctccaagagaaacagatcatagaagaaagaggctgctagtattccag

SEQ ID NO: 502262 - DNA, 591 bp, Homo sapiens
tctcttctccagtgcccgctgctcagacctccaggggagcatacagatggtcaggctgtgaggctctgatcccagagcagtgtctgggggtgaatgtttacagctcctgaagccccagtgggtgtgttcctctgctgatgtgctctctctcaacgtccagcagcttctgtccctgccttgctagggtctcaggtttttataggcagaggatggggcatggcaggccagagtggtcttgggaaatgcaacatttggacaggaaatgcctgttctcacctaggtccgtgggggtggagccctagccagggaccataccctcctctacccagcacttctgttccctgcttccctatcatttaaagggaccacactcttgccttcctarcactcacgtaccattttcaagcagagaaaagaacaagtagctacactaggatttgcctgacttccagaaggaaagagattcatctttccttggcaattgacatagaccaaaagtaagggaaaagtctggggtctacttgtcttagtatctcaaggcagcctccaagagaaacagatcatagaagaaagaggctgctagtattccag

SEQ ID NO: 502263 - DNA, 568 bp, Homo sapiens
gacttccctccctaatattcatgctattttgtacttttcaaggtccacagatggctgccttttatattctgcctgatgtttcccattataattagtgtaagacacagactatagtgggcttattccaacttggccgtcacagaaagatcctcttcagctttgttgttgaaggatgttttwctgattttagaattctaggtttgcgttaggggtagaagttttcttagcgtattttaaggtttcattccattttcctccagattccaaagtttctattgaaagtcagccttaaccttttttgttctttttttccaaagacaagacactttcgtctctggctgatttaaacattttctctttatctttgtttttgggcaatttattatttttttttacatatggttttatttcactagtctatgattgaggttgataagtttcttgtatctgtgttttgacatctttatttcagttttggaaaattttctgccattatctttttgttttctctgctgcactctttatcctttatttttatgtacaattgtaagtatatttgaccattaga

SEQ ID NO: 502264 - DNA, 568 bp, Homo sapiens
gacttccctccctaatattcatgctattttgtacttttcaaggtccacagatggctgccttttatattctgcctgatgtttcccattataattagtgtaagacacagactatagtgggcttattccaacttggccgtcacagaaagatcctcttcagctttgttgttgaaggatgttttactgattttagaattctaggtttgcgttaggggtagaagttttcttagcgtattttaaggtttcattccattttcctccagattccaaagtttctattgaaagtcagccttaaccttttttgttctttttttccaaagacaagacactttcgtctctggctgatttaaacattttctctttatctttgkttttgggcaatttattatttttttttacatatggttttatttcactagtctatgattgaggttgataagtttcttgtatctgtgttttgacatctttatttcagttttggaaaattttctgccattatctttttgttttctctgctgcactctttatcctttatttttatgtacaattgtaagtatatttgaccattaga

SEQ ID NO: 502265 - DNA, 554 bp, Homo sapiens
ggtgtgcagatttgtcacttttactccagagcaaaccattccatcagtccctagggcctgggcttctccagaaggctggagccagggcctggcaccatggacatctctcaggggtgagcttggcccaggttgctggggtgcctggaggaactgctccggtccttttctcagctagaattccccaattctgcaccactctagtataaggggccttcttggggggtctgctttctgatattggtcttccccatctcagcaaagggcaccgtgactacccagacctgaggcctcctgaaaccacctctcccctctcatttcactcttcaggaggtctggtggattctccctgcaccacagctcctgagtcacatgcatctcccatccccactgccacctcctattcccagtcatctccagttctccctacagtggccacctaactggcccctgtctgcctactctctggctctgaacctggaaattggatcccatttctctccttaaaacctcctgtgccaaagatggcygaataggaacagctccagtctacagct

SEQ ID NO: 502266 - DNA, 626 bp, Homo sapiens
tgcctcacagacagaatgtaaattctgtagaaatcaagagtattcagagagacatatgtctttataccagaaagaacttaccagaaaagacaaaaagtttttttcatcatcccaggtgggatgcatagtcctttattaaggtggccttattcaaatcaaatcctgagtaaattcaagagcttccaccaaaaagagggaggctcggcttgggagatgactcaccagggcaggaaaggttagctgtagaagtcgggggctcaaagggctcaagtgagtactgcacactgattgccaatttattttgatagtgatattttttcaggtcccatttctgacactgtgtttgttaaactaaatcatagagagaggctctctaaaaagaaaatgatgtttatttgagaatagagcattgcagtgggaatatgcatgcaactgtaaactgtgcgtatgctcagaaaggtaaaggaaaacaaaggtttttaaagaaaaatgaaaaggattacctaatttttaaaracaattatccttgactacaaatatcaataacaagggtgattccagttcaagccttgacaggcagttgttgggcaaatgttcttgaataagtattttttgtgtaaggttgc

SEQ ID NO: 502267 - DNA, 568 bp, Homo sapiens
cctgctgcaacagtaacaggctgtggcccacaggctaacatgcaaactcttcacccaacattccaggcccctcctgctctgatgcctgcagctcccagccttctgtgctgcttcctcctcccacacaccaacacacagcctcccaaatatctcccagatccctgaccacagggcacttgctcccctgcacctgggcctctgcacagcccctcattctttaatcaatggcctccccctcctccactaggccctcagcccttgacatcttccccgttctttgtctgctctgaggtccctgagggtggggcctgcatctggttttctttaccactgaattctgttacctgagcggagcctggcacacagcaagggctcactaaacacctgcttactggatgcataaaggagagctactgtttagtaggcacccactgtgtgccagccactgtgccaagcactgaactgcatcaactaatccgaccccctaaatcccaacctgatcctcatcttggggataagaaaccaagactcagtgaggtaacygactgtcccagagtcccacagccag

SEQ ID NO: 502268 - DNA, 421 bp, Homo sapiens
gaatggagatcctctcatcaaaaggagaagcctggcatattttagtgcccactctgtgctggctccaagcttggccctcaatttacatcactgcattcaacctacaacagccttgcaggggtatcatgttccagtttcatagaagaggaaaccaagggtcagagaagagcagtagcctcactgagcctacacagcaggcaggttagagccttggcatcctccagcttaagggacaggtgttcttcccaccctgtgtgtgtgggacggataaatgagaggagaaaattggyctttcctcaaataaatggaaacattcttttcaacgcttccctgtgcctgaggaacattttaaacactgcacagtctcaatcattcgtctcaccccccaaccttccatccactcagctacaaccattgccca

SEQ ID NO: 502269 - DNA, 578 bp, Homo sapiens
agctgcacagtcgggctctcaaccatgaacctgaggagtgagaatgtgggcaaggagctctggggagcccacagccagtctggcacagtgcaccatcctggccccatgtccctggtgtgaggtgacaagctggggcagggctgtcatgtgtggtaccagtaattgacaaggacagagcactcaggtctctctaaggggaaggagytgctcaagggcataatctcaggctggggaggcattgattcaggaactggctgcacccagaattcaaacccagacctgcccgatgtcaatgtcctagggcttttgatggtcctgtttccccctgtaactgctgggcctcctcagcactcctgagactgtttatcagatacaccattacccagtgtgagcatttacgcaatgttaattagtcccaatgaggatcagtaagtgattaggagcagagtttgtcaactgcagcccgagtttcctcctcttggcttcctcctgggatcctgggcagtggctcagcagaagggggagccaggccccccagcccattagagaactgctctggtgtctgggaaatgtggccc

SEQ ID NO: 502270 - DNA, 612 bp, Homo sapiens
ctgcgtaccatagttgagccaagaagcctatggcttggtggttactactcagaaagttttttgttttttctaagttaggtggtaaaaggccaccaaaaggtaattcaaaatatcctgactagtcagtgtatcttacctaggtgcctatatttcttgttagtgctctccagtcagcttaatatatgatcattcctttggaatgttaatatatatttctattttcatttaatactgattaaatcccttctgtttttgaaaagtattctgtcagaaagatgtaactggaatcacaagtctagactaaattggttgaggaacactgtatgccaagtggtttttgttttgttttgagacagggtcttgctctgtcacccaggctgaagtttagtggcacaatctcggtttactgctacctcccacctcagcctccagagtagctgggaccacaggcatgtgccaccaagcctggctaatcttcatatttttagtagagactgggttttgccatgttgccyaggctggtcttgaactcctggactcaagggatccactgcctcagtctcccaaagtgctgagattacaggcatgagccagtgcaccaagccccaagtg

SEQ ID NO: 502271 - DNA, 663 bp, Homo sapiens
ttaaattattcatttcaggcagcagtattaaaatgttatawttttttttattacaaagacaatacattcttttagagacactttaaaaattatagataaacaaaattttggggaaaagtcacaaaaattaacagtaagtacaagcgtatgatgtaatcagtgttatcctttggtaattaaacttctgaatttttatgtatatatatttttttctaaggcagaaacataatgtaaataattttttataattgtttttaaacaactgaaaacattattaacttttgagataataaatatctttctatagtgttttttggcagcctagttcctcttcattcatttgttcatatattcagcagatattgttttagagttgcgtaattcccaaattctattctaagtattgcagatataatgacccagtctctgtcattataggctttatatgtaatgacttctcagtattaacaaaggaatattaacaagtgtgctgagtactaagaagagcacagtgctaagagggtatagagcataccctattcctggatcaggaaagagaaacctggaattatatttccttcggtcaaattctttgacatttactttgttttcaatgtttcactaattttttttaaaaaagcatgccagggtgcctccttacag

SEQ ID NO: 502272 - DNA, 617 bp, Homo sapiens
gggggaaaggagtgctagaggcaggagaattctgatgtaaaggggtgatgaggcaggtctggcccagatgacatctgagtagagattaactgagggaattggccttgtgatcaaggaaaagagcattccaagtagagggaactctacttttgttttttactctttatgttgacaaaatattaccttttataatggtgtttcctttttatagttgaagctagggtcagaaccttcaatctgaagcttcagagcttgtttaaggcttaattctgtctctgaggaagggtatccctccaacacttcctgatgccctctatcttgcattgttcgtgggactgaaaccctaccaagaaaaacctggttgctctgaagatgataatttggatttgtcattattccatttctcttcttctgttccccactttgttggtgaataagaaactgctgttgagatcgaccaatttcctgctgagctgaaggtatcataattttgcattgagattctgctggcatttgtttaggyggtgcagcagtcccggatttggctataggtcctcttctatcaaactgagtcatttcatattctaaaacctttggctgtgaagaattactttgtt

SEQ ID NO: 502273 - DNA, 365 bp, Homo sapiens
attattaacatagtatggcagaatattagtatcttaagaggtggtcaactactaatccttctagagaggtgaagtttaatactgggtgtggtacagaacaaccgggagctggcttcatgtctctaatttttattctgtgataacatatcagagaagtcctttaactttttcgaattccagttctttcaagcatttatttagtagagccaacacmtgctttttatgctcctcctaggacacttagttaatacaataaaacaatacaataacaaaagaaacaaaacccttctgtgtctctccttagaagaaaaagaagttatttcagaatgtttaaaagaaattcatttaggatttcttttttaaaa

SEQ ID NO: 502274 - DNA, 486 bp, Homo sapiens
tgtcaaggaacttcactgtggcagacagtggtgattaggattctcttccccactgtaactcactagctcgctatggtcaaacagctagtcattcattccctggcctttggtgtcagaacagtgtccagccttccttgcctcttaaagtctatggacagtctgcttcaccagcaccacccccatgtcctggactagccatggctctgagcagagccagagcaaaacaccactggccggcaaaggggtgtgggagcatgtgggagtcatgcccagcctgggctgctggtcaraagtctgtgcttagaagaatagttttctccttgttatgggctgaattgtgtcatcactaccttttccgcccccaagaaaaagatgctgaagttctaacccccaggacctcagaatgtaacctttcttggagactggatctttatagaggtaatcaagttaaaatgagatggttagggtgaactctcttctaataca

SEQ ID NO: 502275 - DNA, 470 bp, Homo sapiens
gcaggtggttcccaggatgaacacaaaggcatggcctggataattgaattcagggaccccggyaaggtgccaccagtttcccggccaccctatgctgttattttactagaatgtttgttatatcaattgtcttctctttgttaatagcatccttctgaagcagtattattccctgtccctatcccctaccccagccactctctcaacacacaaacgcgtacacacacacactcacacacacacacactcacactcacacttgatgtaattactcctattcagtgttcagattcagcttaaacccagtttcttcaaataacccctttcttatcatcaacactcccctaaaacaattcctcctgttctgtggtctctcacaccatctgtctttccttctcaacactatcccagtttgcaagcatccattgaactgtggccgtctgatgagtctttgaccaccttgatgttgg

SEQ ID NO: 502276 - DNA, 470 bp, Homo sapiens
gcaggtggttcccaggatgaacacaaaggcatggcctggataattgaattcagggaccccggcaaggtgccaccagtttcccggccaccctatgctgttattttactagaatgtttgttatatcaaytgtcttctctttgttaatagcatccttctgaagcagtattattccctgtccctatcccctaccccagccactctctcaacacacaaacgcgtacacacacacactcacacacacacacactcacactcacacttgatgtaattactcctattcagtgttcagattcagcttaaacccagtttcttcaaataacccctttcttatcatcaacactcccctaaaacaattcctcctgttctgtggtctctcacaccatctgtctttccttctcaacactatcccagtttgcaagcatccattgaactgtggccgtctgatgagtctttgaccaccttgatgttgg

SEQ ID NO: 502277 - DNA, 470 bp, Homo sapiens
gcaggtggttcccaggatgaacacaaaggcatggcctggataattgaattcagggaccccggcaaggtgccaccagtttcccggccaccctatgctgttattttactagaatgtttgttatatcaattgtcttctctttgttaatagcatccttctgaagcagtattattccctgtccctatcccctaccccagccactctctcaacacacaaacgcgtacacacacacactcacacacacacacactcacactcacacttgatgtaattactcctattcagtgttcagattcagcttaaacscagtttcttcaaataacccctttcttatcatcaacactcccctaaaacaattcctcctgttctgtggtctctcacaccatctgtctttccttctcaacactatcccagtttgcaagcatccattgaactgtggccgtctgatgagtctttgaccaccttgatgttgg

SEQ ID NO: 502278 - DNA, 481 bp, Homo sapiens
ttcttcatcactctcaagggatttagggacaagaactaagacaaacatactaatactcaagctacttgctgtgctatgagtaataaagtcctttgtctctgatccaagagtcttctgtcttctatgcgcatcaaagaaacagaaatacattaacattttagctcataactatagggcaaacttatgtatcagacccattcttatgatgagaatgggattctgacataactaacttttcagaagagaaagtacaatcaaggttcagggttaaaacaagagtccctaagatctgatagagaatatttttacccagttggtggtcaaaggtgaagacaataaggtttcccacttttctaactcttaatgggactgaggagcaacaagtaagamagaccgaaacaggctgtcttggttgttgcttactgtcttctgagcatgaggagagatattatgattgtgggacagcaatcaatgtgacccc

SEQ ID NO: 502279 - DNA, 586 bp, Homo sapiens
agtaggatggagtgattcaaagtgttatttattatttaagggatgtatcgggcaagtaaaaaaattaccaatatgtatattttcagatgatcaaatgaaaaataaataccaagctgaactgtttgatagtctaagaagcagtttataatgagtatatgacaaggttgtagactttacttctgctttatatcactaaagtccatgtagcatgaccttaaattctgtggaaaggtttgtagctctttcagctacgcttgtctcaacttgatcatgccstgagaaagggaattaacttgtttagtatctttataaaattgccatacatttctgtatttttgatcagtggtgtcacaatgatagtttataggatactttcatgtatgcataatcctaaggattattgtcctgatttaatgacttgatgaagaacatacatctattgaataacagagttgggccgggagcagtggctcatgcctgtaatcccagcactttgggaggttgaggcaggcagatcacctgaggtcaggagttctagaccagtctggcgaacatggtgaggccccgtctctactaaaaatataaa

SEQ ID NO: 502280 - DNA, 589 bp, Homo sapiens
ctggtggctagatgtattttgaaataattccaatacatttaggtaccttacatgttcaagttacttgcaagactggtcagggtacatcataatcattccttatgccatttgtataggaaatgtcttccaagatatagagcaactcacttacaaatgatttttggaatggtactcactcatcgcttgagaagrgtctatttagataataaccgaatggcttggaacaaaagaaatgattcaggatgcttccctgctggcaaagagttatactaatatatctcaatcattcttcttcatttgaaatgttctaatttcctttgaggaaaactttgacatagtttctttctttctcctttagttctaaatatgtaccaagtttgttttaaaaaatttaatgacaggtaagcaaagtgagagacaaagcaagttgtatcattgagatgaattttcatagtgcagggggctctgccctagagacatctcactgggcaagtgtctgggcttgatcctcttcatgtattagctgaatcatacaaacattacattttaaaagtcaaaactgatcaaatattggtcattttattcattt

SEQ ID NO: 502281 - DNA, 609 bp, Homo sapiens
taagtgagccctgagaattgtgccttctcttctcttactgctcacgtatgcggtctctttcttgggcccatttttcaccactgttagttgacacagacgtctgcaggatcaaaggtagaagcagagacaccctggagcacagtcactttctctacattagccaaatgcagtcatgatgcctccacccaggtgtgggcctgggtctcaggtgctgagtggaattgagggtgcccgtcttggggaagtaatcaaaggcagcctcataccagggtgcacgacagcaccaggagcctttcacagtgtctrgtgagcactgcagccaggtactcatactggtcagcagacctaccctcatggtccctgggcttacttactttgtcacctgtcacctgccaggtttcattttttgtcatcaaacccgattccaatgttgagtatttatttttttctttttaagaagaaaaatgcctggcaagcaattctgtacagatttttctttttcatgttatttcagcatatctaagacaaagctggaacggactcaggtgggaaattgacatgacagctcagctcacactccacctcccgtgatgggcccaggctactgtg

SEQ ID NO: 502282 - DNA, 553 bp, Homo sapiens
ctccacaaagccctcgtggtcttctcctgtcctttcccctccaaggttcagcctggcaccctccttggtgccctactgtgctgtgcttatcattgtgctaacctcggtgtacagccaatttctactcactcatctgtctccccaactagactaaattcttaggcagcaaagaacccttgccctggggtcctacagacctggatgcaactcctgccastcaggagtttcaccaaggtgctgaacctttcgagatttagactcttcacttacacaaagaggataatagtactcactgcacaaattgacacaattgatacacccaacaaatgttcactgagcgctggccacaggcaggcactacgttagtcactggattcaggagtgtgcaaagtagacacagagtttgccctccgcgactttagtctactgcaagtttgggagacaaaacacaaatacagtagttcagcagatggttaagtttgggggaaaaaattaaacaggaaagggagatggggaaaggtgaggcagatcactctgtattgggggggggtca

SEQ ID NO: 502283 - DNA, 553 bp, Homo sapiens
ctccacaaagccctcgtggtcttctcctgtcctttcccctccaaggttcagcctggcaccctccttggtgccctactgtgctgtgcttatcattgtgctaacctcggtgtacagccaatttctactcactcatctgtctccccaactagactaaattcttaggcagcaaagaacccttgccctggggtcctacagacctggatgcaactcctgccactcaggagtttcaccaaggtgctgaacctttcgagatttagactcttcacttacacaaagaggataatagtactcactgcacaaatygacacaattgatacacccaacaaatgttcactgagcgctggccacaggcaggcactacgttagtcactggattcaggagtgtgcaaagtagacacagagtttgccctccgcgactttagtctactgcaagtttgggagacaaaacacaaatacagtagttcagcagatggttaagtttgggggaaaaaattaaacaggaaagggagatggggaaaggtgaggcagatcactctgtattgggggggggtca

SEQ ID NO: 502284 - DNA, 463 bp, Homo sapiens
ctccagcatgctgcaaaggaggcttaagaatggaatgaaatctggattctattaggaaagaagaaagtgtggcagagatggatgtgaattggcaatcaatttctgttactcccatcattcacccttcattccttcccttcttccttcattcaagaagcaggaccgtgaacctactgtcagtctttgtggagaaaacaattgcacaaaactggattccagccctccaggagctcatggtccatccatatttacataagaataytccattttccttggtatccaaagtagcactggacagcccaggtggtctaaacagcaaagagtaatttagagtgcctttaattactgcaccttaaaatgcaccagtgtcctagttcccatcttcatgatcactgccagccaggaggttgctggatctcaatcggccaaagtggcagaaggtgcccttcaccaggtccctgtt

SEQ ID NO: 502285 - DNA, 680 bp, Homo sapiens
cacatatactagtggcagcacacagggtgggtctatacccaaaccactgcacagtggrtgcaggcccacgcactgactttttcatgagcactcagtagagtccacagataggagttggtgaatgaatattaactcccttttggtgccctcactattctagactggcacactaacccacacttagcctttggaagctcctttaaaatgtgattggtttcttcttccccacttgtattgtggcctacagctttttctcatgtggtttgctacaggtgagagagtttatgtcttttatctctccttagaagggtttatctctctttcaaactcagataactctattttcctcagttttctgattggttcaataaagttatgattttgcttttttctggacttttctcattgttgtgatgagaacaatagtctttgcagctttttaacacaaagcagaagtgaaaattcatgcttaatttttaaaatttctatgataatgatgacatcgaactattagtaagtgtatctcaaggtaaaaggtgttcttaggttgagtttcctaattaattaatattctagatcatttaaaattttggacaagttcttgttagatctgtttagacaaacattgctttttattgaaatatggctgaaatgttcattattaagagtggagagaatgt

SEQ ID NO: 502286 - DNA, 610 bp, Homo sapiens
ccacagaaccacagaagcccaagcagaaatggatatcgccatggcctcttctccctccatatcactccctgctgcatgaatttgtccttgcttagcttgcttaccttaaaaaacaaatatttacttagttattaaaatgaggcaagtactatacaaggcatcaaagttaatgaaaataagatgtaattcttgcctttaaggaacttagtcttatgagagagacattgacataaagtgaatatttaaaatgtcatgcactaagtaccaacatagagtttacacaacacattataggagatcagaggagggataagtaatccagttctgggggaaagggaggtgggatgaagagaaattgtgcaatagagataatttcttagagaaaggtacaagaaagctgagtcttcagggttgagtaagagttatttaggtaatgagggaataagagagctacttgaagcagaagaaaaataaatgctactagattaagaagtattaataaaaggcaggtagtagagaaaaattrgtctagagagttaagcagggacctgtgcattgaagtatcttttaacaacatgttaaaacaactgtagtgatttagctgagagat

SEQ ID NO: 502287 - DNA, 587 bp, Homo sapiens
tgtcactcagtattccctagttatataactcttccatgtaagaaatagcatcagcaacagcaacaaaaacagtaacrtcactgacattttcattaaatatgagcactcaggaatgaacctgttgaattaaatgaatgcactattatctaagcttagtgcctcttggacaacatgtaaaattggactcttagcaagcaatacactctactatctaaattcaaatataattaacggttagttttcctcatatttcatatctctctaccttaacttcctgaattttacacctaactctatttatactcttttgttttattgctaaggtttgagacatggaaatggccaatttctccatattaaatgtagatctttttaaatatgtttttcacccacttaacaatctttttgaatgaccgttgttggtttggaagaccagatgatgtccacctcactgctaactccattttctttttacttctcttccctttgtcttttgctccttcttcccaggcatctacccacaaaatctcctgactcccttgttatttgtttcttcccgtcatatttgctatgtttatatcaactta

SEQ ID NO: 502288 - DNA, 534 bp, Homo sapiens
agctgcgtttccttccacaatccatccagcaggtgagcgaggtgaccctgtttcagtgaggctgaagtcactgagaacagggaaccttcagatacagcagagacccctggtatcgtggggagtgagagacccatttcccagcacattctatcagggtggcttttagtgcccaactccagcctctactagacaaatggcctttaaggcccccattttttttttattttttattttaagacagagttttgctcttgttgcccaggctggagtgcaatggcgccatctcrgctcactgcaacctccacctcccgggttcaagcaattctcctgcctcagcctcctgagtagctgggattacaggcacgtgctaccacgcccggctaatttttgtgtttttaatagagacaggatttcaccatcttgaccaggctggtctcaaactcctgacctcatgatccacccgcctcggcctcccaaagtgttaggattacaggcatgagccaccgcacccagccaggccccccattctgacca

SEQ ID NO: 502289 - DNA, 583 bp, Homo sapiens
ctggcctactgggcttttcactgttctgactgggcagcccaacatcctattgccctgatagaatagaactcctcatatctgccttgctttctaccaggctctggagccacttattagctctgttttaagaaaattattgatattctgtgtctcagttttctcaagcatgaaatggagataaaaattgtacttcccttaaattgtggttataaggattaaaagaataaatacatgtaaaatgctgaaatcaatatttagcccacagtactcttaaatgttagtgattagtaatatccatagcaagcctcttgcttcaagccctcttgggaacttcctaagctgcaaatatgtgagtaatatcacagcctgtatggcagatgaaagcataatctttggaaagttgtgtgccttgacctgaaaatacttggactgaccatcactgycatcgcaaaccataagcaactgagcacttattgaatatgattttctcaacctgcagctatacttgaagtctgtaggggctgaaacttaccgttatttccaacgctgtttgtagttctaccacaaagcctggcctgttgta

SEQ ID NO: 502290 - DNA, 458 bp, Homo sapiens
ccaataaccaaagtaacctgttgttgtgcttttagcaacacattctctttccttgctgttttggcattattttatactttggttcaatggtctctgtcgtaataaaaaaaaaatctgcttgtttcacacgttgggtgggtagcttacaagaactcatgtggaaagggctatacagacagttcagggagacagtagttaaactacctaaggcagatggtggtagattccatttttaaaggtttctgtggacagatatccaaacctcccttgccaaacacttcttccccttttttttttttttttgagatggagtctcattctgttgcctaggctaaagggcagtgcatagtcttggctcactgcaacctccacctcccgggttcaagcaattctcctggctcaaccttctaagtagctgggattacaggcgcacrccatcacgcccagtatttttgtag

SEQ ID NO: 502291 - DNA, 586 bp, Homo sapiens
ctgtggggaaggtggtgtggccattttgcagagcggcaaaccaagactcatgcagaagtggtgtctgcaggagttcagatcctctgcacacgcagctcaatcaggctgacccatcaactacgaccttaacttagaagtgccccagcccctgctgtgtrtaggactctggggacccgagcctaattcctggaggaggtcacagtccagggagggcaaacattgacccaagggtgtgggagtagaagcagagccctgaagctgggaaggatttccaagaggaggacatttggcccgactcctaataaataggagttccccagcagagaagggatgggggtggcactccgaggctgcaggaaccgcacttaggtaggcctgggtttctgaagaggcagttgcttaaggaggtgaacaattccctgaggccggcaaggaggcagccaggagcacaccgtgaggggccttgtgtcagggagggcacttcaggtccagtcataagatgaatcactctgcaggagatcaggagagagattctgtgcagggaaaatgcatgatggaaacaggagatgcactaacaaaggtcagc

SEQ ID NO: 502292 - DNA, 586 bp, Homo sapiens
ctgtggggaaggtggtgtggccattttgcagagcggcaaaccaagactcatgcagaagtggtgtctgcaggagttcagatcctctgcacacgcagctcaatcaggctgacccatcaactacgaccttaacttagaagtgccccagcccctgctgtgtgtaggactctggggacccsagcctaattcctggaggaggtcacagtccagggagggcaaacattgacccaagggtgtgggagtagaagcagagccctgaagctgggaaggatttccaagaggaggacatttggcccgactcctaataaataggagttccccagcagagaagggatgggggtggcactccgaggctgcaggaaccgcacttaggtaggcctgggtttctgaagaggcagttgcttaaggaggtgaacaattccctgaggccggcaaggaggcagccaggagcacaccgtgaggggccttgtgtcagggagggcacttcaggtccagtcataagatgaatcactctgcaggagatcaggagagagattctgtgcagggaaaatgcatgatggaaacaggagatgcactaacaaaggtcagc

SEQ ID NO: 502293 - DNA, 654 bp, Homo sapiens
agaattaacaattctgttagttctgtctatgtacttcctccatgtgtaatcttttcctcttctggtcgtttatctataaacctttttttggtctctagctactgcccaccacacacagtcatattaaattttcaatggaaaaagataaaacacatttcctcaaaggtctaaagtcatcaggaaggagtgggcaggtgtgtcttcaaatcattacattcatacatttgggaaagcatagargggagaaggaagaggaaaatcatgtaaaaaaaaaaaaaaaactgctctaaaggtgatcctactgagtaaggagctgtgtcgaaaactagaagcactataccaaaggccatagtggcaattcgcccaagggaaaatggtgggaaggaggcactgcagcagaaaacagcttgggaagtattgaaaactgctatctacttgatatttgagaaacctcacatttgggtagtttagtgcaacgtagctaaatgtttaaactaaacctcacagtggtcagaggaataaaaacaagatgataaaacctttttctaagagtaggcataagaggtgataaaactgtttcctaagagtagacataagaataactttatttggccagcactttgggaggcagagatgggcagatcacttgatgtc

SEQ ID NO: 502294 - DNA, 528 bp, Homo sapiens
tattaaaacagtgatgtttggttccaccctasagtttcggattcaatttggtccgaggtagagggaggggtttcatcaggcgatgctgatgctgttggtctgattaccctgtgataattgccagtgtctaccaaatagtttagcatgaaatttggtataatcttgaattatttgtcacatgcaaatcagtatattttgagtacctactacgtgtaaggcctgtgctacctgacattagagatcattagctgtattttaaggacatactgcttattttttatatcctttatcatgttagtagataattggttcatacttattaattggtgttaatcaatacaactgacttctgttttgtctttccttaaaacaatgaaggattgttagaattaacatagatcatatgcaaacatgaggatttaggtggattgtgaaaatctgtgatggagtcttttgacctctctgattgtcttgtgggaatagacaatcttattctgaagcgatttaataaacatggcatgtgaattg

SEQ ID NO: 502295 - DNA, 639 bp, Homo sapiens
ccagtatattgggtcaaagtgtttaggaaccactgaagcccacactacttccctagtcactttctctctttttgctagaaactctagatttatacttcttgctccttctacaccaagacacatcagtttaaccatctggtcattctggaattttctgttacagcaattagatgtattgttggctactcagtcccacaggtatactgccctcatgatcttgycttgaagatgacttttctgcttcatgcataccgaaagttcatcttcttactcatatagaatatattagcccctcgtgtttgctcacctagaatgtgtggtttgttaagaaacacatctttcagccaaatgacttcagtaaaatgactgagggcatttaagcatgtggaagctcaaggagagggttgggcaggaatcgtcagtggtaacaggtgtggagggtgcataaaagcatctcctgctggcactagagacagtgagcactatctatccttccaaatgaccattggtacctattggaagcaggctattttcctatgggttttgctctcatgattgaccatagcattttgtcagttgccttctgaggtccaggcagactcatgcactctcccatggtgctaatgctcctggaaggca

SEQ ID NO: 502296 - DNA, 639 bp, Homo sapiens
ccagtatattgggtcaaagtgtttaggaaccactgaagcccacactacttccctagtcactttctctctttttgctagaaactctagatttatacttcttgctccttctacaccaagacacatcagtttaaccatctggtcattctggaattttctgttacagcaattagatgtattgttggctactcagtcccacaggtatactgccctcatgatcttgccttgaasatgacttttctgcttcatgcataccgaaagttcatcttcttactcatatagaatatattagcccctcgtgtttgctcacctagaatgtgtggtttgttaagaaacacatctttcagccaaatgacttcagtaaaatgactgagggcatttaagcatgtggaagctcaaggagagggttgggcaggaatcgtcagtggtaacaggtgtggagggtgcataaaagcatctcctgctggcactagagacagtgagcactatctatccttccaaatgaccattggtacctattggaagcaggctattttcctatgggttttgctctcatgattgaccatagcattttgtcagttgccttctgaggtccaggcagactcatgcactctcccatggtgctaatgctcctggaaggca

SEQ ID NO: 502297 - DNA, 639 bp, Homo sapiens
ccagtatattgggtcaaagtgtttaggaaccactgaagcccacactacttccctagtcactttctctctttttgctagaaactctagatttatacttcttgctccttctacaccaagacacatcagtttaaccatctggtcattctggaattttctgttacagcaattagatgtattgttggctactcagtcccacaggtatactgccctcatgatcttgccttgaagatgacttttctgcttcatgcataccgaaagttcatcttcttactcatatagaatatattagcccmtcgtgtttgctcacctagaatgtgtggtttgttaagaaacacatctttcagccaaatgacttcagtaaaatgactgagggcatttaagcatgtggaagctcaaggagagggttgggcaggaatcgtcagtggtaacaggtgtggagggtgcataaaagcatctcctgctggcactagagacagtgagcactatctatccttccaaatgaccattggtacctattggaagcaggctattttcctatgggttttgctctcatgattgaccatagcattttgtcagttgccttctgaggtccaggcagactcatgcactctcccatggtgctaatgctcctggaaggca

SEQ ID NO: 502298 - DNA, 502 bp, Homo sapiens
ctggccttggtaacatagtgagctcccatytctttaaaaaaaaaaaaaaaaaaaaaaaagactaaaaagagttctggagattgatgagattgattgcataacaatataaatgtatttaacactactacatgtacacttaaaagttgttaggatagtaaatttcatgtgtattttattacaattaaaaaatgaagcatttttttaaaactaggtaaaattcaaaaggctatgctgaaaaacatcagatatctaataggtagagataaaatgactaatttaaaacaggagaagattaatgctcaaagaggaaagcctgaaccatttctggcccaggacagatgcccatgcagaaagagaaggtaatacatggaatgatatttgtcaaatggtgagaggtaaaggagacagtgctgaagtcctaatattctcatgtgtatcactgctggagcctcttttcctaacttgagggtctcttgcttgtgccttgaagctttggaaggca

SEQ ID NO: 502299 - DNA, 553 bp, Homo sapiens
gatctagtaatcaatactgtttgggaactgttgtgcaggcagtttcaaatccgctgaaccatattatttttcagttatcttttttcaagatgtcaaaagatacaattctacaaacctacaggattcaaaggctttggaaattctacaaacatagaaagtaacttataaccaccttatttgaatatgtctttagttcatctattaaaatactctgaaataatattttaataattgacttcatagtttcaaatttttacaaggtaatccttaatttactgtacaaagatgttatacaacttgtcaaaaaatatttcagaaaaaacccatgacagaaatttaatgatgtttaatattctataatttaaccatatttttcacctgtactttktttttgacttatgtgcaaaatcagtagctttcttgatttttatgaataaaattacactagattctttccttgcattatttctagaataatttcaaaatactgttcagatccaaccaaaataaagattaaatcataatctaaatatgatatactttctaaatatgc

SEQ ID NO: 502300 - DNA, 514 bp, Homo sapiens
caatttttttgcaagatttcataggtggtgccataacttcagtaggagacacatattgtcttcttgtccctctttttattatactaacagccattgataattgcttcctatatcaattaattcattaaggtttgcaaaaatggtgatattttaattttgttgtccctttttcattggtcagcttctattcagacagactttccctcctcagttaatggattagcctaaggtatggtttatataagcaaagaaggaaaatgcttaactttcgcccctttatttgttttcaaaataatgaattagcatcttggtatcttccaaaatgatcagtgaggtgcttatggttgtttaagcagctccagggattcattcattcactcagcatgggttgagcggaggagcagattccctgaaaaagtggcagcagtttccyggaaaggagatatgggagaggggaagaaacgactggcctctctggtacaagggcaaagatgagggaggaaaagatggtaaa

SEQ ID NO: 502301 - DNA, 448 bp, Homo sapiens
tgggctgtatgccaaggaagcttgacctgaccttggttcctggaaggcattggcagtcaagtggagctgatgatgcctgcactctgcggtccaagggtctgtgggctgcttaaccgcaggaggtcacaggggccaagaagagagagaaaatgagctgggagttactatgcaggtaaggagtctgcatgctggctaaagtattcaaagagaattatgggcacagatattgcccaaggagtccagcacaccaaagtgaggaaggaagggatctccttttgagagctttttattttgtcattcatagagggcatgatgactctttctgaaatttttgctcaagggccaagaattagaacgtgcaccwctgtgagcaggtggctctgagataacattcattgaaaggcaacattcctgggaataatcagattaacttggggtaccaggcaca

SEQ ID NO: 502302 - DNA, 568 bp, Homo sapiens
catccagcactctcagcctctccaggtccaaacacatccctgaggtctgtgctggggaacggggagaaagatcaattacccaacatcttgccaaccatatcacaggcccttagactagatcatcctgtgatcaacaaactgggttattcagttcaaaggaaaaacattccacattaagatatgaattaacaaaaaatgtttttctaaatccatgaaataaggagttgccttttcaaacctctcatcaaattcataatacaatacaaataaatacacatcaatggggraaatctcaccaaagtctttttcattcttatacatttctttagactgtattgactgtattttccccccactctcaaattatagtttgacttcattaagcaaagcagcagagtttttccctggaagaaataagagacaaggaatagcaggtagcctgcgtattatgaagtactaaagaggaatccatatccctttggcattcttgtgctgttttcagcttctcaaaggaacagaggacagacgtcttggaaggacggggcctctggggacatggctgggtgac

SEQ ID NO: 502303 - DNA, 568 bp, Homo sapiens
catccagcactctcagcctctccaggtccaaacacatccctgaggtctgtgctggggaacggggagaaagatcaattacccaacatcttgccaaccatatcacaggcccttagactagatcatcctgtgatcaacaaactgggttattcagttcaaaggaaaaacattccacattaagatatgaattaacaaaaaatgtttttctaaatccatgaaataaggagttgccttttcaaacctctcatcaaattcataatacaatacaaataaatacacatcaatggggaaaatctcaccaaagtctttttcattcttatacatttctttagactgtattgactgtattttccccccactctcaaattatagtttgacttcattaagcaaagcagcagagtttttccctggaagaaataagagacaaggaatagcaggtagcctgcgtattatgaagtactaargaggaatccatatccctttggcattcttgtgctgttttcagcttctcaaaggaacagaggacagacgtcttggaaggacggggcctctggggacatggctgggtgac

SEQ ID NO: 502304 - DNA, 568 bp, Homo sapiens
catccagcactctcagcctctccaggtccaaacacatccctgaggtctgtgctggggaacggggagaaagatcaattacccaacatcttgccaaccatatcacaggcccttagactagatcatcctgtgatcaacaaactgggttattcagttcaaaggaaaaacattccacattaagatatgaattaacaaaaaatgtttttctaaatccatgaaataaggagttgccttttcaaacctctcatcaaattcataatacaatacaaataaatacacatcaatggggaaaatctcaccaaagtctttttcattcttatacatttctttagactgtattgactgtattttccccccactctcaaattatagtttgacttcattaagcaaagcagcagagtttttccctggaagaaataagagacaaggaatagcaggtagcctgcgtattatgaagtactaaagaggaatccatatccctttggcattcttgtgctgttttcagcytctcaaaggaacagaggacagacgtcttggaaggacggggcctctggggacatggctgggtgac

SEQ ID NO: 502305 - DNA, 477 bp, Homo sapiens
ctgcagggttttatttaatactaccaaggggcctgtctgtttttgtaaagtatttactaatttcccatctctatttttatttctcttcaaagaatcgatggtactccccacattagtgaaatcccatagtccttacactcagcctttccttcagtcctctcaagggcaagacattgcatcagccagtgtatcccctttcactggtacaccatctcatttcaacaccggtgaaaaaatgaacagtcatcccactagagcatgccagaggctatgcagactctgccaaccaccagagatggtgtcctcaaagtcagcctgccagtgagtgacctgcccttaaatcccatcatagaatctgttctctaggtcacctcctagcaccaactctcttagactgaatctgactgcagtgtacgttacaatagagcttaaaacaaaatatagccaygcattgcttcacaatggggacaccttctg

SEQ ID NO: 502306 - DNA, 653 bp, Homo sapiens
tgttatctcttgcaggataagaaaataggaatgtgtcaaataggacacattcccgtagggtcaaataggaatgtgctctaaaatattttttaatttttaaatttgctttctacaaacatataagcttttaaatctataacatttcaaaaacaaaatagtagaaaaacaaagctctttggatgacaccatcattcacagaggaaaacaacaataatgtactcttataaataaagatgaaaagwtgtgggtttcacatcagtaactttcagagtcaggtgataatattcaatggcaatatttttgttagacctccatcaccattttattgtcttcaagataacaaacttatgtggcattttaagtcactcagttgcccagaaatatactttacaatccttttatcttggtgagtgcaccaggaagttttattacttggtattaaatattctgtgagagctttattgattcttttttagttataaggtgggcatttgattattcttgattttaaaaatgtctggtttttgttaacctcaaaaggaaagctttctggaacttgttggtaatctgactgtaaggtgactgacttaggacctgccatcaagctgccttggaacactcccagaagactctctgtgagagatgggagaccg

SEQ ID NO: 502307 - DNA, 676 bp, Homo sapiens
tcactctctttaataatagaacagactcttatgtgccgtggaatgattttgaagtaatgctattcaaaatcaaaactggacagcttctcaaagtcccttccagacccagagaccaagaacayttacatccaacaatactagtgagaaccaaacacatctcttctgcaaaacactatctttacttaattggaggatattaacaaggtggctttctatgcagttgtgtgttttgctagatatctgggtcttttttatctgcattctccttgcttctactgaaccggaagttaacagctttcactgttcaaatattaatttttaaaccaaaccctaattacagcagggcctcaaactgatttacctaactagctacatgaccttggacagtcttttcttgtaaaatgagaggcttggactaagacccactagaatgtaaacaccacgttctgttcaacactctactccctgcccctgggacaggaaggcattaagagaaaaccattgctatccccaaactacaaatataaaaaaacttaagtcatttctttcttttctaatcaattagattttattctgtttttcccatttttaaagaagacaatgacactgaaatgtcctgtgcagcaaatagaaatgtatataatttaaaataaggtactcagtttttagaaataaa

SEQ ID NO: 502308 - DNA, 588 bp, Homo sapiens
aggcgagtccttctccctgggcctccgtgctccacgtgttgtgtgtgtgcgtgtgtgtgcgcctgtgtgtgtgagcatgtgtgtgtgagatgatcttcgckctctgactctggatcttatatcgcagtccctaattctgatcccagcggctgaggccagggtgagaacttgggttctgactgcatgcaccactgccctcttgtggacatgcgcacaactgtgacggtggctgatgcgttctcccgtcaccaatgttaggaatcaatagtgcttcaaggggtgatttagtcaagcatagcaaaggctgcgattaatcactccctgaagatagccatctcctttttttaacagactttagtgaagacttcatcctgcgcattcttattttaaaagttgattaatttttttagaattagcttcctatagtaaggggatggggtggagtaattgctttgtagaataaccatgattaaaaataaggtggaacattcaggaaaaagtcaaaaagaccatcaagtagtccctgggagagagccgcatagcagagtggctgggagtcccagggatgagggagcaaaggttctgcag

SEQ ID NO: 502309 - DNA, 588 bp, Homo sapiens
aggcgagtccttctccctgggcctccgtgctccacgtgttgtgtgtgtgcgtgtgtgtgcgcctgtgtgtgtgagcatgtgtgtgtgagatgatcttcgctctctgactctggatcttatatcgcagtccctarttctgatcccagcggctgaggccagggtgagaacttgggttctgactgcatgcaccactgccctcttgtggacatgcgcacaactgtgacggtggctgatgcgttctcccgtcaccaatgttaggaatcaatagtgcttcaaggggtgatttagtcaagcatagcaaaggctgcgattaatcactccctgaagatagccatctcctttttttaacagactttagtgaagacttcatcctgcgcattcttattttaaaagttgattaatttttttagaattagcttcctatagtaaggggatggggtggagtaattgctttgtagaataaccatgattaaaaataaggtggaacattcaggaaaaagtcaaaaagaccatcaagtagtccctgggagagagccgcatagcagagtggctgggagtcccagggatgagggagcaaaggttctgcag

SEQ ID NO: 502310 - DNA, 588 bp, Homo sapiens
aggcgagtccttctccctgggcctccgtgctccacgtgttgtgtgtgtgcgtgtgtgtgcgcctgtgtgtgtgagcatgtgtgtgtgagatgatcttcgctctctgactctggatcttatatcgcagtccctaattctgatcccagcggctgaggccagggtgagaacttgggttctgactgcatgcaccactgccctcttgtggacatgcgcacaactgtgacggtggctgatgcgttctcccgtcaccaatgttaggaatcaatagtgcttcaaggggtgatttagtcaagcatagcaaaggctgcgattaatcactcccygaagatagccatctcctttttttaacagactttagtgaagacttcatcctgcgcattcttattttaaaagttgattaatttttttagaattagcttcctatagtaaggggatggggtggagtaattgctttgtagaataaccatgattaaaaataaggtggaacattcaggaaaaagtcaaaaagaccatcaagtagtccctgggagagagccgcatagcagagtggctgggagtcccagggatgagggagcaaaggttctgcag

SEQ ID NO: 502311 - DNA, 637 bp, Homo sapiens
tcattcttggtattttactattaccaaattcttatatatgaagtggcttacatacattatttcatttaattcccatgatagcccttggggcaactattattattacagttttgcaaatgaggagtctgaggctcagagaggctcaaaaattgcccaaatcatccaaacggcaacaatggtaggggcagcctacagacccrccatgcagctttgagtggccttcaggccttctttccagctctttttgtttgtttgtttttttgagatgggggtcttgctccgttcctcagccaggagtgcagtggcacgatattgactcactgcaacctctaccttctgggttcaagtgatttttgtgcctcagcttcctgagtagctaggattacaggcacgcgccaccacacccagctaatttttttgtatttttagtagagatggggttttgccatgttggccaggctggtctcaaacttctggcctcaagtaacccacctgtcttggcctcccacagtgctgggataaccggtgtgacctttccagctctttttaatatgtgcaatgcaaaaggatttttagccttgagatgtatagaactcccataaatcactaagaaagacacaactagccccaaggaaaa

SEQ ID NO: 502312 - DNA, 637 bp, Homo sapiens
tcattcttggtattttactattaccaaattcttatatatgaagtggcttacatacattatttcatttaattcccatgatagcccttggggcaactattattattacagttttgcaaatgaggagtctgaggctcagagaggctcaaaaattgcccaaatcatccaaacggcaacaatggtaggggcagcctacagacccaccatgcagctttgagtggccttcaggccttctttccagctctttttgtttgtttgtttttttgagatgggggtcttgctccgttcctcagccaggagtgcagtggcacgatattgactcactgcaacctctaccttctgggttcaagtgatttttgtgcctcagcttcctgagtagctaggattacaggcacgcgccaccacacccagctaatttttttgtatttttagtagagatggggttttgccatgttggccaggctggtctcaaacttctggcctcaagtaacccacctgtcttggcctcccacagtgctgggatwaccggtgtgacctttccagctctttttaatatgtgcaatgcaaaaggatttttagccttgagatgtatagaactcccataaatcactaagaaagacacaactagccccaaggaaaa

SEQ ID NO: 502313 - DNA, 614 bp, Homo sapiens
ggcatattggcgtgtgaccttgtttctgcctttagtttgttggagatgggagcaataatttagcacagagaaaaagagtcagtatactgcactgatatactctcagtgcaaaccaggggctgttgcagactgaggaagggctgtgggtaggagaaggcaggtgaacccacccgggtccaaaacagaccaactgataaaaaggagagtccacattaatgaatagattctgccttttggaggaggtgaggttggagttgaggagctggatggtctatctgcagttctgagtggtcttaaacatacaggttgcctgagttcaaattctaactcttctagctgtgcagcttttggagagttacttaaactctctgttcctcagtttcttcatttgtaaaatggaaatcatgctattaccagcctgatggggtagtgctgctgattaaatgagttaaaacattcaaagcacttagaataatatctagtacatattaaatactcactaaatcttagctgcttttattgttattattatcggaaagagtactgaatgaagaatcttcaaacttytataccagtattcattctgccatgacttgcttcatgaccttgggcaa

SEQ ID NO: 502314 - DNA, 577 bp, Homo sapiens
cggtggctgggctcctctgccaaggcccacaggtcctgtcaggcaacttctggggtttagtagccacaccttccccttgtcccctcaagccagtctcagtcctgactccctgcttttgccaggcctcrggtacatcactgtcctcattggagtctcttaaccctgcccacaccctttgtaaatagtccctttatgaaactcttcttggtcactccatctgagtgtaccatctgtctcctgccaggaccctggctgatagcttaggtgtcctcattttaccagtgagccaactgtgattcagaaaaggtaagtaaggtaccaaaggtcgtccagcacccagagcggcatgggcttctctgcatggtccgcggctggcacgcttgggcgtggcgtttctccactgctctctcatgcctccatgcactcgagtgttcattgggtctttgcttcacgtcactttgccctctcctacccctacaaccctgccctcgagaagcagcagcggtgctctgttcaaaggctgcaaggccggcgtatttcctaacaacagctcattaccagagacactgcttgtttt

SEQ ID NO: 502315 - DNA, 522 bp, Homo sapiens
gctgttgctattagttaatccttaccacagccacrtgagatgggtacaatcctgtatccccactttacagaaggggaaatagaagccaagaggcacttgccacataggtggtagatggcagagaggattcaaacccaggacagttggacttccaagtcctgtccctctctgagagtgagtgagacagacatagagggtgaatgggatagacatgaccctccctttacagagctcttatggttgagcagggagcagccgcattggcatgtcagagtgacaagcgttgcggagggctaagcagagagcctgcagaggaaggccatggacccaggctggaggcctgttgggtggaggggaaggaaacagtattctaggtagagtcctctgcgatcaaagtcacttcctgctcacctaagggatacgtttcattcgcctctgggcttcagcgaggaggtactagttcagtcgtctgtgtacaagctattaatgattaataatttgagtgcaggggtgtggctactc

SEQ ID NO: 502316 - DNA, 522 bp, Homo sapiens
gctgttgctattagttaatccttaccacagccacatgagatgggtacaatcctgtatccccactttacagaaggggaaatagaagccaagaggcacttgccacataggtggtagatggcagagaggattcaaacccaggacagttggacttccaagtcctgtccctctctgagagtgagtgagacagacatagagggtgaatgggatagacatgaccctcsctttacagagctcttatggttgagcagggagcagccgcattggcatgtcagagtgacaagcgttgcggagggctaagcagagagcctgcagaggaaggccatggacccaggctggaggcctgttgggtggaggggaaggaaacagtattctaggtagagtcctctgcgatcaaagtcacttcctgctcacctaagggatacgtttcattcgcctctgggcttcagcgaggaggtactagttcagtcgtctgtgtacaagctattaatgattaataatttgagtgcaggggtgtggctactc

SEQ ID NO: 502317 - DNA, 485 bp, Homo sapiens
cctttccctcttcaggagtccccccacacaagaccagattctgtcataagcagaaaaaagagatgtgggattgtactgtggttctgatacaactgccacgttcttaagaagttacatcatgagaatcactttttctcctgcagtgttttggtttccagggaggaattagcagccagagtatgtgtgtgcatgtacacgtgcatgcgtgtgtgtgtgtgtgtgcgcgtgtgtgtatgtgtaaggtgagagaggcagaaggagggtggaaagaatggcgtttttggtgcrgtgcaaactaatttgcccaaactgaaaaagctggtgctctcaccattatgccaggctacctccctgtgtagtagatgacacagctgatgtagatgtataaaaatgtagcccctacagtttaatttatctctctgagcctcagttgcctcatctgtaaaatgggtcttaatgtatataaatcctttcacctgacacca

SEQ ID NO: 502318 - DNA, 626 bp, Homo sapiens
ctggacttgagctcgactatcatctctttcccttgccagtgacattgggcaagtctagcttcaaaaaaacaggatttttgactataaaactgaaatcataatatctctcttatagggttgttgtacaatttgatgaggtaatgtacataaagtgcacagcccagtgtctgacacatagtatgttatcaataaatggaagccagcattattattccacttgccagtcttycaggtatttgaaaataacttcatttttccatttagtcttctcttctccaaactaattatctccttcttcaattacactttaaatatgaccaaaattattctttcccagatctggagactacacttgtctattttaaatgatacctgggtaaagctccctgatacaactggcagtttacctatggccaaaaactgagaggaatttcctctgataaaactggatagaaaagcaggtccatggctcatttgagtcccttccccataagtcagcctgccactcctgactgcatcctggttcaaaatcacagcgtctgtcctttgagaggaaaatgacatttcctcacttctctggtctccacgaagaggaatttttgcttcgcacccctggcttcttgccc

SEQ ID NO: 502319 - DNA, 626 bp, Homo sapiens
ctggacttgagctcgactatcatctctttcccttgccagtgacattgggcaagtctagcttcaaaaaaacaggatttttgactataaaactgaaatcataatatctctcttatagggttgttgtacaatttgatgaggtaatgtacataaagtgcacagcccagtgtctgacacatagtatgttatcaataaatggaagccagcattattattccacttgccagtcttccaggtatttgaaaataacttcattttyccatttagtcttctcttctccaaactaattatctccttcttcaattacactttaaatatgaccaaaattattctttcccagatctggagactacacttgtctattttaaatgatacctgggtaaagctccctgatacaactggcagtttacctatggccaaaaactgagaggaatttcctctgataaaactggatagaaaagcaggtccatggctcatttgagtcccttccccataagtcagcctgccactcctgactgcatcctggttcaaaatcacagcgtctgtcctttgagaggaaaatgacatttcctcacttctctggtctccacgaagaggaatttttgcttcgcacccctggcttcttgccc

SEQ ID NO: 502320 - DNA, 626 bp, Homo sapiens
ctggacttgagctcgactatcatctctttcccttgccagtgacattgggcaagtctagcttcaaaaaaacaggatttttgactataaaactgaaatcataatatctctcttatagggttgttgtacaatttgatgaggtaatgtacataaagtgcacagcccagtgtctgacacatagtatgttatcaataaatggaagccagcattattattccacttgccagtcttccaggtatttgaaaataacttcatttttccatttagtcttctcttctccaaactaattatctccttcttcaattacactttaaatatgaccaaaattattctttcccagatctggagactacacttgtctattttaaatgatacctgggtaaagctccctgatacaactggcagtttacctatggccaaaaactgagaggaatttcctctgataaaactggatagaaaagcaggtccatggctcatttgagtcccttccccataagtcagcctgccactcctgactgcatcctggttcaaaatcacagsgtctgtcctttgagaggaaaatgacatttcctcacttctctggtctccacgaagaggaatttttgcttcgcacccctggcttcttgccc

SEQ ID NO: 502321 - DNA, 456 bp, Homo sapiens
atcaataaacagagatgtagcaaataaacattagacaagcgacctttgttaaaccaacttttttatagggtaaagtatttcatatgtacatcaatatagaggggcaaatatgtgtgtgtgcatatatttatatatataaacacacacatatatatattcatttatttacrtatttatttagtgaatcacagtacccagtgaactggaaaacagaaatagtctagaacattttaaagatttctattattcatatggagaatatattcattagtcttctatccaaagcctttacttccacagagctcaaaaactctggctggtgtttaatctaggctcagatacagctcaccacaagccccactatttccttttccaaccccctagtttgctctcttatgttgcctaactggccctgcaggcctctgcaaacaaatgatgacaccatttggccaacga

SEQ ID NO: 502322 - DNA, 601 bp, Homo sapiens
gagggcttaagcatctggagcttctggagaagcttgaattgcttctttgtagaactttttccatttttattttggaggcaaaacatgagcttaagctgctgtttggtgggtggataatgaagraaagagtctacaagtaaataagcttttctctagcagagaggaaaacagagttcagctatattaaatgatttatctaggatcaaacagatttggtattaagattatgactgggccctggctctccagatttgagtcagtttttcctttttgtccacttggcaaatatttattgagcacctgctcagaatccagcattgtgctagccactgggaattgaaatgagagagaagtctttgccctcaaggagcttacatcaggtaacggagatagacaaatatcagatgacgcaatatggtataagagctatgatttactatgagaatatatgatgaaacatatattgcttgggaactcagagaaggcttgcttgatgaggtaacagctgattggaccattaaaggctaagtgtgatagaagtgggtcaaatggacatggaagataagaggtagaggatgggaaggagatgagaaaatgccat

SEQ ID NO: 502323 - DNA, 654 bp, Homo sapiens
ttcagtgacttgaattgtgtttagtacactctcacttgtttatttatatgtccccttgaaatgtcattgcataattccttgaggtcagaaatcatgcccccttgaggaatatggtrgcagcttactgataagtcttctcacttctcttgttagaaaacacacaaagcaataagaacagaggcaaaaaaaaaaccctacacgctatttttcagtgaaattaagagacagagaaaagctgcaaacttcaaattgcctgtaagcagtgggtgagaaattgttgtggggaaggacaaggaatgtggaaagggtgtagcaatagcagagctaagaagaactttccagcaaattagttggtggagcacagggggttttgaggacagtgaaactattctgtataatacagtaatgatggacacgtctttatatatttgtcaaaacccatagcatgtaccaaaaaaaggggcgaaccctaatgtaactatagactttagttaataataatgtatcaatattggtttatccattgtaccaaatttacctttttatcttactagtgcaagatgttaataacaggggaaagtatgtgtgaggctaggatgcaggggtatgtgaaagctctgtgcacttggatcactttctctgtaaactcaaact

SEQ ID NO: 502324 - DNA, 654 bp, Homo sapiens
ttcagtgacttgaattgtgtttagtacactctcacttgtttatttatatgtccccttgaaatgtcattgcataattccttgaggtcagaaatcatgcccccttgaggaatatggtagcagcttactgataagtcttctcacttctcttgttagaaaacacacaaagcaataagaacagaggcaaaaaaaaaaccctacacgctatttttcagtgaaattaagagacagagaaaagctgcaaacttcaaattgcctgtaagcagtgggtgagaaattgttgtggggaaggacaaggaatgtggaaagggtgtagcaatagcagagctaagaagaactttccagcaaattagttggtggagcacagggggttttgaggacagtgaaactattctgtataatacagtaatgatggacacrtctttatatatttgtcaaaacccatagcatgtaccaaaaaaaggggcgaaccctaatgtaactatagactttagttaataataatgtatcaatattggtttatccattgtaccaaatttacctttttatcttactagtgcaagatgttaataacaggggaaagtatgtgtgaggctaggatgcaggggtatgtgaaagctctgtgcacttggatcactttctctgtaaactcaaact

SEQ ID NO: 502325 - DNA, 613 bp, Homo sapiens
gataggcagaaggtaaattttaggagatttgtctatttcttagggggaaaatgaagcaagatttaactctttggcttgttcactggaaatacaaaaatgaatttaaaatttttctattaactaaaatctgaagtattgatgtttatttagggtacaagaggaaattgtacaaaartacttttctaaaaccaggaaacaatttgaagttaaaaatgaaaagacttttgatttgtttttggtatgtttcaaggaagccccatttgggggttatttgggtttagaataactggggtcacatgtctaacagtcctggcacgtagcaggcactgaaatagtttttgaaccacgaatgtgaatgaccaggaccccgcaggactgggagaagaagatcaccaagagggagacttgagaggcggggcgtggtcttcgtttctggtaaagaatgagaggttgcctgagaatgcctagccctgcagcccacagggagccctagcatctctaaagagatgtagaggataaagttcctaacatgtaattattccactctcgtctaccataaggaaatcaccaagtatctgccagaggtttgtggcttagagaaggaggagggatt

SEQ ID NO: 502326 - DNA, 561 bp, Homo sapiens
ctctgaaaacaagactgtgggacccagattactgatcataattatttacaaaaattattccataacctattagaaaccacattactgcaagtagaaaatctagcatcttaataacatatattaccatttagagagagtgagagtgacagaatgcagtagcataatagggctggagcactggaaaaatgtttaggactctgatgaagggtctgttatataggcacttgtcatctacayttttctgacgaaaagcaggggggaaatgactttccttagcagagctccatatgagccctgaaaatagagcacagatatgagagcactgcaaataagtgcctccaaactaacccaaagcagggaactgagccaagcagctttctctattcatgttgagagatgggaagagttacagtgagtagcaaagccattaggcaaccactggaaagaaaagagaaaaagaatatgcccgcagcttaatatagaatatctaagcattaaccttcaaaaagactcacacaagttggagaaatggacacacaaagaggatggggtttaacaggg

SEQ ID NO: 502327 - DNA, 561 bp, Homo sapiens
ctctgaaaacaagactgtgggacccagattactgatcataattatttacaaaaattattccataacctattagaaaccacattactgcaagtagaaaatctagcatcttaataacatatattaccatttagagagagtgagagtgacagaatgcagtagcataatagggctggagcactggaaaaatgtttaggactctgatgaagggtctgttatataggcacttgtcatctacacttttctgaygaaaagcaggggggaaatgactttccttagcagagctccatatgagccctgaaaatagagcacagatatgagagcactgcaaataagtgcctccaaactaacccaaagcagggaactgagccaagcagctttctctattcatgttgagagatgggaagagttacagtgagtagcaaagccattaggcaaccactggaaagaaaagagaaaaagaatatgcccgcagcttaatatagaatatctaagcattaaccttcaaaaagactcacacaagttggagaaatggacacacaaagaggatggggtttaacaggg

SEQ ID NO: 502328 - DNA, 427 bp, Homo sapiens
aggctctgtggtaggcacttctgcagagctgatctcatctcatcctcatatgaaccctgtgaagtggatgctattacctcccagtttacttatggagaaaccgtgactyggagaggtcaagtgcttgctgaaggtcacacagctagtaagtcacagagctgagtttcaaacacatgcctttttgttgtaaatacccaaaccccgagtcacggtgcacctcattattctacttgccatttcttgcagccttttccccaggctccctggcccctgctttgcagttcactttggccagtaggtgcttccagaggaaggcaggagcagaggaggtgccattggctgttccttctctcttttttcctggcatatgcaaaggaaagaagttcctgcttctttggtggctgtggcagcagctacaggggccaac

SEQ ID NO: 502329 - DNA, 427 bp, Homo sapiens
aggctctgtggtaggcacttctgcagagctgatctcatctcatcctcatatgaaccctgtgaagtggatgctattacctcccagtttacttatggagaaaccgtgacttggagaggtcaagtgcttgctgaaggtcacacagctagtaagtcacagagctgagtttcaaacacatgcctttttrttgtaaatacccaaaccccgagtcacggtgcacctcattattctacttgccatttcttgcagccttttccccaggctccctggcccctgctttgcagttcactttggccagtaggtgcttccagaggaaggcaggagcagaggaggtgccattggctgttccttctctcttttttcctggcatatgcaaaggaaagaagttcctgcttctttggtggctgtggcagcagctacaggggccaac

SEQ ID NO: 502330 - DNA, 556 bp, Homo sapiens
aaatccggacaaaccttagggagcctgtagtccaacctcgttcatttaacagatgagaaaacacagcccagagaggcccaggcacttgttcaagggcatggagtaaaatatgagcatattatatgccaggctctgtggtaggcacttctgcagagctgatctcatctcatcctcatatgaaccctgtgaagtggatgctattacctcccagtttacttatggagaaaccgtgacttggagaggtcaagtgcttgctgaaggtcacacagctagtaagtcacagagctgagtttcaaacacatgcctttttgttgtaaawacccaaaccccgagtcacggtgcacctcattattctacttgccatttcttgcagccttttccccaggctccctggcccctgctttgcagttcactttggccagtaggtgcttccagaggaaggcaggagcagaggaggtgccattggctgttccttctctcttttttcctggcatatgcaaaggaaagaagttcctgcttctttggtggctgtggcagcagctacaggggccaactg

SEQ ID NO: 502331 - DNA, 582 bp, Homo sapiens
tcatctaaaaccttggccctgactcaggcccctggaggatcccagatcatctgcattgtccacacagaaagcagccttctttcctcttggcatttgtatctgagctcgccttgcccctcatcaggcctgccctttctcagcaggcctcatcgtttcaggcctcctaagccagcctctcagcccacctctttcaggaagccctccctgattcacatctgtgtccctgccttcagcttctctccagtgctcacaagccctgtgactgggcctctagttctgcctccaccactaaccccaatgccctgggtggctccaggtaagtcgcttcacctccctgggcctcagttacttcatctgacaaatgggcgtgaccatcctgcctggtatctcacatgattgtgatgcagattgagtgagtgtgtggttgggtgggaaactgctttggaatgtggaagccacaggaggactgaggccgccataacccttgtgtggctgagggttctggccactgggtcccgagggcagatgtgctccatggtcgagtctagcacatsggagctgtgacacctcgggcgagtctca

SEQ ID NO: 502332 - DNA, 563 bp, Homo sapiens
ttccctgatgagtctgtgtggtgggaaggtcactggcagaagtgtcagaaaggctgtattccagtcctgtggattggctgcaggtccttgagcaagcatgtcctctctgcttccccggaggtagagagtagaggtgagggggtgatagtagtgcataaatgttcaatctggaaagtgggataagcttagatgattcctaagaatccttccaacacagacacttaatacatttttttctgtatattgtttcttaaatgtaaatttatgtatgtattttacatgtttaattgtggtaaaatacacataacataaaatttaccatttttaccattttaaagtgcacagttcagtggcattaagcattgytgtgtaaccatcaccacttctccatctcaaaactttttcatcatctctatcttagttcaggctactgtaacacaatagtacagaatggatagcctaaaaacaaacatttatttatcagagttctgaagctgagaagtccaagatcaaggaacctgcagatatggtgtctggtgaggactgtcttccttgttcataga

SEQ ID NO: 502333 - DNA, 687 bp, Homo sapiens
tgacaaatgacattagctttctgttggtcccttgacacaatcttactactgtcagttgggaaactttcactacttctgraagcacctttctgaatctctctgcctcattggctctctctcccatttcaaatgtcaagcaagagcattctatttctcatcccctacgcttcttggattcttttcgcttctgctatttctgtttttctctaggtagctatgcgactttaactgtaagcactgtggacacacagtttttatagtaaatactttaaataaattaatttttaaaaaagcaacattataatttcagctttcagctactacttaaacctttatgcagccagatgaaaatgtaaaattctggaaacattttactcaagacataagtggaaattcacctagctaagtaactaatgtgaggttagtacttaggaaaaaaatgaatgtttaagtatgccataaagaattgagatgcccttgatcctttacagtgagataagttttgtaatgaatggcagggcatgcacacttgcatacctgtatacttcataaacctgtacgattagtcattctagtaactagaaggaagtcagacaagcctggaatgtaagcgctctgaccacatgtgtagatgtactgaaacaatatttaactgcactaagaggaactaaagatataatttattag

SEQ ID NO: 502334 - DNA, 610 bp, Homo sapiens
ttacttttgcctcatgcccagcttcaagcctttagaatccaaggagagagagcacaaaatctaggatactttattgtaagaaggttagccaaggagttcctacaaatgaatgcatcttctgttaccataaaaggagtctcctttttttcatcatcactttataatcttaaaaacacttcccaagtagatatgaaaggtattcaactaaaagtgtaaaaacagcctctcctcaatgtcttcattctatctgattattttagggaaaagaaagtccatgtgatgcccccttctcttaatttctttggctgacctccaaagtgttaactgtcagctagtgttagctaaataagaatgagctatggcccaaggcccatatactgtagtcrtatgcatgacaatatgccccctgtattagcactgctgaatgtcaggaatagggaccatcaatataattctatttattctgatgcccaaagactgagtaaggacatcaggaactgttaccgaaacagacagaaaactttgtgacaaagctctcttagcttaagtatcttattcaagtataattaaatctcaccttataaaggaaggctttggtgattaatctcat

SEQ ID NO: 502335 - DNA, 609 bp, Homo sapiens
cctttaaattactactaattgcctttaattactcagctagaaggacaaaaatgattcaagaaaagaaaccaacaattacggggcttatttcctgayactgtgccttccaaggaaagatgcatacatttgaagtaaatctcatctttacttagggacaaccaatgcaattttgagtagtttgttttccatataaagaacttatgttccaaataatcacagagtaagtgtaattataaaattaataaaccacatgttatataggttaataagctacaaaataaagctgtttctatttctatgagatggctttaaagtaacacaatgtagaataaaatatgcatacagcatataaaatagtgtattataatttttcctcaataatttacatgagttttgtttttttactgagcatttgcaaggactttcaggagacagtaaatagttcaggattaaccaaaaaccttattttgttttggatagattcctctgtagcaaacatgaaaatgtgaaatgtattgaacttaggtatttttcccaaatgttacattcagcgcttagtaaatgtgcttgttatcaatgatgataatgacaagaaggaggaagaggagg

SEQ ID NO: 502336 - DNA, 516 bp, Homo sapiens
tgcttctgctactgcaacaagatagcaagaccatttccctttttttttttttttttgacggagtcttgctctatcgcccaggttgsagtgcagtggcatgatctaggctcactgcaacctccacctcctgggtttaagcaattcccctgcctcatcctcccgagtagctgggattataggtgcccgccaccatgcctggctaagttttgcgtttttagtagagccaggtttcaccatgttgtccagggtggtcttgaactcctggcctcaagtgatccacccacctaggcctcccaaggtgctgggattacaggcatgagccaccatgcccagcccatttacatttttggtgcaaacgattgttaccattaccccaagggagaggcaagaatatctggtgtccaagtaggcataaaatccgtagatatatggctctacatggaataatggaagtaaacagaaactctggagagcaaggcttcacacaagattagaggttataagcctagtgctcct

SEQ ID NO: 502337 - DNA, 561 bp, Homo sapiens
ttcagattaatggaaagaaggaagaaaggaaggaagggaggaagggaggttgggaaagaaagagtgaaggaagagagagagggaggagaggaggagagaagaagggataggaggggaaaaaaggattaaggtagcacttaggagctcttctacagattttgtttttcrtatgtatctgagtgaagcaatgtctgtttgcagtatcactcttggagtgggtaaaacatttcattatgaaatagaaaggaaaacactaaggcatttctagaggtagttgtcaagcgcagtttgtttgaaatctaataagaagcatattaaaagtaattattttaagcatctggagttaagacaggcaagtggttgagattattatttcttttctccaaactcataactataccaaaaatggttggaggcaatgtgactatctggatcttatggcacttctttgagatcttctttcttctctctctctctctctctctctcacacacacacacacatacacacacacttttattttttttcttggcacttcccctccatgaaccaatgtttaaa

SEQ ID NO: 502338 - DNA, 561 bp, Homo sapiens
ttcagattaatggaaagaaggaagaaaggaaggaagggaggaagggaggttgggaaagaaagagtgaaggaagagagagagggaggagaggaggagagaagaagggataggaggggaaaaaaggattaaggtagcacttaggagctcttctacagattttgtttttcgtatgtatctgagtgaagcaatgtctgtttgcagtatcactcttggagtgggtaaaacatttcattatgaaatagaaaggaaaacactaagrcatttctagaggtagttgtcaagcgcagtttgtttgaaatctaataagaagcatattaaaagtaattattttaagcatctggagttaagacaggcaagtggttgagattattatttcttttctccaaactcataactataccaaaaatggttggaggcaatgtgactatctggatcttatggcacttctttgagatcttctttcttctctctctctctctctctctctcacacacacacacacatacacacacacttttattttttttcttggcacttcccctccatgaaccaatgtttaaa

SEQ ID NO: 502339 - DNA, 561 bp, Homo sapiens
ttcagattaatggaaagaaggaagaaaggaaggaagggaggaagggaggttgggaaagaaagagtgaaggaagagagagagggaggagaggaggagagaagaagggataggaggggaaaaaaggattaaggtagcacttaggagctcttctacagattttgtttttcgtatgtatctgagtgaagcaatgtctgtttgcagtatcactcttggagtgggtaaaacatttcattatgaaatagaaaggaaaacactaaggcatttctagaggtagttgtcaagcgcagtttgtttgaaatctaataagaagcatattaaaagtaattattttaagcatctggagttaagacaggcaagtggttgagattattatttcttttctccaaactcataactataccaaaaatggttggaggcaatgtgactatctggatcttatggcacttctttgagatcttctttcttctctcyctctctctctctctctcacacacacacacacatacacacacacttttattttttttcttggcacttcccctccatgaaccaatgtttaaa

SEQ ID NO: 502340 - DNA, 652 bp, Homo sapiens
ttagtttcatttcattctctataattctgtgaagyatgtattattagattgatttttcaaatgataaaattactttcaaatgagaaagtaacttaactttttggaggtactaaaaccagtttttgggcaactttgattcaaattgaagtagcctagctccagaattcatgtttaaccatcacttcttatttttgactaccaaagaaaatgaactaaaatattacctgctgttatcagaaaattgttaccaagaataaaaaaaaaaacccaaaacaaaacacagtaaaaataaaagccactgcctcaacctgtattttccacatccttgaggcatactcacatctggtatcaaaacaaactctcagataggacaaaggaactcatcataaagaaaacataattattccgtgtggtatttaatcacggtggtacatgcattagaaacatttggaccattcgttaaaactgtaggtttgagggccatgtatctgatctgctgatcagaatatgttacaacaattccctgaagtctgcatttttaaaagctcctcactcccatgccaccttattctgatacacactgtaatttgagaaaaagttacctcactagggaggcacatagagttagttaccataatgttattcaaataaa

SEQ ID NO: 502341 - DNA, 652 bp, Homo sapiens
ttagtttcatttcattctctataattctgtgaagcatgtattattagattgatttttcaaatgataaaattactttcaaatgagaaagtaacttaactttttggaggtactaaaaccagtttttgggcaactttgattcaaattgaagtagcctagctccagaattcatgtttaaccatcacttcttatttttgactaccaaagaaaatgaactaaaatattacctgctgttatcagaaaattgttaccaagaataaaaaamaaaacccaaaacaaaacacagtaaaaataaaagccactgcctcaacctgtattttccacatccttgaggcatactcacatctggtatcaaaacaaactctcagataggacaaaggaactcatcataaagaaaacataattattccgtgtggtatttaatcacggtggtacatgcattagaaacatttggaccattcgttaaaactgtaggtttgagggccatgtatctgatctgctgatcagaatatgttacaacaattccctgaagtctgcatttttaaaagctcctcactcccatgccaccttattctgatacacactgtaatttgagaaaaagttacctcactagggaggcacatagagttagttaccataatgttattcaaataaa

SEQ ID NO: 502342 - DNA, 652 bp, Homo sapiens
ttagtttcatttcattctctataattctgtgaagcatgtattattagattgatttttcaaatgataaaattactttcaaatgagaaagtaacttaactttttggaggtactaaaaccagtttttgggcaactttgattcaaattgaagtagcctagctccagaattcatgtttaaccatcacttcttatttttgactaccaaagaaaatgaactaaaatattacctgctgttatcagaaaattgttaccaagaataaaaaaaaaaacccaaaacaaaacacagtaaaaataaaagccactgcctcaacctgtattttccacatccttgaggcatactcacatctggtatcaaaacaaactctcagataggacaaaggaactcatcataaagaaaacataattattccgtgtggtatttaatcacggtggtacatgcattagaaacatttggaccattygttaaaactgtaggtttgagggccatgtatctgatctgctgatcagaatatgttacaacaattccctgaagtctgcatttttaaaagctcctcactcccatgccaccttattctgatacacactgtaatttgagaaaaagttacctcactagggaggcacatagagttagttaccataatgttattcaaataaa

SEQ ID NO: 502343 - DNA, 525 bp, Homo sapiens
actcctggaatcaagcgaccctctcaaagcgctaggattacaagagtaagtcaccaagagccgggcgcggtggctcacacctgtaatcccagcactttgggaggccgaggcgggtggatcacaaggtcaggagatcaagaccatcctggctaacacagtgaaaccctgactctactaaaaatacaaaaaattagccrggcgtggtggcaggcgcctgtagtcccagctactcgggaggctgaggcaggagaatggcatgaacccaggaggcggagcttgcagtgagccgagatagcgccactgcactccagcatgggcgacagagcaagactctgtctcaaaaaaaaaaaaaccaaaaaaacccaaaaaaacaaaaaagagtaagtcaccacgcctggctacaaaataatactttaaatataacctattacaagtgttatgatcttatataactgtattgtccaattcactacccaccaaatacatgtggttatttcatttaaattaataacaattaacataaaa

SEQ ID NO: 502344 - DNA, 674 bp, Homo sapiens
ctgagggttgtttgcaggatagagaaaaattgatgcttggagtttttcctttggaggatttggtatggtttgttacagatttttgtgattcgcagatcctgggtgaaaatgtatactatttgatttagtagatttctagataatcatatgtaacaatgtttaacagaaatgagtagtaaattaagtaactggtggattgataccttatgaatgttaacatactactcagatttttaatttagatatggctctttcagtgtatattgaagttattttactcaggacttggcttctaaagtcagtacataaaatgaaattaggcttgaaaatactggaaatttttagtaatgacaaaattttttatttttttttggtaaatagcctagtacagaaatatatatatgcatgatttgtgctatatttggtagcatataattccrtaggctgaatcatattaagagagtaaatcagctgaatgttttgatgcttggaacatgaagccgatttagggagagtcaaacttcctggtttctctctctctcatcatctttatgaagataatatttcttctggttcttcatcagtgagtatttctctatggcctcaaatgtctttctgataattacagtttcactttcctggttaaccatgcctaaaatattaaatggaaaatt

SEQ ID NO: 502345 - DNA, 674 bp, Homo sapiens
ctgagggttgtttgcaggatagagaaaaattgatgcttggagtttttcctttggaggatttggtatggtttgttacagatttttgtgattcgcagatcctgggtgaaaatgtatactatttgatttagtagatttctagataatcatatgtaacaatgtttaacagaaatgagtagtaaattaagtaactggtggattgataccttatgaatgttaacatactactcagatttttaatttagatatggctctttcagtgtatattgaagttattttactcaggacttggcttctaaagtcagtacataaaatgaaattaggcttgaaaatactggaaatttttagtaatgacaaaattttttatttttttttggtaaatagcctagtacagaaatatatatatgcatgatttgtgctatatttggtagcatataattccgtaggstgaatcatattaagagagtaaatcagctgaatgttttgatgcttggaacatgaagccgatttagggagagtcaaacttcctggtttctctctctctcatcatctttatgaagataatatttcttctggttcttcatcagtgagtatttctctatggcctcaaatgtctttctgataattacagtttcactttcctggttaaccatgcctaaaatattaaatggaaaatt

SEQ ID NO: 502346 - DNA, 531 bp, Homo sapiens
cctatttatggttttggaatgacctaatgatgcattactggtcaatgagacagagggggtctgctggkgaacactgcagtaaatgggtgtcttagacctaaaaatcatgcaaaagaaaaaaccatccctttttagcaagacatcttcatgtctgcttgtgaaactgcatagtaatcagcttgctgagtgagataaaatctgaagattgacaacaagttgatgtcagcattgagctaaccctggagaagtcttgcctctggatgacttatgtgaggtaataaatgtctttattctttaagtcacttatagttgggtttcctataacttgcaacggaaaacatccatacttaaacacatctcagtatctgtctgtctgtctatctaccccatctactttcagagaggattagtcttaccttacaataaaagacacagggagaaatcaatacaagggtaaacaagcaacgatgggaactcatgcttctggcatcatggcataccaaataccctgaatgacccttctgattaaaa

SEQ ID NO: 502347 - DNA, 531 bp, Homo sapiens
cctatttatggttttggaatgacctaatgatgcattactggtcaatgagacagagggggtctgctggggaacactgcagtaaatgggtgtcttagacctaaaaatcatgcaaaagaaaaaaccatccctttttagcaagacatcttcatgtctgcttgtgaaactgcatagtaatcagcttgctgagtgagataaaatctgaagattgacaacaagttgatgtcagcattgagctaaccctggagaagtcttgcctctggatgacttatgtgaggtaataaatgtctttattctttaagtcacttatagttgggtttcctataacttgcaacggaaaacatccatacttaaacacatctcagtatctgtctgtctgtctatctaccccmtctactttcagagaggattagtcttaccttacaataaaagacacagggagaaatcaatacaagggtaaacaagcaacgatgggaactcatgcttctggcatcatggcataccaaataccctgaatgacccttctgattaaaa

SEQ ID NO: 502348 - DNA, 572 bp, Homo sapiens
gcccaaggaatttactagccaaatagtgtggttaagtgtgatgttgggcaagatcccccctctggggatctcagtcttcttaccaattatacaaggggaaatatagccaggtggtttctaagccaccttcccagctctgaaactctaaaacccaactggaatccatgttttcaaatgctctgttttctctcaaagtccctgtacgcctcatgattagttgaatccaattatagaccaggtctggtttgaaatatcattaacataataattattatgggctgtcctctcatttaatcctcacaacaagcataagaggagataccatttttatcctctttttactgataagaacacaaggtccagagagttaagatgactttctgcttacgtggcagagctcacatttgaacccagggctgtgtgactccmaaacctgtgctccttattagcctccagtccccatactaccctgtgatgggtgtagggatcattcttcccttgctacagttaaggaaactgaggccaaacagaagagatgttttcctcagggtcacatagcaagttcatggcac

SEQ ID NO: 502349 - DNA, 556 bp, Homo sapiens
aaccaatcacaagccgcaggatgcaaatcgtgttccctaattgatccatcaaggtatgcacagatcaggttatgaaaactggcactgtgggaggaatgtctgcacgtgcgaacacttagcactgggcccracacatgtgaagtattcggtgaacatcagctattgttattagtattatgtatcctacagatggtgggagcatcagactcttacaagctggagagagccatgactggttttgcttttcctttccttggtaaaacgactgtagcctctttaggttatcatgttattactacacctgcttcatagggtgggtatgaggattccatgagttggtgcgcggatgtatttggaatggttcctgtacagcataagcactcagtaacaacaataatatctaatactcattgagaacttttcaggtttactttccagatttaatcctcaccacccaccaatgaggtgggtattaacaccattcccagtttacaagtgaggaaactgagacattggaatgttaaataacatgcttaagttacacagtaaacataaa

SEQ ID NO: 502350 - DNA, 634 bp, Homo sapiens
tttttgtattttggtagagacagggtttcaccatgtctgccaggatggtctcaaactcctggacttcagtgatctgcccacctcgacctccccaggtgctgggattagggattatgggattattactggcgtaagccactgtgccttgccctttttggtttcttctaagccagttccaaccccaagcatccttcttgggcccacaattctggctacacaaaaggaaacattttctaaacaataagagatgttcaaccatggcatgggcagactacaaagtgagattctccctgtcccagaatatccccactgagacatctgtctgtcctggcaggagtaggagccatgtttataatgaaaggaaggctgaactagaagagctttgaagtccctccaaattccaagacctcattatagaacctaagccttgtgaagatagaaataaaatcagggcagcagagaagaaatcacatactcacatttaccaagcatcactcatggccaacacatacttatttygacttcactctggtgctggtttcagagaaccaagatgatgtccactataaactctgtttgttacagtgaaaagcacgcaggcatggagctttcactgtcaggataaacacgcatc

SEQ ID NO: 502351 - DNA, 667 bp, Homo sapiens
agttctgggaccttaagcaagttccttaacctttcagcacttcagttttcaaatgcgggaaacagcaagagctacacttgctgagcactcaccatgtgtcagcacgctccactgaaattcccactccaccctgtgtgatatgtggaattatcaccctcatctgacagatgagggagctagccgaaggatgtggttagcatttgttcaaagtcacagagctgggcttaccccgcagacctggctctgaagctcacactgactactgcaggaggaggggagatggagctgtggatgggcccacacagcacctgccctctacatgtgggtacttacgctccctttctttctcttttgctcttctcttatctcctgttatccaggtggtgggacttaattttctagaaatttccatctggttagatggaactttctaacctaggaaaaaaccccagcgcagcctcccctcaaatacactctaagtttcactgttgaggaaattagcttggtgcagctgaagcctgttttcaggagttgtttctgctggttccactcctsgctgtaaatcaaaacaaatctaagtgacttgatggtagaggaaacaaaatgacttcactcactcacgtgagcatgaactcatgcacacacacactcacacttacacatacag

SEQ ID NO: 502352 - DNA, 615 bp, Homo sapiens
cccgtgctgatccaccctgttgtgccaggtggactcctatggcggctccctgcgttacaacgtgcgctacgagttggcccgtggcatgctggagccagtgcagcggccggacgtggtcctcrtgggtgccgggtaccgcctcctctcccgaggccacacacccacccaacctggtgctctgaaccagcgccaggtccagttctctgaggtgggtggcgcctgagcccttagggctgggagcaaagggggatttaggctgggtaggcactgatgtgtgacccctgccaccttcacccatacccaggagcactgggtccatgagtctggccggccggtgcagcgcgcggagctgctgcaggtgctgcagagcctggaggccgtgctcatccagaccgtgtacaacaccaagatggccagcgtgggacttagcgacatcgccatggataccaccgtcacccatgccaccagccatggccgtgcccacagtgtggaggagtgcaggtgcctgagccggcagggctgggaaccacagagaccctagcaaggatagaggagaaacggcagggcctcaccgtccttgcagcgactcttttggtcctgtccccacagatgccc

SEQ ID NO: 502353 - DNA, 615 bp, Homo sapiens
cccgtgctgatccaccctgttgtgccaggtggactcctatggcggctccctgcgttacaacgtgcgctacgagttggcccgtggcatgctggagccagtgcagcggccggacgtggtcctcatgggtgccgggtaccgcctcctctcccgaggccacacacccacccaacctggtgctctgaaccagcgccaggtccagttctctgaggtgggtggcgcctgagcccttagggctgggagcaaagggggatttaggctgggtaggcactgatgtgtgacccctgccaccttcacccatacccaggagcactgggtccatgagtctggccggccggtgcagcgcgcggagctgctgcaggtgctgcagagcctggaggccgtgctcatccagaccgtgtacaacaccaagatggcyagcgtgggacttagcgacatcgccatggataccaccgtcacccatgccaccagccatggccgtgcccacagtgtggaggagtgcaggtgcctgagccggcagggctgggaaccacagagaccctagcaaggatagaggagaaacggcagggcctcaccgtccttgcagcgactcttttggtcctgtccccacagatgccc

SEQ ID NO: 502354 - DNA, 616 bp, Homo sapiens
tggcttgtttcactgggaaattcccaatggcactgtctgctattgggccactaaggtttttccgtaagtatcttttatttgyctgcctggaaaattcagacctgctgtcgctcttcggaagctgtagaaagaagaggacttaggagtccctgcattgaagagtggaaaggtttaattatccctgtctcagcttgtcacttcatttgtctctgtgttttgtgtcccctgttcaggggccttaggttttgttgtcctagaataagcatctagtcttttgtggctagagggggcagtgatctcaagggcagagaaggggactgagcatctaactacatacttcttaaatagactttccatcccttctctcattttttgtaaatccctacctttacttcatgaggacccagtttttgggtctgtgggacagtactgcagtgtagcaaatctggctacttcttgactttcgccaacttagagttaatttttattgtgtctcattaaccttcttttaaacccttataatttttatccctgttgttgcctctgttgtcttcatcattataactgtatgtcttttatatatatatataaataattcctttggtgtggtggttca

SEQ ID NO: 502355 - DNA, 464 bp, Homo sapiens
aacatcataagaaccctgggagttaggtggtttataaatgagcaaactaaagtctcagagaggtgaattaacttacaaaggtgacacaggagcaagctgaaagtcgacatttgacttcaggtctgctggtttccaaagtctgtgtgctttctgtggcaatgtctggaagatgmagtttcctatgtcatcagaatccacaatcctcccattggaaagtctgccacgtcgtgtacatgcaactccaagagcagccggagcagcagcaccgccaccttcgcaggctagcgcctcatgggtcctcccatcctctacggcgtgccccggacaatcggatcgcaggtgcggttcgctccttggcccctagcgctgggcgggcgggctggctcaagcggggagccagcgagcactgggggacccggagcggagccggctggaacctgggcgcgccgcgagctctcgcagcg

SEQ ID NO: 502356 - DNA, 516 bp, Homo sapiens
acaatgctttatgcgtgtaatcctagcacttttggaggcccagatgggaggattgctatagcccagtagttcaagatcagccctggcaacatactgagactctctaccaaaaaaaaaaaaattagctgagcatggtgatgcatgcctatagtcctagctactcaggagcctgaggtgggaggatcacttgaacttggaaggtcaatgctgccgcggtgagccgtgagctgtgagccatgagccatggttgtgccactccagcctgggtgacagagcaagaccctgcctcaaaaaaaaaagaaaaatgactcatcctgttgcgttaacattaattttatccatgtaattatttttaaatattttatactattcaattaaattgatatacagatwtttcttaggtggtattattattatttttaaagggacagagtgcagtggtgtgatgagagttcactgtagcttcaaactcctaggctcaagtggtcctctgacctaagcctctcaagtagcttg

SEQ ID NO: 502357 - DNA, 665 bp, Homo sapiens
aattatgcaatcattttgtttgcccccaactctatttgtataacatttcaaatcttccaaaaagttgaaataatagtagaataaacacctgtatatttattatttagattcgctagttgttaacattttgccacatttgctcgtgggacagatggaggagctcttcaatgtgtccttyccatgtaaaagaagtttgtccagagaggtcctctttatcacttcgttccttccttaatccctttcttcaacaaataattattaagctggtagaatgggtgaagaactgttctaagtgagatgcctttgtaatcactagtgaacgcatctgatcaaaatctctgtatttgccatgccttttcttcatagatatcttaaggggatgaggcccataatcacaggaaatcttattttttctcatgtattttaggtcttgaatttttcccctgagacaactatcccagttggaaaaataatgcgaaagggaaatgtgactattctttgttgttgttgatacccaattcttcaaagctacattagatgatcccaatgaatgcagccagcaagaaatttaataatcttctgaaatccatgatgcaaacagagccattttcttcaggtagagaacagaagcttcctttgtagagagttgctgtgtggacaaatgc

SEQ ID NO: 502358 - DNA, 665 bp, Homo sapiens
aattatgcaatcattttgtttgcccccaactctatttgtataacatttcaaatcttccaaaaagttgaaataatagtagaataaacacctgtatatttattatttagattcgctagttgttaacattttgccacatttgctcgtgggacagatggaggagctcttcaatgtgtcctttccatgtaaaagaagtttgtccagagaggtcctctttatcacttcgttccttccttaatccctttcttcaacaaataattattaagctggtagaatgggtgaagaactgttctaagtgagatgcctttgtaatcactagtgaacgcatctgatcaaaatctctgtatttgccatgccttttcttcatagatatcttaaggggatgaggcccataatcacaggaaatcttattttttctcatgtattttaggtcttgaatttttcccctgagacaactatcccarttggaaaaataatgcgaaagggaaatgtgactattctttgttgttgttgatacccaattcttcaaagctacattagatgatcccaatgaatgcagccagcaagaaatttaataatcttctgaaatccatgatgcaaacagagccattttcttcaggtagagaacagaagcttcctttgtagagagttgctgtgtggacaaatgc

SEQ ID NO: 502359 - DNA, 494 bp, Homo sapiens
gactaatattatagtagagcctattgctcctaggctacacacctgcactgcatgttactgcactgaatcctgtaggccattttaacacaatggtatttgcttatttaaacatgtataaacatragaaagatacagtaaaaatacagtattataatcttgagggagcaccatcatacatgtggtctgtcacttactaaagtcccattatgtggcacatgattgtatttgagacattttaaaacacaggatcttttctttattttattagtctgttaacatttcctgtctaagcattagaatgcaggtatttgagggcacaattaaaagtggagagactattcattcaagtgagtttattttgaaaatagctttttaactacttcttaagcacctaagcaatccatcatactttatcaccatgtacttagaagtaggaaagtagatcttgtccaaagagatacactatattttgatttacgagatactttactttt

SEQ ID NO: 502360 - DNA, 494 bp, Homo sapiens
gactaatattatagtagagcctattgctcctaggctacacacctgcactgcatgttactgcactgaatcctgtaggccattttaacacaatggtatttgcttatttaaacatgtataaacatgagaaagatacagtaaaaatacagtattataatcttgagggagcaccrtcatacatgtggtctgtcacttactaaagtcccattatgtggcacatgattgtatttgagacattttaaaacacaggatcttttctttattttattagtctgttaacatttcctgtctaagcattagaatgcaggtatttgagggcacaattaaaagtggagagactattcattcaagtgagtttattttgaaaatagctttttaactacttcttaagcacctaagcaatccatcatactttatcaccatgtacttagaagtaggaaagtagatcttgtccaaagagatacactatattttgatttacgagatactttactttt

SEQ ID NO: 502361 - DNA, 582 bp, Homo sapiens
cgtttgttaccgctacagtgacacactgatttcaaagacaatagttagatttgacatcatgcttatagtaatctataataatcaatctgttgccttgcttatattttttcaaattaatacaatattgatagacaggatgaccattctgcttctttgactttttactttattttaaaaatatttcagaattactgctgcccgttccctttttagcatagcatattttatttctgcagtatgagcaaaatctcccctggaaaatgttgcccctacggttatggatttaatttaaaacctaaatttaaaaaaatatcagaactcttttcttaaagctttaacaagcataagtactagctttccttttgtgtgtgtggtgggggggcaaactttcttatttttactgatgctagcgcattatagcttgtggttatatatttcaggaaatcagagaaccatctgccagrggcttcaaggctttgtaactatttagtttggggatagttacatgctgttgtgtaccaaacgactcccagaattagtggtttaaaaaaacaattttttatttgctgaaaattctacaat

SEQ ID NO: 502362 - DNA, 639 bp, Homo sapiens
tacaactcaatacagtgggagcagaagtgcacaggcttactagagaatgtttactaggttgtgggcaaccacagtatgttttacagaggaaatgagaatgtctgttaatctggtgacatgataagtggaattgtttaagagtttctattataggtgaaatacatcctaggtaaattagtagtacaaactatgagtttcactattattcagattcttccatgtgactcaatttttggttgattcatatgggcyggtcatcaataaccttgcatccaggaatgtaaaataaaattctctattgcttgagtggttacgaaggtttcaatgctgcaacagcagattgtctaggttctattaaacatttgttcatctagatgccctttctccaactctgctcccgtaagatcgtgttgtacccagggtctacacaatttgctcatgtgccacagtatttggttatcagccatgggcaacctgataaaatgtctgtgatcctcagtcaacctagaaggtcatttccttctgcaaaagtatttatttcagcacaaaaatgtatagattaaataagatttgtttgttgtggacaaataagggatatgctgtcatgctctgaaggaaacccaaatgtacttgcacagc

SEQ ID NO: 502363 - DNA, 471 bp, Homo sapiens
gctgaaggaaaacagagagaaaagaaatatatagatttaaaataaatgttaaatgctttatagagcagaacaagactctatgtaagaaatgaaccaactatacgttttgcagaggggctcacttgctttttggtaagtgtgtggtttagaatttcttagatgtagaagtttatttcacgttggccaggctggtctcaaactcctgaactccagcaatctgcctgctctggaaggatcgcaggtacttttgcagaaatgtagacaataaggtgacctcagcaagagcaaaagtacagacttgaagtatttccaaacttgaagggattattttaatattgtggttctattgagaagaaaggtgctgatagtaactttctttggttggtcttggagaaggttamtgacaagataatgagttgccaaggatgttcatgagcagaaagcaagtgagacctgcatcaacctattgca

SEQ ID NO: 502364 - DNA, 394 bp, Homo sapiens
acattaggaaaaattatagcttaacgaaaaagaaaattttaaagtctatgggttctctctggaatgcattccgttgaatcaatgaagtgcctcacaaaaaccttaataaccaatggtattgtacagaggagcagaacaacctttgatgtctcctttgattttcaaaggcagattctgaagggaggaagmggtccaaccagtcaaagaaagcactcacaaatgtctagactacaccaaggatcaaattaaccttcaatatcccgttccatagctatgataaaatttgtcttcctgaaacattagattgttattccagcatgttacttataaagaaaggattgtgcacaagaaaatatttccttttgtcatatcaggaaatgtagaaacagggaat

SEQ ID NO: 502365 - DNA, 401 bp, Homo sapiens
agagcagttcaagaggagacttaaattatatatgtctttcacattctctcattttatcaggaaactccaggagagccttcacaaaaaaaaaaawaaaaaatagaacaagagcttaaagtaaaataagaaggaaaaagtctgaaaatccactgttctaatcattcttattgttattttattaactcataggctgtttattcaatctaaaactgagaccccaaaaccaatggcaatattctggatatgatgttcatcaatactatgcaaatagttaatattgccttgccaaatcaacctctaactatacaatctataaacatatagattgctattctgccttcacacatttagagcatttgggaatcacaccatcctttataagcagattgcaataggaatga

SEQ ID NO: 502366 - DNA, 629 bp, Homo sapiens
gaggtttcccactggctgaacttaaccagaaggttacagcctctgactgcagttcagttaggtgagcctcttgaggttctataaatcgttatttttattttgatgataatatagaaattgttgaattccacttaaatcgtggaagggtgggggtggagattgaatctagataggtaaagtggttcttaaagatctccccatcatctcctgcgaacccaagcctagggcatggttgattaacccagggtgacaatgctctaggccaggacaatgagagtctttttttggaatttttattttaaactgcaagtaggaaaaaagagtcagcctctttctggtggcaaaagttaccatgtgactctgaggacctgctggargacatgtttttcatggtggtaaggaggccaggccaccaaaagagaagaaagtgcacataggttagtgctggaaagagggtcctggtggcacttgagtctgtttccagtagttcccgttgtacagtgctaccaatgtcctttccatacttcgcttagattaaaaaaaaagtcattaaccagatcctgttttgaaaatactttgaaatatggtaatgaagtattcttttcttacttctttgttacctttcccct

SEQ ID NO: 502367 - DNA, 339 bp, Homo sapiens
tgtatacattactgcttggcctgtggtgaagctctgttcatagataagattaatatatcatcatatcaacacttggctttttcaagaaaaattattcagcagcaattttccaattccccttagacagagaggaaagagacacacacacacacacacacacacccccacacacacacacacagagaaagagagagagagakaaagagagagagaatatgaattagataggagccaatctctttcatgtatgtccatttaacaaagcaagaactaaattctgacctgaaaaatcaacacagctatatgaattatcattctagcaacttgaaaagggaaaaa

SEQ ID NO: 502368 - DNA, 339 bp, Homo sapiens
tgtatacattactgcttggcctgtggtgaagctctgttcatagataagattaatatatcatcatatcaacacttggctttttcaagaaaaattattcagcagcaattttccaattccccttagacagagaggaaagagacacacacacacacacacacacacccccacacacacacacacagagaaagagagagagagataragagagagagaatatgaattagataggagccaatctctttcatgtatgtccatttaacaaagcaagaactaaattctgacctgaaaaatcaacacagctatatgaattatcattctagcaacttgaaaagggaaaaa

SEQ ID NO: 502369 - DNA, 485 bp, Homo sapiens
gctgtatacattactgcttggcctgtggtgaagctctgttcatagataagattaatatatcatcatatcaacacttggctttttcaagaaaaattattcagcagcaattttccaattccccttagacagagaggaaagagacacacacacacacacacacacacccccacacacacacacacagagaaagagagagagagataaagagagagagaatatgaattagataggagccaatctctttcatgtatgtccatttaacaaagcaagaactaaattctgacctgaaaaatcaacacagctatatgaattatcattctagcaacttgaaaagggaaaaaaatctgactttggatcttgggacagtggttcttgtgatagttacttgttgtatgatttaaaataccttagagtgatggtgaatgaataacatcaagcatttactttgcgagaaaraaaagtcataaaagtaatgtaaaactgaa

SEQ ID NO: 502370 - DNA, 269 bp, Homo sapiens
tgaagtttttcagacttggggatatttgtattatatatatttactggttgagaattccaaatccaaaaatttgaaatttgaaatgctacaatgagcatttcctttgagtgtcatgtcagttctcaaaaagtttccgattttggagcattttggattttgcattttcagatttgggatgctcaacctgtatgtgagaaggtttacttcctcrtatccttactgacaacatctgccatttgctgatgaaaatttggatttcactgtcattt

SEQ ID NO: 502371 - DNA, 520 bp, Homo sapiens
agaactaggggtctggaccctgcggctaaaattcttgagttgagcggttccgaccttcaggttttcttcatttgttttttctggagaaatgtaattcctttcacttttgcttggctttctgtaagttactttttcatggggtaagggtgagagtggagtggacgaaataactccttgaacccagcctggggaagcctccaggcagcttgggcccggtggccctttccttgactccacagcaccccctagtgagctgctggagatctgcgagctcagccaggagaagatgagctctgtgtttgaggacagtaacgtgtacatgttgcacatgatgtaccaggccatgggtgtctgcttgtacatgcaggactgggaaggagccctgcaatatggacagaaaatcattaagccctacaggtgattgcagaggctgttctaatcatccacggagtggaatttggttgtttagaatgtataygatagtgtcatcttcctgcccattgctgagacttgcctagcg

SEQ ID NO: 502372 - DNA, 578 bp, Homo sapiens
tggcttaagcgttttgagcctggccatgtaaatcttgggtcattggtttctttactttgtattgcccttgagagagatgcccatcttggaacaagcaatcatctgtggycagactgaggtcgggtggtgcagagcatggctgggcctgtgggcagagactgcagacttggacagatttcctaagaaggggttcaggtgttgcagacattttaaatgatacgtcgagaaggtgagggcatgttatgtgtgtgggttgcccttatagtctcttttagaaacgttgtatacttagaaagtataggctattacccaaagagacaagttcattaggtcaccacgtctctcacttgaggcctttattttattttcatcttgtatattaatctaatatattttgtcatccttattaattttcaaggctaacaaacaggtttttggcataccaaaaggggacctagataccaagtcccattaaattgtaagagctgttttaccacacacacttttattacagtagacttaggctgcccaatatatgaaccttctcagtggagtacaacctgggatcctactacact

SEQ ID NO: 502373 - DNA, 578 bp, Homo sapiens
tggcttaagcgttttgagcctggccatgtaaatcttgggtcattggtttctttactttgtattgcccttgagagagatgcccatcttggaacaagcaatcatctgtggtcagactgaggtcgggtggtgcagagcatggctgggcctgtgggcagagactgcagacttggacagatttcctaagaaggggttcaggtgttgcagacattttaaatgatacgtcgagaaggtgagggcatgttatgtgtgtgggttgcccttatagtctcttttagaaacgttgtatacttagaaagtayaggctattacccaaagagacaagttcattaggtcaccacgtctctcacttgaggcctttattttattttcatcttgtatattaatctaatatattttgtcatccttattaattttcaaggctaacaaacaggtttttggcataccaaaaggggacctagataccaagtcccattaaattgtaagagctgttttaccacacacacttttattacagtagacttaggctgcccaatatatgaaccttctcagtggagtacaacctgggatcctactacact

SEQ ID NO: 502374 - DNA, 654 bp, Homo sapiens
ccatcaccagcacattatctctgattttgccttggatatatttgttatcttaaaggctcctctaacttttagcaacttaaaatggaataagggttgccacatttcccatttaatggtgtctttgtcataggaaaaccctcagttatttcaaaggagtacagtgtaaaataattccttgattagtgtagattgtagttatgtttrtaggggcagggagggggttctgaagagggtgaagggagatagaggatgataagtattacaaagtagaaaaacatgcttctgggaagggacttatttcatacgatttttcctacttgggaggtttagtcaattttataaaaagaagtctccaaaatgatgatttaccagccacatgcaggtagtcttctttggtaaatgaacttggggatagtgaaaatgagaatccccaggtaccaggcagaagtacccctattaaccccacagcttgtgggtgacacactttcaaccatgtctcacattaataggtcatgtggaaaaaatattatcttggtgaaagccagttgcatagattaaacaacaaatgctccagcccaaaaaatcacctgggagggctaaaggtcagtgaatagaataccagtctagagaatcttataaatctggagaaaatta

SEQ ID NO: 502375 - DNA, 662 bp, Homo sapiens
ctgtagagatctgcagagaggttcctcaaatctcattctgagtgctaatgtgcacatgcatgataagaaatttttcaaatctggagaagaagcactggaaaggaatagatggaataatcgcaagagatcacataggatcgggaatgttccagccagccaaagtggaaaaacctctaatccatagggcagtggctggagtcctcagaagggtgttacattcctagtggagccatatcggtgccttttaaagactgctctagagcccccttcacaaagcataaaagtaagccttgaaagaatcagacttattccaagtaatttaactacatcccaaaacaaaaccccacaatatttaaagaaatacagcaaaatccagcaccttttacaaatttmaaaatggctagctctattaaaaaattaggggtcacacaaagaatccaggaaatataatccttgagcaagagaaacaccagttagagaaatgacatcactaaaagtaataaagtaagaaaatccaaattctacccctccatcaaaacaaaaacaaaaaaattgtaaaaactttttgaatcaacttctggaaattaaccaaaggcttgcagcaatctggtgctgaggtcaagacttctcctccggactccacttctgggcaatcctgaaac

SEQ ID NO: 502376 - DNA, 516 bp, Homo sapiens
ttagacatcagacaccaggcttctatatacacattggttgctgggaatggtgtccacactagctcacactaggctacttagaaactttgtctctcagattacatcgaccaagaaagtcttcacccatcttactatctgtgtggagcaatccaatggaakaatcaatagccctttccctaagggttcttctgccctgactgcaattcacattgtctggtgtccctcaatttctctaatcttaaaaacagagaagttattttccttctctctactccatccaccttgtcacgccatatgccagccttttcagtttgctcattatacaggtgatgtgctcagccagctacctgtccatgtttcctttcctgtttagcctcttttccctggaagtgaacaaaggtattttctgaacaggagattattttctctgcagtcaaactggaatttccagtgtgagcttcctccaccactttccttgaatggcagacatttgctcagggaaaagctagcaggcaa

SEQ ID NO: 502377 - DNA, 680 bp, Homo sapiens
tttggttttacttggtcatattgcttatggggataatagtcagtctaaactaatagtagtgaattcccctttcctggggtgttcaagtagcatttgaaggaccatgtgcaggagtggtccttctatccactaacatctgatatacttaacatccataccaaggtattcctttcccaccctggaatcttttagtaggcctttgtactatattctgattctgggtgactttygtttcccctctactacccctagtctcccaaatagatgaacattgccctcatctagtgttttagttcattttctgtggcttataacagaataccacacactgggtaaatgataaacaatagaagtttatttggctcatgattctggatctgggaagtcctagagcatggtaccagcatctaacaaggttcatcccatggtggaaggcggaacgaagtgcacaagacagaggcactagggatcaggcttaccttataactacccattcccatgataactaacccactcccatgacaatgacattaatgcatttgtgaaggcaccaccctcatgacccaatcacttcttcttaggcctcacttccaaacactgttgttttaatgattaagtttccaatgcttaaacctttggggaacacattcaaatcacagcatctactaaatgacagtagt

SEQ ID NO: 502378 - DNA, 680 bp, Homo sapiens
tttggttttacttggtcatattgcttatggggataatagtcagtctaaactaatagtagtgaattcccctttcctggggtgttcaagtagcatttgaaggaccatgtgcaggagtggtccttctatccactaacatctgatatacttaacatccataccaaggtattcctttcccaccctggaatcttttagtaggcctttgtactatattctgattctgggtgactttcgtttcccctctactacccctagtctcccaaatagatgaacattgccctcatctagtgttttagttcattttctgtggcttataacagaataccacacactgggtaaatgataaacaatagaagtttatttggctcatgattctggatctgggaagtcctagagcatggtaccagcatctaacaaggttcatcccatggtggaaggcggaasgaagtgcacaagacagaggcactagggatcaggcttaccttataactacccattcccatgataactaacccactcccatgacaatgacattaatgcatttgtgaaggcaccaccctcatgacccaatcacttcttcttaggcctcacttccaaacactgttgttttaatgattaagtttccaatgcttaaacctttggggaacacattcaaatcacagcatctactaaatgacagtagt

SEQ ID NO: 502379 - DNA, 680 bp, Homo sapiens
tttggttttacttggtcatattgcttatggggataatagtcagtctaaactaatagtagtgaattcccctttcctggggtgttcaagtagcatttgaaggaccatgtgcaggagtggtccttctatccactaacatctgatatacttaacatccataccaaggtattcctttcccaccctggaatcttttagtaggcctttgtactatattctgattctgggtgactttcgtttcccctctactacccctagtctcccaaatagatgaacattgccctcatctagtgttttagttcattttctgtggcttataacagaataccacacactgggtaaatgataaacaatagaagtttatttggctcatgattctggatctgggaagtcctagagcatggtaccagcatctaacaaggttcatcccatggtggaaggcggaacsaagtgcacaagacagaggcactagggatcaggcttaccttataactacccattcccatgataactaacccactcccatgacaatgacattaatgcatttgtgaaggcaccaccctcatgacccaatcacttcttcttaggcctcacttccaaacactgttgttttaatgattaagtttccaatgcttaaacctttggggaacacattcaaatcacagcatctactaaatgacagtagt

SEQ ID NO: 502380 - DNA, 579 bp, Homo sapiens
gtttctccttcctgattatggagttcacctgtgtgttttgctctcatggatcagtcatgtgctgcctgtttatcaatgcctgaaaacagttgctttaagtagtttttctagtttcttactcttttgtgacaggaaggcaagtccagtaccaggtaactcagtcatggttcaaagtgamcgtactaacttccttatacacttttccatcatttgtgatggagacactcattaaacagggcaaattatagagaaactctgtagtgtctcttttaatgtccatggaaaccaaaatcaggtgaaggagtaaaccaacatgggtctatgaaaaataagctggccaaaatttgtgaggtaatgtgacttaaatgatcatatgttttaccaatagttttatgagcatgaaatccacaataactagaaaaataaacgttaatagatggactcaaaactttttactgcaattcaatatacagtcttttatgatactttaatatattagatgatagttctgaaattattataaaatactagtgaacataacagattaaagcattctttccaactattttgaaaaccatt

SEQ ID NO: 502381 - DNA, 591 bp, Homo sapiens
ctggagccaactttctctgtttatctcagtgtactgtacattattgaaattttctgtagatgctataaaagttagaaagcaatggcctaagaatgttttaatgtagattcccaaccctggtcaaacatcgagataaaaattctataccttaagcacacttatcaattttgatcttggtgccttctgtctctttagaaagttgtataagtagatatgggcatttggatttgatggaaacttttcatcatatgcataattggtgagtacctcttgggctccatctcgatccccatagaattccagcatctatataaaataaatcataatatcttagctgaattctgtaagacagctataygaaaaataatacacagcataagtttactgatgggtattttttaaaaatcacaaaactgacagggttcccattttttccctgtattttgttactactaataaacaatgcagcaacctcaacataaattctcttcctataaaaaataagagtcctcaaagcagggaacactaatgcttgaaaatgtgatgcagctaacctcagtgccctacatcactgcagccacaaaaggagtg

SEQ ID NO: 502382 - DNA, 595 bp, Homo sapiens
ctgagacattagaatcgcttgaacctgggagggggagattgcagtgagctgagatcatgccactgcactccagcgtgggcaacagggtgagactacatctcaaaaaaaaaaaaagatctatacaaacatgtatttatacatttttactatttgtataatcgttaaaaattaacaattttaactaatattaactaatcacctccgaatgaagctagttaaaaagctgaaacaggccaggcgcggtggctcacgcctgtaatcccaacactctgggaggccgagtcgggcagatcacgaggtcaggagagcaagaccatcctggctaacacagtgaaaccccatctctactaaataagaaaaattagctgggcgtggtggcgggagcctgtagtcccagctacttgggaggctgaggcaggagaatggcgtgaacccaggaggcggagcttgcagtgagctgagatggcaacactgcactccagcctgggtgacagagcgagactccatctcaaacaaacaaacaaacaaaaagctgaaacagtcattacaatctaatttaggtgcraaatttaacactgcattgtcttctccatac

SEQ ID NO: 502383 - DNA, 628 bp, Homo sapiens
ttctctcactgctaactttctgtattaatttttgttgtttatatgtgtgccttatttaccctacaaagcatgaagcttctagaggacaagatgtatttcttattcatcttgtaaatctcattgcacttagcactgtatcttacaaatgcatgtaatacatccagtataatacattggataaataactaaagcaataaaataatgtaatatttagcatacaacagttggttccattgtggtttttttttaaatatcattttgtaaaataagtcttccctaggggtaaataaggacttctagagtaatatttaaaatttttcctatggcatttttggggtgaccaccygtcatctaaattgtatatggaagcatgtaactcaggaaaatcccaagttaattttagaggattattcattcaaaaaaattacttaaaatctactatgtatcagataaggttctgggccctaaaaatgtggtttttccctaagccttaaggattttaatccccttacgggatacacattcacaagattgaacattcccaagtcgtaaacttgcatatagtctgtccttaagttgctttggaaaaaccaaagagtataggggagtggttcttaaactgtggtcc

SEQ ID NO: 502384 - DNA, 627 bp, Homo sapiens
tgctttacactgtatttctaatatgtggagattattcacaactttgctattcccctcattaactctccaggaatattttatagggctactrcataattgttattgaagacaaacctcattttgaagtagacatgctttaaaaattagcattcacaactgggagaaattttaatacttgttggctgggcccggtggctcacacctgtaatcccagcactttgggaggccgaggtgggtggactgcttgaggccaggagtttgagaccagcctggccaacatggcgaaaccccgtctctactaaaattacacaaattagctgggcatggtggcacacgcctgtaattccagctacactaggaggctggggcacgagaattgcttgaacccaagaggcagaggttgcaatgagccaagatagtgccactgtactccatcctgggtgacagagtaagactgtgtctcaaaaaaaaaatttttttttaatgcttgtctagtctgacatccacaatttattaaaagaaaacccagagctagagattttcaaacacatggcaaatttcaaaattaaaataaaatcctaagtatcttgattcggcctttgttttatgtagtctaagaatgaaaaa

SEQ ID NO: 502385 - DNA, 627 bp, Homo sapiens
tgctttacactgtatttctaatatgtggagattattcacaactttgctattcccctcattaactctccaggaatattttatagggctactacataattgttattgaagacaaacctcattttgaagtagacatgctttaaaaattagcattcacaactggragaaattttaatacttgttggctgggcccggtggctcacacctgtaatcccagcactttgggaggccgaggtgggtggactgcttgaggccaggagtttgagaccagcctggccaacatggcgaaaccccgtctctactaaaattacacaaattagctgggcatggtggcacacgcctgtaattccagctacactaggaggctggggcacgagaattgcttgaacccaagaggcagaggttgcaatgagccaagatagtgccactgtactccatcctgggtgacagagtaagactgtgtctcaaaaaaaaaatttttttttaatgcttgtctagtctgacatccacaatttattaaaagaaaacccagagctagagattttcaaacacatggcaaatttcaaaattaaaataaaatcctaagtatcttgattcggcctttgttttatgtagtctaagaatgaaaaa

SEQ ID NO: 502386 - DNA, 627 bp, Homo sapiens
tgctttacactgtatttctaatatgtggagattattcacaactttgctattcccctcattaactctccaggaatattttatagggctactacataattgttattgaagacaaacctcattttgaagtagacatgctttaaaaattagcattcacaactgggagaaattttaatacttgttggctgggcccggtggctcacacctgtaatcccagcactttgggaggccgaggtgggtggactgcttgaggccaggagtttgagaccagcctggccaacatggcgaaaccccgtctctactaaaattacacaaattagctgggcatggtggcacaygcctgtaattccagctacactaggaggctggggcacgagaattgcttgaacccaagaggcagaggttgcaatgagccaagatagtgccactgtactccatcctgggtgacagagtaagactgtgtctcaaaaaaaaaatttttttttaatgcttgtctagtctgacatccacaatttattaaaagaaaacccagagctagagattttcaaacacatggcaaatttcaaaattaaaataaaatcctaagtatcttgattcggcctttgttttatgtagtctaagaatgaaaaa

SEQ ID NO: 502387 - DNA, 627 bp, Homo sapiens
tgctttacactgtatttctaatatgtggagattattcacaactttgctattcccctcattaactctccaggaatattttatagggctactacataattgttattgaagacaaacctcattttgaagtagacatgctttaaaaattagcattcacaactgggagaaattttaatacttgttggctgggcccggtggctcacacctgtaatcccagcactttgggaggccgaggtgggtggactgcttgaggccaggagtttgagaccagcctggccaacatggcgaaaccccgtctctactaaaattacacaaattagctgggcatggtggcacacgcctgtaattccagctacactaggaggctggggcacgagaattgcttgaacccaagaggcagaggttgcaatgagccaagatwgtgccactgtactccatcctgggtgacagagtaagactgtgtctcaaaaaaaaaatttttttttaatgcttgtctagtctgacatccacaatttattaaaagaaaacccagagctagagattttcaaacacatggcaaatttcaaaattaaaataaaatcctaagtatcttgattcggcctttgttttatgtagtctaagaatgaaaaa

SEQ ID NO: 502388 - DNA, 643 bp, Homo sapiens
cataggcatgcgccactgtgcatcgctagtctgataatttaggaagagcaaagcaaaattacattttcagtcaatgatcttatcttttccgagcagttacacagccactgagcaacttaagctgctgttaacctttcttgtactctccttttctccaccccactgccatacatattaaaaccatcattctcagcaaactatcgcaaggacaaaaaaccaaacaccgcttgttctcactcataggtgggaattgaacaatgagaacacatggagacaggaaggggaacatcacacaccacggcctgttgtggagtgcggaagcggggagggaatagcattaggagataaacctaatgttaaatgacgagttaatgggtgcagcacaccaacatggcacatgtaaacatatgtaactaacctgcacrttgtgcacatgtaccctaaaacttaaagtataataataaaaaaagaaaagttctgaaaaaccaaataccattttgctagttattcagatgcagatgaagaaaagtcacctgccaaacttacattgattatcagcactgcagcagataatagtgagcacagacaccaaggacagtgtaggaattctaatcactcacttgctccttaacaacctgctccc

SEQ ID NO: 502389 - DNA, 474 bp, Homo sapiens
ctgccagtggaggaattcccttttcgtgggctctctggcttttggcaggggcttggggaatgcggccattgcaagtgtggttagaatctatccctagataatcgtgaatgaagtcctcatgaagtttatattctaatgaagaagacagaccatagatgaacaaataaatatataatgaagagtcagcgaagataactgataggtayaaaattaaagcaggacaaagaggtacagaatgctagaggtgttactttctatagggtggtcagggaaggcatctgataaagtgtaacactgaagtggagatctggatgaagtcaaggaccaaactatgtgactgtatgaagggagagcatcaggctgcagacacagcaaatgcaaaggccctgaggcaggaacaggctgacttgtgggaggaacaaggaggctagtggtgggtgggagtgagcaaggtgagagtggtgagaaataaca

SEQ ID NO: 502390 - DNA, 548 bp, Homo sapiens
cccctgtcagcctcccttccatgctcgtcggtgccctaagcctggatggacaatggttagacaatggtaacttctgctccttggcaactacctatgaggaacaaagggcaacctcatcacatctctctcctaccacccacatttaagtttgcataagcctataagcctatgtttgcttttagactgggtttccaggtttttgcatactacccaayccttttgtaaatacacaataatcccaggaggttatttggtttctcattaacaacagtttcctgtcttttaaggctccaagacataccagattatgggttacacctgagttctaattccttttctttattaggcagtgatactattgtgttatcacaaatgatttcatcttgccttcagaattacttggcattcaaggtcatctggttaataagatgttagagaagccacgaaattaattataattcctgtctgacaagaataacagggttttttttaaaagaaaacagtctctactgatcagtccttcatatgttttctaaccctagagtata

SEQ ID NO: 502391 - DNA, 548 bp, Homo sapiens
cccctgtcagcctcccttccatgctcgtcggtgccctaagcctggatggacaatggttagacaatggtaacttctgctccttggcaactacctatgaggaacaaagggcaacctcatcacatctctctcctaccacccacatttaagtttgcataagcctataagcctatgtttgcttttagactgggtttccaggtttttgcatactacccaacccttttgtaaatacacaataatcccaggaggttatttggtttctcattaacaacagtttcctgtcttttaaggctccaagacataccagattatgggttacacctgagttctaattccttttctttattaggcagtgatactattgtgttatcacaaatgatttcatcttgccttcagaattacttggcattcaaggtcatctggttaataagatgttagagaagccacgaaattaattataatwcctgtctgacaagaataacagggttttttttaaaagaaaacagtctctactgatcagtccttcatatgttttctaaccctagagtata

SEQ ID NO: 502392 - DNA, 579 bp, Homo sapiens
tccttcatatgttttctaaccctagagtatatcctgttgctttgaaataaataattctatgagttttcatttccttctgcaaaggtttctcctatattcctgtgacagagcatgccagctatgcatagtgatgaggcattcacttttatgtcttcagagtggaaatctattgaattccttgctcagaattggcaacctaagtgatatactgacactgtttaatatttatactgaagctatgaaggrcatttctgactttttagtcaagaatggtgaaaatttatccatatgaatttatgaggtttaaaagtggaacttgtctttcttcttacagaatcaattagccctaaggccccagggcaatggagatagccaggaattgctggctgcctgaaccaactgtggcaagtatttttatttcagtctttggggaaagctggacttacatccttttgacctctgttcctcttcaatatccctgttcttatttttgcagtagaccaccaatgactttcaacatcaagcacaagtgtttcctgcagagccgggcagaacccggccattccagcttcccggctc

SEQ ID NO: 502393 - DNA, 608 bp, Homo sapiens
tttcagctggaaaatgacttgttatggcacttgaaattatttctcaactgcaaattttaccactggaaaaatatctagaaaatattataaaacttacccatggtcataggattcctgagatttttgtggttcctaagattattatggactagactctagaagtttcaattacatattgattcctcatttcttaagcctatggaggccataaaatgtgagggttacaaatacctaagaatatctcagttcaaagaaaaaaccctggaaaattgcaaattctaggataacataccctttctttaaagttgaaaatgtrtatcgtttttaaaatttcaacaagtttaaattggacatttacttaccattcattagcttcctgcctgcatgtatgcatatatgtatgtatgtgtgtgtgtgtgtatgtattcattcctgattcacaaacaatgctttggaatttatagtgtatgtagtttcaaatcctgtttggatacatgaggagtatcatacatctacttggcagtcatgaatagaactgacacgtgagaattagaaagtgatgtaaaacacattagaatatgcatatagaataattcaaagaagagagc

SEQ ID NO: 502394 - DNA, 633 bp, Homo sapiens
tgggatgttgtgcctaagaggatgtttgcggacacagaagtagataggagaaaagatggagagtgttgctcatgacattctatcccaagaaaataagggaaactaaaacatatgtcatcctggtgcttagggctaccagtcatctccactcagatgataaattatagcagatttcagtatttgttatacatgcaaataagaaatgaacacctaatttgtaatagattaatttctcaaattcacactcaggaacataggataaaatatgttccataaattcttacagaataacaagagtagacaacaagctatataaagaagatggaagctgctgagaggactggaagacctactcactagtcaaaggttcattcctacactctactctagcaaagttatacatttctacatgtcatgggtctttggggttgttctgaaaccttgaatgcagaatacatgaatgccaaagttttatattattttyggttgtttctctgcatgactaaggcacggaggtttgagaaggaaaagaaaaaacctgaagaagccaaaaaaaatgtctaagccattattctttgaatttggtctttattaatttaacattgctctgagaagctaaatctctaagtgaaa

SEQ ID NO: 502395 - DNA, 673 bp, Homo sapiens
cattttgtaaatgtgtgtatgtgttccaaaggagaaataaataagccataaatctcatatcttaaaaaacagatcctatacatagcaaggtaattacatttaacatagagtcttcgtcataaaaattacttaggaggttcatgggaacagtgaactccagtttaactttcatggtttcattcttgtctgacccaactgttctggccactaccacatctaccttgcaggtcaaggaagataccacatacctcaaaatggtcagtgcatcaccttccattcagtgacagcacctgagctgactgtaacatgatccagttgacctaatatggtctctctttcttctaattaatawaaacagaaagcttttgcattatcttttcattgttaagagaaatatattgggagtatttttacatgtgagtgtgtgcacatgtgtgtgtgaactgtcaggtaaacataatacacaccatgttaatattaattacttatctaagtgtcaccaactgtatcctcttttttacataatagaatcattattatatttgtttttgtttctcatgttgtaaaatactgagacagacagatgctgccacattctcattgggttcataccagtattttcctcagactactcacgatcctgtcttaggacctaagtcacccacctctctta

SEQ ID NO: 502396 - DNA, 673 bp, Homo sapiens
cattttgtaaatgtgtgtatgtgttccaaaggagaaataaataagccataaatctcatatcttaaaaaacagatcctatacatagcaaggtaattacatttaacatagagtcttcgtcataaaaattacttaggaggttcatgggaacagtgaactccagtttaactttcatggtttcattcttgtctgacccaactgttctggccactaccacatctaccttgcaggtcaaggaagataccacatacctcaaaatggtcagtgcatcaccttccattcagtgacagcacctgagctgactgtaacatgatccagttgacctaatatggtctctctttcttctaattaataaamacagaaagcttttgcattatcttttcattgttaagagaaatatattgggagtatttttacatgtgagtgtgtgcacatgtgtgtgtgaactgtcaggtaaacataatacacaccatgttaatattaattacttatctaagtgtcaccaactgtatcctcttttttacataatagaatcattattatatttgtttttgtttctcatgttgtaaaatactgagacagacagatgctgccacattctcattgggttcataccagtattttcctcagactactcacgatcctgtcttaggacctaagtcacccacctctctta

SEQ ID NO: 502397 - DNA, 589 bp, Homo sapiens
tgtatgtagttacctaatgtagtaaaatcaaatagaattattagtaacatcaattatgtatcagggcatatcacagacacagtttcaaaaaaaagggactactaaataccaagcaaacttgttcgaaaatgaaagcacaagaaaagcacagtctagatgtgaaattaggcaatttggaacataaactgaatctgagtaattgcagcattgatatctacaaggcaaggatatctatcacctggagayggcagagattaactggtcagtcagtgggttcgtagttagccggatggccaaaagatctggctctaatttggtatttttcctcccaatcagctccaattacaaacaaatggaacttctgaggtagatacagggacataagataaatatctatattaaagcattgctaaaaacagtcttcttgttttggagtcatggtccaaatatcttatttgtttctttcctttttttttttttttttttttttgagatagggtctgcctctgtcacccaggctggagtgcagtgttgagatctcagttgactgcaacctctgcctcctgggctcaagtgattctttcacctc

SEQ ID NO: 502398 - DNA, 567 bp, Homo sapiens
ctgtctgtgttgagtgactatcagaaaatttcatttgatgcaagacttaaagaaatttaactgctagaggtttttttctaatatcaaacaggaattggtgttatttcagttttttcacattctagatttccttattgtagtatgtatgcagcaattgcctcagcctcatggtgagtcccttttgcgattctataccatctagggcatatctttctcccactgcttctattaacaatcccaggtgtctagtacaggtgtccagtacattggagttagcctgctgccggaattactgaataatttcttgtcagaacaaaagagatggagaggagaaactcaaatttttctrttttctttgttttcaacccagtgtttcctctaatttgtatgaggttacttacgtgatctgctttagtcaattttgatcaatgaaatcagtgtttttttgttagaagcctttaaagaagtaaacagatttctttttcctcaattattatttaaagcaaaatgcttttagtctgaccatgtaaataagaccaagcatcgacttttttatagaaaatacta

SEQ ID NO: 502399 - DNA, 665 bp, Homo sapiens
ttcctattttacagtctatgaactgtgctgtcttaatggctgtaaaattgagacttcgtgccatttttcagtttgaggtctttctggttcataaacttttcttttgcatgcatagtaaactctcaaaattctaacttgatctgattttgacacacataatatacctagtgtcttaaaatacaaacaaggctgcatattttataaaataatctagtgacctgccatatcagttcttctggcttttctaagtctaataataccacttatatatcttyaaaagtatatttagaaaaataagcatacttggagatcacttaatgattctctatttactttttttttttattaaatataccaattactacacattttgttaaagtccttctaaagagagaattgtacatttgagggttgggcttgtagtatcttataaggctgaacctgtcccattcccttagaaaaaaaacgcataaaataagtagtgcacataaagtaatgaaaaaatatctccattgttctttaaaaatatacattttttctctattaaaagcaatgcatgtttctttaaattttgaaaaattgagaaaaatagaataaaaaactaatcattgctgaaaacaaccattattaaaagaaggattcattactcttgctatcatcttgaa

SEQ ID NO: 502400 - DNA, 616 bp, Homo sapiens
ccaccccatcttgattctctgttattctttctaaataacactttcactttactaaatcaagtggtcaatttcaatactcttcttacttgacctatcattcctatgaattgaagtaacaccttgcttactttagtcttaccttgggttcttgaaagtcactcattccacttctacagatgctatatcatctaatttttggcatattaatcaatgcatagagaacacactgcttgatcctataaagagatttacaaatacctgcccattaaaatatcccccaaatggttacatttgaaattagtttctaagaacacygatgtagagaaagtaaattttttctgttatttaatgttgaaatatccaaaaaagtattacagaattgagtcaattcacataaagtttagcaatcatgaagatccactaatgtggtttattatcagaatcacttagagaactattaaaagacagaattcccacatcatcagtgttactgcataatgtaaagcctagtgcagaatctcacacataaataccttcctgggtatctgcataagaagacagtaattcattccgggttctgatgatggtaccttccctcttgtcctaaaaaaataac

SEQ ID NO: 502401 - DNA, 524 bp, Homo sapiens
aattaattatagtaggttaaggttgctaaaatatgtgtgtgtgtttatgtatcatgtttattttatttttaataaaatgtgtagtttttaatcaaggagagatgttattgatactcatccaggtcagataaaattcccctttccacaaacagaaactcctctccagtgagtttacttattcatatcctttcagtttattgtctcttatctctggaagtggttatgtaaacagttaatacgtgctcttgggtctcctttgaacactcgtagccccctacctgttgagtagctctctatcacatcatttgtttcactttttacacatttccactctgttatattttatctttttatgtgcatgcttacttgtttattgtctctctccccctgtaacagaaaatgttccttgggatgggcataacggctcacacccgtaatcccagtccctcctgcaggaacactgaatttcaacaactaattgcacacacacaaaagcgcaasgataacaacagaaaaccgggtga

SEQ ID NO: 502402 - DNA, 524 bp, Homo sapiens
aattaattatagtaggttaaggttgctaaaatatgtgtgtgtgtttatgtatcatgtttattttatttttaataaaatgtgtagtttttaatcaaggagagatgttattgatactcatccaggtcagataaaattcccctttccacaaacagaaactcctctccagtgagtttacttattcatatcctttcagtttattgtctcttatctctggaagtggttatgtaaacagttaatacgtgctcttgggtctcctttgaacactcgtagccccctacctgttgagtagctctctatcacatcatttgtttcactttttacacatttccactctgttatattttatctttttatgtgcatgcttacttgtttattgtctctctccccctgtaacagaaaatgttccttgggatgggcataacggctcacacccgtaatcccagtccctcctgcaggaacactgaatttcaacaactaattgcacacacacaaaagcgcaacsataacaacagaaaaccgggtga

SEQ ID NO: 502403 - DNA, 554 bp, Homo sapiens
ggggcaacagagtgagactgtgtctcaaaaaaaaaaaaaaaaaaagattccctctggatagttcagattcccctaccaacccaccagaaatgaaatgaagagggaaaaaaaatccttccaacactgcatactctaacaaaggccacctatcggaaatgtggtctcggcattccactactgcaaccacatttttaaaaaaacagaaaatacccctctttacacattttatacaactcatccccctttctttattatcccaataaactttcacaaggatataattttagcttgccaaaaagccagataattaacacatatycattaagacagtaacatttcttttttaatgaaatgttgaaagacagtttttaaacatttttgaaggtctacttgatgagattatttttatttacattctttttttatagatgaggaccctgacagggttatctctaacttgctcccaatcacaaagatagtcaataggagagcaggaatattaccctaaactcatgctctcgctaacagttaacttcccagcttcattcttatgc

SEQ ID NO: 502404 - DNA, 339 bp, Homo sapiens
agccacacttcctctaggctctgcttctagacaacaactgagcacaacaggattactggtgtgcccagtcttgcccaaagtggactcctctcatgagcagctttttgccagggactccccatcaacttcactgagattcttctcagagctggtctatggtctaagacttccttcccagtccttcctccctctgtcctctcccaggggtcagcctggccyctggatctaaagcctctccctgcctactcttgctcccttgctctttagccctcacaggtgtttcctttgtcttggcatctgcttctcaaaaaaacccaagttgacagaaataatatatga

SEQ ID NO: 502405 - DNA, 431 bp, Homo sapiens
ttctttttgatgttattgttagatttagctcttataccactctgcacttgttagaytgattcatggtttgtccatctctaccactaaatcatgggttcgtggcagacagcatctatgtatcgatcatttttagcacctagcacagaacctagcacataggagacattcattacatacttattagactaagttgttgtataattgataactctgaggcaggcaggcatcgactgggttatcaatagcattttgttggggagtgaaatattaatctaagagagttgagttgctttctatcaagtgatgaagacatcatgtactgtaactaacaacctaaagaatgttcctacaacaatgtagctgctttttgtaggattaatatattctagtactaggaaagttaaattgcttaaattaaaatattgataact

SEQ ID NO: 502406 - DNA, 431 bp, Homo sapiens
ttctttttgatgttattgttagatttagctcttataccactctgcacttgttagattgattcatggtttgtccatctctmccactaaatcatgggttcgtggcagacagcatctatgtatcgatcatttttagcacctagcacagaacctagcacataggagacattcattacatacttattagactaagttgttgtataattgataactctgaggcaggcaggcatcgactgggttatcaatagcattttgttggggagtgaaatattaatctaagagagttgagttgctttctatcaagtgatgaagacatcatgtactgtaactaacaacctaaagaatgttcctacaacaatgtagctgctttttgtaggattaatatattctagtactaggaaagttaaattgcttaaattaaaatattgataact

SEQ ID NO: 502407 - DNA, 431 bp, Homo sapiens
ttctttttgatgttattgttagatttagctcttataccactctgcacttgttagattgattcatggtttgtccatctctaccactaaatcatgggttcgtggcagacagcatctatgtatcgatcatttttagcacctagcacagaacctagcacataggagacattcattacatacttattagactaagttgttgtataattgataactctgaggcaggcaggcatcgactgggttatcartagcattttgttggggagtgaaatattaatctaagagagttgagttgctttctatcaagtgatgaagacatcatgtactgtaactaacaacctaaagaatgttcctacaacaatgtagctgctttttgtaggattaatatattctagtactaggaaagttaaattgcttaaattaaaatattgataact

SEQ ID NO: 502408 - DNA, 603 bp, Homo sapiens
cttaaggggctgggggctgactaggagaataagaattagaaaggaagagtttgtgtaagttagagaaaacaatattagacaaatcatccattatttatgtcattaaatatatcagtggtctgaatttaggaagcatgctggtctggacaacaggaaagaactatagtgtcatgagtttcattattatctgcttgatattacacaaggcatttccatataaccatcctctttaatccytacaaatgaatattcattatttccttttttaaagtctgaaggcggaggcaaagaaagattaaataattcacccaaagttttagcactattaattgactaaaattaggactttaactcacttctgtcttacttgaaagtccctgtgttttgattctgtcattatatcaattaggacgtaactgataataccaaaaacattatttatagggtggtatattagttttctagggctaccataacaaaataccacagactaggtgacttacaaaacataaatttattttctcacaattctggggactagaaatccaagatcaaggtgactgcagggttgatttattctaaggcctctctctttgacttgca

SEQ ID NO: 502409 - DNA, 482 bp, Homo sapiens
agaacatcagtgagctccttgccaatccgtccaggaaggacctggacccagccacggacctgttagtgctgtctcagggacaccagaccaacatcctggacatcatcctcatacacaaggaagctcttaccacagtcatggagaacaggcaacatgtggcagaagggaagacacaggtacagaggctgatggcatcattatcacaggaacaggatttctttggccactttggctgaaattcaccacttccatccaatycactcaagcgagagacttgaaatcacagatggagcatttcttgcaacaggagatactattttttcaaaaagtcacctaaaatttgatagtgttggatgactagctattagattgtggactttttccagttcacgggtactttctacagcagaatgataacaatatcaaagagctagtgccagctatcggtggtagtacaaggatgactttgtgctcaactgaaa

SEQ ID NO: 502410 - DNA, 414 bp, Homo sapiens
cagatggcactggggctccacytccagggcagaataactgatttaccctgactggcagggagtgaccttggtggctgctccactggctcctggcacacccttgcagaggtgggtggttgctctttgagccagcttggctttgcctggcatgcacaggcctcagtgcaacaaatgtgctgcaaatggagccacatagaggaaatgagcagcaggctcagaactggggtgtgtgccgcctttggggctccagtccaagcatcggggcttctacagcactgtgggcttctcgggtgccaagaggcagaccacaggccatcttgaggaggactctggtaagagcttccttgtgtatgtggatgatgtccagaatgttggcctggtgtccctgagacagcactaacaggtccatgactg

SEQ ID NO: 502411 - DNA, 380 bp, Homo sapiens
gcactggggctccacctccagggcagaataactgatttaccctgactggmagggagtgaccttggtggctgctccactggctcctggcacacccttgcagaggtgggtggttgctctttgagccagcttggctttgcctggcatgcacaggcctcagtgcaacaaatgtgctgcaaatggagccacatagaggaaatgagcagcaggctcagaactggggtgtgtgccgcctttggggctccagtccaagcatcggggcttctacagcactgtgggcttctcgggtgccaagaggcagaccacaggccatcttgaggaggactctggtaagagcttccttgtgtatgtggatgatgtccagaatgttggcctggtgtccc

SEQ ID NO: 502412 - DNA, 380 bp, Homo sapiens
gcactggggctccacctccagggcagaataactgatttaccctgactggcagggagtgacsttggtggctgctccactggctcctggcacacccttgcagaggtgggtggttgctctttgagccagcttggctttgcctggcatgcacaggcctcagtgcaacaaatgtgctgcaaatggagccacatagaggaaatgagcagcaggctcagaactggggtgtgtgccgcctttggggctccagtccaagcatcggggcttctacagcactgtgggcttctcgggtgccaagaggcagaccacaggccatcttgaggaggactctggtaagagcttccttgtgtatgtggatgatgtccagaatgttggcctggtgtccc

SEQ ID NO: 502413 - DNA, 414 bp, Homo sapiens
cagatggcactggggctccacctccagggcagaataactgatttaccctgactggcagggagtgaccttggtggctgstccactggctcctggcacacccttgcagaggtgggtggttgctctttgagccagcttggctttgcctggcatgcacaggcctcagtgcaacaaatgtgctgcaaatggagccacatagaggaaatgagcagcaggctcagaactggggtgtgtgccgcctttggggctccagtccaagcatcggggcttctacagcactgtgggcttctcgggtgccaagaggcagaccacaggccatcttgaggaggactctggtaagagcttccttgtgtatgtggatgatgtccagaatgttggcctggtgtccctgagacagcactaacaggtccatgactg

SEQ ID NO: 502414 - DNA, 411 bp, Homo sapiens
aacatcttcttgatgctgtcttcatgatagtgtgttctcatgagatctgrttatataacagggggtggcacctctttcctctctcagtctttcttctacccctgccatttgaaacatctcattgccccttggccttctggtatgattggaaggcttcctgatctgatcctcccagaagcagaagccactgtgcttcctttacagcctgctggaccgtgagccaaataaacctcttttctttatgatcatgcagaaaattagtactatgaagtggagccatgaaatgccttcaaggccctttcccctttgtcttggcaaccagcactcagcttcttttcatgcaaatatctgaatccttcatgaactttccccctgaaaatggacttttctgttttaccacattgccaggct

SEQ ID NO: 502415 - DNA, 411 bp, Homo sapiens
aacatcttcttgatgctgtcttcatgatagtgtgttctcatgagatctgattatataacagggggtggcacctctttcctctctcagtctttcttctacccctgccatttgaaacatctcattgccccttggccttctggtatgattggaaggcttcctgatctgatcctcccagaagcagaagccactgtgcttcctttacagcctgctggaccgtgagccaawtaaacctcttttctttatgatcatgcagaaaattagtactatgaagtggagccatgaaatgccttcaaggccctttcccctttgtcttggcaaccagcactcagcttcttttcatgcaaatatctgaatccttcatgaactttccccctgaaaatggacttttctgttttaccacattgccaggct

SEQ ID NO: 502416 - DNA, 337 bp, Homo sapiens
ggagtcagccccccacacccaggaatcacctacaaactcacgagcctcacggtgctccacccctgtgtctttcatctcttcacccccaggmctcagggactctcctgtggctcccagttactctccagccatccccaggttcctgcgggagtcagccccatgcacccaggagtcccctagagactcacaggtctcgggagaatatgagcggtcccccagccctgactcctcaagattcatgcctgcctcacccagcttctccctctcccctcccagaaactcagacccaaggggcagctcctcaccagggatgtggaagtcctctacatcatcccgc

SEQ ID NO: 502417 - DNA, 583 bp, Homo sapiens
atgattagggtaagactgtgtatgcctttttttctcaggagaaatcatcaaacaccactaaagacaaattctcctgaataagaaatccttattaagtcatttttactatatttcagtcctgtttgtgcagcttagtaatcacacaagagaggaagagcagagacagttgagagtaaaacaagagaacaatatattcacgctacataaagaagtgaggtgggaatatggagaaagaggagcagatgagaatcaaagaaaagaaaaatcaggtgattgaagtagacacattgaatgaggacagacaaatgaatacgaagccctcttctttaacctttttawggattgatgatttttgagaaaggggcatgttttagcattcatattctgataaatacattcgcatgatgtgatgaaaacacacttctgaaattcttttaaaagttctttacgttcagatttttacaagaacagcttagttttataaaagttattttaaagaaaagaataagaaaccaatattacattttgaattaatgaccttggtcttaatttgaagtttggccaagcacaggggatgcctgat

SEQ ID NO: 502418 - DNA, 671 bp, Homo sapiens
tttagttaagcaaagaacaactcgccaattgggcagccacctgagacagcctagactcagagactccagtgcaaccacgtggtggaagatttatggacagaaaaaggaaagtgacatagggcaagtggaagtgagttacagaaaatggaagtgaggtacagaaataactggattggttacagatggcrtttgccttatttgaacagttggctatatttggccaaaacttggtgattggcacaagtgcagactacgttctgtttacactttcacttgttatagttcacagtgtacagtaaaacctttacgctgagcctaaaatatgtaagggagcagctttaggctgaatttgatttaatagtgcctagtcttctagttcctactactcctctacacccattgaaattgccttgttctctcacattctgtaatttttattcttggttactgtgcttcctccacagactgttaatcctcattatttgttttctttcttaacaggctgaccaaattgtgagggaaaatcttaacacagcgattttttagtttactaaaaatccatttacagttctaagaggatattctgtaaatctactgaatatagagtgaaaaacaagtgtacagatgagaagagtaaacaatatataataaagtgatatgaacttgattcc

SEQ ID NO: 502419 - DNA, 502 bp, Homo sapiens
ttagttaagcaaagaacaactcgccaattgggcagccacctgagacagcctagactcagagactccagtgcaaccacgtggtggaagatttatggacagaaaaaggaaagtgacatagggcaagtggaagtgagttacagaaaatggaagtgaggtacagaaataactggattggttacagatggcgtttgccttatttgaacagttggctatatttggccaaaactyggtgattggcacaagtgcagactacgttctgtttacactttcacttgttatagttcacagtgtacagtaaaacctttacgctgagcctaaaatatgtaagggagcagctttaggctgaatttgatttaatagtgcctagtcttctagttcctactactcctctacacccattgaaattgccttgttctctcacattctgtaatttttattcttggttactgtgcttcctccacagactgttaatcctcattatttgttttctttcttaacaggc

SEQ ID NO: 502420 - DNA, 593 bp, Homo sapiens
catgaagttttgtaccttaatggctctcagctacatttaagacatttcaaggtaactttaaagtttcagataattataacaaaatattcaatcatattctatatttatctgcccccaaatgattttagtaagaaaaatatttactttcttttactccatcaaagcttyaggcatattctcagatttcagacaccattttatttcaaaaattatctaggaaatactctacctacagtcatcgggttctactcaaaactacacatggtcagttgagatttcataattatcatagaggaagggaaatagactttctgaaaagggaaaatataactgctaatgtcagagaagtcattttttaaaagcctaacaattatataaaaattcatgccaggaaaatgagtcagtaaagcatcatagattgcgcgggccttggtggactgaacaaaggaggatgaacgcgggaataaagacaaagacaaaagagtatatttggaataaggggtcagggggctccttgcttctagtgaacaagggccctgagcttctatagcccttcatatttatcgagtcaaggagatagggagaagggggtg

SEQ ID NO: 502421 - DNA, 541 bp, Homo sapiens
tttaaagtttcagataattataacaaaatattcaatcatattctatatttatctgcccccaaatgattttagtaagaaaaatatttactttcttttactccatcaaagctttaggcatattctcagatttcagacaccattttatttcaaaaattatctaggaaatactctacctacagtcatcgggttctactcaaaactacacatggtcagttgagatttcataattatcatagaggaagggaaatagactttctgaaaagggaaaatataactgctaatgtcagagaagtcattttttaaaagcctaacaattatataaaaattcatgccaggaaaatgagtcagtaaagcatcatagattgcrcgggccttggtggactgaacaaaggaggatgaacgcgggaataaagacaaagacaaaagagtatatttggaataaggggtcagggggctccttgcttctagtgaacaagggccctgagcttctatagcccttcatatttatcgagtcaaggagatagggagaagggggtggtcg

SEQ ID NO: 502422 - DNA, 541 bp, Homo sapiens
tttaaagtttcagataattataacaaaatattcaatcatattctatatttatctgcccccaaatgattttagtaagaaaaatatttactttcttttactccatcaaagctttaggcatattctcagatttcagacaccattttatttcaaaaattatctaggaaatactctacctacagtcatcgggttctactcaaaactacacatggtcagttgagatttcataattatcatagaggaagggaaatagactttctgaaaagggaaaatataactgctaatgtcagagaagtcattttttaaaagcctaacaattatataaaaattcatgccaggaaaatgagtcagtaaagcatcatagattgcgygggccttggtggactgaacaaaggaggatgaacgcgggaataaagacaaagacaaaagagtatatttggaataaggggtcagggggctccttgcttctagtgaacaagggccctgagcttctatagcccttcatatttatcgagtcaaggagatagggagaagggggtggtcg

SEQ ID NO: 502423 - DNA, 639 bp, Homo sapiens
gaccagtaagttgctgaaggtcctttgttttgtggataaaggaagtcattggagtgaactctctaatatcccttatctagcatgactatatgcagggttatggaatagggcagcttccaggaaratggccaatctgttgttagggctgctgttctatcatatctcccgtgatgtttttgatggggaagacagatctggacttgttactgggctatgccttgtagagaatgatacagggttgtggcaggcaaggaaacataatctcagcaattgctccaattgatgaagcttctaacatttcagagtgctttcctccacagccccattaaacctaatcatttctctccaaaagaggcagggcccatgtggaaatctttcaacatagtaaaaaagctaaggtttagaaagattcagtaactttgccaaagccatatggaaggattgtccaaaaacctgtgcaagagctcatagcttcccactccaaataccttacgcttcattgttgtcagattatttttcaatcttttcttagagctcactgcaacattgctcactggaatgctggaaagtacaactaataaaatgtgtctattgagtatttgtttctaactgtactccatttaaaattgcatatgaatg

SEQ ID NO: 502424 - DNA, 473 bp, Homo sapiens
caacatggttggctctccatccctttcttcaccatgtacattgtggccattgtgggaaacatcctaattatggcagcagtgcaggargactctgccctacatgagcccatgtacttatttctctccatgttggctgtcactgaggtgggcgtctctgtgtctacactgctactgttacaggcattctttggtttgatgcccacagagttgactttgatggctgcctggcccagatgttcttcattcacaccttctcctgcatggagtcaggggtcctactagccatgagctatgaccgctttgtagccatctacaacctcctgcgctatacagccatcctgaccctgccccgtattatctgcatgggtctgggcattacactgaagagtgtggcactcatggccccacttccaatccttttgaggcaactgccctattgccacactaatgtcctctcacactcctactgcctc

SEQ ID NO: 502425 - DNA, 473 bp, Homo sapiens
caacatggttggctctccatccctttcttcaccatgtacattgtggccattgtgggaaacatcctaattatggcagcagtgcaggaagactctgccctacatgagcccatgtacttatttctctccatgttggctgtcactgaggtgggcgtctctgtgtctacactgctactgttacaggcattctttggtttsatgcccacagagttgactttgatggctgcctggcccagatgttcttcattcacaccttctcctgcatggagtcaggggtcctactagccatgagctatgaccgctttgtagccatctacaacctcctgcgctatacagccatcctgaccctgccccgtattatctgcatgggtctgggcattacactgaagagtgtggcactcatggccccacttccaatccttttgaggcaactgccctattgccacactaatgtcctctcacactcctactgcctc

SEQ ID NO: 502426 - DNA, 473 bp, Homo sapiens
caacatggttggctctccatccctttcttcaccatgtacattgtggccattgtgggaaacatcctaattatggcagcagtgcaggaagactctgccctacatgagcccatgtacttatttctctccatgttggctgtcactgaggtgggcgtctctgtgtctacactgctactgttacaggcattctttggtttgatgcccacagagttgactttgatggctgcctggcccagatgttcttcattcacaccttctcctgcatggagtcaggggtcctactagccatgagctatgaccgctttgtagccatctacaacctcctgcgctatacagccatcctgaycctgccccgtattatctgcatgggtctgggcattacactgaagagtgtggcactcatggccccacttccaatccttttgaggcaactgccctattgccacactaatgtcctctcacactcctactgcctc

SEQ ID NO: 502427 - DNA, 503 bp, Homo sapiens
gcaacatttatcaaataaataaatggcaaataatcataamattattaatttaagagtgcaggtgtttatattaagcaaagggataaggcaatgataaaactcaatgtttaactcaaccttgagaaagccaaatgagttgtgggtgggtggagttttccacaaggaataaaaggaggaaggcaaattcctatggctagtaaaatggtaaagcacgtacagactaagaagtgggtttaagacttgaccaattggaagcattggtggtctcaatttttttcatgtttgtatctccatagagatgtagtcacaagccaaaaatgtacctctgtatgattcattgtctcttcaaatccagtatgcataacttggtcatagtgagtcattcagtcacttggtcagtaatacttatttttaggtgtctgccaggcagcaatgataatcaatgtcttatttccctttcaaatctgatacgtcctcaaaacctgtggtttttttctaaataa

SEQ ID NO: 502428 - DNA, 503 bp, Homo sapiens
gcaacatttatcaaataaataaatggcaaataatcataaaattattaatttaagagtgcaggtgtttatattaagcaaagggataaggcaatgataaaactcaatgtttaactcaaccttgagaaagccaaatgagttgtgggtgggtggagttttccacaaggaataaaaggaggaaggcaaattcctatggctagtaaaatggtaaagcacgtacagactaagaagtgggtttaagacttgaccaattggaagcaytggtggtctcaatttttttcatgtttgtatctccatagagatgtagtcacaagccaaaaatgtacctctgtatgattcattgtctcttcaaatccagtatgcataacttggtcatagtgagtcattcagtcacttggtcagtaatacttatttttaggtgtctgccaggcagcaatgataatcaatgtcttatttccctttcaaatctgatacgtcctcaaaacctgtggtttttttctaaataa

SEQ ID NO: 502429 - DNA, 503 bp, Homo sapiens
gcaacatttatcaaataaataaatggcaaataatcataaaattattaatttaagagtgcaggtgtttatattaagcaaagggataaggcaatgataaaactcaatgtttaactcaaccttgagaaagccaaatgagttgtgggtgggtggagttttccacaaggaataaaaggaggaaggcaaattcctatggctagtaaaatggtaaagcacgtacagactaagaagtgggtttaagacttgaccaattggaagcattggtggtctcaatttttttcatgtttgtatctccatagagatgtagtcacaagycaaaaatgtacctctgtatgattcattgtctcttcaaatccagtatgcataacttggtcatagtgagtcattcagtcacttggtcagtaatacttatttttaggtgtctgccaggcagcaatgataatcaatgtcttatttccctttcaaatctgatacgtcctcaaaacctgtggtttttttctaaataa

SEQ ID NO: 502430 - DNA, 503 bp, Homo sapiens
gcaacatttatcaaataaataaatggcaaataatcataaaattattaatttaagagtgcaggtgtttatattaagcaaagggataaggcaatgataaaactcaatgtttaactcaaccttgagaaagccaaatgagttgtgggtgggtggagttttccacaaggaataaaaggaggaaggcaaattcctatggctagtaaaatggtaaagcacgtacagactaagaagtgggtttaagacttgaccaattggaagcattggtggtctcaatttttttcatgtttgtatctccatagagatgtagtcacaagccaaaaatgtacctctgtatgattcattrtctcttcaaatccagtatgcataacttggtcatagtgagtcattcagtcacttggtcagtaatacttatttttaggtgtctgccaggcagcaatgataatcaatgtcttatttccctttcaaatctgatacgtcctcaaaacctgtggtttttttctaaataa

SEQ ID NO: 502431 - DNA, 563 bp, Homo sapiens
atataccaccatcttgactcccaagaccatcatcaagagtgctatgggcatctcctttcgaagcttctgcatcatcctgccagatgtattcttgctgacatgcctgcctttctgcaggacacgcatcataccccacacatactgtgagcatataggtgttgcccagctcgcctgtgctgatatctccatcaacttctggtatggcttttgtgttcccatcatgacrgtcatctcagatgtgattctcattgctgtttcctacgcacacatcctctgtgctgtctttggccttccctcccaagatgcctgccagaaagccctcggcacttgtggttctcatgtctgtgtcatcctcatgttttatacacctgcctttttctccatcctcgcccatcgctttggacacaatgtctctcgcaccttccacatcatgtttgccaatctctacattgttatcccacctgcactcaaccccatggtttacggagtgaagaccaagcagatcagagataaggttatacttttgttttctaagggtacaggatgatgttttactaggataa

SEQ ID NO: 502432 - DNA, 563 bp, Homo sapiens
atataccaccatcttgactcccaagaccatcatcaagagtgctatgggcatctcctttcgaagcttctgcatcatcctgccagatgtattcttgctgacatgcctgcctttctgcaggacacgcatcataccccacacatactgtgagcatataggtgttgcccagctcgcctgtgctgatatctccatcaacttctggtatggcttttgtgttcccatcatgacggtcatctcagatgtgattctcattgctgtttcctacgcacacatcctctgtgctgtctttkgccttccctcccaagatgcctgccagaaagccctcggcacttgtggttctcatgtctgtgtcatcctcatgttttatacacctgcctttttctccatcctcgcccatcgctttggacacaatgtctctcgcaccttccacatcatgtttgccaatctctacattgttatcccacctgcactcaaccccatggtttacggagtgaagaccaagcagatcagagataaggttatacttttgttttctaagggtacaggatgatgttttactaggataa

SEQ ID NO: 502433 - DNA, 563 bp, Homo sapiens
atataccaccatcttgactcccaagaccatcatcaagagtgctatgggcatctcctttcgaagcttctgcatcatcctgccagatgtattcttgctgacatgcctgcctttctgcaggacacgcatcataccccacacatactgtgagcatataggtgttgcccagctcgcctgtgctgatatctccatcaacttctggtatggcttttgtgttcccatcatgacggtcatctcagatgtgattctcattgctgtttcctacgcacacatcctctgtgctgtctttggccttccctcccaagatgccygccagaaagccctcggcacttgtggttctcatgtctgtgtcatcctcatgttttatacacctgcctttttctccatcctcgcccatcgctttggacacaatgtctctcgcaccttccacatcatgtttgccaatctctacattgttatcccacctgcactcaaccccatggtttacggagtgaagaccaagcagatcagagataaggttatacttttgttttctaagggtacaggatgatgttttactaggataa

SEQ ID NO: 502434 - DNA, 597 bp, Homo sapiens
atgttcttcaccacctggttctttgtttacgaggtcacctctaccaagtacacttgtgatatctataaagagtatctccttggtggcctcactcttcatgggctttgaagtcctcttcctgatgctctgggttggcatctacatgtgagtgcccaagagtaacaaccaggtggcttcactgaatccctgcttttgtaaattaagttttctttctattgctggaagtgtcccgcctgttgcttataataaatgcagatgtatggcattaaaaaaaaaaaagaaataatagaagttaggcagggattggggcatgaaggttgaaaacaagaaggaaaaggagcccaaggaaatgcaagtgttgtaaaatgtgctaagtagatgtctgagtggmattcctccatgagagaaagcttaagggaagaaagagaccctgagtgtcttcaaaactcaaagttttacgaacagaatgattagtctggagaaatcatttttcatcaatacaggatctcaagtgtttccccacaacgaacccaacccctcacacacacacacacacacacacacacacacacaccggtgagtggacagacatcgttt

SEQ ID NO: 502435 - DNA, 521 bp, Homo sapiens
ctgcattataaaccaaatttactatgaagtcctttgctgtggaggcaatgttgttccagagtcaacgaggaagactaatggccaaaacatagtggaggtgctrtgtgtgagtcaaccacttgtaccactataccactggggggccccagtctaagctctgcttatgcctatcttgagatgcaattacacccaatttccaatgtgaactcttgcctgagtctcattcatgtgggctatgagaaaaaggatggatatgggagaagaagtagtgataagggctgtctctacatggatggaaggacttggagggaaactaaaaggtctgaagttagaagactcacaggtatgaagaacagaggaggaaatgttgctgcaaccttttgaaggtcgaggcctgcaactttcccagtgttctttcagcgtttcttcagattttgtgtcctgtagtagctgctaccaggtgctctggttttccgagctccctaccactagcctgactgaaaagtggttatagtttctta

SEQ ID NO: 502436 - DNA, 566 bp, Homo sapiens
aaaaaaaaaaaaagaaagaaagaaaagaaaagaaagaaagagagagagagggagggagcgagggaaggaaagaaagaaaggtggagggagacgatctgacttctgactgctgctctaacgggagggtcatgggacaaagctggtgcaccttctttgagtgtcaatttcatatgaaggtaagcaattccaaatataattttaaaaccccaaagcacccaagtatgtcagagtaggatgcaacactgcatgcgcttttatgctaaaacaygaggttttagagaaattagagatacactaggcttttagtggctgccgcatacttcatttcataaccctgatccctggtgtctgagctgtttcctgtgtgccagtaggggctcttcattggaaaaatctgaaatgctttggactagataatggcaaagacattccagttcagaaaccagaaagcttggacctgaactcacttctgacactgacaatcgcctccctttgttcagccacattttcactatgcatgcaacagccaggccaattgggaggtctgcaccaatcagaaaagatgc

SEQ ID NO: 502437 - DNA, 408 bp, Homo sapiens
ttccctagctgcgtccggcacacgccgagttgtcctgcctccttgcccctgctcaggctgttgcctttccctgaaattgcctttgctctttcttctgtccatccaaccaggcattctttatgaatcaaattccagatcctccagtaggcctctcctggtccctctgtgtcctgaattcccaaagtagtgcttcccaaacttgaacatgcatcaagtctctgagagggcatgttatgacacagtcctagagtggtagattcagaggtcttgtgtgggggctgaaaatttgcatatctcaccrgttcccaggtgatgctgatctgaggaccccactttcagaacccctagagcatatccagtcacctcagatcattaggcactgtgcttgttacttgtacttgcttgaaa

SEQ ID NO: 502438 - DNA, 514 bp, Homo sapiens
tctccatctctagttagagttattctgctgtgtgcatggccctgagcccttagcaccttgggagtccttagcaccatggagctgccagttggcagcagggtgctcctcatctcttctccttgtccctggaggctatggaggagggtacatctttccctgggactgtggggcccttgaaggtgtggcttcagtctgattcctctctggccttgcagtgcccaactctgggcttggctctgagcagtctccttgagtgttcattgcatttccaatgctcagctcagtgccaggcactcagagggtcctgagagggacacagcaggagacatcatgggaggaaacagcatgaagttggagggaggagyggagaagggcttaaggccaaagtcattggaggctttaagcaggcaaatgaaatcagatggtactccaaaaaaaatggctccggctgctgaatgaagagaaattgaagacagtggacttgggtggaaaagttcagaagctgttgctcagg

SEQ ID NO: 502439 - DNA, 669 bp, Homo sapiens
aaggccgaggataaagactcagccatttgggtcctccatgggacattctgatgggcactcgctgaggctttgccaggcctgccttgaggttcagcttgtccctgtgcccatcctcccccacccttcctcatgtgtaatgaactcctgtgtgttcatccctcatatacatcttccaccccaaatgtcacctcagtgtctgctttgggggaacccaatctgcaaaagctatataataaaaaggctgcctcttgctgacacagctatgcttaccacacagagaaggcagccccaggcctgaacgcccctcctctaaaatgggctctttaacacctggctcagaatcctacaaatctggaaatacagtttgccagcgcttagacagtttagatggagrctctccaagtgagttttgttagagttgcagggaaagctcaaaggcagagtggaaggtgaggagagctgcagtcttaacgcacccctcttactagaagcccctacagagggaccctcagcagtgagtgttttttgcacagcaatgacctgatactcattggtctaccaaggccactggtcaaaccactgacctctgtgggtggaaatagagtttgccaattcaccatgaaatgagggaagttgtgatgatgtcatgaatttcagggaattaactat

SEQ ID NO: 502440 - DNA, 615 bp, Homo sapiens
gctgggcttgagtgagctcacacctggaaaagtcatcttaggaaaatatccaggtggacagggcttggaaatcatgcagctatgagtaactgggaagsacggatgagctgatgtgagggttttgtgaatggtcttctcatggaacatctgtactggcttagcagtgtctgcgggacctgcgaaaatgtatccctggcccaggtttcattgggaaaacacctccagatgaaggtggacttgaccactgcggctggcttggctgagggctgtggagagaagggtgaggggcagggagctcaaggtgggagcccctgttcttagcagccctggtttgtccccagagacgtaggccacagggagagggtccaggtgctcctgcattcaaacttcctcacccctcccctctgcagcagttggagcgaggacattaacaacagtaaaaatcacactaatgcttaacctcactattgcgctctacagtctataatgcacttgcacatccattatcttgctccgtccttaaaatatctctgggatattggcagcataactgtcagatggggtcctgtttgacagcaaaaggagactgagggtccaagacaggattgagtgatt

SEQ ID NO: 502441 - DNA, 615 bp, Homo sapiens
gctgggcttgagtgagctcacacctggaaaagtcatcttaggaaaatatccaggtggacagggcttggaaatcatgcagctatgagtaactgggaagcacggatgagctgatgtgagggttttgtgaatggtcttctcatggaacatctgtactggcttagcagtgtctgcgggacctgcgaaaatgtatccctggcccaggtttcattgggaaaacacctccagatgaaggtggacttgaccactgcggctggcttggctgagggctgtggagagaagggtgaggggcagggagctcaaggtgggagcccctgttcttagcagccctggtttgtccccagagacgtaggccacagggagagggtccaggtgctyctgcattcaaacttcctcacccctcccctctgcagcagttggagcgaggacattaacaacagtaaaaatcacactaatgcttaacctcactattgcgctctacagtctataatgcacttgcacatccattatcttgctccgtccttaaaatatctctgggatattggcagcataactgtcagatggggtcctgtttgacagcaaaaggagactgagggtccaagacaggattgagtgatt

SEQ ID NO: 502442 - DNA, 601 bp, Homo sapiens
tcaattcaggcagttctggctccaccatcctcactctaaacctccatgctatacctgtttcaggagcaagcacttaggcagacatctgccaggtggagtatgaaaagcaccagactgggcatccaggatttacccgtcatattttttgtcacaagaaatagatcttttcttttctcttattttctcttctctcttctctcctctcctcctcactcctctcctctcctctcctctcttgtcttctcttctcttcttttcctttgctttggagtctcactctgtcgyccaggctggagtgcagtggtgcaatctaggctcactgcaaccttcacctcccaggttccagcaattctcctacctcagcctcccaagtggctggggttacaggcatgcgccaccatgcctggccaatttttgtattattagtagagacgagatttcaccatgttggccaggctggtctcaaactcctgacctcaagtgatccgcccacctcagcctcccaaagtgctgggattacaggcatgagccacgcctggccgacttcttactttaagaaggaaaggaatttattaagaggccatgagtctaggcatcaatt

SEQ ID NO: 502443 - DNA, 635 bp, Homo sapiens
ctcagttgtgaacatgtgcaacttttcctttaaaaatatttttggttttttaaaattttaatttccaattctttgttgcttgtgtataagaatacaattgatcatccaaaaaaaattgatctgtatcctatacatttcttttctttttttttttttttttttttttgagagggagtctcactctgttgctcaggctggagtgcagtggcgtgatctaggctcactgcaacctccacctcttgggttcaagtgattctcctgcctcaagctcccaagtaactgagattagccatgcctggctaatttttatattttagtagagactgggtttcaccacgtttgtcaggctggattacaggkgtggccaccacgcccggcctgtatcccataaatttcttaaattcacttattagttctagcggcttttttgtagactccttataattttctacctagacaattgtgtcatctgcaaattaagagttttatttcttcctttctaatttgaatgcattttattttttgctttattgcactggctagaactcccactagaatgttgggttaaagtggtgagagtacacatcactgtcttattctaggtgttaggtgaaagcattcagtgtcttactgtt

SEQ ID NO: 502444 - DNA, 652 bp, Homo sapiens
ctatcccaaattaatccaatatatagtaaaactaaaaatagttcaacaatccagtgaagaaaataattatcatataataaatgatttggagagaattgtaatgyggagaagagtactcacactttgtaccattttctgcaataaattgtcatgagattatgttcctgtctgaaaaacaaaccataaaaaagacttgaacatgcaatcccacattgatcgtattggaagaaaatccataatcagagacaaaaaaaatcaattaaaaaataggaaacttttattgaataaaatataggacagtcacaagaggaaaataacagcctggaagaaataaccaaccagcgatacatctaaaatttattaatttttgcttttttacaaaaagctaaaatcagtgcccagattccactccgtaagcaacaaaggaggtgaacagacagtttacacaggaagcacagatggtaaatcaaaacatgaaaaagtacatagttctaccagaaacaagaggaatgcaaacacacaagctctgggtatcagtgcatgcttaccaaactagtgaaaagaaaatgaaatcatcaaaccctgaatgggtggggctgtgggaaacaggcaggatggtatagagaggctcagggctgacctgcagccagac

SEQ ID NO: 502445 - DNA, 652 bp, Homo sapiens
ctatcccaaattaatccaatatatagtaaaactaaaaatagttcaacaatccagtgaagaaaataattatcatataataaatgatttggagagaattgtaatgtggagaagagtactcacactttgtaccattttctgcaataaattgtcatgagattatgttcctgtctgaaaaacaaaccataaaraagacttgaacatgcaatcccacattgatcgtattggaagaaaatccataatcagagacaaaaaaaatcaattaaaaaataggaaacttttattgaataaaatataggacagtcacaagaggaaaataacagcctggaagaaataaccaaccagcgatacatctaaaatttattaatttttgcttttttacaaaaagctaaaatcagtgcccagattccactccgtaagcaacaaaggaggtgaacagacagtttacacaggaagcacagatggtaaatcaaaacatgaaaaagtacatagttctaccagaaacaagaggaatgcaaacacacaagctctgggtatcagtgcatgcttaccaaactagtgaaaagaaaatgaaatcatcaaaccctgaatgggtggggctgtgggaaacaggcaggatggtatagagaggctcagggctgacctgcagccagac

SEQ ID NO: 502446 - DNA, 652 bp, Homo sapiens
ctatcccaaattaatccaatatatagtaaaactaaaaatagttcaacaatccagtgaagaaaataattatcatataataaatgatttggagagaattgtaatgtggagaagagtactcacactttgtaccattttctgcaataaattgtcatgagattatgttcctgtctgaaaaacaaaccataaaaaagacttgaacatgcaatcccacattgatcgtattggaagaaaatccataatcagagacaaaaaaaatcaattaaaaaataggaaacttttattgaataaaatataggacagtcacaagaggaaaataacagcctggaagaaataaccaaccagcgatacatctaaaatttattaatttttgcttttttacaaaaagctaaaatcagtgcccagattccactscgtaagcaacaaaggaggtgaacagacagtttacacaggaagcacagatggtaaatcaaaacatgaaaaagtacatagttctaccagaaacaagaggaatgcaaacacacaagctctgggtatcagtgcatgcttaccaaactagtgaaaagaaaatgaaatcatcaaaccctgaatgggtggggctgtgggaaacaggcaggatggtatagagaggctcagggctgacctgcagccagac

SEQ ID NO: 502447 - DNA, 479 bp, Homo sapiens
gagggatccagctccccgtattgccagggtttaacatggagcatttgtcaaagcagaaatgtggtttgtggagtcccagtccttgtgtcacaaagcagggtagaagggtgagtttggaactgagataacagcccagtaaccgacacagacagagagcgcctgaatcatggaagtcatcactaagcattgaactaaaaacgcatggagctgcctgactttggtttcttggcatggggagaaagtagatatctccctgtgtgagctgcttgttcctggtctgcttttctgctatgaaccagcctctgtactgacacagccttgtcttattcagctcttgtcctccacagtgccttgcacagggctgctacattggtcaacattaatcagattgaactgaagcccccctcacagctagtgtggtcttgagggactgggaccscggctcagattcctgggcgtaagtatctgctccctccctc

SEQ ID NO: 502448 - DNA, 419 bp, Homo sapiens
caggttgagagatctgcatcacaattggatcttaagaaagccaaacaatgtttttcattaaacaagagagctcttaataagtagcttttaaaaacatgattattctcattattcaacagaatggaagccactttctttgcaatcgtcaggcaaactccagaggaacagggkagacgatcgcttctgcatttgcaaagatggaccaagctgccccacggacattatccactcattcactcaaagtacactaaacacctactgcaggcaggcactgttctagccctgggcacacagcagtgaacacgtagaggtctctgtgctcaggagccttaaccctagttgagacagactgacaatgaacaaatgcatatacactatatgaggtagaaagcagtatagagaaaaatagggaggaaagg

SEQ ID NO: 502449 - DNA, 231 bp, Homo sapiens
ctgaggtaatttaagtacacccccagggtcactgatggagcaggtacaasagagtgaagaatgaaagtataatgtttctgtaactcttcatacctcattaaatcaaagaaagatgtagttcaccatttctatctacaaatagcttaacattaacatcacaatgtattcatttcctttgaattctttttctccttttacatccaggctgaggccaaatcccacatatgagaa

SEQ ID NO: 502450 - DNA, 630 bp, Homo sapiens
taatttaagtacacccccagggtcactgatggagcaggtacaagagagtgaagaatgaaagtataatgtttctgtaactcttcatacctcattaaatcaaagaaagatgtagttcaccatttctatctacaaatagcttaacattaacatcacaatgtattcatttcctttgaattctttttctccttttacatccaggctgaggccaaatcccacatatgagaaatctctacamctgccacaaaacaaaataccatcaacatttcattctccaaaagagatatgtaatttgaaatatatatatatgtcacagctaaaatggctgttcttgcttaatagtatttttatacaggtaattttctcactgagaactaataagtactataaattcgagatccattataattttatgacaaagtatatgagttttataagataacctttgaagactttgcatgcaaagccatcattgctttttgaattttaagagaatgttataatcaagtgcaaaattgaatgaaagtgaatatgcctgtgcaagctgtttgaaggtaacttacagccagtgtactaacagcctgtgacacagggttaagtcataggaactgagaatgccattctgcttactat

SEQ ID NO: 502451 - DNA, 520 bp, Homo sapiens
cctactggagccccactacctctcccctgtggtggtgcctgcaggacactgccctggtgtggccttcatggcaggccatgatcgtttagaatactcacttcactgtctgcagatgaattcatttcttggtgttgtcttttagtcaagctgttagcctgagtgctggatgattttacgtgccttcattgtccttctgagtatttttgggaagatgtaaggatatattctaacttaatgagctgagccgatgttaccttgtaggacctgcatctgggtgctgtttttaagcctaaaatctccgtgctttacactcctgcccctgcaccttcggtgttctcttcccactccatggcaatccctttgatgagagggtaacatctgtgatcacatctctgaagctggcctcattctcactggttggaatcacagtttttttccaggttaaagttaccacttctgtaacagctttagtgtgagtgacaaaagcagtaactgttrctgccctgtgaggccctaaatt

SEQ ID NO: 502452 - DNA, 339 bp, Homo sapiens
agctgggtgacggtggtccaggagctgtggtggactctgccctttgctctcacactcctgaggcaatgccacccccagagacctgcagcacctgcccctttytccttgttcctctgcccagagaagcaccgagttctcagcagtgacccctcctgacccttgacacctgtgctgctctcttgccctctctatgtgagtgcggtaggacactggtgcaggagcctcctggggagggggcagaagggagtctctggggcatctgtagtgggcatgtggggaagtggggaggaggaggaaaggaggtctgtgatggaggaggggcatcttaggcatgaagca

SEQ ID NO: 502453 - DNA, 339 bp, Homo sapiens
agctgggtgacggtggtccaggagctgtggtggactctgccctttgctctcacactcctgaggcaatgccacccccagagacctgcagcacctgcccctttctccttgttcctctgcccagagaagcaccgagttctcagcagtgacccctcctgacccttgacacctgtgctgctctcttgccctctctatgtgagtgcggtaggacactggtgcaggagcctcctggggagggggcagaagggagtctctggggcatctgtagtgggcatgtggggragtggggaggaggaggaaaggaggtctgtgatggaggaggggcatcttaggcatgaagca

SEQ ID NO: 502454 - DNA, 522 bp, Homo sapiens
tcgcagtaagagacagatcctgttaatgtgcatggtatgcacccagggaatcctcacatcacatgtttctccctttaagcaaaaggsggctctcttttgtttccttttgcaattggatattactgggaactttaaaaaaggaaagcaacttaagtgttttatattctgaacttggaatgaataataactaaaatgacagtcccatgggacaaggtggaatttatcatttcacaatgcagcttaacgtacaattggctttaattaatctttttttaatgaaagatatattttttaaaagttttgtttctctgtatgtcaatataaaaacctatcatgaactttttccctggagaaactgccacccctgtcattgcctgtgcatgagatcggtgagggaggccagcaccttccctgcgtctgcacctgtcagggatgccagtcccctccctgtgctcctgacttgcccagagaaaatattttctctcaaagatttttcttttggaaaccacttacaatcttaga

SEQ ID NO: 502455 - DNA, 522 bp, Homo sapiens
tcgcagtaagagacagatcctgttaatgtgcatggtatgcacccagggaatcctcacatcacatgtttctccctttaagcaaaagggggctctcttttgkttccttttgcaattggatattactgggaactttaaaaaaggaaagcaacttaagtgttttatattctgaacttggaatgaataataactaaaatgacagtcccatgggacaaggtggaatttatcatttcacaatgcagcttaacgtacaattggctttaattaatctttttttaatgaaagatatattttttaaaagttttgtttctctgtatgtcaatataaaaacctatcatgaactttttccctggagaaactgccacccctgtcattgcctgtgcatgagatcggtgagggaggccagcaccttccctgcgtctgcacctgtcagggatgccagtcccctccctgtgctcctgacttgcccagagaaaatattttctctcaaagatttttcttttggaaaccacttacaatcttaga

SEQ ID NO: 502456 - DNA, 592 bp, Homo sapiens
tcgcagtaagagacagatcctgttaatgtgcatggtatgcacccagggaatcctcacatcacatgtttctccctttaagcaaaagggggctctcttttgtttccttttgcaattggatattactgggaactttaaaaaaggaaagcaacttaagtgttttatattctgaacttggaatgaataataactaaaatgacagtcccatgggacaaggtggaatttatcatttcacaatgcagcttaacgtacaattggctttaattaatctttttttaatgaaagatatattttttaaaagttttgtttctctgtatgtcaatataaaaacctatcatgaactttttccctggagaaastgccacccctgtcattgcctgtgcatgagatcggtgagggaggccagcaccttccctgcgtctgcacctgtcagggatgccagtcccctccctgtgctcctgacttgcccagagaaaatattttctctcaaagatttttcttttggaaaccacttacaatcttagaatcaaatacttagaggtattcttctttattttgttgttaaaaggagtttgggtagttttatgggcagaag

SEQ ID NO: 502457 - DNA, 516 bp, Homo sapiens
tgttcccaaagtcagtgaaacatccccaaacggtaagcttcagcattgtccaaaatggaggtaactccagaaagtgaaggaatctgggaaacaagcacacaggaagaagcccacaagggcaagaggaagttctttgaggcaggagaggggactgaggggaaggagttgcaaggttggggagcctttgggggctgcagtgagctaatggtgtggaggacactggctggatgcctctgaaggtcatgtcaaaggacagaaggaagacaacagggaagtgaagaggaaggagaatgatggcataccccacgatcccatctgttcagtcatggggagaacatctagaagagacgggagcaggacagccgttgtcctgggatgtggccaacacataggccagcctaagcttgtgayaattccatagggatccccatgagaagctcctcctcgctgttcctcacccagcccagttccagcttcttccttgatgcccagcctgcatttctcagaccccggctc

SEQ ID NO: 502458 - DNA, 516 bp, Homo sapiens
tgttcccaaagtcagtgaaacatccccaaacggtaagcttcagcattgtccaaaatggaggtaactccagaaagtgaaggaatctgggaaacaagcacacaggaagaagcccacaagggcaagaggaagttctttgaggcaggagaggggactgaggggaaggagttgcaaggttggggagcctttgggggctgcagtgagctaatggtgtggaggacactggctggatgcctctgaaggtcatgtcaaaggacagaaggaagacaacagggaagtgaagaggaaggagaatgatggcataccccacgatcccatctgttcagtcatggggagaacatctagaagagacgggagcaggacagccgttgtcctgggatgtggccaacacataggccagcctaagcttgtgacaatyccatagggatccccatgagaagctcctcctcgctgttcctcacccagcccagttccagcttcttccttgatgcccagcctgcatttctcagaccccggctc

SEQ ID NO: 502459 - DNA, 549 bp, Homo sapiens
gggaacacattagctgtgaagcatcagaaccagtcatccccaggcaatgggcccrggaagtcgggggcagctctgcagagaatgggaaggaacggagttgctctggaattgctctgtcaaagctgaatatgtgtgtccactcaggaaatcatccagactctccttcatttgcttttaatctgatacacactaactgttgctttgggctgaaccacagtgtgggcgtgcacccccacccccatgcagtcagcagccccttacctcccaggcaagcaccgaaggccagggcatacatgagcggcggtgcgggcaggccaacctcagggtcgtggctcaggttcaggagcacgggaatctgtggaggaagaggacattgatgccacgtcccatggacgctcagagaagctgccatactgtgaccaatttagaaaatccaaatgctttctcagcattcaaactctaaggagcataagatttgtggaaagaaaccaaagcagactttggaatccacagaaacttgagtttgaactcatctgtatgtctttgatg

SEQ ID NO: 502460 - DNA, 616 bp, Homo sapiens
cttgggggtcaccttgagccttaaggagagttaatatgattgtatgtgtgacgtatttcactaatattttatcactcacctgcacaagttgtacttaaagctaagaacaattttaaatcttctttatgctaataaaaacaaaacacatttcataaattagttattaattttccttggtatgcaatcatattaaccatgctattgcaataaaccctgttttattacattattgctggtatgaaagtacattcattttagagaattaatcttttctgtatagtcaaaatttgcaactacatattttagtgatagatttaaatcatacagataaacatcctttaaaactcacttcagtcattcattgaatatgaagatttaaaaccaaactccaagactgagaggagtttgccataattttagtctgcctttttcagtgaaaaccagcaaatataagggcctaattttaaatatttgaggtttaatattatgctacacctttgtcaatgaactaggtaagacatttctggaatctggtttaaaaagactgagtattcatacaggtttctcatatgtataggcataataattttawaaatttaaaaagctccgattctta

SEQ ID NO: 502461 - DNA, 601 bp, Homo sapiens
tgaaaaagtcagctgctcttagttataatcaatgttcaaagagctttaacctatgttttcaagattgatggcctgatgcccagttaagattacttaagatagacagactgtgtcatcacccagaattctgatttcttgtaggcatgctaagtcagaaaagccatcaacattatcttattactttcctcatccatgaccacacagtgaccttcttcactgaagagtcaatgtttaaaatcactattaccctttcctgttgccaaggacctcgctccaaaagaaatgcattatgtaagttagtcatctgtttgtgatttttcttatttgatatggcaaagggccatgctgactcagagccaattcagtagccaaagctttagaaaatcacttgacatgtaaacatattcaaatcctctgatctttcaaaagtctacattttaaggagctatatatatatatatatatacacatacatgtatccctgccattttataaccttcaagcaactacattggtgcttttgtcttcagtttactcatttataaaataagggctttggaytctataacctgctggatcctttgggggactatatattggg

SEQ ID NO: 502462 - DNA, 527 bp, Homo sapiens
taatgattacatttgcagtggctcacacctgtaatcctcgcacttcgggagaccaaggcgggtggatcacttgaggtcaggaatttgagaccagcctgaccaacatgrtgaaacctcatctctacgaaaaatacaaaaatttgcccggtgtaatggcaggtgcctgtaatccccgcttctccggggggtggggaaggggaatttcgttaacccggggggggggggttgaagtgggccgggatcctgcccctgccttcccgcctgggcaataggggggggctctttctccaaaaaaaaaaaaaaaaaaaaaaaaaaaaaaaaaagtaataattatgtaaatttttaaacaaattttaaacgattttttaaaatatcctctctgttttcttcctaagtattattcagactctaaccatatttactcttattttgctctttttcttgaagagaaaaatgttaaatatccatggacccaaaggtagagatatttcatttgattccttttcaagcaggaaagcaggatatat

SEQ ID NO: 502463 - DNA, 598 bp, Homo sapiens
ttttcacttttcataaagcaacctcatgatgaggttcagcagggatgagagcccttatctggatctgggtatgaggcgaaggagtcttaggtactcagtcttcagaagtaaggcccttttgaaggttatccttttacttgccttctggtaactttttggatgctgtccatagctttcctgataaattagcagccctctggttagtccgaggagagaggccgcaggacrggcagactgctgctcatctctgcagctccactttggtctcttgtctctgaaggtccagtcacagggaacttgttcttctgagtacccacagcttactcttcctttgtagcaggaccagccacagaaaaaactcctcagacaccgaggtaaagaaggaaggggtttattcggccaggggcataggcaagactcctgtctcaagagccgagctcctcgagtgagcaattcctgtcccttttaagggctcacaactctaagggggtccacgtgagagggtcgtgatcgattgagcaagcagggggtacgtgactgggggctgcatacaccggtaattagatcggaacaaaacagagtagggattttcacagtg

SEQ ID NO: 502464 - DNA, 539 bp, Homo sapiens
cccacctgggcactgctgggcctggcccccaacccacgcagagggcccagtacctggtgtacaggccgttctttcggcagaaagagttcttgacggagagccgcctgttgttgagttccagggcagggaagctgctttcatccaagctcatcatctcgctgtggcctagggctccagacttggcactgttccctgaagtcggcgggagattgacaccctttagactgtgtggcctcccctctcccataccactctccacctggctgggttatcccctctttctcttggtagagttgagaccaaaataagagattgagattgtgtgtagaaaccctaggctgccccacccaccagagcaggtgcgctgccaggagccaggagagggacctgatcacccctgttctggccaaaaaggagatacataaaastcaagtccagccagcatggctggtgccagctcactcacccgagtctgtcttcttggcgtacttcttgctctggccccggatgatgagcacgaagaccagaagcaggatgaa

SEQ ID NO: 502465 - DNA, 574 bp, Homo sapiens
cctactaactgctacaatctatgggaaggcagggtctgtaccctccgaatgaggcagaacctctgtaaggacagtttcacctcaagtatccgctctgatcagtcggtaaagggctgcctggagggctgatgtcagatgagttctgagatggctacctggctcaataggaaagagtgctaagattgattagtgatgtctgccagggacataggaggggagagtggcagtgtgttagctacttttyccccttttttttttttttgagacggagtttcactcttatttcccaggctggagtgcaatggcatgatcttgactcactgcaacctccacttcccgggttcaagcaattctcctgcctcagccttccaagtaactgggattacaggtacctgccaccacacccggctaatctttgtatttttagtagacacggggtttcaccatgttggccaggctggtctctaactcctgacctcaggtgatccacctgcctcggcctcccaaagtgttgggattacagacgtgagccaccgttcccggccccttttctttttttcttttgtacttgtct

SEQ ID NO: 502466 - DNA, 607 bp, Homo sapiens
ggaaaactaaatattgcccccctagcatatgcctcccatgggaaaagaaaggggccagggcagcgccagcagcagtgtggcagccaccagactgtcgaggcttgtaagtggtgagttaatagacagacccaggaaaatgtgyaggtgcacaacaccatacagaatacagcagaggcctacatgctccagaaaacatgacccgtacctgagcggcaactgtggatgtgaacggagaaagtgctacctcctggacctgtgataaccaaggtactgacatcaacacgcacgaacatcagtgacgcattaacttcatcaacccatgagcacaccgaagctgatactgcattccagtcagactgcacccaactggtgcgtggcaggcacattcatgcacgttctgagagctccagtctttcagttggtcaatgacacgtgtttattgagcagttattgtgtgcccagcattgtgagcttagatgttagggagggaaggccaacacggggcaaaataaataataccgccaggtggtggtaaatgaagcaggttaggggagagccaggtccatgaggaggtttgaatttttttttttttttttgacacggagtc

SEQ ID NO: 502467 - DNA, 592 bp, Homo sapiens
gggggccagccagtgctctgagctgttcctagtggatggctggtatgagctgcagtgccctggatgagaatggaaggtgggctccaatctctgaagtcaaagtcagcaaggggtctaatagactcccagagatgagccgcaagttcacacccaaggaccctactctggtctggtcttctaaagggaaagtttgtggccaggcttagtggctcacgcctgtaatcccagcactttgggaggccaaggcgggtggatcacttgaggtcaggagtttgagaccagcctagccaacatggtgaaaccccgtctctactaaaaatacaaaaattagccagcgtggtggcacacacctgtaatcccagctactcaggaagctgagacacgagaatcacttgaacctgggggacggaggttgcagtgagccaagatcgcaccactgcactccagcctgggtgacagaacaagactctgtctaaattaattaattaattaagggagggttagtgaccatcttccctctcccctccccactcrcagccctggccttgtcaacacagatgggcgcaggatcagggctgcagcctggagcccc

SEQ ID NO: 502468 - DNA, 577 bp, Homo sapiens
gtccagttcagaatttgattttacttattattcatttatttttttttttgagatggagtctacctctgtcacccaggctagagtgcaatagcgcgatctcggctcactgcaacctccacctcccaggttcaagcgattgtccygcctcagcctcctgggtagctgggattacaggcgcccaccaccatgcccgactaatttttgtatttttggtagagatggggtttcgccatgttggccaggctggtctcaaacttctgacctcaagtgaccccccacctgccttggcctcccaaaatgctaggattacaggcatgagccactgcgcccagcccagaacttaattttcacagcaggatggagtggccaaaccattagctctcaagagctggttgctgtcgcactgcagagggaaacggaaatgtgctgtccccagaaagcagaatgttcctgagggcttagggacctcgcagccatggggaaagtctggggccttcaccctcacttcctttaaaaaccgagggtggggttcagctagaggcaagggaacttttcactttgcgccttgtccacttta

SEQ ID NO: 502469 - DNA, 542 bp, Homo sapiens
ggcagggttcttggctttgcccaggaaagtatttaagggcaagacagtggtgatagacagcaatcttttattgaacagtactgctccttaaagagcagggctaactcataggcatcgcatcggttggtaacctatgggctcttgtcaactatctttacactaaggcaaactcactttcaattacatgtaaattgaggagtggatcaatgaaacttgatgggcaggttattcagaactttctaggagaggagcagtaacttctgggttgttgccatggaaagaggtggttaaattccaggttgttggcatggaatttataaacagtcatggtgctggagggaatgtctcatgccagtgagcagtgaagacaaccagggatccctgtgtgtctgtttgcctgtttcttcactgtatgctgtctggaccagatcttgttttgatcagcagggttgtgaccagaaaaccrcctgccggtctcctacctcataatggcaaaaggcattgagtgtcttttcgtgtgatttgggtatgactgtagcttt

SEQ ID NO: 502470 - DNA, 542 bp, Homo sapiens
ggcagggttcttggctttgcccaggaaagtatttaagggcaagacagtggtgatagacagcaatcttttattgaacagtactgctccttaaagagcagggctaactcataggcatcgcatcggttggtaacctatgggctcttgtcaactatctttacactaaggcaaactcactttcaattacatgtaaattgaggagtggatcaatgaaacttgatgggcaggttattcagaactttctaggagaggagcagtaacttctgggttgttgccatggaaagaggtggttaaattccaggttgttggcatggaatttataaacagtcatggtgctggagggaatgtctcatgccagtgagcagtgaagacaaccagggatccctgtgtgtctgtttgcctgtttcttcactgtatgctgtctggaccagatcttgttttgatcagcagggttgtgaccagaaaaccgcctgccggtctcctacctcataatggcaaaaggcattgwgtgtcttttcgtgtgatttgggtatgactgtagcttt

SEQ ID NO: 502471 - DNA, 460 bp, Homo sapiens
agctgaaaccacatcatgggacatcctattaaatacctgactggtgcttttcaaaagggccaaggtcgtgaaaaagaagtgaaggccaggaaactgtttcatataggagaatacctgatgtgtcaggtagactctaagttggtgcccatttatccccaccttctcacatacagaaccttctactgtaatcccatccaagtgagtctaagcaggaattgagacttgctttgaaacaacagaatagtgcaaaggtatagaagtgtcactgggattcttatatatgattatgattttggtcttsctagaaatgtctctctcgatggattttatgaagccatgtgagagaagcccccttggcaaggcactttatttagccaatggccaacagccaagaaagtaagaggcttttgtacaatagactgttctacagttggaaatactatattttaaactaaccata

SEQ ID NO: 502472 - DNA, 597 bp, Homo sapiens
ccttctcattggccatcatcgacatctggattcatgatacagagaaactgtgagtaagagccacttagtatgtgagaatttattattcagtaataaataatacacctggcagtcaatgcaatgtgttatcctggacagaaaaatgacattacttaaaagccgagtaaaatatggaaaaagcctatacttcaataaatagttttgtgccaactattttttagggctcatggatacataatctattacattgcatgtaatccaaagatatctaagctttctctactatctgtgcatatttctgtgtatttaaaattatttcaaagaaaaaatgtttttgaagaaagcattaaatgtgttatgaaaataactccaargcacaaacagaataccttcagctcaggagatgaaagggcacgtagagagagaatagcaaagcatctttccatatcgatttaccaactggaacacaggtacacttgcttcaggaagatcccccccaagatccagagactcgtcctctttcatcttcttcatcatattctgcatttttcagtcaccagttttagcatctggtgctaactacgtaaccagtttttg

SEQ ID NO: 502473 - DNA, 674 bp, Homo sapiens
tcttggattagaccctagaacagaaaaatgacactagtggaaaagctggtaaaatataaagaaaatcttttccagttaatagttttgtaccactgtcaatttctgagttttcataaatatgctatggtgatataaggtgttaacatttcaggaagctgtaggatatacgaaactctattatctttactactttctataaaactaaaactatgataaaataaaaatatttcttgaaatgtaatattcaggtaccagaaaataaaacaacaataacaaagacagatttaaaccacaataaaaccacagatcagaggatgaatggagatataggagactatggcaaagtagcttgccttattatcccccrttcctacacagggcacctgcttcagaaagacaccatcaagctccagggacactcatccactttcttctttcccatcacacttcccattacccagttatcaattgtgttcataaccactttttcaaggaaagacgcctttctcacatatgttagaaggccctgtattcaggcactttctggcagtgtctttgtaggatctcactataaagacattttagaagatatgacttccagacattagaagagaagattgagaaacgccagtgatggtgaacataaatagttctgaattaagagtgttttctta

SEQ ID NO: 502474 - DNA, 674 bp, Homo sapiens
tcttggattagaccctagaacagaaaaatgacactagtggaaaagctggtaaaatataaagaaaatcttttccagttaatagttttgtaccactgtcaatttctgagttttcataaatatgctatggtgatataaggtgttaacatttcaggaagctgtaggatatacgaaactctattatctttactactttctataaaactaaaactatgataaaataaaaatatttcttgaaatgtaatattcaggtaccagaaaataaaacaacaataacaaagacagatttaaaccacaataaaaccacagatcagaggatgaatggagatataggagactatggcaaagtagcttgccttattatcccccgttcctacacagggcacctgcttcagaaagacaccatcaagctccagggacactcatccactttcttctttcccatcacacttcccattacccagttatcaattgtgttcataaycactttttcaaggaaagacgcctttctcacatatgttagaaggccctgtattcaggcactttctggcagtgtctttgtaggatctcactataaagacattttagaagatatgacttccagacattagaagagaagattgagaaacgccagtgatggtgaacataaatagttctgaattaagagtgttttctta

SEQ ID NO: 502475 - DNA, 558 bp, Homo sapiens
cagaataacattatcatggaagaaagttaactagatatgaagaaaaattataatcatggagttgtaggttaattcctgctcaaaaagatgtggaaatgaacctttagacatcagatgtatgaaagtgaggcatgttagtgatacagggtgtgttgtgcagaggtggaaatagcctaatagaaaaaaggaacgaacagcacagtacaacatacaccagcccaccatgcagtgatctaagagatggacacaggccgagtgctgactcttcaaatgtgctggttaaacaaagatccccacagcggggaggactgtccctcttcccaacacagctccctgttcacaggccacaccactttacagaggaacaccagggatsttccaggaaccatgcccacaaagcttactaagccatgggactgcatactacactcccaaggacatccacaaagtcaagactcttgcgttttcagactgtgatcatgggctacattctccataccatgttcatatctacagtgaaaaaacaaactcctgcatcctggagacctacaatgagag

SEQ ID NO: 502476 - DNA, 229 bp, Homo sapiens
gtagcagtaattcaggtgctattatttggggcatttatatttcagtaaaccttcttacccctctaatcttacagttcaccccatcrgaaaggatggtttcatttaaattggcaatcttaagtcatgggggtttgctctttttctttcattataacaggagtttctataaggtaagtgacttgtacaatcccattttcctcttcatttcaatgcatacatgtggtctatt

SEQ ID NO: 502477 - DNA, 267 bp, Homo sapiens
cgacgacacaggcaggcaccgcctcaggaacaagcgcgcttcgcagagaagcgaccagaaagcccaacgcagacccctcagacatccgccctgagttctcctgtagatctcaccgccctctccccctgtcagccgcgccytctgatcaccgccctccaccttcctccctcactccctgtcagcctcgccctccacccgcggccctcacgccccacgtgggcctggctcccgcccccaagcccagcctgcgcggcagctccggttccc

SEQ ID NO: 502478 - DNA, 570 bp, Homo sapiens
taaggtaagtaagaccagctatgactgcctcacacccatagctaactccaggagaaaggataggccccaccatgtagcttgatactattttgccatcctagccacatatgattagtcagttgatgggtttggccacattgctaagaggtaaccatcccttagcctggctgctagtgtggggtgtgttgctcttgtgtttttggatgtgtagaggtgcctgacccattgcctgaatttgcaccatcaccagccatcctatgttgtcatgtacagcatagtctatagagggggtgatattaacctgcttatgagccagatggaagatttgtttccaggtttccccaaaagtggagcactcatggtgagtggtactgtaatcatagatgggaaatgggtgagaattcttactcttgtcccacgtataaacataactccaagtgctcgagttggttgcttggatgtgcaacggcaagtcagcagtggagaaaggggtatttcccccacagacccagcagtcttttgttttggaggaaagccactgtytacacccattcaggtagtttcagcaaa

SEQ ID NO: 502479 - DNA, 538 bp, Homo sapiens
ttaatggtgtattgtatcactgttttagaattggtaggatgaatgcaaaaaccttttggtgacttttgctcctactaaaatttaattagccttagttactgacctcatgttttatgtaacagtacactccaaaatgatctcataaagaattgaagttttggaagaaagtcattcttgctttaaaaactagcatcacataaaagttctctgagtgttttttaactacttttgcaaagtattcttataattgctaacattacctatgggactgactgactttgaatttaattkaagtaaaaatgcgtctctttgacaaggtcactttttaaagtagagctgcactactttgcattacggttctgatttttttcattctaaattaactatgatgtataaaattatcgataaagaataataccttggccatcaaatattaataatgattacaagagaggaaaactacctttaatgcacataaaatttatggttggtaatgatctctactaaatctgcaagactgggtctgtacagtgaagag

SEQ ID NO: 502480 - DNA, 615 bp, Homo sapiens
ctctgtgccctcctcacattcagcaactagagcagtatgagccttggattgtggtcctcaaagacccttcttggtcacatatgtgtttctaagaagacatcagcatggtgacaagattgatgttttattttaccttgcttaaggcatttgtaccacaaaaatgagtttttaagtgggactttggaaacaaaggtrttatttcagaatatacaaatcacataatgaagatttaatttaataaaccccccaaattttcattttaaccaagagtagggcattaaaatagtaggagatctagattccatttttggtttcactttctattattgcatgttctgagccaagtcatttgacagctatgaaacagggatactaatacttcttttttaaaaactttgtgtgtatatatatatataaaatttatggatacatagtaggtatatataatatttatggggtacatgaggtattttgatacaggcatgcaatgcataataaccacattagggtaaatgggatatccatcacctcaagcatttatcctttgtcttacaaacaacccagttataatcttttaattattttaaaatgtgcaattaaattatgttgactata

SEQ ID NO: 502481 - DNA, 627 bp, Homo sapiens
tgtttccttctagaaaagcagtagtgaacataaaaacatggggcaattgttcttgaatctcttttaccaaattccattgaggtatatcatttaagatggagagaaaaaatccaaaatggtttaaaaaactaggtgctgttattgtagttataaaataatccctaggttgttaggcaacaatatgaaaatcaaaactggcaacatgtttgtgactgtcacaagaagacacctatgaaattattctaaggagacaagtgattcaggatgtgatgtgggttctggcaaagggaagagatgccaggattgccccagcctctgaggaagcctctttaatttaaatgtgcatgctgagatgcagctgtgctgatgaatgcatatttattggacctggataggaggcaaatgcgtaactaattaaactatcctggcatcaactactctggccaaaaacccctttttaaaaagcgtcactgtttaaaatgcattctgaaagcaaaaagttaccactcagaactggtttgcaaataacatctctgaaggaatgcgatggtaattttacttagtttagaaaaataatgtttagaagtgcgtttaatktagaggtgactttatgaaagtttttgccct

SEQ ID NO: 502482 - DNA, 563 bp, Homo sapiens
cttgatggagagtgatctggggtcagggagactattggttgggagcmcccattcctgggaagtagagctttaggctagggtatatatcagagtctgcatctttgatgtgatgcaatgggtgagaaagagaagtggcagaggcagccaagcagaggaaatcctcaagaagagggattctagcagccacaaagaggcataaagaccaggatagaccccaggaagcataggaaaagagcatctcagaaaaatgcttttgggcaacatttagtttgagcttgtgctctctcttagactctctgctaaagacttcccattaatgccattatttaatcctcacagtaaaccacaagagaggcactatcattagtcatggatcaggagatgagcattaaggaaattccataatttccatcaagtgcaaaactggcaagtgagagagcctgaatttgaatccagatttacctgaccctagagtctgagcctgtaaccagtatgcaggaccacctcttggctggctcctggcctcctggccccatgtatttgttttcttttatttctaaatg

SEQ ID NO: 502483 - DNA, 545 bp, Homo sapiens
ttgcttatcaattcacaaaaatccagaagccctacaggagaagactaacagatttgactactccaagcttttttaaaacattgttttctatttttcatgtataaggctttcttcagatatctgtggatctttgtctatttgctcatgattataaatggagaaaagagctgattagaaactgtgtatctgcatagagcttatttattccgaacatcactgttggataaactgggtaggccatttattaagcaattcccactgtcagtatcttaggccagaagtcctaagtaagtctcactargctaaaattaaaatgctggcatggttttattgctttctggaggctgcgggggaaaaattgttttcttgtcttttccagcttctagaggctgtctgtattccttagctcctggccctttcctccatctttaaagccagcaacagccactcaagtctttctcacattgcgtcactctgacattggttctcctccctccctcttacacatttaagaactcccgtgactgcactgggctcacacagat

SEQ ID NO: 502484 - DNA, 571 bp, Homo sapiens
aaagagggcaggttttgcttatcaattcacaaaaatccagaagccctacaggagaagactaacagatttgactactccaagcttttttaaaacattgttttctatttttcatgtataaggctttcttcagatatctgtggatctttgtctatttgctcatgattataaatggagaaaagagctgattagaaactgtgtatctgcatagagcttatttattccgaacatcactgttggataaactgggtaggccatttattaagcaattcccactgtcagtatcttaggccagaagtcctaagtaagtctcactaagctaaaattaaaatgctggcatggttttattgctttctggaggctgcgggggaaaaattgttttcttrtcttttccagcttctagaggctgtctgtattccttagctcctggccctttcctccatctttaaagccagcaacagccactcaagtctttctcacattgcgtcactctgacattggttctcctccctccctcttacacatttaagaactcccgtgactgcactgggctcacacagataatccaggttca

SEQ ID NO: 502485 - DNA, 418 bp, Homo sapiens
atccctgtcttatctggtgcctttaaaagaaaggaatcattttaggcaattattatgacctaaaaaatttttaaatcttaacgtatagattaattccttgacagctgaagtcatttacaatacattattaaatttcacattcagttttaaatccaaacatagatctcaacattaagaatatggattttagggaaagtaactagctgctcaaattcatttagctgaaaaactactgtcgaatcaccttgaaaayatacactaatgcttgcacattgctaagtggcttttgattctgctcttcattttcttacacagaatcaaccacacaatagaattaagaactcaggcccatggcaaagtgctcccatttagcagttaggacactggacatattcagcatatgtctactgctattgag

SEQ ID NO: 502486 - DNA, 369 bp, Homo sapiens
tcacatatggaaatgaatgagttctactgagtatctagtatgattcctgactcagtcgagacaattcccatcttttaattcattaaatcaccacagcaactatttaacagatgagaaaactgaagcacagaaggcaacrtggcccaatttacgtttggtaaaaggcagagaatgaatccaattcaggcaggctgtctatagtagggtgctctaaatccacggaccattctgcctaaggaatgaatattttatgaattggaatatttctgctgaacgaatttgccattttctcctctagtggagaaatccaactgagggtaaagaaggaaaaatgttgattgtttaaaacaataaattagtctctaaatt

SEQ ID NO: 502487 - DNA, 613 bp, Homo sapiens
gttttaattagattgctttccttataacaagtttcagtgtttctggtcacaatacaatttattagctcctgacacatgacactgctggatcaccaaccttaactctgattctctccatacaacccagtatccttaagtaaaatgctgcatatttcattgctggtaagagaggcagggccaagattcgaactcacatgaagccaactagagaagcctatgctctacactattttacatctcataattctcatacactactaacctgttgcaaatgaaaaagaagtcttmttattgtaccacttttaattgcacttattattgccttcagtaaagtcttcatttctaaaatgtcttagtaaaacagtaatttcataaaaatattgccaactaggagtactaaattctaattttggttatattatgcggccttggataaggaagtttcttaggctttcatattccaaattattggactattctaaaaacatttttaatattttgatggatgtagtctattctaatataatgtctttcaagtgtttgaaagttactacttattcaaaactcaactgtctggcagcttttcttatcctgaactctgtgaagaacttcg

SEQ ID NO: 502488 - DNA, 613 bp, Homo sapiens
gttttaattagattgctttccttataacaagtttcagtgtttctggtcacaatacaatttattagctcctgacacatgacactgctggatcaccaaccttaactctgattctctccatacaacccagtatccttaagtaaaatgctgcatatttcattgctggtaagagaggcagggccaagattcgaactcacatgaagccaactagagaagcctatgctctacactattttacatctcataattctcatacactactaacctgttgcaaatgaaaaagaagtcttattattgtaccacttttaattgcacttattattgccttcagtaaagtcttcatttctaaaatgtcttagtaaaacagtaatttcataaaaatattgccaactaggagtactaaattctaattttggttatattatgyggccttggataaggaagtttcttaggctttcatattccaaattattggactattctaaaaacatttttaatattttgatggatgtagtctattctaatataatgtctttcaagtgtttgaaagttactacttattcaaaactcaactgtctggcagcttttcttatcctgaactctgtgaagaacttcg

SEQ ID NO: 502489 - DNA, 626 bp, Homo sapiens
catggtacttacagcctagaatgagcatacaaaggatactcattcgctattcgatgatgactgacaaacagtctcccaggatcaccatgaaataactaaactgagtttgatttatttaaaaatcaggtccaggtaacaaactgcacctgtccccttgaattgatacaaataaaaataaaacaaaaaaggacaatattttactttatggaactttttattacaaagaattaaaaaaaaataaaataataatacttaaaagaatactttgactattattttatcacctaaagscttctcttattattttatttttggagacagaatctctgtcaccccggctggagtgcagtggcgcgatctcagctcactgcaacttctgcctcccgggctcaagcaattctcctgcctcagcctcccgagtagctgggattacatgagtgcaccaccacaccctgctaattttttgtatttttagtagagacagggtttcaccatattgccgaggctgatctcaaactcctgagctcaggcaatctgcctgcctcggcctcctaaagtgctaggattacaggcatgagccacagcgccctgccaacctaaaggcttttcacaactgggaattcact

SEQ ID NO: 502490 - DNA, 625 bp, Homo sapiens
tttatagaatatcagagtagtcctacaattcttaattctcaaatggaactagaaagaatatgagagtttctaaatgataaaaccattaatttaaagttataaggggrtgttttctacggaataatttagaattgaattatgtcaattactctgagaaataaactgtcacttctacattgctccttattctttgggagcaattaaatgttctggttaatggtgaggttctggtgtcagacagtctgaggttcaaatctcatccctgcagcttactagctgtgtgatttggacaacatatttaatctctctggacttcaattttatatctgcaatctggaaacatgctgttcgcctttaaagattaaatgagataatatagattcagtatttaggataattcctggtataaaattagaactcaatatacggtgggaatgggtttcacctctcagttgcaagtgtacaatgtgcctcacttatatctgctaagataacacttctctgagctcctgtttacccagctaacaaaaactttcatttcagatgttttctagggagacttagcacaccataagttagtgcaagatctttgagggtcatggactttctagaatattcaaggtag

SEQ ID NO: 502491 - DNA, 625 bp, Homo sapiens
tttatagaatatcagagtagtcctacaattcttaattctcaaatggaactagaaagaatatgagagtttctaaatgataaaaccattaatttaaagttataagggggtgttttctacggaataatttagaatygaattatgtcaattactctgagaaataaactgtcacttctacattgctccttattctttgggagcaattaaatgttctggttaatggtgaggttctggtgtcagacagtctgaggttcaaatctcatccctgcagcttactagctgtgtgatttggacaacatatttaatctctctggacttcaattttatatctgcaatctggaaacatgctgttcgcctttaaagattaaatgagataatatagattcagtatttaggataattcctggtataaaattagaactcaatatacggtgggaatgggtttcacctctcagttgcaagtgtacaatgtgcctcacttatatctgctaagataacacttctctgagctcctgtttacccagctaacaaaaactttcatttcagatgttttctagggagacttagcacaccataagttagtgcaagatctttgagggtcatggactttctagaatattcaaggtag

SEQ ID NO: 502492 - DNA, 524 bp, Homo sapiens
acgcagatggggcgagccgagataactctcatgtatgaacaacagcagctatacaatggcagacagataatatctggtttgagatgggaatgcaacaaagcacttaatgggtagaactctgagctgcatggttagtttgtacctatgagctatggcctacagttctctgtacaaatagttgagcagtatttaagcatcttgcaacttgtcttgctcagtgagcagagatgatttgtatgtgcttcacaaacacttctgaagagctgctacgtgataagacatctgagaagggctacaagaacccactgcaagcctagctgtgtatcatacttcagcagaccagtcaggttcacgttctggtaacatggaggctgacactccagcaaaaacgrtaacactggctatctcttaagtcttgcaggtagcttattgggaacataaacatagtagacattgcagtgcagaagtggactagcaaataacaaagccagcaggattgtacctctgctatgcagattttgtgg

SEQ ID NO: 502493 - DNA, 617 bp, Homo sapiens
acagttcttcaaatgagtcccttttgaattactggggagataagtatatggagaaggcattagatgccacataaaactgaggaattaaaaaaaaaaatcttgaatggtaggaatcttggtgctagaggcatccccagaaagacactgtcagaattccgctccaagaaacaaaagacctccgggaatccactcgccctcaagacacagcatttctagattctctctgctcacatcttccccttctcctggctttccagcaccccagctgactacaactcagaagtgggaaggcacatgtgaaaaaattatgagttccagtctttaaaaattattacagttttaaataattacataaaaatatttacgtttcccgagtcaaacctaaaaaccacaaggcatgttcagaaaagcttcacttctattcctaggcatgaagccctctcccatacttgttttctttccttttctttggattttatttgggtttctccctccagtattaggttacggggcccatctccaatgcggccatctttacccacaaagcacgtggagcccrtgcagtggggttcctcttcaaagaaaactgtgatgctgtcagcaggaagtgcacaaag

SEQ ID NO: 502494 - DNA, 617 bp, Homo sapiens
acagttcttcaaatgagtcccttttgaattactggggagataagtatatggagaaggcattagatgccacataaaactgaggaattaaaaaaaaaaatcttgaatggtaggaatcttggtgctagaggcatccccagaaagacactgtcagaattccgctccaagaaacaaaagacctccgggaatccactcgccctcaagacacagcatttctagattctctctgctcacatcttccccttctcctggctttccagcaccccagctgactacaactcagaagtgggaaggcacatgtgaaaaaattatgagttccagtctttaaaaattattacagttttaaataattacataaaaatatttacgtttcccgagtcaaacctaaaaaccacaaggcatgttcagaaaagcttcacttctattcctaggcatgaagccctctcccatacttgttttctttccttttctttggattttatttgggtttctccctccagtattaggttacggggcccatctccaatgcggccatctttacccacaaagcacgtggagcccatgcagyggggttcctcttcaaagaaaactgtgatgctgtcagcaggaagtgcacaaag

SEQ ID NO: 502495 - DNA, 554 bp, Homo sapiens
tggaggagtgctggggatgctgcaagagctcagagcacctagtccatcacggggaaatggcaacctgggagttgctacagagtgagttggggttgagccagggcacccatgagacagcagcatggtgggtggaagggagtaagtagaacatgatgaggtgaggggcgccatcatggcatgctaagagaagcccaggccggtgggattcatcagaaggaaacctggccgggcaaggtggctcatgcctgtaatcccagcactttgggaggccaaggtgggcggatcacctgaggtctgcgagttctggaacagcgtggccaacatggtgaaaccccatctttaccaaaaatagaaaaattagctgggcgtggtggcrggcgcctgtaattccagctactcgggaggctgaagcaggagaaagagaaagaaagaaagaaacctgagcaacatggcggcagggagtggggaggctgagaaacgaaggcagcttctgggtggcctaacttgccccatggagttttcaaacatccggctccctgttatctcctggtgcc

SEQ ID NO: 502496 - DNA, 599 bp, Homo sapiens
aagagataaataatttcccatgaagtaaatgtgctgcgttttcaaagaataaacacaacatgttcccttcttgctctatccaacccasagcagtgtgtgtttaccctcctcttggaaacagagtcctgcaaagtttcacgttgtggaggaaaattgaactttaactgattgaaatcgctgctttattatagccatcaccctgtggttccctaacaaagaatacacaaccacacaaatatctaaggacttgctacccttccctgccattaactccagagatcacagggctttctgtactgcccagcatcctgagtccaggctgattaaagtcatgaagtttaacaaggaggttaatcaatagaggataatccattataaaaatatctgcaggcttttgagctgtgagggaaatgtgagaaaagaggatgcttttgacaaagaaatctagcacgtggctactcaaactgaggcttgcggcagcagcagcggcagcagctttacctaggagtttgttagaaatgcagaatccagggctgcatctctttttcagcgctacagaatcagaatctgcatttcacagggtccccagggatgcatat

SEQ ID NO: 502497 - DNA, 599 bp, Homo sapiens
aagagataaataatttcccatgaagtaaatgtgctgcgttttcaaagaataaacacaacatgttcccttcttgctctatccaacccagagcagtgtgtgtttaccctcctcttggaaacagagtcctgcaaagtttcacgttgtggaggaaaattgaactttaactgattgaaatcgctgctttattatagccatcaccctgtggttccctaacaaagaatacacaaccacacaaatatctaaggacwtgctacccttccctgccattaactccagagatcacagggctttctgtactgcccagcatcctgagtccaggctgattaaagtcatgaagtttaacaaggaggttaatcaatagaggataatccattataaaaatatctgcaggcttttgagctgtgagggaaatgtgagaaaagaggatgcttttgacaaagaaatctagcacgtggctactcaaactgaggcttgcggcagcagcagcggcagcagctttacctaggagtttgttagaaatgcagaatccagggctgcatctctttttcagcgctacagaatcagaatctgcatttcacagggtccccagggatgcatat

SEQ ID NO: 502498 - DNA, 541 bp, Homo sapiens
ttgttgcagtcatatcttggaaaataaaatctctcatgcctactatttttaaaaatgaagacccagtgaattactttatgacagtttaacaagtctattacttttcctagtaattaccagtgatagtgagttgaataggtataaaaccacagagcctaggacagggcctggcatatggcaggtgcttaaatacatgcttgataaaggaaacacatagtcttagttgttttaaatgcattgatgtaagatttatgcatatcataaccttagagtgggaagasaatttatttattttccagacatataaatatatgtcaggcatttgtgaagagttaccctgtgcactgagtaccaatttgtcagcctggtgagacagaacacctaaatatactataaattccatgaagctaatttattacttgcagatagttataaagggaccacagaaggctcggattcatgataagccagtctcccaaggctcaggaaagcttcccagactgagtggagtattgtctgtgcatgccctgcttgcaccaca

SEQ ID NO: 502499 - DNA, 541 bp, Homo sapiens
ttgttgcagtcatatcttggaaaataaaatctctcatgcctactatttttaaaaatgaagacccagtgaattactttatgacagtttaacaagtctattacttttcctagtaattaccagtgatagtgagttgaataggtataaaaccacagagcctaggacagggcctggcatatggcaggtgcttaaatacatgcttgataaaggaaacacatagtcttagttgttttaaatgcattgatgtaagatttatgcatatcataaccttagagtgggaagagaatttatttattttccagacatataaatatatgtcaggcatttgtgaagagttaccctgtgcactgagtaccaatttgtcagcctggtgagacagaacacctaaatatactataaattccatgaagctaatttattacttgcagatagttataaagggaccacagaaggctcggattcatgatragccagtctcccaaggctcaggaaagcttcccagactgagtggagtattgtctgtgcatgccctgcttgcaccaca

SEQ ID NO: 502500 - DNA, 624 bp, Homo sapiens
ccatgaagccctctctattcaagtggggataactgaccaactgatctttttctggggaccctgagtactttgtacttaatacaatcatagccaagcaataccaaacatttatataagtgctatcttccttaccagactgcctgctgtgtaaatgtgggggttgagtctggccactcctggcatctaacaaagaaggtactcaaaagatgattacggaaacaatggatgaaaagttaaaaaaaattccataataatcatggcagttcagaaaaacaggcaagttgcataagcagttgaggttaatactcttgggtgttagaaatattttataatctcatgttctatcaggagtcatgtccaatttttgtgaacagattttttaaaaggtagaaaattaaggataaggaagmtaactcacagcttgtaagtaccggaaagacaagatagggctacttaatgcaccacaagcattactgtcttcaaagtctccttcttcaagcagaaactgctggcctttaaaatgttctttttcataggcaacccacctagaaatacaggggacacccaaatgacccattaataaaactgtagtcaagaaagcaaaacagagacaatcaagataaa

SEQ ID NO: 502501 - DNA, 601 bp, Homo sapiens
ctcaatgactgacaggaacacaaagagggagctgacccacaggtacacatccacagccttgaggtaggacacctggggcatggaggcgctcacagcagtgatgattgtggacatggtcagcactgtggtgattcctgccatttgagaatagtggcaagctcagtgatatagccattcatttccaggatctggtgctgaatcacaccaggggatgcatttctagaacaatatcaacctggtgatccaagaggagggaaggtgtgtgcatgttgaccagctatatatcttgagcctaaacaaacactctcactggatttttctgtctctttttcttgcccttaccctattatccagaaggtttcctttcctccatttaaaggcttcacagaaaacagagtctgacttttctgtttttcaccctcagatgggcctcttctaagcatgccagaaaggtaaacatgtattcaatttaaaagagtattctaaaatcatttcctctaacctttcccattctttcacaatttttactgyttataacctgtctttatgtctacatttaatatttcatgcttccggggagcttatttcttcttgaaagatc

SEQ ID NO: 502502 - DNA, 423 bp, Homo sapiens
tgggaggcagtgtttacttgttctggtaggtgctgatggtcacgtgagtmgagtgggccagccccgcaggagtgtccgcttgatgaatggttcctctgggaaagtacaacaaatcacccggctaaaggaaggaataggaaagggtagagaagttaataagtattccttctcagtcctcttcatttcagggagataaatatgggctttgagtctcagttctccattctagaaaccacaacctcaaggcacagtctatatgctgggctcatgtcgtgtgcagctagtctagcttctctgtgtccgtgagcctgtcactgttaaccatgatccacgagaggctctcggtgcctgaagtcactatcttttcattctcaagctgagactagactcacctgagactaccctgccctgatgcagggatca

SEQ ID NO: 502503 - DNA, 372 bp, Homo sapiens
  misc_feature (1)...(372): n = A,T,C or G
tctgtttacaagaaaaccagctctcagacataaatatcatcaatactttgtagtgtgggttttgtggcacccaaaacactttacaatgcattattctatnctattttattttattttattttattttattttattttatttttagatggagtctcgctctgtcactcaggctggagtgcagtgttgtgatctcagctcactrcaatgcattattttaaaataagattgttggccaggtgcagtggctcatacctgtaatcccagcactttgggaagccgaggcaggtggatcccttgagctcagtaataaggctagtattttggcttccaaatgcttattatttaacttagttttcaatttgtttacaatcc

SEQ ID NO: 502504 - DNA, 372 bp, Homo sapiens
  misc_feature (1)...(372): n = A,T,C or G
tctgtttacaagaaaaccagctctcagacataaatatcatcaatactttgtagtgtgggttttgtggcacccaaaacactttacaatgcattattctatnctattttattttattttattttattttattttattttatttttagatggagtctcgctctgtcactcaggctggagtgcagtgttgtgatctcagctcactgcaatgcattattttaaaataagattgttggccrggtgcagtggctcatacctgtaatcccagcactttgggaagccgaggcaggtggatcccttgagctcagtaataaggctagtattttggcttccaaatgcttattatttaacttagttttcaatttgtttacaatcc

SEQ ID NO: 502505 - DNA, 649 bp, Homo sapiens
agatatattttattggattgatgattatatatggtattatgaaagcatcttacctagaaaaaaaatcacaataaatgttatatctctttctcctycactataatcatttactgaagaacaaatgcctaattcattatcaacatgtagcagtctggatgactgcattcctatgatactggttgctgagacagttgatcacataaacttgattatatatgagacatttttatactgaatagttttaaaaattgtctaaatatattggtgtaatctgaatatgatctttcaatttctaggtggatgtcatatgatagagacatttttggaggtagacaatttaccattttttgccaaaactatccagtgaataaacaatacccagaaggacttcaacaatgttgctgtgggaacacacaccatctttagcatttggctgtgcatcaggaaacattttgttctattattctctttctatttaaaatgttctgtgtccttagacaagtcattaaaatctttatatgccttttttaatatattcaatcattttatgctatgaaggtggctggttaaaatagtctgtatacattcattcagttcaaacaaaaaacaaaataaaaaaatcacaagaaaaatgtaagcatagatctat

SEQ ID NO: 502506 - DNA, 649 bp, Homo sapiens
agatatattttattggattgatgattatatatggtattatgaaagcatcttacctagaaaaaaaatcacaataaatgttatatctctttctccttcactataatcatttactgaagaacaaatgcctaattcattatcaacatgtagcagtctggatgactgcattcctatgatactggttgctgagacagttgatcayataaacttgattatatatgagacatttttatactgaatagttttaaaaattgtctaaatatattggtgtaatctgaatatgatctttcaatttctaggtggatgtcatatgatagagacatttttggaggtagacaatttaccattttttgccaaaactatccagtgaataaacaatacccagaaggacttcaacaatgttgctgtgggaacacacaccatctttagcatttggctgtgcatcaggaaacattttgttctattattctctttctatttaaaatgttctgtgtccttagacaagtcattaaaatctttatatgccttttttaatatattcaatcattttatgctatgaaggtggctggttaaaatagtctgtatacattcattcagttcaaacaaaaaacaaaataaaaaaatcacaagaaaaatgtaagcatagatctat

SEQ ID NO: 502507 - DNA, 608 bp, Homo sapiens
tttagtatctagacctccagaatattgcacttttgtgtgtgtttgtgtgtttgactacaaatacatacatcactaaataaatattttacatggtttttgttgaatccatgtaagtgcagcggaaagaaaaaaaaaaaggtagaattgctcagcccctagaaaccagttttacatattcagggaaaaagatgattcactgtatatatttctactccaccatattgacacacctagagcctggttgctttttcacattccacagcatccttatacaccaaaaagcagaaaatctaaataatctaccctcattcttttasgaaaaaagtgaagggatcattatgtttcattttaaaatattcaactttccattttctgccttgttccagagcaagtgttttataaataattaaaagcaaggactttgaatctgccagataaaggatcaaatctgggttctttcctttattgagtaaccttggaaaatacaaacaaggtttctgaacttcatttttattaactgtaaaatctcaattataaaaacagtatcataacattattaatatttaataaattcatatacatcacttggcacagagtcggcactcaac

SEQ ID NO: 502508 - DNA, 596 bp, Homo sapiens
ataatttaagtttaggtaactctaacaaaatgctgagtaagaacacggaaagcatttgaaaattgttacaaatgtcttaagtgctattttaaagaaatgaagatataattatatagttctttaatttcaaagagaaaaattgagaaaataaaagtgaaatttctgattaaaaaattgcaaaacagcaaagctatctaaaaagctatttgctctgagatgttacaactttgaaatgagcaaaatgatcattaaagattaacaatttaaagaaacacattttttttctaatscagcacttataacaaaaaagtaaaagcttaatggaaactatatagaaataaatgtcaacacatatttagaaaaattaaagaaaaaacattgaaaaataaactcaagattcagcaaaacagttcatattattatttaaaattatcatcattttaacgaagtggcttctcatattcagggtatagcgtgtgcacagggcagagagggaagaaggtatttgagcacatgtgcacaaaaggacgtgttgcgcaaattctgatgtatattttcaagataagcataattataattaagcttaatttcatgta

SEQ ID NO: 502509 - DNA, 596 bp, Homo sapiens
ataatttaagtttaggtaactctaacaaaatgctgagtaagaacacggaaagcatttgaaaattgttacaaatgtcttaagtgctattttaaagaaatgaagatataattatatagttctttaatttcaaagagaaaaattgagaaaataaaagtgaaatttctgattaaaaaattgcaaaacagcaaagctatctaaaaagctatttgctctgagatgttacaactttgaaatgagcaaaatgatcattaaagattaacaatttaaagaaacacattttttttctaatgcagcrcttataacaaaaaagtaaaagcttaatggaaactatatagaaataaatgtcaacacatatttagaaaaattaaagaaaaaacattgaaaaataaactcaagattcagcaaaacagttcatattattatttaaaattatcatcattttaacgaagtggcttctcatattcagggtatagcgtgtgcacagggcagagagggaagaaggtatttgagcacatgtgcacaaaaggacgtgttgcgcaaattctgatgtatattttcaagataagcataattataattaagcttaatttcatgta

SEQ ID NO: 502510 - DNA, 596 bp, Homo sapiens
ataatttaagtttaggtaactctaacaaaatgctgagtaagaacacggaaagcatttgaaaattgttacaaatgtcttaagtgctattttaaagaaatgaagatataattatatagttctttaatttcaaagagaaaaattgagaaaataaaagtgaaatttctgattaaaaaattgcaaaacagcaaagctatctaaaaagctatttgctctgagatgttacaactttgaaatgagcaaaatgatcattaaagattaacaatttaaagaaacacattttttttctaatgcagcacttataacaaaaaagtaaaagcttaatggaaactatatagaaataaatgtcaacacayatttagaaaaattaaagaaaaaacattgaaaaataaactcaagattcagcaaaacagttcatattattatttaaaattatcatcattttaacgaagtggcttctcatattcagggtatagcgtgtgcacagggcagagagggaagaaggtatttgagcacatgtgcacaaaaggacgtgttgcgcaaattctgatgtatattttcaagataagcataattataattaagcttaatttcatgta

SEQ ID NO: 502511 - DNA, 508 bp, Homo sapiens
gatctgacatttttcaagatcattctgggagctgaatgtggtatgaatggatgcaggaaaagcagttaggagtccagaagaggctgtagtgaagatggagagaagaggatgattatggcatatgtttcagaggtggagacaaaagaacacgctgatgagggggatgatgatgagacaaagaacagagcctgagtatccacttcatcaactaggtggatggtggcaccatttgctgaaatttataaaatggagggagaggcaggarttacaggaaagggaacaaaggcattgaaaattcagagctctgcccatgaggaagaagccaaggggagtcgtccagtagttgtttcagtcaagggtctggaactcagggctggggacacacatttggtcaccatctacctatgaatggtatttagagacactggaataaaaaagactggaaccgagaaacaagccctggttgttcagacaaaggaagagccagcaaaggaaacttcagacacag

SEQ ID NO: 502512 - DNA, 649 bp, Homo sapiens
ctgtaaagctggcctcatctgctcctcccaggctgggaagagaaaattgtgtcattctgcagacttatgccaccacaattctttcacttgtcccgtgctcagctccacctcaaaacatttctaagtagctcagcctgtttttctctcttccttcctcaaccccttatgtgtgaacattcccttctccaggtgctcgccctgctaccccagatgatccaccgagtggagtcacctggttctaactaccatgcatatgttggggaaccatcctctgtgtctgcagcccagactcctaatgagctcttggacccacgttcstgagcaggatacatgatggtccacaggcacttcagaacttcagcaagccacagaactcatcagttactcccctccaccctcgaatggtgtccccttgtaactccaatctcagtgatctaacataagaaggcacaaagttgccctagttaagaaaactgggagtcatctgtgatggctttgtggtgtcattttggccaggctaaacaatatccccataattccctttctagtatgtttctgattagggtgggctacaaggaagaccttctcctgaaagttggtagatggaagggagatatggccgtctgtagcacccacatacactcactca

SEQ ID NO: 502513 - DNA, 186 bp, Homo sapiens
gattctgtgtcattagaagaagaaaaaagacaacagagtctaaggtctatttcttagattctcagtattctgttacagcttcgcatgcacgtgacaagtcacctggagaggccccttmgacagagatgagaacaaacagacaaaagagatgagaacaaacagacaaaagtcccagagggaatcaca

SEQ ID NO: 502514 - DNA, 570 bp, Homo sapiens
gcctgggaatatggctcagtgttaccaagtctccaggcatttcaaggaaagccaagaatctgtattatgaaaaatttctagatttttgaaaatacaaygtgggccaaacaaaataatgcttatgtgcaaatctggcccaaaccaaataatgcttatgtgcaaataatgcttatgcgcaaatctggtcaccaacatttcctgtgttaccctaaagccttctgagatctaatacaccaaattgcagagaaactctgccctagagttttctacctggaaaattgtgcagagagcaaagatcatgacagacccagagagcgggctgctgacctaaaaaggatgaaatcttaaacagaatccactggaaagtaggaagatggagaagtcgggggttaggatataagatggctactggccccaggagaggcaagagttctaatggtcagaagatgacagtgagagtgattagctggaaaacaaggcctttgagagaggtttttgcatgaaaaaacagatataagggcttttcactacatataaggctgtgacctaaataaacttgaatgtctgcga

SEQ ID NO: 502515 - DNA, 458 bp, Homo sapiens
cagctgggaagggctaagtcgatgacctaactttatgaatatgcaaactgaggatttaaaaagtgaggctgcttgctgaagccacagactggctagggaaagagccaagactacctcaagctgccccttcaagttattgatcatggtgccaccccagcaccatgctactcctctgtcatgctgtgcatgggttctcaatttttcattaacttattttcccaagaagagtgtgagcctcccaaggttaaaacctctgtatcttttgcctcttaagacatgtgaagcatacagtaaatgcatgatggtaccaaaataggggcaattgaaacctaaatattaargtgaagcaataatgctttttaatcagtatgtccagctcaccaaaacactactttggtaaagtacattaaagtatatagctaacacttcccaaaacaattttcaatctaaacattgat

SEQ ID NO: 502516 - DNA, 437 bp, Homo sapiens
gtgtaccatgcagactaatctgttatcagtatgcacttttggcaaacaaattggctaaaattgtactggctttttttttttttttttaaagcagaaggtcaaattgtccaatgccaaaatattttttttattttttaaagttaacctcactgtttggttgatagactatgttacaggaggaagaccatctacaagacaatataccaatttacctagaggctaaaactccttattggtcatttgtgttttcttcatgggttttttgtaattttcagtcttacagcaacaaggatcttagtgttcattayccaaactatctatattgtactataatctatgaatttgtttgatttgcttggtaaatattagagtctttcgctgactaaagataatttgaactttttgccaacatttcatcggttgttggatcagtgcaa

SEQ ID NO: 502517 - DNA, 573 bp, Homo sapiens
ctagaatgattttttaattttttaagattccttytccttaaatttttcccatagtttttaacttattactttgtcagcacttatatttctcttcaaagttttttgaagcacaaaagttgtggcatataaaagttgttgctacacatacaggagaagcatgttgaggtgtgcaggggcagtgctgcatcctattttctgacctccttgctggagtaataaatttctaatgtcatgcatatgtagaggaaaaagagcttttgtatttaaaatatttaatggtaaattacaatgttaatattaaaactctaattttgattgcttcatgcaaggaatgaagtatttcaagttctttttagtatactttaagaagttaactatattttgttgtattatagtaaaggtaatggaataatgtagattttatcattttgcaattagtctttcttttcagtgacagcccatttttagggtgaaacttactggtatcaattctctctattaaggacctcaagcaatgatagaaggcccttcattgcactctgtctttccaatgttgcttttatgcttccctgg

SEQ ID NO: 502518 - DNA, 522 bp, Homo sapiens
accatggccagctggttgcctcccttttgtgaggaccacactccctatcaagcagctctctcccttcagctcccttctctgagtaacttctccctctccttacttgcaggtgtkaagagcttctccctgttactagctccagggcatagcatatcccttgtgctttaagcactgttttattaattactaacctttattaagctctttattaactacattaagttaattagactcttctcaccattttgacaatgacctttactttccaaacatcatgtggcatcttacgtattttacttaattacttgtttttctccctctgctaaaacataggcttcatgaagtcaagatttgtcccttttgcatactactgtattcccagcacctacgagagaacagggaacatagtaggagatgagaaagaagcactggataaataactgaatcatgagtgaacatatgacttaggaagggacatagaaagtctaactccccatcttctctgtatgctggatctctgcc

SEQ ID NO: 502519 - DNA, 522 bp, Homo sapiens
accatggccagctggttgcctcccttttgtgaggaccacactccctatcaagcagctctctcccttcagctcccttctctgagtaacttctccctctccttacttgcaggtgtgaagagcttctccctgttactagctccagggcatagcatakcccttgtgctttaagcactgttttattaattactaacctttattaagctctttattaactacattaagttaattagactcttctcaccattttgacaatgacctttactttccaaacatcatgtggcatcttacgtattttacttaattacttgtttttctccctctgctaaaacataggcttcatgaagtcaagatttgtcccttttgcatactactgtattcccagcacctacgagagaacagggaacatagtaggagatgagaaagaagcactggataaataactgaatcatgagtgaacatatgacttaggaagggacatagaaagtctaactccccatcttctctgtatgctggatctctgcc

SEQ ID NO: 502520 - DNA, 522 bp, Homo sapiens
accatggccagctggttgcctcccttttgtgaggaccacactccctatcaagcagctctctcccttcagctcccttctctgagtaacttctccctctccttacttgcaggtgtgaagagcttctccctgttactagctccagggcatagcatatcccttgtgctttaagcactgttttattaattactaacctttattaagctctttattaactacattaagttaattagactcttctcaccattttgacaatgacctttactttccaaacatcatgtggcatcttacgtattttacttaattacttgtttttctccctctgctaaaacataggcttcatgaagtcaagatttgtcccttttgcatactactgtattcccagcacctacgagagaacagggaacatagtaggagatgagaaagaagcactggataaataactgaatcatgagtgaacrtatgacttaggaagggacatagaaagtctaactccccatcttctctgtatgctggatctctgcc

SEQ ID NO: 502521 - DNA, 559 bp, Homo sapiens
ctgtccctctatattcatgggagactggttccaggaccccctgcagataccaaaatccacaaatgctcaagcctcttatataaagtggtgtagtatttgcaaataacccacacacatcctcctgtatactttaaataatctctagattacttatataatgccgacccatctcctcattcatgtggattcaacatagtgctcagtgtgtggcaaattcaaattttgccttttggaactttgtgaagtttttcccccctaaatatttttgatccatggttggttgaatctactgaagtggaacctatggatacagagagccaactgtatttctattaatgtttccagttatttctatgatatttaagagaacaaaaaatatttttatcatctttaagcctgttatgagcccctcatgtcacatggtacacagcaatcctgtaatcaaattcatcccaggccacactcrgcatcaatgattaacatgctgcccctgatgctacttcatttcctgaaggctgccagaaagaggtggtacaaacaagagtttcctgacataact

SEQ ID NO: 502522 - DNA, 607 bp, Homo sapiens
tttagattttatcattgtgtaaattactgggtttttagcatttcctaatgtgaagttttaatcatttttaagtatacatattttttttctgtaccatttaaataaaatatttttataactttcttgtgagttttgttcatgcaaactttggaatgacttctggtttttagctattagcactttgaattaaccatagaaataacaagggctaactctgttcttcaaagactttataaagacagtatttgcactttcaaatgcaaatatatctacattaaatctaaacagcataagcattgtgacagaatgtacctcatgttgattgttttctctgtaaggtgacttctagtaatgatttgacttaatcaccacttgtgtctggttcagatcataccctgccatttactagctgcaagaccttcagtagtacaggtttagtatccctaatttcaaaatctgaaactttytgattgctgatatggcactcaaaggaaatgctcattggagcatttcgggttttggaatacaatgcaaatattccaaaatccaaaacacttctggtcccaagcatttcagagaaggggtagtcaacctgtaatcttttttc

SEQ ID NO: 502523 - DNA, 622 bp, Homo sapiens
atgaaaatattttatgttttcccatcactttagattttatcattgtgtaaattactgggtttttagcatttcctaatgtgaagttttaatcatttttaagtatacatattttttttctgtaccatttaaataaaatatttttataactttcttgtgagttttgttcatgcaaactttggaatgacttctggtttttagctattagcactttgaattaaccatagaaataacaagggctaactctgttcttcaaagactttataaagacagtatttgcactttcaaatgcaaatatatctacattaaatctaaacagcataagcattgtgacagaatgtacctcatgttgattgttttctctgtaaggtgacttctagtaatgatttgacttaatcaccacttgtgtctggttcagatcataccctgccatttactagctgcaagaccttcagtagtacaggtttagtatccctaatttcaaaatctgaaactttttgattgctgatatggcactcaaaggaaatgctcattggagcatttcgggttttggaatacaatgcaartattccaaaatccaaaacacttctggtcccaagcatttcagagaaggggtagtcaacct

SEQ ID NO: 502524 - DNA, 690 bp, Homo sapiens
ctggccagccaagccagacaagccacccggccatccaagccagccagccaagccagccaagccagccaagccagccaagtcagtcaaccagccagccagccaagccagccaagcctcccagccagcaaaaccagccaagccacccagccagccaagccagccaagccacctagccagccaggcccgccagccagccagccagccagccagcgagccaagccagccaagccagccagcctgccaagccagccggccagccaagctaggcaatccactcagccactcaagccagccaagtcacccgaccatccaagccagccaagccagtcagccagcccagacagccaagccagccaagccagccaagccagccaagyccgccaaccagccaagacaggcatgctagccaagccagccaggcagccaagccagccaggcagccaagccagccaagccagacagcaagcaaagccaggcatgtcagccaagccagccaggcagccaagccagccacgccagccagccagccaagccaggcatgccagccaagccatccagccaactaagccagctggctagccaagccagccaagccagccaaccagccaagccagccagctagccaagctacccagccagccagctagccaaaccagccaagccacccagccagccaagccaccaagccag

SEQ ID NO: 502525 - DNA, 563 bp, Homo sapiens
tcagcactttgggaggcagagacggatgtatcgcttgagctcaggagttgaagaccagccttggcaacatactgagactctgtcttgtataattaaattaatatttaaaaaaaggaaagaaaaggaccagtgtttaaaatttaaaaaaaagggggggaaagtataatgcaaaatgtggactatgctagctatgattgggaaaaataatttttcatacagcattatctgttgacttgtattagcagcacactggtcataagcgttttgctttcatcaaatatgaggtaagctactttaaagtgtggtggggctttcttccgcatggctcctggaggtgttgagtcccaatttagccaattaattggggtttagttttgatatggataagggagaccggcttcattcatgatgcacacacagttttgccagtaaggaaaaaaaamgcaacctgaatgtttctactcattagatgctatctggagagctcctaccccaatgccacaaaggcccaggcccttaaaaagactcaatgcagcctttgtgtgtctcatactgtattctgc

SEQ ID NO: 502526 - DNA, 523 bp, Homo sapiens
gtgcttttgaactttatagaaatggattcatacagggtgtattccttcacattgagctggctgtgtgcagcattgtgtgcagttgtttcatattgtagccgggaacagtgactcatcttcattgctctttagcattccattgtttaattgaatcccagttttcttttccactgttgattgtgtttagatttttttcagtttggggttactatgaaggatgctataaagagcattcttgtacatrgctcttgtagcacagtgaacacatttctgttgggtgtagagatgtacgtatatgtgtgtgtgtgtgtgtgtgtgtgtgtgtgtgtatatatatatacaccccaaggggtaaaattgttggatgtacatacctttgacttcagtaaatcatgccaaactgctttccaaagtggttgttcatctttttttccttttgtttttcagtggatccttatagtttgggattcttccataatggtacatatagatgtgtcacattttttcaaacagttgcatagtt

SEQ ID NO: 502527 - DNA, 523 bp, Homo sapiens
gtgcttttgaactttatagaaatggattcatacagggtgtattccttcacattgagctggctgtgtgcagcattgtgtgcagttgtttcatattgtagccgggaacagtgactcatcttcattgctctttagcattccattgtttaattgaatcccagttttcttttccactgttgattgtgtttagatttttttcagtttggggttactatgaaggatgctataaagagcattcttgtacatagctcttgtagcacagtgaacacatttctgttgggtgtagagatgtacgtatatgtgtgtgtgtgtgtgtgtgtgtgtgtgtgtgtatatatatatacaccccaaggggtaaaattgttggatgtacatacctttgacttcagtaaatcatgccaaactgctttccaaagtggttgttcatctttttttccttttgtttttcagtggatccttatagtttgggattcttccataatggtacatatagatgtgtcwcattttttcaaacagttgcatagtt

SEQ ID NO: 502528 - DNA, 598 bp, Homo sapiens
gcatatatgtaattacataaatgcataggaacaatctgttaatagtagttacttctgaggatcaaggtagtattcaaagtgactttttgcttctctataatattttagtttcataataaggaaaacacaagctacattacttgtgggattaaagatgattaaaaacattaatagaacaaacattggctwaaaaaaatgttaacctccttttcccaaagtacctttttggggagagagtggaaagtgataatgtgattgaactttgtctattcccgtctctagggtaaagttgtggaatgttgcaaaaggtaaacttccagattgccctgggaggaggccatctgggtagcccaccacccaatttattagcatggtaaatcatctttctttcgtgtattttaaggacttttgactttcactttcaactttgtcttttgcgtaaagggactagaatctaataaatggaaacctgtctcagcattttattacagaagattcctggaacatagctgcatctctgcaaaagttacctaggacttcccagaaaagcccaggcccagaatctgcaattgcatcatggtgcagtgtttggacacca

SEQ ID NO: 502529 - DNA, 598 bp, Homo sapiens
gcatatatgtaattacataaatgcataggaacaatctgttaatagtagttacttctgaggatcaaggtagtattcaaagtgactttttgcttctctataatattttagtttcataataaggaaaacacaagctacattacttgtgggattaaagatgattaaaaacattaatagaacaaacattggcttaaaaaaatgttaacctccttttcccaaagtacctttttggggagagagtggaaagtgataatgtgattgaactttgtctattcccgtctctagggtaaagttgtggaatgttgcaaaaggyaaacttccagattgccctgggaggaggccatctgggtagcccaccacccaatttattagcatggtaaatcatctttctttcgtgtattttaaggacttttgactttcactttcaactttgtcttttgcgtaaagggactagaatctaataaatggaaacctgtctcagcattttattacagaagattcctggaacatagctgcatctctgcaaaagttacctaggacttcccagaaaagcccaggcccagaatctgcaattgcatcatggtgcagtgtttggacacca

SEQ ID NO: 502530 - DNA, 455 bp, Homo sapiens
tggtaaaagttactgccactcaagtatctcctattcctgctactctgggcactcatgccctaccctgtcctgggaactttccacagtccagcaaataagaagtaatgcccgtcacagtgggtgamtccactctgcttcagtaaaacttctgtagtttctgggtggctgatgaccgtgtcgaatgtgttgttaaatattttgactatcacttgtctatacaacttttttgaggatctcattacaatctcaataagcaaatgtctttttgtgtgctcaatacagtcttgtttcctcctccaggcaaaaatggactgtttggtgttggaggctgagcagaggtgggcaaaaaggaacagaaggagagtaactggtgaagaaggagcaaagagtgaggcacagtaagttggtcgtggcgagggggcggggggcgggggtggggggtgcgggcagattct

SEQ ID NO: 502531 - DNA, 455 bp, Homo sapiens
tggtaaaagttactgccactcaagtatctcctattcctgctactctgggcactcatgccctaccctgtcctgggaactttccacagtccagcaaataagaagtaatgcccgtcacagtgggtgaatccactctgcttcagtaaaacttctgtagtttctgggtggctgatgaccgtgtcgaatgtgttgttaaatattttgactatcacttgtctatacaacttttttgaggatctcattacaatctcaataagcaaatgtctttttgtgtgctcaatacagtcttgtttcctcctccaggcaaaaatggactgtttggtgttggaggctgagcagaggtgggcwaaaaggaacagaaggagagtaactggtgaagaaggagcaaagagtgaggcacagtaagttggtcgtggcgagggggcggggggcgggggtggggggtgcgggcagattct

SEQ ID NO: 502532 - DNA, 455 bp, Homo sapiens
tggtaaaagttactgccactcaagtatctcctattcctgctactctgggcactcatgccctaccctgtcctgggaactttccacagtccagcaaataagaagtaatgcccgtcacagtgggtgaatccactctgcttcagtaaaacttctgtagtttctgggtggctgatgaccgtgtcgaatgtgttgttaaatattttgactatcacttgtctatacaacttttttgaggatctcattacaatctcaataagcaaatgtctttttgtgtgctcaatacagtcttgtttcctcctccaggcaaaaatggactgtttggtgttggaggctgagcagaggtgggcaaaaaggaayagaaggagagtaactggtgaagaaggagcaaagagtgaggcacagtaagttggtcgtggcgagggggcggggggcgggggtggggggtgcgggcagattct

SEQ ID NO: 502533 - DNA, 409 bp, Homo sapiens
cctagtctccattatttcatccagccccaccatagtttcacagggagaaactcagaatggagttgagaattggaaaatggtggaggaccctctctttctggttcacttttttgggggattttaaattttgatcaaaggataatgcagccatctattctttttggtgggcatstacatttgcagcataggatagaaagaaaacatatatacatgtacatacacacacacacacacacacacacaaacacacactcattcatcataaagaaaccatttggatgggactggccatagcacttatcattgtcatttctgccacttagcatgttttgcaacattttcttctccatccacctcttccctttgacattttcataaaactggaccaggggcatcagagtcaaagaaa

SEQ ID NO: 502534 - DNA, 629 bp, Homo sapiens
ctgctccatcctcatcaccccatccttgccatttgacagaaacagaatgacttgcaggatgtcacactgcatttaaaataaaatcaagctccccatcagtgcctgcaggtccaggataatctggccctagctgatctccagcctgtctctcccagtctcagttcattccagccacatctacctttttttgttcctcagataaaacaaactcactccagcctcaggacctctgccttgctctcctccctgcctggaaagccctgcccccagatctttttgggactctatccttctcactatttgagactcaggtcatagaccgctgtcttaggaaaccatctctgttatcactctataagctcaactgtatctgttgtcctcttgaaatttctgtatatcatgtattattattaattattaaaattgattatttactctrgacagcagttataattatatttgttgctatcatcattgttacattattattaggcattcgaagcttatttattgcctgtcccatccccaaatataaactctacaagaataggagctttgctatagtgtatctatctaatacagtgcctggaacatacaagacattcaataaatatttgataaataagtaa

SEQ ID NO: 502535 - DNA, 644 bp, Homo sapiens
ctgctccatcctcatcaccccatccttgccatttgacagaaacagaatgacttgcaggatgtcacactgcatttaaaataaaatcaagctccccatcagtgcctgcaggtccaggataatctggccctagctgatctccagcctgtctctcccagtctcagttcattccagccacatctacctttttttgttcctcagataaaacaaactcactccagcctcaggacctctgccttgctctcctccctgcctggaaagccctgcccccagatctttttgggactctatccttctcactatttgagactcaggtcatagaccgctgtcttaggaaaccatctctgttatcactctataagctcaactgtatctgttgtcctcttgaaatttctgtatatcatgtattattattaattattaaaattgattatttactctagacagcagttataattatatttgttgctatcatcattgttacattattattaggcattcraagcttatttattgcctgtcccatccccaaatataaactctacaagaataggagctttgctatagtgtatctatctaatacagtgcctggaacatacaagacattcaataaatatttgataaataagtaaatacatggctgtgct

SEQ ID NO: 502536 - DNA, 616 bp, Homo sapiens
catctctgaaaagttgattatcctaacagcctcttaactatcctcctgccttcagtctctgcacaacaagtcatactcaacaatgtgaacaaggttatttctcataactgagcatatcactctcctacttgagaatattaattggctctattcaggccaatacacctacaaaataaagtccaaaatctttagtacattcaaatatctttggcatcttgctcaatcttatttttgctcattttrcacattttttgctcattttgctcactttttgatgattttgctcagcccttatcactcctttcacattaaatgcacacatgcatgcacacacacatgcacacgcaataatcatagtagactacacacaattccccatccaaaggcctttatatcttgatacatgcagttttctgtacctcacataatctggtcttctttgccaggcaaatcccttctgtgatggttaatattgagtgtcaacttgattgtattgaaggatgcaaagtattgttcttgggtgtgtctttgcaggtgttgccaaagtagattagcattggagtcagtgaactgggagaggcagacccaccctcaatctgggtgggcaccatctagt

SEQ ID NO: 502537 - DNA, 472 bp, Homo sapiens
ctttggaggggacttgaggatacagggagaaaaatgtccatctctttgcattggagtcttccactgtcccaaatgaaaagggagtgaaacgaatgggaagaatgccggtttggggcaggaagacaggagtttggtaagaggagaataacgccctgctgggcagaccccttggatgggtcagaggtgaacagacagcttttctgagaaccagtatctttggagatgctttgctgacagagttgatggctaagaggccccagacagagatctgttgaacgggtacacagagcagaatcccacctggagcaaccttggcgccccagggctcctgggagtaggctacatggtatatrggatggaatgggggtcaaaagtccccacatttacctttacttttcggggagagagagtatttaagtaatatacactaggagctttaaatttaattcctatcctcagtttaaatataact

SEQ ID NO: 502538 - DNA, 616 bp, Homo sapiens
taaggaaggcatgataacccctcttgcgcgggtaagaaactggggctctaaaagcttaaatagctgatttgagatcacaccaggagtaagaaagtggtagattcaaaaagaatccagagagccaaaatagacgtggtgggaaccctgaagtgagtgcaaggcttccagaacttcccctgaaatgaggtcgaggggaagatgctgaacttccaatcagcatgcggtctggcttagaatccgggttccatctgcctacttatcctctctgtgtctcagttcctcctccgggaggaggaggaataaacaactgggatacacaactataggaagaacagcaaacgtgtttttgaagccttcctacgtgccaggcacttctggtggagcatttctggtggagtagctacttgaatctgaggattgctgtgggcagtgatgagaaacaagcaaagggcgccgctcagcgtctggtacataaaacgtgactttcaatctgacacccatgattcatgattctgacctgcttagatggggcaggaaagagcatgtgtgctatctagtggccaatctggggaaattccstccgtgatctaaacaggagcctcaggaggagcagcag

SEQ ID NO: 502539 - DNA, 655 bp, Homo sapiens
tgctttcaggtgctggacaagtggctttttcttcctcatctctaacaatgggatgcaatagctcatatcttgcccatctcaaaggcaactaaaaatttaactatttaaattgaattatttaaatttttgtgaacatgggtttttaaatgccagaggctacagagatacaaggagcggctttcaaagaagttacagagctagatagaatttctcatctctacaaagaaaataaacttggaagtcaaagcatcatgttatctgccataacaatattaaaatgacttatcaccaatgcgacttttctaaaaaattgttactgattgaaaaaatgttactgattggttgrggaacagtcctggattcttgctgcccttaatttgctgtgtaactacatgcatgttgccttaccttcctgggctgaagactcctcacctgtatgtgaggaggtcagactgactgagctctgacagccctcccaggtttaacattttctagtccaataaacagatgtaactaataacctacccctaattctccaaaactgtgactgtctccagcagctaactgagctctgggttcctcttagccccagaaccccaatattctttttttcaggccaactctctaggacatattgaactgtcagttattgaaa

SEQ ID NO: 502540 - DNA, 544 bp, Homo sapiens
catcaatatcaatttttagacttcaaacattgaacactgatatcttctcccacaataagccacttcctcttcccatcctacctcatatttaatagtattaatactcaaggtgctgtatagtaaattcacaattatctttactactttatttgttttccttcccttcacaaactacatctattggtcataacagtgacttgaaaatgctacattccttctttttctatcctacaaaactggtaataaaaatgaaggagcaaatgaaagcatagagtttgctccaggttggatgtagttaatttatatatttattgagagctaaataaaggaaagraagtcaaggacagatccaagattattaagtcttgggagagtattagagatgtatggttccaataacagaaatacagtaatgaggaaacatgattactttgattttatacttgttgaatttgaaattaaagctagaaattcaacacaaagtaccctaaaagcagatggatttataaaacaaacatgcaagagaagaccaggatcagagatg

SEQ ID NO: 502541 - DNA, 497 bp, Homo sapiens
cctttaattaacaaactggtcttaagaaatcatggctagtaattgtatattaatattatagttttttcaattcaaaaaaaaactacggaagattttatctataatagcatatatataaatccctcagaaaaacgattttattcctaaagcttactgtttataaatggaaaaaacattttctcatggaaataatcatataactgactgttaagtgcccaagccaagaggcaaaatgtctcccattaatttactaacaataagcatcaatggcttcctattgtagttagcataaaatctaaactcattaacatggactacaaaatatacataatctagtcattgccttatcactctccccttcattcatttagctctatcaacattggcttccatctttcatactgagaaaaagccctggttcactcygcaccaccattggttacgccctgatactgcgcactgagtagaatgccgtctgcaacttgcgcatttcgcag

SEQ ID NO: 502542 - DNA, 594 bp, Homo sapiens
tgtattagtcagttctcacgctgctaataaagacgtacccaagactaggtaatttataaaggaaaggggtttaattggctcacagttccacatggctggggaggcctcacaatcatagcaaaaggtgaatgaagagcaaagccaygtcttacatggcggcaggcaagagagagcttgtgcaggggaactcccatttataaaaccatcagatcttgcgacacttactcactatcatgagaatagcacaggaaagacccaccccacgattcaattcctccactggggttcctcccatgacacatgggaattatgggagctacaattcaaggtgagatttgggtagggacacagccaaaccatatcagccgccatctacaaggcagggagagaggcctcagaagaaaccaaacctgccgacacattggtcttacacttctggcccccagaagctgtgagaaaatgaatttctgccatttaagcctctcggtctgtggtactttgttatggcagccctagcaaacaaatacacttggtatgtatcttaataccgggtaaacaagccaagctagtgtgttaattataagttgggctttc

SEQ ID NO: 502543 - DNA, 598 bp, Homo sapiens
agcagcaattatgcattaggccatgtgtgcaggccaggatgcatcacacctcatcaggaacacatctccgaagacagatcctggatagcaaaataaatttattgggcgatactggggagacttacattctaggcttgctcaaggcagttrgagtatggaaatatgatgaacatttctgttactctcaaaatctcctgtgtcggtcagtaaattgtatggtcaccccaggcaatactatcatgtaacaccacagaaaattgtgtccatccaggtaggagaaaacatcctgagagttaaaaaaaattggctattcagttgttcagtctttttctttgtctgtctccatctctcttttcaattttcattcactgaacaatgcattctcctgtgtttctcagcactttatcacacccttaatgattctagaccttgtatatcctcagccttggcttcagaatgttggagacatgatgccaattccagttcacaacaaagcagcatacgtagtaacccagattgtctcccggccactgaatattgacccaatgctgttcattgctgttgagagcactaaacttctcttcaaaccaaccagcag

SEQ ID NO: 502544 - DNA, 557 bp, Homo sapiens
gggtgcagtggctcatgccctgtaatcccagcactttgggaggctgaggtgggtggattgtttgagtcccggagttttgagaacagcctggccaacatggtgaaaccttgtctcttctaaaaatacaagaattagcccaggcgtggtggcacacgcctatgttcccagctactcaggaggctaaggctggagaatcagttgaatctgggaggcagagcttacagtgagccaaaactgtgccmctgccctccaacctaggtgacagagggaggctctgtttaaaaaaaaaaagtgtaaaatatcttttctgtctagaagaggatcttatctttccagtagctacatctggctagtatctaccatactagtgaggtagtgtggtagctgttgggcacctgatgtgtagctaattctactgaggaactgtatggctaatatctaccatattggccagtgcagttctagacaaataggcaaataacacaagaaaatatataagataggaagaatggaaagcacagagtttacgtgaaagataaagtaagttgtctacctca

SEQ ID NO: 502545 - DNA, 531 bp, Homo sapiens
ctgttaggcacacgaagctgaaattacttactatctagyatagaacatatttgctgcctctgatatacacagtagaaatcaccagaacacatgagatcctaataattttaatataagaaattctagtattcactggagtttaatagaatactctgtttactcttatcattacattggcacatctataacatactaatattcggaataaaaatacagagttcctctatgatcctaaaatatctcttggatcaccaagaaaaaattattctccatataaaaatactcctaaatatcatgtgtttttgtctagatatttggaaagcggttctccttttatgatttatatttgattttctattaactatagtattttattaatcagagcacttcgttctctgtgtatgccaagtgatatatatgttaagccatatgaaattcttactttgttaatgtttcatcaattcatggaaactaaactggatctgaaacataagtttcagattcaaacttgtgtggtcagagaagtatggg

SEQ ID NO: 502546 - DNA, 515 bp, Homo sapiens
ggcagggattttgctgaacactttgtgaggtttacactcaacttccttcttcagattgctattttatattaaaccaatagagcactgttattgagacaccagactgctacaacttcaagaagatcctaaaccaagtaactttttctggaccactcgagtctccatgaacgtaaaagtctaatatacttgaaaaatccattgcagctcaggagacattatagtgggatgatctacaatcagactctctggatttgaagaatcttcctaccacttatcaatgctgtaagtttgagagacaatagaggttaagaatacagtccttcctttcttccttccttccttcccttctttcttccttccttccttccttccccccccmccttttctttttcttttcttttctttttttgagatagggccttactctatcacccaggcttgagtgcggtcacacattcatggctcactgcaaccccaacctcccgggttcaagcaatcctcccacctcagcctcc

SEQ ID NO: 502547 - DNA, 515 bp, Homo sapiens
ggcagggattttgctgaacactttgtgaggtttacactcaacttccttcttcagattgctattttatattaaaccaatagagcactgttattgagacaccagactgctacaacttcaagaagatcctaaaccaagtaactttttctggaccactcgagtctccatgaacgtaaaagtctaatatacttgaaaaatccattgcagctcaggagacattatagtgggatgatctacaatcagactctctggatttgaagaatcttcctaccacttatcaatgctgtaagtttgagagacaatagaggttaagaatacagtccttcctttcttccttccttccttcccttctttcttccttccttccttccttccccccccaycttttctttttcttttcttttctttttttgagatagggccttactctatcacccaggcttgagtgcggtcacacattcatggctcactgcaaccccaacctcccgggttcaagcaatcctcccacctcagcctcc

SEQ ID NO: 502548 - DNA, 552 bp, Homo sapiens
gaaggaggagcactcgtcctctccaagcacatccaatttgcctcagtcctcatgactcctgccctgttaccagaactgagctcatttgttattgaagttgcttttcttatacccagcccagttttccattgatgctcccgcttattctatgtaggtattttcatttatcacacaatatccctagtctaagayttcatttgaggaaagaaaaaaaaaaaaacctctgctgctaaaaataatttgaaaactcctagacaataggacctttcaaatcccttacaattctaacaaccagtgaattcatgcttcacagccattcagatctatacgtatgaaatacaagacatatgtgttcaactttccttcatcgcctcctttaaactttcttttttcttttttgagtcagtccctgcaggaacagaccaagtgagcccattaagagaacagttcattcccacctgctacctcgagccagccaacaatctcagcctcaccactccattcttgattatgtagaaccattccaatcctgagtgacaggatttgcaaaga

SEQ ID NO: 502549 - DNA, 645 bp, Homo sapiens
cgatcttcacatgtaagatgaagtaaacaaaagctgacaatgcccagcaccattcagcagtaagcattcaaatggatttttcctcaccgcgtttgcaggcccggcacagtctcagttccccacagcacagagaggaagcaaggtctttgcatgccctgttcacttggccaaacattgccctagatgtgcaattcaacccgtataaagcaagcgtaattcaagagccctgactctttcaccatttcatgatggcttattactcgcacacggcattgtcaggttccagcaactctgtgtgcagcaggcagaaatgcagtgtttatctctgacaggcaaacattcttaggctcatcggcatgagtatccacgctgaactggctatcggggaagtagatccctgcatgggaaagtcaaggtatgtttagagggactcgatgattcaaccccattggctggytcattccttttgtttcctctgcctttttatttgcttacacagaaaacagagcattcatttatttcttttccctctctcatctctattaaccactagggccatctgcccatctgaaactgtctttggctgcatggttgtgaatccaggtgacagtgaaaatgaagaagtggtgattgtccctgcatgtt

SEQ ID NO: 502550 - DNA, 571 bp, Homo sapiens
tgacacgtgtagccaagttgcttctttacatttgtcatcttccagaactaaactcacattgtgatactggtgtctcgcacatgacgtcaagggaagtgattatgaagaatattgggtggaagaagggaaattgagacagtttaaatgtcattcactagttcatttattcattcaccaaacatkcattgggcatcatcctcagtggtaccagaaagtttattttataaagtacacttgggttctggccaaagactttgtaatgttgactagaatagaaggttacattagtagccctggtaatacaacaagggagcctgaagtgaaagtttaaatgctgcattttcagggattgaacattcaagggtaataagctgaattgactaagattgttcttttgaaatgatagcattgacttctaggtttctgagtttcctgtttaaaatttatgaacagtattggttgaactcaagaaagttcttttaagatcaatgaaatccagtggctcctctgctctgaggctgcggatgtaggaatgctaagataaggtgttacctgacagtgacaataacaa

SEQ ID NO: 502551 - DNA, 625 bp, Homo sapiens
acagaatgtccacaagtggcaatcacagttacaggaaaggttgacaccgtcagttctgactgcacttacattaattaaaaacagaaattaaaagggaagaagrcaaaggggaaagtcccactttcaaatgaggtcatttaaacaataaactagtttcagtaattatttaaagggagcagaactgattagatatcagaaatagaactaggccttttggagaagaggcattctctagaagccacttcccttgcagaatttccctgaaagatcacttattgtttagtttaatattttcaaaaataaggagtaacaagatctactaaattagatttgttagaagataaaggattaccaacagtggaatgttttcagttgattgcagcataaagaagcgaaatctaaggtcatcatgaaggaaaagcatgtaaatactgcccttggatttcatagtgacaatatttaaggggtcctggcctaattcaagtttgtttcccactaagtgctagactttcttatcatagctttcattccttagctgagaaatgattatgaaagcagatattttcttgggaactgagtgaatttcaaatatatggtgacttgatatcagtggattaggattgtt

SEQ ID NO: 502552 - DNA, 507 bp, Homo sapiens
cagtgagtcaagattgcgccatggcgctctagcctggcaacagagtgaaactctgtctccaaaaaaaaaaaaaaaaaaaaaaaaaagctaaccatatctttggtactggccttaaaacaaatacaatgatgaaaataaaatcatgtatctcagcagggttgagttgcattcatttactttcccagagccaagctcagtcagtatctttcccatactaagtactcaagtaaatattktgaattgaacttcatgtgtaaagttggtgaatatactacagaactggaatctaggtatgtttcattcttaatttagaaaacagtacttctggaaatagtcaactaagttttcttaaggcatatgaccatactatgattcaagttaaaaaaaaagtactttcagttatttaactatctttcagctactcattccacttctacttaatctttggtaagaaaatgagaaagaaagtgttgtgagcagggtccagaataagggatttaaacaaac

SEQ ID NO: 502553 - DNA, 494 bp, Homo sapiens
aggcttcctgtcaaccttaagtatccaaaatagctcctaattagaaaatttggttaggaagagaatgctttaatagtggagggatgaaaatccaaaaatgatactagacacatagaatggctagtcttccaaccagaaggaaagaagcattcttatcagcagtcttaaaatgaccaggttttatgtgtgaatgtcaagaagtagggaaaaagagacaacagagataaaggaaaaggaaaatgaaatcaagactatagcagagatcagggctgtcagtccagacactaacagaacagcagaggacacgaagacaaaacagttttctatagtccctgacatatcaataatcagaaagggaaccagggtacattatacatggctaaattagagtacctggtccatgtgtcacaagaatggtttcagaaaagatcaaagggcagttatctctaatcyaatattaatgaaagtgataaacatgtttaaatgcaaattca

SEQ ID NO: 502554 - DNA, 472 bp, Homo sapiens
atactttggatatctcttaatcaccacaaacatagtatgtcaaaatattgattattaaaaacattgttaataatttttaattatttttaatttttcccatcaaatttgttcttatctttacccactttggctagcagttccactatatattgaagctttcaggccaaaaacctagaagtcctatccaaatccatctgttactgtcagctttacttccaaaatacatctgatccctgctcgttatcttcacttctcatcatttccaatgctaccattgttttgttagccttctcttyaccccattggtgaggcaggcattgccatcctagggttgtgggggtggccgaacatgacacctgacactgggcagatgagagggacagcagtttattagtcacatatactcacagcccaggagacaacacacaccaggcagagcagaacaaggagcagagagaacaagcaaaggctt

SEQ ID NO: 502555 - DNA, 410 bp, Homo sapiens
ataaatcagatttagaatatgctggttcaaagcaaatgttagcattagataaatgtagatcacaggaaagaaaaaaaagaagtataataaatctaatatgtcccacttactttgtagaggtatattttgtaggtggagttcaattttgaagcttagtgacttagcactctaatttgtaaaatgcatatttctctgaattggtagccatacttgatgaaagtagggccatttaagatttatttggrtgcagcctttagataacaacattgtattttctttcacaccactcccagcaggcatgtgctgtgactgttgttgactgaggaccacaattctagccacaggagattatcttcatcatttcatttctgaggggttggcaaactgttcctgaagacaaaaatccagcc

SEQ ID NO: 502556 - DNA, 610 bp, Homo sapiens
tgcggcttcctgcctcaggcaggatgtaccaaacgtggaagcggagacggggaggtctgggggtgccacgcaagtccctttcctcccgacacgagtgcagtaaagaaaaacggttatgagcgtaaagtgacagcctcggccgatgggaatagggggaagtccgacactgagcaacgaacgcattcccgcgcctccaaaacctaggccgggggcgctggaaacccttaccggcacccggccaccgcggcagacgcttgctcctgccacgccccccccccctcccccgcatcacgtgtctgcactcgctttcctcggattcccggatgtgggtgagttcatttgctcgcgtgcaggggaagtctggagaaggcattgtttcaattattaaaagtgtgggggcagtgggcggaacaaacgcgccgactacagaggctggacgtaagcttagcggtggcgcgcgtgcgcagcgccggcccgaggtaacggcgggaaggctcaggggcgtkcttgcggcaaccctgtaaccgccggtgcgcaagttggaggggcaaggggctgccgtgtcctggtctggaggcggcccaggctgccttggtgattctggcttcgc

SEQ ID NO: 502557 - DNA, 492 bp, Homo sapiens
gctggcagcttggaatcattgtcctgacactgagcacatactgtcacttattttgtggctgatggatttttttagtgacactcctccaaaaaygcatgccctttcttcacacgaccgcttcctcactactttgaagttcatggtgtaaaaaaagttctgtttacacatgaacacatggggagaacgacacagaatgggcctactgaagggtggagggtgggcagatggagaggatcaggaaaaataactaatgggtactaggcttaatacctggatgaaaataatctgtacaacaaacccccatgacataagtttacttatgtaacaaacctgcacatgtacccctgaacctaaaatgagagttaaaaaaaaagaatgtaaaggggaaaaaaaaagttctgtttttaaaaaaatctattttcattatcacaacagatttcaatatcacatttttctagaaaagaataaaagagctgttacattctcttggca

SEQ ID NO: 502558 - DNA, 492 bp, Homo sapiens
gctggcagcttggaatcattgtcctgacactgagcacatactgtcacttattttgtggctgatggatttttttagtgacactcctccaaaaatgcatgccctttcttcacacgaccgcttcctcactactttgaagttcatggtgtaaaaaaagttctgtttacacatgaacacatggggagaacgacacagaatgggcctactgaagggtggagggtgggcagatggagaggatcaggaaaaataactaatgggtactaggcttaatacctggatgaaaataatctgtacaacaaacccccatgacataagtttacttatgtaacaaacctgcacatgtacccctgaacctaaaatgagagttaaaaaaaaagaatgtaaaggggaaaaaaawagttctgtttttaaaaaaatctattttcattatcacaacagatttcaatatcacatttttctagaaaagaataaaagagctgttacattctcttggca

SEQ ID NO: 502559 - DNA, 464 bp, Homo sapiens
atgtattactgagtacctttaaaaatctagcaagatgctaggaatagccacccctgaggtgagacttccacttctttatttctggttcccagtgttttatttggcatggtggagaactggtttttgtttgttgttttctgaaacagagtttcactttgtggcccaggcagtgatacgatcacagctcgctgcascctcgacctccccggctcaagtgtcgtcctatctcgcctcccaagtagctgagactacaggtgcatgccaccacacctggctaattttttttttatttttatgttttgtagagatgaagtcttgccgtgttgcccaggctgacctcaaactcctgagcttaagcactccttctgcctgggcttcccaaggtgctggaattacaggcatgagacatcacccccagcctgatacttactgacaaattgaggtaatacgggaggtaatacggg

SEQ ID NO: 502560 - DNA, 665 bp, Homo sapiens
ctggtgagcagtgaccaagccaggtcttatgctgctaaatagattattctctccactacaccactgctatggtttgaatgtctcctccaaaactcatgttgaaacttaatccccaatgtactatgacagtactgagaggtagggcttttaagaggtgactggataatgagggctctgccctcaggaatgaataaatccatttattgattaattaatgggttaatggattaatgggttatcatgggagggaaacgggtgtctttataaaagaggaagagagacttgagtaagcacttttgcaaattaacatgctcagcccccttgccatgtgatatcctgcgctgccttgggacactgcagaatccccaccagcaagaaggttataaacaacagaaaacagactaagacaatcacctctctctctctcaatgtatctatcattatctctcaatctctactttcccaggagtccagactgcagaagcacatacaacataagttcagtggttttaaaatatgtccacaaattcttcaatacccatccctttaaatgtgaagcccaattcctcgtcctgtcagcatggaccagatttagtgactcacttctaacaaataaaatatggtagaaatgattaggtcatgwgtggcattgtggcattgtggcc

SEQ ID NO: 502561 - DNA, 458 bp, Homo sapiens
attatatatgttgttaccatggttaacaaatgtattcttccatctgagaatcctcagtagtacagagagaggttttgcatttagaattctatttagactttttattccttgaagcatcaaaagtacataaacaccccaaaaggttatatcagaagtcaaagcattatgatctctctggatgcttttcagacatggtgggkgagcgttctgaatcccaaccccgcccccaatgccccccagccgccacccggccagctttgcctggagagctactgagattttccactatctagtcttgggatgctgaagcctcaagaggttaggaatgaatgcaattctcacccacctgacaatgttggtatgcaagctttggttgctttggttggtatgagacacctcatcctactggagaagttattttcttgtctttcaccatggaatcatttacttttgtggtg

SEQ ID NO: 502562 - DNA, 624 bp, Homo sapiens
agctggggctttgtttcacttaatcaaatctttaaatgttatagagatgagacaattattatatttgctttctcacccttttctaccctcagttccactcaccccaccctgaaaactagtttttattcaagataaaacttacattctttgttttctatccataccatttcttcagaatccattttggtcaaaaataatttaaactccactggttgcaccagayacatttcaatataacgtcccaattttaaaactttactatcaacaaatgcaattttctttagaaaaggagatttttaaaattctacttagactgggcacagtggctcatacctataatccaagaggatttaggaggccaaaacaagtaaattccttgggcccaggagtttgacaccagcctgggcaaaatagtgagactccatgtctaaaataaaaaatttttttttagttagacaagcaagatggcacattcctgtggtcccagctactcagcaggctgagattagaaggatcgtttgggaagctgaggctgtagtaagccatgatcacagtattgcacttcaacctaggtgacagagaaaaactctatcttgaaaaaaaaagtgtattaataaaatacca

SEQ ID NO: 502563 - DNA, 624 bp, Homo sapiens
agctggggctttgtttcacttaatcaaatctttaaatgttatagagatgagacaattattatatttgctttctcacccttttctaccctcagttccactcaccccaccctgaaaactagtttttattcaagataaaacttacattctttgttttctatccataccatttcttcagaatccattttggtcaaaaataatttaaactccactggttgcaccagatacatttcaatataacktcccaattttaaaactttactatcaacaaatgcaattttctttagaaaaggagatttttaaaattctacttagactgggcacagtggctcatacctataatccaagaggatttaggaggccaaaacaagtaaattccttgggcccaggagtttgacaccagcctgggcaaaatagtgagactccatgtctaaaataaaaaatttttttttagttagacaagcaagatggcacattcctgtggtcccagctactcagcaggctgagattagaaggatcgtttgggaagctgaggctgtagtaagccatgatcacagtattgcacttcaacctaggtgacagagaaaaactctatcttgaaaaaaaaagtgtattaataaaatacca

SEQ ID NO: 502564 - DNA, 624 bp, Homo sapiens
agctggggctttgtttcacttaatcaaatctttaaatgttatagagatgagacaattattatatttgctttctcacccttttctaccctcagttccactcaccccaccctgaaaactagtttttattcaagataaaacttacattctttgttttctatccataccatttcttcagaatccattttggtcaaaaataatttaaactccactggttgcaccagatacatttcaatataacgtcccaattttaaaactttactatcaacaaatkcaattttctttagaaaaggagatttttaaaattctacttagactgggcacagtggctcatacctataatccaagaggatttaggaggccaaaacaagtaaattccttgggcccaggagtttgacaccagcctgggcaaaatagtgagactccatgtctaaaataaaaaatttttttttagttagacaagcaagatggcacattcctgtggtcccagctactcagcaggctgagattagaaggatcgtttgggaagctgaggctgtagtaagccatgatcacagtattgcacttcaacctaggtgacagagaaaaactctatcttgaaaaaaaaagtgtattaataaaatacca

SEQ ID NO: 502565 - DNA, 624 bp, Homo sapiens
agctggggctttgtttcacttaatcaaatctttaaatgttatagagatgagacaattattatatttgctttctcacccttttctaccctcagttccactcaccccaccctgaaaactagtttttattcaagataaaacttacattctttgttttctatccataccatttcttcagaatccattttggtcaaaaataatttaaactccactggttgcaccagatacatttcaatataacgtcccaattttaaaactttactatcaacaaatgcaattttctttagaaaaggagatttttaaaattctacttagactgggcacagtggctcatacctataatccaagrggatttaggaggccaaaacaagtaaattccttgggcccaggagtttgacaccagcctgggcaaaatagtgagactccatgtctaaaataaaaaatttttttttagttagacaagcaagatggcacattcctgtggtcccagctactcagcaggctgagattagaaggatcgtttgggaagctgaggctgtagtaagccatgatcacagtattgcacttcaacctaggtgacagagaaaaactctatcttgaaaaaaaaagtgtattaataaaatacca

SEQ ID NO: 502566 - DNA, 572 bp, Homo sapiens
acttgaaactggacattcatttcaagctattaaatgatatgttgtactacagtagggcatttagaatctgagtgacttctgcaaaaggtagctaccatgagcatatttgtctagctttcttcccaaattcctactgaagtgaccaatggaatattcaaatggaaaacactgcctcagcatcagacactagaagggggctccagctctccataccagaaaktggtaaggatggaaaagtcctgtggggatcaaaacattaggcaataagtaaaaggatacttcaaccaacccttattcactacagggacatccagaaccagaggcaggaaacatgatcatgagtagattcctgctctcctgtctttccagactgatagcaccagacctggcagccaacactggaaggcttcatggttttcttctagcacagacagaaccaatgcaggcaagaagtgggaatatgggagaaaattaatacacaatgtagtgcagtgacatatctcccggccacgatgacctgcacctgctccctccctgatcctcttatattggtgacatactgtgagattttt

SEQ ID NO: 502567 - DNA, 554 bp, Homo sapiens
tgccataactggctcttctgtgattttctccccctctaagtatgttgtgtttaatagaacttacattttcaacctttttcctgatgtattctctctgacattatttcaactttgtcttttttccaaagaatttttattgccagtagccccagagtttacaccaaatcaatcaacccattaaaactctgcaaaattaacacctataattctactttgtttttattgaaataaaaatggggctggttttgtcctctatcttcaatcccttcttggggaatcagccctgcccgctcttgtcagattaaggtactggaaacaaagataggatgttagtgaagacatacttattttggaggcagtggggaagttatgattcacataccacacaattsaacgatttaaagagtataattcaataacttttaatatagtcacaaagttgtgcatctgtcagcacaactaatttcagaagatttctgtcacccccccccaaaaaagaacaaaccccgtagctcttgtctctgacccttccatgccccctaagccctgggaag

SEQ ID NO: 502568 - DNA, 500 bp, Homo sapiens
ccacaatacataattttcttcttctttcgtattaataaaatgtttagctgaatgtatggctgctcagaatgagaaacagagtttcagcctttcttgcagctaggtgtgacaatgtgactaaattctggccaatgtatgtgaccacagtgaggtatgcaaaacatccatgttttgctcttaaagggcggaggcctgcctccctttccccattcctgctggctggagccatcttggatgataagatggcagagmaaaaacacagaaggagtctgggcccctgacaacttaataaagaccaaataccatatcattccaggtttttctatgagaaagaaagaaaagtctgttgtgtgtaatctactgttagttttggtgtctgtgacatgcagcagaggcaacatcttacaataagaatacaatctactgagactaatttatcaatccaggagccattgagtgtgggcagttgtgggcagtgagtgtcagaaagtgtggcctga

SEQ ID NO: 502569 - DNA, 510 bp, Homo sapiens
aaatggagttttctgcctcagagccttcctgcagaaaaaaagtccctacgcatcccctctttccccttcccagcaacacctaactcttattcctcctcaaagtcaactcagaagctctccccttcaccatagtctgaattgggaccgcaacttcctgctccattcttctttcacaaccctgtttctcctctgtagcacttatccacatctaccataaacacatgtgttttgattwatgtttgtctcccctactgggccataagctacaggcagtgaagggcaggcatactgctgtgtccgctccagctctccagccccacacaggcttgggacatggcagccttgcatgctttgtattactgattcaaaacaaaaacaaaaaacaaaaatgcaataaagtgtgtatgtattaagtgaaaaaaatggctgacttggctttgtgctctgttgacgtacgacatccagcagacaactttcgtggcagaaagttttggggcagcagggtaaaca

SEQ ID NO: 502570 - DNA, 571 bp, Homo sapiens
ttgggctgaccttgttcctgccagcacactttgggacctgggccatacaagttatagcatcctggacagaccctctattttatagaaaaggaacctgaggccctaggattaaatgaattgccagaggtcactctccaaagagactctgaggtccagattaggaaacctgaactaacattgaagccgtgtctttctgtataagatccaactgcttgtggtatgtttggccaaaaagactcaggttaaagtcagataccaaataayatattgacatctagcatatttatgcccagatgccgtatagcaaatcatccttcactttaattagcttatagttatatactcgacaatgtgaatgaacagagaaaaacaaggtatttttttttcatcttctaaatttgcttgggaaattcctccgtgtcttttacaggtttaaaaatcatgtttaacgataatgtagttatcttaggaaaaagaccaacccatttttatcactctttatcattgggccatcacagatgagagctttctatcttatagaatcatttgcacaaagtatatatgaggatat

SEQ ID NO: 502571 - DNA, 571 bp, Homo sapiens
ttgggctgaccttgttcctgccagcacactttgggacctgggccatacaagttatagcatcctggacagaccctctattttatagaaaaggaacctgaggccctaggattaaatgaattgccagaggtcactctccaaagagactctgaggtccagattaggaaacctgaactaacattgaagccgtgtctttctgtataagatccaactgcttgtggtatgtttggccaaaaagactcaggttaaagtcagataccaaataatatattgacatctagcatatttatgcccagatgccrtatagcaaatcatccttcactttaattagcttatagttatatactcgacaatgtgaatgaacagagaaaaacaaggtatttttttttcatcttctaaatttgcttgggaaattcctccgtgtcttttacaggtttaaaaatcatgtttaacgataatgtagttatcttaggaaaaagaccaacccatttttatcactctttatcattgggccatcacagatgagagctttctatcttatagaatcatttgcacaaagtatatatgaggatat

SEQ ID NO: 502572 - DNA, 583 bp, Homo sapiens
tgggctgaccttgttcctgccagcacactttgggacctgggccatacaagttatagcatcctggacagaccctctattttatagaaaaggaacctgaggccctaggattaaatgaattgccagaggtcactctccaaagagactctgaggtccagattaggaaacctgaactaacattgaagccgtgtctttctgtataagatccaactgcttgtggtatgtttggccaaaaagactcaggttaaagtcagataccaaataatatattgacatctagcatatttatgcccagatgccgtatagcaaatcatccttcactttaattagcttatagttatatactcgacaatgtgaatgaacagagaaaaacaaggtatttttttttcawcttctaaatttgcttgggaaattcctccgtgtcttttacaggtttaaaaatcatgtttaacgataatgtagttatcttaggaaaaagaccaacccatttttatcactctttatcattgggccatcacagatgagagctttctatcttatagaatcatttgcacaaagtatatatgaggatatacagcattgtatt

SEQ ID NO: 502573 - DNA, 432 bp, Homo sapiens
tgcccacccatcccccgcccttccgcaacgccagcatcctgcgcccctcccccgccgcctcttatcagcggcgagcgcggcgcgcggcggccttgggctcgaggmggcggcgcggcgcggggcctgattgcaggtgcgccggcgccgccgagtctgcagcggccgctcagtggccggcccggcggccgggcgggtggcggcggcaggcacggcgcgagcgaggggcgcgggggcgcggcctccccttcgcacgcagggcggtagaatgagccgcacggccgcgcgccgctcgcccctcgccccgggccggccgtgaacttgccggggccgcctgcagggagaggcgggccccgctggcacctgccgccctccgctcccaactccgtccacgcccggggctcgcaacccacgcggacaggagactgctggcta

SEQ ID NO: 502574 - DNA, 579 bp, Homo sapiens
ttgatttgatacaggtttatttccctggttttgaagcctaggcattgcagatagtctttgttttcagacttccaagggaggcttggctgacagactccgatgggagtctttgattacttccaactacccattagttaattgctcagaggtgaggagcttacagggcaggtctctgatgatcctyggggtaccctacttgcagtgggattaagtcagtgagatggagcacacgcatgcctccaggtccttgtgaatccacacaatcctctctgtgtgtcccagggagagcagactccagcaagagcccagccgtggcagtgtggttctggggcctccagaaggggcgacaggccttgagagtgtttagttaacatggaggagggagacttccattcatggatgcacgcaggggctatttactgagggcctactctgtgctccctgggcgtggctgcaggcaaaatggagttgatgctctcaaggacttggttctttcctggcaaatggctattaaatagatacttatacaaatggcttgattctaggtatgacatatgcggtaaagtaggataaggtgtg

SEQ ID NO: 502575 - DNA, 579 bp, Homo sapiens
ttgatttgatacaggtttatttccctggttttgaagcctaggcattgcagatagtctttgttttcagacttccaagggaggcttggctgacagactccgatgggagtctttgattacttccaactacccattagttaattgctcagaggtgaggagcttacagggcaggtctctgatgatcctcggggtaccctacttgcagtgggattaagtcagtgagatggagcacacgcatgcctccaggtccttgtgaatccacacaatcctctctgtgtgtcccagggagagcagactccagcaagagcccagccgtggcagtgtggttctggggcctccagaaggggcgacagrccttgagagtgtttagttaacatggaggagggagacttccattcatggatgcacgcaggggctatttactgagggcctactctgtgctccctgggcgtggctgcaggcaaaatggagttgatgctctcaaggacttggttctttcctggcaaatggctattaaatagatacttatacaaatggcttgattctaggtatgacatatgcggtaaagtaggataaggtgtg

SEQ ID NO: 502576 - DNA, 630 bp, Homo sapiens
gggtactattttatttatattttagagatgtggaaacagaagcctaaataattttcccaagggcaagtarcaacaagttggtaagcctgaatttcaactctggtctctgaggcacataatgagtattcacaaaatgattgctttgggcattacagtggtagggatggctttcatttctggtgacttggtagaacattgaccatgagacaatagatcagagaagtttccatcctctacttctcaaaaataccaccccctttcctacttctcatatgaaactgaccaggttttgccagagaaacgatgtggcatcagttcttccccaggtggggtgaggcttcctagagaaatccaagagaaaaggccctctatgtttctgtcaccaggagggaaaattctctgcagaggcataatgaacaggtatacaatttcctaacatggtgagtcccctcagaactgagagagtgcccccacatctgagggtgctggatgattgggactgagcaggtctggaaatgggtagaagaccctcatgcctcttctcctccacccccaccttacatccataacttaagtgagcatgaccagaaagccactaataacaacatctccaccagctctatttaccca

SEQ ID NO: 502577 - DNA, 361 bp, Homo sapiens
tgtctctgacatttttaatactctctcatttctctgtcctccagggattcatttgaagaagcccacagggacgggtgacactgaggaaacaaaacccaggccccccggcctccgactgagccgtgcagagcatgctgggagatcacctccacctgaggagcacaaaagaccccaggagtggaggaagctggcctgaggccaacyggatgtagcagacttgctgagcccaaggagggaggtctggtgatggagcctcgagtacatatccttccaatcctaaggtaaacagcgcttggggctttggctacagggaggttgtggcccattgaagtgggtggtacaaggcgggtacaaggcaggc

SEQ ID NO: 502578 - DNA, 361 bp, Homo sapiens
tgtctctgacatttttaatactctctcatttctctgtcctccagggattcatttgaagaagcccacagggacgggtgacactgaggaaacaaaacccaggccccccggcctccgactgagccgtgcagagcatgctgggagatcacctccacctgaggagcacaaaagaccccaggagtggaggaagctggcctgaggccaactggatgtagcagacttgctgagcccaaggagggaggtctggtgatggagsctcgagtacatatccttccaatcctaaggtaaacagcgcttggggctttggctacagggaggttgtggcccattgaagtgggtggtacaaggcgggtacaaggcaggc

SEQ ID NO: 502579 - DNA, 361 bp, Homo sapiens
tgtctctgacatttttaatactctctcatttctctgtcctccagggattcatttgaagaagcccacagggacgggtgacactgaggaaacaaaacccaggccccccggcctccgactgagccgtgcagagcatgctgggagatcacctccacctgaggagcacaaaagaccccaggagtggaggaagctggcctgaggccaactggatgtagcagacttgctgagcccaaggagggaggtctggtgatggagcctcgagtacatatccttccaatcctaaggtaaacagcgcttggggctttggctacagggaggktgtggcccattgaagtgggtggtacaaggcgggtacaaggcaggc

SEQ ID NO: 502580 - DNA, 599 bp, Homo sapiens
gctgggtactacttagatattccagagctggccttggataatctgggggtctgggggtgttccatgaggaagttgttcctttgagataaagttattgtccatggaaggagataagattgaatctgaatggaggacagatgagaattaatgtagacgaatgtgagttacgcagaaagaaggggagatttgggagacctagagaaggtgacatactcaggatgggacacattgagtttaagctgtctatgacagggacacatcatgtctttacctaaagttgggtcatttttctcctggccacacaagtagacttcatttcccagyctctcttgcagttaggtaagagcatgtgactgaattctgttcagtgaaatatgggtaaaagtagcatatacgccttctaggcctggcctctaaaactcccacataatcttccaggacttctccttgcttacctgctagccagatgcagaagatccagtagaggattctgatatcctagagcggattgtttcaactgataatgtgggccagatgcttctttgttatgggagactgttttgtgtattatagggtatttagcagcatacctaaactct

SEQ ID NO: 502581 - DNA, 597 bp, Homo sapiens
tgggtactacttagatattccagagctggccttggataatctgggggtctgggggtgttccatgaggaagttgttcctttgagataaagttattgtccatggaaggagataagattgaatctgaatggaggacagatgagaattaatgtagacgaatgtgagttacgcagaaagaaggggagatttgggagacctagagaaggtgacatactcaggatgggacacattgagtttaagctgtctatgacagggacacatcatgtctttacctaaagttgggtcatttttctcctggccacacaagtagacttcatttcccagtctctcttgcagttaggtaagagcatgtgactgaattctgttcagtgaaatatgggtaaaagtagcatatacgccttctaggcctggcctctaaaactcccacataatcttccaggacttctccttgcttacctgctagccagatgcagaagatccagtagaggattctgatatcctagagcggattktttcaactgataatgtgggccagatgcttctttgttatgggagactgttttgtgtattatagggtatttagcagcatacctaaactct

SEQ ID NO: 502582 - DNA, 622 bp, Homo sapiens
ctccagatagccaaaagtatctctagacattgccaaatgtttctgtgtgagaatcactgccctggaagatggcaaagccataatacagaaactgcctgggtccctgaatgactatgtggagcggagctagccctgctgatttgcactggactgtgacaggaatgagaaatacatctttattgttataagcccaggagatctggrtattgtttgttatagcagcttaacctaccctaacacatcattcacatctggagctcatttaggtctgggctgtagttccagactttggaattatccatcaaagctgagagagagcatggagtgaccaagagtgagatgagaaaggcttgagacctgaatgctcagaaatagaacatttaagacaaaggaggaggaggaatcctcaaataaggccgatgataggaggtaagaggtcaaccagcagagcatggtgccatagatgctgatggaggaaaaattggaaactcagcagggaatatgggtaacaggaacttatttgaattgctagctctcaagtgaatgataactcaaacctagagacttacgaatctgggaaataaataacaaccagcatggaacaaaggcacagaaggtcagg

SEQ ID NO: 502583 - DNA, 622 bp, Homo sapiens
ctccagatagccaaaagtatctctagacattgccaaatgtttctgtgtgagaatcactgccctggaagatggcaaagccataatacagaaactgcctgggtccctgaatgactatgtggagcggagctagccctgctgatttgcactggactgtgacaggaatgagaaatacatctttattgttataagcccaggagatctggatattgttygttatagcagcttaacctaccctaacacatcattcacatctggagctcatttaggtctgggctgtagttccagactttggaattatccatcaaagctgagagagagcatggagtgaccaagagtgagatgagaaaggcttgagacctgaatgctcagaaatagaacatttaagacaaaggaggaggaggaatcctcaaataaggccgatgataggaggtaagaggtcaaccagcagagcatggtgccatagatgctgatggaggaaaaattggaaactcagcagggaatatgggtaacaggaacttatttgaattgctagctctcaagtgaatgataactcaaacctagagacttacgaatctgggaaataaataacaaccagcatggaacaaaggcacagaaggtcagg

SEQ ID NO: 502584 - DNA, 622 bp, Homo sapiens
ctccagatagccaaaagtatctctagacattgccaaatgtttctgtgtgagaatcactgccctggaagatggcaaagccataatacagaaactgcctgggtccctgaatgactatgtggagcggagctagccctgctgatttgcactggactgtgacaggaatgagaaatacatctttattgttataagcccaggagatctggatattgtttgttatagcagcttaacctaccctaacacatcattcacatctggagctcatttaggtctgggctgtagttccagactttggaattatccatcaaagctgagagagagcatggartgaccaagagtgagatgagaaaggcttgagacctgaatgctcagaaatagaacatttaagacaaaggaggaggaggaatcctcaaataaggccgatgataggaggtaagaggtcaaccagcagagcatggtgccatagatgctgatggaggaaaaattggaaactcagcagggaatatgggtaacaggaacttatttgaattgctagctctcaagtgaatgataactcaaacctagagacttacgaatctgggaaataaataacaaccagcatggaacaaaggcacagaaggtcagg

SEQ ID NO: 502585 - DNA, 568 bp, Homo sapiens
ctgccctggaagatggcaaagccataatacagaaactgcctgggtccctgaatgactatgtggagcggagctagccctgctgatttgcactggactgtgacaggaatgagaaatacatctttattgttataagcccaggagatctggatattgtttgttatagcagcttaacctaccctaacacatcattcacatctggagctcatttaggtctgggctgtagttccagactttggaattatccatcaaagctgagagagagcatggagtgaccaagagtgagatgagaaaggcttgagacctgaatgctcagaaatagaacatttaagacaaaggaggaggaggaatcctcaaataaggccgatgayaggaggtaagaggtcaaccagcagagcatggtgccatagatgctgatggaggaaaaattggaaactcagcagggaatatgggtaacaggaacttatttgaattgctagctctcaagtgaatgataactcaaacctagagacttacgaatctgggaaataaataacaaccagcatggaacaaaggcacagaaggtcaggca

SEQ ID NO: 502586 - DNA, 661 bp, Homo sapiens
ttttccatcctggcacatgccttggctctgtaggcaaatcacccttctctctaactgtttagagaggtttgttatgttttcccattaaagatcaccattgcaagccttgcaggataaatgaagcaaaaatctatgcaaggcttcaatctggctttcactcccttacagcccaaccctggcccccaaagaaaggtgttatgtaaataaaaaatactgtgattacaatgtgctggacaagtgtttgataaggatcagaggaaggctgggrcccctaatgaccactagtggtgagggaggtatgattccatccttgtgtttcaagaaaagtttgtaaaggaagccatgtggcagagactcactgggatggtttaaaaaatgaaggaaattccccatttcctggttgtaagaaaatatgggtggaacaagtcttaaatgagctgatcatggctctgactttgatgttggatgaatgacaatgatctccaaggcaggaacacaatgtaatgaacttgcctggcttttccatgaaaaacaaaatcactgaaggggtcttgtgttggaagacaaaggcactctgactgcaggggggggaagaggaaagcttggagggtgttcttaacctgtagctaatgggaatgaaggcatgagggctgctagctta

SEQ ID NO: 502587 - DNA, 569 bp, Homo sapiens
aggtttgttatgttttcccattaaagatcaccattgcaagccttgcaggataaatgaagcaaaaatctatgcaaggcttcaatctggctttcactcccttacagcccaaccctggcccccaaagaaaggtgttatgtaaataaaaaatactgtgattacaatgtgctggacaagtgtttgataaggatcagaggaaggctggggcccctaatgaccactagtggtgagggaggtatgattccatccttgtgtttcaagaaaagtttgtaaaggaagccatgtggcagagactcactgggatggtttaaaaaatgaaggaaattccccatttcctggttgtaagaaaatatgggtggaacaagtcttaaatgagctgatcatggctctgactttgatgttggatgaatgacaatgatctccaaggcaggaacacaatgtaatgaacttgcctggcttttccatgaaaaacaaaatcactgaaggggtcttgtgttggaagacaaaggcactctgactgcagggsggggaagaggaaagcttggagggtgttcttaacctgtagctaatgg

SEQ ID NO: 502588 - DNA, 493 bp, Homo sapiens
ctggcttcctccagagcaagtgattcaagagagaaggaagaagccatactctcttttatgacctaacctcagaggtgacatactatcacttctgccatattctgtgggtcacactgcccaatcctgatacaacaagggagggacttgaacaaagttgggaatgccaaggggtgggaaatattgaaggccatcttggaggctgccaccctagtcaccctgtgggtaaatgatggagataggaattgagtttagattctgcattctgccttgattgatgtgtcctgcatctaccacacaccagggacccagagcctttaaggtgctcccaggccaggagaaaactgatgaacaatggagcaattgcctcaggggcaattgagtttagaatgtggacwgtgagagctcagcagagggggtccttgtgcagactgggggatgaggagagttatgctggctgagaggctcgagaagagcagttggggaacaggaaaca

SEQ ID NO: 502589 - DNA, 677 bp, Homo sapiens
ttgaatttcagttccctctttggggggtggagtggagacacacacacatgcacgcacacacacacaccagggcaaagatctatgacaacaaaaatatactcctgaaacctggctcctgctacaaaacttaagtaaatacatacagagaagcatggatgartggggggaaaattatagtcagaattaatgggttatgctattatttactggctgtgtagaatttttattttctctgtctcagtatttcctcatcagtaaaattgtcataataatgtcacctcagagctagttgggactttaaattagttcatatgtgcaaagtgtttaaatgcataagcaatagctatcattatttttattatcattctgtaagatggagatgatcattagagatttatgcaaaggactgggtggtaaaaggaaagcaatagatgttatctattattatcatggacaattgttctatgcatttcgggctgggtttaagaaaatgtgatcatggttagtgtggaagatggatagagaggatttaagtttgctagtccaaagtgatggaaatgtttagaaaaggcaagaggaacaagagttttcacataggtggaaactgactggtagaaagtactttgggaccatgattgaggagactgaattagataccaaagcaaagataaagaatt

SEQ ID NO: 502590 - DNA, 623 bp, Homo sapiens
gctgatcttgtaatccaggccttccatcttcaaagctgctccttctcatggttttgatactctgctgggggcgcactgtgagggtggaagaatcacccacatggagtgagaagtgcctgctagtgctggcagttctaaaccaaatgtagtttctttcccttatttttcccccaagtacttcaaacaaattccgatgaagagggattccaatctagcaccacgtggcctcttgttttcatatgtgattgaatgttcaaatttgttcaaaattctttttatggaaaactgttttcgaatagtataattttcaaaagttctcaatggagtggggaaattggatcggcacatcacctgcatttattttcttttcccaggcaattttgaaaggactgtaaaagatcttttttttwaaaaaaaaagttaatcttcaaaattcttctgggacatataatcctgaagtgagcttaactgcaaccaatactgagttttcattttttcacaagcaaacaaaaacaaccaccaaaaagataatttaccagtgtaaattcctttctgttgatctcttttttatataaacatatttttggatgttttgctttagtcatatgaagtttggagatcta

SEQ ID NO: 502591 - DNA, 292 bp, Homo sapiens
tattgtataggcatcacacacatacacacagacagacacaagacacamacacatttccaaatttaagtagaaaacccattccaaaaccaactctacagaagtgattctttgattctcccactgtttcagatcattggctccaatatttactgtctttggtgcataaaatagagaaattgagatatagcatttgctgtcaaccaaggttaaggtatcattctccagcccactttgggtccatgagttatatgtcatctgctttcaaagattccctttcttgctagaaagggag

SEQ ID NO: 502592 - DNA, 587 bp, Homo sapiens
aaaatgagccaggaggaattgacacagaagcctgaggtcacacaggtaggtggcagattatggatctgacaggtgtatccatgctgtggacagccttggtttgagcagcaataagagggggtacaaggtgaagttggaaatgggtacagaacggtgactctcgccaactttccaggactttagttagtggctttgctattgtataggcatcacacacatacacacagacagacacaagacacaaacacatttccaaatttaagtagaaaacccattccaaaaccaactctacagaagtgattctttgattctcccactgtttcagatcattggctccaatatttactgtctttggtgcataaaatagagaaattgagatatagcatttgctgtcaaccaaggttaaggtatcattctccagcccactttgggtccatgagttatatgtcatctgctttcaaagwttccctttcttgctagaaagggagttattggaataatcatctagagcaggtacaaccccaccccacccccaagctcatacgggctggaaagccttctttcccaccactcaccctcccccacca

SEQ ID NO: 502593 - DNA, 494 bp, Homo sapiens
gtattacaataagagatttgtataaggaaattggtgatgcaataacaaataaaattttaatctcgggctggacatggtggctcacactgtaatcccagcactttgggaggccaaggcgggcagatcaccagaggtcaggagtttaagaccagcctgtccaacattaggaaaccccatctctactaaaaataaaaaaaaaataaaaaaaattagtcgggcatggtggcgggtgcctataatcccagctactcaggaggctgagcaggagaattgcttgaacccaggagtcagaggttgcagtgagatgagatcgcaccattgcaccgcagcttgaatgagagggtgagtctccatttcaaaamataaaaaacaaaataaaataaaattacaatctccgtggcttatgaaataaatgcttattgcttatttgggcaaagcctcctgtgggcttgggctgactctgggaggtcactgcaaaaggcgaagagagaggt

SEQ ID NO: 502594 - DNA, 586 bp, Homo sapiens
atgtaacagcactgcgtagaattctctggaaatttcttactttctcttatgctcccaagatggctataatggctccagacatcatggttccttcaagtaggggaatggagcataggtacaaggcactgtccgcataagtttctgtcttttcgttttggaaggaaaactttccctgaaaaattggatttctccttctattggtttatttccagtgaaaaaagaacttttgccaagaaaaaaatcacatggccacaggacttggaacaatcatgtttcattctcttgagctggacctcaaataaaatcaaagtgtgtttccaagaakaatgtgaagatggggctatttgtaagcaatatttagagtgtgtcgtatttgccttctcagtcttctcttgcagcctcaggtcagtggaagcctgaagggcattggaggtcattaaagtagagtggttacagacagaggttgaaaaagatattcctgcaggttaactgcccatgatggagtaatttctacctgatcaaaatgacaaactttctcctgtaagacaaacaaaacccagccagtttttctgttttttccttacct

SEQ ID NO: 502595 - DNA, 656 bp, Homo sapiens
ctgtggtatgccagagctggctctacggccccaaaaactggttgtgtggatcccttcccaaccctgccttcagagacatctggttggtgggagtatttgtaccatgtgaattggttaatactgtagatcagggcccctagccctttcatccagatctggttgttaaatgtttaccagcacaccactgggttgggggagggatggtgtaggaagcaggcagaagcagctacctcctctgggtctttacccttaaaatcaatgttgaatggaatatggtaacatgattgttattaaggctataataaagaagacatttaaaaagcattgtaaaatacatgattaaaatatcaatggttaaactacaaaacttataggaatgtggtcaagggggtagtacctttcccattcccctagctttcaaaggcacaggccccgcccaccatgccyacaaaggatgatctgacaagccaggtaagcctctggtcttatttccacatgtattctttaccttggttacttgaggtaacctgagtgcataccagttacttaaaaccaaaagcgcccaatgaatacagtttttgaatgccacttttttttaatgtagagaaaataagacagattagtatggtaaaagtatatatgcactttagaatgag

SEQ ID NO: 502596 - DNA, 541 bp, Homo sapiens
ccctccctcccacgcccttcttagcctgccagcctagcaggaatgaatgggttccgcagagcactgtgtgagtagtgctgcagaccctgaaaatttgtctctgaaaaccaaaaggaaaaattatttgtaaaaaataaattttcaactttagtggccaaacttatttacctctgaaatttcatcaccaacatccagtggtacgaagtccagtgacttactccggatcgttgctgagaatggaggcttcctaaatatcaagataattttactccaatttatttcctaggggtgaaagcaaagcctttttgtcccaagggacaactgagcaaccaccagagtctctagctgaayagcaagggtgtgaggccggctaaaattcccacagttagaagcccactcgcaggaggatatttaccaaattgacataagaactacataaaaaggaaatgcgtttattgagctgatgtttcacagttgtctgtggatggaggcgacattgcaaaattctttttacattatattattctcttcttctttttaa

SEQ ID NO: 502597 - DNA, 575 bp, Homo sapiens
aatcctcacaatatcaaactggacgccaagcgtgcctgccagtgtcccctctatctgragcgaccaccagccagcacccgctacttccaaatcaagtggccatacctgggtgccccgctcccagaccgagtcagaccagtcatttcctttgaccacagagtgaaaatggcccgtctcgccctgctcccacttccatccaaatggactttgtcttttgtgtctgttgtgtcacggaagtccggcttccccaggccaggctcctccccagggccctccccggccccctggggatcacattcccgcctgggactcctcccgcccgccctcgcggggaaactcggtgcaaggctctgcagacgcctgcagctccggtgggctcagtgcccagcccgggcccagctcctcccacaccaccgcaccatggccgccaggtggcgctgccgccgatggaagggggggtccgggcggtccccagacaccttgtgcgggtaccgaggcacagcagcacaggactgcccctatggaggggctgcctggcaggagcaagggacgctcctatctgtagtgctaaaaaa

SEQ ID NO: 502598 - DNA, 575 bp, Homo sapiens
aatcctcacaatatcaaactggacgccaagcgtgcctgccagtgtcccctctatctggagcgaccaccagccagcacccgctactyccaaatcaagtggccatacctgggtgccccgctcccagaccgagtcagaccagtcatttcctttgaccacagagtgaaaatggcccgtctcgccctgctcccacttccatccaaatggactttgtcttttgtgtctgttgtgtcacggaagtccggcttccccaggccaggctcctccccagggccctccccggccccctggggatcacattcccgcctgggactcctcccgcccgccctcgcggggaaactcggtgcaaggctctgcagacgcctgcagctccggtgggctcagtgcccagcccgggcccagctcctcccacaccaccgcaccatggccgccaggtggcgctgccgccgatggaagggggggtccgggcggtccccagacaccttgtgcgggtaccgaggcacagcagcacaggactgcccctatggaggggctgcctggcaggagcaagggacgctcctatctgtagtgctaaaaaa

SEQ ID NO: 502599 - DNA, 575 bp, Homo sapiens
aatcctcacaatatcaaactggacgccaagcgtgcctgccagtgtcccctctatctggagcgaccaccagccagcacccgctacttccaaatcaagtggccatacctgggtgccccgctcccagaccgagtcagaccagtcatttcctttgaccacagagtgaaaatggcccgtctcgccctgctcccacttccatccaaatggactttgtcttttgtgtctgttgtgtcacggaagtccggcttccccaggccaggctcctccccagggccctccccggccccctggggatcacattcccgcctgggactcctcccgcccgccctcgcggggaaactcggtgcaaggctctgcagacgcctgcagctccggtgggctcagtgcccagcccgggcccagctcctcccacaccaccgcaccatggccgccaggtggcgctgccgccgatggaagggsgggtccgggcggtccccagacaccttgtgcgggtaccgaggcacagcagcacaggactgcccctatggaggggctgcctggcaggagcaagggacgctcctatctgtagtgctaaaaaa

SEQ ID NO: 502600 - DNA, 541 bp, Homo sapiens
cttcacttttcttctcgctctatgtgttaggtgtaactccttcttcctctttaattccaaaatatactttacaaacctctattacagcatatacgatatttaccctaattacaagatgatgtggtcattgaggcactgactttaattatatgtaaatgtgtatcccaaacatatagcacatgtctgatacaaactgaaaacaaacttactggtgtttagtgaatgtataggaattattcaggcaaaggagtcagatgtatcatggtgtcttttgataagctgggagggagatgcgtagctcaatttgccccaaacactgaawgaaactgaaagtctatggatctgtcattgtatagagagtggtgagagctcatgtggctcaggactttataaatggttcccaaggaagcttctttggaagtcctatttaattaagtggtatggtggcatcactgacaatgagatactggagggcagccagtctactcactttgaagcaacacatattgcagcataactcttctgggtaggatatactggg

SEQ ID NO: 502601 - DNA, 632 bp, Homo sapiens
ctggcagatgattttaaaacacattgtaaagaggctatgtggcaaaagtgggggcaaagctgttttggttattctaaatttgaagtaaatttattttttaagttttaaatgacagtgggagaaacataggtatccactgaaggtttgggacgctgcaagatttggtgtcgttcccatctttaccattctttagctttgtgagaagtcacagacaagtcatttaacctttatgttcccctgttcgagaaaagaaaaatatctcattcttgggagtacccaagcaatcaaatagctcccatgccacctgccaccctccaaaaaagccacaacagaaaattcaaaaggcaaacacacayatcattgttgttttaaaaacaagaacttccatttccaaccttgattttttaaaacctgtaggaaaaaataaagttagggccactggaattgagaatctatcaaatatttttgtttgtttattagaataaagtcaaatatatagaaaactgggaagatttttaatgccgttaacacacgttaacccattaatagtagcaatgtcgtgttgttttccatttattgacactttcactagaaatattttgggcaccctttttccttcagtttgaactgtc

SEQ ID NO: 502602 - DNA, 505 bp, Homo sapiens
tttactaacgctttatccctgaattaggcagacttacctaaccagctcctggctctgctggacagctgcatgatgctttctgcatttcggagagcagactagagataattcatcagggactgagccacacaatcccagtgaccactgccaaacytactcatcagatatgtgctttacgtctcttctccaaggaagaggaaatgtggaggggatactgggagtatggttgggtgtgctgtgtttcttcccaaggaaacatgatgaatggggaatacgtagttttctcaacaatacaaagaatacaaggagtcagcagatgaggggctagaaataaaaagggacaatggagatagtgctcttaacggacttagtcctccccacatatggtataaataactgagggtatagacctcagacaatagtagtgggaattgttttcaaccccatttatggcatggaagataatgtgttcgcccaaagcccacaatatgctggagtgcatgcc

SEQ ID NO: 502603 - DNA, 505 bp, Homo sapiens
tttactaacgctttatccctgaattaggcagacttacctaaccagctcctggctctgctggacagctgcatgatgctttctgcatttcggagagcagactagagataattcatcagggactgagccacacaatcccagtgaccactgccaaacctactcatcagatatgtgctttacgtctcttctccaaggaagaggaaatgtggaggggatactgggagtatggttgggtgtgctgtgtttcttcccaaggaaacatgatgaatggggaatacgtagttttctcaacaatacaaagaatacaaggagtcagcagatgaggggctagaaataaaaagggacaatggagatagtgctcttaacggacttagtcctcccyacatatggtataaataactgagggtatagacctcagacaatagtagtgggaattgttttcaaccccatttatggcatggaagataatgtgttcgcccaaagcccacaatatgctggagtgcatgcc

SEQ ID NO: 502604 - DNA, 352 bp, Homo sapiens
atgatgactgaaaaaactaacaaagctgatattttctctttttcattaagttctcactgtttggggattggaaagttattttccatatagagtattattgctggaaagcttatataataatacctcataaaatatcatgcttttattacaaggaaaaaacctcatttgttgttaataaattatataaattawttttctcacaagtgcctaaatcaggcctaaaataagtcaaaataattacctgtagttgcagtggccttctgcagggcaatggactaaatgactttttttaagctcctcttgagcctttggtttcagttttaatcgaactaaaacttatataagtaatgtg

SEQ ID NO: 502605 - DNA, 546 bp, Homo sapiens
tgactttttttaagctcctcttgagcctttggtttcagttttaatcgaactaaaacttatataagtaatgtgattaggatcacatagctaataaggccagggtcagrattagaactcctggcctcctaatttccagtcctgcagcccctactcttcacacctgaaccaactgagctatgaagtgatcttggtaagtgcacagtaattcagttttttgcctacagcctttctttcctgcctgcctgcctttttttttttttttctattaatttcattatctcgtgctttttgaagaacagtcttaccctgtcacccaggctggagtgcagtggcacgatctcagctcactgcagcctcaacctccagggctcaagtgattctcccacctcagcctcccaagtagccaggactacaggcatgtgccaccatgcctggcaaatttttttgatttctgaaagagattaggtctcactatgttgtcacgggctgatctcaaactcctgagctcaaccagtcctcctgagctcaaccagtcctcctgccttg

SEQ ID NO: 502606 - DNA, 441 bp, Homo sapiens
tgctgtatgtgtaaaatatatacctaagtttgaagacttaaygcaaaagaaagtaaaatagctcattaataattttaataattactatttacctattaatttaataattattaatgaacaactacatgttgaaatggtaatacttggaatgtattggcgtaaagatgtatgaaaatatgctttgcttatttttttcctttagtctggctgtcaggagatttaaaattacatacatggctcacatcatatttctgtatcatgaatcaagaagtgagaaagaaatcttttaatcttttaatgatcacttatctctcaagctgaacaaataaaatttggtgccagaggacacttgcagtacagagcaatgatgaagaacataaacaggctctggagtcagactaagttgtctgaatcctagccttggcatttaaagcctgttag

SEQ ID NO: 502607 - DNA, 617 bp, Homo sapiens
ctgggacctccttagggctgggtgggtagtatcagaggtctcagaaggtagtacattctgaaagatgacctgaaaaaagaatgtgacagccacatggggatctctactgagaaaagaatgtctcctatttaggaagagaagtatcagctttgagagccttctgagttagggtgagcaatcaacatcctcgagggtgttttatgctgttatcaaattttaaaacacatttgtttaatttgcataaagtaaaatccatgctgcattagttataaatcaggtacaggtgtttctgacaataaatttcactagaatgactccatttaccaayaacaagcttactgtattaacagaccaccacattataaatgtagactgaatggggaaataaatctaaatagcaaaacaaatgaaccaataaagaaatagcacttaagaatttcaaaagcagcaactggtgaagaactaagagaagtatacagaccatagtcagctacttaataatctcatcatttctgggtattttaaatggtggaaaagacacacacctgtggtaaatccctgcctgggagtaacacctgaaacctttctgttagtgtggagaccaagaacctactaaa

SEQ ID NO: 502608 - DNA, 592 bp, Homo sapiens
ccttttcctctatttttataaatataggtgtcatagttatttttaagttcttatcaggtaattccattatggatctgttttgatggtctggtttttttttatwcttatcatcctgtcttttgacataaccagcaatttttttagtccaatgaaggacactgaatataaaaggtatagagactccagatgatgctatcatctttcaaagagcatgtattctaccttccattagaccaatagatgctgttatatcaaagttctgttgcagctcccacagctttaatacacctcttatttgcccctgaactttaaggtttttaactgagaacctaatacattttacccagccctcctccaggcagatcttgagccaaaattctgctctgattttcaaaggctgtccgctaatatctgtgatctcccatttagtacagacctccaattatgcaaaaatcctcaagggataggaagtcttgtgcttgaggccttcaattctcttctgaaacatgcagctcttgctcttctgaaaggtacaaacctgagatttttaagctttcagccagagcccaaatatggcaaatactcctaggat

SEQ ID NO: 502609 - DNA, 605 bp, Homo sapiens
ttttgctgagctaaagtaaacgaagatccgagttatgtcaacagatgacacaagtgttcagcagtgaggctgtttgttctgaggagggaaacaggaagggaagctggtcccactcccagttcttcttcatcagacctccgttatttatttgatgaattagcaatcctcacaacttcagacacgatcacaaaatgatattttggaaatgctactcggactgtataattcttccaacccttcgttgattcccaagtgccttcgggacaaagtgcaaacccgttggcgtggcacatgagccctctgttatgtgagcctggctctaattccacatcccagtgtcatctcctcccactcctctttatgtgccttacctamactaagtaaagaggttaatgcatagaaaatgctaaacatctggcataatttctggcatttagtaaaggcttattatacatgttggctgtcattatggcacactagttatactcacagttccctaaaggtgcagtactggtcctggatctgtttgccctgaatccatcctccctctttgcctgctgtgttttagttcacgatggctgatccttgcaggctgcagttcacag

SEQ ID NO: 502610 - DNA, 556 bp, Homo sapiens
gaattcctggcctcaagtgatcctcccaccttagcctcctaaagtgttgggattactggagtaagcccttgagcccagcctctctgtctatttctgtttcccttctattttccttctttttgttttttcatttttagaaaatctccaggaaggaaagaatttagcttcttttgttaattgtgctatgccaggcatctagaacagggccaggccctcattaaatatttgttgaatggttggaagcatgatcttttggtcctggcaactttgactcattggcttacctggtaatgggaatcgggctaaaattgcttaataagcttagactggtaagaaacactccatttcttttcagcccygtcatttcattagtctagtttgggagtaggtaaacctggcgccaccttgtctgtataaaggtatgtgagcacatatcattttttcccagggacagtcacactgtttatggaggtgtgatgtcaacagcccttggggttgccaggtgttaacccaatgggcaattaacagtgtcatgccatccttttcttgggaggca

SEQ ID NO: 502611 - DNA, 582 bp, Homo sapiens
ctagttactatggaaatagaaactaaaaaacgtgactatcaaattgtcaaaaaaaaaaaagataatatctaatattatcaagggcaccaccgcatagattgctgatattagcacaggctttttagagagcattttggcagtgtctgttaaggtgaaaaaaatgggcatatgttctgacccagcagttctatttttaggaatctcttttccagaaatacttgtctagatgtttaagagtatatgtccttgtagcattayttataatggcgaaaaatttgatataatgtaaatatccaccaattggacagtggtttagcctatttatggtatctatactttatccatagtttgaagtagtttgttgatattgtattgagtgttacactactttgtaacatcaacaacaaaacccaaatgtaaagggaactgcaagtgtaatcactcagcttttatttttctctagctataccaaatggttttggtaccagtccactaactccctctgctaggatatcagcactaaacatcgtgggggatctcttacggaaagtaggggtaagtttcaattatttatcactaggt

SEQ ID NO: 502612 - DNA, 332 bp, Homo sapiens
ttgttaaagtgacttcccttctctgggcctcagtttcttcatctgtaaaatgagcaggttgaaccagatgacattgttgacagtgagtgagtcaggacccaccctgacatctagccaagcaccatcccggtggagcagagagcccttcctctccttggccagtctgcagaatgtgatggcagagtcagscctctcctgggagggtgagggtaatgactaaggatagtcttattcttgccaacgttcctttctatgccctaaggaattgctgatcttgcagaatgaaccacttcatgggcatctaaggtctggtgtatttgtttcctgtggct

SEQ ID NO: 502613 - DNA, 637 bp, Homo sapiens
tgagtagctgcaacacagtccatgttgcccacaaaactaaaaatattcattatgtggccctgtagagaaaaagtttgcagactcctgctttaaatggtaggagttcgttttgtgcagtctaattcacatacacacacacaaacgtgtgtgtgtgtgtrtatatttaacaatgaacatgtattacttttataaccagaaaaagttaaagttatttttgcaaaagaaagacatgaatgaaggaacaaagaaaaaagaaaagaaaggagggaattatttattcatgtttaccaatacagaaaaatgtccacagcaagcaaaaattttaagtattgtatgaacaggatggttatatttttgtaatgtctggatacaggactgaaaggaaaaaaaggttagcatggctgtatctgggtaagggaactacaaatggcttttatttccttctttgttctttgttgtattttctcaattttccataataaacatgctttacttttgtaataagaaagagagaaaataagtgatattgaagatagagaaaataaaatattagtctacataaaaagcaacaatgtttctaccagtctttgaacatctacttggggtcctgggagtgtgtccctttgggcacactgct

SEQ ID NO: 502614 - DNA, 610 bp, Homo sapiens
atccagtcctatgatcacattttctggacaaggaaccaaggcccagacaagtgaaattatcagcctgaggtcagacaaccagctaaaaagactgagtgtgaaatccaggtcttctgaatcagattctaaattcttagtcttgtgattttttttttcccctaaggcttttgttttgttttgttttcaatggttatacaggttcaatgcagaaattttggaaaacccagaaaagcacaaagaaaaactgttagaccaatttttaacaatttaaaattgttaatctccatactttaagacaatcactcaaacttttagtagggcactatgatacagaaactaagagggctgcttctggagtcatatatttggcttcttatcctgactcctatgcttgacaagcttgtgggcayggaagttactttaccttcctcagcctcagtttccctgccagtaaaatggggagaacaaggttcctcagcgtcagtttccctgccagtaaaatggggagaacgaggtcactgatttctcaaggttgtgagaatgaggtgagatgaaatttgtaaagcatctcatacaatgcctgcagacaataatcattagccatcatgat

SEQ ID NO: 502615 - DNA, 520 bp, Homo sapiens
tttttgtgtatacagagtgaaacacagtgcaggggacatggtaaaacacttaggaaacagcaactataatttttaccattayagaagaaagtgccctcatggaactttttttaagacatggagtcttgctatggtgcccaggctggagtgcaatggttcttcacaggtacaatcatggtgcactgcagtctcaaactcctgagctcaagtgatccttccacctcagcctcctgagtatctgggactacaggcacatgccaccatgtctggctgaactctttttgatgtttccagaaacaatcccccaatgggtggtagagtccaaggtgagcctagctaacactaagcaccattccctaagaaatagcattctggggaggctgttaagacattactttttaaattgcacgtataccatccaaggaagagtggctggggagaatgctgccgaggaagctggatgggagctgagggaatatattgagaagtgggatagccatttttcctctgaatttctttg

SEQ ID NO: 502616 - DNA, 520 bp, Homo sapiens
tttttgtgtatacagagtgaaacacagtgcaggggacatggtaaaacacttaggaaacagcaactataatttttaccattacagaagaaagtgccctcatggaactttttttaagacatggagtcttgctatggtgcccaggctggagtgcaatggttcttcacaggtacaatcatggtgcactgcagtctcaaactcctgagctcaagtgatccttccacctcagcctcctgagtatctgggactacaggcacatgccaccatgtctggctgaactctttttgatgtttccagaaacaatcccccaatgggtggtagagtccaaggtgagcctagctaacactaagcaccattccctaagaaatagcattctggggaggctgttaagacattactttttaaattgcaygtataccatccaaggaagagtggctggggagaatgctgccgaggaagctggatgggagctgagggaatatattgagaagtgggatagccatttttcctctgaatttctttg

SEQ ID NO: 502617 - DNA, 478 bp, Homo sapiens
tcataatctacccgccttagcctcccaaagtgctgggattacaagtgtgaaccaccgtgccaggcctataccttaaacttttatagctaggtctatgcctttagttgtattttctatatgatatgaagtaggggtcccattttattatttttcatgtggctatccagttgtctcagcatgatttgttgaaaagactatgctttccctattgaattgacttggcacctttgaagaaaatcagttgaccatagaagttagagtttatctctggattctgaggtgggtgcatttttaattggtgccatctttctaacatgatgtgaagccttcasagagccaagctctggttgcatggtaaagcagctgatagctgtcaggtgaattttgaattggagggccttcaatttctctggctataaaatgaatttttggacaaaagctctagtgttgtttacttataggactggaaagagccttc

SEQ ID NO: 502618 - DNA, 610 bp, Homo sapiens
tgtgaattttgggaggatacagacattcagtttataacttttgccatctagtgttgatactttccatgttcctttttagatgactttaatgtttataaactgtccattcaatatcctacagtcaatcatactaaaagtctattaagatactgattgattgattgattgattgatatgaggtctcactcttgtcacccaggttactttgcagtggcacaatctcagctcactgcaacctctgcctctcaggcttaagaaatcttcccacctcagccccccgagtggcagggaccagaggcacgcaacaccacgcctagctaattttttttttttttttttttttttgtatttttggcagagacagggttttgccatgttgccagactggtgtccaaytcctgagctcaggtgatctacctgccttggcctcccaaagtgctgggattacagacatgagccaacgcacgtggcctaagccacttattcacatgacgaaacttccttccttatcatcactcagaaatattctacatctgaaataacaacttcctactcaagactctaactacaatcttctattcctttaaggctggcacatcatataactcta

SEQ ID NO: 502619 - DNA, 540 bp, Homo sapiens
cattaaataatgtgaaggcctcttgtaaagccccaaattaatcattaaggttgtttgtttaacatctaccatgcataagacacactactgggtactctaactgtattttaaagttaataaatagaccaaagattaatcaatacctaatttaatcatttgagtatatwtcttcaagtattgtgaagaaaagttagtgcagacctgaatacatataacatttttattataaaaataaaggactaaagaaatatgcaaggcatataaacaaacaatacaagttttaggtagccttggtactgttggttctaataaatacgcattaactttagcataatatcaatatgtacctttatagtattatataaacaaagcagtaataaagaagttacaattgataaaacaggttgcaccatatttatcctggcctggaatccctcttgaaatcatgcctaatattcacagtagaatctagagttcaataatgtatcaagcgtgttacactaacaacattttaaaatatttcttcctgaccaagttttt

SEQ ID NO: 502620 - DNA, 540 bp, Homo sapiens
cattaaataatgtgaaggcctcttgtaaagccccaaattaatcattaaggttgtttgtttaacatctaccatgcataagacacactactgggtactctaactgtattttaaagttaataaatagaccaaagattaatcaatacctaatttaatcatttgagtatatttcttcaagtattgtgaagaaaagttagtgcagacctgaatacatataacatttttattataaaaataaaggactaaagaaatatgcaaggcatataaacaaacaatacaagttttaggtagccttggtactgttggttctaataaatacgcattaactttagcataatatcaatatgtacctttatagtattatataaacaaagcagtaataaagaagttacaattgataaaacaggtygcaccatatttatcctggcctggaatccctcttgaaatcatgcctaatattcacagtagaatctagagttcaataatgtatcaagcgtgttacactaacaacattttaaaatatttcttcctgaccaagttttt

SEQ ID NO: 502621 - DNA, 481 bp, Homo sapiens
ttcctattctgtgtacttataaagatacttatagaacaaataattagagagttaacttgacagaagtcaacaatgtagtgtgtgatagactaatcaatgataaatcacatcattcagaaaagagaagttctgtaagtcttgcttaatttattgaaaataaagctacatttttcagtgatgaacatttcttgatgacagtaatgatgatgcatgaattaaatgaggagataggaaataggaataaaaaaaggatggaaaaactataattaacaaaaaacatccacaaacaataatttatgtaagtgaaatagatttctgcagaataaaaatggaacaaagtgaacaatggaaattattcgacaattagggtggatatagcttggatcactgaaacggtgaaaggcaaaagataatgtaatgcawcttacacagagaaacaatggaaatctgttcaaaagctcttttaaaagacttccccttc

SEQ ID NO: 502622 - DNA, 540 bp, Homo sapiens
gagaaagtttattaaggtgagaccgaaacaaaagataacaataaaccctccagtgaagttaactgaggttgaatgcttacaggaggaggagaataccaccactaaaaactagtttgatttatggtgtaaaacattactcataagaaagaatttttcaccaaatcctaggaggctgtgctaggtatctgcccgatccgatctatttccctaagggaaatggtagactctcttgggaactgtgggctgatctgaaaactgtagggtgcawcctatatacaaattagaccaaatgagacggtgttgcctctaatgcactcacttctctatgtgattggtttatgcatcaggcttcccttccccaggtggggtgaggtggtattggggtggaagcagggggcatgtatcatacccctcccaaagagagtggtgattttttatctcactggggaggcacactaagaaggtttaaaaatgtaaatgccttgtcaaggctgtaaaacaaagatatagtctccttttattcccacactgtggcaacag

SEQ ID NO: 502623 - DNA, 615 bp, Homo sapiens
ctcagcctcccaaagtgctggcattacaggcatgagccaccagacctggccttaattttgaagaaacttcactttgctaagctttacataccatgcattataggttgaatcaaactatagtttgtagtactttgttacggcagccctagcaaactaatacaccatgtttaagctctgtaatgaagccacatataacttgtttcactgataaaatttaaatatattataatgttttctcctaacaatctacttatttcatgcttttaccatctcttaaaataaattcacaaatcatacaattcttccttaaaatacttcaatattgagatattttaaagtaaacaagaaatagcaatgtgctgttcaattctttcaagttgcttttcaaatgagaaaaaaacttgatctagtgtggccagcaacttttgtctatagaaattaaatcttagtaaatattttattaaaataaaactattcacaattctagcattcaatatccacattgctgccagtacaaygatctgtatttagcttcaagcatgttacatctagacctacatttatataaatataagacgaatgtgaattttttaatattgtgaattttttctcagc

SEQ ID NO: 502624 - DNA, 650 bp, Homo sapiens
gaagactgtacctatagattcatcctgtttcaatacagaaaatattaattataacttgcttaattggaaacaaaagaagtataacaatacttggaaagcagataacaagttaatggaattttctgattggttaaaaattactttgaaatagattgttctttcaatacttattggttattgaaagcctatttagaaagccttctaaaacatgcagttagtgacttccaccctagtaaatagtatgcaaatrttttctggagattgaggattgtgcaatgtttcaaacttatgctataaagtaaaaaatgtggtactgtacaggcatattcaatggattgaaacttaatccagagggactatagcacaaactccaaaagttattctcttgcacaaactcctccttgttttgctgtcatttacgtttttttttttttctaaatctggtgtagacagttgaaatatgcatttttctagtgagcgattttgccagtaatttcattttgttttaccttattaagaaaatccctctgacagttctcattctgtttatacaatcatttatttttccctctattgggtcatttccagtaatatacaaacatgctatatttctttcatttaaaaatattttatctaactaatttttttgc

SEQ ID NO: 502625 - DNA, 618 bp, Homo sapiens
ctttatagcattttgtcacaattgcaattacacgtttatttctgtatgtgtgtgtttaacatctgcggcatgaagagaccttgaatccttggtccttttgttccctccatgcttaatcccttggcagtttcatcggtctttggactttagatatcatcaacatgctgacaattctcagatgcacatagctactccagacttctctcccaaacttcaggttcatacgtctaactgcctgcttgacagttgacctcgatatacatatagaactatcaaacttcacatgtccacctctaaactcctgaccttcccctgccaagcctgctctacctgcagccttccctcatttcaattgatggcacctccattcttccaagtgctcaggaaaccraaaaacctcagagtcccccacatgtctttctctcataccttaaaccaatctctcaggaagttctgttggctctgccttcaaaataagttaaaatgtggccatttctcactatttcccctgccccttcctgttctaagccaccgtcacccctctcctggattactgccttggtctcctgactgggctcccggctacccctgccctttgcactcatcttgacacagcag

SEQ ID NO: 502626 - DNA, 635 bp, Homo sapiens
tgctctctctttaggatagcactgatccccacaaaatccttatcaacatttaatgaaaagacagtctcctagaagaatgaaactgaagaacatagctgccttactaattaaactttggcagattcgcacttggcctctgaatcataatttattctatatgaactatttactgaattgttgwaccattgcccatatgaattattttgttataggaattttgtttttgttattgtagctatttaaacaacattaatttagatgaaacatgattttctaaatatactcctataaatcattttatagctaaacaataaaaactacccccatttgcagtgagccaagcttgtgccactgcactccagcctgggcaacagagcaagaatccgtcttggaaaaaaaaaaaaactaggttggcaaagattccagaacattaaataattaaaaacaggtctggatttctttctatatgtaaagacaaaatagtaaattgtaaccagagtccttcctattattatagtacatctattctcactaggcaattttaaaataccaagctgtcttcagcaatagtaattcggcgggtttgtgcttaatatattcatgaaggggtttgatggatttgataaccataagca

SEQ ID NO: 502627 - DNA, 623 bp, Homo sapiens
catgagcaggctgatttaccataaaacaaaggaagcttaagtttctttttttgttgttttgtttttgagacgtagtttcgctcttrttgccccggctggagtgcaatggcatgatctcggctcactgcaacctccggctcctggattcaagcgattctccttcctcagcctgccgagtagctggtattacaggcgcccaccagcatatccagctagtttttgtagttttagtagagatgggggtttcaccatgttggccaggctggtcttgaactcttgacctcaggtgatccacccacctcagcctcccaaagtgctgggcttacaggtgtgagccaccacacccagctcaggaagtttaagtttctatcaatgtgtttacatggtcatacaattttgtaaaatttgcaaaaataagatactttacttcaatcaagtaaggctactgactccttccactctgactttctttctatcatacttcctctcatgtggatgagtgctggagtggccacaaacattttgagattcgaggggaagctaagttggtggtatatttagttttagtttagtacagtgtatatgtggtttgcaattacttccacatataagtaagttattac

SEQ ID NO: 502628 - DNA, 373 bp, Homo sapiens
tataatgtagatcttaacagccaagaagtctgtaatcagagaaaaaaagaatttcaaaacataaactatgttcttggcactagccttgaatactggacattcawaacccacaagtgcccagactataaatttgcaagttgcattaatacggcagtaaaagtcactcttctgaaagctgcacttgtaaaatatttataaattcacatggttgttcctggcaaatatctacatctgtcagctctgtctttttgctcccaaagcagcagagttggtgtcctgtgtaattcacaatatgttcataaaaaattattttgaaaaatcaagatagaagatattttattctaaggggcaatatatctgctcctccaatggt

SEQ ID NO: 502629 - DNA, 295 bp, Homo sapiens
tcaatctgtaaggcctagcactgctcaaggccttctctgcagtttagattcaacaaatacctattaggagttcattatgtgtcagacattttgcacrtaacattatattgtaatcctcaaaacagtcttgtcaggttttatcacagttcatataatagtatcacaatttttacataaggaatttgagctcagagaaggtaaaaaaatatacccaaagtttcatgactgctcagagtggaaccagaatttgaatagcattttcctgaatctacaatctatgttcttttccctttat

SEQ ID NO: 502630 - DNA, 522 bp, Homo sapiens
acaggataaaaattttgtggaagctctttaaaagtaaacagagaatgtttggtcatagaaatatcaaatactaataaggaacacctaagcactttaggtgcattggaaaaatatttaacttgttgaagccaaatttcaagtatattggacttctagactgtggtttggttttaattttgtattcccaagccaaaaaaawtttttttttaaataggaaactctttttaatctatatactccctgaattgtttttctatatattttgattatatgtctcaaaagctgaaaagggcctgaaattgtatcctatttgcaagctaagttagcctgtcagtttcatgggtgctggcagaagatataatactcctgggttatatatactccttggttatataataaaccaaggacagtttattacttatagcattaacagtagacagaatatcagcatttataccagccccttaaacctcaaatactgcctggcaatgtaaagaggagcaggtgatatttgcacatgca

SEQ ID NO: 502631 - DNA, 636 bp, Homo sapiens
gtttaagtcttgggtgagtttttaaaaacaagcatctataccagtgttgggggtgaggatgtgaggatgagagaggacagtggggcagcagaaatattaggattctaatctattgaaaataaagctccaggtccatcccatcatggatttcatggtcccccagwatcgtgtggtccctaaaaatcatgtaccatttcttcaggataatctttttacaatgggtgacagcttgggctgcaatcagcttcttacggtctcttaaggtctccagtggcgtcatctatgttgcatttaacatggacctgaagcccagacagttgttgcaaacaacctccatcatcctagctaaagctcaaatcaccttgaatctgccaatgccacagattcctcacccgagtgctgaaccccggtcgcagtcaacgctgggaaccggaagctgggtgactattttgagacatcaatgatttggaatgttggtggcctatcattcttgcctccttccaattcattcactaaagaagtccaggtgaccttttctaaaggtgaatctgatcctctcacatgctacctagacactactgcctcattgcttaaaagtgttctttgggccgggtgctgtggcttatgcctgtaatc

SEQ ID NO: 502632 - DNA, 636 bp, Homo sapiens
gtttaagtcttgggtgagtttttaaaaacaagcatctataccagtgttgggggtgaggatgtgaggatgagagaggacagtggggcagcagaaatattaggattctaatctattgaaaataaagctccaggtccatcccatcatggatttcatggtcccccagtatcgtgtggtccytaaaaatcatgtaccatttcttcaggataatctttttacaatgggtgacagcttgggctgcaatcagcttcttacggtctcttaaggtctccagtggcgtcatctatgttgcatttaacatggacctgaagcccagacagttgttgcaaacaacctccatcatcctagctaaagctcaaatcaccttgaatctgccaatgccacagattcctcacccgagtgctgaaccccggtcgcagtcaacgctgggaaccggaagctgggtgactattttgagacatcaatgatttggaatgttggtggcctatcattcttgcctccttccaattcattcactaaagaagtccaggtgaccttttctaaaggtgaatctgatcctctcacatgctacctagacactactgcctcattgcttaaaagtgttctttgggccgggtgctgtggcttatgcctgtaatc

SEQ ID NO: 502633 - DNA, 604 bp, Homo sapiens
aactgagctctgtttgtgaaactggcttcatattttcataacctgtacgcacgatagcgctctctactttgttacctgctgataggagtatgcaaagtattacttgcctcagttagaaaataccctyatctgaaatatgatgttgcacatctttttatggaaataactggacatttctggccatgaatccccagagcatgttaaatacagcggtgaaaatctactgaagaagttttttttccaggatgaagttttgacagttctgttggttcaggaagtttatagcaaggaaaggattcctcagaaacgatgctggttttcttctgttttcccctctatagaagaccctctgtcaaatttgtagcccctgttccttttttgcttgtatgcaatctagtcctgtgtttctcaaactgtgacccacttacaactgaagttctcctcagacttacttaggctttctgagacgggaaaattctcatttttaataagatctatgggggattcttaggtgccctaaaatttaagaaccacttgcttagaattaccagtttagggggggaaaggctctgaaaaagatttctccaggggacatttgtgaaca

SEQ ID NO: 502634 - DNA, 604 bp, Homo sapiens
aactgagctctgtttgtgaaactggcttcatattttcataacctgtacgcacgatagcgctctctactttgttacctgctgataggagtatgcaaagtattacttgcctcagttagaaaataccctcatctgaaatatgatgttgcacatctttttatggaaataactggacatttctggccatgaatccccagagcatgttaaatacagcggtgaaaatctactgaagaagttttttttccaggatgaagttttgacagttctgttggttcaggaagtttatagcaaggaaaggattcctcagaaacgatgctggttttcttctgttttcccctctatagaagaccctctgtcaaatttgtagcccctgttccttttttgcttgtatgcaatctagtcctgtgtttctcaaactgtgacccacttacaactgaagttctcctcagacttacttaggctttctgagacgggaaaattctcatttttaataagatctatgggggattcttaggtgccctaaaatttaagaaccacttgcttagaattaccagtttagsgggggaaaggctctgaaaaagatttctccaggggacatttgtgaaca

SEQ ID NO: 502635 - DNA, 608 bp, Homo sapiens
actgcagcccacaggaacaaagcctttggggaaaggargaaagcatcactccttggagagggttctccatatgctccctttcaatatgtttgaatttaaagcaatcctgtggtcctcactctcgaaagattaaagaggctgtcattataaataggatagctgtactaaggcaggtggcttcttttctgacagctctttcaccagcagagcctactgacagatccctaggaattttcactgatacataccctgcctctttctatcagatttaccagtgattaaaaaaaaaaacaatataaaattagtttgtagatggtccattaaaatttaccaaggagttcattataatgataaagatcaaagttagcagagaactcaatatgcttaattatgacttcaaactgcaaagaaatcaatcaaagctctctctcccttatccttgaaaaggattaagtttctttgcccaattttagatggagttcatacaaatgaaaggttttgcacttgggaggcaggtgaagttaatcatcagtttgacatcaacctggcttagacttcaggaaggcacatccattggtctagggaagggatagagttgtttgggcttt

SEQ ID NO: 502636 - DNA, 608 bp, Homo sapiens
actgcagcccacaggaacaaagcctttggggaaaggaggaaagcatcactycttggagagggttctccatatgctccctttcaatatgtttgaatttaaagcaatcctgtggtcctcactctcgaaagattaaagaggctgtcattataaataggatagctgtactaaggcaggtggcttcttttctgacagctctttcaccagcagagcctactgacagatccctaggaattttcactgatacataccctgcctctttctatcagatttaccagtgattaaaaaaaaaaacaatataaaattagtttgtagatggtccattaaaatttaccaaggagttcattataatgataaagatcaaagttagcagagaactcaatatgcttaattatgacttcaaactgcaaagaaatcaatcaaagctctctctcccttatccttgaaaaggattaagtttctttgcccaattttagatggagttcatacaaatgaaaggttttgcacttgggaggcaggtgaagttaatcatcagtttgacatcaacctggcttagacttcaggaaggcacatccattggtctagggaagggatagagttgtttgggcttt

SEQ ID NO: 502637 - DNA, 547 bp, Homo sapiens
cggtgctgaatactaggcactggtatctcccgccaggttcaatccctcagggttcgaataggctccaccatgggagactgaactcacttccctagggtgaggggtggagaattcatttagatgtttscttgctctcctcccacaggaaaccatttttccacaaagaggcattgtgcattttatgggaaagtaatggcacagctccagctcagcaccaaagtgaagagctctactgaggcacaatggaaagtcgaggtaaataaaaactgctctttccctccctgaatcaacacaacagcttttgggatcctagatccccttgttgacgaattcttaaaaatatgtttttttaaaatcacatgattaatcattttactgataaacaccctaaaaggtggtggtggcgctggctttgcaatatcggagtataactactgatattgttttactgaggttgagaaacaaaggggaggagggaagtaaacttgtaaactaaggtggcttgaatggttaaaaattcatttttaatagtattgctttaacatag

SEQ ID NO: 502638 - DNA, 504 bp, Homo sapiens
attttagttcaattttgcaaattgtcctaattgaattcccttggatagggaacagtttatactgataactagcaaaaaaaaaaaaaaaaaaaaatagtgtccttgttggttgaaaagaaaaatgagagagagaccagaaaaaaaaaattatagaatattttgttggtttgtgtaatgttctatgttttctccttcctgacttaatccctgtccttcccaaactcccaaaatcttcattttactcttcagaaaccccagctctatgaaacaattcttctacattctcaaacatgtcttccttgcactttctgctcataattaaccctaacttcccatgtggaacaccacttccgttacagcccttttgatagaagtggcatatttcctaattccccargtatctcagggctggaagtgggttcatgttccagacaaatatttttccagcctctgtaaatcctggacctgctgagtccaggcttacagtctctgtcttcctcattg

SEQ ID NO: 502639 - DNA, 612 bp, Homo sapiens
caggattcccgtaggctcagggcgtttgtggcatgattgtgaaacacatcccattttcagagatgtgcaaatgtgggaaataaagaattgaggagatatggctgggtgatctcaatgagaaggagtcatacggctagctatgagggaagaaccaatctatgctagcttgcaagaaaaagagaattcaattcaatcttatgtatgggactagctgcctttccattttataattagggtctrtcctttgacaagtctccaaatagacctgaaatatggacctggcttaaaggcaggtaggcagaagccaggcagcaatgcgtcttctaaggacagtggttctccaagagtggcttccagatcagcagccccagcctcacctgagcacttgttcaaaatgtaaattctcaggccccaatccagccccgctgcattggaaaatatgggggtgggcccagcactctgttttaacaatccccagctggtttccatatgtgctaaaagttggggaaccactgcctcaaaaacacccccaaccaacaatgaaaaagcagatgagttaagtttttctgtttatttcctttttattatcctatttgtctatgaagtcatatt

SEQ ID NO: 502640 - DNA, 572 bp, Homo sapiens
accatatagcccagcaattccactcctaggtaaatacccaaaaagaattgaaaatatacattaacacaaaaacttgtacatgaatacacatagcagcgttattcataatagtcagagtggaaacaacccaaatgaatgaatcaacaaaatgtgatatgttcatacaataaaatattatccagccacataaagggatgaggtactgatgcatgctacaacatggattaacattgaaacattatccagactccaaaggccacatggcatatgactccatctacacgaaatgtccagaatgggcaagttcatagggatagtattccttttgaggggtggtgaaaatgttctggaattcaataatggtgatggtcacacaactttgtgaataaactaaaagccgctgaattctacacttcaaaatggtggatttaatggtatgtaaattatatctttctcaaaaaaaaaaaattagagtgaatctggggcaaggtaccaatccaataactcaattaggatcatcttgttgggcagttggctgggaagctgctgtcmcaagccagccagagcctaga

SEQ ID NO: 502641 - DNA, 568 bp, Homo sapiens
gtgaaataatctgttctggaacaagaagctccaaaatatctcagcctgggatgactttgcgtgctttccatagagcatttggctacatatcaaagccgttatcagtgggctgttccctggctcagggcaggtgtctgcctcagccatgtacataatggacataaggagctcaactcttctgtctcctgctgcctgatcccagataaggaaaaggattatgaggaggtgccacatgatggtgaaatttgctttcttctcattgtaagttgaatctttagtaccttttttggtctgtgacatttgatttctcatggagcactcacagtgttgagtaacatgataagctcatagagtgggatgtgtttaacctcactgacatttgtgcttatgtgattttttcaaaaaaattcaratgtcaatgagaatattgtgccacctcagttttatttatttttatttttttaacttttgttttaggttcagggatatatgtgaagttttgttacataactgaacttgtgccatgggggttccttgtacagattactttgtcacccaggtattattc

SEQ ID NO: 502642 - DNA, 662 bp, Homo sapiens
agtgtctagcctagctccttgtgaaataagggctgacactgagctcctgctggctcccactgctccctggacacgatgcctgcctgggtcaagggggtgagtctggacagacgtcactctggccatcagtarcctaactaccttcatgacctcccactgtgaacagagtcccggaagctgctggagccatgaaagttggacagagaaatcccacatcactgcagtcagaggggggctatgaaaagaccgtgggggggtttcatactatgaccacccagcactgagccatggctgccactctgtctgatgggagcccccaggggaagatccactcacactgtgctctagaggtcgtttttgtcaccatctttgttctagctggtttgggccagtttctgtagtgcatcctgttttgtccagatcctgttctggtcagcgttgtcatgaccagtgttgtgatcagtgctcagaatacaagccctgatgatctcctaccttatactcactgccttctgtgaaccagatgttctgataagggtcctgttggatcctactcgaatcagttgccacacagaccctcactgagggctgagggccacagacatctgaagataaacagaggtccagagaatgatagcctgtgactgtcctctgtaaagaca

SEQ ID NO: 502643 - DNA, 569 bp, Homo sapiens
ctgaagcatcacatgcacttggatgttagtgcagcagaggggagatgaaacacacggtgagcttaggagatgagaacaccaaagagttgagaagcacaggaaacaatccattcattccttctacttgttctatcattgaatcagttgactatgagagaagccattgtgcctggtgaggcaaaattgtatttattttgatggattaggtgacttaaaaccagatggaaaaagcagaggagtgacctcaggcagctcccagcactcatttcactgctccctgatacgtgtctgtttcatggcctttgcccattttataatggagttgtttcttgttgttgatttttttaaaattttttgtagattctggatcttagayctttgtcagatacatagcttgtgaatatgttctcccattttgtaggctgtctgtttactctgttgttagtgtctcttgctgtaatgaagttgtgtagtttaattagatagcacttatcaatttttgtttttattgcaattgcttttggagtctatgtcatgaattctttgcctgagcaaatgtcaagaatggc

SEQ ID NO: 502644 - DNA, 569 bp, Homo sapiens
ctgaagcatcacatgcacttggatgttagtgcagcagaggggagatgaaacacacggtgagcttaggagatgagaacaccaaagagttgagaagcacaggaaacaatccattcattccttctacttgttctatcattgaatcagttgactatgagagaagccattgtgcctggtgaggcaaaattgtatttattttgatggattaggtgacttaaaaccagatggaaaaagcagaggagtgacctcaggcagctcccagcactcatttcactgctccctgatacgtgtctgtttcatggcctttgcccattttataatggagttgtttcttgttgttgatttttttaaaattttttgtagattctggatcttagatctttgtcagatacatagcttgtgaatatgttctcccaktttgtaggctgtctgtttactctgttgttagtgtctcttgctgtaatgaagttgtgtagtttaattagatagcacttatcaatttttgtttttattgcaattgcttttggagtctatgtcatgaattctttgcctgagcaaatgtcaagaatggc

SEQ ID NO: 502645 - DNA, 541 bp, Homo sapiens
tcatcaggaggagaattcttgggggccatgagccytgggaacaaccagctatgatgaagggagagtgaatgaaagctcatccctccctatcttgcctacatttttcaaggacatttacttgtcaaaacaaccagaccgtggatgcagattagtgacaacacaagtggaatacgtgttggaaatgaccagcttggggtttattttatacaagatgatacttggtcctattgagaaatcatttttttcatttcattctcccaaccttgtatcttttttagcactcgtacactaaactgccctctccagtgtcatgctggagaaggtattctacacaagctgtcctcaggggagtgtggcaaaaaataattattaaaaatgtttaggtttgactattcatagacttggtaaacacatggcaaataaaagatctcaatgccaaaatacttcaattctcctcaattaccttcatcccagtgaaagttcttccagttacaaaagtgagctttgaaaataaacagaatgaactcacagatggacaaca

SEQ ID NO: 502646 - DNA, 541 bp, Homo sapiens
tcatcaggaggagaattcttgggggccatgagccctgggaacaaccagctatgatgaagggagagtgaatgaaagctcatccctccctatcttgcctacatttttcaaggacatttacttgtcaaaacaaccagaccgtggatgcagattagtgacaacacaagtggaatacgtgttggaaatgaccagcttggggtttattttatacaagatgatacttggtcctattgagaaatcatttttttcatttcattctcccaaccttgtatcttttttagcactcgtacactaaactgccctctccagtgtcatgctggagaaggtattctacacaagctgtcctcaggggagtgtggcaaaaaataattaktaaaaatgtttaggtttgactattcatagacttggtaaacacatggcaaataaaagatctcaatgccaaaatacttcaattctcctcaattaccttcatcccagtgaaagttcttccagttacaaaagtgagctttgaaaataaacagaatgaactcacagatggacaaca

SEQ ID NO: 502647 - DNA, 631 bp, Homo sapiens
tgagagaaaaacttgccttcctttaagtttctgattagcctttccagaacaggtaattagatatgcatttatctcagggaccagagggctgactttgaaaacaatgggaggcagatttgccctattcagttcccagctagaattttccctttagcttagtgatttggggagcccaagatattttcctttcacaatatttattcgtaatatagatgcatagtagatacaaagatatcactgcaatttacatctataatattatacatatttaatatacaaagtttgttacaaaygcatatatacatatacacataattttatgtttatttagcacgtgctcctttttttttctaactataacagaatcaggctcagtcaggactctgcggacatttgctgacctctttggctccagcacagtcctggtcattgagagccagtgagaacagagctgagagcagcccaccccaggagcttgggcccagccccaaggcccttgtctctgagactttcctcctggtggcaggctctgggcttgaagcagtgcccatgagtgtgtgagcaatttccttccctgaagcccctgtgaggcagacctgtgggcagcgcctttggttcccaggtcctcagc

SEQ ID NO: 502648 - DNA, 631 bp, Homo sapiens
tgagagaaaaacttgccttcctttaagtttctgattagcctttccagaacaggtaattagatatgcatttatctcagggaccagagggctgactttgaaaacaatgggaggcagatttgccctattcagttcccagctagaattttccctttagcttagtgatttggggagcccaagatattttcctttcacaatatttattcgtaatatagatgcatagtagatacaaagatatcactgcaatttacatctataatattatacatatttaatatacaaagtttgttacaaacgcatatatacatatacacataattttatgtttatttagcacgtgctcctttttttttctaaytataacagaatcaggctcagtcaggactctgcggacatttgctgacctctttggctccagcacagtcctggtcattgagagccagtgagaacagagctgagagcagcccaccccaggagcttgggcccagccccaaggcccttgtctctgagactttcctcctggtggcaggctctgggcttgaagcagtgcccatgagtgtgtgagcaatttccttccctgaagcccctgtgaggcagacctgtgggcagcgcctttggttcccaggtcctcagc

SEQ ID NO: 502649 - DNA, 631 bp, Homo sapiens
tgagagaaaaacttgccttcctttaagtttctgattagcctttccagaacaggtaattagatatgcatttatctcagggaccagagggctgactttgaaaacaatgggaggcagatttgccctattcagttcccagctagaattttccctttagcttagtgatttggggagcccaagatattttcctttcacaatatttattcgtaatatagatgcatagtagatacaaagatatcactgcaatttacatctataatattatacatatttaatatacaaagtttgttacaaacgcatatatacatatacacataattttatgtttatttagcacgtgctcctttttttttctaactataacagaatcaggctcagtcaggactctgcggacatttgctgacctctttggctccagcacagtcctggtcattgagagccagtgagaacagagctgagagcagcccaccccaggagcttgggcccagccccaaggcccttgtctctgagactttcctcctggtggcaggctctgggcttgaagcagtgcccatgagtgtgtgagcartttccttccctgaagcccctgtgaggcagacctgtgggcagcgcctttggttcccaggtcctcagc

SEQ ID NO: 502650 - DNA, 605 bp, Homo sapiens
cccagattgttccagagccaatcaagggatctgacccaagacattttctgccttagaggaattctggtgctacctcctctcaaaataatatgttctctgtcttttcaaaattgacgggaaattattacaaggtgaagatatttgggagaacaagaacagccatgcactgaggagataaaagccatctcttcctcttgcattaatatcctattgctgttggaacaaattagtatgacctcactggcttcatacaacacaaatgtattatcttacagttctgaaagtcagaagtctcactgaactaaaatcaaagagtgagcagggctgtattatttctgraggctccaaggaagagaattggatactaagttttcatcttcaagatctctcagattccttgcttcttggccccattctgccacaacagcattcccctccattgtccgggctcctctctgattgtgaccctcctgtattttctattataaggaccttgtgattacactggtttgagacaggcaatctaggatactctcctcatgtcaaatttcttaactgaatcacatctgccgagttcctcttgacatataaggtaacattcatag

SEQ ID NO: 502651 - DNA, 605 bp, Homo sapiens
cccagattgttccagagccaatcaagggatctgacccaagacattttctgccttagaggaattctggtgctacctcctctcaaaataatatgttctctgtcttttcaaaattgacgggaaattattacaaggtgaagatatttgggagaacaagaacagccatgcactgaggagataaaagccatctcttcctcttgcattaatatcctattgctgttggaacaaattagtatgacctcactggcttcatacaacacaaatgtattatcttacagttctgaaagtcagaagtctcactgaactaaaatcaaagagtgagcagggctgtattatttctggaggctccaaggaagagaattggatactaagttttcatcttcaagatctctcagattccttgcttcttggccccattctgccacaacagcattcccctccattgtccgggctcctctctgattgtgaccctcctgtattttctattataargaccttgtgattacactggtttgagacaggcaatctaggatactctcctcatgtcaaatttcttaactgaatcacatctgccgagttcctcttgacatataaggtaacattcatag

SEQ ID NO: 502652 - DNA, 502 bp, Homo sapiens
acagagagagagttggcggctctacagcaaagyaggttttatgtccagcacaagactgtggaggtgggggactagcttaataccagaacccgctgccgcttacaggctggggtacttataggtatgggcgggaggggtctagacggtattacttgctgcccggcaggacgttgataacatgttcctgtggtcaggcggttttgccaaggatgttccttgggccttttgcccagcggggcgtgataagaatgtttcttgggcccactgtccagcagaagacgatagggatgttcctgtattcacgtggttaggcaggatgtttctcacagttccaaccccccgtgtaatgtttcactttaaccaaggtctacaaaatggcaggggggcttacaaaatggtgcacctcggactaacagataggaaaagtctatggccttttgcctggaactgctttttttcacccaagcttcgtcaacaagaattttagaactgtagttttacc

SEQ ID NO: 502653 - DNA, 502 bp, Homo sapiens
acagagagagagttggcggctctacagcaaagcaggttttatgtccagcacaagactgtggaggtgggggactagcttaataccagaacccgctgccgcttacaggctggggtacttataggtatgggcgggaggggtctagacggtattacttgctgcccggcaggacgttgataacatgttcctgtggtcaggcggttttgccaaggatgttccttgggccttttgcccagcggggygtgataagaatgtttcttgggcccactgtccagcagaagacgatagggatgttcctgtattcacgtggttaggcaggatgtttctcacagttccaaccccccgtgtaatgtttcactttaaccaaggtctacaaaatggcaggggggcttacaaaatggtgcacctcggactaacagataggaaaagtctatggccttttgcctggaactgctttttttcacccaagcttcgtcaacaagaattttagaactgtagttttacc

SEQ ID NO: 502654 - DNA, 434 bp, Homo sapiens
cgcttacaggctggggtacttataggtatgggcgggaggggtctagacggtattacttgctgcccggcaggacgttgataacatgttcctgtggtcaggcggttttgccaaggatgttccttgggccttttgcccagcggggcgtgataagaatgtttcttgggcccactgtccagcagaagacgatagggatgttcctgtattcacgtggttaggcaggatgtttctcacagttcyaaccccccgtgtaatgtttcactttaaccaaggtctacaaaatggcaggggggcttacaaaatggtgcacctcggactaacagataggaaaagtctatggccttttgcctggaactgctttttttcacccaagcttcgtcaacaagaattttagaactgtagttttaccagctgaaatggcagcaacaactggaagc

SEQ ID NO: 502655 - DNA, 434 bp, Homo sapiens
cgcttacaggctggggtacttataggtatgggcgggaggggtctagacggtattacttgctgcccggcaggacgttgataacatgttcctgtggtcaggcggttttgccaaggatgttccttgggccttttgcccagcggggcgtgataagaatgtttcttgggcccactgtccagcagaagacgatagggatgttcctgtattcacgtggttaggcaggatgtttctcacagttccaaccccccgtgtaatgtttcactttaaccaaggtctacaaaatggmaggggggcttacaaaatggtgcacctcggactaacagataggaaaagtctatggccttttgcctggaactgctttttttcacccaagcttcgtcaacaagaattttagaactgtagttttaccagctgaaatggcagcaacaactggaagc

SEQ ID NO: 502656 - DNA, 434 bp, Homo sapiens
cgcttacaggctggggtacttataggtatgggcgggaggggtctagacggtattacttgctgcccggcaggacgttgataacatgttcctgtggtcaggcggttttgccaaggatgttccttgggccttttgcccagcggggcgtgataagaatgtttcttgggcccactgtccagcagaagacgatagggatgttcctgtattcacgtggttaggcaggatgtttctcacagttccaaccccccgtgtaatgtttcactttaaccaaggtctacaaaatggcaggggggcttacaaaatggtgcacctcggactaacagataggaaaagtctatggccttttgcctggaactgctttttytcacccaagcttcgtcaacaagaattttagaactgtagttttaccagctgaaatggcagcaacaactggaagc

SEQ ID NO: 502657 - DNA, 601 bp, Homo sapiens
ttttgcctggaactgctttttttcacccaagcttcgtcaacaagaattttagaactgtagttttaccagctgaaatggcagcaacaactggaagcttgttgccaaacgggattgacttgagctgggwtggagagtagaacaagatccttcagtgttttcagctaatggtgctgaactctgcaggaaatgcccagaaaaggcccagagttttgcaagtccaaggtgatgaccctgggagactggtacaccagctaaaacttgataatggattactggaaaccatggagtcatagaattatagagatcatccctgcacacattcttagaatgagcagatgtgacttagaaattgcatatttgagtgacagagacccaagtgggcccagtgaataaaagtgaaggaggtgtcttttatgggcacgcttcaagccacacacatatacattggcagaaagtagattattgaggtcaaggagtttgagcaacacaaatgcctaagttactggtgattaccaaactgtgcagacacaggtagggcttctggctaaaacttaaaatgaaaaaaatcagaaatatcaatcgccaaacagctagtaaggga

SEQ ID NO: 502658 - DNA, 601 bp, Homo sapiens
ttttgcctggaactgctttttttcacccaagcttcgtcaacaagaattttagaactgtagttttaccagctgaaatggcagcaacaactggaagcttgttgccaaacgggattgacttgagctgggttggagagtagaacaagatccttcagtgttttcagctaatggtgctgaactctgcaggaaatgcccagaaaaggcccagagttttgcaagtccaaggtgatgaccctgggagactggtacaccagctaaaacttgataatggattactggaaaccatggagtcatagaattatagagatcatccctgcacacattcttagaatgagcagatgtgacttagaaattgcrtatttgagtgacagagacccaagtgggcccagtgaataaaagtgaaggaggtgtcttttatgggcacgcttcaagccacacacatatacattggcagaaagtagattattgaggtcaaggagtttgagcaacacaaatgcctaagttactggtgattaccaaactgtgcagacacaggtagggcttctggctaaaacttaaaatgaaaaaaatcagaaatatcaatcgccaaacagctagtaaggga

SEQ ID NO: 502659 - DNA, 424 bp, Homo sapiens
cacaagcactgacatgctgagcagaaggcccagcagggtctacaccagcagggggcgcagtggggatggagaccagtgtccatgattcagacatgtattcgggatacatgtatctgtgtagccttggggattgggggagcatgctgaatctgtggaagttttatgtccttgtagcccagcacctccatccctgcctgctgactcagacctcaacatgtgtcccatggaaagcacgggccacttatasaggctgccctgtgcaacccccaaggctcagctggattctcctttcccaggagagctcctctgcctgtaccaagtcagagcttgtttccacaggcaaacttggcggctatggcagaaggacaaaaagtcaggtgagcatcagctcaacaatgaaaggttctttttactatggaatttt

SEQ ID NO: 502660 - DNA, 578 bp, Homo sapiens
acatgtacttagacactagtgcagcagaggggagatgaaacgcacagtgaacttaggagatgtgaacaccagctacagcctctaggtcagcttcatagtagagaagtacaggagccagtccactcattccttcttccttcttctgtcatcraagcagtcagatacaagagaagccattatggctggtgaagcaaactcgcgtttattgtcatggattaggtgaactaagccagatggaaagagcagaggagcgggctcaggcattcatttcacttccctgtttcttcctgcgtttctatgcagaaaaatcctctgattgtgacaggaaacttgtgaggcaggatgctgtgcccacaggacagtgctgcctggccaggacccagaccaggagaatgagcccctctggaaggcatctccccttcccttattaacttctgaaaaccactctgcaggggcatatctcatgtgcagagccttaatcacatctgggaccctgaatgccagagacatgaaggttagcctcaccagaaacgaccataaagatcgtgctggaggccaggggataaaaagaatacaga

SEQ ID NO: 502661 - DNA, 578 bp, Homo sapiens
acatgtacttagacactagtgcagcagaggggagatgaaacgcacagtgaacttaggagatgtgaacaccagctacagcctctaggtcagcttcatagtagagaagtacaggagccagtccactcattccttcttccttcttctgtcatcaaagcagtcagatacaagagaagccattatggctggtgaagcaaactcgcgtttattgtcatggattaggtgaactaagccagatggaaagagcagaggagygggctcaggcattcatttcacttccctgtttcttcctgcgtttctatgcagaaaaatcctctgattgtgacaggaaacttgtgaggcaggatgctgtgcccacaggacagtgctgcctggccaggacccagaccaggagaatgagcccctctggaaggcatctccccttcccttattaacttctgaaaaccactctgcaggggcatatctcatgtgcagagccttaatcacatctgggaccctgaatgccagagacatgaaggttagcctcaccagaaacgaccataaagatcgtgctggaggccaggggataaaaagaatacaga

SEQ ID NO: 502662 - DNA, 427 bp, Homo sapiens
ggcagtctacctgaagttgtcatttaccattgagaattactgctaaaaagtcatttgataaaaaaagactcatctgtgacagacagtcctcctttggaaggactctgtctttttatccctttatacccattttaagccctttgatggcctttgggtttttcttaaacaatcaatgtattaagtttaattcattatttatgtttaataattaattttcaatgtgcacatgtaccctaaaacttaaagtataataataaaaaaaagaaaaaaaattaattttcactagcacaaagtcaaaaatcctgarcgttgctatgtcaaagacctgcctctagatggcaaacaaaccccacaataaaccaaagagattgccatgatctaaaaatattacttgcattgtaagggtgatgatgtctgcttatcaaca

SEQ ID NO: 502663 - DNA, 565 bp, Homo sapiens
gtgcccttttgacctccacattctcaccacctttttctttgttggataaccaataaatagcactgggctcccagagctcggggccttcgcagcctccatgatcacgatggccccctggtcccactttacttctcaaactgtcttttctcaatcctttgactccaccagacttggtcatccccatgacctggtgttgggtctgatcaccccaacactgctgtgtgacaacacctagacacataagccccttatacagcawatttcttcctcccccccttctgaataacaaccttggccccttggcctatagacagactcctgctctcaggaactaccggcaaacctgtcaaagcttcacccaataaaagttgtgtgtgctactgccatcctgtggacatctctttttctttgcccaggctccaaagtcctcaaatgatgtacaaacaacaggatcacactctccatccaaccccacaaacactgacttccaaggacacaaacacttccatttccatgattatcttcccatgtcatacaagtaatacacttacttccaattttatgg

SEQ ID NO: 502664 - DNA, 565 bp, Homo sapiens
gtgcccttttgacctccacattctcaccacctttttctttgttggataaccaataaatagcactgggctcccagagctcggggccttcgcagcctccatgatcacgatggccccctggtcccactttacttctcaaactgtcttttctcaatcctttgactccaccagacttggtcatccccatgacctggtgttgggtctgatcaccccaacactgctgtgtgacaacacctagacacataagccccttatacagcaaatttcttcctcccccccttctgaataacaaccttggccccttggcctayagacagactcctgctctcaggaactaccggcaaacctgtcaaagcttcacccaataaaagttgtgtgtgctactgccatcctgtggacatctctttttctttgcccaggctccaaagtcctcaaatgatgtacaaacaacaggatcacactctccatccaaccccacaaacactgacttccaaggacacaaacacttccatttccatgattatcttcccatgtcatacaagtaatacacttacttccaattttatgg

SEQ ID NO: 502665 - DNA, 565 bp, Homo sapiens
gtgcccttttgacctccacattctcaccacctttttctttgttggataaccaataaatagcactgggctcccagagctcggggccttcgcagcctccatgatcacgatggccccctggtcccactttacttctcaaactgtcttttctcaatcctttgactccaccagacttggtcatccccatgacctggtgttgggtctgatcaccccaacactgctgtgtgacaacacctagacacataagccccttatacagcaaatttcttcctcccccccttctgaataacaaccttggccccttggcctatagacagactcctgctctcaggaactaccggcaaacctgtcaaagcttcacccaataaaagttgtgtgtgctactgccatcctgtggacatctctttttctttgcccaggctccaaagtcctcaaatgatstacaaacaacaggatcacactctccatccaaccccacaaacactgacttccaaggacacaaacacttccatttccatgattatcttcccatgtcatacaagtaatacacttacttccaattttatgg

SEQ ID NO: 502666 - DNA, 625 bp, Homo sapiens
ggggtttattactgcatgcaagctctacaaactcctcccacagtggtacaacccctaacagaaacctcctcctggggttgcctagttgctcacatgtgctgcttgtctggagagcagctcagcagggtctctgagtctgcagaagaggaggctgttggagacctcagggcagaggttgctgctgaggactctggctcatgatagcctcagctgtacttcagtcccacatgttaaggccccattaggtgaaaaataaatgattccaaaaactgagatgaaataccaaggagaatcagagtacaattaaggctgttacaaagaagcctcaaaatatggtggactaaatgtgacatggtttctgtgtctgttgcctgacagtgcagaggcaggtgggtggctttggtggtgtcggtggctcttctccaagaggtcrctcagatgggcaggagacacgaccaccctcagacacagccttcctccttcctcagagtcacttgcccccatgcccatcctcgacagcatgaagtggaacgactagagagaaagctgttttcttctaaagaccaaagaaatctagagtttcccatcagggataaatgttcttttactttaagcacgcattgga

SEQ ID NO: 502667 - DNA, 604 bp, Homo sapiens
tgagtattgttcaaattctagaatatttttcctcaggaaaagacaacaattatataacagcatggcattcccaatttttggaataaaatactgaaaaataatttaaactgcatcttcttagcgtagttattccattttaatttctattatcaggatacttgaagaacttcactgtgagatcaagctggtattgtgggtggttgttggaggcygaaagagcgagggttgtgatcaacttggtgtaccactggaggctatatgaataaacagcaaactgtttgtcataaatgcagaatgctggcaaactgacaaactgcatctgccacccagaaggaatgctgagggcagtcacacccccaagcgcagtgtttcttgcaattaggtacatctgaagccttttagtaataatatgaacctgttatcaattaagcagctgaccaatcattacctcctcctccctgctcttgctacccaataaacagaaagggctgtggaagctcaggggctgcttttgatcactagaagcagggagctctcttcttcttgcccggttccccctccctttaaaacagtttcttttgtcttaagttttcatttctatgtt

SEQ ID NO: 502668 - DNA, 320 bp, Homo sapiens
gcttacaggaactactttatcgtaaaatgtgtgttaatatgtgtcagtaccaggtggggaaaaaataatggtgttatccaataataacaaaagaaaaaaaaaamcacccacaattaaccccctcccacagccctgttaaccagtcccaaacatataaatacatcttgctgtagctagagaaaagtactcctggcttttattaaacctgcagtggggagagattctgcaagcaatacagaaaaggctgcacttgctcccaaggaatttgactgtttatacttcataatgataagcttaaaaagcgacctggaaagagaggg

SEQ ID NO: 502669 - DNA, 505 bp, Homo sapiens
cttttaaaattcacgtgtgacaagcagaaaaaactcgtggaggcagtttcaacatttaacctaagtgtacttagcaactacacttaatagctttttaaaaagcctcgtttttaaaaaaagtggatctttctttgcagagtgacttaaaatacatcatcatagtcttattaattaaacatgttcttatcagaaaaaagcrtctcgaaagctagtatatatgcttaattaagctgtatgcaaccatcagtccatatcttgaattaggctacatgtgaggccctgatttgccccattctttctgctacccagaacagcactgctcactgcctaccagtgtttccagcaaagatataaagttctacatgtctaaacgtttttgccctgatatcaaaagcaaagcaaaacaggtcttctccattcccattttggttaacagcatcaccatctgcccactggcctgatccacccagaagcctgtcttcttttttgaacttgaaatactcat

SEQ ID NO: 502670 - DNA, 470 bp, Homo sapiens
tgtttattttgaatgacagcagaataatgtcagttttgcttccaatctgttagatattatgtatctccaagagttgcttatcaaatgctaggagtctyaaacctaatgacaaagacactccatgtttttattgcctggagtggtaaaaatgactgctcgtacagttatgctgtcagtcagctcttctgattccttgacatgccgctctatccagaatctcaatctgtgcctttttgctgattcccctcccccacaaccatctccctgtcttccagtctgttttcggagccctgggggaggcccttattatagcttagtaaccagtttatttcaccttctcctcttgtgatagagcttccctgcatctcataatcactattagaagacacaggatttcattgtcctaagatagtcaaacctagggggcttttgattctttgaaagtcacaaaacatgggggatcttttcag

SEQ ID NO: 502671 - DNA, 522 bp, Homo sapiens
ctgggactacaggtgcctaagtaaatctcttttcaaagagaatacagaaaggttttctgaaggaaatgggctataaaccaagggaaggattttagtaaataggacagagaatgtttcagactgggcacatcagaaataaaggtgaggtgagggggatgagagaaacctgagctgtgtttagtaaactctagggtaggatttggacacctgtaggagagaaagagggagaccagagaggaatctgctgcaatagctcaggaaaggtacaagaagaatggttgactgtggggactcagaaagaagggatgaagrtaagaaatcctgtgaaggtaaactgacccaatgaggcagtcaactgagtggaagtgctgggaaaatggccaacgctatgacccaggctccaggacccagaaaagggcagagcctttaacgggaggggacaggacagggctaggggttcaggcatgtggcttgggagatgctggatgatcgctcagggggaactgcttctaaggaccttcc

SEQ ID NO: 502672 - DNA, 624 bp, Homo sapiens
gtgtcttactgtaactcttagaagttgttaaagtttactattgagcgcaccactaaagactagggaatttttctttttcttttctttctttctttttttctgagactgagttttgctcttgttacccaggctggagtgcaatggcgtgatcttggctcactgcaacctctgcctcctgtgttccagcaattctcctgcctcagcctcccaagtagctggcattacaggcatgtgccaccacgcctgggtaattttgtatttttagtagagactgggtttctccatgttggtcaggctggtcttgaactcccgacctcaggtgatccgcccacgtcggcctcctaaagtgctgggattacaggcgtgagccaycgcatccggccgatgggaatttttctatttgaaagccattgactccagaaggaagtgtaggggagctggctgaatcagatggttacttttttttttttgaagcagaatctcactctgtcactcaggctggaggacagtggtgcgatctcggctcacagccacctctgcttcctgggttcacatgattctcgtgcctcagccatctgagtagggaatacaggtgtgcaccaccacatccggctaatatagatg

SEQ ID NO: 502673 - DNA, 656 bp, Homo sapiens
gctggcaacctggagccccagggttagaacatagccctgtatggatgtcaaacccatgtttttctcactatactatttggtctcattcaaattttacaagtggctaaccgaaaaagacatacctaatgaagagacagactattaggatttaattgtgtcctctcaaaaaagatacattggagggccgggcgcagtggctcacacctgtaatccccacactttgggaggccaaggtgggtggatcacctgaggtcaggagttagagaccagcctggtcaacatggtgaaacattgtctctactaaaaatacaaaaaattagccaggcatggtggcgcgcacctgtaatcccagctactcgggaggctggggcaggagaatcacttgaaccctggaggcagaggttacagtgtgagccgagatcacaccactccaacaagacggaaactctgtctcaaaaaaatgaacaaacaaaaaaaccaaacatatgttggaatcctaacccctagtacctcaaaatgtgaccttatttggaaactgggtctttaaagaggtgactaagtgaaaacaaagtcattaggatgggccctaatccaatatgactggtgtccttatcagaagggraaatttgcatacagagacagacatcacccaggga

SEQ ID NO: 502674 - DNA, 623 bp, Homo sapiens
ctgggtgcggtctataaccccgcactttgggaggccaaggcgggcagatcacgaggtcaggagttcaagaccagcctggccaatatggtgaaaccccgtctctacaaaaaaatacaaaaattagccagccatcgtggcacccgcctgtagtcccagcccaggagggagactgaggcaggagaatcgctggaacccgggaggcagaggtttcagtgagccaagattacaccactgcactccagcctgggagacaagtaagactccctctcaraaagaagaacagaaaaagaaacaatgccaggtgtggtggtgccgacctatagtcctagctacttggtaaggctgaggcaggaggatcactcaagtccaggagttcaagtccagcctgggcaatgcagcaagaccttgtttcaaaaaaaaagaaggaagaagaaagaaggaagaagaatgaagagaaataaaacaacctaggatcacacagtaaaaggtaaaagaacctcagcaaaacaagaacttcacttacagactttcccttttattacctcatacaaaatgatgaataatcaaacctatatggcagcatgtactaagaatgattagtccccatatgaaaccaaatgctc

SEQ ID NO: 502675 - DNA, 486 bp, Homo sapiens
gcttggccaacatggcgaaacyctgtctctagcaaaaatgaaaaaaaattcgctgggcatggtgacgcacgcctgtaatcccagctatttgggtggctgaggcatgagaattgcttgaacccaggagatggaggttgcagtgggctgagatcacactactgcactccagcctgggtgacagagtgagattctgtctcaaaagaacaaatcttgacattaggcactttctttctgagtaacccagagcttgtgacttggaaaagagccaagatatctatggttgtgtgaagccctgtgccacctgctcagaatgccacataactccttaactgatagtagtaaggggcccacctttatcaacacaaacaccaacacaggaacaaagtcatccgctccagggacagagtcctcattggccaggctcaggaggttcataatcgtagagcacattctcaggatgcactgcactttgtcccggggggtttt

SEQ ID NO: 502676 - DNA, 391 bp, Homo sapiens
tagtaaactcaatgaaagtgtatgttaatgggctatttcagtatatggatagaaatgaagaaagtttaataccctacaaaaattaaagcaagccattattaaatttrttcatttactaacacatttccacttagtgtattatgatttacttgcaactcattttaggacaatatttgattgtacttagcagtcttctagcacaaaatgcaatccaaagtagagtttgttcatgagctagagttctatagaaaatgcctgtgcctgtgcatcaggcagctttgatattggtcctttctctgctggttgtgtttgataagctacctctaaggacctctaagctactgctagggacctctatgatccctttttagctctggcattctgcaactct

SEQ ID NO: 502677 - DNA, 603 bp, Homo sapiens
ctgctgaaatagttcgagaaatcgaaaatatagagaagactaggatgcgtcttgaagctagtaaactcaatgaaagtgtatgttaatgggctatttcagtatatggatagaaatgaagaaagtttaataccctacaaaaattaaagcaagccattattaaatttattcatttactaacacatttccacttagtgtattatgatttacttgcaactcattttaggacaatatttgattgtacttagcagtcttctagcacaaaatgcaatccaaagtagagtttgttcatgagctagagttctatagaaaatgcctgtgcctgtgcatcaggcagctttgatattggtcctttctctgctggttgtgtttgataagctacctctaaggacctctaagctactgctagggacctctatgatccctttttagctctggcattctgcaaytctatgattatacttatggaaatgttaagtaattataagaggataaattaagtaatttgaggatggaatattctcttgagctttggagggaatcagagacctaaaattcttcactgttgccttccactagcttgatgccccaaacttgaagacagga

SEQ ID NO: 502678 - DNA, 684 bp, Homo sapiens
tgtgctaatagaatgcaggcctggagcttctggagccatgtttgcctctcatggggggagcctgcatgagcgttaagtcgacactgagggaagaagatataaggcattaagaaagagtgattatggccaggcgcggtggctcacgcctgtaatcccagcactttggaaggctgaggctgggagttcacgaggtcaggagttcaagaccagcctaaccaatatggtgaaaccccgtctctactaaaaatacacaagaattagctgggcatggtggcacacgcctgttgtcccagtagggaggctgaagcaggataatcgcttgaacccaggagacagaggttgcagtgagctgagattacaccactgcactccagcatgggtgacacagttagactccgtctcaaaaaaaaaaaaaaaaaaaaaaaaaaaaagaagaaagagtaattgagagggaagaagagagaccacctggatcaagccatacctgaatacctacctcaggtcttttcagttacatgagctaacacactgcctttcttgcttaggccatttkgagttagctttctaattcagcactttgaaccaaaaagtcctaatacagttccctcccttaaaagttcttcctgtctgatctcaaagctcttcccatctgcagaccttgacttggactgggcattcctctgt

SEQ ID NO: 502679 - DNA, 515 bp, Homo sapiens
gctgacactcacacagggcttagtagttgccaggcacccttctaggcattaaacctagaataactcctttaattatccctacaaggcaaatactaatattatccccattttgcagatgagaaaattgaggcacagagaggtcaacaacttacccaagttaacatggattaaaatctgaactttttactaaggcatggaactctccacttctggggtctytgggtctttgcatggctgcctctctctatcagttgggtctctgcccatatatcacttcctcagagggagcctcccagatcatacaatttacagtgtcccctcctctgtccattttatcacccttttttattgtttttacatcagttactgttttatgcaattatcttactcatttttttacaaactctctttttttttatcctggctccatgctcacccccaggctgccagctcctggagaacagaggccatatctgtcttactcacctctgtattctagcacctggtacaagtgg

SEQ ID NO: 502680 - DNA, 542 bp, Homo sapiens
taatatgggctgggcacggtggcttacgcttgtaattccagcgctttgggaggccgaggcgggtggatcacttgaggtcaggagtttgagaccagcttggccaatatgtgaaaccccatctctactaaaaatacaaaaaaattagccgggtgtagtggcacatgcctgtagtcccagctacctgggaggctgaggcaggagaatggcttgaacccgggaggcagaggttgcagtgagtcaagatcacaccactgcactccagcctgggtgacagagcaagactccatctaaaaaaaaaaaaaaaagatgttmatataaaggaaagctcgactaaggcatataggaaatctctactatccttgcaacccttctataaatctaaaattacttgaaaataaaaagttttaaaaatatatttttaaaagtgtatgtatatatagtaaaatcttgggctctaagtagcccaagattttataaatttgggctatttagagataagggtcccaaaagtcaaacgcatacttgcagttacatgcaagatt

SEQ ID NO: 502681 - DNA, 542 bp, Homo sapiens
taatatgggctgggcacggtggcttacgcttgtaattccagcgctttgggaggccgaggcgggtggatcacttgaggtcaggagtttgagaccagcttggccaatatgtgaaaccccatctctactaaaaatacaaaaaaattagccgggtgtagtggcacatgcctgtagtcccagctacctgggaggctgaggcaggagaatggcttgaacccgggaggcagaggttgcagtgagtcaagatcacaccactgcactccagcctgggtgacagagcaagactccatctaaaaaaaaaaaaaaaagatgttcatataaaggaaagctcgactaaggcatataggaaatctctactatccttgcaacccttctataaatctaaaattacttgaaaataaaaagttttaaaaatatatttttaaaagtgtatgtatatatagtaaaatcttgggctctaagtagcccaagattttataaatttgggctatttagagataagggtsccaaaagtcaaacgcatacttgcagttacatgcaagatt

SEQ ID NO: 502682 - DNA, 457 bp, Homo sapiens
ccatgtggtgctcccctcaatggccatagctgactaaactctaaagagaggtcatctgactcaagagcaaccaatctacagaccagccagcaagataggatttataatccaatacasaaagttgaactggctcagtcaagtttctttctcaggaatttgcatttgggaagttgcagaacttcaagtgattttttttcttaggtatttgaatttgaataatcatgtagattcacttctgggatggccattacaggactatgtgcattccaggttttacaggactaaggaaggccgttttgggaaaaaaaaaaaaaaagaggagaccaaaactgcttcatgggacagaagggggctggaaatgaaagcagtctagtccacagagctagcattgttccagctctcttgaggtatggttgttcattttctcctggacttatgtgaaagttcccaatagcct

SEQ ID NO: 502683 - DNA, 570 bp, Homo sapiens
atttatgatttcagtctaggaattgtaaatagccattcctttttgtttggaaaactgcctggagtaacaaactcattagagccaaagccaggtacccagtgaaggatatttgaagatagtctagaagtgacaaggtaggatggtggaacttgggcaagtgtaagcactgatggaggaatggtgagagatgaatcttgacgtctttatttgcttaatttagacctcaaaacatggatgctttctactatcgcttgacacactgttyctttagataatttttctaaagttctgagaactattttagacctaacgggttaaacttgtgatgtatagtaacgctcttatcatggaaggggtcaggaaactgaggagacctgggttttgtagtacttactatgcatttcaggttccttctggttttttgggttttctgatttcattcagaaattaaaagtgtgtaagctttttatatgtgttatgctttaaaaaaaatcttaagccacttctgtttactaacatactttggtctagggtactgggtatcaactctcccaacaaaaacaactgaaa

SEQ ID NO: 502684 - DNA, 616 bp, Homo sapiens
gaaaggtgatgctgggaggctctgagccycacccagatctcctttcctggtagggcacccacgcttccccatccccacactgcccaccaggagtgttggtcactaatggtgtacagtggccccttgtcctcaaatgtcagaagcccactctcccagaaagttgcatgcacacccccacctgcggtgacaccctgcctggcaaggggatggtgcagtggtgcacacaagtagttccagctacttgagaggctgagacgagaggatcacttgagcctgggagtccaaggccaacctgagcagtacagtgagactcagtctctaagaaaattatcttttaatttggtgggagattagaagggattagggggaaaaaaaaactataaaaaaggctcccagagggcagtcaataaaaaaaaaagattaaaaagcacggtgcaagatggatgctaacagggaagatggtcatgacagatagagaccaactgctccaagtggctaaaatgcagaaatgggctatttctgttacttgggcagattcccagtctaaggactggtcagtcctgattgcttctccagagccctcaccccacggcacccccatctcaggctgccgggg

SEQ ID NO: 502685 - DNA, 532 bp, Homo sapiens
ttctttccacagggccttggtccttgcctgttttccttccatctaccacatttcaccagatacatggtactctccatggcagttcacaaactggcaaggagggggcactctcccaggagtgctagtggtttaatttatttatttaaatatttcccaatggccaggcgcagtggctcatgcctgtaatcccagcactttgggaggctgaggtgggcaatatggtaaaaccctgtctctactaaaaatacaaaaattagctgggcatgaggatgtgctcctgtaatcccagttactcagggggctgagggaagagaattgtttgaactcgggaggcagaggttgcagtgagccaagactgaaccattgcactccagcctgggcagcagagcgagactctgcctcaaaaaaaaaaaaaaaaaaaaaaaaaaaaaaaaaaaaaaaaattsggaacaattttttatttctaattttagatgtaatgcctatgtgttataaaatttaaacaaaacaatataaaaaggtaaaaagaaac

SEQ ID NO: 502686 - DNA, 588 bp, Homo sapiens
tatgaaccactacatgtgattaacttcgacaggtagctcctggccggctggcaagctgaagagcattttaagtacaaataatagttctggggtatgtcttgagtgatagaatgatgactgagtggaacagattcccttaattttagctcatgaaaacacatttggtttccttcagaagckgggatcctaccaaaaaatcaattaacaaaacttctcagagatcttccttgatacttggaagtttggcttttattgcacttatattaaatatgggaccaccctggggggccagactcattcatctcagtcttcaaagggcctatcatgatcatttgcaacaatttaataataatattagaaattttcaccatattttcactattgctgcaaagtttagaatgtactcaactatccattgaagcaggtcttattgacaggtggcaaaactgacttagagcagtgaattaactttctagtaacacacaccaatgagtggcagagtagacacctgtactcaggtctcatgaccagaggtctttctaatgaatttttctgaaatgggattgaatagggtaaaatgtctcagtc

SEQ ID NO: 502687 - DNA, 606 bp, Homo sapiens
tgaggattctaagtttattttttccacagtaaggcataatataaagtgacggaacaaatttaatactgctgggtctgattaaaatttataactttgaagaaataaacagatttgcatttctccaagattatgttttccctaagtggtagtttgtcaacagaaagctacactsaataaaatctcagagatatccaacttccaatacttgctgctttattcaggtctgatctgaccatctggaagaatttcattaggttttaattatcatgcactaagaacataagcagagcattttcaaagaggagccttcatttcatgctgagtctgaaaaccttatcataggaggaatgtttgagagaataggggtagtatagcctgaagaagtggtctcaaggggccctgttcactgtcccagacaggatggacatggacaagaaagaagcagaccagttttatgtggacagagccagaatcaaacagcaagcttcaaaatggcaaatgtcagcccagcttgaaaaaatgaattgtctaaaagtgaaaaaaaaaaaaaaacccacaaaacacacaaaaaaactgagaaatttctctgatgtccccttgttataa

SEQ ID NO: 502688 - DNA, 652 bp, Homo sapiens
attctaacaaactttggaaatgggtactgtccttaccttatagatgaagaaacaaggaagtaaaagagcccaagttcagacagcaagtagaggacctgagatttaaacccagattagtctagctctaaaattcacactctttccactgtgccactcagcagttgatgaaaatgcaaaatttcgtgcaaaatgagaaggcataaagaattttttctgtgtaacatggtggggagggcactcttccttctttttgattcagggagtgtgtataccccagccagaagatgtaaatggctatttgtttttgtcatctgataaacatatggtattgtgtatttttgtgtgatattgttttgtgtattatggttccttgttcccttaagtcccaggtgggcaggtgtcttctgctgggaatcaagaaataggtctttactgagagtgttgttatgggctgaatgtttgtgtcccccaaatttatatgttgaagccctaacctctaatatgatggtatttggaggtggggcctttgggaggtgattaggttgagatgaggtcatgagagcggggccctcacgatggtgttagtgtcctcataagwagagagaccacggcttgctcactgtccttcacatgtgaggacacagagaaggca

SEQ ID NO: 502689 - DNA, 647 bp, Homo sapiens
tttcattactaccctcactgggggttctctgtgacttctcccagggcctgttagccatcctgattacttttcctctcccacagggtgcctttgaccttaaagttattatttttcctctttgggcatctgttttctcatcagtaaaataacatgaaagtaatctttaagtttctttctagctccaatattctgtgatgccattgtccagaatctctactgaatgggggagcaaattatgtatcacattttttgttataaaaatcaaattggtttattgaacagattctggagaataaaaccttcrttcaagcctcagccttagtggtcatattagtattgtggtctctgtgggtttttaatcaaagaaaactgtggacataggaatggtatcatttgtcagtgtaagctgcaatgaagaaatgcaaggtagaaaaagatgactgacatcattagacccactttgacaagtgtgatattattctcaaagtactcccgggcatgtgagttatttttgtctcctgtgggtcagagtctggggcttgttctcctcccctggtaagatagctagtttaatgatggctctgccatcactgaagtacatttggtcttaataatgggcttaaatttttcttggttctgttgggaac

SEQ ID NO: 502690 - DNA, 647 bp, Homo sapiens
tttcattactaccctcactgggggttctctgtgacttctcccagggcctgttagccatcctgattacttttcctctcccacagggtgcctttgaccttaaagttattatttttcctctttgggcatctgttttctcatcagtaaaataacatgaaagtaatctttaagtttctttctagctccaatattctgtgatgccattgtccagaatctctactgaatgggggagcaaattatgtatcacattttttgttataaaaatcaaattggtttattgaacagattctggagaataaaaccttcattcaagcctcagccttagtggtcatattagtattgtggtctctgtgggtttttaatcaaagaaaactgtggacataggaatggtatcatttgtcagtgtaagctgcaatgaagaaatgcaaggtagaaaaagatgactgacatcattagacccactttgacaagtgtgatattattctcaaagtactcccgggcatstgagttatttttgtctcctgtgggtcagagtctggggcttgttctcctcccctggtaagatagctagtttaatgatggctctgccatcactgaagtacatttggtcttaataatgggcttaaatttttcttggttctgttgggaac

SEQ ID NO: 502691 - DNA, 616 bp, Homo sapiens
tgtcagtataatatctaccttgagacagtctgaatgactggctgctaagagattcagtgaggcagcagagaaggcacagggtagggggaggtgcctggttgggtggctgctgtttgcagggccagctaggcactatgtatcagaaggggaccacttatatgacggactttcagggtcatcaggaaaagcccccccatccaccaaaacaaaaacaaaaaaaaaccacacacctcactgacwactgtagtttctatgtaatgtgattggtttagactccagcagatctaggctggattctggatggcaattacaagctgactaacctgtagcgtcagttttctggcttgtaaaatcaacacaacactgatctcaaaatctacatgagattaccttgattaaatgagacaatattaggaaaagcacttaggcagtatctcatacacagcaggcattcaataaccaataatccctttcttcctttatgttaggtacagccttctctagtcaagtttcctataacataaaagcctttgaaatttaaaatactgacaataccacgttgctatggactgaatgtttgtgtcactcccaaacacatatattaaagccctaatcc

SEQ ID NO: 502692 - DNA, 593 bp, Homo sapiens
gaatctggagaaagctaagtacagcaaaagaatgatcagtatttatttgcaatcaagttcaygatagggtgcaaatgtagtcatactctggccaaattgctaaaagcagagtttcctgctgcctggaatcctttggacctgggccaactttccaaacttggtcttttagctactagtacatccaggtggtgggggtgggcaatatcctttaaattaatactatttacttcatttatttatcctaaaaaagtcaaactaaaattggtttttagtgattgcaacaaaatctctgtcatgagtcaaaatgttgtttggaaaagcaacctacagtcaactggatacatatttactaattatttaagttccaattcaactattgattttcataataattagtggcttggctctattcagtgtttgatgggcttgtatgaaggcctatagtccaagagaattacattattcaactttatatcaaagtagaaccatggaccaaaagttttcctgagccaaattattaaagaaaatgcaaacatcaaattcagttcactactggcttctcctgatctggaatagcataggccttgcaccct

SEQ ID NO: 502693 - DNA, 489 bp, Homo sapiens
taatatttttaaatatggtttttgattacctcgttttcttcaaaattcttcaacaattaagatatagaagaaaattccccaaatcatggtttggcatgcatggttaaaaacatcttttcaaacttgcattcccagccttatttgttacratctatgacactgagtaggacatgtattttctcaactccattattcagtttgccaaactgtttaagcttgaaatactctgcctccaactccctgtctcacagcccaactaaacttcaggattcaactcaaagactagctatgtcattaatccctaatttccccagatgcatgcattctctacttctctaatgcctagagcccttaagtcacatttcaactattttctacttatcatgtgtaaccttgtattgaaggtattcccagataaattataaaatacctgatggaagagattaaccgctaactattcttggcctcctctcttgtaactcttaaaac

SEQ ID NO: 502694 - DNA, 628 bp, Homo sapiens
gctgcaagtttttcttcaaatagagcttacattttagtaattgggagaaacaaaatacacatataaataaataagtattaagatactgttgtgagtaatacatgttaacttgaagacaaagaaatgtgtctttaagatgttgtattattggattacattagtgrgtcacaggaacccaaatcaaactaaactaaactaacaagttatggaactttattggcccgcatacaaaaactacagaaaaggtagagagggaaccagctacagggacccctggatccagaaacccaaacacctctgagactttcttgcttattcttgcttctttcttgcttacatactggtataattctctgataccagctctgttacttcagcatcaattcaataactcctcagagaagaactctaaacaacctaactcgcattaactgtcccatcctctataactatggtgctaagggagcataattggttcataacgagatacatcacagccatggctagggcaataaaagcattgttaatcataatattgagagtttaccatgtgtaaaatatagtacaattatagaaatgtgtctattaaaaataaactctgtaaggactactatctcctctttactga

SEQ ID NO: 502695 - DNA, 628 bp, Homo sapiens
gctgcaagtttttcttcaaatagagcttacattttagtaattgggagaaacaaaatacacatataaataaataagtattaagatactgttgtgagtaatacatgttaacttgaagacaaagaaatgtgtctttaagatgttgtattattggattacattagtgagtcacaggaacccaaatcaaactaarctaaactaacaagttatggaactttattggcccgcatacaaaaactacagaaaaggtagagagggaaccagctacagggacccctggatccagaaacccaaacacctctgagactttcttgcttattcttgcttctttcttgcttacatactggtataattctctgataccagctctgttacttcagcatcaattcaataactcctcagagaagaactctaaacaacctaactcgcattaactgtcccatcctctataactatggtgctaagggagcataattggttcataacgagatacatcacagccatggctagggcaataaaagcattgttaatcataatattgagagtttaccatgtgtaaaatatagtacaattatagaaatgtgtctattaaaaataaactctgtaaggactactatctcctctttactga

SEQ ID NO: 502696 - DNA, 628 bp, Homo sapiens
gctgcaagtttttcttcaaatagagcttacattttagtaattgggagaaacaaaatacacatataaataaataagtattaagatactgttgtgagtaatacatgttaacttgaagacaaagaaatgtgtctttaagatgttgtattattggattacattagtgagtcacaggaacccaaatcaaactaaactaaactaacaagttatggaactttattggcccgcatacaaaaactacagaaaaggtagagagggaaccagctacagggacccctggatccagaaacccaaacacctctgagactttcttgcttattcttgyttctttcttgcttacatactggtataattctctgataccagctctgttacttcagcatcaattcaataactcctcagagaagaactctaaacaacctaactcgcattaactgtcccatcctctataactatggtgctaagggagcataattggttcataacgagatacatcacagccatggctagggcaataaaagcattgttaatcataatattgagagtttaccatgtgtaaaatatagtacaattatagaaatgtgtctattaaaaataaactctgtaaggactactatctcctctttactga

SEQ ID NO: 502697 - DNA, 628 bp, Homo sapiens
gctgcaagtttttcttcaaatagagcttacattttagtaattgggagaaacaaaatacacatataaataaataagtattaagatactgttgtgagtaatacatgttaacttgaagacaaagaaatgtgtctttaagatgttgtattattggattacattagtgagtcacaggaacccaaatcaaactaaactaaactaacaagttatggaactttattggcccgcatacaaaaactacagaaaaggtagagagggaaccagctacagggacccctggatccagaaacccaaacacctctgagactttcttgcttattcttgcttctttcttgcttacrtactggtataattctctgataccagctctgttacttcagcatcaattcaataactcctcagagaagaactctaaacaacctaactcgcattaactgtcccatcctctataactatggtgctaagggagcataattggttcataacgagatacatcacagccatggctagggcaataaaagcattgttaatcataatattgagagtttaccatgtgtaaaatatagtacaattatagaaatgtgtctattaaaaataaactctgtaaggactactatctcctctttactga

SEQ ID NO: 502698 - DNA, 640 bp, Homo sapiens
gcattatttcttttccccactgagagactgtcgtaacacacataggatgctggacacagcaacatgggagccaggttctgtactcttctacttaggtaaacttctgtcagcccgcagaagtcagtgaacacaattatattaaacatgtgtaccatggacccattggtcagaagccatattaaatgcagtttcatgcatggttagtcatccataaacatttctgcttgtaataataatgcggtcagaagtaggccttgtggggctgaaaagaggttactaaacaaaagtattaaggacacagtctgtgcagtgtgtcacttggtcaactggaaagcagtgacgacttttcttatacttgccagggtggaattcttctcagtgtattggtgtgaggttctctccggaggcattgcaatctgtttmtaactacttggcaacagcttttggaataaggccaaaaagattgtcaaataatacacagagtggaaatgagctgtttgaatttttcagccatccttccttttcttagggccaaagatgtagttttataaatctccttaattagtaatttctaccagaatgagttagaattattacatggaatttagctcttctgaatgatgttcagtcattaagttat

SEQ ID NO: 502699 - DNA, 530 bp, Homo sapiens
ctgcctagggcagtgattcatctgtagagcactgtgatggtttataaactctggagccagactgcctgggtttgcatactgactctaccacttactagctgcgtgacggggagtatcactgaccctcttcaaacccatttcttcatcagtaaattgggataaaaataacactgactcacggggttgttttgtggattaaaggaaacatcatgcagagaatgcttagcacggggactgccacaaaaacagccccccgtaaggtatggttggttggtattgttttcccataacagacactcaggaaaccttagtcctcattattaactatcttcagatttgggatttttctcttcatctctttagggaacagaataaaaaatgaaaaataataatgaggttttgggtagacgaagggaaatgaaagcaacttttgtttataatgaatgttcaggttacaaaagtaaggaacgcagattctccggaacayaaaatcataaaatattatatttggatggtatttggctgtttac

SEQ ID NO: 502700 - DNA, 520 bp, Homo sapiens
actccttggcacttgctcccaaatggattcatccttttattcattcagtctttcatccatccagtacttactgaactcccatatttgccaggcatttggtgctagrgatagagaggtgaataagaccaagttttgcccttatgagagcaacagtctaatctagggagatgacagacagcaaaatcaatgaagagataatgaagggccacctagggatcattcctattaagctggtataagttggtttaaactagataatgaaagaaggtctttctgaagcggtgcctttgaacctgagatttgactgacatctctgcgaagatctgggaaagtcttcaggtggagggtagagcaggtgtaagaccctaggaaagtgggagcttggtagtatttcacaaacagtgaggaggtgggagtaaattcagcactttatgaagttttgtgcattcttcggtgttgttggcatcagtgagtgtgcgatagctagaaacaggtcaataaattattcatgatcaaaatg

SEQ ID NO: 502701 - DNA, 410 bp, Homo sapiens
gaggcccagggcaggggcagggctatctctgkgtcccacgcatttcagggagtgagtgttgaatgactgcatgagccagggtggggctcagctcagtgcagtgactacagagaagcttcctgaaacacagctaagtagccagagaacaggggctccagaagcccttcagctgtgagtgggatggggctggtggcaaggccagggataggatacactgacgacattagcaaagacctccgaagtgtttcctctgtaccaggctctgcactgggcatgggtgatatagtcatggccccatttcataagactcgaagctcattttcagggcatagagggaagagagtgagaagggtattctaggccgagggaacagtgtagaaaaaaaagcatgaaggtgtgaaagagcccaa

SEQ ID NO: 502702 - DNA, 510 bp, Homo sapiens
tgtaacagatggtcaatttttcaaatactctgtatgtgcagaaaattgtatattctctgttgcatgtaggggatgtgtatatacagtctttgactgtcccatctttatccattccaaccagcagtgaatactgttaggaactctgatgataacctggttcattctcctttttaggtgacctgcattttctctctggaagtttttggaattttctctttgcattggtagtgttaaatttatgaaataatgcatctggttggaagtttgtccttatctcccatgattgacactctcagatccctttamattttaggtctttcaattttttaatatagtatatttatgtccactgtttctataaatatttcctccaatttgtttatcctttcatctgggatatctattgcctggatgttggcatttctacttctatcctccacatctcttatattttattttctcgtataccttctatttcttgatccctttccaaccgcctttatcaagagt

SEQ ID NO: 502703 - DNA, 611 bp, Homo sapiens
tacagcacccccagcctgcagagtcagagacaagaaagcagaacaaggcggttcctcctccttcctccccacacacccacgcctgccacctggccaaggagacgcctctcaaagacactggtgccttggatgtgcaaagaggaactgcctgtgagtgcgaagatcttgcagccccagacttctctcaatgaggctgagctggatcagggtgaggagaatagaggaaagaggcttggcaacccttgggaggcttagtctgaaggaggaggcaagacagagacccagaacgcagctgaactagcccaactgtcagtgtcatgcttgagtgaggcatcaggctttggggaggggaaggtacctttcccaagcacctcctgtggctagaggtttccaccagccgttccccaattttcatgtgcaccagaaccacccagagtgcttgttaaagtgcagattgctggccccacccccagggtttctgatacagtaggtctgggaygaggtccaagaacttgcgtttccaaacattcctagatgacactgatgctgctggtcgggggaccacacctcgagacccactgacactatcttggatcctcctacaagcccaa

SEQ ID NO: 502704 - DNA, 401 bp, Homo sapiens
aattttcttaacgtctgtcrccttcttaggtgtgggttctgaattttaaatattcctctttttgaacctgtggagattgtaaaaggctacatccctagtgaaaattggtttgagataattccctggaaaacttttgtcaaggtgtacagttgtcactttggttcatgttagaaccaggagaatgtaatatgtaataatgactaatgcccctttaaaagagcatttctctcttttcttgtctgcagatatttctcatgtctataggtaccgcacgggcaagagccatactttagataaatacaggttttgagtttttttgttttttgttttttgtttttggttaatatactgtctctctcaaaatcaaaaataaaagctaaacacttgaggctgcttataat

SEQ ID NO: 502705 - DNA, 458 bp, Homo sapiens
tcttaacgtctgtcaccttcttaggtgtgggttctgaattttaaatattcctctttttgaacctgtggagattgtaaaaggctacatccctagtgaaaattggtttgagataattccctggaaaacttttgtcaaggtgtacagttgtcactttggttcatgttagaaccaggagaatgtaatatgtaataatgactaatgcccctttaaaagagcatttctctcttttcttgtctgcagatatttctcatgtytataggtaccgcacgggcaagagccatactttagataaatacaggttttgagtttttttgttttttgttttttgtttttggttaatatactgtctctctcaaaatcaaaaataaaagctaaacacttgaggctgcttataatacaagttatatataataggcctgttaaaataaaacatttagacctgtagaagaaggggaatg

SEQ ID NO: 502706 - DNA, 401 bp, Homo sapiens
aattttcttaacgtctgtcaccttcttaggtgtgggttctgaattttaaatattcctctttttgaacctgtggagattgtaaaaggctacatccctagtgaaaattggtttgagataattccctggaaaacttttgtcaaggtgtacagttgtcactttggttcatgttagaaccaggagaatgtaatatgtaataatgactaatgcccctttaaaagagcatttctctcttttcttgtctgcagatatttctcatgtctataggtacygcacgggcaagagccatactttagataaatacaggttttgagtttttttgttttttgttttttgtttttggttaatatactgtctctctcaaaatcaaaaataaaagctaaacacttgaggctgcttataat

SEQ ID NO: 502707 - DNA, 401 bp, Homo sapiens
aattttcttaacgtctgtcaccttcttaggtgtgggttctgaattttaaatattcctctttttgaacctgtggagattgtaaaaggctacatccctagtgaaaattggtttgagataattccctggaaaacttttgtcaaggtgtacagttgtcactttggttcatgttagaaccaggagaatgtaatatgtaataatgactaatgcccctttaaaagagcatttctctcttttcttgtctgcagatatttctcatgtctataggtaccgcaygggcaagagccatactttagataaatacaggttttgagtttttttgttttttgttttttgtttttggttaatatactgtctctctcaaaatcaaaaataaaagctaaacacttgaggctgcttataat

SEQ ID NO: 502708 - DNA, 359 bp, Homo sapiens
gtggtgcctgtggaagagggcccctgccaggaggcaggtgacaaagagaggtgccagtcctcagcccaaaagagctcaagttgggagaagaaataccagactttactctcatcttactctgggaacctgacagaagccagaagacatgggaactccaaagatgaaatccatraaggtcagagcccaggccacaaagcagggtaaagagagatggagagtggatctgcagaagcaaatggagaataacctgcacacaaaccccgtctcagggtggaggctgggacgattatatgagataagatgagagaaatgactagcacagggcccagagcataagttctcaataaatgttagttgtt

SEQ ID NO: 502709 - DNA, 632 bp, Homo sapiens
agagagggtggtgcctgtggaagagggcccctgccaggaggcaggtgacaaagagaggtgccagtcctcagcccaaaagagctcaagttgggagaagaaataccagactttactctcatcttactctgggaacctgacagaagccagaagacatgggaactccaaagatgaaatccatgaaggtcagagcccaggccacaaagcagggtaaagagagatggagagtggatctgcagaagcaaatggagaataacctgcacacaaaccccgtckcagggtggaggctgggacgattatatgagataagatgagagaaatgactagcacagggcccagagcataagttctcaataaatgttagttgttagaatgattcttcttattattattcccattaatatttggtggtgtttttcagtttcagggagatatttttagaatcttggctgaaaagaaccgactttgatctgcaacctagaataattattctactcagaggtgggataggtttgtcagcagttagaaatacgattctagacatatccacaggactaattcataggcttataaaggaacttttgcatgtacattttcacattgcgtctggtgacagtgtaattaagattatgtca

SEQ ID NO: 502710 - DNA, 528 bp, Homo sapiens
atcatcattttgcatttttctcttctactataccctgaggccttggaagaaagctgttttcctgcaagtgaacttaatttactgttttctgagtaatttgggaggatattagacagatagttgtgatcacttctcagagaactccttgcccactggagaagggtgagtcgtggtgggccctggggactgaccatgctttgccgctgctgctggagttggctgacaaggtctcttcttggatctggagcctaccttgactcaagacaggttcctccaaccacaagcccgaggatgcccttctcctgctctctaaaagtgctggtgacactttgtccatgttgaatggtcttcttgtcctatgastccctttatttgacacattctcagcttctgtttctgactaggagctgttaaacttataatccctctttttggttaagaggagaatcactggaacccagctgatgggatcacagggctaaggagtccagagttatttgaatccctgtgtagtccagctaagctgtt

SEQ ID NO: 502711 - DNA, 588 bp, Homo sapiens
gtgcctttttgtcttgacatctctaaaatctgatggaagtgagtgggaaaagctgatgctatatggtttttcttacccaacttggatgtcatgtttactgatatctgattttaaatactcagaggaattttcagacaaaaaaagtctttttgaaaaacatattatggactttaggttaggacaagatgatatagagccatttttttgttcctcccataaattaaaatttctaaatttcataaattaaattctaaatacaactataagcccaggaaatagcacaagaggtatatttcagtccattcaggctcttatatcaaaaaatatcacagacaagatagcttataracaagaaacctttcttttatcacagttctggaggctaggaagtccaagatcaatctactggcagattttgtgcagggtgagtcccacatctatgtgcatagacagctgtcttctccccgtgaacttacatgggagaaggggtgcgaaaactctctggagcctcttctgtaaaagtactaattccatttgtgagagctctgccacctaaaaagccctacctcctaatatcatcaccttggg

SEQ ID NO: 502712 - DNA, 588 bp, Homo sapiens
gtgcctttttgtcttgacatctctaaaatctgatggaagtgagtgggaaaagctgatgctatatggtttttcttacccaacttggatgtcatgtttactgatatctgattttaaatactcagaggaattttcagacaaaaaaagtctttttgaaaaacatattatggactttaggttaggacaagatgatatagagccatttttttgttcctcccataaattaaaatttctaaatttcataaattaaattctaaatacaactataagcccaggaaatagcacaagaggtatatttcagtccattcaggctcttatatcaaaaaatatcacagacaagatagcttataaacaagaaacctttcttttatcacagttctggaggctaggaagtccaagatcaatctactggcagattttgtgcagggtgagtcccacatctatgtgcatagacagctgtcttctccccgtgaacttacatgggagaaggggtgcgaaaactctctggagcctcttctrtaaaagtactaattccatttgtgagagctctgccacctaaaaagccctacctcctaatatcatcaccttggg

SEQ ID NO: 502713 - DNA, 457 bp, Homo sapiens
gtagggatggtgtctaacaacaatataaatgcatgctaagacttcaggctgtggatttatgctaggaatacattggaaagattgcccggggagscttacattccagaagcacacaaggcgacatgaataaacctatcgatgaagtaaggcttgatggtgtggtggcaggaggacatccttggtgaaggaaggtcattaataagttttaaaaatataatgtacctttatgctatgattttcataatatgagctaacattattaagcaagtcccagtcttcataatcggctctcctcatcagagaatctaactttattttcatgacatatcttgtcacatttagtaaaaggcttttgtgtgtgtgtgggggggtggttatttgcttatagttatggtgttgcagttattgactgagattgttcaaccttgaaaaaacggtcaaatgaactaattttgtc

SEQ ID NO: 502714 - DNA, 595 bp, Homo sapiens
aatagaacaacctagtgttgcttggtttactttgtatgcctttttctatttgcataaaccctgatctgattacaaacttgtatttacaccaktcccttgactccttccaactcaaagtatttattgtccagttaaaacatttatggtcatataagctggcttatctttttttctttgatttttttttgagtcagagtctcaccctgtcgcccaagctggagtgcagtggcccgatctcggctcactgcaagctccgcctcccgggttcacgccattctcctgcctcagcctgcaagtagctgggactgcaggcgcccgccaccatgcccagctaatttttttgtatttttagtaaagacagggtttcaccatgttagctaggatggtctcgatctcctgacctcatgatccacccgcctcggcctcccaaactgctgggattacaggcgggaggcactgcgtccggcctctttttttcttttttttatttggaatagcctctcactctgttgctctagctggagtgcagtggtgcaatcagggctcactatgccttgacctgggctcaagtgattctcccacctcagcctcctga

SEQ ID NO: 502715 - DNA, 595 bp, Homo sapiens
aatagaacaacctagtgttgcttggtttactttgtatgcctttttctatttgcataaaccctgatctgattacaaacttgtatttacaccattcccttgactccttccaactcaaagtatttattgtccagttaaaacatttatggtcatataagctggcttatctttttttctttgatttttttttgagtcagagtctcaccctgtcgcccargctggagtgcagtggcccgatctcggctcactgcaagctccgcctcccgggttcacgccattctcctgcctcagcctgcaagtagctgggactgcaggcgcccgccaccatgcccagctaatttttttgtatttttagtaaagacagggtttcaccatgttagctaggatggtctcgatctcctgacctcatgatccacccgcctcggcctcccaaactgctgggattacaggcgggaggcactgcgtccggcctctttttttcttttttttatttggaatagcctctcactctgttgctctagctggagtgcagtggtgcaatcagggctcactatgccttgacctgggctcaagtgattctcccacctcagcctcctga

SEQ ID NO: 502716 - DNA, 595 bp, Homo sapiens
aatagaacaacctagtgttgcttggtttactttgtatgcctttttctatttgcataaaccctgatctgattacaaacttgtatttacaccattcccttgactccttccaactcaaagtatttattgtccagttaaaacatttatggtcatataagctggcttatctttttttctttgatttttttttgagtcagagtctcaccctgtcgcccaagctggagtgcagtggcccgatctcggctcactgcaagctccgcctcccgggttcacgccattctcctgcctcagcctgcaagtagctgggactgcaggcgcccgccaccatgcccagctaatttttttgtatttttagtaaagacagggtttcaccatgttagctaggatggtctcgatctcctgacctcatgatccacccgcctcggcctcccaaactgctgggattacaggckggaggcactgcgtccggcctctttttttcttttttttatttggaatagcctctcactctgttgctctagctggagtgcagtggtgcaatcagggctcactatgccttgacctgggctcaagtgattctcccacctcagcctcctga

SEQ ID NO: 502717 - DNA, 572 bp, Homo sapiens
gctcaggttcttgcagccaatatgtaggcaattctacacccactccatgacatcaagcctagaaytgttatcagactctgaattgaagaaacttttgcttctccagtttttcatacagaatattagaaaattattgttggaattagttttcgaatattttactcacattgcaaatagtatgctagactttgggaacacaaataaaatataattcttaattttaaggcaattaaaatcagagagagatatataaacacattactatttatttgtaatgtattacttactatagtgtcacattttatcatcaataacttgattacacagatggagagcatcgtatcatgagaggtgagtaggaagttttcagttaaaagttgcagtttcggccaggcgcagtggctcacgcctgtaatcccagcactttgggaggctgaggcaagtggatcatctgaggtcaggagttcgagaccagcctgttcaacatggcgaaacccatctctactaaaagtacaaaaaatagctgggcatggtggcgcatgcctgtagtcccagctactcaggaggctgag

SEQ ID NO: 502718 - DNA, 473 bp, Homo sapiens
ccccatactgttcttgtggtagtgaatgagtctcaccagatctgatgtctttaaaaggggtttcccctttcacttggctctcattctcttttgcccgccaccatgtaaagacgtgccttttgtcttccaccctaattgtgaggcttccccagcctcatggaactgtgagtccattaaacccccttttctttataaattacccagtattaggcaagtctttatcagcagtgcagcagtgtgaaaatggattaatacatgccctgaaccccaataaaggctttggcacactggctccttcctccctctctgctccccacctgctggttaagtgttcatacytaactggtatctaatttaaatttctccatcactataaacatttttttaattttccaaacagcaagctggagctctgggagtggacaccgatctcctgtgagcaacactgctttggtcccaccaatttgagtcaa

SEQ ID NO: 502719 - DNA, 524 bp, Homo sapiens
tagccataaagaagaatgaaatcatgtcctttgcagtaacatgaatgcagttggaggccagtatcctaagcgaattaatacagaaacagaaaaccaaataccacatattctcacttataagtgggagctaaacattgggtaaacatgaacagaaagatgagaacaatagacactggagattccaaaagcggggaggatggaaatgggacaagggttgaacatctaactrttggctactatgcatgctactttggcgacaggtacattagaagcccaaacctaagcatcacgtaatatacccatgcaacaaacctgcaaaggaactcccgaatctaaaattttttaaaaacattaaaaaagaactttaaaaattgaaaattacatacaatttagttgctggtataattaataagtttttaaaagcatccatgtaacaaacatctagatcaaaaaaatagatttctacacaagagctatcccctttaccatcaaattcctgcctcaatcattattttggcttgcat

SEQ ID NO: 502720 - DNA, 477 bp, Homo sapiens
tcctcatcgattaatcagagctccctcattcctactttatagatgatgtatcagaagcacagaaaagttaagcaacttgcctatggtcacaagctcaggtctttctgactccaaaccatgcatgtttaaattactcttcttgccctttgtcccagggaaattagttttttgctaacttacactgcccagcaaggggcattttagttatccttatgaatcttatgtagatttstgctagatcatcctcccatgtgttaaacttggattaaatgagcagctctgattgtttcctgtcctcaggggctatgccattgccagcagcagtgacgatcggatgaatgagcctccaacctctcttgggcttgtgcctcaccaggttagtgatgtggaagtgaaatcacaattcttttggtacagggggaaagcatgtggggtctctttgccattccatctgcccagcccacttcatatccaccc

SEQ ID NO: 502721 - DNA, 586 bp, Homo sapiens
tggctgggggaggggcagaagatgggcgggcagaataaagaaaggatctccctagtcttggaggaaaacaggggaagccagagggaggaagttgttctgggttcaaagaaatcaacttagaaagcttccctgataaaaatagccattggcaaatcctagtctatttatatcacccatccaagatcactatcaggatcctgggctgaatcacaagacccagtaaataagtatggagcgctggctgcctgatttatgggaagatatttaaacaccactggagcaactgagtcagggaaaatttgagtgctggcaccaaacggtacatttacaagtggctctcactttacagaaatagataggttcctgaaaagttggctmtaaaatgaattcaattaacagaatcatattttcctagtgaatcacatcttaaaattagagatagattgggggaggggtggccaaaaaaaaccaaccacaccaaacaactgtgcctctgagactaaataaaaatcactcttcattcagcaaactctaaaacgtcacttacttaaaaggccattataaacgctcataaaatacaaacaat

SEQ ID NO: 502722 - DNA, 558 bp, Homo sapiens
tcatactaaaatgggttcattttactatatatcagttatgtcttgaaaaaggtgattttaaaaaaggcttataatcttaatttttcaaaacactgcagaaaagtacgaaatgaaaaccctaagtccctgttacctccattccctctccctgcaaaataatcaccaacattagtgttccatagaaacgtctagaaaaaaaaaattgtacgcctaaactagctctacaatatttgtatctttgctactccctgaatattaaaaaacccacctgggaatcacagagcctagaagaatcccaattacctgtggtttcttggctccagtcccactcatcacccccaggcccmaaagggccaagcactttgagtggaaatccctgttgtcagatgtggggcaccaggttgtagctgagcttggctcacagggccttaggagacaggacacaccgtcctcaccgtggggaatgaaaacacggcagacagcatgcaaaaagcatcagaataggtcgtttggcctcgctttatatggttgtttggcctcgctcccgggctgttccca

SEQ ID NO: 502723 - DNA, 449 bp, Homo sapiens
tgtttgagaagtgctaaatatgtgtggttcagaaaagatacctcgatgatgtctatataatccttcaacctattccacccaggctgaaagctataggggaagagcaatacagttgacccatgaacaatatgggaattaggggcaccaaccccactgccatacattagaaaatctgcatataacttttgactccttccaaacttaactacttatatagccttctgttgactgcaagtgttcagtaygtggtttaatgctttgccatcaccatctagaaattcttaatcatttttgcacaggaggatatgcattttcattttgtgctgggctctgcaatttatgtagctgaccctacatgcagatttccattatgaaccaacaccatttcagggtttggtagtggtcactgtatcatgtctatcatgccatcaagcctgaaggtagcacca

SEQ ID NO: 502724 - DNA, 692 bp, Homo sapiens
aaaggatggattgctaattgctgctaaatggcgattaaattacactctccatgttttcaaaatgaactggagtttagcagaccttaaagaattagatctgagtcaaggtaaagggcagaaaagatgtcctcagagttttatgaaaacatacacacatgagcatgaactcagaacttgtttgcaagttctttctgttagtccttgccttccaagatatatatgatagtgtatgttttattagaccataacttattcctattccaaataattgataaagttgagaaaatcaatgccatttgagaattagacatgaactatataactacagatagaattttaatattaatgctgcatggtmatatgtttcaatgattgtttcgcattagcatgatcctctttgaagggctcattatggttttacagactttccagagtaggcagcaattgcagtaccaggttagagtaacatttttaagcaagtatttaaaaaatctcaatatctttacacggcttttttcctcttttgtttggccttggtttaaatatatactgcatgtgcatcctgggggcaagcactatatattgacatttctgtagtttctgttgcccctagcacagtgtctagtctaaaggtggctaaattaataatacacggataaataaatgaatgaacaaataaacatcatgcaacg

SEQ ID NO: 502725 - DNA, 692 bp, Homo sapiens
aaaggatggattgctaattgctgctaaatggcgattaaattacactctccatgttttcaaaatgaactggagtttagcagaccttaaagaattagatctgagtcaaggtaaagggcagaaaagatgtcctcagagttttatgaaaacatacacacatgagcatgaactcagaacttgtttgcaagttctttctgttagtccttgccttccaagatatatatgatagtgtatgttttattagaccataacttattcctattccaaataattgataaagttgagaaaatcaatgccatttgagaattagacatgaactatataactacagatagaattttaatattaatgctgcatggtcatatgtttcaatgattgtttcgcattagcatgatcctctttgaagggctcattatggttttacagactttccagagtaggcagcaattgcagtaccaggttagagtaacatttttaagcaagtatttaaaaaatctcaatatctttacacggcttttttcctcttttgtttggccttggtttaaatatatactgcatgtgcatcctgggggcaagcactatatattgacatttctgtagtttctrttgcccctagcacagtgtctagtctaaaggtggctaaattaataatacacggataaataaatgaatgaacaaataaacatcatgcaacg

SEQ ID NO: 502726 - DNA, 523 bp, Homo sapiens
gccagggtttgaagccttgtaattctgaatagggcttgctttcttcacagccacatccaactgtctcccagtcatgatggccaaactcagtgctcatagagacaactgtgccctatctctgctccattatctcttcctactccttgaagatgaatccagaactttcaggcaaatgatcaaatgctcaactgcttcagcagcagaaaacaataaaaaccttttcakcagggaattcctggtatcagccattaggtctcattggtaaggtcactggcaatcaattccatcttattatctaaatctcagtggctggagttgaattgtcttataaatgagggaagatacagagacaaaacatgaggaaaattatttcttttcaggtgggagcatgttcaaaggccaacttgagggagctgaatcaaatattcagttatgttttaaatctaatagaatcgcgggcattttacaagtgaggaaactgagggctagaaatgagaagggtcttatccaacagaagaggcaa

SEQ ID NO: 502727 - DNA, 523 bp, Homo sapiens
gccagggtttgaagccttgtaattctgaatagggcttgctttcttcacagccacatccaactgtctcccagtcatgatggccaaactcagtgctcatagagacaactgtgccctatctctgctccattatctcttcctactccttgaagatgaatccagaactttcaggcaaatgatcaaatgctcaactgcttcagcagcagaaaacaataaaaaccttttcatcagggaattcctggtatcagccattaggtctcattggtaaggtcactggcaatcaattccatcttattatctaaatctcagtggctggagttgaattgtcttataaatgagggaagatacagagacaaaacatgaggaaaattatttcttttcaggtgggagcatgttcaaaggccaacttgagggagctgaatcaaatattcagttatgttttaaatctaatagaatcgcrggcattttacaagtgaggaaactgagggctagaaatgagaagggtcttatccaacagaagaggcaa

SEQ ID NO: 502728 - DNA, 667 bp, Homo sapiens
gaaatattaagatcgcctatgattggaaatcactgggagggacaaagagaaagctttctgttctaaagctgagagtgaacaaaaatggaatttgtggcagctaccttagctctaatagtattaagtaccaagtaatttctgatttttaaatacaaaaaattatgcatagaatccctgcaggaaatgaagaaatagtaacagtagggttttcagcccaacaactgcactgacacatggatattttgaaggaagatgcctcatctctgattttcacaggatgtcagagtctttggtaattaatgttcactactccagcaattaggttcttgtcagttaatcatccatacacacacacacacacacacacacacacacacacacacacacacacacayatttctttgccagaaaagccagtctttctatggttatattggcattgcttttgttccccagtggagaagattagagaacactcagagcagtttatgaaaaagtacagcaaggttctttctctcttcatttctttttgattagagttgaatgcagcagagctggcttgtaaagtcagaagaatggatggccagagacagcagtctggagactattaaacagagagagctcatttccctggttttgatgtggtcatatcatctgtaaattatag

SEQ ID NO: 502729 - DNA, 560 bp, Homo sapiens
gttctgggtataccaagccatctcctttctggcattgaaacagcttgtcttttttttgcttaaagactgttttgtaaaaacaaaaaygatgttccggggagttggcgtgtgtgtatgtgtgcacgtgtgggtgctgccaaacatataactgaatcaatatatttttaatgaacatatgttgcagctactttttaatggccccttttttccatatttgccctttttttgttgttcaccctttatttacgtggctggcaaaatggagggaaaagttcatatccaaggaaagcaaagcaaaccaacattaattatgagcattccagagaagaatgaaacacaagatttatactaattatattcctccaaggaacataattcacactagtctctgacgagctttgtagcttagtcaagtcatggctggtacaagatttagagagccagaaagtttaaggaagtcattgaagtggagaaattctctagttgtttttttaattaaatgttcacagtgggattcatacaggtagaaaatttgttggtgcattttatgattgtattca

SEQ ID NO: 502730 - DNA, 562 bp, Homo sapiens
tggaaatagaaacaatttttgtatcattggataccctgatatgtaaataaaatccawtcacatcctattgcatcacatatgttgcatgtttgatttgttccacagctcataggtgaaagagtcatcgcatgcttttatttttctaaattcatttcagtaagactctgtcccttccatcagggttggtgggaagtctaatctgtcattttctcagggagctcctcttacccatttggcattatacaagaactctaggacccagtggtcagagataatggggatgaagttcctggttatcagttagttgggtttatctctgagaacttggacttcctgaccatgtaatccatttgtcatgggtaactcctctggcagtgtttatattctccatggccaggttttagcagtgttatcttcactgagaatcccactcaggatgctgagttcctggcctgcctgggttcaggcagaaccatggctattggcgctcctaccagctcctgagctttaggtaagtgcatcaatcccatcctactgtcttctggaaaccaactctcctcct

SEQ ID NO: 502731 - DNA, 496 bp, Homo sapiens
acatggagagaggcacatttggaggttcttttttttcttaaaataaaaatggtatacatgtaaggtgtgctatgtgatgttttgatacacatacacattgtgtaatgattaccayggtcaactaacatgtccgtcacctcaaagttaccatatttgtgtgtgtgtggatgagaatacttaggatctactctctcagcaaatttcaagtatacaatgcagaattattaactgcagtcaccatgctgtacattagatctgcagaccgttttcatcctacatagatgagatgttttacctcttgactaacaactccccatttctcccagcccctgacaaacactgttctatgctctgcctctataagttcagcttgtttagattgcacctgtgacagcaggcagtattggaagttctttatgacaagtgacaatgagagttagaaaaagtgtctggtgttaccaggctggtgccgtcctttggccctggttcctgttca

SEQ ID NO: 502732 - DNA, 496 bp, Homo sapiens
acatggagagaggcacatttggaggttcttttttttcttaaaataaaaatggtatacatgtaaggtgtgctatgtgatgttttgatacacatacacattgtgtaatgattaccacggtcaactaacatgtccrtcacctcaaagttaccatatttgtgtgtgtgtggatgagaatacttaggatctactctctcagcaaatttcaagtatacaatgcagaattattaactgcagtcaccatgctgtacattagatctgcagaccgttttcatcctacatagatgagatgttttacctcttgactaacaactccccatttctcccagcccctgacaaacactgttctatgctctgcctctataagttcagcttgtttagattgcacctgtgacagcaggcagtattggaagttctttatgacaagtgacaatgagagttagaaaaagtgtctggtgttaccaggctggtgccgtcctttggccctggttcctgttca

SEQ ID NO: 502733 - DNA, 538 bp, Homo sapiens
catcttcaaagccagtggtatagcatctyccagtctctctctgactctgaccctcactcttctgctccctctcatacttatcaggccccttgtgattccgttgggccacctggtaatctccctatctcaaaacccttaactcaatcgtatctgcaaagtcacttttgccatgtaaggtgctgtatgtacaggttctggggagtaagaagtagacatctttgggatgcattttttctacctacaataagtgtgttagagtggaaattagagataaggagactgagttccaatctccacgctgccattgaggaggaacgtgccttgaggcaaatctcaactcccgggccattgtttcctcctggtccctatgtagaccccgttaggatattctctttgagaagtaatgccttttcctaaacacagggagatatggctcctgctaattaaaagccagacctgttttacacacttacaaacgacaccctagcatttgtttaaggccacttctgaaccatgccattagtccttctaatggcgt

SEQ ID NO: 502734 - DNA, 620 bp, Homo sapiens
tgagctgagtggatttcttgagcttaggtggatccccattgtggttagtcttgatctctccactgtactcaagcctggatgacagagcgagactctgtctcaaaaaacaataaaactaaaactaaaataaaataaaataaaaaattagccagtcatggtggtgcaagcttgtggacccagctactactcaggaggctgaagcaaaacgattgcttgagcccaggagtttgaagctgcagtaggttgtgatggtgccactgcactcaagctgggcaatagagtgagaccttgactctaagaaataataaaaataattttaaacttagattatatataatcgattaaatcatgtaataaattaggtaacgtcatcaattaaataatacatttcttaaaattgtatggagytctactgttcctaggatacaattcaaaatcctgagtgttagcaataatgccagcataatatggtccctgccaatttctccagcttttactgacaccattcccttttttcctcaataggctccacaattcctttctttctttctttctttctttttttttttccattttcaaatgtcttacgtagccccttccaatttcataggctttaaacg

SEQ ID NO: 502735 - DNA, 561 bp, Homo sapiens
aactgagaaaggctgccatgaggctgaaattgaattatgcatgggaagtactcagcaagcgcatggcacrtgaatgatgtacattttcatgagctctcccagcaccccatgtttcgcatgggcaagagctctgttccccagcccccaggttcacaggttttctttttttttttttttgagacagtctcgttctgttgcccaggctggagtgcagcggcactatctcggctcactgtaacctccgcctcccagattcaagtgattcttctgcctcagcctcttgagtagctgggactacaggcatgcgccaccacacccagttaatttttgtatttttagtagagatggggtttcaccatattggccaagctggtcttgaactcctgacctcgtgatccgcccgccgcggcctcccaaagtgctgagattacaggcgtgagccaccgcgcctggcccacaggttttcttttgctgctatcagatggctgccatttggggctggaccttccccaggccctggatgtctgaggtctgtctggcttgaagctggggcacacccgg

SEQ ID NO: 502736 - DNA, 519 bp, Homo sapiens
ttaatagatcagaagaagatagttgatgaaaaatttactataatttcaggcagcccaaataccttttgctcttaagaagtaaaattaaacttctttctttcctccgttttcctccccaagtctcctcccattccttcaatgtctcacttcacagagtaaaaacttcagagatagaaaaggctacaaaagcaatcagatttttgttctaacttagaactctgcaagytcatcatattgatgacagcagggaaagaagaggtgggttggttgccctgctgaaacattaatttcgattgaaaggagtagaaataccagcaatgtacaggcataacggctcattgccaagatcgaaatgacttttccacgcaattgataatatctcagatggtgcaccattaagagatggcaacctagtccacatataaattcagtatgtaatccaaatttctatctctatattgatagtgtatgtaccatgtctgaatctaaactcatacacagtacacctctcccctctca

SEQ ID NO: 502737 - DNA, 441 bp, Homo sapiens
tgagaaatacaggaatggcagattagcaagctccaggcaatacccactacaccacatcttttcttacccatggttgtaccttgaagcagagctgggggtgcaggtccaccttctccaaaacataccactgtgggaggagaggagagttcrtcagggagaaaattcctgggccccagccctgcccaccctggtcctgggggaacctgtcctcaccccatctgactctcgagctgtggcattcgggaggtctttgcaaagggtatgccagtcgtgcctctggcagagggcagcttccagcttcagtgggcagcggagtgtcagggccatgaccatctgagtgtgctggctgtagtcagtgaagtgcactgacttccagaagtccgagccatctgggcaggtggcagggtcagtgggtgagggtcagccctgcttcagccccac

SEQ ID NO: 502738 - DNA, 483 bp, Homo sapiens
ggggtagggtaaaaatgttctatctctgaacttgcttcagttcttcatacataccaaacatgagtagcacagggtaacttaaagacatggctacagtagggacaaaccaamgggcaatagggcttccattattcagacactgggaacaatcatcatgcctagtaggcttttgaaagaaggcaaaatggttttaatgcaaaatggttttaatgcaagaaggaaaaaaattgccattttgccaaccctgaataggagttagcacacttctggttgctgaagtggagagctgatgaatgcaataaacaacctggaacccaaagaagcaggtttctaagctcaaacccatggtttataattcctaggttgtaagaaattcttgtcaacaaagacagaatgttcatggataagtgactggggtactttctcaccttttatcatctacatggtgattttaattatcataattcatttaaattggagacc

SEQ ID NO: 502739 - DNA, 483 bp, Homo sapiens
ggggtagggtaaaaatgttctatctctgaacttgcttcagttcttcatacataccaaacatgagtagcacagggtaacttaaagacatggctacagtagggacaaaccaaagggcaayagggcttccattattcagacactgggaacaatcatcatgcctagtaggcttttgaaagaaggcaaaatggttttaatgcaaaatggttttaatgcaagaaggaaaaaaattgccattttgccaaccctgaataggagttagcacacttctggttgctgaagtggagagctgatgaatgcaataaacaacctggaacccaaagaagcaggtttctaagctcaaacccatggtttataattcctaggttgtaagaaattcttgtcaacaaagacagaatgttcatggataagtgactggggtactttctcaccttttatcatctacatggtgattttaattatcataattcatttaaattggagacc

SEQ ID NO: 502740 - DNA, 483 bp, Homo sapiens
ggggtagggtaaaaatgttctatctctgaacttgcttcagttcttcatacataccaaacatgagtagcacagggtaacttaaagacatggctacagtagggacaaaccaaagggcaatagggcttccattattcagacactgrgaacaatcatcatgcctagtaggcttttgaaagaaggcaaaatggttttaatgcaaaatggttttaatgcaagaaggaaaaaaattgccattttgccaaccctgaataggagttagcacacttctggttgctgaagtggagagctgatgaatgcaataaacaacctggaacccaaagaagcaggtttctaagctcaaacccatggtttataattcctaggttgtaagaaattcttgtcaacaaagacagaatgttcatggataagtgactggggtactttctcaccttttatcatctacatggtgattttaattatcataattcatttaaattggagacc

SEQ ID NO: 502741 - DNA, 470 bp, Homo sapiens
ctcctggaaaccactgacctcttcccattactatagtttagtcattctgagaatgttttagatacatatgtgtgtgagagagagtctgtgtgtgtgtggtgtgtaatcatacagtatgtgwccttttggagtttttgttcctttttcctgctgagtattacatgctggtatggataagaaatacatcttcaatatcggcacttcgggctctatgaaaactgacaaatactttgagcacgggagccatttcaagatctctcatctttctctgccaacaagtaggattaggtatggccttttatttttttttataaaagacttgaaaactcaaaaatcagttacataaacataggtggaggttttctcttattcccagaaaaatattttaaagacattttagaacattatttcttatataatcaacatgttgattaaaattaattcttatataatgctttaagtagggcttc

SEQ ID NO: 502742 - DNA, 470 bp, Homo sapiens
ctcctggaaaccactgacctcttcccattactatagtttagtcattctgagaatgttttagatacatatgtgtgtgagagagagtctgtgtgtgtgtggtgtgtaatcatacagtatgtgaccttttggagtttttgttcctttttcctgctgagtattacatgctggtatggataagaaatacatcttcaatatcggcacttcgggctctatgaaaactgacaaatactttgagcacgggagccatttcaagatctctcatctttctctgccaacaagtaggattaggtatggccttttatttttttttataaaagayttgaaaactcaaaaatcagttacataaacataggtggaggttttctcttattcccagaaaaatattttaaagacattttagaacattatttcttatataatcaacatgttgattaaaattaattcttatataatgctttaagtagggcttc

SEQ ID NO: 502743 - DNA, 629 bp, Homo sapiens
aagcatgccaacagtgaggagaaaacatgaaggaagctgggtaagaatgtttagaaagtggaagacagcatttcttcacctctggaatggctagaatggaatatttttcctctttaaaagcagggatggagcctggaagttttgtcccaataaaactagttgaatccctcaggctcagatgttcctttgagagaagtcaaaagttattctaagagtgaccaaaaaatgctgcctatttcattcccatcaactctttctatgccctttctaagactgaaatagtctactccaaagtggaaagcaactgaaaaaccaataccacctattcacagaaaaattgkgttaggtaagaatcaaacagaagaaagccaccatcccctgatgagcttgactctagtggaacctactaaaggagttttgttcacctcagaaagggaggctgagcttttcaaaggaacacactgtgttcacttcttttatggaaaataaacactgtgtctctccagaggatctgaaatgaaaaaccccagtgtgctcttgaaaagtcttagataacaattttaaaaagcaaattaaagtaaaaagaactctttttagtgaagttgaaccagttgaccacccatgagcca

SEQ ID NO: 502744 - DNA, 633 bp, Homo sapiens
aaagacataaatagaatttcttaatccgtgatacctgtcacaaaacattaaaaatttttttaaaaaacactttctcatttaagactaagccaattttctccatatcatctgcctgctatatggttaggatagtgacaggaattcagaagtcggatcttctccaagtttttctagacaacttatactttcttgaaaggaacsatgcaaactccacaatcacaggcttgtaagaaacagcaagctcagctaggttgtttgagatcattttctgagtctcaaactaaaagtttttgctttattattattttttaaacatgaggtagtaggtataaagcagtggtcctcaaacttgaccatgcatcaggatggcctgaagaacttattgaaccatagggttccactccccgagtttcaaattcagtaggtctgggatggagcctgagaatttgcatatgtagtttccaggagacgattatgttgctgccctctgatgaccccactctgagaaacctatcggcataaaggttaagtacatgggtattataattttttaaaaaaaggggtggaagctttatttactaacttatgagttgtttacaagccccttgaaaacgttattaaaatcctctaagt

SEQ ID NO: 502745 - DNA, 648 bp, Homo sapiens
gcaccagtcaccctttaactgctttgggttctggcaactatacacagctcatgtgacttcttactgatctttatcacaaatatctgttcttggttcctgagtctatacttgccaaagctgagaaaaaaatcataatttttgataggacttatagttctcaaattacatgactactagagtctggaaaaaagtaataatgaagttcacatgtatgtgtgtacgtatatgtatgtatgtatgtayatatacacaaacatatgtatgaaattgctttatcttaaggtagctataaatcaagtagccatacttctattggtgggagttatcatctagtaaatgctttgggagaagtggttctttttgataattcatctgtagcccaggtattacagtagtttaaaactgttcctcccaaagttggttaattatcagaatcacctggggtagcttctgatgaacacagattttttttttttaacccccaccagagaccaattaaacttctggggatgagatcagaaaagctgtttttcctcaaaatgtttaaagtgactcaggcaatgacagcaatttaggaacaaaagatcaatgatggaatgagatcattcaaggaacctagtataattttacccagaggatattttttcc

SEQ ID NO: 502746 - DNA, 607 bp, Homo sapiens
aacaattactgcatttatatatgttgcctgaatgtcactgggaacatacaaaggaaataaagggttgatcaatttaaggggcatcatttgctggggaggagagagaaagtatatttaatagctcaragataataaggtgtcatgaatcattaaaaataatgtgtatagaaaacataatctggcagggtttattaaggtgacctaacttctttgtgtgtattatattaaaaatgatttggcctacttccttcctaagagaccctatctacagtcatagtcagggatgtcttcctcttggctctcagaaaccgctttacattatgtaacttgactgtcatcaagctcaattataactacattctgtcaactggactcagcattcttagacaagagattgcatcttattttacaatgaattgcccagtaagtagaggattgtgcatagtaggcactctaaaaaaatttgataaataagcaaatgcataaatgaatcataaattaaaattgtaaatatacacgagattaccaggatgatatttatagtgttgtagtcaccctataaaaggaggtcttctgcaatagattttgcaattacattcattcgaat

SEQ ID NO: 502747 - DNA, 482 bp, Homo sapiens
tgaacaattactgcatttatatatgttgcctgaatgtcactgggaacatacaaaggaaataaagggttgatcaatttaaggggcatcatttgctggggaggagagagaaagtatatttaatagctcaaagataataaggtgtcatgaatcattaaaaataatgtgtatagaaaacataatctggcagggtttattaaggtgayctaacttctttgtgtgtattatattaaaaatgatttggcctacttccttcctaagagaccctatctacagtcatagtcagggatgtcttcctcttggctctcagaaaccgctttacattatgtaacttgactgtcatcaagctcaattataactacattctgtcaactggactcagcattcttagacaagagattgcatcttattttacaatgaattgcccagtaagtagaggattgtgcatagtaggcactctaaaaaaatttgataaataagcaaat

SEQ ID NO: 502748 - DNA, 480 bp, Homo sapiens
gggtaacagagtgagaacctgtctcagtaaacaaacacacaaataaactgggggaaacttagcaaggcctatttgttcagattcttctttgtctgtgtctctgcatctttggaggtaaggacgttccttttctatgggaaggcacctcttacttamtaagagtcttatggtcctccagggaaaggtcagaaaaatcttcctggtttctatgacctcttcaggggagaaggatgggggaaggtcagaaaggccttcctgcttctgcctttttcttaaatattttcagtttaaaatattaaatatgtcaatgagggctattctggggtagtgtttccggagccccatcataggtatatgaggtttcattgaatactattttctgcttttaaatatgtttgaaattgtaaagaacagtttttaaaatgcgaagattttacataattgaaaaaagatttccaggttttcaaatgccctttaaaa

SEQ ID NO: 502749 - DNA, 480 bp, Homo sapiens
gggtaacagagtgagaacctgtctcagtaaacaaacacacaaataaactgggggaaacttagcaaggcctatttgttcagattcttctttgtctgtgtctctgcatctttggaggtaaggacgttccttttctatgggaaggcacctcttacttaataagagtcttatggtcctccagggaaaggtcagaaaaatcttcctggtttctatgacctcttcaggggagaaggatgggggaaggtcagaaaggccttcctgcttctgcctttttcttaaatattttcagtttaaaatattaaatatgtcaatgagggctattytggggtagtgtttccggagccccatcataggtatatgaggtttcattgaatactattttctgcttttaaatatgtttgaaattgtaaagaacagtttttaaaatgcgaagattttacataattgaaaaaagatttccaggttttcaaatgccctttaaaa

SEQ ID NO: 502750 - DNA, 633 bp, Homo sapiens
ggagaaattgtaataattacttgcaatggtattgctgttctctaaattggtattacctgcacataattttaaaaaaagaaatatacagatggaaatgttcttttactggcaagtgaattgattcatttgatatcatcttttatttttagtacatagaactcactatagcggacgaaatgaaaaggagtccagcttcttccatgctggaccggaacaatggaggaaaatgctagagaatctcctaattaagctgtacsatttggtgctatcatttacccattcctggacagtaagtctactggcaatgattacttttcctgcaggtatcacatgtcttagcacaaaatagcaaagggtaaaaatggtgagaattaactaaacccataccgtggacaatggattggtagggtggagggaggagcacaaaacatttgtcagagttgacgcagagtttggtaaaagctatagtcttatagaaacattaaaataacctgtaagaattaaaacaaagactaatcttttggcttctgactctttttatacttatttatctttgtagtttttcttgatgatcaaattcacagtaccctcttccttgaattcaacctttcatctgagttctggttccaatta

SEQ ID NO: 502751 - DNA, 633 bp, Homo sapiens
ggagaaattgtaataattacttgcaatggtattgctgttctctaaattggtattacctgcacataattttaaaaaaagaaatatacagatggaaatgttcttttactggcaagtgaattgattcatttgatatcatcttttatttttagtacatagaactcactatagcggacgaaatgaaaaggagtccagcttcttccatgctggaccggaacaatggaggaaaatgctagagaatctcctaattaagctgtaccatttggtgctatcatttacccattcctggacagtaagtctactggcaatgattacttttcctgcaggtatcacatgtcttagcacaaaatagcaaagggtaaaaatggtgagaattaactaaacccataccgtggacartggattggtagggtggagggaggagcacaaaacatttgtcagagttgacgcagagtttggtaaaagctatagtcttatagaaacattaaaataacctgtaagaattaaaacaaagactaatcttttggcttctgactctttttatacttatttatctttgtagtttttcttgatgatcaaattcacagtaccctcttccttgaattcaacctttcatctgagttctggttccaatta

SEQ ID NO: 502752 - DNA, 592 bp, Homo sapiens
gaaaaacccacaggcatcagagagcatatttgatagccactaaagtatgcttgtgcatatrtattatttctcaatgggagaaagaaagaattatttatctaatacagatgcacaccaagtctcatctcatccttaaatggaaaatgcatcagacgcataacctgacattctaatgaaccagaacagattgtgacaccaccttgcagtagaaacaaatggagtccctcatatggttattatccatcatcgatgttttttataaatggcaccgaaaaatatttcttaacagctttctctgctagagctataattatagtcctactgaagagtaaaataaaatattaaggacaaatattttcaccttgaagttttatttttttaaataatgtcttcattactgttgggtagaatgcataaatatgtgggacaagtgatatatgaagttaatccacagatgaggaaaaaaatctcatatctgattctatagtttgctgttgttggacatttcttaatagcattatcttcatttgtttgataactccaaagtgaccctatgagtcactagtttatccatggaattgtgtcatataat

SEQ ID NO: 502753 - DNA, 594 bp, Homo sapiens
catgtcattataaatttgtcaaaagccatagcatgtacaacacagagtgaaccctaaagtaaactatagacttcagtcaataataatgtatcaatattgattcatcaattgtaacaactattctacaataatacaagatgttaayattaggggaaactggggatgaggcggtatatgggaaatctgtgttttctgcattattatctttataaacataaaactatgctaaaaatgaaaatctacttattaaagaaattatagcatagccatgaattgctggaaaatccaaacaaaacagaccattttgttatacagtaaacaatagtatatgtctagctttttgtccaggtatctcccttgtcttagtatataaagattgattgtgccagtccctcctggacaaatctgagagatctaggaagtagagcagctgcactgagatttctgcatgttatggcttctgaaatgtacaaaagttaccataaagtaattcctctcacttccgagttctccctctgctcaacacttagagaagtgttgaaaacgcagtcacagcaagggccctgaggcaggttggagttgtgtcagaaagct

SEQ ID NO: 502754 - DNA, 594 bp, Homo sapiens
catgtcattataaatttgtcaaaagccatagcatgtacaacacagagtgaaccctaaagtaaactatagacttcagtcaataataatgtatcaatattgattcatcaattgtaacaactattctacaataatacaagatgttaacattaggggaaactggggatgaggcggtatatgggaaatctgtgttttctgcattattatctttataaacataaaactatgctaaaaatkaaaatctacttattaaagaaattatagcatagccatgaattgctggaaaatccaaacaaaacagaccattttgttatacagtaaacaatagtatatgtctagctttttgtccaggtatctcccttgtcttagtatataaagattgattgtgccagtccctcctggacaaatctgagagatctaggaagtagagcagctgcactgagatttctgcatgttatggcttctgaaatgtacaaaagttaccataaagtaattcctctcacttccgagttctccctctgctcaacacttagagaagtgttgaaaacgcagtcacagcaagggccctgaggcaggttggagttgtgtcagaaagct

SEQ ID NO: 502755 - DNA, 594 bp, Homo sapiens
catgtcattataaatttgtcaaaagccatagcatgtacaacacagagtgaaccctaaagtaaactatagacttcagtcaataataatgtatcaatattgattcatcaattgtaacaactattctacaataatacaagatgttaacattaggggaaactggggatgaggcggtatatgggaaatctgtgttttctgcattattatctttataaacataaaactatgctaaaaatgaaaatctacttattaaagaaattatagcatagccatgaattgctggaaaatccaaacaaaacagaccattttgttatacagtaaacaatagtatatgtctagctttttgtccaggtatctcccttgtcttagtatataaagattgattgtgccagtccctcctggacaaatctgagagatctaggaagtagagcagctgcactgagatttctgcatgttatggcttctgaaatgtacaaaagttaccataaagtaattcctctcacttccgagttctccctctgctcaacacttrgagaagtgttgaaaacgcagtcacagcaagggccctgaggcaggttggagttgtgtcagaaagct

SEQ ID NO: 502756 - DNA, 628 bp, Homo sapiens
tgttattttagagggcagcaatgttctcattgtcctcttggggaatgtattcttaaggaaggtgagtaatcctggaagaaaagctaagatctttttggaccaataatgttaatatagttacaggaaagatcactaggctaaaaattaggagaatcgtgttctaaaccagacccagatatgaacttaggaaagctagttcttccctggtctccaattccagcatctggatatgagtgaaataattgttagagttccttttgcctataatcatttaatctgtgagtgacaggtgaatggcaatccacaaagtagaggataatacctttaacaagaaggaaattgtgggtgatgagatcaattgtcaaggtctggaggccaagttccatttaaataacataaaagcaaagaaaaaaaagaaaaaagaaaaaaagaaagagaagaaaactttaagtgaaaatttaagaatgaattatttcggtaaggcttatctgtaagttaatgtacctgctaatatataatgattttcatttttgttataaattgaacattttttgttcaagtacactgtatttagccatttttgatatttttaataytcagagaatttataaacattcctaaaatcctt

SEQ ID NO: 502757 - DNA, 605 bp, Homo sapiens
tttttgtacgatagtttcactggaacatagtcrcattcattgacataatgtctatggctgctttggggctataatagcagaattgaacagttttaatagaagtcatatgtcccatagatccttaaatatttactatctgaccctttacaggagaggtttgcttcctgatccagagttttttcatctgtgaagatgaatatgcctacttacatagcagtattaagttttcaatattactcaaaagtagtcatggtttgcacataaactccactttttttttcaatccttcttgaggtttaagggcttctgatgggttatgagatcggagagtcttaagagtgttggttggagttgagggtacaggcttgaatgccgtgattctcagtggagaggagaaccaaaacaaaggagctttttttgacttcaacatcctggaacataatgttcaaagcaattgcaacaggcaatgcatttgaactacctcctcattcaacccaaagtgatttaattttacctaaaataaaagaatgtgctaagtttaataagaaatgtactctttggatatagatattagtctttttaatacagttatttttacacctctc

SEQ ID NO: 502758 - DNA, 618 bp, Homo sapiens
tgacagctgttgtggaacagagtattccaacccacttgggattggttttaaagctatttaaattcctagaatgttacaactgaaggaagctttcctcctgtgtgatgtagctgatgtttcttaacctctctgtgcttgaatgtccacatcaatatagtgaatattaaacaggttgttgtaaaaaaaaaaaaatatgtyacatgtaaagcacttagaaatgtgtgtcttatataataatcaatcaatttagctataatttttattatgatttgtttttattatctatcttttcattattatttatctttcattattattattgattaattgagtgcatactatacacctggctctggttctgaaacagacgatgtttcagatgataccagggatatagcagtaagcagatatgttccttgccttcatgaaagttacagtctaataaaagaaatgggcaagaagataattatgcagataggtactaagttacaacaggaataaatgctaccatgagcatataccaaagtgtaacagacactgtcaagccttgagtggcctactcatgttctcctggcccacccagaatcagattgtgttgaacttcctcatacttatttt

SEQ ID NO: 502759 - DNA, 519 bp, Homo sapiens
aacagagtattccaacccacttgggattggttttaaagctatttaaattcctagaatgttacaactgaaggaagctttcctcctgtgtgatgtagctgatgtttcttaacctctctgtgcttgaatgtccacatcaatatagtgaatattaaacaggttgttgtaaaaaaaaaaaaatatgttacatgtaaagcacttagaaatgtgtgtcttatataataatcaatcaatttagctayaatttttattatgatttgtttttattatctatcttttcattattatttatctttcattattattattgattaattgagtgcatactatacacctggctctggttctgaaacagacgatgtttcagatgataccagggatatagcagtaagcagatatgttccttgccttcatgaaagttacagtctaataaaagaaatgggcaagaagataattatgcagataggtactaagttacaacaggaataaatgctaccatgagcatataccaaagtgtaacag

SEQ ID NO: 502760 - DNA, 618 bp, Homo sapiens
tgacagctgttgtggaacagagtattccaacccacttgggattggttttaaagctatttaaattcctagaatgttacaactgaaggaagctttcctcctgtgtgatgtagctgatgtttcttaacctctctgtgcttgaatgtccacatcaatatagtgaatattaaacaggttgttgtaaaaaaaaaaaaatatgttacatgtaaagcacttagaaatgtgtgtcttatataataatcaatcaatttagctataatttttattatgatttgtttttattatctatcttttcattattatttatctttcattattattattgattaattgagtgcatactatayacctggctctggttctgaaacagacgatgtttcagatgataccagggatatagcagtaagcagatatgttccttgccttcatgaaagttacagtctaataaaagaaatgggcaagaagataattatgcagataggtactaagttacaacaggaataaatgctaccatgagcatataccaaagtgtaacagacactgtcaagccttgagtggcctactcatgttctcctggcccacccagaatcagattgtgttgaacttcctcatacttatttt

SEQ ID NO: 502761 - DNA, 618 bp, Homo sapiens
tgacagctgttgtggaacagagtattccaacccacttgggattggttttaaagctatttaaattcctagaatgttacaactgaaggaagctttcctcctgtgtgatgtagctgatgtttcttaacctctctgtgcttgaatgtccacatcaatatagtgaatattaaacaggttgttgtaaaaaaaaaaaaatatgttacatgtaaagcacttagaaatgtgtgtcttatataataatcaatcaatttagctataatttttattatgatttgtttttattatctatcttttcattattatttatctttcattattattattgattaattgagtgcatactatacacctggctctrgttctgaaacagacgatgtttcagatgataccagggatatagcagtaagcagatatgttccttgccttcatgaaagttacagtctaataaaagaaatgggcaagaagataattatgcagataggtactaagttacaacaggaataaatgctaccatgagcatataccaaagtgtaacagacactgtcaagccttgagtggcctactcatgttctcctggcccacccagaatcagattgtgttgaacttcctcatacttatttt

SEQ ID NO: 502762 - DNA, 591 bp, Homo sapiens
tatctggaaacttagtatccccaaaggcattcatatttttccttgacttctcgctcgaatcccaccaaaattgtactgcactgctcccttgagccacctttataactgccactgatatttgaagttattgaagcaataagatagtgctttagcccctagacttcgcactgcctaggagtcacactgctttccatgcagaaggaggaaggcctttctccttgctttagggcacatgctgtccaacggttccaaagagaaatgctggcagccaagggtattacagagtttagtggaatagctccattgagtcagagctcacaggacacacacccccacatacacaaaaacaaaaccacagagaggctggtcttagaagctgattcaattataaaaaccaagaackgcatgccaactcacttcccaacaatcaaagccatgtcattgtaccaggaaccctctttcttcaagatcaatgttattccgttaagctccttgatccttcctgaaaatatacctatgtaggggctgccccaccggttcatccaggatgtccagaaatgccccagcctgagcagtggtgaagctgagagt

SEQ ID NO: 502763 - DNA, 650 bp, Homo sapiens
ctgcctatctctgtccctcgctctctcttcctgggtatctacgcccccacagtatccccctcccacctcgccccttcctgtatcaaaaccttagattgattacatcccatccatccccataaaccaatgtcacgatagcctttctcccagaggcttcttcctctgcggcttcatttccttttggagaagcaaaggattttcccctaataaagggacctcaggctgcctctttccccagcctcaagtaagcagaggatcattccatasacctgcactaaacctcttctgtgtgtacaagtactccttgagcaagcctgaggcagagaactgggctgatgacacttctggccatctgcagagacctctgctgacaggcatccaagtggtgaaaggccttgcaagcagtcttgcagtccttcccgtgctagagggttcgcttgttggtctcatcacctgtgctagcagattatagttagaatccccacgagtttatacagagacatctatgagtgcgtcgatgctaatgtacatattcgcatcctccaggtcacaggaatcctgaattaggcctattccctttttaaaggcagaaactcaactcaaacgagcttaagcaaaagacgagagtcttggtgcccatttctaggaag

SEQ ID NO: 502764 - DNA, 650 bp, Homo sapiens
ctgcctatctctgtccctcgctctctcttcctgggtatctacgcccccacagtatccccctcccacctcgccccttcctgtatcaaaaccttagattgattacatcccatccatccccataaaccaatgtcacgatagcctttctcccagaggcttcttcctctgcggcttcatttccttttggagaagcaaaggattttcccctaataaagggacctcaggctgcctctttccccagcctcaagtaagcagaggatcattccatacacctgcactaaacctcttctgtgtgtacaagtactccttgagcaagcctgaggcagagaactgggctgatgacacttctggccatctgcagagacctctgctgacaggcatccaagtggtgaaaggccttgcaagcagtcttgcagtccttcccgtgctagagggttcgcttgttggtctcatcacctgtgctagcagattatagttagaatccccacgagtttatacagagacatctatgagtgcgtcgatgctaatgtacatattcgcatcctccaggtcacaggaatcctgaattaggcctattccctttktaaaggcagaaactcaactcaaacgagcttaagcaaaagacgagagtcttggtgcccatttctaggaag

SEQ ID NO: 502765 - DNA, 547 bp, Homo sapiens
ttccacagatataaggtagggaaggtggagggatgggaagccaatctgctgcctccacttcaatcacagcagttctactttttatccttctatcttgcccttctgcataacattttgtgaagtctttgaagctcaaagattctgaaaaccattaatgactcaaaggctgattccattgctaatatcctgtgatgatgactctatgtcctgtaaaaagaactyccggggatggggcattcccagcagccactctgggtttagggccagagactgtgcttccttctcactagaccccactctctctgggatgggtgacctgattgtattcaggaggttagaaagtgtgtcacattgcccagagacgtcaggggtgggggcagggaatatcgcactcctgtctaggaaaatttcattccatttggtggcttaggcttttcaagcagttatagaatcccccctcattaagccttctaaatttattcctcttgttcatcactcagagccgcatgacacttggtgctgtcacagcctgtcggaattgaggaat

SEQ ID NO: 502766 - DNA, 547 bp, Homo sapiens
ttccacagatataaggtagggaaggtggagggatgggaagccaatctgctgcctccacttcaatcacagcagttctactttttatccttctatcttgcccttctgcataacattttgtgaagtctttgaagctcaaagattctgaaaaccattaatgactcaaaggctgattccattgctaatatcctgtgatgatgactctatgtcctgtaaaaagaactcccggggatggggcattcccagcagccactctgggtttagggccagagactgtgcttccttctcactagaccccactctctctgggatgggtgacctgattgtattcaggaggttagaaagtgtgtcacattgcccagagacgtcaggggtggsggcagggaatatcgcactcctgtctaggaaaatttcattccatttggtggcttaggcttttcaagcagttatagaatcccccctcattaagccttctaaatttattcctcttgttcatcactcagagccgcatgacacttggtgctgtcacagcctgtcggaattgaggaat

SEQ ID NO: 502767 - DNA, 628 bp, Homo sapiens
tgtgcgaccttgggcaagctccttgccctttcagaaccccagcttccttacctccctgtaaaaaaggctgaagcatttgtctttgcaagctcagatctgtctaactaagcctagagttttcaagcctagagtgagaagcaatatctccagctcccattgtgtagatgaagtaatacaattcagtgacccttaaggtcctgaccatcttttaaaytccacagttgtaacaaatcatttacccatggtccttgttctcaactgcctgagcaactgtgcttggatttaaagaactcatgttgtataaaagaaaggaggagctattaggttcaagtccccactctagcattaactagctagctatgtcaccacagatattgttatctattagctatttaagtactctgaccctacacttatctcatttttaaaatggatataataccacccatctcacaaaacttaaatagaataataaatagaaagtgctttgtaaactgtgtagttccataaagcattatttcccattattaaactcatgcagcattgatgctgccaatgacttccatgttttatagggtgtgaaatttaatggaattgttaaactcactgcctttcattaaacaggtaa

SEQ ID NO: 502768 - DNA, 584 bp, Homo sapiens
tgcgaccttgggcaagctccttgccctttcagaaccccagcttccttacctccctgtaaaaaaggctgaagcatttgtctttgcaagctcagatctgtctaactaagcctagagttttcaagcctagagtgagaagcaatatctccagctcccattgtgtagatgaagtaatacaattcagtgacccttaaggtcctgaccatcttttaaattccacagttgtaacaaatcatttacccatggtccttgttctcaactgcctgagcaactgtgcttggatttaaagaactcatgttgtayaaaagaaaggaggagctattaggttcaagtccccactctagcattaactagctagctatgtcaccacagatattgttatctattagctatttaagtactctgaccctacacttatctcatttttaaaatggatataataccacccatctcacaaaacttaaatagaataataaatagaaagtgctttgtaaactgtgtagttccataaagcattatttcccattattaaactcatgcagcattgatgctgccaatgacttccatgttttatagggtgtgaaatt

SEQ ID NO: 502769 - DNA, 556 bp, Homo sapiens
acaggggagaaggggcatggccatgcgttcctgggagggtacttgctacatttctatgaggtgctcttgagaatgagatatgtgtggacctcactccccaccccacagctttgtgctcactctacttgcctgagtggtagcctgccctctctggtctcggcccaaggtgcatactgagagtttaactctgggctgcatcctgaccttggcctgagttcaggctgatgtgtctgcagccgctgcccagccaaggacccatgtggaaacctggctaccccgtatatgtctaggataatgcccactgccctgtaacaggctgtggtgagactmagatgcaactagactgcacttctcacagcttttcacccacaaagtttgcccaggtagcaccctgcctttctgagtcctaggcccaagacatattttgatagtttaatgctaagttcctcttatccttggcatgagtcagactgacacagatgcagccaccactcaaccaaaaaggagtggggaaaccaggctcttctacacatatctaggacaatacctgacacct

SEQ ID NO: 502770 - DNA, 516 bp, Homo sapiens
attttattttctttctccttatgcctcagtggctattccagacccatttgtggatacaaaagttccaccttaaaacaaggagaaagaatgggagaaataagtaaggscttacttttcctcatggaggactggcttcttggtgctgcgtttattaatgtagtttaatacaaactggagattaactggagaagactgataaagaagctagacctagcaggcaccagaagggggattaaagcttagcctaaacatccacataatctgatttatttatatgtccacatgtagagaaataaaataaaataaaattagccaagattaaaatcatgtggaatatcacaaataaacttgggctaactaaattaggcagttctagaaaatcagtgacccaactgttgggtactgattataaaataaacttgtgattctaaaagaaaaacttagtaaataggatttagggagcagtgtatatcagtggtaaccaagataaggtaccacaaataattaaggtattaa

SEQ ID NO: 502771 - DNA, 555 bp, Homo sapiens
tgcttttcactggggaaactagcctaagctgctaaaaaggtcagacaactgtgttccatgctctaaaagccatctgaacttctttgacacagtactgttcacagtttatattatatatatatatattttttggtgttatgtatatatgcaaatgagctcatctgtgattggaaagtagaggrtttttgtctgtgcaacacaaagtacaataattcaactgaatatagcaagcttagataaggactgttcagcagggtgtccccagactctgctatttggctcagattggtcagatgttttatcttggaagtctttactgcatggttatccctatcttttggcactttacaccatcttcataacttagttctcagagaatcaagaaacacggataatacaaagcttgtattaaggttctctaagaaacaatctatggagtatatatgtattacattttattgagggctttcaagctgaggatcatgtaaaatttaaactaaaagatactacatttttccctaaagaaattttaatcttaaattttaaaaagtaact

SEQ ID NO: 502772 - DNA, 669 bp, Homo sapiens
agggtgtggttcagtcctcagcacttcagctcttctcagtgttgacaggcatctcctatgcattgtgcatctttcccctaagtagacctgctccatgtgattgaaatgtgttgccgcaggtaagctggtctttcagattcctgcagcacagagacccatttactgcaaggcatctgcccactaggacccggactsgcagagccttctgatgtggattccccagcccacccttaagggagcctctgggcactttagtcagggacctggcttcctccacttactagttgtgtgatcttaaacaagtctttcagcctcctctgtaaaatggtgatgataatgacacctacctcctggggtcttgtaaggagcaaatgagctcacaggtagaaagcctggtaggcccataagggcgtaggcattgtcttctctttctcccatagtacatgattcattctttgtttcccttctaaaggacttagcccaaaggcatgtgccacatctgtccttgtcttatcacatttaattttttttaaaaaatcttattttaatgggtcattactgcatacttcatctttgtcttattattattcaattattctgtccagagacagtacagggtgatgatcacaaattcaagacccagcctgcctgaaactgaatcctgttttg

SEQ ID NO: 502773 - DNA, 639 bp, Homo sapiens
tgacaggcatctcctatgcattgtgcatctttcccctaagtagacctgctccatgtgattgaaatgtgttgccgcaggtaagctggtctttcagattcctgcagcacagagacccatttactgcaaggcatctgcccactaggacccggactggcagagccttctgatgtggattccccagcccacccttaagggagcctctgggcactttagtcagggacctggcttcctccacttactagttgtgtgatcttaaacaagtctttcagcctcctctgtaaaatggtgatgataatgacacctacctcctggggtcttgtaaggagcaaatgagctcacaggtagaaagcctggtaggcccataagggcgtaggyattgtcttctctttctcccatagtacatgattcattctttgtttcccttctaaaggacttagcccaaaggcatgtgccacatctgtccttgtcttatcacatttaattttttttaaaaaatcttattttaatgggtcattactgcatacttcatctttgtcttattattattcaattattctgtccagagacagtacagggtgatgatcacaaattcaagacccagcctgcctgaaactgaatcctgttttgcccctccctaga

SEQ ID NO: 502774 - DNA, 669 bp, Homo sapiens
agggtgtggttcagtcctcagcacttcagctcttctcagtgttgacaggcatctcctatgcattgtgcatctttcccctaagtagacctgctccatgtgattgaaatgtgttgccgcaggtaagctggtctttcagattcctgcagcacagagacccatttactgcaaggcatctgcccactaggacccggactggcagagccttctgatgtggattccccagcccacccttaagggagcctctgggcactttagtcagggacctggcttcctccacttactagttgtgtgatcttaaacaagtctttcagcctcctctgtaaaatggtgatgataatgacacctacctcctggggtcttgtaaggagcaaatgagctcacaggtagaaagcctggtaggcccataagggcgtaggcattgtcttctctttctcccatagtacatgattcattctttgtttcccttctaaaggacttagcccaaaggcatgtgccacatctgtccttgtcttatcacatttaatttttttwaaaaaatcttattttaatgggtcattactgcatacttcatctttgtcttattattattcaattattctgtccagagacagtacagggtgatgatcacaaattcaagacccagcctgcctgaaactgaatcctgttttg

SEQ ID NO: 502775 - DNA, 669 bp, Homo sapiens
agggtgtggttcagtcctcagcacttcagctcttctcagtgttgacaggcatctcctatgcattgtgcatctttcccctaagtagacctgctccatgtgattgaaatgtgttgccgcaggtaagctggtctttcagattcctgcagcacagagacccatttactgcaaggcatctgcccactaggacccggactggcagagccttctgatgtggattccccagcccacccttaagggagcctctgggcactttagtcagggacctggcttcctccacttactagttgtgtgatcttaaacaagtctttcagcctcctctgtaaaatggtgatgataatgacacctacctcctggggtcttgtaaggagcaaatgagctcacaggtagaaagcctggtaggcccataagggcgtaggcattgtcttctctttctcccatagtacatgattcattctttgtttcccttctaaaggacttagcccaaaggcatgtgccacatctgtccttgtcttatcacatttaattttttttaaaaaatcttattttaatgggtcattactgcatacttcatctttgtcttattattattcaattattctgtccagagacagtacagggtgatgatcacaarttcaagacccagcctgcctgaaactgaatcctgttttg

SEQ ID NO: 502776 - DNA, 587 bp, Homo sapiens
ctgcgtgagtgaacatgctgtctgttttagcagcagccactttttggtggcatattttgttctgtttctttatggaaatatggtttatctataccactaaactcttttctttttctggcaaccgattctgagttgaaaagtttatgccagacacggtggctcacacctgtaatcccagcactttgggaggccgaggcgggtggatcacctgaggtcaggagtttgaaatcagcctgggcaacatggtgaaaccctgtctctactaaaaatacggaaaaaaaattagccaggcatggtggcatgtgcctgtaatctcagctactcaggaggctgaggcaggagaatcacttgaacccgggatgtggaggttgcagtgagccgagatcgtgccactgcattccagcctgagcaacagagtgaaactctgtctcaaaaaagaaaagaaaagtttagaaaatactggattttgattttattggaattcatagtggtaagtttaggatacatgggcaagagggacagagaagtttaaatatcaaaatgcaggatcacctctaatcaayatattctcctttatcagtcaaaac

SEQ ID NO: 502777 - DNA, 544 bp, Homo sapiens
tggttgcaggatcaaatgcaaaatatctaaaacattgcctggcacatagtaggtgcttgatagtaattttatatttacctacttggcagctttgttttccggatgtactcctttaagtactttctcttattaatcatttctaaacccaatttatcttaaagaatttaacttaattaaataatctttcatggaaaaatgatcaaaaccagacttaagaccatgactgggaagcttatagttatttttaatttaacacagtgcattcagggcttgctgatgtgtgtagactgtttccatcaaatgtgagaaaaggagctcgacacagtctgacaatctctggcaatgcatctggtcctgaaaactagacccattccccagagaaggactggggcaggcaggacttggcaggaggtgtagaaagagacccagacaggaagaaaaccatcctggagacctggagacattgtttagcatcagcaaactccatcagcagacacataagatagtgatgtataaaacagtgkttcccaactggggcaataaa

SEQ ID NO: 502778 - DNA, 616 bp, Homo sapiens
aaaataaaattttggagaaaacaattaagyaataaacttatttgtaccgggtattgtttaatttaaccaaattgtatgtgcttttaactttttgggaatcctagaggccatatacacattaaaacagagacattacaaattccaataaagaaccttcagaagttgtttgtcaatctaatttgtagtgaatttggtgtttagtcttttgccaagtgctaagttatatagatatagacaaaatgaagaaacagccctgcatataaaaaatactttataaaatcatttccatatgacatttcattcattttgtccctcaaagaatgtttaaaggcttacatattctatacaaatttacaaatagttaaaatataaacagaagctgaatgaaaagaatcatttatactctctattgagaaaaaagacaattatagaattgatgagcatacagaagattttagaaaatatatttaagataaataagataaaggtgtgttagttatatgaatttacatataaataattattaaaataattttaacaataaagctaaagaaaagaatgttttatttaataatatgtaagttaaaataatcaggctatgatcttttaaaaatat

SEQ ID NO: 502779 - DNA, 616 bp, Homo sapiens
aaaataaaattttggagaaaacaattaagcaataaacttatttgtaccgggtattgtttaatttaaccaaattgtatgtgcttttaactttttgggaatcctagaggccatatacacattaaaacagagacattacaaattccaataaagaaccttcagaagttgtttgtcaatctaatttgtagtgaatttggtgtttagtcttttgccaagtgctaagttatatagatatagacaaaatgaagaaacagccctgcatataaaaaatactttataaaatcatttccatatgacatttcattcattttgtccctcaaagaatgtttaaaggcttacatattctatacaaatttacaaatagttaaaatataaacagaagctgaatgaaaagaatcatttatactctctattgagaaaaaagacaattatagaattgatgagcatacagaagattttagaaaatatatttaagataaataagataaaggtgtgttagttatatgaatttacatataaataattattaaaataattttaacaataaagctaaagaaaakaatgttttatttaataatatgtaagttaaaataatcaggctatgatcttttaaaaatat

SEQ ID NO: 502780 - DNA, 533 bp, Homo sapiens
aaacaaaattcatagcagaacattgactcagtagaaattcttataaacttgttttttaatcacagactactgtcattcctcacactctttaagggcccctggataagaaaattatagaatgtaatagataattagtggataataaggtatgcacaaactgtccagaagacatctggattattttaaatcagcartcgataccagctgaaagcttattttattttgtcagtatcttgtaattatgttaaaaatgacgtatctgagaatttacacggaatgtaaagaacaagatagttctatccactaaaaaaaatgattttatgttctggctaaattatcagtatgttttataggtatatgataatgtggaaccttatctataaattattctagacccattgcctgctctgtagttgggttcaaactcaggaaggaaaaggatgttaaaacagcggcaagaccaacatctgcgtagcattttgttctcttactcttgagtttgagagactttcacgacttcttattgctcagtg

SEQ ID NO: 502781 - DNA, 652 bp, Homo sapiens
aatgaactccttctcaaggaatgctttcctctaactgcggtgaaggtggtggctctggtggtcctctccaacatgggtgtctgggttttgactgcctaagagaaggtaagggacagatggatgaggcatgggacagtgtgcctttgcaaagcacattggagactttgcacagggctgcctgaatggtcccttacatggaaaaggtagcttggatttcagcctgaatgctactgaagtttgggtttatttcattactttattgctaaacactatgctgtggtgttatggactgtgctttactgggaattatttcccatgtatttcacatggcaaaaaaatatttcaccaggtgcaaaaggtcatgtgattgccctggaattttttagcatcttggttagaaacttcagttaaacctcaaactttcgagtatggtgaaayacctggtcttatattaaccctaagtatgttgtgtgttacttagaaatcttacttcaagactggaagtctgcattgaagactcagggaaactttggaaaactaagttaccttggttgaaaaggcatgatgaggctgtaactgtttacagagagacttttgtttaaaactgcagggcatgttgtaaggttggtttggtatctttgtggttttgata

SEQ ID NO: 502782 - DNA, 624 bp, Homo sapiens
ctgggattctgggacaacaaactagacagagtctttaaacatgtgatattttacttacaaagtcattatttttttctttttctcctgggctatttcaagtctcatcatattcataattgttattccagartcacttctactatggaaagaaagaaaaaatatatacacacacagtctttgaaggatttagtattaagtttctgcatgtttttctcttgaagttttatttttctggattcctagacctaagggttggttatccattttaggtagaccgagaaagcttggaggagccatagaagtatttgagtacttactccccttttaaaagtgattggctttgtttaatagttactaaagttacttatcaagcttttaaaatacttggactatatacactttattggaaacatcattcagtgtttaggcacattatacaaaaaagtttttctttctccctaacctactgctttcttcaagtctagtggatcatcagtcactttatttcccacctttttaaaaagttaccccttggcatctcttgtggttttgaacacttttgaatgaattcaagagaactgaaatgatctttttgtgtagcttgttctttacgatgtaattcat

SEQ ID NO: 502783 - DNA, 624 bp, Homo sapiens
ctgggattctgggacaacaaactagacagagtctttaaacatgtgatattttacttacaaagtcattatttttttctttttctcctgggctatttcaagtctcatcatattcataattgttattccagaatcacttctactatggaaagaaagaaaaaatatatacacacacagtctttgaaggatttagtattaagtttctgcatgtttttctcttgaagttttatttttctggattcctagacctaagggttggttatccattttaggtagaccgagaaagcttggaggagccatagaagtatttgagtacttactccccttttaaaagtgattggctttgtttaatagttwctaaagttacttatcaagcttttaaaatacttggactatatacactttattggaaacatcattcagtgtttaggcacattatacaaaaaagtttttctttctccctaacctactgctttcttcaagtctagtggatcatcagtcactttatttcccacctttttaaaaagttaccccttggcatctcttgtggttttgaacacttttgaatgaattcaagagaactgaaatgatctttttgtgtagcttgttctttacgatgtaattcat

SEQ ID NO: 502784 - DNA, 624 bp, Homo sapiens
cctaatcacattagccgctcccccttaaagctctccaggacttttctgctagctmactcagttgcctaaaaaccttcccaccttttaaaaaatgtaatttacaaataataatgtacatatttgtaccaggatagttgagttcaatttctttttcttcttgcaaaggtcttcaataaagtttttcttgcccatttagctggctaggtacttccccttgctcccaatactacttcatgacttcatggctagaggagtcaacagcgattttatagttagaagacttggatcttctaacgcttaaatcttggatcttctaacttagactcttccttaaacacagcagttaacttcagagtaccctcattttcttattcataaaattggaacctcaaagattcctatgaagatgacacaagatgagggatgtagaaagcattgtaattattttttttaactgaatagttaatttcatttaattttttaaaaatgtattatactttaagttctgggatacatgtgcagaatgtgcaggtttgttacataggtgtacacgtgccatggtggtttgctggacccatcaacctgtcatctacattagatatttctcctaatgctgtccctccc

SEQ ID NO: 502785 - DNA, 634 bp, Homo sapiens
gataatcagccaggtgatttcacagaatcagaatctgctacataaaagatgaatgtttttcatcttttggtgattgttgctgcctttattttctgactgagtctggtaatgcacaaatattccataatacgaggcacagcaataaattgggaaaggtctgatcatccgacttagttgttcctgtaagatgatttttttgtggttgaataatatttacatattccttatatattattaatgaacacaaattattcataaaatcagactttttaaaacacatttttttgctctctgaatcctgatgaatgaaagataacaaayatagttgctgaattttgagaaagactaagacaaattcagtgccacttacaaaaatctagtttacctatacatgccgtagtctaattacaccaccatatttggaaagaagagatggttaagaagagtttgaaaataaagttatattaaagttattccccttatgcgtatatatgcgtatatttgtcatgtccaaaagaagttagttaggaaccatctcagagaataggcccttgattaaatagattatccagttatttccacacaaccagatcaactgtcagatattcatgttccaattctgggtacatcattg

SEQ ID NO: 502786 - DNA, 557 bp, Homo sapiens
ttgcacttggaaattttgctcagtgaattgcccgacccaaaccttcaattgaatgtcttttaaatagtttgtactcaaaaatggcattttcttctttcagaaaatatkttgttcttcaagtatgtttttgaggttataaaataagagatgcaaagcagaattcataatggttattatctggcataaaattgtaataacaggtgttccttgcagattccaaatagctggactgtaatggggaaccagatttagtttgtaatgggctcagtactgaccttccctgctgcactacctgtgggcatcttgctaacatgataaaatggccagaatccgagaagcacctttgtttatggggttggatacttgccatatcttcaaatataataaccagcatccaatcaaaaatgactgaagcataagagtgaaacagagtgcataataagagtgtgttagagtcatttggtgtgtgctgattttaaactcatttgacatcctgttctctgattaaatccacgcaagccccttttatgactatttttacaactgtactatctcag

SEQ ID NO: 502787 - DNA, 557 bp, Homo sapiens
ttgcacttggaaattttgctcagtgaattgcccgacccaaaccttcaattgaatgtcttttaaatagtttgtactcaaaaatggcattttcttctttcagaaaatattttgttcttcaagtatgtttttgaggttataaaataagagatgcaaagcagaattcataatggttattatctggcataaaattgtaataacaggtgttccttgcagattccaaatagctggactgtaatggggaaccagatttagtttgtaatgggctcagtactgaccttccctgctgcactacctgtgggcatcttgytaacatgataaaatggccagaatccgagaagcacctttgtttatggggttggatacttgccatatcttcaaatataataaccagcatccaatcaaaaatgactgaagcataagagtgaaacagagtgcataataagagtgtgttagagtcatttggtgtgtgctgattttaaactcatttgacatcctgttctctgattaaatccacgcaagccccttttatgactatttttacaactgtactatctcag

SEQ ID NO: 502788 - DNA, 541 bp, Homo sapiens
aaccatgaggtagtcaaaaggagaaaaataaaagaactgctccacacagacttggctcggctgaaatgaaatggcctggcttggctgcagaaggcagtcagcattgatcttacgatgttctccactgctaaggaagggagaaaacaaacagggttgccaagggctgaggaaaggcagggcaggaacagaacagcccagcactgggatgggcagaccccggggctggggcagacaagagctgcagaaggccctgcaagctgcagaagggccaaggaaagagagattagaaatcagccaaaaacacaggtttagagcgagtgaggaggagggagaaccagagtcagctatatggtgtgggcgagccagtgccatttccagatgaacttcaaggtggtaaaagcagagcactggacccagcacaggacctcgaaccaagcacaggatcccagaccaagcacaggaccccgaamcaagcacaggaccccgtacaggagaacaagatccccccaagcctccacaaaggactgcagccctgccaaca

SEQ ID NO: 502789 - DNA, 483 bp, Homo sapiens
ggtaattggaagatgatatggtggcaggtgatgtgatagcaaaagtcagtttctggatgtaggaaggaatattgaaaatgttagattctagaacaaatcaatatttccaacagtgtgcaatgaagggaacctaccaggctactccagcctgaaaataccttggaaattttacaggaggtatttcttcactcactcacacacacacacacacacacgcacacacgtgcgcaaggaattatatcaggatttattagtcctgaataaacttcactagcattgtgaatttaaygctaagactttcccttccaaaagctttattatttattttcccttttctattctcatatattcatccaggagctaggaaggactgacaaaaaaaataggcaaatgctcagctttgcttcttccaccaagatctgtgatctgtaggcagaagtgattcttattaccaaagtgagtaaagttcttactccctctaac

SEQ ID NO: 502790 - DNA, 600 bp, Homo sapiens
ctgcagtagttttgggacagcagaggcttggctgacccacacagtgcagtggggtgggctcccttgcaagctcttttgcaagagcactttgtggaggaccacagtgtgaacaaagagggggaaagggacagtagaatttattttgatgaccccatatgtactggtaaggcaaaggggaagctggttgcatatacattttctcaacttatcctcacaacacccttatgaaaaaggcattatcatatcctctttgtaggtgaagaaactgaggcttggagggtccgaataacttgccaatatcacagaaagtaagtagcagagctgggattcacacatgaggctgactgcgaacccttcttggggcctctgtgaccaccctgaattcatgtctgcatattcatttattttcttctaatttggggggaagaagtctctctcttctttccaaggtcaaactttccactcctgsccataaatcctgtaacttcctaattcctgctccagagtctttgtaaagcaccgcattgctctgttgtgcatctttagcctttcttctgtcagtttattcattaatctttgccatcttttaacagaaatgag

SEQ ID NO: 502791 - DNA, 579 bp, Homo sapiens
ctcagggcttaatgccagacttaagccaatgcacaagtaaaggccgtgtattagcccattttcacactgctacaaagaactaccttagactgggtaaattatgaaaaaaaaaaagaggtttaattgactcacaattccacaggcttaacaggaagcatgactggtaggcctcaggaaacttatgatcgtggcagaaggcaaagaagaagcaaggaccttcttcacatggtggcaggaaagagagagaggaygaagggggaagtgccacacatttttaaaccatcagatctcatgagaactcactcactatcacaagaacagcaagggggaaattcacccccatgacccaatcacctcccaccaggcccttcctccaattctggatgagatttgggtggggacacaaatccaaaccatatcagacaggaattaggaataaaggactcagtgtctagaagaggattctctggaccacatgtaaaaagaggaacagaatccttatgtaatctcttctctatgccacacaaattatagtttctcatcaacttcttagggatgtcagaacccctaaaaggcctc

SEQ ID NO: 502792 - DNA, 609 bp, Homo sapiens
aaacttgcacaaacatttacagcagcacaatttgcagttgcaaaatgctggaaccagcccaaatgcccaccaatcaatgagtggataaagaattgtggatatatatatactgtaatatataaataccgggattacgcctgtaatcccagcactttgggaggctgaggggggtggatcacctccgccataaaaatgaatgaaataatggcatttgtagtaacctggatggagctggaaaccattattctaagtgaagtacctcaggaatggaaaaccaaacatagtatgttctcactcataagtgggaactaagctatgaggatgcaaaggcataagcatgataaaatgaactctggggacttgggggaaagggtgggagtgggggwgagtgataaaatactacacattgggtacagtgagcactgcttgggttatgggtgcaccaaaatctcagaaatcaccactaaagaacctattaatgtaaccaaacaccacctgttcccccaaaacttattaaaaataattttaaaaccccacagtattgcaaaggataaacatttgggtaatcaacaacaacaaccaacaactagaaaagagatcccggtgtta

SEQ ID NO: 502793 - DNA, 587 bp, Homo sapiens
ggtgccctgcagttcacctaacttgatgggtgttcagsctgtccacagcaggcttttgctctcaagaaatactgcaataaacatccttattcaaaatctaatttgctgcctatacgcatatgtgtgcaaatatatgagccatttgctaagatggacttgttgggctagagatacatggatttcagattttgatgatgttagattgctcgccaaataacagtcccctctacagttacgtaggggtctctattttcatctctgagaaatttaaaaaatcgtacaattgatgactccactattaaagaaacaatgatttcagaaagaaagaaatgtggggtttttttgtttttgttttttgtttgtttttgtttgtttttgccaagactgctcaccgaagtctttgctaacatcaataaattgctatgggaagaaaagaaagcattgcacattaaggtgatagctattcttggtcaaaagccactataaaaaagccaagtgaaatgagagattaatttccattgcgaatttgcagctaatgccacagggctgtgcagcttgtttctcagctcgtaggagcacatgctcag

SEQ ID NO: 502794 - DNA, 549 bp, Homo sapiens
gccccatgtgggcacctggaggacacgcccatccctcaccaccttaccctccagagttcagatcctgcagctttgcaggggaaaataacatgtgagccggaggtggaagcactcacgtacacgtcacgtgattcatatgacactcgtgtacacatcacgcaatccatgtgacactcgcatacacatcmcgcgatccatgtgacactcgcatacacatcacgcgatccatgtgacactcgcatacacatcacgcgatccatgtgacactcgcatacacgtcacgcaatccatgtgacacatacacatcaggcgatccatgtgacagtcacgttcatgtcacgcaatccatgtgacacgtacacatcaggcgattcatgtgacactcgcatacacgtcacgcgattcatgtgacacttgcgtacacgtcaggtgattcatgtgacactcgtgtacacgtcaggcgattcatgtgacactcgcatacatgtcacgtgattcatgtgacacttgacctggacctcctgggctcaagtgatcctcctgccttag

SEQ ID NO: 502795 - DNA, 615 bp, Homo sapiens
ctgatggactctgctctcggccactgtcctggagggaccccttcctctgcctcctgttcaggttccttatttctttcgcaattgtggcagaaggtgctgctgtttttcacagacatgagtgggacagggtttctctcctaatatttatttgccctcagagcaagggctgttctgcatggacccaggattttgaggaataagaggatgtcactgcgttttgggggatttggctgtctggccarcctttgagtaccgagtggatacaatagtagcaaagtgaggtccttcatcacctgctgtttgcacacatccattctagttcagcaacattttctgctcgtgtgagcagttacctttcatgaagcccacgctcattctgttaagggataatattacgtggttttgaccctcagggtagccacacatcccctctgcgattgtccattttactcatttgttgactcaaaaaaatgagacaggtggcagggcctgcatcggggacttctcagtgaccctcacctggatcccagtcaggctggggtctcggggaagcagaaacccaaggctgcccagctccccaggcttcatccttgcttggaacccaataagagtttc

SEQ ID NO: 502796 - DNA, 588 bp, Homo sapiens
agctgctaagtgtgcgcttgcgattcactttgttgtttgaaattatcattttgaaacagacctgttagtgtcctccaaagataatgccaacacaaagtggcattgatattgagaaagtcaccggattgaataatgaatatgacttttaaaagaggaaaaaggaagcatcatctttacacttgaaatgttcacatttcccaatattttttgattagtctatttaaatatttagagttgaagaatgtggagtaatagttcgcaataatgcattttataaatataaacaggaggaaagtgttgcctttctccaaattcacttgccttgccaggaagcgtcagtcatgctagcttagaaagtattcaatttagggggaaaaaggaaatctggggaaagacttcatttgctataaacttaactttagcaattcaaaataaaactcctatagcaaatatttccataccttgrttattttgaatatgtcaagtcccttaattttcatagccaaaaattgaagcgggaaagggcattcaggttttgtacactgatttctgttacgaagagatttctggcgtgcgggagaatttccc

SEQ ID NO: 502797 - DNA, 569 bp, Homo sapiens
ctttaaaaaaaaaaaaaaaaaaaacaccttygtcacagaatatgactttcaggtattatttggcaggaacctgtatttctctctcaaataaactttaaagaaggttctcagaatatgtctccccacacatcaatcctacttctgttattttactgggacctagtgttgtacaattttgtgttttctgtgttatttttcagcagggactttcttttagaaattattcataaatggtttaaattttttatgtaaatgaaaaatgccaaaatttgactctcatataagacgaaaaacaagctgctgaaaaaaaaaaaactatgagaaggacagggaaaatctctctcatttttacatcgcggcaaagcaacgttcatatcccatgacacatgccaaacacgtcagtgtgtcccgcgcctgcctcactcataggcgttcggaaaatagtaccacttggaggttatggagactgttacctgcctcctaataccctgagttcatttctcaccagtaccaggagattgcctttattttatagttcttggtaattatgtacaacaaaatccatatta

SEQ ID NO: 502798 - DNA, 508 bp, Homo sapiens
acaaaatccatattatgtggttatatagagtaatatctgcctgtattaraaaatagctcaatgtgtacgtattaaaaaaggatacactttaaccaaaaaataataaagaaaaagggttttttttgttaatatccgttcaaccaggtagattaagaggcagaactcaacaaaacagtagagtatataaaaataaatcactttaaaatatgccaataattctctgaaccctggaataacttcagggtagtatgtatgaggaatttcttaaatgtttttagttattaaaacagtgcatatattctgctttgtctatctgtttttctctcttttgtgaatgtatttttttttctaaaagaagctatgcattggcatgaaaggcattttgcaaatgaaatatttttaatcttctacccattactgtgtacaatgtgtaaaatgactgaagtttccagaatttttctttgaaaaaggctgtttcaaggcaaacatatttggaaatagattgagg

SEQ ID NO: 502799 - DNA, 508 bp, Homo sapiens
acaaaatccatattatgtggttatatagagtaatatctgcctgtattagaaaatagctcaatgtgtacgtattaaaaaaggatacactttaaccaaaaaataataaagaaaaagggttttttttgttaatatccgttcaaccaggtagattaagaggcagaactcaacaaaacagtagagtatataaaaataaatcactttaaaatatgccaataattctctgaaccctggaataacttcagggtartatgtatgaggaatttcttaaatgtttttagttattaaaacagtgcatatattctgctttgtctatctgtttttctctcttttgtgaatgtatttttttttctaaaagaagctatgcattggcatgaaaggcattttgcaaatgaaatatttttaatcttctacccattactgtgtacaatgtgtaaaatgactgaagtttccagaatttttctttgaaaaaggctgtttcaaggcaaacatatttggaaatagattgagg

SEQ ID NO: 502800 - DNA, 598 bp, Homo sapiens
actgacacaggcccagctgccctggggtccccagggcttccccgactcagatccctgtgcaaccaaatacacagggccctggacaatgtttctgccccaaaattgctttgagaaatacatgggccaatctgtgtctgcaaatgggaagagctcagagatttaaaaacaaaaagcaaaaaaaaaaaaaaaaaaaagcacactacaaacccaagcagagacagaggagccgcttcccatcttggttgtgaaacacgtgatcagaataacatgtgatcagaataacatgtgatcagaataacttgtgatcagaataatgtgatcagaataacgtgatcagaataacrtgaatgtgtgcaatgaagcatgctctctaatgctctctaggaattttaggagtgcctttagcccttccaatcccagtgaattcaaaaggcctgcatgtggtttattgttattcaaggtatatgtaaactttacggttattttgtagacttttttcttgtagatcttctctacagtatagctccttgatagtcataagggatatatactcagagatctcagaatcctaaatctgccaaagcatccatggcatgcc

SEQ ID NO: 502801 - DNA, 484 bp, Homo sapiens
tgcgcctctgtccagccacacagcaggtgtgcaccgcggccctgggcttccggttgggaacctcatgggcatccgctccctcccctgggcttcactccttcctgcctgggtgccgcaggctgtgagatccctgcctgggagatcccttcgcttctgtctgcggattccagtctgcctcctgaccagagggccagggctctccctggcttgcttaagctttgacccagagctccccagacagccagctccttcgtgtccccacgccagctctcctggggccttctgcatcttctgtgggctcctcctgcccagggatccttcctcctctcctctcaggggcttgctgtcaggatcttccggaattgtgtgtagctcagcatcaggactccaagcaatgggccacatccccgaccygtttcggtccaagcaatgggccacatcgccacccgtttctccacggatatttgtctactgtgggcatctg

SEQ ID NO: 502802 - DNA, 541 bp, Homo sapiens
tcaggtggtcagttccccttttactgagtaacctgagcaccctggagactctctcatcacagctcctgcagcagacgacgcacggttactgactgcgtttcccgtgctgagcatcaggtctccagaaggcactyctcccatccctgaaaccgtccaccgtccacctcacaccagcaaccccctgcacgactctccggctctggcaaccacccttctgctctctgtttctatgagtttgactatgctaccaacttttacaacctctacatgaaatacatgaaaagactgctgcaaatctccaagcctgacaaaagcacatggttttttccggtcagcattgcagagcctctcgtctaacggccagaggggaaccacgatgacagacactggtgctgcctccatgaggaaccaggtccagagaaaatgcctctgggcaggagggggaactgctgccttatttttatgtgttttccactttttatttaaccatgtggatatattattcataaaaatgaaatttagaataaaaatcaacgagaac

SEQ ID NO: 502803 - DNA, 687 bp, Homo sapiens
gccaggcctaaatgtctactcacctctgataacataccctcagaggacaaagcaattggaaagggcctttaatcacaatgttaggaatgggggttgaaataaaaggctgcttaaagcataaatattatcactaccaaagtaaaaaaacaggagaaatcatatataatttccaccattttaaaagacataaatatgtgtgtatttccatataaaatctgtcacgacctcactcactgcctctacacatgcacacacaatgcacatgaacacaaaacacacgtgcacacatataaacgcaaagcacaacacacgtgcayacacacaaacaggcacatacacaatgcacatgtgcacacacaaacatgcatatacgcacatatacacaggcatataaacgtgacacatatatgcatgtgtgcatacacagacacatgcaaacacatacacacaatatacatgtgtgatactacatgcaaacatggacatgtgtgtgcatatatgcacacagacatgcatggatgcacatatacacaatgcatgtgtgtgcatgtatatgtgcatgcacacatacacacgcaggcatacacacaggcacaccccacacacatgcatgcacatattctctcacatacacatgtgcatcccacacacaggcatacacatatgcacactttcacaattacatct

SEQ ID NO: 502804 - DNA, 687 bp, Homo sapiens
gccaggcctaaatgtctactcacctctgataacataccctcagaggacaaagcaattggaaagggcctttaatcacaatgttaggaatgggggttgaaataaaaggctgcttaaagcataaatattatcactaccaaagtaaaaaaacaggagaaatcatatataatttccaccattttaaaagacataaatatgtgtgtatttccatataaaatctgtcacgacctcactcactgcctctacacatgcacacacaatgcacatgaacacaaaacacacgtgcacacatataaacgcaaagcacaacacacgtgcatacacacaaacaggcacatacacaatgcacatgtgcacacacaaacatgcayatacgcacatatacacaggcatataaacgtgacacatatatgcatgtgtgcatacacagacacatgcaaacacatacacacaatatacatgtgtgatactacatgcaaacatggacatgtgtgtgcatatatgcacacagacatgcatggatgcacatatacacaatgcatgtgtgtgcatgtatatgtgcatgcacacatacacacgcaggcatacacacaggcacaccccacacacatgcatgcacatattctctcacatacacatgtgcatcccacacacaggcatacacatatgcacactttcacaattacatct

SEQ ID NO: 502805 - DNA, 687 bp, Homo sapiens
gccaggcctaaatgtctactcacctctgataacataccctcagaggacaaagcaattggaaagggcctttaatcacaatgttaggaatgggggttgaaataaaaggctgcttaaagcataaatattatcactaccaaagtaaaaaaacaggagaaatcatatataatttccaccattttaaaagacataaatatgtgtgtatttccatataaaatctgtcacgacctcactcactgcctctacacatgcacacacaatgcacatgaacacaaaacacacgtgcacacatataaacgcaaagcacaacacacgtgcatacacacaaacaggcacatacacaatgcacatgtgcacacacaaacatgcatatacgcacatatacacaggcatataaacgtgacacatatatgcatgtgtgcatacacagacacatgcaaacacatacacacaatatacatgtgtgatactacatgcaaacatggacatgtgtgtgcatatatgcacacagacatgcatggatgcacatatacacaatgcatgtgtgtgcatgtatatgtgcatgcacacatacacacgcaggcatacacacaggcacaccccacacacatgcaygcacatattctctcacatacacatgtgcatcccacacacaggcatacacatatgcacactttcacaattacatct

SEQ ID NO: 502806 - DNA, 526 bp, Homo sapiens
ctgctgagccgggaataaggggcttcctcgtcagagccctcgtctagggacttgctgggccacagatgcctctccatccggggtcttttagtttgtgtcccggcatttcacaaggtcataaggccaagcaagaatgctttaagcaggactgttcatggagatgggcaggcgcacacacacacacacacacacatgcacagacacacatgtgcacaggcacatgcacacatacagacacatacagacacagacatgcacacacaaagactcgcagacacacccatacatacacatacaaacacacatagacatgtaaatgcacacacacagactcacacacacacatgaggtgggggctttaactcatgaattttggggacctattcagcccataaaatgtccaccaaattgtacattagtggtaggaaatacatatggtccatacgacgacatcaacgttacaagcctttactttccagtcactggtgccgcgtgtstgcaagtagtcctaaacctccccaaacat

SEQ ID NO: 502807 - DNA, 598 bp, Homo sapiens
agtatgggtgacagagcgagactctgactcaaaaaaaaawaataaaatgccctttttgttttgggtttaggaacataaactggtctcaggggtttatggctctttcttctcattgttggggaggagctcatgggccctgggtacacctcggtctactgagaagtgtatgtgttggattggtaaaaaacagcaaacaaagttacttctgtctgaggcctgaagttttaaatttttatttttttgctattagaaaataatgacaaaaattacaatagtgagaacagggtatgaaggaaagttctagaatggtcagcaggtgcactgcttagtggtctgtctgcctccaggttcactctccactgcctgccccaccttggagccaatgccatggccttgccttcccgccctgccatgctgtgctcacagcagccttccagattgaagtgtgcctgcccctccccagagaagctgggcatcccctccagcccatgctggggaggcagcacagccctggatgtggcccaggactcactgccatcgccagttacccaccacccagaggcccaggatgcgcggtatggtggatgtgtcagggtgc

SEQ ID NO: 502808 - DNA, 598 bp, Homo sapiens
agtatgggtgacagagcgagactctgactcaaaaaaaaataataaaatgccctttttgttttgggtttaggaacataaactggtctcaggggtttatggctctttcttytcattgttggggaggagctcatgggccctgggtacacctcggtctactgagaagtgtatgtgttggattggtaaaaaacagcaaacaaagttacttctgtctgaggcctgaagttttaaatttttatttttttgctattagaaaataatgacaaaaattacaatagtgagaacagggtatgaaggaaagttctagaatggtcagcaggtgcactgcttagtggtctgtctgcctccaggttcactctccactgcctgccccaccttggagccaatgccatggccttgccttcccgccctgccatgctgtgctcacagcagccttccagattgaagtgtgcctgcccctccccagagaagctgggcatcccctccagcccatgctggggaggcagcacagccctggatgtggcccaggactcactgccatcgccagttacccaccacccagaggcccaggatgcgcggtatggtggatgtgtcagggtgc

SEQ ID NO: 502809 - DNA, 598 bp, Homo sapiens
agtatgggtgacagagcgagactctgactcaaaaaaaaataataaaatgccctttttgttttgggtttaggaacataaactggtctcaggggtttatggctctttcttctcattgttggggaggagctcatgggccctgggtacacctcggtctactgagaagtgtatgtgttggattggtaaaaaacagcaaacaaagttacttctgtctgaggcctgaakttttaaatttttatttttttgctattagaaaataatgacaaaaattacaatagtgagaacagggtatgaaggaaagttctagaatggtcagcaggtgcactgcttagtggtctgtctgcctccaggttcactctccactgcctgccccaccttggagccaatgccatggccttgccttcccgccctgccatgctgtgctcacagcagccttccagattgaagtgtgcctgcccctccccagagaagctgggcatcccctccagcccatgctggggaggcagcacagccctggatgtggcccaggactcactgccatcgccagttacccaccacccagaggcccaggatgcgcggtatggtggatgtgtcagggtgc

SEQ ID NO: 502810 - DNA, 598 bp, Homo sapiens
agtatgggtgacagagcgagactctgactcaaaaaaaaataataaaatgccctttttgttttgggtttaggaacataaactggtctcaggggtttatggctctttcttctcattgttggggaggagctcatgggccctgggtacacctcggtctactgagaagtgtatgtgttggattggtaaaaaacagcaaacaaagttacttctgtctgaggcctgaagttttaaatttttatttttttgctattagaaaataatgacaaaaattacaatagtgagaacagggtatgaaggaaagttctagaatggtcagcaggtgcactgcttagtggtctgtctgcctccaggttcactctccactgcctgccccaccttggagccaatgccatggccttgccttcccgccctgccatgctgtgctcacagcagccttccagattgaagtgtgcctgcccctccccagagaagctgggcatcccctccagcccatgctggggaggcagcacagccctggatgtggcccaggactcactgccatcgccagktacccaccacccagaggcccaggatgcgcggtatggtggatgtgtcagggtgc

SEQ ID NO: 502811 - DNA, 598 bp, Homo sapiens
atgggtgacagagcgagactctgactcaaaaaaaaataataaaatgccctttttgttttgggtttaggaacataaactggtctcaggggtttatggctctttcttctcattgttggggaggagctcatgggccctgggtacacctcggtctactgagaagtgtatgtgttggattggtaaaaaacagcaaacaaagttacttctgtctgaggcctgaagttttaaatttttatttttttgctattagaaaataatgacaaaaattacaatagtgagaacagggtatgaaggaaagttctagaatggtcagcaggtgcactgcttagtggtctgtctgcctccaggttcactctccactgcctgccccaccttggagccaatgccatggccttgccttcccgccctgccatgctgtgctcacagcagccttccagattgaagtgtgcctgcccctccccagagaagctgggcatcccctccagcccatgctggggaggcagcacagccctggatgtggcccaggactcactgccatcgccagttacccaccacccagaggcccaggatgcgyggtatggtggatgtgtcagggtgcaca

SEQ ID NO: 502812 - DNA, 568 bp, Homo sapiens
tgttttatgttgactaattatactttttctcccatttttcttgccaccacataggaagggcattgatggtggcttgcatttctataragggtcccagtgggagtgtaactggattgaaatcatcattcaaaactactgctgctagaactttgtatttctcttctgttgggaacttgaatgtttcatcgagaaaaaaaagaaaaacgaggatcagaaccagcaagtagtgctagatgtctgtgtgcccctccagacacactctaccctgagctgctgagctctgcatcctgggaactggcctcagagggttgcattctgtcgctagatgtttgtgtgcccgtccagacacactccacaccaccctgctgagctctgcatcctgggaactggcctcagagggttgcattctgtcgctagatgtttgtgtgcccgtccagacacactccgcaccaccctgctgtgctctgcatcctgggaactggcctcagagggttgcattctgtcgctagatgtttgtgtgcccgtccagacacactccgcaccaccctgctgagctctgcatcctggg

SEQ ID NO: 502813 - DNA, 568 bp, Homo sapiens
tgttttatgttgactaattatactttttctcccatttttcttgccaccacataggaagggcattgatggtggcttgcatttctatagagggtcccagtgggagtgtaactggattgaaatcatcattcaaaactactgctgctagaactttgtatttctcttctgttgggaacttgaatgtttcatcsagaaaaaaaagaaaaacgaggatcagaaccagcaagtagtgctagatgtctgtgtgcccctccagacacactctaccctgagctgctgagctctgcatcctgggaactggcctcagagggttgcattctgtcgctagatgtttgtgtgcccgtccagacacactccacaccaccctgctgagctctgcatcctgggaactggcctcagagggttgcattctgtcgctagatgtttgtgtgcccgtccagacacactccgcaccaccctgctgtgctctgcatcctgggaactggcctcagagggttgcattctgtcgctagatgtttgtgtgcccgtccagacacactccgcaccaccctgctgagctctgcatcctggg

SEQ ID NO: 502814 - DNA, 568 bp, Homo sapiens
tgttttatgttgactaattatactttttctcccatttttcttgccaccacataggaagggcattgatggtggcttgcatttctatagagggtcccagtgggagtgtaactggattgaaatcatcattcaaaactactgctgctagaactttgtatttctcttctgttgggaacttgaatgtttcatcgagaaaaaaaagaaaaacgaggatcagaaccagcaagtagtgctagatgtctgtgtgcccctccagacacactctaccctgmgctgctgagctctgcatcctgggaactggcctcagagggttgcattctgtcgctagatgtttgtgtgcccgtccagacacactccacaccaccctgctgagctctgcatcctgggaactggcctcagagggttgcattctgtcgctagatgtttgtgtgcccgtccagacacactccgcaccaccctgctgtgctctgcatcctgggaactggcctcagagggttgcattctgtcgctagatgtttgtgtgcccgtccagacacactccgcaccaccctgctgagctctgcatcctggg

SEQ ID NO: 502815 - DNA, 568 bp, Homo sapiens
tgttttatgttgactaattatactttttctcccatttttcttgccaccacataggaagggcattgatggtggcttgcatttctatagagggtcccagtgggagtgtaactggattgaaatcatcattcaaaactactgctgctagaactttgtatttctcttctgttgggaacttgaatgtttcatcgagaaaaaaaagaaaaacgaggatcagaaccagcaagtagtgctagatgtctgtgtgcccctccagacacactctaccctgagctgctgagctctgcatcctgggaactggcctcagagggttgcattctgtcgctagatgtttgtgtgcccgtccagacacactccacaccaccctgctgagctctgcatcctgggaactggcctcagagggttgcattctgtcgctagatgtttgtgtgccygtccagacacactccgcaccaccctgctgtgctctgcatcctgggaactggcctcagagggttgcattctgtcgctagatgtttgtgtgcccgtccagacacactccgcaccaccctgctgagctctgcatcctggg

SEQ ID NO: 502816 - DNA, 471 bp, Homo sapiens
aattctgattattcaaccataagacacttcataataatttgcaaaagtaatttttactttcaacaagtcattttttttgttcaagtacagtgtcactaggtttaaaaatcagatttttttttgagagagggtcttgcacttcacatatgctggagtgcagtggcccaatattggctgactgcaacctccatccctggggctcaggtgatgctccccyctcaggctcccaaaagtcagatcttaagtggtgccacctagcaagtttgaggtagttaaaaatctgtgacgtggtaatcgacagtttctcaatgaattaaatacaaataaaagagtattgttttgttggagagatcattgtggcaggctcaacaacaaaaacattaaagccactaaaaacaaatcacaggcgagatttccagcaatggccatttgaagagaaaattaaaccctctcctccaaaagcaactatac

SEQ ID NO: 502817 - DNA, 471 bp, Homo sapiens
aattctgattattcaaccataagacacttcataataatttgcaaaagtaatttttactttcaacaagtcattttttttgttcaagtacagtgtcactaggtttaaaaatcagatttttttttgagagagggtcttgcacttcacatatgctggagtgcagtggcccaatattggctgactgcaacctccatccctggggctcaggtgatgctcccctctcaggctcccaaaagtcagatcttaagtggtgccacctagcaagtttgaggtagttaaaaatctgtgacgtggtawtcgacagtttctcaatgaattaaatacaaataaaagagtattgttttgttggagagatcattgtggcaggctcaacaacaaaaacattaaagccactaaaaacaaatcacaggcgagatttccagcaatggccatttgaagagaaaattaaaccctctcctccaaaagcaactatac

SEQ ID NO: 502818 - DNA, 392 bp, Homo sapiens
ctgaaacccctgccccctgcagcttgtagaagttctgtcagattaaggcaggctgcgaaggaactgtagcttcttggctgcaattaatggatcacctggcttggrggaatgaatggtgtaaaataatcaacagaggagttaaagtgatacactcagttattcaggaagagattgagaaggcgagagacatgtggaaaataaattgcaaaatggtaaatgtaaatccagccatatcattagttgcattaaatatgaatggtctaaacacccaaataaaaagagcagagatcatcagattagataaataagtaagatttagctacatgctgtctacaagatacattttagaatcaaagacacaaatacattgaaagtaaaaaaaaaaaaaaaaa

SEQ ID NO: 502819 - DNA, 392 bp, Homo sapiens
ctgaaacccctgccccctgcagcttgtagaagttctgtcagattaaggcaggctgcgaaggaactgtagcttcttggctgcaattaatggatcacctggcttggaggaatgaatggtgtaaaataatcaacagaggagttaaagtgatacactcagttattcaggaagagattgagaaggcgagagacatgtggaaaataaattgcaaaatggtaaatgtaaatccagccatatcattagttgcattaaatatgaatggtctaaacacccaaataaaaagagcagagaycatcagattagataaataagtaagatttagctacatgctgtctacaagatacattttagaatcaaagacacaaatacattgaaagtaaaaaaaaaaaaaaaaa

SEQ ID NO: 502820 - DNA, 534 bp, Homo sapiens
gaactgcaaactacagtagtttctactgtatagctagaatggcacttacttgattacacttgagtaagaatataaactgttgttttgggaaaatttttgttagaaaactagatttcacacagcccatagaatttttgtcactacccatagaattccattgtcagcgcctacacccgcctctggccgccttcccaggcatggtccaccgtgagccgtmactgctttgaactccttgtctgtcccgttgtaccgtcatcaccttctctgtcatcagtgcgattgcacacgcatggattccctgccttattgaagacattggagacctccctcccgcctacaggaccaggggccttcaccctcaggaatgcccagtacgagggctgagtttgcagtcaaatagttaatgttcatagagcttattagagacccacagcatttaatcctcaaacagccccttcagtaggcactattattatcatcatttgttcatggggccactgaggcacagcaagatgaaatgatttggccaaggta

SEQ ID NO: 502821 - DNA, 513 bp, Homo sapiens
agtagtttctactgtatagctagaatggcacttacttgattacacttgagtaagaatataaactgttgttttgggaaaatttttgttagaaaactagatttcacacagcccatagaatttttgtcactacccatagaattccattgtcagcgcctacacccgcctctggccgccttcccaggcatggtccaccgtgagccgtaactgctttgaactccttgtctgtcccgttgtaccgtcatcaccttctctgtcatcagtgcgattgcacacgcatggattccctgccttattgaagacattggagacctccctcccgcctacaggaccaggggccttcaccctcaggaatgcccagtacgagggctgagtttgcagtcaaatagttaatgttcatagagcttattagagacccacagcatttaaycctcaaacagccccttcagtaggcactattattatcatcatttgttcatggggccactgaggcacagcaagatgaaatgatttggc

SEQ ID NO: 502822 - DNA, 513 bp, Homo sapiens
cacaagaaggggcttgacgagcctcgrattgatttattgatttagaggttgcttttctagccaaggcaactgaagattagactcctgatcacggacacttgactccattcggagagcagggcccatctgtgcatgcaagatcgcctcccacaaaggagagaaattctcctccattctttctcttgattgcctttctatcttaattttttttctctctctctcatcaccttcttacatctgttgcaggttaaagggcacagttcaatgtctatcaggtgaactttgactttaaacttaaatctcagtccttgcacagaccccataatcaaagtagaaaaccataagctgtgaaaacttcatgtagaagtttgcccacagctacacagccatggccatgacatctaacgttcctagatttctaatggaattaacttctactggtttgtcataagaaatggagatgcagaagcactggctgttttacagattacactagaaagagacataggggtt

SEQ ID NO: 502823 - DNA, 513 bp, Homo sapiens
cacaagaaggggcttgacgagcctcggattgatttattgatttagaggttgcttttctagccaaggcaactgaagattagactcctgatcacggacacttgactccattcggagagcagggcccatctgtgcatscaagatcgcctcccacaaaggagagaaattctcctccattctttctcttgattgcctttctatcttaattttttttctctctctctcatcaccttcttacatctgttgcaggttaaagggcacagttcaatgtctatcaggtgaactttgactttaaacttaaatctcagtccttgcacagaccccataatcaaagtagaaaaccataagctgtgaaaacttcatgtagaagtttgcccacagctacacagccatggccatgacatctaacgttcctagatttctaatggaattaacttctactggtttgtcataagaaatggagatgcagaagcactggctgttttacagattacactagaaagagacataggggtt

SEQ ID NO: 502824 - DNA, 513 bp, Homo sapiens
cacaagaaggggcttgacgagcctcggattgatttattgatttagaggttgcttttctagccaaggcaactgaagattagactcctgatcacggacacttgactccattcggagagcagggcccatctgtgcatgcaagatcgcctcccacaaaggagagaaattctcctccattctttctcttgattgcctttctatcttaattttttttctctctctctcatcaccttcttacatctgttgcaggttaaagggcacagttcaatgtctatcaggtgaactttgactttaaacttaaatctcagtccttgcacagaccccataatcaaagtagaaaaccataagctgtgaaaacttcatgtagaagtttgcccacagctacacagccatggccatgacatctaacgttcctagatttctaatggaattaacttctactggtttgtcataagaaatggagatgcagaagcactggctgttttacagattacactrgaaagagacataggggtt

SEQ ID NO: 502825 - DNA, 649 bp, Homo sapiens
tgtctgtactgctctctcccagagtgatttctttccttttaattgatcacccattctctaatatacaaaatcaaataaaaccgagacacagcctcgtagagatcacctgtctctttggtcatgtttgtcctcaaggtgccagcacttgaagaggtggagctggagggcatcagccatggagaaggtgtgactccccccagcatcacccctccyccactcacactgcagacaggtctgccccgtctgaaatcagcttgaccctccatcctggaaaactgccggctgatgtgggctttcgcccatccctctgtgactggcctgagctctgcccttgtccacgcgtgggtagatcagaggcaggaaagacacatctaccctggagcaccctggcagcaggtgcctgaggggctgagagcaaacgggcggcgatgcattgcctgcagcctcctctggcctccctggcatgcttagggggaaaagtcgcttctgtgcacattgtcaaggagcgagggggcctcatcagtactttatgataacagcacacaaccctgctagccgtgggtagtgcctgtgattacttgctttctaccgatgttaggctgcgttacgatcggcattcactgttcagcgcttgctaggctgttaatta

SEQ ID NO: 502826 - DNA, 586 bp, Homo sapiens
ccaaacaatagcagcctccgcgagactagctcagagcacacgacacaaaggcaggtcctgctaattgcatctgaggctcttgcttcaaagtcttgacgacctaaggcaggttggaggctctgttctgatgccagttgctccttagacctcatcgccaaggagacctcctgatgcagacaccagcaagggctgtcgtgacagaggcttgtcctgtatggctgggagcttcccctgcaccactgggtcctgtgctgatgccaatggagtgagagagagatagagagacagagagaatcagagacagagagagacgcgaatcaggcagaatcagatrgagacagaaaaagagacagacagaatcagacagagacagagagagaaaagagatacacagagagagaaaaacagagagaatcagacagagacagtatcagatagagacagagaaagacaagagatacacagagagacagagaaaaacagagagaatcagagaatcagatagagacagagagagacagaatcagatagagagagacagaagagctacatagagagagagacagagaaaaacagagagaatcag

SEQ ID NO: 502827 - DNA, 586 bp, Homo sapiens
ccaaacaatagcagcctccgcgagactagctcagagcacacgacacaaaggcaggtcctgctaattgcatctgaggctcttgcttcaaagtcttgacgacctaaggcaggttggaggctctgttctgatgccagttgctccttagacctcatcgccaaggagacctcctgatgcagacaccagcaagggctgtcgtgacagaggcttgtcctgtatggctgggagcttcccctgcaccactgggtcctgtgctgatgccaatggagtgagagagagatagagagacagagagaatcagagacagagagagacgcgaatcaggcagaatcagatagagacagaaaaagagacagacagaatcagacagagacagagagagaaaagagatacacagagagagaaaaacagagagaatcagacagagacagtatcagakagagacagagaaagacaagagatacacagagagacagagaaaaacagagagaatcagagaatcagatagagacagagagagacagaatcagatagagagagacagaagagctacatagagagagagacagagaaaaacagagagaatcag

SEQ ID NO: 502828 - DNA, 613 bp, Homo sapiens
gagttagatggcactacagccacattgatgtttaggaaccacacaaggttttcagctagtgacgttccygggggcaggaaggatggtcatattttgatgtttttgcctgtggcctgggtgataggcaaataattcagtaaagaaataacctctatcaacatcaaacactgaagagagaccagcaaaactgagagtgttttgggaaaaagagcagagagaactgaattccaaggggatcccgaagcaaagaaagattgctggtctggaaactcctgagagatgtgcttaccatatacacaggcttttctaagatcattttgatttcaaatattctgtccttgtgcttcgacaaatgtagccaagggttctgatatttacattagaaaacacgaccgccatatgtctccttaagcacaggaaaactctaaatgatgcatgaatccctctgttcaacatgcatcatgaatcctgtatgccccaaatattttgaagtttcccttcactgaaaggagcggagaagcagcagctcagtgacacacgagctgctgaaatgggttattgaaaacccatttcaaccagagggtaccgttgcctctgtggcttcatgcctcaa

SEQ ID NO: 502829 - DNA, 626 bp, Homo sapiens
gaatatcctgcctttggggacacctgtatgactgtactacatcccagataactgtagagggcaatgattctccagggaagtgtctacaggttggcctcaagcccctccaactctgttaatggagcagtcagggttggctctggtgaacaacctggaagctaagttttttgggagcaaaargtaagccaggaaaaaaatgcaggtcttctagaaatggtctgctttccatctaaggtgagatttttctaggtggctgtggttgttaattttatatgtcaagttgactgagccacagggtgcccagatatttggtgaaacattagtctgggtgtttctatgaggttgtttttgaatttgtttaacgtttaagttgatagactgagtaaaatagattgtcctctgtaacgtgagtggtctcacccaatctactgaaggcctgaatagaacaaaaggctgaccctctcccatatgagagagagttgctcctgcctgactgtctttggcctggaacatcagttttttttccccacttttggacttgaagtgaaccattggctcttcctgggtctccagccttctggcctgcagactgaaactacactgtcagctctcctgggtctctagct

SEQ ID NO: 502830 - DNA, 583 bp, Homo sapiens
gaaaagagaaaacaggaggtggtctatggcccccaagaaaagaagtgactgtcgccccttttttcagggtgcctgagaccagcactgggactagcactacagttaggagctggtacagtttggctctttgtctctgcccaaatctcatgtggaaatgtaatctcagtgtgttaaaggtggggcctggtgggagctgattggatcatgggggtaatttgtaatggtttttcaccatcaccgttcccctagtgctgtctcgtgatagagttctcacaagatctgatggtttaaaagtgtgtggcactcgcctgcttcactctttctctcttgtyacctttgcctttgccctttgccttctaccataattgtaagtttcctgaggcctttcaatcatgtttcctgttaagcctgcagaactgtgagtcaattaatccactttttttcataaattacccaatctcaggtagttccttattacctgaattagtgtgaaaacagactaatataggaccctactggagacgtggctcaggattgggactacccgaagtgataggtagaatagagcacctggggctctaca

SEQ ID NO: 502831 - DNA, 526 bp, Homo sapiens
ctgctccacagatgtctctgtgccacactacatttctccccactgccagggatcccctggggttgttctcttaactagagtttactcattctagaaagagcaaacaggatattatttgagcaaataatttactctttgtctttttccttccttttgtttcaaacatcctaatacctgacagaaaactcgatatcgaccttttttatcttgtgccaaggcttaaaccctttaaagaaatggtgccaggtaccccagagaggaaagagagaaaagataatgactttcaagtccagcagaaatagaaggcagggatttccagagaccgtgtaaggagatgaacgtgagagggtttctctaatattagagatccacatattgctccgtggccaactctgacaaagggaagagaccccaagggtggttgcagagggcacctaaggctggtcctataatccagtgccctcaggttggctgctagggctgacagccccaactggactgtrgcaacaggccatctcagtacgac

SEQ ID NO: 502832 - DNA, 561 bp, Homo sapiens
catgacagggtctgatttgctgagtgttctggtcttcatcttttctcctgtgctggttgcttcctgccctagaacatcagaccccaagttcttcagcttttggactcttggacttacaccagcggtttgccaggggctctcaggcctttggccagagactaaaggctgcactgtcagcttccttacttttgaggttttgagactgggactgatccaccactggcttcctcgctcctcaacttgcagacgacatatcgtgggagtttacctctwgatcgtgagtcaattctccttaataaactccctttcctatatacatatatcctgtttgttctgtccctctagagaaccctgactaatagacatggtcattgttgaaaattacctgaaacaagaggccgacttggttaggagtcccttagcataggcagttccttgagatgtggaaaaaaaaaagtaaactttttaaaaatataattatataatctaatttaggctaatatttatattctgaaagggaataatctcttggtcacagaggaagctttaaaaaaacatgaa

SEQ ID NO: 502833 - DNA, 606 bp, Homo sapiens
tgtatcccccaggctactgacacaggagaatctgtaggagaaaaaaaaatagcaaakattttcagccagggtaattcacagtgaataagacagcaacatattccaattgataacagaaattaattcaatatgtcatgtaagggcagaagagttcatatcaaatgtggtccccagatcccaaattgaaactattacaatttcctctttccctactaggggaaacacttcacagtgatgctattgccattatcctttatttattttttcataaagaaagacttagcaatttgtgtgttgttgctttcctaaaatcctcaggtcaagattttaagggacgctcaagccattagaagttttaccactttaaaaaaaattcaaaacgtttaatgttttgctgcttgaagcagatgattccaagtggcattctggagttatgcttgttgctgcagctgctgaaaaaaattctttcagtgatcagttctcaccggggcagccacagccacagcatggagcactgggaaggagtaaggctctaggactacaggatggcagtgtttggccttggaacagtgttgggaaggccatgaggagggtgaccgcatctcc

SEQ ID NO: 502834 - DNA, 606 bp, Homo sapiens
tgtatcccccaggctactgacacaggagaatctgtaggagaaaaaaaaatagcaaagattttcagccagggtaattcacagtgaataagacagcaacatattccaattgataacagaaattaattcaatatktcatgtaagggcagaagagttcatatcaaatgtggtccccagatcccaaattgaaactattacaatttcctctttccctactaggggaaacacttcacagtgatgctattgccattatcctttatttattttttcataaagaaagacttagcaatttgtgtgttgttgctttcctaaaatcctcaggtcaagattttaagggacgctcaagccattagaagttttaccactttaaaaaaaattcaaaacgtttaatgttttgctgcttgaagcagatgattccaagtggcattctggagttatgcttgttgctgcagctgctgaaaaaaattctttcagtgatcagttctcaccggggcagccacagccacagcatggagcactgggaaggagtaaggctctaggactacaggatggcagtgtttggccttggaacagtgttgggaaggccatgaggagggtgaccgcatctcc

SEQ ID NO: 502835 - DNA, 606 bp, Homo sapiens
tgtatcccccaggctactgacacaggagaatctgtaggagaaaaaaaaatagcaaagattttcagccagggtaattcacagtgaataagacagcaacatattccaattgataacagaaattaattcaatatgtcatgtaagggcagaagagttcatatcaaatgtggtccccagatcccaaattgaaactattacaatttcctctttccctactaggggaaacacttcacagtgatgctattgccattatcctttatttattttttcataaagaaagacttagcaatttgtgtgttgttgctttcctaaaatcctcaggtcaagattttaagggacgctcaagccattagaagttttaccactttaaaaaaaattcaaaacrtttaatgttttgctgcttgaagcagatgattccaagtggcattctggagttatgcttgttgctgcagctgctgaaaaaaattctttcagtgatcagttctcaccggggcagccacagccacagcatggagcactgggaaggagtaaggctctaggactacaggatggcagtgtttggccttggaacagtgttgggaaggccatgaggagggtgaccgcatctcc

SEQ ID NO: 502836 - DNA, 522 bp, Homo sapiens
gaaatgcaaggtttagatgaatgccttatgaatgaaatataagagattactagtctgcagataagaaaattagacgtttgcaagcggcacagaagagcaaaggaagtaagcaatctttacagatcggcaaacaaagtccttcaagtggattgaaatcaaacaaaggatattaaaagacacctaaaataggggcagaaaactgacctcaactctgttgcctgtcaggtaatgccattaggggttttaagtaagattgaggatgcactcttctaaggctatggaactgtccaacacagtagccactggccccagtgagatgtctaaatttaaattgtttgaaataaaacaaaatccataattcagttgttctattcccagctcagtgacttatttcggccggtcttatccatctgtggacctcaaaatcccaastggtaaagaaggggctgacagaaggtctgcaagatctcttccagctcgggggtgttcttgattctgtggccagtcttggaaaacagctca

SEQ ID NO: 502837 - DNA, 666 bp, Homo sapiens
ttttacagatgaaaaaaaaaaacactaaagaagtaaagtgtgtgggtcaaagtcacagagcttcttagaggtggacctttgtctcggtgtgtctgagacagaaggcgtggctccagcactcaccaccattcacaagcccacacgctgtgcctgaaaggatatgacaggggaagaaaaggctgaattgcaaaagaaatatagaaatagacagtaatatggatgcaattcagtggcagatcagggggcagaggaaggaaaaaatagattctagaattaggcaaggaccagatcagtcaagggtgaaaaaggagaattgtgaatgaaagatgaatggggtacagaccgtggagaaagatgaaataagcgaagtatgaaatcaaccctcctttggccgtaccttccagggcagccttgaaatatgtcacttactgcctgtcacttgcaggtatagaggaggtgaagttggtggtgagtgaggtggcagtggggatggctttctgtgtgtggccaggtcacagcagagggtcttcaggggagactttcrggaaggagcagtactcctggaaacttaggggttaactcatctgggtagatagcggaatctcttcctcaccagccaggatggaacagtgtctgcctttcttcattccctgctgaacctcttgc

SEQ ID NO: 502838 - DNA, 420 bp, Homo sapiens
aaataaaatataatcattggtcttagccctggcattatttcatcataataaaatgatgcttcaggttccaagtcactttcctactcatctgagttgatcttccaagctacccaaggacgcagtccacgcaaatgttattcatgtcagattcacaaaggaaactgaggctctgaaagaagtcaggggctgatctgggggcacacatttagctatgcagcagtgggaatttaaaaccaggactaatccatcactccaacttcacctggagtcaagtcagcactcagacacggatggagatgaatttgtaaaagggagtaacttgattgtcctcagaggccacagccagcatcaatgtgacaacccacaggcatcaccccagggtgctagtggggygctgatgccccttcagggaccctaagt

SEQ ID NO: 502839 - DNA, 597 bp, Homo sapiens
gtacgttctttcttgctttaagttggatcactgaagttaccctccgagactccatgtttgataacccatgagcactttagattggttcctgtccacaactcccgggcctccagccataaggaggatggggttaagtgtagatgaatcaaagccaccagcctcttcacaagataaatactccctgagagtagacagcccatggacagcaacgttggctttgtacaggaaatatagcagctttagctgatggctttgggcagtgttggttgactgaccctgagttcatgcttggctccttcttggctcatacccttactagagggggcacttttcttctaaaagaatgagaaaatccttccgttggccctgattccctttgaagaaggtgctggtctcaggctcagagtctgctctggtttctactttattggtccaatgttatgaatggagaagagtgagaacagaaacaaagacgttgaagaaggcaaacgtgaaatctatcttggcaggcagagtcttgaggktgaggaagagtgccaaccacaaagtgcacttcctagatttcagctctccattctctctcacccacactctcag

SEQ ID NO: 502840 - DNA, 611 bp, Homo sapiens
atttgattaaataagcttattcttgaaagtgagtggagagccagagtaataactagatgcacagagctcatactttttttttgcttcattgttggtttttaaaatttaaacaatgataggaaggagcctgtggagagtgtgtgaaaatacagacgatgttatcaatgcaatataaacggaataagttgagaaggcaggaagaggcagaggcaggaaccagagtcaagaaagagggattaaccatgtagaaaagaaacacttccttttttttttttttgagatggagtcccactctgtctcccaggctggagtgcagtggtgcaaactcagctcactgcaatctccactttctgggttygtctgcttcagcctcccaagtagctgggactacaggtgcaacaccacaccctgctaagtttttttgtagttttaatatagatggggtctcatcatattagccaagctggtctcaaactcctggcctcaagtgatccacctacctcagtttcccacagtgctgggactgcaggcatgagaagaaacacttctgatgaacaatgatggaaggtgaaagggaagctgcacatccaggcaagattttatatttcatg

SEQ ID NO: 502841 - DNA, 611 bp, Homo sapiens
ctgcttttatttttatttatttacttagagacagagtgtcactcttgtccaggctggagtgcagtggtgtaatctcagctcactgcaacctctgcctctcaggttcaagagattcttgtgcctcagccaccagagtagctgagattacaggcacacgccaccacacgtagctaatttttgtatttttagtagagatagggtttcaccctgttggccaggttggtctcgaattcctgaactcagctgatccgcccacctctgcctcccaaagtgctggggggttacaggcataagccagcacacacagcctatcctgcttttaaacaaaactattatatgcaatttgaaaataaaatgcatataactcaaaaatttataggacaaaaagattactgcaagattttgaaatattcttaacattgtgccctttttmtttacttttatagcttctaaaaatgcatttgtgataaaaaggatgtataattttatgcaaaacaatcattcaaaatacaatactaataaaaaagtcttatatctttttttgaagtttccaagtaaatgattttatgcttgtgtacccacagatatttagagttcaaatattgttaaat

SEQ ID NO: 502842 - DNA, 611 bp, Homo sapiens
ctgcttttatttttatttatttacttagagacagagtgtcactcttgtccaggctggagtgcagtggtgtaatctcagctcactgcaacctctgcctctcaggttcaagagattcttgtgcctcagccaccagagtagctgagattacaggcacacgccaccacacgtagctaatttttgtatttttagtagagatagggtttcaccctgttggccaggttggtctcgaattcctgaactcagctgatccgcccacctctgcctcccaaagtgctggggggttacaggcataagccagcacacacagcctatcctgcttttaaacaaaactattatatgcaatttgaaaataaaatgcatataactcaaaaatttataggacaaaaagattactgcaagattttgaaatattcttaacattgtgccctttttctttacttttatagcttctaaaaatgcatttgtgataaaaaggatgtataattttawgcaaaacaatcattcaaaatacaatactaataaaaaagtcttatatctttttttgaagtttccaagtaaatgattttatgcttgtgtacccacagatatttagagttcaaatattgttaaat

SEQ ID NO: 502843 - DNA, 615 bp, Homo sapiens
ctgagaagtttaaagatttcagaaaagatttgaaatagctaacaagaaaaaagaaaaatgagagctaagtaagaaaatatgtaaggattactgagcttgtttaaaaaggcccagaagattttctcaatcaggaaacaggcttttgcagtaagaagacaatttctcttaaggaaatattcagttttatttttataatagtaattattgacaactagtttgttaagaaaatcataatgtatcaatataaaaaaatagaatatttcagcatgtaataatcacatattaagatatttgatgtcataatacaatattaaaaaatagtcccaatactttctatatgatatgattccaattaaaaatggaaaaaaatgtatggaggaaaaaccacatgaatacatatcaaatacttgacagtatttmtctccattagggtataaactccaatgaaggcagagatttattttttccataaagacatgcccataaagacatttaatacagaactaggcatatgctacaaatgaatattagctaagtgacatgaattcattctaaattaatggtacatatttaaggtatataattccaatgagtttgaggataagtatacacctg

SEQ ID NO: 502844 - DNA, 617 bp, Homo sapiens
tttgctgcagtaatgtcagccctcaatctaaatgcttctcccttccgccttcacagaaatcaaattttgggctgagattgtgtccttttttatattttttatgatggataacatcaataacaggatgcaaaactaaagctgataagagggacttgggtagggcacaaaagtgctccatttctccagttcttttagaccatccttattactaggaaattttatgagcttggaatttggatatacagcagatcctcagataactttgtttccttcaatgacatttcattataacattgatgaggaaaaaactcattctcagatgaggtcactgtctttttggagattgcatgttttccccatgtctgcatgggttttctctgggtactctggtctcctccgacatcccaaaacagtgcacgttgggtgaactggttgtctaattggcccccrtctgagtgaatgtcagggcatatgtgagtgcaccccgacatgggacggctgattcccaccttactcctgagctgccaggacaggctcaggccacccatgaccctgaaatggaataactaggcaaataattttcttacttttttttacaagtctttaaagaatgtatg

SEQ ID NO: 502845 - DNA, 633 bp, Homo sapiens
gtgacgaggcgagcctgggaggtcggggcgagaagggagaggttggagctgggatgatgttggcagggcttcctttgcaaacccagagtcagtcttctcagctaaagtcttgctgtgagacatggtggttgggtgaaggaagartaaccaggcatctgccatgtgaagcttatgaagaaaggaggcagagaaaggagaaccagctccctttactacatagatgaacaatttgattttcccccctcccttcagtctgtggccccagtgtgtataactggtccttgcttcacagccctcactcagctttgctccatgcacagagctctttcattccattttcattaaaacaaattacttgaaatgggtggtggtaaacacccgcaaggctacccaatgtggccactaatgcaccaacagtcacttccaaccacctgtggcctcctcccatgtcctgtccccctgcctggtggcctgaagcaatgacatttctgaagttcctgcttctcgcttcctgacctctgaaacacatgcttctatgtgtcccgcaagaggtacactgtggaattttagttggttttgacttgatgaaaagacatttgtgttgtcagtaattttctgaaattttcatcctaa

SEQ ID NO: 502846 - DNA, 633 bp, Homo sapiens
gtgacgaggcgagcctgggaggtcggggcgagaagggagaggttggagctgggatgatgttggcagggcttcctttgcaaacccagagtcagtcttctcagctaaagtcttgctgtgagacatggtggttgggtgaaggaagagtaaccaggcatctgccatgtgaagcttatgaagaaaggaggcagagaaaggagaaccagctccctttactacatagatgaacaatttgattttcccccctcccttcagtctgtggccccagtgtgtataactggtccttgcttcacagccctcactcagctttgctccatgcacagagctctttcattccattttcattaaaacaaattacttgaaatgggtggtggtaaacacccgcaaggctacccaatgtggccactaaygcaccaacagtcacttccaaccacctgtggcctcctcccatgtcctgtccccctgcctggtggcctgaagcaatgacatttctgaagttcctgcttctcgcttcctgacctctgaaacacatgcttctatgtgtcccgcaagaggtacactgtggaattttagttggttttgacttgatgaaaagacatttgtgttgtcagtaattttctgaaattttcatcctaa

SEQ ID NO: 502847 - DNA, 565 bp, Homo sapiens
gcggctcttccccaaccccttcctctgcttcctgggtgcacggccagcctacccctcctggcttcactgtggcctgtagctgaattctggcccagtgaatacgcatggacaggatgagcagtacttcctggcctggctccccacacgccatgctcttccccttcagcttgagacaggggagcatagggaccttgggacccacatggaagtttggagggttcccacatggaagattggggcatcccacatagaaggagctcaggcccccaaatcactgcttagatggacaccaactgcccctcaagatcactcattttgaacttcacgtgaccaaaataaacttacattatgttaagatacggagattaccctaacaggcaaattttcaaatttctaaactatccaagctcaaggaagtggaggaaggcattctaaaattgaatttagcaaaaacttacttcaaaacaggaaagactctatattgggttgaacagtgtctttccaaaatgtatgtccaccggaatcycagagtgagcccttacgtggaaatagggtctttgtgaat

SEQ ID NO: 502848 - DNA, 523 bp, Homo sapiens
aaactgctgtctttaaaaaaaaaaaaaaaggttatatatgcccatcaaaaaaaatgtagaaaactcagcaaggtargaagataagaaataagagttatagctgccaaacataaacacaaccaattccagaatgtctttctctgaaaactgattttgcttacctgttcaattacagttttcaaccaccactgaggacccatcaatgttatagctgcaatgattttggcatgcaggactccaagtgcccagtcctagggaattaaaaaccatttaacatatttctgttgttttttaacaataaacacagcagagaggctgtataattttcttacattatttcacatcaaaatagaagttctataggattggcaacaattttacaaaagactaacgtactgaaaacccagagaattttttttcttcaacagctcaaattcaatgtttccatcaaaaattgttcttctatcttttaaaaatctatattgttttcccaagagttagagaaagtctggtcattaatgga

SEQ ID NO: 502849 - DNA, 699 bp, Homo sapiens
ctgtgcgctgtgctgcctgctccctgttccgccatggtggatccttgttccccatggaccacacacctgtccctcctttgactgcaaggccactcagagttcccctcccatggacttcccgtgggctcctttgccgcatggcttccccgactttggaccctcatcgcagttcgcaacttggtatagatgcctttcattctgcgttgttttatattgattggtggatattttctcttgaagcttggtcagctccatgagggagatgctcaacctcattcagtttctgccctgtgcagtccggcagtttgtcgcacatggttggtggatgattgtccctgcttttttttttttttttcttgtttttgagatggaatcttgctctgtcgcccaggctggagtgcagtggggcaatctcggctaactgcaacctccacctccagggttcaagtaactctcctgcctcagcctcccgagtagctgggactacaggtgtatgctaccacgcctgggtaatttttttgtattgttagtagagacaggttttccccatgttggccaggctggtcttgaactcctgacctcaggtgatcctccctccccgggcctcccaaagtgctgggattacaggcgcgagccacygcgcccgacctgtccctgctttttgaacatgattcaagtatcgtgccctgttgccagtta

SEQ ID NO: 502850 - DNA, 427 bp, Homo sapiens
tttggtgcctgaacagctgcaaaagttccagagagaagctgagtttggggtggcttccactgacatgtctgtcaggcgcccagtggaactggtgactcaggtggctacttagtaggcctagcgctcacggaggagacttgggagcatgggcgagatggggtatacaggcggggtggtgtatacaggtggggtggtgtacacgggcgggatggtgtacacggtggggggatggggcatacaggcggatggtgtacacgrggggatggtgtacacggggggatggtgtacacggggggatggggcatacggggggatggtgtacatgggtgagatggtgtacatgggcgggatggtgtacacgggggaatggtgtacacgaggggatggtgtacatggggggacggtatacacgggtggggtggtgtat

SEQ ID NO: 502851 - DNA, 422 bp, Homo sapiens
caaaagttccagagagaagctgagtttggggtggcttccactgacatgtctgtcaggcgcccagtggaactggtgactcaggtggctacttagtaggcctagcgctcacggaggagacttgggagcatgggcgagatggggtatacaggcggggtggtgtatacaggtggggtggtgtacacgggcgggatggtgtacacggtggggggatggggcatacaggcggatggtgtacacgaggggatggtgtacacggggggatggtgtacacggggggatggggcatacggggggatggtgtacatgggtgagatggtgtacatgggygggatggtgtacacgggggaatggtgtacacgaggggatggtgtacatggggggacggtatacacgggtggggtggtgtatacaaggggatgatg

SEQ ID NO: 502852 - DNA, 427 bp, Homo sapiens
tttggtgcctgaacagctgcaaaagttccagagagaagctgagtttggggtggcttccactgacatgtctgtcaggcgcccagtggaactggtgactcaggtggctacttagtaggcctagcgctcacggaggagacttgggagcatgggcgagatggggtatacaggcggggtggtgtatacaggtggggtggtgtacacgggcgggatggtgtacacggtggggggatggggcatacaggcggatggtgtacacgaggggatggtgtacacggggggatggtgtacacggggggatggggcatacggggggatggtgtacatgggtgagatggtgtacatgggcgrgatggtgtacacgggggaatggtgtacacgaggggatggtgtacatggggggacggtatacacgggtggggtggtgtat

SEQ ID NO: 502853 - DNA, 618 bp, Homo sapiens
gggataagggcagcctctcctcttaggatgtgagcataaaatggcttagtgcccacaaggctctgggaaggcctggccccaggcttgtgtttaccatcgtgtttctcattcgtctgccttctcttggcttggaagagagcaccttcccagttttattttgttttgttttgttttttgtcttctgccaggcaaggctttttctctcgctgcttttcttcccctttgattacagcagaagtgaagactttgtttctctgtgtcacgtaaaataatgatgtaggcccggacatagcctgctaacttagagacccttggactctttcatctttggatcagacggagcagggcttgtgttctgtgctttgtgaggccagtggggggagcgaggcaggagcctccattcttttcattagcttctcaaggctgttgatcaaacagcctctatcttcctgaaaaacagctgaaagaatcaagtgtggcaaagccctgatgccctgctctgtggtaaatggagtgagtcattgccaaagtgtttaccgcagacctactgtgctcccgctaggtactttagcagactcaaaactgaatcyggcagtccctgcctttgaagagtcctag

SEQ ID NO: 502854 - DNA, 643 bp, Homo sapiens
ggctgcctcagagaagttaatgaaatcttaagcaaagctatyttcattaggtaatgcaaatccagtcaagggctaacaatctaatgtagtctgttataagggttccaggaaacggaagttgaaagtgtcttattgttttgcttttggttttgtttgagacagagtctcactctgttgtccaggctggagtgcagtgactcaatcacagcttactgcaacctctgcctccaaggttcaaggttcaagtgattctcctgcctcagcctcccaagtagctgggactacaggcgcacaccaccacacctggatgatttttgtattttttagtcgagatggggtttcaccatattagccaggctggtcttgaattcctgaccttgtgatctgcctgacttggcctccttgtaatccctgggattacaggcatgagccactgctcctggccgaaagtgtcttattcttgaatgggaatctgggttctgtatcacgcaatccactacagtttaccctttttgctacaccaaactatgtattcatataactttttagagtagcccttctagaatttgggcacatttatttttcctaagggaaacataaaataggaaagctagtgggacaaattgcatcccttagtattgca

SEQ ID NO: 502855 - DNA, 452 bp, Homo sapiens
acgttcataagtatgaggccatttccatgctttctataaaatgagttctttagcaggaagtaatgctatggaaaattttccacaccatgatgaagaataagacattaaatatgatggttttgttggaagatttatgaatagggaagatatttcaatattcaaaataagtgcctattagtatgaagaaaaatgctacccctttccatgacggaattgacccaatgtaatcaacttgttacctaatatctggctgatccacctaagaaatgaygccatatctgggctcacgtttgatatcaaatattgaaaatgaaccactcagtagtaggtgtagccatacatgttctcatgagaagaaatccatgtcttatgtacattccatagacaaatagaacaactgctagtactataatacatccttaataaccttaataatacagattgtagctccc

SEQ ID NO: 502856 - DNA, 427 bp, Homo sapiens
tctatttgccttatagaattaaatactcttctcccttctatttttttgaaaaatatttattatattaggtttcaatattttaaactatttgttagaactcawaaccagaaaagagggatatctcttcattggtaagtgccacttactattttactttatttaatgcaataatttttgagcttttaagttttgcattttatcttatcttgattttgttccatcacgcttccattaattttagcttataatgctttgattatattcaacattatatttcccttatagttttcaatagttctgttttgttaattgtattatcttctttagttagccaatgtaaagaattttttaaagtcttgttttaaaatatgtagggaaaaatgttaggaggacatttaataacttaaaaagccactgggatggcacc

SEQ ID NO: 502857 - DNA, 627 bp, Homo sapiens
aagggctagaataagaaagtatttataggccatttagtaatatcagaagttaataatattcagaattaggctggtggctagttaaattaaataaaagggtaattattatgaagaaagaactggcaagaatcaatttctgatttaaaatgtagattaagaaataaattctaattgttttactggaataatgtaaatttcatgtgtttatactatccaraaataattacatacagataagagatgcatttaggcatacactggggtttgttctttttttactctgagagtaagcctcattcaactgaattaggctgtgtacttttccactgtgtggagcattccatgaaggattggacatttttatgtgcaactaaggaggatgagttttatatcctcttatttattatgtcctgtgcctgcccagatgttctgtcctcttgatatctacaaaagcgccttgcctcatcccatgccattaattgctgctttgctggcacatacccttgtattaaaatagaatattttaaaaagacttatcaagttttgtattatcttgtcttttaataggttaaaaattacaaagcaattgaagccctaaaaattataaagaaaaaaaatttttaaatg

SEQ ID NO: 502858 - DNA, 652 bp, Homo sapiens
ttctaatgaatcttttttttgtttttatgtttaaaatatacataatttttaaaagttagaatagagggatagtaaaaaaggattaataaaaataaaaaatttttaaggaaattgtaagaataatttcaacattgcaaattgttttatctcagcaaattttggtacacagactttgtaaaagatgaaagaatactgtctcacaatctttcaggaaactggcttagactaaagttgtggcccaaatattgtatcttgaatttctcyccactgaattactaaaactgtatcaaaataccatttttcgttgtttggaaaatattgcttactcattactttgtaaagttgagaaaatgtatgtgggagatcatcatctaaatactcatattctgatatttcatttatgatcaattttactatcataattagtgtttagagtataatctgtctcatttaattcattttctgatttacctagtaactgcaaaatataattctctgtcagtgttattctcttttctgttgcatataggccaaacatgaaaaatcatatttctcatgctgaaaaaaaaatcttcaggtagactgcagatattgattacctacttttatactctgtaaaagtttattcaataccttgcacaatgccattaga

SEQ ID NO: 502859 - DNA, 652 bp, Homo sapiens
ttctaatgaatcttttttttgtttttatgtttaaaatatacataatttttaaaagttagaatagagggatagtaaaaaaggattaataaaaataaaaaatttttaaggaaattgtaagaataatttcaacattgcaaattgttttatctcagcaaattttggtacacagactttgtaaaagatgaaagaatactgtctcacaatctttcaggaaactggcttagactaaagttgtggcccaaatattgtatcttgaatttctctccactgaattactaaaactgtatcaaaataccatttttcgttktttggaaaatattgcttactcattactttgtaaagttgagaaaatgtatgtgggagatcatcatctaaatactcatattctgatatttcatttatgatcaattttactatcataattagtgtttagagtataatctgtctcatttaattcattttctgatttacctagtaactgcaaaatataattctctgtcagtgttattctcttttctgttgcatataggccaaacatgaaaaatcatatttctcatgctgaaaaaaaaatcttcaggtagactgcagatattgattacctacttttatactctgtaaaagtttattcaataccttgcacaatgccattaga

SEQ ID NO: 502860 - DNA, 433 bp, Homo sapiens
tagagttgccaaattattaacctaaatactccactaattctgcagctactatcatagcacagaagtgtctttgaaatagagattttgtaaagaatagcatgttttattgactatgtaatgattactttcatacatcaattgttaagcttctcatttaaaaatttgtgcagcagtacacaatttaagtggaaatttcctatgaacctgataaaatgatctatacttcatttttatatttacttgttctctttgtatcttctttctatgtyaactatctagtcatacgtttatgcactaataacagcaattgaaggcatttatgttttaaagcagtagctgtaattatattacttttcctataaataacattggcattgatgcttttataatgaaaatgaacccaagcgattgaatatttatgaatcagaatctt

SEQ ID NO: 502861 - DNA, 433 bp, Homo sapiens
tagagttgccaaattattaacctaaatactccactaattctgcagctactatcatagcacagaagtgtctttgaaatagagattttgtaaagaatagcatgttttattgactatgtaatgattactttcatacatcaattgttaagcttctcatttaaaaatttgtgcagcagtacacaatttaagtggaaatttcctatgaacctgataaaatgatctatacttcatttttatatttacttgttctctttgtatcttctttctatgttaactatctagtcatacgtttatgcactaataayagcaattgaaggcatttatgttttaaagcagtagctgtaattatattacttttcctataaataacattggcattgatgcttttataatgaaaatgaacccaagcgattgaatatttatgaatcagaatctt

SEQ ID NO: 502862 - DNA, 521 bp, Homo sapiens
tctttccttcttcctggttggcyattgtggatcattcctgcaaaattactttctgtggttctccagggctggagggcatagctcaattgctcttgaaactaaaccctttcacaacttcctgggcagctgccagaccctggtgctagcaggactacatgggccaggtttctgctttgaggattttactgaattgtacagacacacagtctcaggtcttttttcttatcaactctttggtgacatgaacaggcaccagagtaaggtctctttactgaatgctcctgctcagagttggtgaatctgtggaatttgtttttgcttcctgagttttgggtgggccttcagactcggctgtaggactcgccgaccagaggcccccagattcttgtgtggagtgcctactcttccttcctcactccattcctcacctaatgtaatttccttggattcagacaagtgctagtggtttcctgcctctagtacacccagcctgccccagactgggcatgcactgagtgtgt

SEQ ID NO: 502863 - DNA, 587 bp, Homo sapiens
cacttactcactcactcgcctacccagcaagcatttatgtattaatttcttacaagaggctaggcactggagatacacatgattaaatgttatctctggcctttaagaactgccactctactctcctcagaaccctacrtcttccaacgtgtgacatttctaatcgtggacaggcacgctaactgtttaagaggctgggaccacaggcataaactgaagctccaccagcaagcctggatgtgtgatcaccctaagtcagacttggaagtgcagctcctgaagggcaggaaccatccccacgacccctctctgcccattctagttcacttgaactgacttttggtgtcaggaaatttatttttgtttctaccccatccaccaaccccacaccaccaagcatttcagatcaagtatctgtgaatcataggtcaggttgactcatttcttaaagattccaggctgtgaatgaaaatggtattgatggctgggaggatgatcagatgtagggagtgtcaatgtgacttgttctacatttatctacaaaaatgcaaaccagatctgcaagcattttattaaaatgaggaagg

SEQ ID NO: 502864 - DNA, 407 bp, Homo sapiens
catgctgtaggcactaaatggragaatgtgggtgactcagcaccaggcctggcacacagtaagtgctcaataaatggcacaggggttgctgagttttagactcaagtctctccatctccagcacctgtgtctggatgaaagatccttcttggtgtgatgggcaggtaaataagtttgttggcccctccctccctctctctttccctccctccctctttccctcccttgctctctttgcagttgaggatgggggaagagacgaaataattcctgcataatatttgtctaaaaggaatgtgtaagataaaacagtgtgtgtgaggcctgtctttttttttttaatagccccatagcacctggcataggtgggcaccacaggatctatgatgattgaaaggagtgttttc

SEQ ID NO: 502865 - DNA, 552 bp, Homo sapiens
cactgctttatgtggtcttcactcgtctctttcctagtgcagattcttctcattgggttttaaggttctcaaaattctgaccctaacacaccctccctcaggggacttcttgctggccactgagcatscaatacccctcccctgctctaggccttcatcactgaatgctatcctttcaccccaccccctgcaaacctacctgtcctgtgggtatcctttaaatctggctctcagaggactttcctttgcagccacagtgaccctgctctcctgaacccagaccacacagtgcccacactcaattaatctttgacaatcttgttttatcttatacttcattgctgcatggttatctaacaatcctcatgttgaagtctcgactccctaactcggttatacactcaaggaatggcctgggttttgcaatttctcactgcaacgtcttggtgataacaggcacttgagaaataagtttttaaagagttgattggattggtgatgtggggctagagagtagaaggggaaaactgacgtggagtcatctaatgggca

SEQ ID NO: 502866 - DNA, 636 bp, Homo sapiens
ctggacacagggttatactccgcttgctcccttcctcacacctctgagttcagaaatgccacatgccaatgtcaaatgcacatgacagtgatggttccccccccatcaaatgctgtgtaagattcactgcaacaaatagcttagaaaaaagtaaatttttcaaactaacattagagaaatccataatctgacagactctgtgaacaggttactgaaatctgtttcctcttgctcctgggcacagagattgactacatttccccttcttccttgtagttaggtgtggtcacatggctgggctctacccagtgggaaaggagcagatgagataggcaccacttcctgacctggcccttataaacctccsttgggtgacctccttcatgttctattccttctaggtcactgggatagataccagggtggtctccagagccacctttgggaggtagatagcataagcaccatcagttagggtctctgactgaccgcactgagcagattgctcagctcttagtccacagaaccaccctaacacctactcaaatccttatacttctaaaactagattgtaattacttatccatgaatttttatagccagtggaatatgagctcactgaatacagtcattatt

SEQ ID NO: 502867 - DNA, 565 bp, Homo sapiens
atacgtggtatagtgtggctgtctagctccaccctccagcagaggcagcttgacatttgtcttggataatgagggctaaatgcagggttgagagtcacgcccagcagcaaagytgtttctgtctgaactgtaaggtcactctaaatcccactctttcaaggcaggtatattcagcaggcttaattgaaaactggaacatagcttaccattgttaggatagaactggagcttgaagtgacctgacttctcagtgagaccaaacattcacactctccaaggaagaaaatgaaggaagagaatgtttatgactggctaagtctgtcaccatccagtacagagaacctcatttgggcagagttttatggcaagctattgaagttatatatgtacgcatatgtctgacagatctatatctatagaatatatcatatatgtgtgtaatacataagctactatatatatatgtgtgtgtatatatgttaagattatacacatacaaacacagttgcctttagttgaggaaccccaagaacctgccccttgtccagtcagggttgctgcccag

SEQ ID NO: 502868 - DNA, 565 bp, Homo sapiens
atacgtggtatagtgtggctgtctagctccaccctccagcagaggcagcttgacatttgtcttggataatgagggctaaatgcagggttgagagtcacgcccagcagcaaagctgtttctgtctgaactgtaaggtcactctaaatcccactctttcaaggcaggtatattcagcagrcttaattgaaaactggaacatagcttaccattgttaggatagaactggagcttgaagtgacctgacttctcagtgagaccaaacattcacactctccaaggaagaaaatgaaggaagagaatgtttatgactggctaagtctgtcaccatccagtacagagaacctcatttgggcagagttttatggcaagctattgaagttatatatgtacgcatatgtctgacagatctatatctatagaatatatcatatatgtgtgtaatacataagctactatatatatatgtgtgtgtatatatgttaagattatacacatacaaacacagttgcctttagttgaggaaccccaagaacctgccccttgtccagtcagggttgctgcccag

SEQ ID NO: 502869 - DNA, 565 bp, Homo sapiens
atacgtggtatagtgtggctgtctagctccaccctccagcagaggcagcttgacatttgtcttggataatgagggctaaatgcagggttgagagtcacgcccagcagcaaagctgtttctgtctgaactgtaaggtcactctaaatcccactctttcaaggcaggtatattcagcaggcttaattgaaaactggaacatagcttaccattgttaggatagaactggagcttgaagtgacctgacttctcagtgagaccaaacattcacactctccaaggaagaaaatgaaggaagagaatgtttatgactggctaagtctgtcaccatccagtacagagaacctcatttgggcagagttttatggcaagctattgaagttatatatgtacgcatatgtctgacagatctatatctatagaatatatcatatmtgtgtgtaatacataagctactatatatatatgtgtgtgtatatatgttaagattatacacatacaaacacagttgcctttagttgaggaaccccaagaacctgccccttgtccagtcagggttgctgcccag

SEQ ID NO: 502870 - DNA, 654 bp, Homo sapiens
gtagggttcaaatctcttttcatcctctcttccaaattcagaatgatgaacttgaagatataggtagaaagtagtgtaagaaaaaataaatcagtaaaaatataaaatgtacatgctgattttctcttttaaaactatggtttcaaataaaaagtagaaattgtaatggttaacaatgtatatatctatccacagacatacgtctatatacatataaacagatgcaaagtaggaatacattatatatgttctaacttcatgtatagcaggtataggttttatatgtaagttaggtgtataattcatcttaaaaaattagtttaaacttttaaattgacaaaggtattacaaatagcttttaataaattcctagatgttgtctagagtataattcaaaaattaatttatgctacaagggtcttcacctttcagtatctagyttttttgcatctagctagagctaacattcattgtaaagggttaacagtgatgcaaattcttcctatttatagcaatgtgagagaatgaatacacaactgaaaaataactagaccatatataaagacagaactctgacctacagtctgcagtaactgcccaggaaaccaaccacttatctccagtaacctgccaggaagtgagcccgctatgtct

SEQ ID NO: 502871 - DNA, 609 bp, Homo sapiens
ggtgaaaatctcctcagttcttgtctgttccataaggccagcccaccatctgagccccaaactcgagtgctcaccctgcagcccgggttgggatgtctgtgctccaggctggagaccacagtgaacctccrcacagatgtgcctccaccaccagctgtgtgcctgctgctctgtagcccctgggattcacaggtaagccaggtgcaaggtttggtaaaaatgaattccagcaccctcgcttgtgcctgtggggtgccctgtggcttccccacgatttctgcaagccctggggcctctgccatcctacttccatctgctccaggtttggcatccgctgagctctcttgactcactgtctctcactcagctgtctcttctcttgtctctgcgatgaagcttctagcattctcagccctgactcccaacacctccccacatactctgcctgcatcagacctgacaaaggtttcttcagggggattttatagtcagaatggcagagtagaggaaggcaggtgggaatattggcagccctttggccatccagccacttctcaaaggctatgctttctggaaggttctccaattagaagcacccaccaatcggaa

SEQ ID NO: 502872 - DNA, 590 bp, Homo sapiens
cagatttgggaaccgccactgccacccagcacaaattcagtcctgactcccttcctggggcttcagaaggcaggagctcttcccaaggacgctgcccagctccacctggagccaggtgagggtccagaggcacagcgcccagcccttgtctcacaaatgtactacatacacatgtgcacacacacacattaatgtacatatgcatacatgtgtattcatgtgtatgcacacatgtgcacacatacacatacgtacacacgtgtgcacacatgcatgtacaaatgtacttccacacacacgtgcatgtcagcacacatatgcacacatacaaatgcacacgcacacatgccagcacacaccatgcatgcccaggcacaatcctccattcctgaggtgaggaggaagttggggagttctggcaaaaccatccrcctcctcaccggcttcctgccaggccaggggaagggctctctggttctgcgctcctttggtgatgagcaaccagccccttccccagatgagcccatgcctcacataagcctgggagctcaggtgggcttgcacaggtgcccaggatcaacttcaactgc

SEQ ID NO: 502873 - DNA, 582 bp, Homo sapiens
acagtgtgcccttgcccttcctggcaactgagaactgtccaggccctcaccctgctcsttgtctctgaaccaggctgctgggaagaccacagggtgagctcagcaaaggcaggacatggtctcacccacagctccttccccagcccctacaacagcacctgtgatgtagcgggtgcagactgggccagggatccaagaatagaccagactcagacaagaataaaggctgcttcccaaatctttatctttgtgctggctgtaccttccccagggacatccttgttgccccccacaaggaagacctaagatcaggcaaccggccctccatgtgatcaccaggccagcacctgggggcctggttctgtcccagacactgccatccttcacactctcgtcctaccgcactcccagaggacatgggccgcctgggaacccctcctatctgtgtatttccttctttgaaaatcagaatggaaccagagaagggctaaggctcaagagggctggggtgactccatgcatgtccccagagtcacatggggtgtgactgggcaagtcgctttgctccttgagtcctggctg

SEQ ID NO: 502874 - DNA, 329 bp, Homo sapiens
atagaaatggaagatatttgtggatgccctcaggagaccgaccgtttctgcggtgcaggggcctggaacccatctggtccccgtactttctgaaatctcatgcttctctttttcctctcattktataaggacaagtgactctgtgtcttcccaatctgtgctcatgttggccagaatcagatatcatattttgccaccagtagaccttaatttattgagatggagtatcttaattatttctcacaacaaccttataaggtaggtattgtgttatcccattgaatagatgagaaaactgcagattgggaagggggtcgcccagcacgtgt

SEQ ID NO: 502875 - DNA, 329 bp, Homo sapiens
atagaaatggaagatatttgtggatgccctcaggagaccgaccgtttctgcggtgcaggggcctggaacccatctggtccccgtactttctgaaatctcatgcttctctttttcctctcattttataaggacaagtgactctgtgtcttcccaatctgtgctcatgttggccagaatcagatatcatattttgccaccagtagaccttaatttattgagayggagtatcttaattatttctcacaacaaccttataaggtaggtattgtgttatcccattgaatagatgagaaaactgcagattgggaagggggtcgcccagcacgtgt

SEQ ID NO: 502876 - DNA, 582 bp, Homo sapiens
aaacatgaaggggtgggggctggagcactgtggttctgggagaatggggagagggacctggggatccatctcatgaggatgaccaggacaaaggagcaacaaaagaccttaaaatgcmagtctcaccagtctcagtgaacgcaagcggcatcctaaaaggggccagcgtggacggaatatttagaaaaccttagtttggtagagaaaggaggaagaacaagagagagtgggagggaggaaaaatagaagcaagtgatgatcccctgttactgttataaatgggtgctgtttgcagtgacagagacaaaagtgtccacaattcactcctggccttcacaaagtggaatggggaggaaaaggcagcaaccacagccacagaattcactccaaccagagcaagcccagtgcacaaggcccagcttggaggcccctaaaactgcccttagggagtcggccccccagaaggaatgatcctaagctcttcttcccaggagtgtggggtcacatgctcagatccactccctccacttcacagccctcattctgcaatgacggcctcgcctggggcccaactgtatttac

SEQ ID NO: 502877 - DNA, 291 bp, Homo sapiens
agctgtgggcatgcggtgggcactcaaagaagacttggccatgtgcgatgatgctgatatgaccagagctaagggggtaccccgtgacccaggcaggtggcaatcgtgcgaggtccaggaaaatgttgctcgaatttctcaagggtctctgttctttctcctcttcatgttgggacactttctacgttgcaaagttggcagcagggtggaggggacagagagtgcacatgtttctctrtctcccagaggtggacacctcccttgcctgccgggggctgagccactgtgcca

SEQ ID NO: 502878 - DNA, 498 bp, Homo sapiens
tgtgggcatgcggtgggcactcaaagaagacttggccatgtgcgatgatgctgatatgaccagagctaagggggtaccccgtgacccaggcaggtggcaatcgtgcgaggtccaggaaaatgttgctcgaatttctcaagggtctctgttctttctcctcttcatgttgggacactttctacgttgcaaagttggcagcagggtggaggggacagagagtgcacatgtttctctatctcccagaggtggacacctcccttgcctgccgggggctgagccactgtgccaccatctgtgctgctcatggctgagcaactcaaaatgtactgaccgtggctcatattctgggctttgagtcrtctctgttttacagcgtgtgtcggacgcactgctcagggattaattggctgctgctcagtgagcacttaggctgggagatgggctcgattccatgctaatgtggcctgggaactgtggcgcccagccccagggacaaag

SEQ ID NO: 502879 - DNA, 603 bp, Homo sapiens
gagagtttccggggcttccaaagagaatcttgtgattctcatcatgtctgctcatgttctaccctttgatggayggtgagctcagatcctggggcggagtgaggatgtgacttctctctagtcaggccggttttcaggcctcctgaccccaggctctgtccaccatctttcaatgttgtaccactgaaatccccttttcttccagtgctcctatcctgggctgcgctgtcactgaagtgttgtggtgttgggtgttgggatccaacagcctctgaccctgagtagctaggtgactttggacaagagttttcacccctctaaatggtgcatcatcacatacagtgtgggtatagaactggcagtcacaggggccctttgggaggactgggctagggcaggagaggtgttgtctgcacagagctggcccagtgcccacatctatgttagatattattattgttattattagatctgcaacatttattatttcagtactaacgacgggcaggcacctcgccaagttctgtgcatgcaaagacaaacacgctgtctctgcctgtggggagacaagtgaatagacaattatgattcagggtgatgtta

SEQ ID NO: 502880 - DNA, 451 bp, Homo sapiens
tcatctataaaatgaaggaaaattgtagtttctaatttgtagctttgttatacagaataatagagttaatgcatgttaaatgcttagaatgtctaagtgtctgtggcattgaaagtcgtcaataagtgttacttgatataaggatcatgattattatcagaaaaggaggctagaaagtatatagcctcaactagtaactgctttcacttatacaaaatggagggttataagctatattgtagttactttaagaaactttatgtacttgattttttaagtttcggaattagagttgaaaacatccttatatgcatttasagaatgccatatacatgtttatgtatatatatatatatatatttatgcatgacatgtatgtatgcatatgtgtgtgtgtgtgtgtgcgcgtgcacgcgcatgtgtgtgtgtgtgataatgccacatcttggtg

SEQ ID NO: 502881 - DNA, 655 bp, Homo sapiens
aaagttatcgaaattttttttgctaaacaatgttaggctgagtaattgttaaacttaattctattttcagtgaccaggcctagaaggaaacacgatggattacagatctctaatttttgaaacaaattcatgtgagcaaacattttactagccctaatcttatgaaaaaatttatacgarcttttatgtcatctgatccttgcttgtcttagtaacttgctcaggatgaaaacgtgatgtcatactagatatcgctctctctatcacatgacaaattaaatcagcaaatcctaggtctactttcaaagtatatctacaatctgactattctaactacttacacacagttaaccccctggtccaagacaccactatgttactggatcatttacataaccttttaaaggggctctctgccctcactcccctgtaatttattttcatcacagctactagagtgatctgactaagcatagaacagatcgtcacattctttttctcacaacccttccatgttgctaggagtgaaggcttataaagccctaaataattaggcttctgcaacttttctttctgtcatcccctgtctatttgatggttctgtttaaatctcactgggttttgcgcagttcctcaaatataccagacattttca

SEQ ID NO: 502882 - DNA, 558 bp, Homo sapiens
  misc_feature (1)...(558): n = A,T,C or G
tcctcccaccatttgaaatcttgtcacatattttatattttgaaatcttgtactattttgtttatagcttacctttgtgtactataaactacactaagcatcatattttcttcctctttcagrtttctcatatttcttttgagcataaaaatatgatataacattagaggttgaagtaaataacatttatgcccagaggcagatgcgcctctttttctaggctgtaaatggtatctgtgtatggcagggagcaaggaggtggggtagataatttattctggtttgcatagagctggtagtgagctttgtgatagctttagttaagttcaatttacaataaacttcaaactttttgatgacaaaatcagaacctttcccgtgacagggattgggttctgggtgccttgagggattttttttttttatttctcctacttttctctcagtcttcaccagatctgtgtgcttactccttggaaatatctctatcagttatcttgactgctccaccccaaacttnnnnnnnnnnnnnnnnnnnnnnnnnnnnnnnnnnnnnnn

SEQ ID NO: 502883 - DNA, 558 bp, Homo sapiens
  misc_feature (1)...(558): n = A,T,C or G
tcctcccaccatttgaaatcttgtcacatattttatattttgaaatcttgtactattttgtttatagcttacctttgtgtactataaactacactaagcatcatattttcttcctctttcaggtttctcatatttcttttgagcataaaaatatgatataacattagaggttgaagtaaataacatttatgcccagaggcagatgcgcctctttttctaggctgtaaatggtatctgygtatggcagggagcaaggaggtggggtagataatttattctggtttgcatagagctggtagtgagctttgtgatagctttagttaagttcaatttacaataaacttcaaactttttgatgacaaaatcagaacctttcccgtgacagggattgggttctgggtgccttgagggattttttttttttatttctcctacttttctctcagtcttcaccagatctgtgtgcttactccttggaaatatctctatcagttatcttgactgctccaccccaaacttnnnnnnnnnnnnnnnnnnnnnnnnnnnnnnnnnnnnnnn

SEQ ID NO: 502884 - DNA, 558 bp, Homo sapiens
  misc_feature (1)...(558): n = A,T,C or G
tcctcccaccatttgaaatcttgtcacatattttatattttgaaatcttgtactattttgtttatagcttacctttgtgtactataaactacactaagcatcatattttcttcctctttcaggtttctcatatttcttttgagcataaaaatatgatataacattagaggttgaagtaaataacatttatgcccagaggcagatgcgcctctttttctaggctgtaaatggtatctgtgtatggcagggagcaaggaggtggggtagataatttattctggtttgcatagagctggtagtgagctttgtgatagctttagttaagttcaatttacaataaacttcaaactwtttgatgacaaaatcagaacctttcccgtgacagggattgggttctgggtgccttgagggattttttttttttatttctcctacttttctctcagtcttcaccagatctgtgtgcttactccttggaaatatctctatcagttatcttgactgctccaccccaaacttnnnnnnnnnnnnnnnnnnnnnnnnnnnnnnnnnnnnnnn

SEQ ID NO: 502885 - DNA, 629 bp, Homo sapiens
gcaaataatcgaatgagtcatatgaagtagattgacaaagtagargaattcagtaataaggagtcttgaattcagcttgggttgttgtttataattccgttttaagttaacgctttgaaaagttctgagtgatagggtagtcactatggtgtataaaaattagtatatgcctgtgtatgaattagaattgaataaacagcaatgaaatcggttagaaggctgctacaagtggttcaggcatatgtcacaaattaagccaatggctataggaatgaaaacataagcaattgggtgaaacacattaaaaagtttatgagtctttacaactgactaaatgtgtgggaatcaaaaaacataaagtcttaagtattaatatctaatcctttaatactagacaaagaattgtgccattatctgcaaagccaaaaaataatcaaaagatggtttaaaagagaaggtaataagtctagtgtttatcctttgggaagtagtcagaatataccaatgatgaggtagagcaggcaatgtgaaagttagtgtcacagcaatgagtgagcaattaaagctaaacatattagaagacaaaattatttgcattgatttactgatgttaaattgaatgttacttg

SEQ ID NO: 502886 - DNA, 611 bp, Homo sapiens
ttaataataatgtatatccgtcattagcatccatacccactaaaaactgtcctttgtgactcagttttcttagtgtttctgatccattgaaacatctcatcaaatagacacagtaataccaaagttttctacttaagtaatggcttatatggtccatatgaagaacttgaaacttaaagagataacttgcccaagagcatacattagaaatgaaaattacctatatatagcacatcttttgtttcatttttccttcactgctttcctcctgccacagagaataagaggtggaaaactgggaaactgatatttaagacaagtagaaaacaattcctctatcatcacttctccaaaatcttaagagacgttgcatcctagaagatatagttatcacaaataaattttattkatatatatataaataaattttagaggtggtagtttctatcatcagaacaatttaacagtagacactatgaattactgattctatgaacagaattgagccaaataaaaattttcctgggatccaaacaatatgcagactcattagagaagagatgctccaggtgtatgttaaaacccaaggtttaaatttgaagtgttatttc

SEQ ID NO: 502887 - DNA, 334 bp, Homo sapiens
cacatatttgaattcccagtcttatacgccccaggcctttgcaatgtttagggtccacacgagaagccattaaaatgcaaatacgtcatctgtgaccgggaaccaagctggcatctagcagatactgacacatttatcagtctgatgtgtggacaactaggtgcctcccagaggccttcaggtaaggtggaggaagggccaattctgagctgacacagtgggatccatcttggccaggacagtgggatccatcttggccaggacaaaggcagtccagrgaggccccgcggcgcggtgcggcgcgatcacgcccgagtctccttctcgttcccct

SEQ ID NO: 502888 - DNA, 715 bp, Homo sapiens
tttttatttttagtagagacgagtttcaccatgttggccaggctggtctggaactcctgacctcaggtgatccacctgccttggcctcccaaagtgctgggattacaggtgtgagccaccatgcccggcctatttatttctgagagaaggtcttggtctgtcacccgagctggagtgcagtacagcagtcatggctcactgcagccttagcctcccaggctaaagggatccccctgcctcagcttcctcactataggtgcatgccaccatgcccagctaatttttttattatttgtagagatgaggtcttgcagtgttgcccaggctgatcttgaattcctgggctcaagtgatgcttctgcctcagcctcccaaagtgctggaattacaggcaggaaccactgcccagccactctctctttctttgtaatatatattcaatatatataatacatacataatataatatatatgattattattttctgagctatctgagaataagttgcagatatgattttcctttgcctttaaatacgtcaataagtatttcctccctctcctccaaaaatgatagtctctcaaaacaggaaattacattggtaccatactttaacatacagaccttgtttaaacgtcaccaattaataatatcctttagagcagtacaaaacaaatttgatcaccyatgttttaaacaccatggcatgtgcta

SEQ ID NO: 502889 - DNA, 605 bp, Homo sapiens
gtacaaatatactacagaaaacaaaatgaaagcaagaaaaatgtcccgtaaaagacaaagaagctatcctgaaaagaatataactcaagaaacagaagaaattttcttaaaactatgcaactgtataaccataaaactacttattacaacatgaatttaataaataaaagttcagtaatgagatgataaaaaagaggatattatagaaccaaaaaaaagaggattggccaggcatggtggctcacgcctgtaattccagcactttgggaggcagaggcaggtggatcacaaggtcgggagatcgagactatcctggctaacacagtgaaaccccgtctctactaaaaatacaaaaattagccaggcgtggtggcatgtgcctgtagtcccagctacttgggaggctgaggcaggagaattgcttgaacccaagagtcaggggttgcagtgagcctagattgcgctgggcgacagagtgagactcggtctcaaaaaacaaacaaaaacaaacaaacaaaaaaaggattaaatkattacagagttaataaattttaaaatagctaaagaatggcatagacaccactgaaaatcaaattattgacaaa

SEQ ID NO: 502890 - DNA, 437 bp, Homo sapiens
atgtggcctttcttccattgccttttattggtaacaagtaagtcacaaaggctggctcagtctcaggaggaggggacacagactcccgcctttctcaaataatgtatagatttgtttagaaccatcacatgaatyagtgagatgtgtgctcagtgatggtcactgggtggggaggaagcagtcggaacacagacatggtagctggagctcaagcaaccatcttggaccatgaggactccacggacagacaccaggagccaacagcactgcacagacaatagtgaccatgcacagtgagtagaatctcaacctgacacaggtgagtcctaagagctgaggaggccttgtgttgccctgggcatcaataccagtggtcagtgctggctgggtctcctccctgtctatgagagctctgtgagctgccgaccacggcagca

SEQ ID NO: 502891 - DNA, 598 bp, Homo sapiens
aggaaagacaagggaggcaaaagaagcttgcaagggaagcaaggggaggaaaaggcggaaagattttttaaagtggagggagaaggaggagagagaaagtctcatcctaaacggcgaaggggaagaggtcaagactgaggctgagacagagagtgacactgctggagagggagacctgaggagcaacactgagagataagacagcttaaagctgtcttgcactgcaggcagtgatayaaccaggaaccggcaagtgagggactagtgaaaacaacagtaaagcaaaaatgcaccacaggattaccaaaaataaagctaaaacagattgtatgtgtatttcagtgtagagaaatgtaagagcacaaatgaggagtgagaaggtctctagtcttcattgtgccattaataataaaaactctcatggcaacatttattagggattgctgttttccaggcatggtgctaagggtttcccaagtaccctcttgtttgatccttacagcaactctatgcagcagatcatactatctttcctctttggaagaggaagacactggaaaatactcagcaaggtcagacttggcccaaggtcacccag

SEQ ID NO: 502892 - DNA, 598 bp, Homo sapiens
aggaaagacaagggaggcaaaagaagcttgcaagggaagcaaggggaggaaaaggcggaaagattttttaaagtggagggagaaggaggagagagaaagtctcatcctaaacggcgaaggggaagaggtcaagactgaggctgagacagagagtgacactgctggagagggagacctgaggagcaacactgagagataagacagcttaaagctgtcttgcactgcaggcagtgatacaaccaggaaccrgcaagtgagggactagtgaaaacaacagtaaagcaaaaatgcaccacaggattaccaaaaataaagctaaaacagattgtatgtgtatttcagtgtagagaaatgtaagagcacaaatgaggagtgagaaggtctctagtcttcattgtgccattaataataaaaactctcatggcaacatttattagggattgctgttttccaggcatggtgctaagggtttcccaagtaccctcttgtttgatccttacagcaactctatgcagcagatcatactatctttcctctttggaagaggaagacactggaaaatactcagcaaggtcagacttggcccaaggtcacccag

SEQ ID NO: 502893 - DNA, 629 bp, Homo sapiens
taatcccactgttattttgtgtgtggactctaagccatttaaattgtttcttcatatgctttcttataacaagctcatcgttaggtgatatattttgttattgttttaactgagtattttgtgtgacctgaattctagaagtttctttcgagggttagtttgcatttgtttctgacaggaaccgcttgaggcctattgaatttttgggttagggtttccaacttacatgagtggtgtagttcaaaacatacacctcagtgcaacataaatcttgaatttgtaattattttttctgtcataagccaagtctagacaacagtctttgttttctacttgttacaatctataggtgttcacaacaaatgcagttcttcaagggtcccagaattatgcaacagtcttaactccaactcctagccctatatgtctgtaaggcctcactacctatgtcttctacatcattaaaacccaaaatcatggttgactgataccactacttccttctccttattcttctagaaaatcaagaaataggcagacaattaaatttggarctaaggtgagatatatggaggcaaaatgctgccagttcttaatagtacaaaggttaaaacaaaaggcactatctt

SEQ ID NO: 502894 - DNA, 596 bp, Homo sapiens
agtatatttccaataaccatggcaatcatcattgaactactgggtagagactgcgagatgaaaatacatcaataaaacttgagaaagaaagatgtaagatccttgtttatgccttcaggctaacaaatgttcattgcctttcaaagaattgtggccatgatgggtatgtgaggaaagtccacattttagtcacccataggttggtttaaatctttctgcaaagcaatttcataagttgcttctaagagccccaagatcaactgagaatcagacagctatttatgctaagaaatggttatgtggactgtggccagatagacttagtaataaataactgatgaaaaggcagaaggggtaaacataatttgaataaattgattaatcttttattatcagagttttgaactatatgccagaaagcatgcttgtgctaggctcccagagataaatgatgttctgtacctttacatagttaatatttgtggaacatcattctaaatatataaatgaaaatttattaattcycaccacaacttcaggatatatgaactattattggtcctttccagatgttcaaggttacacagttagtaatc

SEQ ID NO: 502895 - DNA, 601 bp, Homo sapiens
atgctagtaagggcattgatattttctccatctttatggctaagaaaactgagactcaaaaaaattaaatgattttctcaagatgagtggtgagtatgtggccaatctgtaattcctrccctagtctgcgtgaatcctgcggctttgtttttttccaacataacccttgtctggtcagtctccagttagctgacaagaaagactggcttgacttgcaggtcagataaacagacggctttgtgtgtctatgatacaggcacacatgaaaatgggagctaataaattgtagtcattaagagagggacctctggagtcaatgtctagagttttaagcttaccagctttatttacttggatgagttacttaacttctctgtgtttcagtttctttatctataaaatagagcattgagataattaaatggaaaattaattctatatgaagtgcttggcacatagtgggtgctcaaaaaaatgtcatcatcagcgtcattatcatcatcattttaattatcatcatctttggaattcaaactcttgcctaaggggcaaggcaaagggttttctgtttatccacagggcattattaatttatttcagg

SEQ ID NO: 502896 - DNA, 601 bp, Homo sapiens
atgctagtaagggcattgatattttctccatctttatggctaagaaaactgagactcaaaaaaattaaatgattttctcaagatgagtggtgagtatgtggccaatctgtaattcctaccctagtctgcgtgaatcctgcggctttgtttttttccaacataacccttgtctggtcagtctccagttagctgacaagaaagactggcttgacttgcaggtcagataaacagacggctttgtgtgtctatgatacaggcacacatgaaaatgggagctaataaattgtagtcattaagagagggacctctggagtcaatgtctagagttttaagcttaccagctttatttacttggatgagttacttaacttctctgtgtttcagtttctttatctataaaatagagcattgagataattaaatggaaaattaattctatatgaagtgcttggcacatagtgggtgctcaaaaaaatgtcatcatcagcrtcattatcatcatcattttaattatcatcatctttggaattcaaactcttgcctaaggggcaaggcaaagggttttctgtttatccacagggcattattaatttatttcagg

SEQ ID NO: 502897 - DNA, 631 bp, Homo sapiens
aaagtccaccaatttagagaagaattttatgcagaaatcaccttcacagaaacatccagaataattgttgaccaaatatctgctcatctggcccagccaagttgacacataacgctaactcttgcatatgagaacrctaactttgtttcttctacttcttgtttcactgcaagagtaattgttgaatggacgtaaacataccatatatcttgttagtaaatgtgtttagacagccctgatcttacactgagtggcagtgagtgatcttccataaagaacgtctgccttgtctgaagccgtgtttgtcataacaaccgttcattcatggatttaatattcatcccttcattcattcattaattcatttcctcagcactaattcatgtcttcttaggctaggcagtgtgctaggttgggggacaaggcagcaatcacagttcttttcctcaaagagctttttatttttttgtgagaagagcaacagttaagtgaaagattcaaatgccctgtggcaactgccatgcccacagctcctttgtaatgtgtaagactctcatagggaggctgccatcaaggcctttaaggagggctgcactgtcacgaccacagggcattgaaaagccacctgccg

SEQ ID NO: 502898 - DNA, 556 bp, Homo sapiens
ttctaacaggcaggcttgaacctgagaggtggaggttgcagtgagctgagatcatgctgctgcactccagcctgggcaacagagacactgtttcaaaacaacaacaacaacaamaaaaaaaaaacaacaaataaaaaaaaactccaaatctctctcttaaaaatatccttaaattttcactgagaaaaaagactgacaataattaggcggcagacttcatgaaaaacagaatattattgacatataagttaatatagatctaaaccactgaaaacatgtttgccatacgtagtacttgagaccctgaaagagcatttatcaactgtgtgtttacaaaattaatcttacaaaagtgggcacagattctagagtcatctcaacacgtttttttagtgtattgtttgcacgggaatttagccaatgtttcaaaaatccccttggctctaaatttatcattgtgcaatcataattgaaaggaaaataagagttcatctaacctttctctaagcagacttgttagggtcacattcaaaatgaatggataattgtttggatt

SEQ ID NO: 502899 - DNA, 675 bp, Homo sapiens
ttgtatatgaggtgctatatgccatattacactctggtattggaaggatgaaaaaggcattgtgctctctttgtggaactcaacatctagtgataggatatatattaaaacacataattataataaaaagtataaagtattataattgtttttcataaaatcaatatattttgttgtatcatcaggcatttaagacccatccacaatgtgttttttgattcctctggataacaggcccatatatttcaggaggttggtaaatgtactcagtactgtattttttggtcacattggatggagcatgaactgtctgatttatcaccatttctaccactcccaactgttacacaaaagaccagagtctctcttggatcaccaaaatctttgagaccctgaagtggtagyttctctagtaaatgacataaaccctcatgttgactgtctaaactaaacccacttgggtttctggctcaaatattcaattacagtacaattgtataactgacaaatctccactttacttttcagtacgagaacacatgtcgtccttcatacactcaagtgacattactgacccaccatctgccttgagaatttttcctggtggtgacaataaattttcatggattcatatacacctggtcccatttgtgacaaagagcatgcattttagag

SEQ ID NO: 502900 - DNA, 675 bp, Homo sapiens
ttgtatatgaggtgctatatgccatattacactctggtattggaaggatgaaaaaggcattgtgctctctttgtggaactcaacatctagtgataggatatatattaaaacacataattataataaaaagtataaagtattataattgtttttcataaaatcaatatattttgttgtatcatcaggcatttaagacccatccacaatgtgttttttgattcctctggataacaggcccatatatttcaggaggttggtaaatgtactcagtactgtattttttggtcacattggatggagcatgaactgtctgatttatcaccatttctaccactcccaactgttacacaaaagaccagagtctctcttggatcaccaaaatctttgagaccctgaagtggtagtttctctagtaaatgacataaaccctcatgttgactgtctaaactaaacccamttgggtttctggctcaaatattcaattacagtacaattgtataactgacaaatctccactttacttttcagtacgagaacacatgtcgtccttcatacactcaagtgacattactgacccaccatctgccttgagaatttttcctggtggtgacaataaattttcatggattcatatacacctggtcccatttgtgacaaagagcatgcattttagag

SEQ ID NO: 502901 - DNA, 611 bp, Homo sapiens
tctacaagtacaccaaaaagaacagagaaactgttatttatagtcaaattgcaatttattagagctgttattttgtcaacacgttacttcagtggtttgtttgacattcttctagatggactctctctggtcctgtcaattttttcagtctttcgaagagcctgtcagtaaaaaatataaaaatcatagttgtctaatgaggtcttgccatatgcgtacatgcacatctatgatatgcatggcattttaaatctgtggataaaataaatgtgaatacttgtttattattttttccatgggttctgaactaattattcaagtaattaggttttatcttcttttagataattgaccttcatacaatgaaagatcccttaatttttataaatatctaaaatgccatatatttgttgtttttatttcgtgttttgatgtgacacaagcaccaatttccttgcaatacatagttttctaaaaatmaatcatattagtaacactcaaaggaactttggagctttgacatgacatatatgttttatgagctttcaatatgtccttgataaatgtaaaggcttattaaatgagcttctgtaagacaaaagaatcacaag

SEQ ID NO: 502902 - DNA, 611 bp, Homo sapiens
tctacaagtacaccaaaaagaacagagaaactgttatttatagtcaaattgcaatttattagagctgttattttgtcaacacgttacttcagtggtttgtttgacattcttctagatggactctctctggtcctgtcaattttttcagtctttcgaagagcctgtcagtaaaaaatataaaaatcatagttgtctaatgaggtcttgccatatgcgtacatgcacatctatgatatgcatggcattttaaatctgtggataaaataaatgtgaatacttgtttattattttttccatgggttctgaactaattattcaagtaattaggttttatcttcttttagataattgaccttcatacaatgaaagatcccttaatttttataaatatctaaaatgccatatatttgttgtttttatttcgtgttttgatgtgacacaagcaccaatttccttgcaatacatagttttctaaaaataaatcatattagtaacactcaaaggaactttggagctttgacatgacrtatatgttttatgagctttcaatatgtccttgataaatgtaaaggcttattaaatgagcttctgtaagacaaaagaatcacaag

SEQ ID NO: 502903 - DNA, 635 bp, Homo sapiens
atgaggctgtttcagtgtgtaatgaggaatttgactggttttagccctggttcctgagagataatgtttaaatctttggaatttgtccagtaataggmatgtatttattattcatggtgaatctctcatgccacacctgatagtttatgctaagtaggtgactccagttgggcccctagtttatgctaataatataactaaacatggagctggccacaatagactaatcatatgattagaggatttgggcttcaagccatatgatatcaacctgatctctatggagaaaagggaggattgagattcagtttgaccacatctattaatttagtcaattatacttatctaatgaagctacatgaaaaacataaacagtgaaacttgggtaacctccctggttggctatactctggttattgttacacattgatgtgccgggagggcaatagatctctgaggatgacagaaatttcatggtttgggtactctccaaccttgctttatgtgtctctctttgaatggttctgatttatacctcttttcctataataaacctgtaattgtcaggcctctgagcccaagcgaagccatcatatccccagtgacctgcacatatacatccagatggcctgaag

SEQ ID NO: 502904 - DNA, 577 bp, Homo sapiens
tggcctggggcaggtcacttcacctccctaaaccacattatctagatggatcccttctaaatccaccatcctaaggggctgggtctgagtcttttttccactctgaaatgtgatgctctgcctaacacgcagagctagcagtcacaacgatgcccagccaggagagaggtttgcccctttttgaccagtgatgcttcgaggtgttaatgcagacctggaggcaaggctctgcccatacccagcttcccctgctgctgggccccgatctatcttccctcctgctcacccacggcaccaccccttggctgcctttatctttgtggggtgacttgttcagatcctgaagcagtctctggatattacaaatggcaaagaatggtgtctttctcttggggagatgccaggccaacactttgacctgccctagcagctcagacagctccaccctggcagacagacstcacttactccaggaagcccctcgggtgccttggccctggtctcgccccgctgcagggattcctggggtgagctccaaatgcagaacacagttctggggtatatactgagcccactg

SEQ ID NO: 502905 - DNA, 538 bp, Homo sapiens
ctgtgccctgtctgacctcatggccacccacaagctggcaccccccacaggcctcttggggaagcctgtactttccaccgcmggaggcgggtaccgcgtggaagccaggctcaggcggactcattctttttgaactttgggaacaggcctggtacaggctgagttctcacaagagacacacacccgtgtcactgtctcctgagctgtgccggacccgtcctacagactccacctcctctaggtcctggccctggcatctgccagggggattttaaatgagttgatatatgctaagtgctttgaaaggcgcctgcacggagggagagctgtataaatattcactattggtaatatttctcccatgctgttactctccaaagctgcccgataattctagagtgggttccggggacgtgcccgctgtttggggcctagaaatgaactcgggaggttgttttgcttgctgagagctggtctgggaatgccccttgaccgttccctgccctgctcctggcccactcccagactgctcctgtgc

SEQ ID NO: 502906 - DNA, 431 bp, Homo sapiens
tgacacgttttattgaatgtaaacaactctgtgaggcagatttgatgaccaccctttaataggtgaggaagccaaggctctaagacgttaagccccatgcccaagggtacacagccagtatggagagtcatgtggccagcctggggccagtggccatgtcttcccactgtgctgctgtgccacccagagctgagggcctgggatgtttgatgggacagaagccacgtgcctggtatgtcatctctgtgcatccccactgggacttggaagtagaaattggaagtagcctgtggtgttgcaggagcactggctttagggtgagatggcctcagttccaggttcgcctctgccacgtttcacggtgtgatactggatgactcttttgagtyccagcccaccctcttcactgacgtatgaaagcggggttaaaa

SEQ ID NO: 502907 - DNA, 598 bp, Homo sapiens
ttaatcattcttaagtgtgtatgtrtcctggactcacttactcagggtgccctaagacgttcagtgaaaagactcccaagtctaagacgtggaggttaggcgtgccgaaggtttgggcaacacccttttccacgcccatcccagtgttttactgaagcagatttttgtttgcccttaagaagaatgacaagtccctctgtaggccgtttgaagtttgcatttttaaatcctgcttttctctcttcatgttccatgtttgtgactggcttatttcacttagcataatgtcctcacggtccatccatgttgtagcctatctcagaatttccttcctttttaaagctgagtggtattcaggtgtatatatgtcacatttggtttatccattcatccattgatggacacttaggttgcttccaccttttgactattgtgaatcattatggtaagacatgagtgtatggattgtgactcgcttttaacaaagaaaatgcagcaaaagtggcggctgtcagtcccgaggttagatgatggagccactctagcattgtcttgcctgccctcgctggctagctctctcccactcttgaggcaagcc

SEQ ID NO: 502908 - DNA, 603 bp, Homo sapiens
gttaactggggagaggaacattctattttacaatatttatttcactaggggtggaaaaaattgtctgcagagttaacttcaaaaactgaaccataggctcaaaagctccttggttattattacccaaaaaaacacagggttctaaagctctatttcccaagccacaacactcaggaaaaagaacttgtctctctctctggcagagggagggagggagggaggcaggagtgaagggaaccgcttagtggttaatyaaactggcagggtttacttcaaccacatctaaaagataagaccgagggaccactgcggtctcccaaaagcaactgacctgcttcaagacaggaaatgaagcaatccgtctacagtaggacttaggaaatgtactctttaattcatttaaagtctgtgaagtcggctcctctcctacctcaaagggtcttgacaaaaacacataaatgagaaactccttgtcattagcccccacaattcccatcggcttctccatcctgaggtggtcaccactcacttcccaacctcatagcctccacacagtccttgtcttcccagccccaatttccctggaaaccaggcaactgaggg

SEQ ID NO: 502909 - DNA, 597 bp, Homo sapiens
cagttgggagcaaaactctgaaggctgttaarggagggaaaggagcttccgagatgactgagaaggaatgatcagagagccaggtgtgtgttaacgggaggcagaggaagagaagaatatggtgtgagggtggccaagggaatggagtttcagaaggagggaatgatctagctgatccaaagcagcagaattgtgcctaaggaagagatggaaaattaacgtttgaattcaatgattgggaggccccctggtgactttgtgaagacagattcaggagagagtgatggtggtgggaaccggacagatggcaagggattgaagaatatgcagactgtagggtttaaaccttgttttcttttagagggggtctggctctgtctcccaggctggagtgcagtggcgtgatcttggctcactgcaacctctgcctgccgggctcaagtgatcctcccacctcagcctcctgagtagctgtgacttacaggcacatgccactatgcctggctaatttttaattctttctttttttggtagaaatgacgtctcactatataccccaggctgatcttgaacttctaggctcaagtaatcctccta

SEQ ID NO: 502910 - DNA, 597 bp, Homo sapiens
cagttgggagcaaaactctgaaggctgttaaaggagggaaaggagcttccgagatgactgagaaggaatgatcagagagccaggtgtgtgttaacgggaggcagaggaagagaagaatatggtgtgagggtggccaagggaatggagtttcagaaggagggaatgatctagctgatccaaagcagcagaattgtgcctaaggaagagatggaaaattaacgtttgaattcaatgattgggaggccccctggtgactttgtgaagacagattcaggagagagtgatggtggtgggaaccggacagatggcaagggattgaagaatatgcagactgtagggtttaaaccttgttttcttttagagggggtctggctctgtctcccaggctggagtgcagtggcgtgatcttggctcactgcaacctctgcctgccgggctcaagtgatcctcccacctcagcctcctgagtagctgtgacttacaggcacatgccactrtgcctggctaatttttaattctttctttttttggtagaaatgacgtctcactatataccccaggctgatcttgaacttctaggctcaagtaatcctccta

SEQ ID NO: 502911 - DNA, 568 bp, Homo sapiens
ataagtacttccttgtccattcattccctggcttacccacaagtcccccaraattccttctctgaacccacctgaccctcgtcaaagtgtaggtgggtcttctctggtctccgtgactctgtgcccagagaggaccacctgccccatccatccatccacctgcccgtctagcagctctaaatgcacagtccagagtcatccttacctgccttctgccaccgccgaccccaggctatattttgagtaggatgggacctgagaaggcttgcccacagctcagcactgaaaacctcatgggatcacacagaggactcagctcacagaaggaacatgtacttattaatgcatttcacaataccactgatgcaacccacagctccaaccttcacatccgcctttgaggtccgatgctaggctcagagcctcaacctcatgtgctatgtccagttactccctgggttggttaagaactgagaaagcagtggtagcagctcctctcccagcctgcagggtgctgacggagcccaagctaggacccatgtcagccctcgccgaagccccgagcaga

SEQ ID NO: 502912 - DNA, 612 bp, Homo sapiens
gaaggagcaatggggtgacagttgctcacgtgacctccacacaacccatcactggacacaaagccccagtcagtgaacacacccccagtgcctccactggagtgaccaattaaaggatgggaccaagtgtctcattcatctttgtaccctgcytcaggggatggaggctgagggactaggagatggactggacagagagcgctgttgtgcattcccaaggtgtgacaacagcagccagtatgatttgaaaggtctgcagagagatataagagacaggctgggagagaccagggatacgagagaggagagagagcctgcagatttctcggctcccatcctagaccatgaagaccccgtgctctgggaattccgtgcctgtctggcacacagatggtgctctgaggctaggaaatcaaggggttttctccaagtttgtttgaaacccctggaatcgacagggaagtgttcctgggagagggtctggctgtgtccccaggcaagaggccccatagtgattttccaggcctttcctggagtggcctcactgtagccattgggtggaggccacaccaagatgcactggagcttgggtctagtctgcttcccaaacct

SEQ ID NO: 502913 - DNA, 501 bp, Homo sapiens
gaaggagcaatggggtgacagttgctcacgtgacctccacacaacccatcactggacacaaagccccagtcagtgaacacacccccagtgcctccactggagtgaccaattaaaggatgggaccaagtgtctcattcatctttgtaccctgcctcaggggatggaggctgagggactaggagatggactggacagagagcrctgttgtgcattcccaaggtgtgacaacagcagccagtatgatttgaaaggtctgcagagagatataagagacaggctgggagagaccagggatacgagagaggagagagagcctgcagatttctcggctcccatcctagaccatgaagaccccgtgctctgggaattccgtgcctgtctggcacacagatggtgctctgaggctaggaaatcaaggggttttctccaagtttgtttgaaacccctggaatcgacagggaagtgttcctgggagagggtctggctgtgtccccaggcaag

SEQ ID NO: 502914 - DNA, 640 bp, Homo sapiens
ttctgccatgaaatcccctgcctgctaccctctggctctttctggaaactggctccagcccttgctgaacgaaggagtactgctaccatgtactaggaaacgagatgtggcaagcattttagagttgcttgcagactattttagcaatgaccactcacttctctgcacctttcaaatgacctatgctggcttatgtgtccaccaccatggccccgcacaygcgccttcctggaaatggcaggcacttggcagctcttctgccccttgctctaggcaagctctttggaatcaggccactttaagaaaggaatgtggtggcagttactttgcaagcagctcagtgtgactattggtaaggcactgacatgccgttcagtggaacttctgagtagcccagttactgtgctcagaactgggggtactcttgtcccggctgcttccagataacatttgccgcgctctttaacagatatgaggagagcgttatcaaactgcaacaccttggggcaccttctgcaagaaaccctcttctggttccatacgcgggggtttcccttcttttgcaaataggtaaatgtgtgctgtgttaaagaaagacccttaaaatatatatatatatatatatatatgggatgtcaga

SEQ ID NO: 502915 - DNA, 640 bp, Homo sapiens
ttctgccatgaaatcccctgcctgctaccctctggctctttctggaaactggctccagcccttgctgaacgaaggagtactgctaccatgtactaggaaacgagatgtggcaagcattttagagttgcttgcagactattttagcaatgaccactcacttctctgcacctttcaaatgacctatgctggcttatgtgtccaccaccatggccccgcacatgcgccttcctggaaatggcaggcacttggcagctcttctgccccttgctctaggcaagctctttggaatcaggccactttaagaaaggaatgtggtggcagttactttgcaagcagctcagtgtgactattggtaaggcactgacatgccgttcagtggaacttctgagtagcccagttactgtgctcagaactgggggtrctcttgtcccggctgcttccagataacatttgccgcgctctttaacagatatgaggagagcgttatcaaactgcaacaccttggggcaccttctgcaagaaaccctcttctggttccatacgcgggggtttcccttcttttgcaaataggtaaatgtgtgctgtgttaaagaaagacccttaaaatatatatatatatatatatatatgggatgtcaga

SEQ ID NO: 502916 - DNA, 640 bp, Homo sapiens
ttctgccatgaaatcccctgcctgctaccctctggctctttctggaaactggctccagcccttgctgaacgaaggagtactgctaccatgtactaggaaacgagatgtggcaagcattttagagttgcttgcagactattttagcaatgaccactcacttctctgcacctttcaaatgacctatgctggcttatgtgtccaccaccatggccccgcacatgcgccttcctggaaatggcaggcacttggcagctcttctgccccttgctctaggcaagctctttggaatcaggccactttaagaaaggaatgtggtggcagttactttgcaagcagctcagtgtgactattggtaaggcactgacatgccgttcagtggaacttctgagtagcccagttactgtgctcagaactgggggtactcttgtcccggctgcttccagataacatttgccgcgctctttaacagatatgaggagagcgttatcaaactgcaacaccttggggcaccttctgcaagaaaccctcttctggttccatacgcgggggtttcccttcttttgcaaataggtaaatgtgtgctgtgttaaagaaagacccttaaaawatatatatatatatatatatatgggatgtcaga

SEQ ID NO: 502917 - DNA, 555 bp, Homo sapiens
ctgtagttgacactacaggcccacataagacaacttcagcggccagttctagactccaaggctctttcctaaaaatgagatttaataaatcctggagagctcctccccagatgcaaatcttgatccactggatcacgggggagctgtgctgcaaggcacgaggagaggctgtgagaagccagcttggactccagcccagccaagagctgggggctctgaagaatgtcccctctcctgtcacccaaagcatgtccctcattacctgggccacgaggcgctggttttcaytgagccaggtctctctcattgcggccttccggtcaaagcgccgggctagttgctctagcttctcctgccgaatgagctcatttctcagggccagctcccgccgatactcagcttcctccaggctttcccaggcctgcacaaaggatggaatgagaattcttggggcacaggagaaatgcctcactttgggggctccacccctttcacccaacactgagtgatttctggaatcaaggtacagcctgatgctcttgggtgacgtggtag

SEQ ID NO: 502918 - DNA, 555 bp, Homo sapiens
ctgtagttgacactacaggcccacataagacaacttcagcggccagttctagactccaaggctctttcctaaaaatgagatttaataaatcctggagagctcctccccagatgcaaatcttgatccactggatcacgggggagctgtgctgcaaggcacgaggagaggctgtgagaagccagcttggactccagcccagccaagagctgggggctctgaagaatgtcccctctcctgtcacccaaagcatgtccctcattacctgggccacgaggcgctggttttcattgagccaggtctctctcattgcggccttccggtcaaagcgccgggcyagttgctctagcttctcctgccgaatgagctcatttctcagggccagctcccgccgatactcagcttcctccaggctttcccaggcctgcacaaaggatggaatgagaattcttggggcacaggagaaatgcctcactttgggggctccacccctttcacccaacactgagtgatttctggaatcaaggtacagcctgatgctcttgggtgacgtggtag

SEQ ID NO: 502919 - DNA, 561 bp, Homo sapiens
  misc_feature (1)...(561): n = A,T,C or G
atgttgcaagatggaagaggtcatggctggggcatacttaagagaactggagacccgtatgtggtaggatggggtaggcgtgggtacctggtttgagggtttggttgctgcctgcctcatcacctccttctctggcctgctacttccctagcagacagggtcttccgagatgtgtttgaagacctgagttctcatcctggcttgggggaatcttatagtatggagtggtgctcttcaggtangaaggaaaggctgaccccgcccggggagcaccaggggaggcactttaactgtctctgtgggagtctgagctacacacacataatggttccaatccggtgtcttagggccagaatgcactccagctgagtgcagtgcactcagaatgcactctgagagcgatgcctcttatccgtcaccatcaaacggtgcctcctgacagtctgcactagtgtcctgctttgtactcagtgcctcrtttgttcttcagccctccctttcttgggctcttggctcttttccagcaagtcctcctgcccaagagagagagagccttgtgat

SEQ ID NO: 502920 - DNA, 353 bp, Homo sapiens
tcataccaatgataagtgttaaattttactaagctsctgatatgtgtgagatcctaggccagtagacacaagaaatgttcccaaacacttcagggctgcacagaacatctgcatcttcaatccttccctctctcttgctgtttcactcttgcctatagataagttcaggtctttcccattgaatacaactgtcccttggccctgcatgcctgtctgctccccctcaaagccccataccctctcccatcaaacattttgaaggaatgggctacattcttcgttgtactctgatttattccactccctgctgccatgggttcttgtccccgtgccctactgaaactgttctccct

SEQ ID NO: 502921 - DNA, 647 bp, Homo sapiens
tagcttcatgaacatgggtttcactttatttttatggggttccagctcttgctcatggaatccctccctgcctgttctgcagtcttcccttgtttactgcctgtggacttcaagtatcagacacagagaaagatttgtagatactgtttactcagcccccacaatttccatagcaggtctcttaattcccatcacctccagggagggtcattgctgggatcctaggaatcaagtgccttgtcttgatggccacagtggtaaccataatagtcaggttttccctctgtgcaattctggaacataaaaatcttctctggtaacaagactacagaaagcaatgaaagcaacactaaactgggagtttgctggcctgtgtttctaagaaatttaatgtttttacataaayaatgaagaagaaatgacttttctaaagttcctgtcatttatgccatggattggactcttctgtgaaagcagtttcattgatggatgtggataattagcttaacttcaagtaaaagattagagagcaaattgtaaacataactgtgcttttttacactcaaatgacattaatcagacagttttggatctctagaaatatatattagaacatgtaagttctatattgaaatgcgcaagtttgg

SEQ ID NO: 502922 - DNA, 647 bp, Homo sapiens
tagcttcatgaacatgggtttcactttatttttatggggttccagctcttgctcatggaatccctccctgcctgttctgcagtcttcccttgtttactgcctgtggacttcaagtatcagacacagagaaagatttgtagatactgtttactcagcccccacaatttccatagcaggtctcttaattcccatcacctccagggagggtcattgctgggatcctaggaatcaagtgccttgtcttgatggccacagtggtaaccataatagtcaggttttccctctgtgcaattctggaacataaaaatcttctctggtaacaagactacagaaagcaatgaaagcaacactaaactgggagtttgctggcctgtgtttctaagaaatttaatgtttttacataaacaatgaagaagaaaygacttttctaaagttcctgtcatttatgccatggattggactcttctgtgaaagcagtttcattgatggatgtggataattagcttaacttcaagtaaaagattagagagcaaattgtaaacataactgtgcttttttacactcaaatgacattaatcagacagttttggatctctagaaatatatattagaacatgtaagttctatattgaaatgcgcaagtttgg

SEQ ID NO: 502923 - DNA, 647 bp, Homo sapiens
tagcttcatgaacatgggtttcactttatttttatggggttccagctcttgctcatggaatccctccctgcctgttctgcagtcttcccttgtttactgcctgtggacttcaagtatcagacacagagaaagatttgtagatactgtttactcagcccccacaatttccatagcaggtctcttaattcccatcacctccagggagggtcattgctgggatcctaggaatcaagtgccttgtcttgatggccacagtggtaaccataatagtcaggttttccctctgtgcaattctggaacataaaaatcttctctggtaacaagactacagaaagcaatgaaagcaacactaaactgggagtttgctggcctgtgtttctaagaaatttaatgtttttacataaacaatgaagaagaaatgacttttctaaagttcctgtcatttatgccatggattggactcttctgtgaaagcagtttyattgatggatgtggataattagcttaacttcaagtaaaagattagagagcaaattgtaaacataactgtgcttttttacactcaaatgacattaatcagacagttttggatctctagaaatatatattagaacatgtaagttctatattgaaatgcgcaagtttgg

SEQ ID NO: 502924 - DNA, 420 bp, Homo sapiens
aacaaaagaaacatttgcatttatcagagctatagtttccttgtgctgtcctcagactagtgtcggtctgttgtgaggttttcacccatccatggtgaaatcagtaaggttaaggagctcagttaytcatttaaaaatgtcggtctttttcttggcatgatgcctttttcatttattttacttaaactttttttttcatttaagaaataacattaatagttgttttttccctataaaagccaattcttaagagcccatgtttaactaggaaatataaacataaaataaatgtgtcacagtggaaatataaagcagatgcagaaaagaggtacagttaatatgatttagtgattgttgaatgtaaaaagataggggatagggagaaatctcagatgattctcaggtttctggcttgtgccc

SEQ ID NO: 502925 - DNA, 523 bp, Homo sapiens
atatttattatgataatcttttggctaatggtaacagcatatcttgttctaacaaaattactgttaacatagcaattaaccagcaggtagaaaaacacatcttgttctaatgaagtaaatatacctcattcgatttcaaattgggggaaagtcaataatagtgacaccttgttggtttataagtatgtaacatgacctgttcttctcaacaaggaattgcttttctgacttctgcactcagaaggtctctttaaaaaataatttcccattagtattagtgcacattgggtatgtttggcagggttttgtttgtgtttttgtttttgtttttttctgagacagggtctcactctgtcatccaggttgtgatcatgatcacagctcactayagccttgactcccaggctcaagcgatcctcccatctcagtctcccaagtagctgggattacaggtgtgcaccaaaacacccagctaattttgtatttgtttttgtagagatgtggtctcactctgtcacccagg

SEQ ID NO: 502926 - DNA, 539 bp, Homo sapiens
gctgactccagctttttagtgtggcattcatcttccattcttactttctttgtgttttacacttttcctttcaagttcctaggaaacacctagactccatgggactaatctttgtgctgtcattccattctccaagkggagtagttttctctattttttccctggtgagctcctcttatattttgcctcttctgtaacgccttccttgtgctaaaatataactttccatatatcaactcttaaactacacattgtatcataattgcatattacctggtttttgaggcaggaaatatatatttctttatatgttgttgataattcataactgtgttttttgaattaatgaattgagatggagaagagttggaattttacaaaatttttttgttatcagtagaattattataaaacattggccttttgtagattttttaaagttgtggttctgcgttacatatgcaggaagtaaagaaaaatgaaaataaaaaatgtacctcaaaataatctctgattacgccagtgtttgagaaggctaa

SEQ ID NO: 502927 - DNA, 539 bp, Homo sapiens
gctgactccagctttttagtgtggcattcatcttccattcttactttctttgtgttttacacttttcctttcaagttcctaggaaacacctagactccatgggactaatctttgtgctgtcattccattctccaaggggagtagttttctctattttttccctggtgagctcctcttatattttgcctcttctgtaaygccttccttgtgctaaaatataactttccatatatcaactcttaaactacacattgtatcataattgcatattacctggtttttgaggcaggaaatatatatttctttatatgttgttgataattcataactgtgttttttgaattaatgaattgagatggagaagagttggaattttacaaaatttttttgttatcagtagaattattataaaacattggccttttgtagattttttaaagttgtggttctgcgttacatatgcaggaagtaaagaaaaatgaaaataaaaaatgtacctcaaaataatctctgattacgccagtgtttgagaaggctaa

SEQ ID NO: 502928 - DNA, 539 bp, Homo sapiens
gctgactccagctttttagtgtggcattcatcttccattcttactttctttgtgttttacacttttcctttcaagttcctaggaaacacctagactccatgggactaatctttgtgctgtcattccattctccaaggggagtagttttctctattttttccctggtgagctcctcttatattttgcctcttctgtaacgccttccttgtgctaaaatataactttccatatatcaactcttaaactacacattgtatcataattgcatattacctggtttttgaggcaggaaatatatatttctttatatgttgttgataattcataactgtgttttttgaattaatgaattgagatggrgaagagttggaattttacaaaatttttttgttatcagtagaattattataaaacattggccttttgtagattttttaaagttgtggttctgcgttacatatgcaggaagtaaagaaaaatgaaaataaaaaatgtacctcaaaataatctctgattacgccagtgtttgagaaggctaa

SEQ ID NO: 502929 - DNA, 539 bp, Homo sapiens
gctgactccagctttttagtgtggcattcatcttccattcttactttctttgtgttttacacttttcctttcaagttcctaggaaacacctagactccatgggactaatctttgtgctgtcattccattctccaaggggagtagttttctctattttttccctggtgagctcctcttatattttgcctcttctgtaacgccttccttgtgctaaaatataactttccatatatcaactcttaaactacacattgtatcataattgcatattacctggtttttgaggcaggaaatatatatttctttatatgttgttgataattcataactgtgttttttgaattaatgaattgagatggagaagagttggaattttacaaaatttttttgttatcagtagaattattataaaacattggccttttgtagattttttaaagttgtggttctgcgttacatatgmaggaagtaaagaaaaatgaaaataaaaaatgtacctcaaaataatctctgattacgccagtgtttgagaaggctaa

SEQ ID NO: 502930 - DNA, 420 bp, Homo sapiens
tgtgctgaatgttaggatttgaagccaaagcatatgtgaagcttcagaattaacttttaattcttgctttaagttgcaaaaaacgaaaacaaataaaaaaaaccccacsaaatctaaccaaaccaaaccaaaacaaaatgtgggtgattaactagcagacaagtagagaggggctgtttcaaaaacttcctaaacataacttccttttactcaatggtagaaacttttacctggagtggatactggctagtatgtggacacacaggggaattttttttttttttttttttaacacaggtttatcaccaactctggcagttttgagaaagactcacttgggttctaaggaacagaatttttctgtgaaaactgcatctcatcaagctgaaagatctccagcagtgccaaggccagggagca

SEQ ID NO: 502931 - DNA, 589 bp, Homo sapiens
ctgccagcttgttggctgcagccccaaaagacctactgatatttggtcctcatcaagagctgacccagagagtccaygtatgcaactgtaaacccacttttttccccctattttgttttcctttcaaacctaaagctagatgtggccgtttcgccgcccaaggggactgtgtcgtggaggcccggctcgggtccgaacaggcagaggcccgctccaacaggtgcgcagcgtgtgcgcgcggccagcttggggccggccacacagcccccagcagctcgccccgggtctctcccgctgcacccagcctcacccagagcccgaggacgcagagaacggcctgcgcaccgcccgcggctgcttcggaggggtgagggggtacagcgagaaacagagctgcgtctccctcgtcccctccttaaattccggcgtcctccagtcacagtgtcccaggtgcggcctactcaatcacccaccccaaaacctggaaagccgcgagagcagagctggagctgccaggagggcagcggaggggagggaggggagctgggtgaacccctgggcagtgttctgtgcgcgacgagccaggcat

SEQ ID NO: 502932 - DNA, 565 bp, Homo sapiens
cccagccaagctccaccttttaaaggaaggagcatcagataatttatggacgttcaaagcaagttastatttgttactagttgtgagatttttatcaagtcacctatcttatataagcctcagtttccccaactgtaaattggggatatgaatgtgtaccttatagagttgttaatggtatttaatgagcttatttatacaaaatgtctatcttagagtaagggctgagtattagagtgacattattattattttttgtagtgtagcttatatagcataggaccttgcaagatgtttgagtggaccttatggctattattaatcctatagccacgatatgtctctcatagtacgctacatattttttcacctctgcttctccaatgtgtatgatagtgcctggctcatattaggttctcaatcaatgtttgctaaaagagcaaattaatctttatctggaaatctacagatagttcaaacccaacatatgaggaagcccaaaccattagcttcccccaaatcatgtagtgtcaagaaaagtgcctggcacataacagttgtcaaa

SEQ ID NO: 502933 - DNA, 440 bp, Homo sapiens
catatcttttagagagttgtaaggattaaacaattaaatgggattaaataacgaattaattttaaaggattatataataaaattcatgcatgtacacagtgaacagtaaatgggagtattactcttattatctgtcccttgctgcgtttcaagcatctatccaggatactttaatgttgtccaacctaacagagtctgaatttgtttaacatttacagtaccttaaagaggagctcagtgagctcaaatgagacgagaaaggtagccactgggttctgagcagggtctgccacccctttctggaccccaccccctgcccaragtgccagatggcccagctgctgtccttgcctcttccaaaagcttggggaggtcttgctgcatcttcccatgtgggaaactcaggcaggcaggcagccctgccaaccagggaccaaatg

SEQ ID NO: 502934 - DNA, 635 bp, Homo sapiens
tcatctcatttcatctcatcattttatctcattatttcacctcatctcatctcatttcaatttcattatttcatatcatttcattatttcatttcatttcatctcatcatttcatctcatcatttcatccatcatctcatcatttcatctcattttatctcatctcatctcctttcaatttcttttcaattttgtcatttcgtctcatcatttcatctcatttctactcaccatttcatctcaaaatttcatctcatcatctcatctcatctcatttcrtcatttcatctcatcatttcatctcatctcaagtcatcttatcatttcatctaagtgaaatgatgtaatggaatcatgaaatgaaatggataggatgccctcagtgatgttaaatttaaaaattgtttcttttcatgtatgcatttttatatttatatgtatttatatttatatttacttatatttatttttacttatttttatttatatttttacttatttctttatttatagacaaggtcctgttctgtggcctaggctggaatgcagtggtgcattcacagttcactgcagcctcgagcaaacctcccaccttagcctcccaggtagctgggaccccaggtgcgcaccaccac

SEQ ID NO: 502935 - DNA, 551 bp, Homo sapiens
cttataagttacaggtatttatctggttgtcttaagcaaatgttcgttatggccatcagtttacacattggtactcagctgtacctttagtgatatttccttctattcatccttctttattcccggtataatcattctaagataatgttggtgttaagaggtcaaaagcgggattctatcaaatgctctgaaatatgcaaaaatatggtttacattttctaaagcatgcttgagaggttctaacatctattgattttttgaaggtatctgttacacacagatactaaatcctagccctatatattactgtagaaggtatttaaaaaactgatgaaatgacaaacaaaagattgaatcagctatataycaggaactatgctaaattattttacattacttcttaatttcttaattgctcttatttctagtatttctaccaactctgtatagcctcccaattattcttcaaagtgacccaacctatcatgtctttaattatcattacatgcttagtttttaaagttgctttttcctgttcttggtcatcactt

SEQ ID NO: 502936 - DNA, 560 bp, Homo sapiens
ttatttctcgatgtgcacatatctggagaagcccagaacttctggctcttacatggaggaccccagtgcagatgaaccattttcactgaagaaagacattaggattggtttggggaggcgaagtaatgtttttccttgttgctgtctctgtcatatggtacataggcatatggaaagaagggtaaccactcctgacatcactgtgagcattgtgtgggcatgtgtgtttgtgcgtgtgtgtgtgtgtgtgtgtgtgcgtgcttgtgttcatgggtgcatgagggggtatgaagaggatgtggtggcttggtctgtaggatcaaagggcttgagcagcatgrgtggacgttgcctgcacacacagggatagaaaaaggcatgtttttgtttctggtggttggggcagatggtgggctcattccagcctctgtgtgcttcgagaaatgagaaatcaggcagcacagggagctgagcgggcccggagctggtcctgctaggttatgagtgagtgaaggagtgggctgtgtgtgtgtttccagcttctactgtgggaacgactt

SEQ ID NO: 502937 - DNA, 626 bp, Homo sapiens
tctactttggaattgacgctttaaatccattccaatcactgttagccacacttacgctgatctgttaaaaaaaaaaagttgaaagcactgttgtttgagtgattcgatactaatttttggaacatttgctatatatgtcmgggactgtgctgggccccagggatagagcagtgaacaaaaagacaagagcctgctctcataaagttggaaacaacatacttagacgactcaaagccaagaatcaaataaaccctactggttttctccagatgtttttgtccttgccttttcccccctctaatgaactcctggctctagacccaagcattggctcccaccatttgggagccataccatatttgaagctttgccactcacctctgggcattaaggatctttgcacaatttaccactttcagttttgcacttctctttgacttctgcttcccacattgcttcaggctaggacttactgcaggtgaccctggccctaaaagacctacccgtttctacctccccatgccctgacacccagaaatcttggcgcctgcatggtgatggtttctgtgaccacagagtccccttggaagtgatgtggatctgtctctacttccatgattgcagct

SEQ ID NO: 502938 - DNA, 550 bp, Homo sapiens
ttgttaaggctgaataacagtatacgctgcattttgtttatccattcatctcttgatgaacacttgagttgcttccatcttttggctattgtgaataatgctgctataaagttgggtgtataaatatctctttaagaccctgcttttcaattcctttgggtatatacccagaagtggagttgctaaatgaaaaggatgggaaggtgtttttcagatgtgattaaaatttaaataagtaaactttgagtaaagcagattkcccccgacaatatgagtggccttataaaggccttcagaaaaaaaattaaggttcccataaaaaagaaattctgccttcagactgccttctgacttgagctacagcatcaactcttccttgagcctccaacctgctggcctgccctgcagatttcagatttgccagcctttacaaccacaggaacaaattccttaaaaatctctctctctctctttctctctctctcaggtctgtttttccaactctgataaatatgtacagggacagaaacagatcagtagttgccaggag

SEQ ID NO: 502939 - DNA, 626 bp, Homo sapiens
tgacaacgcatgtatttcaggaagattcagagtagaataactggaaaatgctttaaagattattttctccaagctccctacagaagataaccctggggcactgagaaaagaaatgacttttccaggaycatacaatgaattaaaaagagaaaaataattaaaatacagttttctgactcctgaaccccagaactcttttccctaaatgcaataaagcccaagaccaaagatgccagacagcagtttagggagtacagcttcttaaatatttgcttctttagatgttgtttccttctcctagacagcaatccagctcccttctttgactggcggaccccttaagaagcaggtcaaatagcacctcctccaggaggccttctctgatgcacccagagttaagttaaggcccattctgtgagctcccatagcattctgtgctgaatcctaaactagtacttttcgtcatttatcctgtgctggctctttggtcttttattcctccccagatgctaagccaagaaggatgtatattgttcatggttgtatccccaacccctagcccactgcacagtgctcagacagatctcattaaactacgcaaaatctcatggatccaggaagccatc

SEQ ID NO: 502940 - DNA, 312 bp, Homo sapiens
acacacgctcggggaaggcacatctaacaaagcgtcgaaagtggatgaagaacgcccctgccaggggagaatttgttctgtgtcaaagcctttgttttgctcttgcaaaagtctgagtgagagtcattgagttttccatgtttggaaaaaatccttttttccttccttcttcatttggtctttctaaaaaagcagttagggtttccctagtgatcattatttccytcactggggaaaagcctggtgcttctcctaggctgcagagtggaggcggtggccaactttgttcattgtattccccctggcagggcc

SEQ ID NO: 502941 - DNA, 670 bp, Homo sapiens
gagctatttacacagtgtgtggccagcacgacgcaaatggaccagaagctcctagaactgtttcctcttccctttcctttccccctttcccttaacaggatagccagccagcagaggctccctgtaaacctgagtcaggaggaaaggccgtgggtgagtgactagcagccaggtgatatagggcagaggccagsagactcaccttgtttggctacattttttttctaaattagttgctaacatttaaaaatcagattccacacaaaaatccgaattcccaacttctctttgaaatcctgggcctgtaatcccggacagcggcccctgcctggggctgagcagcagccacttaagatgggaccttctcttcccctgtcactgggtcccgctgacacaggtcacctgcccggcccctggtggcatttgagtttgagccgctggatttagagacaaaggggaaagtgctgaggaaagccaaagacctccactgtagtctactcactggccatgtcaacgcgggcaagtcacctactttgctgagctgctgtttctccctctgcaaacagaaatgaaaatgcacagcaaggcctcatccccaaaactgtagggaggactaggtaggaaaacacgggacatgcttgaaaacctgaacacacaccatgcaagtaag

SEQ ID NO: 502942 - DNA, 461 bp, Homo sapiens
agctttcatcttaccaaacttcactttaaagaaatgaaggtaccacaaggtaccttcattacaaagagattttgttcaattgctgggccaaagctgggaaatattaaattccagtcaaagaaggtatggatatcctgctaattccctgaggcatgttccatactgacaaaccatctgactttctgagtgtcagggaaatttccaatccaaagagtaaatgaacttccgtgagtagaaaaatagcctcttcacagcacccgattctctcccaccaagaattctctctcacctttcgcatgcagtactgacgttcgtaccattaggaacaaaacgaaggggaaggaaatggcaccagtccaggtgttaccagacggatatgtgaaagcaagtgtagaatcacccccaagaractcaaagtaggagaagcacttgctcatctgttaccagatactcactgtcca

SEQ ID NO: 502943 - DNA, 614 bp, Homo sapiens
ttgggaccatggccaccccagagccatccgatcgatggatgggatgcactctcagaccaagcagcaggaattcaaagctgcttgctgtaactgtgtgagattgtgaagtggtctgaattctggaatcacaaaccaagccatgctggtgggccattaatggttggaaaacactttcatccggggctttgccagagcgtgctttcaagtgtcctggaaaktctgctgcttctccaagctttcagacaagaatgtgcactctctgcttaggttttgcttgggaaactcaacttctttcctctggagacggggcatctccctctgatttccttctgctatgacaaaacctttaatctgcaccttacaactcggggacaaatggggacaggaaggatcaagttgtagagagaaaaagaaaacaagagatatacattgtgatatattagggacactttcacagtcctgtcctctggatcacagacactgcacagaccttagggaatggcaggttcaagttccacttcttggtggggatgagaagggagagagagctagagggacaaagagaatgagaagacatggatgatctgggagagtctcactttggaatcagaatt

SEQ ID NO: 502944 - DNA, 531 bp, Homo sapiens
tgggactacaggcgcatgctgccacgcccggctaatttttgtatttttagtagagacggggtttcactgtgttagccagatgatctcgatctcctgaccttgtgatccgcccacctcggcctcccgaagtgctgggattacaggcgtgagtcaccgcgcctggccaacttttttcttttccytgtttctttccttatctatttccctttatgggttggataattagctacattgcagatacacaatgtgtatacataaaatcaccaagaatggaaatgcaatgggctatacttatctagctgaagattggacttttccaatgtcatatcctcctcaccagtcacaaaactgctgtactttaataactatttggtttatgaagggatgtgttttgagagcattttcccaattttcagtgaattaataggcccaggtggtctggtgctctgttggatggatgtttctattttggtggaaagttattttttcataaattcactctcatgcacatataaatgtgaataataagcc

SEQ ID NO: 502945 - DNA, 627 bp, Homo sapiens
ttctcaaaagtccccttactgactcatcctgctctggtcctccagcgtgaaataacagaaccaatttggttaaatgttgctaataattaccctaagcacattctgcacttcaagaataacatacatgaccaaatatttaaacattggctaaaatgcaatagggtaatcaacagactcatcagtagacctgtttttatgtttatgtctcaaaggagaattgtttaacatgtttatatcttaatgcttttaacagttacaaaaatgaaactataattgaatttccttttaggatgattgaacttgataatattatacatccttgatttcaataacactgacagagcaatcaagattttttttaagatcctaaaaattatctttcataatatggagtatacacagatcttaacagcaacactgtctgaagtgtgtaactcaaaattttatatatacagccatgtaaccaccacctagataggacagtgatcatttctagcccctcaacagtctcttttgtgttgcctcccagtcagcccccyagaataaccactattctaactactatcacaaaagattggttttagctacttttgaacttcatataaatggaaacctacagtatatact

SEQ ID NO: 502946 - DNA, 481 bp, Homo sapiens
gacattcagacactgaatctcctctttgagctagcctcttctgctagaatttatgcagaacgtttaactcaagcccaggcagtcatacaggtgtcagtggcagagcaaggctcagaggccgcaccccagggctcttccattaaaccacactcattgcatcccacattgcctttagcaaatctatggtgaaatctttcttcctctttttggcttgttataaaaagcataaggcataacaggaaatatgagtgggaacattcaacactataagtaccttcctagtactgacagttccagataggtaaggcttatatgaagaagaaaaaaaaaacctaggtatgcgatgttactgtaataaaaaaccaaaaggggtctgggtaaaatatcaaataaaggctcacrcaaaaattcagtgggcagctgtctgaagatttccttcttttagtatcctccagggaacaaatgcctcaaaagttaggaa

SEQ ID NO: 502947 - DNA, 576 bp, Homo sapiens
aaaaaatcattcaagcttcctaccattatggctttttctytaccctcactggccactcaatcctgaatgaagggctgttactgttcctttctgcggaagaccttactatcaggtgttttcatgccctacctccttaatattttcaagtcacatgcttgataagtacacgaagtgctgttttagaattatgttttacagatactgacatctagcaaatcatttctttctaacagtagctccaaacacatttattacacagacagtaagtccctgtactagatcaggcataataaagagatcacagttccgttaagatgacatgcaaacaatttcagcaacatgaaaagatccatatagagaaatgtatgttgtttcaggagcagaacaaatagcaacctctgcctgagaagatgcacagatggactcttctctaaaaaataatgtacccaattccttccttctagcttaaaacactttctttgtggccatcatttttctggttagccttcattgatcaacaacgtacccaccccgaacacaaactcccagtgagcataccttgtggctttggacttg

SEQ ID NO: 502948 - DNA, 495 bp, Homo sapiens
gtgtttgggtcatgaagaccccaataatctatgaattaatccaggaatggattaatgctgattataaaagggcttgaggccatgaggtggatttcttgctctctctctctctctcaccatgtgatgcctgccttctgcatgttatgatgcagtaagaaggccctcaccagatgccagccccgcaatcttggacttcccagcctccagaactgcagaaaataaacccctgttctttataaattagccagtctcaggtgttctgtgatagcaacatgaaatgscttacattaaacagcatcctacattaacataaaaaacaatgaaaaagtatggtatggaggcatgaaaatatgcaaacacatgaagatcatttaaaagcagatagcagattctaaatacagtttggttttccagacaaatgtattatctcaagtgtaggaaacagaaaactagccctcattacctttctagagagaaaagaaaataaaaatggtg

SEQ ID NO: 502949 - DNA, 495 bp, Homo sapiens
gtgtttgggtcatgaagaccccaataatctatgaattaatccaggaatggattaatgctgattataaaagggcttgaggccatgaggtggatttcttgctctctctctctctctcaccatgtgatgcctgccttctgcatgttatgatgcagtaagaaggccctcaccagatgccagccccgcaatcttggacttcccagcctccagaactgcagaaaataaacccctgttctttataaattagccagtctcaggtgttctgtgatagcaacatgaaatggcttacattaaacagcatcctacattaacataaaaaacaatgaaaaagtatggtatggaggcatgaaaatatgcaaacacatgaagatcatttaaaagcagatagcagattctaaatacastttggttttccagacaaatgtattatctcaagtgtaggaaacagaaaactagccctcattacctttctagagagaaaagaaaataaaaatggtg

SEQ ID NO: 502950 - DNA, 436 bp, Homo sapiens
tggccctgaattaggcaaataggctttccccactcccttaaaatgaaaacaaaatggtagtttaaagaaagtaccaaagggactatatctaataataacaatgagattgaaaatgagggcacatggtgtgtttagggacggctgaggccagtgaatgtcaaggcagactgcatctttgacagcctcgcctcactggctcctgaaatcctcacacacaaaacagcattcttcttgtgttcttaaagtgaaaggcactgtttccctgtcacactagcaatgttgcgaagtaaatgtcatcctttcctcctccttggccctgccttctacagctagtgcccctgccagttgtttcctcagcacgtctccagcgttcctcttctcttccccctcggcayggccttacttctggtctcatcatcctatgcctgggctgatg

SEQ ID NO: 502951 - DNA, 258 bp, Homo sapiens
ccaggaacaatactttgcatccttcaatccaatcaagttgacactcaatatgaactatcacattcactgagttctagaactcagcaaaacarataaacacatgttagaactactaagctctaccactgggaaaaacaagccagggatctagagttcaatatttgtttgcactctgagtccacatactgtatgcaaaagtttgagttagttcttttttctcttcagtgtggttatgtttttcatttggtaccatttgat

SEQ ID NO: 502952 - DNA, 497 bp, Homo sapiens
aaggattctgtaaaataaacattgcccttggctcacaaagggacccaaatgtgatttgggtccacattacatcagagtggcataattcaaggcttctcaaactctaatgyacacatgaatcacctggggatcttgttaaactgcagactgacatagtggcctgcgatgcagttctaacaagctcccgaggggtgctgctgctcctcaaaccatcactggagtaccaagcttatagtgggaaggacttagtgtccgagaccattgactagaaatccctggctctaccacttatgtttgagccttgaagacttgtgagacttacatgagacaatcatatattgtctggcccatatgagatattcagttcataattgttaatagagatcatttttgttaattcaaaaatttgcagccctgactgcacatgtgaatcacctgcagagtagttagagccattccctggtccccatccccatccccctcaaaaattctattta

SEQ ID NO: 502953 - DNA, 603 bp, Homo sapiens
aagcaagtttaataggaaagtaaaggaataagagaagggctgccccataggctgagcagcggcctgggctactccgacgagaacacttwttgttgtttcttgatatgtactaaacatggtgtggattattccggacttttccgggaaaggggcaggcaattcccggaagtgagggttcttcccccttttagaccatctagggtaacttcccggcattaccatggcaactgtaaatggtcctggtgctggtgggcgtgtctcatgctaatgtattataatcagcacataatgagcagtgaggactggctgtcttggttttggtggtttggggccagcttcttcacggcatcctgttttatcagcggggtctttgtgatctgtatcttgtgctgatctcatcctgtgactaagaatgcctgacctccagggaatgcggcccagccggtctcggactcattttacccagcccctgttcaagatggagtcgctctggttcgaacgtctctgcagaatcactccaggttctttggattcatggcaaaggggctgcggcctctgcccctccgtgccccactgtgtgtgggtcctacaagcattgcagag

SEQ ID NO: 502954 - DNA, 603 bp, Homo sapiens
aagcaagtttaataggaaagtaaaggaataagagaagggctgccccataggctgagcagcggcctgggctactccgacgagaacactttttgttgtttcttgatatgtactaaacatggtgtggattattccggacttttccgggaaaggggcaggcaattcccggaagtgagggttcttcccccttttagaccatctagggtaacttcccggcattrccatggcaactgtaaatggtcctggtgctggtgggcgtgtctcatgctaatgtattataatcagcacataatgagcagtgaggactggctgtcttggttttggtggtttggggccagcttcttcacggcatcctgttttatcagcggggtctttgtgatctgtatcttgtgctgatctcatcctgtgactaagaatgcctgacctccagggaatgcggcccagccggtctcggactcattttacccagcccctgttcaagatggagtcgctctggttcgaacgtctctgcagaatcactccaggttctttggattcatggcaaaggggctgcggcctctgcccctccgtgccccactgtgtgtgggtcctacaagcattgcagag

SEQ ID NO: 502955 - DNA, 603 bp, Homo sapiens
aagcaagtttaataggaaagtaaaggaataagagaagggctgccccataggctgagcagcggcctgggctactccgacgagaacactttttgttgtttcttgatatgtactaaacatggtgtggattattccggacttttccgggaaaggggcaggcaattcccggaagtgagggttcttcccccttttagaccatctagggtaacttcccggcattaccatggcaactgtaaatggtcctggtgctggtgggcgtgtctcatgctaatgtattataatcagcacataatgagcagtgaggactggctgtcttggttttggtggtttggggccrgcttcttcacggcatcctgttttatcagcggggtctttgtgatctgtatcttgtgctgatctcatcctgtgactaagaatgcctgacctccagggaatgcggcccagccggtctcggactcattttacccagcccctgttcaagatggagtcgctctggttcgaacgtctctgcagaatcactccaggttctttggattcatggcaaaggggctgcggcctctgcccctccgtgccccactgtgtgtgggtcctacaagcattgcagag

SEQ ID NO: 502956 - DNA, 603 bp, Homo sapiens
aagcaagtttaataggaaagtaaaggaataagagaagggctgccccataggctgagcagcggcctgggctactccgacgagaacactttttgttgtttcttgatatgtactaaacatggtgtggattattccggacttttccgggaaaggggcaggcaattcccggaagtgagggttcttcccccttttagaccatctagggtaacttcccggcattaccatggcaactgtaaatggtcctggtgctggtgggcgtgtctcatgctaatgtattataatcagcacataatgagcagtgaggactggctgtcttggttttggtggtttggggccagcttcttcacggcatcctgttttatcagcggggtctttgtgatctgtatcttgtgctgatctcatcctgtgactaagaatgcctgacctccagggaatgcggcccagccggtctcggmctcattttacccagcccctgttcaagatggagtcgctctggttcgaacgtctctgcagaatcactccaggttctttggattcatggcaaaggggctgcggcctctgcccctccgtgccccactgtgtgtgggtcctacaagcattgcagag

SEQ ID NO: 502957 - DNA, 595 bp, Homo sapiens
gttattaggtgtactgcttccttagaacatatattaaaaatgcaccagataagccaatgctccaggggaaacctgaccttcagaatccttctcaattttatatttgaattaatgttgattgcagattcatcaaaatgggaaaaatcttctttaatctttttttttttaaacatgatgaactgacttgtttaaactttgagaagacatagactgggttatgtggggtctacgtggaaacacaaagatgattttatttatagccagaagagaaattagtcayaatcgagttcacttcttagagatttgggggtttaggttctgaaagggggggggaaagctagttaatttgtaaacaacgaggccaggatccaaacattgataaggaaagttgcgttttccaacaatgacaggaacggtatctcccatcccatatactcttctgcaacatggccctgccactccacaccaagaagtagagcctaattcctttctccttaaacatgggctgactttggtgactcatttgtaacaatacacagtggaaatgatgctatgtgtcttctaaggccaggttggaagaacatgtgttaacttc

SEQ ID NO: 502958 - DNA, 576 bp, Homo sapiens
tgcttgggtttccatctaggttttgctgtttattagctgaatcacctgagttagttttatttattttcttttaagtaaaccttttctggggctctgcttctgatctgcaaaataaggataaaataccttcctaacaggtttattgtgagaattaaatgagctaaaacgtgtacagttctggtacatagtaatcattcaaaggtgttagctaggatgataacgtgatactatcatatgtgcttattctctgtcaactaaaatattttttagttccctgaaaacttgattctccattcttctcatcaatagaatattctacattaagaacaaaaaaaatggctgtaagatccagaatggattagaattgagtgatttattttttcaaacagggtttatgctcttttctcagttaccatgttcattatggaagaatgagaatgtagctaggaatggatctgaccttaaccgtcactgcctctacctggtctaaatcgtgaaaygagcatcacatctcaggctttcttgctgctgcacagactttttccccatgagtagatttgtgttccatgaatttca

SEQ ID NO: 502959 - DNA, 454 bp, Homo sapiens
agaacactttttcccttgttgctgtataactgaggccattttgtggcatatgttttttccccaaacatgttcttcactttcgcatgcctttttgcaatataactatgtctcttttcccaccaagagatggagtccctttgaaacatggctggtcttttgcattgtttggatcaatagaatgtgctgggttcatgttgtgccagttctgggccgaggcctcaagagtcttggaagctcctgaattctttttctactttgaaccacatgtaaggaatttaagctatttatgtgaagagaggctacctgtagagagaagttcaggaggatgatagtcastgtaaaaacaaagatttcagggaggagagatgggttttctcaaatgactggcagcgtacagaccccagtcatgtagacgaatctatttttgaccttccaattgaacccaggtgtcagc

SEQ ID NO: 502960 - DNA, 479 bp, Homo sapiens
ggctgggggggaaaaattaccttttttggaactgaaatagaaactgtttggatggttaaatgaaaccactcactagagtttataggcctagtttatacttgacatgtggaaatgagtcttcaggaagaaagaaaattcctgaagatggatactgattatctctgtttctgaagatacactcaccaaagaaaggcccctcaggatcatgcactggtgtattcaaaatacacactgcatcgccctcaagtaaaaaggacaaggatagactaagtcttatcaaattatgcccagcaaaatgaagaacttggaaaatgaggttccggtaaaagaaaatctcccctcaaatactgtacaatctttcaaaaatatgaaccactcactaagtgtgcttctcatgttacataaaactttggaaaaccacatcaaatcctgttacctcttaaytatacacactaatgaagggataaaaacatggagaa

SEQ ID NO: 502961 - DNA, 567 bp, Homo sapiens
tgttagtctagttgatattcttctctctagaaacataaggagatgaggagtgggaacacatggcaaccttcactaactccaggttgttttgtattgtatatggtaactgcagtmgaacagtaggaatctgattaccatcataatgagactataacactgctaaattaagtttagcctaaagccacttccttacatattttaagtttgaagaggtttctccatacatagtgaactgtaacccaatgtgcaaacagaagtgcaagcaacctactcttgtaacaagagctaatcacagcagacaagtttagaccaatcacaggcagtagactgttcaagccgtgttcaaataaggtaaactccaagctgtagccagtctggctgtttctgcaccttacttctgttttctgtatgtcattttcctttttctgaccataaatgtgatccaaccacgagatagcccccaggtcgctctggccctattctggttctgggtgttgctctatttacaaattgttttttgctcaattaaactttgtctaaagttttccttttaccaacacagaaata

SEQ ID NO: 502962 - DNA, 567 bp, Homo sapiens
tgttagtctagttgatattcttctctctagaaacataaggagatgaggagtgggaacacatggcaaccttcactaactccaggttgttttgtattgtatatggtaactgcagtagaacagtaggaatctgattaccatcataatragactataacactgctaaattaagtttagcctaaagccacttccttacatattttaagtttgaagaggtttctccatacatagtgaactgtaacccaatgtgcaaacagaagtgcaagcaacctactcttgtaacaagagctaatcacagcagacaagtttagaccaatcacaggcagtagactgttcaagccgtgttcaaataaggtaaactccaagctgtagccagtctggctgtttctgcaccttacttctgttttctgtatgtcattttcctttttctgaccataaatgtgatccaaccacgagatagcccccaggtcgctctggccctattctggttctgggtgttgctctatttacaaattgttttttgctcaattaaactttgtctaaagttttccttttaccaacacagaaata

SEQ ID NO: 502963 - DNA, 627 bp, Homo sapiens
agaaacagcacagggagctccttccctcacgctgctaaaaatactgctgggaaagtaatttctctggtcctattttagaaatcagagacagatccaccatattcatgtttggatcctggtcagccttctggtttgagttttaaatttcaagatattttttttttggtggggggtagggcagttaaaacagtctgcagagtttgagaagcaaaatttgaaaacactgttaaggaagatatgttttgggcattatgtaattactagcaattattattattattttgagacagagtcttgctctgttgtccaggctggagtgcaatgatgccatcacacaactcactgtagcctcaacctcccaggctcaagtgatcctcccaccttggcctccccagtagttgggactacaggtacatacyaccttgcccagttaacttttttattttttgtagtgatggtgtctcactatgttgcctaggctggtctcaagctcctgggttcaagtgatcttccttcctcagtttcccaaagtgccaggattacaggtgtgaaccaccaggcctggccgcaatttttgaaaaggctttattaaagacaatcaaaatgtcatgtgacaaaatccttcca

SEQ ID NO: 502964 - DNA, 585 bp, Homo sapiens
ttagcttggcctaggctcaggagtgagtgaggatagccagcctgtgaggctagaagcaggatggagtcagccatgctagacttcttttgctatcataatccttgcaaaagcagtttcaatggcttctttcatgagtgtggtctctgtaaagttcagtttcatctcagccccttctaatggcgagggtccagctatgcytctctttggtttgttgacagtggttcacgttcctaagcatctttctggatgggtcatctccatttgtgtccttttgtgcatcttgttggcttctgctccttttctacgctgtgctccttcctgtggagccacaggaactgctgaagttccctcccacacctttgaaggctacaaggatttgggatgaggtgaagggccgccctcgtattctttccgggcttatgaacttcactgttataacgtctccaaccctcccagcttcagaaatctctagataaaaagcaggctttgtgctctatgttgggtgtgcctgcaaatgctagagatcttataggaagtgctcccccaaatttatcatgctttgctttgctctgatggaagcatgag

SEQ ID NO: 502965 - DNA, 585 bp, Homo sapiens
ttagcttggcctaggctcaggagtgagtgaggatagccagcctgtgaggctagaagcaggatggagtcagccatgctagacttcttttgctatcataatccttgcaaaagcagtttcaatggcttctttcatgagtgtggtctctgtaaagttcagtttcatctcagccccttctaatggcgagggtccagctatgcctctctttggtttgttgacagtggttcacgttcctaagcatctttctggatgggtcatctccatttgtgtccttttgygcatcttgttggcttctgctccttttctacgctgtgctccttcctgtggagccacaggaactgctgaagttccctcccacacctttgaaggctacaaggatttgggatgaggtgaagggccgccctcgtattctttccgggcttatgaacttcactgttataacgtctccaaccctcccagcttcagaaatctctagataaaaagcaggctttgtgctctatgttgggtgtgcctgcaaatgctagagatcttataggaagtgctcccccaaatttatcatgctttgctttgctctgatggaagcatgag

SEQ ID NO: 502966 - DNA, 585 bp, Homo sapiens
atcttgtggtatttcatagttaaatataagagaatgatgaatgcttgactgggaattgtaatatgagttaagtaaggattattaaaacagaagaggcatattaagaaaatatgggataatagcatcaacattctgaatttactcagcaaaacccagaaagtatacatgtgtgagagagaaggggtgggttgtggggtcagattccacaagggagcaggaaaatgaagaagttaaaacatttaaagccttcatcactgtgcagagtacatggccaagtaaaacaatgaggcaaggggaagaattaggaagagttattgaatttttatgtagcaatagagaagtatttgactgtaaagatggctatcatctgcaacaattaagaggcctattgtttgatcatttattcaacaaatagttattgagcatccaggatatgccaggyatttttctaagtgctggagataaatcagtaaataagaaagtaaataaaacagagaaggcttatactctcattctcaagagggaagacaagcaacacataggtaatcaaacaaataacaacataatttcagtggtgatacctcc

SEQ ID NO: 502967 - DNA, 522 bp, Homo sapiens
accacaagagccctgacctctttgaccacttgtgagcacccaatgatctacttcaagcgttcccaagaccatatagagccctgagtagttattcatctcatacccttgatttcaagcaagactgtattccctcaaatccaggatggcagctcatttggattttcatgaaagtcactggagggttctctacagcagtgtcacagaaccatacaataaataatcatgaataaataaaagcaacctcatttctctaaattagtatatggttcatgattccaaacctttaccattttgtgtatacatgtgtatgtgtgtgggtgtgtgtgagtggggtgtatatgtacccttatattttgctaaggaccctactccatatctaagagggaaaggaggtgctattaatatttatactcaggcagtgggtataaaccagaacyaagcagggcaagtcaggtcatatgatacgattcatggggtctttgattctttttcagacaaaataaagctcccaaaacgtagcac

SEQ ID NO: 502968 - DNA, 630 bp, Homo sapiens
tgggtgtccataagcaagtcacttaacccctaagttttcctcatatgccatacaacattcatgttaatttctggagggaagaatgctccggaacacagtgaacagtgtgtaaatcctacccccaaatacccttttccccaaggattgccacccagccccagggcacagctcaataaagtttccataaaactcagcttctctgagtccagcttcagaaattacagagagttgattcatcacattgtttgaattatgtcaatatgaaaatacagaaaacccacagggagtcagccttttcccatatataaaacagggttacaatccygtataaacttttaaaagataatagtttgtatcatatgcatatgattgaaaaaataaaaggaaagaacaagaaaagaaaaaagtacacattggcaaacaatgtaattcaggccgacaccctggcttgggactcccccttgcccttctcctgctcttcattcctcatctccgtaacatcccccatcagtgccctggcagcagtaggctggggcttttctgtggcttcagagtcctgctgcctcctcaggatccctgaattcatccactcttccccatctccaccgtcacagcccacacctgggcacc

SEQ ID NO: 502969 - DNA, 412 bp, Homo sapiens
attaacatgagatttctttcccaccaatttccctcccaacttcacaatactgactttatacacaaaagttttacttggagtgaaggccaggtgtgggaaatttaaagacaaaaagccatttaaaaatatctgcagagtggaagaaagagcacaagaccaggagtcaaaagatttgagttttactcctacctgagtcacaacatcactgtgagaccttgaatagttcacttcacggctctgggcctcagtcctcttacrtgccatagagaatcatatgtgccatgcctatttctaaggattatttgaagatgaaatgaatctatttggaagtgtcttcgaacaactgagagctgaaagcatagatgtgtgtctgtggaggtgtaggactccaaggattaagtattgcattgcc

SEQ ID NO: 502970 - DNA, 410 bp, Homo sapiens
tattttttttttttattttttgagatggagtcttgctctgtcacccaggccggagtgcagtggcgcgatctcggcccactgtaacctccgcctcctgggttcaagcgattctcccacctcagcctcctgagtagctgggattacaagcgcccgccaccatgcccggctaattttttatttttagtagaggcggggtttcaccatgttggccaggctggtttcgaactcctgacctcaggtgatccgcccacctcagccttccaaagtgctgggattataggtatgagccactgcgcccggccytcgagtgccaccacttctttgaccttggaaaggtcacttaaccttgtagatcgtcattctctttattcctgattggactaatggtaattgcacacctaccttcacag

SEQ ID NO: 502971 - DNA, 570 bp, Homo sapiens
gcttccgggtggcggccctggacgctcacacctgttgggctggaagactgaggagaccagggccccaaaatacaagataaacttgaaacagacaagaacatttcccaggccctatcactagcccccaactctgctccttctgtccccaggcctccatcttcaaggtctaaggagccatgtgctggttgcccagggtaggtgggcaggcaagtgataatggactgctgcctctgtgacctgctagaaatatgggatctccttgttcacatgcagcaatagacagatcttttcctgcatgtaacctggagctaggtgggcagaggtcctaacctggagcctggttcacctattcacacacagagacatggctgccatagcaacggggagggcagaggggagctggcagcttgacacttccagtaggctttgggctgaaatacaagtcactaaccttttccttcactgtaaggctgagaacctgactgaacttggcactggcccatctgattctggatataccaygcacaaagcttaagtccgaaagaatctccccactccaacaaaagcccc

SEQ ID NO: 502972 - DNA, 549 bp, Homo sapiens
tatacaggtttttttcaagaatgttttctgcaagactatttatagcagtgaagagttggaaatgattcagcttcaaacagcagaggactgattagataaatcatgaagaataacaggtatcaatacaaagatcataagctcaaagcgtctcaggtgtccttagcatgtgaaaaacaggatgcaggcacatgtgtcataaatacatacatatctcatgataataactttgtaaaacactaaaaaaaggctacacaccaaaatgttaattatggttatgggtgatttttccctcttagtttatttttattttctcagttgtctttagtcaacatgtatttatttttaataagtgaatagaaaaggaatatatgttaaatatcataaacagttgagaatttctgycctgtctaaaatacctcggcataacattctcagacccatcatctctatcaaggactctaagcagagctggggtctaggtgtggagcattaaactcctccatgacaaccacagtatggtgggggcatgatccttcaccacctcatcct

SEQ ID NO: 502973 - DNA, 549 bp, Homo sapiens
tatacaggtttttttcaagaatgttttctgcaagactatttatagcagtgaagagttggaaatgattcagcttcaaacagcagaggactgattagataaatcatgaagaataacaggtatcaatacaaagatcataagctcaaagcgtctcaggtgtccttagcatgtgaaaaacaggatgcaggcacatgtgtcataaatacatacatatctcatgataataactttgtaaaacactaaaaaaaggctacacaccaaaatgttaattatggttatgggtgatttttccctcttagtttatttttattttctcagttgtctttagtcaacatgtatttatttttaataagtgaatagaaaaggaatatatgttaaatatcataaacagttgagaatttctgtyctgtctaaaatacctcggcataacattctcagacccatcatctctatcaaggactctaagcagagctggggtctaggtgtggagcattaaactcctccatgacaaccacagtatggtgggggcatgatccttcaccacctcatcct

SEQ ID NO: 502974 - DNA, 654 bp, Homo sapiens
catatatttgtaaaatgccatatgacaaackaaaagctgtctatgcaagaccaaggctgcattttctgtttttactgagcatcagcagcgtggagtaaagattggtgtttgacaacaggacctgctgattgttgagatgaaatactgacaaagactttctctgtctacctttgccttggcttgaaataattacagaatggccctttttccacccctaatgagagcccattcatatagtgtgacccctatctgtacacattgcaaatcagccaaacatgacacacaaaccttaatgaattatcatcgcttcccaccagaactttaaacaagtcaggactgagttaacatgtcggaaaggaaaccagcaggtctcagtgatgattctttcagttttaaaattgtctgattatcagatgatggtcacttataaattggttcatgagaaacaaaaagtagaaataaaaatatcaggtgctacgtttaacatgcagtatttatactggtttgcaacagctatcaacctcgacacctatttcaaatgagattgctaaaataatgtattcatacaaatactgcaatttgaaatagtaggttttttaaataaattataatggctatattaataattttagtaagaatttcaagtagcaaatg

SEQ ID NO: 502975 - DNA, 493 bp, Homo sapiens
tgcagaagctgcaggttgtatagctgcatccttagagatgtgcaaaatgtgagtgagtktcttagccagtttctggactgtttagatttttgtagcattatcatgggccatttaacccttatcaataatcttaggaccactccagtttttttttaagtcttagttgagtttttatacgtttgaggaattatagcccagtagccaatgagtcaacacagactgtttctggttgttgatgctgctctgattcctggacccaaatctgttcatgtgccggcagcctcattcttgagtgcttgggtccctgaatgatgacctttcggaacccaattcctgaagtatatccggtgccctctctggttctctgagtccacctcccctggaccgtccgggagttacccttcagtggtgggtgctctgctgctattggttgaattcccctgttggcaaagggatgcatttctgcacagatctcccatgtacctgcatttat

SEQ ID NO: 502976 - DNA, 680 bp, Homo sapiens
ctgttgcatggacctgtgtcttagtggaactgggaaatcctaatctccatcatccctcttccatagagagtccatagagttgctagctctgttggtgttttaaccatattcattttctcatgggctccttactgtctagaacagaaagtctrgaagcctggaaactgcatttcccagaatccattactagcagggttcctgatcttgctaaggaactaaaaccaagaagagagatttaagggctcagacaatgcagtgagaaaagaccgaactgaaccctccagtttactagtcatgcaactattcaatgcttagaatattatccaattttcttcaattattttatctgtaaaataaggtaaacaatagaacctatcttatatatttacaaagagcttctttgaatttttttgttgttgttgttgaaatggagtctcgttctgttacccaggctgcagttcagggccatgatcgctgctcactgcaacctccacctccagggttcaggtgatcctcttgcctcagcctcctgagtagctgggattacaggcacctgccatcacacctggctaatttttgtatttttagtggagatgtggtttcaccattttggacaggctggtctcaaactcctgacctcaaatgatccacccgcttcagcttcccaaggtgctgagatt

SEQ ID NO: 502977 - DNA, 680 bp, Homo sapiens
ctgttgcatggacctgtgtcttagtggaactgggaaatcctaatctccatcatccctcttccatagagagtccatagagttgctagctctgttggtgttttaaccatattcattttctcatgggctccttactgtctagaacagaaagtctggaagcctggaaactgcatttcccagaatccattactagcagggttcctgatcttgctaaggaactaaaaccaagaagagagatttaagggctcagacaatgcagtgagaaaagaccgaactgaaccctccagtttactagtcatgcaactattcaatgcttagaatattatccaattttcttcaattattttatctgtaaaataaggtaaacaatagaacctatcttatatatttacaaagagcttctttgaatttttttgttgttgttgttgaaatggagtctcgttctgttacccaggctgcagttcagggccatgatcgctgctcactgcaacctccacctccagggttcaggtgatcctcttgcctcagcctcctgagtagctgggattacaggcacmtgccatcacacctggctaatttttgtatttttagtggagatgtggtttcaccattttggacaggctggtctcaaactcctgacctcaaatgatccacccgcttcagcttcccaaggtgctgagatt

SEQ ID NO: 502978 - DNA, 680 bp, Homo sapiens
ctgttgcatggacctgtgtcttagtggaactgggaaatcctaatctccatcatccctcttccatagagagtccatagagttgctagctctgttggtgttttaaccatattcattttctcatgggctccttactgtctagaacagaaagtctggaagcctggaaactgcatttcccagaatccattactagcagggttcctgatcttgctaaggaactaaaaccaagaagagagatttaagggctcagacaatgcagtgagaaaagaccgaactgaaccctccagtttactagtcatgcaactattcaatgcttagaatattatccaattttcttcaattattttatctgtaaaataaggtaaacaatagaacctatcttatatatttacaaagagcttctttgaatttttttgttgttgttgttgaaatggagtctcgttctgttacccaggctgcagttcagggccatgatcgctgctcactgcaacctccacctccagggttcaggtgatcctcttgcctcagcctcctgagtagctgggattacaggcacctgccatcacacctggctaatttttgtatttttagtggakatgtggtttcaccattttggacaggctggtctcaaactcctgacctcaaatgatccacccgcttcagcttcccaaggtgctgagatt

SEQ ID NO: 502979 - DNA, 704 bp, Homo sapiens
agtgtttccatttgatttagttctagaaagtccttaggttctctgcctccaggccctattctcctgcctcaatcatagatcactgcagccttgaggtcctgggctcaagctcaggtcccacctcagcttcctgagtagctgggaccacaggcccgcaccaccatgcccagctattttaatttttttttttttgagatggaatcttgctctgtcgcccaggttggagtgcagtgttgcgatctcggctcactgcaacctccgcctcctggattcaagcaattctcttgcctcagcctcccgaatagctgggactacaggcrcccaccaccacgcccagctaattttcgtatttttagtagagacggggtttcaccatattggccaggctggtctcgaactcctaaccttatgatccgcacgcctcagcctcctaaagtcctattttttttttttaagaggccaggtgtggtggctcacacctgtaatcccagcactttgggaggccaaggcgggtggatcctctgaggtcaggacttctgccattttcccattcatttattcaagttttaattgagtacttacttgtgctaggcactgttgtggcagcggacaaactgttcaacaagacagagctcttgttctctgaactttaatggactggtaatgtctcccttcacttctctccatgtgatatgaagtgtccc

SEQ ID NO: 502980 - DNA, 641 bp, Homo sapiens
gtgaaaggctatcctctgagaaatattgttcaaaaccttccaaggttagagaacagaagactccagaagcctttggacagtcttttcctccctgtgattcttttcctcttgggcttctgggatttcaaactcggtacatctggtctcttggagacacatcctccctggaagctccagcagaagatggccaaagaccccttttgccttttctgcttctccaaagcacaaatgagagactgataattcagaaataattctaatacctacaaaatgagaacaaaacaggaaatacttaaaagcagtcaggttttcaaagcacagctttctgatactcacccagtcctctatcttaaaacactaccccttggttctagagggtgtgatggctatgcaggtctgtttctcatttgtcagcattttgctatctcctggacaagsagctttcagtatttatcttgtctgtagtcctagaaatgggtctaatgattcattctacttccatacgtaacctccctgaattttagttttgtcatctgtataaaaagggaataaaaacatctaactcataaagacaaatggggaaactcatgtatgcatatcacacacagtaagcactcctattagttgtccaagtccaacag

SEQ ID NO: 502981 - DNA, 440 bp, Homo sapiens
  misc_feature (1)...(440): n = A,T,C or G
aacggctacggcagtggagaagtaagaagagaaacaacgttccggcgttntcgccttcgcttaggaggaggaagagctggtagggaaaggaaagtsgttcgccctgggcctggactggaccgagtcgggttggtgggggtctgggctatgagcttttgagggtcgcctgggacgcggagcgagacacgagagccaggagctatgtctcagccgccgccgccgccgcctccgttgccgccgccacctcctccccctgaggctccacagactccgtcgtccttggcgtcggcggctgcttcgggggggcttttgaagcggagagaccggagaatcctttccgggagctgcccggatccgaagtgtcaggcgcgtctatttttcccggcctccggttctgtcagcatcgagtgtaccgagtgcggccagcggcacgagcagca

SEQ ID NO: 502982 - DNA, 440 bp, Homo sapiens
  misc_feature (1)...(440): n = A,T,C or G
aacggctacggcagtggagaagtaagaagagaaacaacgttccggcgttntcgccttcgcttaggaggaggaagagctggtagggaaaggaaagtcsttcgccctgggcctggactggaccgagtcgggttggtgggggtctgggctatgagcttttgagggtcgcctgggacgcggagcgagacacgagagccaggagctatgtctcagccgccgccgccgccgcctccgttgccgccgccacctcctccccctgaggctccacagactccgtcgtccttggcgtcggcggctgcttcgggggggcttttgaagcggagagaccggagaatcctttccgggagctgcccggatccgaagtgtcaggcgcgtctatttttcccggcctccggttctgtcagcatcgagtgtaccgagtgcggccagcggcacgagcagca

SEQ ID NO: 502983 - DNA, 611 bp, Homo sapiens
gtctgcagtttctccagtgggggaatatggtttggctgtatccccacccaaatctcatcttgaattgcaactcccacaattcccatgtgttgtgggaggaacccagtaagaggtgattgaattattggggcaggtctttcctgcactgttcttgtgatagtgaatgagtctcatgtgatctgatgatttaaaaaatgggagtttccctgcacaagctctctttttgcctgccaccatccatttaagacataacttgctcccccttgtcttccaccatgattgtgaggcctcccaagccatgtggaactacaagtccattaaacctctttttcttcccagtctcgggtatgtctttatcagtgttgtgaaaacagactaacacagggggaaagactgacataaacctccaccttccccagtgwtttgggtctttgtcctagaggactgctttggtcttgcctcattccttatactggggcagagttgttggggggcgggggtgggacagctaggtccataaaaaggggtggggttttttagcagtcaatatgcatggaccttgatggtaactccagaccccaccaggaaccttgcccagccacagctctcac

SEQ ID NO: 502984 - DNA, 611 bp, Homo sapiens
gtctgcagtttctccagtgggggaatatggtttggctgtatccccacccaaatctcatcttgaattgcaactcccacaattcccatgtgttgtgggaggaacccagtaagaggtgattgaattattggggcaggtctttcctgcactgttcttgtgatagtgaatgagtctcatgtgatctgatgatttaaaaaatgggagtttccctgcacaagctctctttttgcctgccaccatccatttaagacataacttgctcccccttgtcttccaccatgattgtgaggcctcccaagccatgtggaactacaagtccattaaacctctttttcttcccagtctcgggtatgtctttatcagtgttgtgaaaacagactaacacagggggaaagactgacataaacctccaccttccccagtgatttgggtctttgtcctagaggactgctttggtcttgcctcattccttatactggggcagagttgktggggggcgggggtgggacagctaggtccataaaaaggggtggggttttttagcagtcaatatgcatggaccttgatggtaactccagaccccaccaggaaccttgcccagccacagctctcac

SEQ ID NO: 502985 - DNA, 611 bp, Homo sapiens
gtctgcagtttctccagtgggggaatatggtttggctgtatccccacccaaatctcatcttgaattgcaactcccacaattcccatgtgttgtgggaggaacccagtaagaggtgattgaattattggggcaggtctttcctgcactgttcttgtgatagtgaatgagtctcatgtgatctgatgatttaaaaaatgggagtttccctgcacaagctctctttttgcctgccaccatccatttaagacataacttgctcccccttgtcttccaccatgattgtgaggcctcccaagccatgtggaactacaagtccattaaacctctttttcttcccagtctcgggtatgtctttatcagtgttgtgaaaacagactaacacagggggaaagactgacataaacctccaccttccccagtgatttgggtctttgtcctagaggactgctttggtcttgcctcattccttatactggggcagagttgttggggggcrggggtgggacagctaggtccataaaaaggggtggggttttttagcagtcaatatgcatggaccttgatggtaactccagaccccaccaggaaccttgcccagccacagctctcac

SEQ ID NO: 502986 - DNA, 623 bp, Homo sapiens
ttaattggtcaaagccttacaaccttgcaaattatgatacttaagctttatttacaagatatgattttatacttcactggtgtggtatgctgacttatgagtctgtgtacgggtcaggagagaagaagtggcattgtggagcataaatagaaccacaaactttcacaaaaatatttcctaaagatatgtcatcaccatattttgaagacaacctaataagacacaaagaagaggctgcttctttggacaaaggaggttgagtggtgttttatggttcagtgtacagcagcacccaaaatatctccattcttattttcaatgcccacctatatgaccagttccctttcctttattggatcttacttattaaagctggagttttctgtgttaaaagaccaaaggctttattttgtctttcttttctattttacacttttcaagcaactagatagaaaatcttatgtccttagggcaaattgatattgktgcttacttctttattgttctcttatacaaaaagttatgtaataacattttggatatagttttcattttgtgtttagcaagcagcttaaaattggagagtcttgaactttcaagaaaatgacaaggtcttggataaa

SEQ ID NO: 502987 - DNA, 471 bp, Homo sapiens
ctggcttcacctcttatgggcacaggcctggtggtggagccctagccagggaccatgcctttttccccttccttatcatttaaagggaccacgccctttgcttctcagcacttcccttccatatcagtatcattgaatttaaatctattattttgctaattggtgarcctattttcctacttgctattttcctacttggtgaacctcccctttttttgttcctctttttatgctagtttctaaatttttttaaaaataacactactcatattcctttttatttatttatttatttttggagacggagtccactttgtcacccgggctggggtgcagtggcgtgatcttggctcactgaaagctttgcctcccagattcaagcaattctcctgcctcagtctccctagtagctgggaatacaggtgcccaccacaacgctcaattaatttttttgtatttttagtagatatg

SEQ ID NO: 502988 - DNA, 615 bp, Homo sapiens
aaatgaataatcattaaaccttctgctgaaaaaawtaactcaaagaccttggtccccatgatctgagaagaatctccttctgagagaaaaagacaagaatctcctctgtgtacacagaaatcagatttctaagtcctcagtgttaaggatcacatggtactaaacagaaaattcaccatgttaaatgctgcctgttaatgaacaaatatgtggccttccaccaggatttccctatgcagatgtttttccctgtgaaattaaaataaatgctgctgtagctcaagtttcccgaggagctggaaaccaggtagtaagattgcatgtggcttttggggaaagtgagttaggattgggtaaagaaagaagttaggcttcaatgaagtcgccacaaagacctgagccaatcctactgagaattccaaggccaattacctcttggagatgttacaaatcgaggcagagggaccatgccttttatttcaaccatgaccagccattggacataggctacctctgaggtaaggagcatgcttttttcttcacatttcccttagctaaaaccaattcctggaaagtgacactatcgtgagctgtcagcaggcaatactcccagca

SEQ ID NO: 502989 - DNA, 502 bp, Homo sapiens
aatgcttcacaattcattgattattgaaaataagcaggctttaaaattgtatgtacgcgacgttcccaaatttgttttagaagacacaggtatttgtctatatactttgttgaatgagcrtacagataaaataatcgttaactaagtcaatatattttggatatcttcttaagagctggcgtaatgttttcactacttgcaccttaatactacccaccatgtttgttttcattctcatccttctttttttttttattttttaatcgcaggaaattttcacattgcttttgagaagcttgactcctctcattagattgctagggccaggtgtggattttctattgtagacacacttctgaccctaaaaatcattgttccattaaaattatttcctacacatttttccaagttttgcctgccgctgtcctcattataatgacaaacagctctcagctttcgacaacattaatccacagatgtttctgctgcccttagtcctggc

SEQ ID NO: 502990 - DNA, 587 bp, Homo sapiens
tgctggtggctgccagcattcctttgcttgtagccacatcactgccatctctgccttggtcttcacgttgtcttcttttctgtgtgtctgtccaccctcccttggtcttcctcttacgaagcatatgacatgcatgcttttaatacatgtgataacatttagagcccagcaagataatcccagataatatcctcatcacaaaatccttaatttgatcatatttgcaaagactttaccatataaggtaacattcacaggctcctgggattaggagaacctgatttcttagaggtccaccattcagcccactgtactagcatgtggctccaagtgagtgtcaacctcactgtgcctcagtttccttatctgtaaaatgacagcagccacctcactgggtaattatgaagatttaataagtacttagaatggtgaccagcacatgataaaagctttgtaaatgttaaccttcaataatatcaagggtcggtcgggcgcggtggctcacamctgtaattctagcactttgggaggcagaggcgggaagatcgcttgagcccaggaatttgagaccagcctgggcaacatga

SEQ ID NO: 502991 - DNA, 261 bp, Homo sapiens
tagatccccttggtcactgttttgggttccagtgttcatcactgtggggataaatcttcyctgaactggaggttctttatgagggaggtagccagagccctttccctatcactaagaaaaatgcagaaactcgcttcttctcccagaaatgaggcattctcgctctagcagggaggaattttggtctcccaggaagatttcttagctgcctctccaaagcctgtcccatactagccccatcacaatggggttctctgtttc

SEQ ID NO: 502992 - DNA, 560 bp, Homo sapiens
ctgcccccaggccaaggttcagaggaggcatcatgtctcatcaacatccacttcatcatgctggccttgcttcagccttaactatcttgcaaaacagtttcctagatgctcttcctaacctccagagggtattcctcctggagacagatcactgaagatcgccattggactgtgtgaactctgcaggggcggacacagggtcttatcagccttggtatcttagatgaargagaatgcgctgtgaagtcagtggacctgggttcaaatcccagtcctgccacttactagcagtagactttgagcaagtcacttcacctctctgagcctcagtgtcctcatctgtaaaataaggataaaaatgcccacctctttaggctaatgcacagatatgaaagtgagcctatcagacacctggcctataatagctgccttcaaatggtggttggcaccgttctgcacaccctacatccagggcaatgaccagggtacaatgggtcctcagatgtctgctgaatgaatgcagagcaaacatgttcatctgttctcttattgatatgatg

SEQ ID NO: 502993 - DNA, 563 bp, Homo sapiens
ggtaaatggtgatgccatttagtttgatggtaaagtcttgcggggaatggattcaggaaggagttcaaattttgttttggacgtgtttgcttccaggtctgcagtacatccaggtgtagttagtagttgaaaaaatgagtttaaagttcaggggagagtttgaatctgaaaatacgatttgggagacatcagtggagagaagtaaaggaagctaaagactgagccccaggaaggttaatattttaaggaatatcctccacttccttcctttttgggactctctgtggctctgcctctgctggcattagcttgactgcacacttgtgtcccytggatacagtgaaaccctcaacaccacacaaatcatcaatccatagacctgaacaaagagaaaaggataacattggtgctttgtctgaatcattgatttcttgtcttctcaatttttgtcctgtaacctgccttttgaacatctttattattattattattattactattattttactattatttagtggaaagaggtcaacaattatcttcgtaggtacccagggagggac

SEQ ID NO: 502994 - DNA, 578 bp, Homo sapiens
tgggtaaatggtgatgccatttagtttgatggtaaagtcttgcggggaatggattcaggaaggagttcaaattttgttttggacgtgtttgcttccaggtctgcagtacatccaggtgtagttagtagttgaaaaaatgagtttaaagttcaggggagagtttgaatctgaaaatacgatttgggagacatcagtggagagaagtaaaggaagctaaagactgagccccaggaaggttaatattttaaggaatatcctccacttccttcctttttgggactctctgtggctctgcctctgctggcattagcttgactgcacacttgtgtcccctggatacagtgaaaccctcaacaccacacaaatcatcaatccatagacctgaacaaagagaaaaggataacattggtgctttgtctgaatcattgatttcttgtcttctcaatttttgtcctgtaacctgccttttgaacatctttattattattattattattactattattttmctattatttagtggaaagaggtcaacaattatcttcgtaggtacccagggagggaccctgcatatattc

SEQ ID NO: 502995 - DNA, 650 bp, Homo sapiens
atagtttttaaacaaggttcctgtgatgagtgtcttctgatttcttctgctgtctccccgcgccacaggtcagagacctgtgccctgttgaacctagaggctcctacaatagytcctggtatttagctgaagtagggtgttcctctctgtctggggcagatggttgtatttctagtccagaacctgctataatttactctgtcctcccacactaatagcgattcttctatctgccagcttggcttctatagccttctgcaatctggacccgctccacccagttcatctctttcttctctacatgtagaacacaccctcatggccaacaggtgtcctgggctcaccccatttccgccacagaaatatcctccctgctctcctcatatgcaaatcattcttcaaggcactgctcaaggtctttctgcccccaaagcctgcccatgtacaggccaatggtttgctttccaaatctctttacatttatgttcccaatttacctaagttagccctcaacaggtttctgtatatatctccaagtgtagtgcaggctccttgagggcaggcacacaagtgttcattcattcactggaggcttttagcaacaccttataaagcgagaaagaaggagaaatataaactatggttgcttc

SEQ ID NO: 502996 - DNA, 290 bp, Homo sapiens
gccttgaacacatttgttgaatgaatgagttgactaggtaaacaaagatggagggacaatattctaggactcttggtggaggaaacagcctttacaaagccatggagttttgagagaacaatgggcagcaagggtggccagccatctggtgtggccgcaggatcagtgcctacatgcagagtggagctgagctgttgagatgggcagggccagctcccacagggtcttgagggccaacscaaagagcttggagtttatcctgacagattgaaagctgccaaaggattttg

SEQ ID NO: 502997 - DNA, 644 bp, Homo sapiens
ctgagatagttattgttatcccagttcaaacgtaaggacattgagacacaaagaatataaggtaccttgatgcaggagggcatattactccataggcagagtactctgctttgcttgtttctggatctgatagtgtttgtatcatgttattaaaaaaaatcttggaacagtatagaatcagttacatgtctaccttccaaatgagggattgccttgtttttagaaaaggccagtctaccgggcgcrgtggctcacacctgtaatccgagcactttgggaggctgaggcgggcagatcacgaggtcaggagatcgagaccatcctgaccaacatggtgaaaccccgtctctcctaaaatacaaaaaattagccgggcatggtggcacatgcctgtagtcccaggtactcaggaggctgaggcaggggaatcgcttgaacccgggaggcggaggttgcagcgatcgcgccactgcactccagcctggcgacagagcgagactgtctcaaaaaaaaaaaaaaaaaaagaaaaagaaatagccagtctaatcagacaagcaacattacttcattttttaaggtttaatataatttttttttaccagaacattttaacaaatacatttctctttaacagtgtcatctta

SEQ ID NO: 502998 - DNA, 377 bp, Homo sapiens
tgccccttggattagggggtggcagcagcaggaattagcgaaaaatacccaaggctcaaggtgcagggacatggggaatctcagaggcaatgccagggccttggcgctgtttcaccactgcatggaattatctcttcagggcccactttagaggacctgggcagtwttttactaaggaaagaggtagctgcctaatagctctttggtactttatttctagggtgaatttttatttttattttgttatgtttttgttcattatctggctggtttatttatttgtttcaaaattacctagggagagttgggcaacaaccctcaaccaacagaggcaccctctttgaagcaaatggtctgtgtataacctctagaggaaa

SEQ ID NO: 502999 - DNA, 593 bp, Homo sapiens
gccttggcctcccaaattgctaggactacaggtgtgagtcactgcacccagccgtattcattctaccaatatgttttggacacctcctgtgtgcctggtctttaccttggcaccggagagcccatgggaaccagacagagaatatccttgctctgggaaagtttagctaacaatttccctctataggaatttagaatgaacacaactgccatgtgatgccaccctcatgaaggttcaaggaagccagaaagtgatggtaggttggcctggagatgttacgagaaaaacccatgtcctcctgaaggcccaggawaggaacatctttggagaagaaagggtaggctgggtcaaatgttctaaaagcagacttcatagtttggctataaggacagtcatgctcccaatataagcctgccaagtagtctgagtcaagagaaagaaagtttgggcaaattcagaatcttttggactcagtgggctccatgtctaaaaccagattttggtcttgtaccttttagtatctaatcatggcaagggaatgcctagttgaaagagaaatgagcttttcgagtttgggattagacagcaaataa

SEQ ID NO: 503000 - DNA, 547 bp, Homo sapiens
gtggcatgttctttctgtgcacccacttagggcacggattttatttcccaactacacacatgtatatctcacacacacagcagaagaaagaactgcctgtctttaagtgacatttagtgatgaatgtgccactactgacatcttgaatgagaactctccccccaaacggtagacacttgaatgactttcaagaaaaccaactcccctgctctatcaagatggctttcatatcgatttagctccctatgacaaaacattttagaaatggcaccgccgcaytttaaaaaccagagtgatcccccttgtctgaaaagtgaaaagcaaacagaatccttgcccatatcgttcccgtgaattggatcacccctgtcttggaagctatcaactccgcaaacctgaaaaaatgcgaattctcaggtcagttattttctaaagcaggcctcctggtggaaagccttggtgatacaagagcatatgaatcttagccctgcttaaatcaccagtcgttctatattgtgctttctctttttagttttaaattatttat

SEQ ID NO: 503001 - DNA, 547 bp, Homo sapiens
gtggcatgttctttctgtgcacccacttagggcacggattttatttcccaactacacacatgtatatctcacacacacagcagaagaaagaactgcctgtctttaagtgacatttagtgatgaatgtgccactactgacatcttgaatgagaactctccccccaaacggtagacacttgaatgactttcaagaaaaccaactcccctgctctatcaagatggctttcatatcgatttagctccctatgacaaaacattttagaaatggcaccgccgcactttaaaaaccagagtgatcccccttgtctgaaaagtgaaaagcaaacagaatccttgcccatatcgttcccgtraattggatcacccctgtcttggaagctatcaactccgcaaacctgaaaaaatgcgaattctcaggtcagttattttctaaagcaggcctcctggtggaaagccttggtgatacaagagcatatgaatcttagccctgcttaaatcaccagtcgttctatattgtgctttctctttttagttttaaattatttat

SEQ ID NO: 503002 - DNA, 547 bp, Homo sapiens
gtggcatgttctttctgtgcacccacttagggcacggattttatttcccaactacacacatgtatatctcacacacacagcagaagaaagaactgcctgtctttaagtgacatttagtgatgaatgtgccactactgacatcttgaatgagaactctccccccaaacggtagacacttgaatgactttcaagaaaaccaactcccctgctctatcaagatggctttcatatcgatttagctccctatgacaaaacattttagaaatggcaccgccgcactttaaaaaccagagtgatcccccttgtctgaaaagtgaaaagcaaacagaatccttgcccatatcgttcccgtgwattggatcacccctgtcttggaagctatcaactccgcaaacctgaaaaaatgcgaattctcaggtcagttattttctaaagcaggcctcctggtggaaagccttggtgatacaagagcatatgaatcttagccctgcttaaatcaccagtcgttctatattgtgctttctctttttagttttaaattatttat

SEQ ID NO: 503003 - DNA, 622 bp, Homo sapiens
catatgaatcttagccctgcttaaatcaccagtcrttctatattgtgctttctctttttagttttaaattatttattaaaagacacaatccctgttagggcaacctcatcagcatggagaacatggatccagtgacttgtgcataaaatctgcaactcaaatgaaaactgtggggaaacttcaaacagtgacagaagagaaagaactcaaaagtgaggtgttctcctttctgattttagttcagaagaagagatggcttgtaaatattttggttttattcgacaaatgtttttttttctctctctctctcttttaaagctaaaatgcttttagaaacccccaacctgtctttcctcataaaaatacagggaaccttgcttaaggttagttttgtccctcctttaggaggtgcatgtggggtgtttgggaggcgaaaaagggctggctgctctctttttctttgctttgatggattcctcccctcatcaaccatagcccagctcataattataatgcaaaacagcatccccacagcctgcttggtgcatttcaaatctgaagttccttgaagttctaaggatttttaaatattgatattcattaattgtgtggcttttgtgac

SEQ ID NO: 503004 - DNA, 583 bp, Homo sapiens
ggtaaacataagtaaacatcattgtagaattgctattatacatttatagtttttacccattttcatatagaaagagggcaagcaatattgggaaacataacaaatgaataatctgtaataagaatttaaaaatgtattttctaaagtattttggtttggccaagaaccatctaatgactgcttcactcaagaaaaaaggaatggttatgagacctgacttgcagattttgatcataaaatgcaaaacctagagtcacccaagtagtaagtgttttcacaaagtgaattacaactaaaaattctttggtaaagtcacagaaaactgaaaggaaaagacacaacactattaaatgaaaaagtaacagaaattgactccagccacaaagcacatattcatgaccaaacatttaactgctctcctaacaatgccaaaataaaggcagaagggaacagggagaggaaggaaataataatttatatgagttgggaataaaaagtgtyccaagcaaaaatgagttacatttgaaaatgctttttcaatgtcaaacgttttctaatgggctgaaaaaaagatggaaaatac

SEQ ID NO: 503005 - DNA, 503 bp, Homo sapiens
agcagaggccaggccagggggtccctgatctgccacctgagtcctgggcccttcctgccaccccacggagaggagacgcctgggtcagaggcccggcctgtcaacaggaagggcacgttcttcctcctaaaggcctagtgatctgactccagtgtagcaatgacagcaatgacaacacagttgaatgctaayggaggtccaggcctggggaagcactcggcctgcgtttgctcacttagtcctcagcctcctgaatgaggcgctgctgttactcttgtgggtgtctcgggcctgcaaagaccaggtgtgctgggctgggggcttcaggactactgttttttatttttatttttttatttttttgagacggagtctcgctctgtcgcccaggctggagtgcggtggtgcgatctcggctcactgcagcctctgcctcccgggttcacgccattctcctgcctcggcctcccgagtagctgggactacaggcgcccgccaccacg

SEQ ID NO: 503006 - DNA, 404 bp, Homo sapiens
ctcttgcactgatctcctgcgattccttgactgagtgaccagggaggaaggtccatggtctgaggacaagtcctgaggtgaacagggctccaggcaggatttattccatggcccattagtatcctttggctgaacctgagtcatgctgaacctcatctgtccccgagtagtggtggaggcatgaggtcagcaagtgaaagcactgacccctgggcagggccctgggctgtctgggctgggagactcccccagtcagatttagctcctagatgcctgttcctcagcccctratgggagtggaaagatccctcctgcctgccttttcctggcagggcagtaagcggctgtgtagggagcacaggccgggcatccggagagctgggtggacaggtggctctgctgcc

SEQ ID NO: 503007 - DNA, 476 bp, Homo sapiens
tgaagttgaaaccaaactccatgcccggccgacctcacagtgcgcttgtaggatcagaagggtacatgatgggccgggcatggtggctcatgcctgtaatcccagcgctttgggaggccgaggtgggcrgatcacctgaggtcaggagttcaagaccagcccggccaacatagcgaaaccctgtctctacaaaaaatacaaaaattagccgggtgtggtggcgcacacctgtagtcccagaggctgaggcaggagaattccttgagatacggaagtggaggttgccgtgagccaagatcgcgtcattacactccagcctgggcgacagaagaagaaagaagaagaagaagaggaggaggaggaaaaagaagaagaagaaaagacgaaaaagaagaagaaaaagaagaaaaagaagggagaaccttcatggacttgtattccttttcttaggccaggtccaggtgggtgtgcggtgg

SEQ ID NO: 503008 - DNA, 593 bp, Homo sapiens
acaaatcccctgaacgtactgctgtcaccagtgtcattgtggctgcgggaaggagatctgaacctaacttttcttactccctgaggagtttcttgttggacccaatggggtccatgaagacactgatggggatggaagcagacccatggcatcaactgcagtgtttctgctgtgttcatcttctcagaaaactctgtgacccagttctttgggagcttttgtcagtctctttcgtgccatctaccttcgaaggaaggaacacttttagagttacaatgatgaggagaggagcgggacaatactcaatcctataccaagtcrattgagattagtttcctactgggagtaagtgcctggccctgctactcctatttgaatgctattaatattacctagccttttacaaaggatactttgtaaatgtctgctgttggaacttgatgttaatccattttggtcatagccatattagagagatttgcacagaatgtaaaggcaaaagcataggaaacaccttcctttctaaagcaacagccttatcaccttgacctctgtccctcttcagaacattcttccctggaaccagtgctcca

SEQ ID NO: 503009 - DNA, 320 bp, Homo sapiens
caccctcaggggacaggggagcagaggaaggagagctcctcaattgtcatcactgaacttcactgcaccctgcaagccttagccacacagagaaaactggacttggggccattcgcttgccccttctgcccactttggtgaatgaggttgaggtcacactcccagacctcgctccaaagacrgaattcttgtctggaggtgagtgggagaccaagagggttcccagcactctcaacattctgcttttttcctctgtccccatccacttaacctggttggtgtttatgacagcagccgagcctcagcccaggagccctgtg

SEQ ID NO: 503010 - DNA, 608 bp, Homo sapiens
acaccttaaacaaagcacttgcatgcgaatcatcttggggtcttttgggaaaacccagctaagataatacttaaagtgtttggtctttgattttcttttctccctgaccttctctgcagtccattgtgagatgtgtccctggcgttggaatctactttggcactctctactctttgaagcagtatttcttgcgaggccatcccccaaccgccctggagtcagtcatgctgggggtgggctctcgctctgttgcaggggtctgtatgtcacctatcactgtaatcaagacgcgctatgaggtgagttcaaccactttagggcctcaggatagttcrgcttagccactgggctcctggggagtgaccaccgatgtcaactcctgatttgtaatctaacatagagtctgatgtggtcagacaagccatatgtgaactagatcccatggtaatgccccataacctgcagtctgcttgttcagtgctgaaatgcagcgcctccatgcgagtcactggttctgtgctctctttgcagagtgggaaatatggctatgagagtatctacgctgccctgaggagcatctatcacagtgaggggcaccggggcctctt

SEQ ID NO: 503011 - DNA, 243 bp, Homo sapiens
gcacgattgcactccagcctgggcaacagggcgacactttgttctccgccccctaaaaaacccccaaaacaaactaaccccatttcctaggcatartttcagtgccatgcctaggtagtggagagcaagcagctttcaacctgggctgcctggattagagcccatgttcttaaccacaagactaaatatccccccaacttgtgcttcttgtataaagtaatggctgtttcctgattttttttt

SEQ ID NO: 503012 - DNA, 625 bp, Homo sapiens
tgctcctccatacttggcacagtgcttagtgcacagcaacttcttaataaatagttgaacagagagaatgaggcaaggaggagatgtggagtctggtgaagagttggaggaaaggactgaacagccagaatggaaggatgctcctctttttgtgtttccygagccagatctgagggctggtgtgggcccctgcaggactggacacttgcctgctgtcacctgtgtatttgtttcctgtggctgctgtaacaaattaccaccaacttagtggcttagagcagcagacgtgtattctcccccagttctggaggccagatggctataatccagcagggctgcctccttctgggtgcttgaagggcgaattgttccttgccacttctggctcttggtggctgccccagcaaacctggggcttgtggccacatcactttaatctccaccatcttcacatctccttctccactgtgtgtctgcatcagatctcacccacctctgatttatgagaacactcatgattggatttaggatccgtccaggtaatccatgataatctccccatctcaaaatccttgacttaatcacatctgcagaagctcttctcccaagtaaagtaacatttaca

SEQ ID NO: 503013 - DNA, 510 bp, Homo sapiens
ctggtagaatcttaaactaaataagtgctgttgatttgagggagactgttatatagcagtagatcacttacttacgtgctacccaaaacttcagatcaaatctcttttctttgttctccctctacccctacccctatctctctttttgcttttctttaatttattatkattattattattatggagatggggtctccctatgttgcccaggctggtcttgaactcctgggctcaagtgaccctcttgccttggcttcccaaagtgctggaattacaggtatgagccattgcgcccagccagtacctctgtctctctgtcttgaccctgttactctgaacaccaagcctggaggaggcccagtaaggtttctaaagaagtatttcctaacatttttcacatggaccccctgcatcagaattgcctggagaactttttggaaatactgaatcctgggaattctgggaatctttggaaatgcaatatgagaatcttcaatttgaccagtccca

SEQ ID NO: 503014 - DNA, 510 bp, Homo sapiens
ctggtagaatcttaaactaaataagtgctgttgatttgagggagactgttatatagcagtagatcacttacttacgtgctacccaaaacttcagatcaaatctcttttctttgttctccctctacccctacccctatctctctttttgcttttctttaatttattattattattattattatggagatggggtctccctatgttgcccaggctggtcttgaactcctgggctcaagtgaccctcttgccttggcttcccaaagtgctggaattacaggtatgagccattgcgcccagccagtacctctgtctctctgtcttkaccctgttactctgaacaccaagcctggaggaggcccagtaaggtttctaaagaagtatttcctaacatttttcacatggaccccctgcatcagaattgcctggagaactttttggaaatactgaatcctgggaattctgggaatctttggaaatgcaatatgagaatcttcaatttgaccagtccca

SEQ ID NO: 503015 - DNA, 510 bp, Homo sapiens
ctggtagaatcttaaactaaataagtgctgttgatttgagggagactgttatatagcagtagatcacttacttacgtgctacccaaaacttcagatcaaatctcttttctttgttctccctctacccctacccctatctctctttttgcttttctttaatttattattattattattattatggagatggggtctccctatgttgcccaggctggtcttgaactcctgggctcaagtgaccctcttgccttggcttcccaaagtgctggaattacaggtatgagccattgcgcccagccagtacctctgtctctctgtcttgaccctgttactctgaacaccaagcctggaggaggcccagtaaggtttctaaagaagtatttcctaacatttttcacatggaccccctgcatcagaattgcctggagaactttttggaaatactgaatcctgggaattctgggaatctttggaaatgcartatgagaatcttcaatttgaccagtccca

SEQ ID NO: 503016 - DNA, 582 bp, Homo sapiens
ttatgaaaggaagttgaaaacattcgatcacaattgagttttgtactatggactaaaaccaagatgtgctttctgtcagtagctgtgcaactccctgaaaaaagaaaaatagcgcagagcgatctgagctttgtgaaggctacacaatttatcaggcccagagagataggagtgtgagacttcagtcacgtccccccgtacgcatgcgcaggagtaattatttaaagacattttgttcctgactaactgcctcactcattatgttcctggaatttgtgatacaaaaaaacaatgtttagcctatcaatagtttatatagtttatgttattttaatataaattcttctcaacttagaaactgcctcttttttcttttaaaaacccacttgtaactgctgtatatattcagggcaacttgatttggtgtttcgttggttgcagtcctcaaatttgacctcaatatactctctacytatataaattttgtctcagttttgtccgtaggctgacattccaattgttttcctaattatatattttgttccttatttctcatgtctagaaataaagctagggaagtaa

SEQ ID NO: 503017 - DNA, 524 bp, Homo sapiens
tgggtgtaagttctagctttattgtcagatagacaattatstagtatctagtagataaagcttgggtaaaccacctaatgtctctaaaccccactttaatgtccctgaacctcggcctcctcccctgtaggagtcaaaaggaaatgcaaactactgaacagaatatgtcatggttatttgttctaacataaggttatcaagcttataggtagaccctataatataccagtaaatcacatagactctggagtgacattggcagatttaattccagcaataccacttactagctttgcaaggtttgtctaattacttactgatatgggttagctatgtctccacacaaatctcatcttgaattgtagctccacgtgttgtgggagggacccaatggaagataactgaatcatgggggcggtttcccccatatagtttctgtggtagtgaataattgtctcatgttacctgatggttttataaggggaaacccctttcgcttggttctcattttctgtcttgccacc

SEQ ID NO: 503018 - DNA, 524 bp, Homo sapiens
tgggtgtaagttctagctttattgtcagatagacaattatctagtatctagtagataaagcttgggtaaaccacctaatgtctctaaaccccactttaatgtccctgaacctcrgcctcctcccctgtaggagtcaaaaggaaatgcaaactactgaacagaatatgtcatggttatttgttctaacataaggttatcaagcttataggtagaccctataatataccagtaaatcacatagactctggagtgacattggcagatttaattccagcaataccacttactagctttgcaaggtttgtctaattacttactgatatgggttagctatgtctccacacaaatctcatcttgaattgtagctccacgtgttgtgggagggacccaatggaagataactgaatcatgggggcggtttcccccatatagtttctgtggtagtgaataattgtctcatgttacctgatggttttataaggggaaacccctttcgcttggttctcattttctgtcttgccacc

SEQ ID NO: 503019 - DNA, 564 bp, Homo sapiens
aggatttccctgggaagatcagtactgagtcatcagttgatcgaaggtaggggacggcacaacacataccatgcacaaatcgaatgtagggtgtattaagccctcagcagtatgaagattttaaattattgggtgggtacaaaagtaattatgatttttgccattaatataatttcagtcatagcactatcttaatatctctgacagaagactcttggaacattaaaaaaatcaagattctaataaggctgtcttgtgaagatcaaggcatggaggtttgaaaatctcagtgtcgattcattatctaaaaatctcttgaatagctcaattacaaagtcagccataagtggaaaactatgtatctagggtctgcaccgtgccggctgcataagataccgagtaaatgtttgaacaactgagggaatgaattcccaggtcggccatctcaactttttacaacgttaatgacaaataygatttcgacatatataattcatttgtatcagtgttttgggtgtgatatctgtcagttgtgatggctgttatatgagttgaacagttgtg

SEQ ID NO: 503020 - DNA, 595 bp, Homo sapiens
atatttttattctaattttatttacttcctaaaattcatgaacaaaaagactaatgcctttttatcatcttaaatcawtaaagacataaaaatgattgaactggtgtatatccaaataattcttacttatccatttgacattgtgtatatttcactttaaaagataaaatttaaattaagaatagaaagttacataagcaactgagggacatgctatttataattgttaagtatgatttgaagtcataccaagagttaatcttagaccgggcaccgtggctgttgcctgtaatcccagcactttgggaggctgaggtgggtggaacacgaggtcaggagttcaagaccagcctggccaatatggtgaaaccctgtctctactaaaaatacaaaaattagccgggcatgatggtgcatgcctgtaatcccaactacttgggaggctgaggaaggagaatcgcttgaacctgggagctggaagttgcaatgagctgagattgtgccactgcactccagcctgggcaacagagcgagactccgtctcaaaaaaaaaaaaaaaaattaggagggagtggtggcagccacctgtaatccc

SEQ ID NO: 503021 - DNA, 520 bp, Homo sapiens
aggcgcctgtatcccagctactmgggaggctgaggcaggagaattgcttggacccaggaggcggaggttgcagtgagccgagatcgtgccacttcactgcagcctgggtgacagagcaagactctgccagaaaaaaaaaaaaaaaagatggaaagatgcagtttgaagatgtgtgtgaatgcactcattcagtccctcagcagctatgactggcacctcctatgctccaggcgctgccctgcccctgcgaaggcagtggtgatggagggacaagggccctggcctcatggagcttacactggggcaggggggcagacaataaatacacaaataggagactcccagagtcaaggtgccctgcagaatacagaacaaggtcaagagtgtctggggagtgctgctttcactggggtgacctcccggagaagtagagtgaaaggggccagcctttaaaaagcagaattatcagccaaagtggtgcaagcaaacttggctttgcaggaaaacagagaagaggcca

SEQ ID NO: 503022 - DNA, 520 bp, Homo sapiens
aggcgcctgtatcccagctactarggaggctgaggcaggagaattgcttggacccaggaggcggaggttgcagtgagccgagatcgtgccacttcactgcagcctgggtgacagagcaagactctgccagaaaaaaaaaaaaaaaagatggaaagatgcagtttgaagatgtgtgtgaatgcactcattcagtccctcagcagctatgactggcacctcctatgctccaggcgctgccctgcccctgcgaaggcagtggtgatggagggacaagggccctggcctcatggagcttacactggggcaggggggcagacaataaatacacaaataggagactcccagagtcaaggtgccctgcagaatacagaacaaggtcaagagtgtctggggagtgctgctttcactggggtgacctcccggagaagtagagtgaaaggggccagcctttaaaaagcagaattatcagccaaagtggtgcaagcaaacttggctttgcaggaaaacagagaagaggcca

SEQ ID NO: 503023 - DNA, 468 bp, Homo sapiens
gtttgtgacagatctaagaccagaactgggacctccagttctgatggaaacttcaggctacacagatttcaaggccaacagttgaggtttatatttgtgttaatttagtcaaactaagtatgacttaagtaaaatgaagtttaaatgatttgtttatgaaaaataaaatttaataaatagataagttcttagagtgttcatctttcataaattcaaaattgtgtgagaagaaagaaaccaagcattacctttcctgtagagaaacagccccagcgaaaagtctgaataaacacaatctgtaggtagtgcccatagacgctgatgactgacaccagttggatgagttcacagtgtgtrgtcttgtttcattaacagtcttgtcaatcacacgtaaggccctaaatgtgtttataaagcacatgtactattatttttgacattgtccacacactaagtttttatgatgca

SEQ ID NO: 503024 - DNA, 639 bp, Homo sapiens
ctggagggagaggtttggcattgtttgaggttctggttctggtttcatttattcctgagaaccagtgatatccctgacctttccataattttcatttttccacatttccttatatttttkgtgctaataatttcctcatttatcaagttaattcaagttaggctcctgtcataccaaacaccgtccacagtttgttatgtatttaagacatatatttctaatttctctttcaatgccggagatcctgaaatatctctgagcaaataattgggagtaggtctgaccaaatcaacaattccacttaattcaacacatgtttatcaaatacctaccaagccaagacagtctcatcaagaatgcatgtaaatggccactcagaattggaacagctaaataattttgagatattccactataaataattttgtagcaaactcccaagtgtacattgctgaaaaaaatagatggagccccaaattgaactcattagaaatatgaccatagggaaatgaaaatcattcaatgataacttttattttcttagcatttcctggattctaaatcaactgtgggctagaaactggctcttagactttatcttttatggtaacttacaccataatcaagagaaagcttttt

SEQ ID NO: 503025 - DNA, 415 bp, Homo sapiens
ttggcattgtttgaggttctggttctggtttcatttattcctgagaaccagtgatatccctgacctttccataattttcatttttccacatttccttatattttttgtgctaataatttcctcatttatcaagttaattcaagttaggctcctgtcataccaaacaccgtccacagtttgttatgtatttaagacatayatttctaatttctctttcaatgccggagatcctgaaatatctctgagcaaataattgggagtaggtctgaccaaatcaacaattccacttaattcaacacatgtttatcaaatacctaccaagccaagacagtctcatcaagaatgcatgtaaatggccactcagaattggaacagctaaataattttgagatattccactataaataattttgta

SEQ ID NO: 503026 - DNA, 639 bp, Homo sapiens
ctggagggagaggtttggcattgtttgaggttctggttctggtttcatttattcctgagaaccagtgatatccctgacctttccataattttcatttttccacatttccttatattttttgtgctaataatttcctcatttatcaagttaattcaagttaggctcctgtcataccaaacaccgtccacagtttgttatgtatttaagacatatatttctaatttctctttcaatgccggagatcctgaaatatctctgagyaaataattgggagtaggtctgaccaaatcaacaattccacttaattcaacacatgtttatcaaatacctaccaagccaagacagtctcatcaagaatgcatgtaaatggccactcagaattggaacagctaaataattttgagatattccactataaataattttgtagcaaactcccaagtgtacattgctgaaaaaaatagatggagccccaaattgaactcattagaaatatgaccatagggaaatgaaaatcattcaatgataacttttattttcttagcatttcctggattctaaatcaactgtgggctagaaactggctcttagactttatcttttatggtaacttacaccataatcaagagaaagcttttt

SEQ ID NO: 503027 - DNA, 639 bp, Homo sapiens
ctggagggagaggtttggcattgtttgaggttctggttctggtttcatttattcctgagaaccagtgatatccctgacctttccataattttcatttttccacatttccttatattttttgtgctaataatttcctcatttatcaagttaattcaagttaggctcctgtcataccaaacaccgtccacagtttgttatgtatttaagacatatatttctaatttctctttcaatgccggagatcctgaaatatctctgagcaaataattgggagtaggtctgaccaaatcaacaattccacttaattcaacacatgtttatcaaatacctaccaagccaagacagtctcatcaagaatgcatgtaaatggccactcagaattggaacagctaaataattttgagatattccactataaataattttgtrgcaaactcccaagtgtacattgctgaaaaaaatagatggagccccaaattgaactcattagaaatatgaccatagggaaatgaaaatcattcaatgataacttttattttcttagcatttcctggattctaaatcaactgtgggctagaaactggctcttagactttatcttttatggtaacttacaccataatcaagagaaagcttttt

SEQ ID NO: 503028 - DNA, 638 bp, Homo sapiens
tagggcagatttgctgttcagtgtcaacttgcttgaggtgggactgggagcaattcacttgctgaaggagactacagtgaagtcttccagaaactctggggaactggtcacattcacaggtcacaggctctgactcagacgtggctttgtctaggttgtggactgctggagtctttccaggaagagaacaccttccttttatcttaaaaccatgctgtgattgccccaacatattcctgactgcccaaaccttgttaactaggcgagccagatagaatttgagtgcatgctcattaagcatagatgcttggatatacacatatacgtacagcaaggagtcatgccaggaaaaggtgccagaccccagtgctgtggaattatactggatttctgtggcaaaagcatcatggaagacccttttgcaagggagtgggctttgccagagttttcatgcagagtcataaggatattcccttttagcatttggcaccagttattttacaccaacttgtgaagcacagtgccaagttctattgcctggaatctccttaaaggtttactcagatgttgraagaagcatccaaagtcatattttctgttgtttattcttttgctttttttttctctttgcaaatgaa

SEQ ID NO: 503029 - DNA, 638 bp, Homo sapiens
tagggcagatttgctgttcagtgtcaacttgcttgaggtgggactgggagcaattcacttgctgaaggagactacagtgaagtcttccagaaactctggggaactggtcacattcacaggtcacaggctctgactcagacgtggctttgtctaggttgtggactgctggagtctttccaggaagagaacaccttccttttatcttaaaaccatgctgtgattgccccaacatattcctgactgcccaaaccttgttaactaggcgagccagatagaatttgagtgcatgctcattaagcatagatgcttggatatacacatatacgtacagcaaggagtcatgccaggaaaaggtgccagaccccagtgctgtggaattatactggatttctgtggcaaaagcatcatggaagacccttttgcaagggagtgggctttgccagagttttcatgcagagtcataaggatattcccttttagcatttggcaccagttattttacaccaacttgtgaagcacagtgccaagttctattgcctggaatctccttaaaggtttactcagatgttgamagaagcatccaaagtcatattttctgttgtttattcttttgctttttttttctctttgcaaatgaa

SEQ ID NO: 503030 - DNA, 586 bp, Homo sapiens
tatttcgatgtagtctaacttctataacaaacaactccccagttgcagcagcttgacatagtgaaactgttatttcttgctcatgtcacagcgcagtgtgggaggatggagggactctgttccacattcattcatgaacccaggcaccttcartcttgtggctccaccctcatattggcccttaaagttctttcaaggtagctaatgagaaaaaaggcagaaaagagaacgtgatgaccacacaaaggaagcgtatgtaggttatttctgcaagtggcacgtgttgctccagctcatatccaattggccagaatgccactgcatagccttacctggaacacgtggtgtctccctgtgcccatggagacaaaaacaacaatgttggtgaacttgggcatacattcatctcaagagccataaaggcctgttagattagatttgtttgttcttaactgtttactcgccgttactcatgcatatcctttgatctgtgttcaggcctttgattttatgtaaatgcctaggcgtacacattttcctataagccgaacttaataatgagaaaagaggtagaccagaagtctct

SEQ ID NO: 503031 - DNA, 586 bp, Homo sapiens
tatttcgatgtagtctaacttctataacaaacaactccccagttgcagcagcttgacatagtgaaactgttatttcttgctcatgtcacagcgcagtgtgggaggatggagggactctgttccacattcattcatgaacccaggcaccttcaatcttgtggctccaccctcatattggcccttaaagttctttcaaggtagctaatgagaaaaaaggcagaaaagagaacgtgatgaccacacaaaggaagcgtaygtaggttatttctgcaagtggcacgtgttgctccagctcatatccaattggccagaatgccactgcatagccttacctggaacacgtggtgtctccctgtgcccatggagacaaaaacaacaatgttggtgaacttgggcatacattcatctcaagagccataaaggcctgttagattagatttgtttgttcttaactgtttactcgccgttactcatgcatatcctttgatctgtgttcaggcctttgattttatgtaaatgcctaggcgtacacattttcctataagccgaacttaataatgagaaaagaggtagaccagaagtctct

SEQ ID NO: 503032 - DNA, 586 bp, Homo sapiens
tatttcgatgtagtctaacttctataacaaacaactccccagttgcagcagcttgacatagtgaaactgttatttcttgctcatgtcacagcgcagtgtgggaggatggagggactctgttccacattcattcatgaacccaggcaccttcaatcttgtggctccaccctcatattggcccttaaagttctttcaaggtagctaatgagaaaaaaggcagaaaagagaacgtgatgaccacacaaaggaagcgtatgtaggttatttctgcaagtggcacgtgttgctccagctcatatccaattggccagaatgccactgcatagccttacctggaacacgtggtgtctccctgtgcccatggagacaaaaacaacaatgttggtgaacttgggcatacattcrtctcaagagccataaaggcctgttagattagatttgtttgttcttaactgtttactcgccgttactcatgcatatcctttgatctgtgttcaggcctttgattttatgtaaatgcctaggcgtacacattttcctataagccgaacttaataatgagaaaagaggtagaccagaagtctct

SEQ ID NO: 503033 - DNA, 559 bp, Homo sapiens
attttgccagtttttaggttattagaaaaaaataaaaggacaaaacaagaaaaatgtgacagcagctaggcgggtatgttaagcatggggacaggcagcactgacccccaacttggggcagggcagcaagaagggcccgacaccacctgcatggggaggggggggcgcccatttgtgggaccagagggagaggcagtggcttaagctccacggtcagcgtcctgtcaccactcggaatccacctccactcttccctccaggtagatccagggagaagggagggcatgtcagtttcttttgggtttggaccaaagaaccaaaaaaagatgaggatagaatctggttctcctctcctagatcccaacttagcctcaaccaccccaaccccytcccaacctcctccacggagcagtggcgcagtgatggggcaagaccaaagcagggagatgggcccaggctggggagtgagaggaggtgtggggcagggctgctgctgccccgggcacgcaaagcaggagggaaggcgagcctagcgggctgcccagcacggcgcccaagc

SEQ ID NO: 503034 - DNA, 515 bp, Homo sapiens
atacatataataaaaatattacctacaaagaatttaagtgacgttgaaaattgattatgacttatgtgaacaaataaagatataatatataaccatgacatgatcttaactatgtaaaaatatataaaataaaaactacacaaaaaasgaaaaagttgttaaataaagaaggaatctgaggattagtgaaattgtgtctcttatgattttcctcataggtcattatatttttttcactttctcccactagcttccacagtcctcagaaagggaaatgttggtctataatacacaagatgtattcaaagtatctcacgtggtcctctggatgaggtcgtgccaaacacatgttttcagagtcattactctaatcatgatttgcctactttgcatgtaattttccaggtgaacttctcatctatatagggtactaaagaacaaaaaatttggaaccaggaggcctagactttagttctgagtgtcacactttctaataaggtatctttaggcagatc

SEQ ID NO: 503035 - DNA, 622 bp, Homo sapiens
  misc_feature (1)...(622): n = A,T,C or G
tgagaattctccggttatgatattgtactatagtaatataagatatcamcatcggtggaaactagttaaagggtatacaggtgctccctatattatttattacaactacatataaatctacaattatatcaaaatagaaagtttacaaaaatattttgtgatgtgttntacattctgtagaaatagcccaaatagaagttttaattaaatcatagttggcaacaatttgcaggtatttctattgtttttgttggtggtaatatttgctcatatgaacctaagcactatgaggccaggcatttactcaccagatctggtctggggttacatatgggactgaaaactcacatatcatctggttagagtagcaaaaagcaagaagacctggacagtcttctccatgcacaggccaagcagagatgcacggagcagcaggagggattagagtcttgcatcctaggttgacttatctatttaccattttattgcttgaaatacaaaaccttgttaaaattcatgtgaccgggcataagtttaactctcaagttagacatgttactttagaaacacagatggagcaccttcaagagaacggcggatgatttcagccaatatttaattg

SEQ ID NO: 503036 - DNA, 558 bp, Homo sapiens
  misc_feature (1)...(558): n = A,T,C or G
ctccggttatgatattgtactatagtaatataagatatcaccatcggtggaaactagttaaagggtatacaggtgctccctatattatttattacaactacatataaatctacaattatatcaaaatagaaagtttacaaaaatattttgtgatgtgttntacattctgtagaaatagcccaaatagaagttttaattaaatcatagttggcaacaatttgcaggtatttctattgtttttgttggtggtaatatttgctcatatgaacctaagcactatgaggccaggcatttactcaccagatctggtctggggttacatatgggactgaaaactcacatatcatctggttagagtagcaaaaagcaagaagacctggacagtcttctccatgcacaggccaagcagagatgcacggagcagcaggagggattagagtcttgcatcctaggttgacttatctatttaccattttattgcttgaaatacaaaaccttgttaaaattcatgtgacygggcataagtttaactctcaagttagacatgttactttagaa

SEQ ID NO: 503037 - DNA, 651 bp, Homo sapiens
tgaatcctgctagctgggtggctttgggcaactttcttaacttctctgtgcctcaatttattcctggatgaaatggaaataataacataactgttctatagataaaatgggttatatgtaacctatgaacatggtgcctataattacgtaataaacactgtaaatgtgatgttattgttgttactactgtaattacataatttacatttttccaaatgtatcatatcctcacaatgttggagtcaccctctagtgtttgaaaaagccttatttatagccaacattttaacattattttaatattaacttatttaaatattatattaaatattatatttcatattttttgggaaaatgtttatttctctggaatgagagcttttaaataatccattaaatattaacttagctttttatttatttgaatacattatgaagaactgcaaatctctagaagttatagctgagagtttactactaaagaatgcatacatayacatgcacacacacacacacacacagagtaaagtaacttatgattagaggtgctttacaatttaagtactaatacaaaagaaacacatgaagttggagtccacccttgatttttctatggattttccattaatggcttgaaatcctttaatgaag

SEQ ID NO: 503038 - DNA, 446 bp, Homo sapiens
ctgatagtgtctatttgcagttcatttcctgtgtaatmctatatgcatgtatatatatgtatacatatatactatatacacaaacatatgtatacacacacacatatatatgctcaattcaggcatggctacagatctagtagattaggtcttcttatgtgtgaactgatctttcagtggtatcaactgatgacgtgggttttcccctatatttaaatgcattgttcttttaatggatatctgcaagcatcaatgcatgtgtgcaaaaatgcatgtgtgctcacatttatgcttgcagatgttaaaaactgtggtaggtagatttcttcatggtcctttgttccttagtattactctggtgattatcttatatattatataatgaaagaaatttcaaaagtgtgattaattagtttagtttaacatatggatatttctcgatgcag

SEQ ID NO: 503039 - DNA, 555 bp, Homo sapiens
agactctcttcttattcacactaaaactgatagtgtctatttgcagttcatttcctgtgtaatactatatgcatgtatatatatgtatacatatatactatatacacaaacatatgtatacacacacacatatatatgctcaattcaggcatggctacagatctagtagattaggtcttcttatgtgtgaactgatctttcagtggtatcaactgatgaygtgggttttcccctatatttaaatgcattgttcttttaatggatatctgcaagcatcaatgcatgtgtgcaaaaatgcatgtgtgctcacatttatgcttgcagatgttaaaaactgtggtaggtagatttcttcatggtcctttgttccttagtattactctggtgattatcttatatattatataatgaaagaaatttcaaaagtgtgattaattagtttagtttaacatatggatatttctcgatgcaggatcagtctaatcacataaatcctatatgtggttaaattagtggacgtctctcaaaagcaggtcagtgtagtggctaacagcc

SEQ ID NO: 503040 - DNA, 448 bp, Homo sapiens
ctcgaattctcctaaaagaggataaataacagcacaagattctagggttttgaagcaaggccrcgaccactttatgtagttatgttaactgttacacctgttgagagagaatttttggcttatacaccaggagagaatgaatacctgtctgtgaaacatcaaatgaccagatatgagctgttctttgtccatttggtaaagccataagactaggtatgtacagcagctccatcatgtaaaatggtatatacaagatctattttgaacaggtcctttgggcacaagtaaattccatgagcaagtagctgagactcttactttacctctccctcatctcaaaccttcagcatcatagaaaatctgtatgaccatttgacaaataataaaaacttaggtctgatttacagatattactgcacaatatgctggtacaaactgaaagtggcag

SEQ ID NO: 503041 - DNA, 448 bp, Homo sapiens
ctcgaattctcctaaaagaggataaataacagcacaagattctagggttttgaagcaaggccacgaccactttatgtagttatgttaactgttacacctgttgagagagaatttttggcttatacaccaggagagaatgaatacctgtctgtgaaacatcaaatgaccagatatgagctgttctttgtccatttggtaaagccataagactaggtatgtacagcagctccatcatgtaaaatggtatatacaagatctattttgaacaggtcctttgggcacaagtaaattccatgagcaagtagctgagactctyactttacctctccctcatctcaaaccttcagcatcatagaaaatctgtatgaccatttgacaaataataaaaacttaggtctgatttacagatattactgcacaatatgctggtacaaactgaaagtggcag

SEQ ID NO: 503042 - DNA, 539 bp, Homo sapiens
gagtatgtgggtgtacccctacaaatggggatgagttgtgtacatttgtgtcctatgtgattgctcactcatcccactcaggaatggaggctatgtatgaactcaaaaagggcctccacccatcaatcctaatctgcctaccacctctgctgagtagtaacttgccagcagcagggatcaatgctgaaagcccaatgtggtgccattttctggaaaaccatctagtcacatggtggcacattaattacagtggatctcttccatcrcagaggagcaacagtttctctccactattaaataggcctttctacagaatgcaaatcagcctactctgccctttgccatctgcggatgtatgaaatgcttattcactgtcttaccactcacaatattgcttctgaccaaataactcattttcacagcaaaagaaacataacagtgactcatgctcatggaattccaactggtcttaccacataccccatcgctagattgatagaatcatagaatagcttgctgaagactcattacagagccag

SEQ ID NO: 503043 - DNA, 519 bp, Homo sapiens
gtggaatctgttaaggcactcacttaacagattaccccacgccatcttccccatgtgttcctgaactagaagttaggctgaaggagtggaaaaggggaggacctgctttgaacttggcgatggcgctgaagagtgaggcggccctctcggagcaggcgtcgatgaggctaatggtgtcgtggccattgtggaaagagaacttgcagaaggtgcagagcaatttgttgtcattgcggcagtactcgatgatgcggctggatgggtggtggatgcagatcttctcgtcctgttcctcggcgctggtgtccacaaagacgtggtcttgcatggccacatccgagtggaaggccttgaggcagtcgttgcacaggttgaggcggcaggtgatgcagcgcttgtaagcgatgcgcytgttgcggcagacctggcagaggatgggcccggaggagcggtcaaagcgccacttgaggtagccgtgctcctgcatgtagcgcttggtgagacgcccgtgcaggtagt

SEQ ID NO: 503044 - DNA, 569 bp, Homo sapiens
ataggtaatggagcctgcatttctaagtacaatttctgtgctgtctctattacaggctttcctttgggaaacattacactgccaagtagtgtcttcaaattactttggttcccaaattgggttctctttcagttgagaagctgcctttgcagtggaggtagggctttcagatatatttacgattrtgagttaaatatattgactgtttggtttaagctaattttgggttacttaagattccaggagcttatcccttttgaatgggatgaccacaaagagtctagaggagcagatatgagtgaccagatcctagaggtcaaagaggtaagtgcaacctttcctgactactcacttctactctgtgccccacaccctcccacttccccactgggcccagaacctttcttaccttggcagctcttgggtacaccagagtctggtagataacaattgggcctggggtcttcacagagccatcgttgaatgagtaccagttgtggaagctgctgctgttctgtacagactggctgtctgctccagcactccagtaggtgtagaggccgtctgtg

SEQ ID NO: 503045 - DNA, 549 bp, Homo sapiens
gagtcaatattagctacatctgagaatgtcctagaagagtttttttcccattagttccatttatttccccaacgttacagaagaatgtcaaaacacaggcaattattccaaggtctgaaagtctcaagtaacagatcttactgccacatccattctcctgaaacatgaatttcataatgccattcccttttccaggacttacggtgtctccctcctactctcacatcaatcaatcaatcagttcatactactcagcatcctgttcagtgcatagccctctgctacacacaggaaaaaccaagtcattcatgttttttactcattwaaaaaatgtttattgagcacctactaagtgacagaagccatgctgggcactggagggagaatagatggacaaggcatggcccctgccctagagaaactcaaactttcctggggttggcaaatgggtaaacaacaattacaacacactgtgataagctgacactaaaaatatgttcacagaatcctgcaaagccctagagaaggcatagcagagaagaaaacaca

SEQ ID NO: 503046 - DNA, 638 bp, Homo sapiens
ggacagttcaacacagaagggattggaggtatgtgaaggagaatgggcccaaggtcagctcagaaaggsttggctttcctggttctcaaaaattttaaagaaaagctgttaattagaatggttgttcatcaatgtataaaaaaatagaaaggcagagtctagaggcaaatgttggcagtgcctgtacaaacactaaccggaataaaggatgtgaatgttatcaataaacttggagtttctgggtctcactgcttgtattagtctgttttcacactcctataaagaactacctgagactgggtaatttatgaagaaaagaggtttaattgactcacagttctgcaggctatacaggaagcatagctaggaggtctcaggaaacataatcatggtggaagttgaagggaaagcaggtatgtcttaccatggtggaggaggagtgagaaagcgagagagagaatgtgccacatacgtttaaatcatcagatcttgtgagaactcactatcataagaacagcaagggggaaatcacccccatgatccaatcacctcccaccaggcccctttcctgacacatggggattacaattcgatatgagatgtggtggagacagagtcaaaccatatcactgctggac

SEQ ID NO: 503047 - DNA, 547 bp, Homo sapiens
agaagataaaaggaaacccttccatttcctgaacaggggtgagacctgacctgcaattttgctcatagttatgcaatttccccacccatctcttttctttgcagacacagggttcatagccacagcaggtgacggtgcagggccctgagctctgatcttgcgtaacagaaatagagtctgctcttgacctggtcacccagaaccacagcattgagaaagaaaacttagacatccagctatgtccaactgccacattgagtcaaaaggaaactgaggccttgagaaaggagatttgcctgaggaaagggctcaaccacagtctcccaacccatttgcctttgttcattgcttgggtgccactgcaagtctggccctgtttacagcacattgcrgctttctacaggaattcatcccattaacttcacttctcagccctgaagccttcctcggtctccttgctcctgtgcttctgtggtgaggtcaccttttctggaaatccctgtgatttctttccacaagccctcagctatgcatgtggcaagaaggt

SEQ ID NO: 503048 - DNA, 646 bp, Homo sapiens
ttgagtttgtacattccttggtgtcggctaaagccacaggaactttggcagtattttgaagttacacccgttccctattgcaatgcaggtctgtgaaataatgccttagctctgccaaaaaccacagtgattatcaacagtgtaaataatcaagtaaaagcacttttccacagcccagtgactagattgtcaagaatgcaaaaagtagtagcaaaaattgattgccatttgcaargataatttctatctgaattatattactgtattgcaacagcgatgcataatgtgtgtccagcatctttgtaataaacattttaggtttaatttagaaatctctgagtcattagaaaagttctttctcattatgatgaaggggccatggtgaactcagcactattacagtctaaagagggaaaagaaacagacaagcaagctacacgtgtgagaagcagaattgctcctagctgaaacaataggaaaaagttcaaaatatagatagctgcctattattgaataattaatataagtatggctgttttacattatcaagcagcctgagtattttcaatattccaatacaatgtgatatggtcattgatttgttgttgttttaaactcttcatttctgcgaggaaaagaagacttc

SEQ ID NO: 503049 - DNA, 646 bp, Homo sapiens
ttgagtttgtacattccttggtgtcggctaaagccacaggaactttggcagtattttgaagttacacccgttccctattgcaatgcaggtctgtgaaataatgccttagctctgccaaaaaccacagtgattatcaacagtgtaaataatcaagtaaaagcacttttccacagcccagtgactagattgtcaagaatgcaaaaagtagtagcaaaaattgattgccatttgcaaagataatttctatctgaattatattactgtattgcaacagcgatgcataatgtgtgtccagcatctttgtaataaacattttaggtttaatttagaaatctctgagtcattagaaaagttctttctcattatgatgaaggggccatggtgaactcagcactattacagtctaaagagggaaaagaaacagacaagcaagctacacgtgtgaraagcagaattgctcctagctgaaacaataggaaaaagttcaaaatatagatagctgcctattattgaataattaatataagtatggctgttttacattatcaagcagcctgagtattttcaatattccaatacaatgtgatatggtcattgatttgttgttgttttaaactcttcatttctgcgaggaaaagaagacttc

SEQ ID NO: 503050 - DNA, 560 bp, Homo sapiens
acacacatatgcctaaaacagcattaagtaaaggtcctcatatycattatcacgtacatatgcaaaaaatagctttaagtgcacagtttttaaaaattattttagaaattgcaatggagtacaaaattatctttttatgtaaatccaagattagacgattatttctatctaggctgtgctacaaagatattctcccagaatcatttctggatggcagttccagaaacctggagattctggtaattagacctttgcttccaaatgacaggagttggggagccagggagatggagtttttgaggtgcccagttcagtatagcgagaatccgagtcctcctacaagtgaacaacaagaaaccaccacctgcctctaatctcctcctcaaccactagctgggtgctcgctaagggagggcaggtaggattctcagtcctgggttaaggaggagtcctagaaatcaggatggagacattcttggtcacagtggagcaaaggaagcaggtgaggtggttggcctgggccactgctcacgaggggagcagcctgccgctggctatga

SEQ ID NO: 503051 - DNA, 447 bp, Homo sapiens
accaaggccaaaaccaaacatccgcaatgaggaaaaataagcacaagtcttgagtgggtcccgggggtctccccagccaggttcactgccaatcactgaactccttttctttgccatcaggcaccccatccccattattcttgtccttcttctatcctgtgaggtacattctatttttcccatttcaccaatgaggaaaatgaggctcagagtaggtaaccccgttggggaaggtcacacagcatatacatagcagaggcaattctgaatccagttatgtatgtttaatgctgacacatagcttctgaagaaaagctacttccctgtctctaaggcctttttctagagcatttgtagaaaagagtagtgcttgaaaagatgccaaggaatggctggtgaggmttctggggctgtttcagtgtgtaggcaggggaggaacttaggatt

SEQ ID NO: 503052 - DNA, 530 bp, Homo sapiens
cagctggaatgagaaatgactaaatcatcttggatccttggatcagattactgaagggaaaggagctcatttatctaaaagccaaaccaaatacgtgtagacacctacgtagttaaatcacagcagctctaggtagttaaaacagcagaaagcccccacgcagatctgctgaaagtatctcccttcacctacccacctttggtagctgatattctattcttagagagtcatttgcttaactaytgtacccgttaaaatgcacataggtataacagtgctttacatttgcataggatgacagggtgcttgaaatttttttcctatgtccttctattcactcattcaaataaattctatgagcacctattgtgtgccagaactgagcaatatgctggtgctacaatggcaagcaagaaagatatgccatgttgtgctgtgagagcacaatgataggttaactaactagacttgggactacacgctaggcccttgactcctgatccagcgctgctttcatccaactacctgtc

SEQ ID NO: 503053 - DNA, 617 bp, Homo sapiens
ctggctggatgataaccctttctctctcagattacagtacttttattaactagctcttgttacatgcagaaatgtctccatgtacaagcgaagtttagggtactctatgatagcctccagttttctccttacaaatagggtccctgtaactattatatggggagatattctttactagttttgggaagaagawaacttctccctccctcttttccccataggttgtgcttttttccttcttgctgtcattctaacactttgtggcaaaggcagtgggggagtgggcagggggtgtctgcagaagtggcattgaagaacaacaggctgttttaaaagcagacactcattcttgaatgagaagtatcaggccaatgagcctgggatttaagaatagcaagcttcatttataactctctatgagctgatttagaattgtcctctgggaaagtaaagagacttgtcctgagaaatactttctgctgcatgaaggaagagggaggagaggttacaactgccagaggaggaggggacacaaggccaaaatgagtgtggcagaaactagtgtggccgctggcagtgtctcccttagattcaaggcctagcaaattctgtaatcc

SEQ ID NO: 503054 - DNA, 299 bp, Homo sapiens
ccacattctgaacccaagacatccctgcatattgctatgaatgtgagtcaattttccagygagctcctggattgactatggagcacagttcacgttttgactccttaaacagtaagtcagtgagggtgtacggaaactcttagaggaaagagaactgggattattacattcccaaaatatcttggaatttttaaacttcaaagttgtattgcagttccaagagtagcctaacctttacaaaggttactttgcaaatatatgcaagataaagaattccctggaagaatgtccaccaggat

SEQ ID NO: 503055 - DNA, 598 bp, Homo sapiens
tgttttcttccttcagcaaaccacaacttgaggctccagcaggttctctggggtgtagagttggcagtaaagtctgttgtcccgaaaggtggcgcggcaaagatgagcagcctctcagcatcacctgttggggagcctggagctcccttactttttcctttaaagagctaggaatttgaagctattaaagattaatccatcacagtcacaattcatccacagtttttaagttctgagcaaggactgaaggcaggagcggaaacaaagaggattgaaatgatagaaactgcactgggctgaggatgtggagaggggtctagagaggccaggcatttgctgggcatctactgtgcaccaagctcactgtggggcactttatacaacttctctcatttaatcttcagaataacctgagagagtttatttgcctcattggtgaaatgcagagctgaagggtcagagagttaggggacttgctctgagttacacaaccgggatttgaacccaggactttggatcccagactcttcttcccaggatagggtgcaatgatrggcatgctctttggagtcaagtcaccgttttggtgctcactagc

SEQ ID NO: 503056 - DNA, 587 bp, Homo sapiens
gcagcatcttcctctccatcyccgtcctcagaaagttcccacctctgttgggttactaattccttctcagttttcaagactcaggtatcttctctaggaatgtttcttgaccccttcaacttccaagtctagagtaggttctcttcccggcttccttagtaccttgggtttgcttccacagccctttcttgcctctctatctggagggtaggaactgttattatgcatctgtgtccacagtgctgtccacggggcctggcacaccataggccttctgtgaatgtcatgaaagaggaagactcccagataaaacatgtttgaggtctagaagatgaaaaagggcatacacagggtaaattaacaatttctgaatttccttttcaaattctgatatatttaaagttttcaagaagtatataagaaaggataaagcagggactcaggatacaaagaggttgaagatacaaatggattcaagaaagacttagaaaaattgatgaatgtcagaagcataaaacaacattggaaagaaactgagatgtttggaggaaattctggaacctcagggagatgccagtgaatttggc

SEQ ID NO: 503057 - DNA, 582 bp, Homo sapiens
gcagtgcactccagagacaggaagtggaccccactcccccaacayttggaacagccccattctttgcctgctttctcctgccaactttaaaatgaataaaacagtcactggaatggcacatggggcctggtagtgcaggcagcttgcaggctgcttatggccacccagaaaaagggtctggagatggagtcttcattctcataatcctgacctacctcacccagggcctattaatgactgaatctgggggccaggcacagagagcagttctgccccagtctctcctattcctccttgctgacttcctccttctcagcaaaatcaggagccctgtactcctaatccttcacctgagaggctctgtcattccctctcagtgtcccctaggattcgaataatgggccccacctcaactctacaccatcatctgccccgtccccccaggatggtgcgctaagcactaacttacttatacctgtccagatggaaagccaatgtctcatgaaatcacttgcctcacaagtcaataatgcttattgaacatccattaaatactcggctctgggaatccaaaggtaaaat

SEQ ID NO: 503058 - DNA, 582 bp, Homo sapiens
gcagtgcactccagagacaggaagtggaccccactcccccaacatttggaacagccccattctttgcctgctttctcctgccaactttaaaatgaataaaacagtcactggaatggcacatggggcctggtagtgcaggcagcttgcaggctgcttatggccacccagaaaaagggtctggagatggagtcttcattctcataatcctgacctacctcacccagggcctattaatgactgaatctgggggccaggcacagagagcagttctgccccagtctctcctattcctccttgctgacttcctccttctcagcaaaatcaggagccctgtactcctaatccttcacctgagaggctctgtcattccctctcagtgtccccyaggattcgaataatgggccccacctcaactctacaccatcatctgccccgtccccccaggatggtgcgctaagcactaacttacttatacctgtccagatggaaagccaatgtctcatgaaatcacttgcctcacaagtcaataatgcttattgaacatccattaaatactcggctctgggaatccaaaggtaaaat

SEQ ID NO: 503059 - DNA, 582 bp, Homo sapiens
gcagtgcactccagagacaggaagtggaccccactcccccaacatttggaacagccccattctttgcctgctttctcctgccaactttaaaatgaataaaacagtcactggaatggcacatggggcctggtagtgcaggcagcttgcaggctgcttatggccacccagaaaaagggtctggagatggagtcttcattctcataatcctgacctacctcacccagggcctattaatgactgaatctgggggccaggcacagagagcagttctgccccagtctctcctattcctccttgctgacttcctccttctcagcaaaatcaggagccctgtactcctaatccttcacctgagaggctctgtcattccctctcagtgtcccctaggattcgaataatgggccccacctcaactctacaccatcatctgccccgtscccccaggatggtgcgctaagcactaacttacttatacctgtccagatggaaagccaatgtctcatgaaatcacttgcctcacaagtcaataatgcttattgaacatccattaaatactcggctctgggaatccaaaggtaaaat

SEQ ID NO: 503060 - DNA, 503 bp, Homo sapiens
tgcataaatacataaatagatgagtaagtgtgcaagtacataatacaaagcttagcctgtaaggtaccaggacttggtgtttcaggaagtacctctatgtctctctaccctttgggtgatcttccactcaaagatcctttgaatatgtagaacctttggggtcttgctcttacactggctatctttactgggaatcactcattggagtgggtgtccagcagccttgcttataccmcatgaactggtcattttggccacatttttatggaacagagatggacatttgacccaataagttttcattcgatttttacaactcggagtttgaaattgaggctaagagagtctacctctttgcaggtcagttgctagaacagtaacacataaactgaggagctatgacaaaccatatgccatcatgtggaccacagaagcaggtctgagaggaaaacaaagaggctttcagaaagagaaaatattcccttcctagttcaaggtcctag

SEQ ID NO: 503061 - DNA, 479 bp, Homo sapiens
ctatattatgttaaagttctgcctagaaccaaaagactatcctgcccaaactagaggcctaccagcaaactgccttcagactttacctgcaccatcagctctcctaggtctccaggccaccggcctgtagaaaggaactacaccaccaacttttakgcgtctccagcctatcagattttggactcaccagcctccgtaattgcatgagctttttataataaaacctttttttattgcatacacacacacacacaaacacatatcctatgtgttttgtttttgtggagaaccctgaataacacagtcaaaaaatcagaagctactctagatatttcaagcaggaagagatttaatataaagagttagaaatttacacaactgctctaaaagtttgcagtttcaaaggtcaaggagactgctgctggctctcagaaaatctagaaatacaagaatcacagggaagtcactgctaatgatct

SEQ ID NO: 503062 - DNA, 513 bp, Homo sapiens
aagacaggtttaaaggcagtaatgcaaaatagatgcatatatgattataaccaccttttccaatatatagacacatagacagatctacatacataaattctgtcttcctcttcctctctctcgtttcacacacacacacaaacacacacacaggaaatgtagaagatactttccaatggctcagcctgagtatcagagtgtctcttgcttgcttgcttgcttgcttgcttgcttgcttttttcttcttttcttcctttcttcctttctttcttactttcttttcttycttcctttctttctttctttctttctttctttctttctttctttctttctttctttctttcatctctctctctctctctttctttcttttttttttttttttgagacaagttcttactctgtcaccctggctggagtgcagtggcctgatcatagctcatggcagcctcaaactcctgggctcaagtgatcctcccaccacagcctcccaagtagctaggactgca

SEQ ID NO: 503063 - DNA, 486 bp, Homo sapiens
tttaaaggcagtaatgcaaaatagatgcatatatgattataaccaccttttccaatatatagacacatagacagatctacatacataaattctgtcttcctcttcctctctctcgtttcacacacacacacaaacacacacacaggaaatgtagaagatactttccaatggctcagcctgagtatcagagtgtctcttgcttgcttgcttgcttgcttgcttgcttgcttttttcttcttttcttcctttcttcctttctttcttactttcttttcttccttyctttctttctttctttctttctttctttctttctttctttctttctttctttctttcatctctctctctctctctttctttcttttttttttttttttgagacaagttcttactctgtcaccctggctggagtgcagtggcctgatcatagctcatggcagcctcaaactcctgggctcaagtgatcctcccaccacagcctc

SEQ ID NO: 503064 - DNA, 497 bp, Homo sapiens
ttagaataatgttccactgctacttccctagcccagaatggcttgtggtccttcttcccacatctctgcagaccaagagcaacatcttctcccactttccaccaacatgatcctctagggctcattgctgttaattaatckcaggaaatcttgcacattatctaaatgtctgtgagcagtatcttcagtttccactaggttgggggcatgtaatgccatcctcttactgatacttgggagcacctcaacagggagactttaactgcccaaatgtacaggaaaaaaaaatagtccctctttggtcttttaacactaatatgtcctaatatcaggctaggtgtcaggtatcaattcatatgcattctcccaaggccagagggctgcctagttgatattccagaagctgtttttcctgatgcccgttactattgttcttccattattgctgcctatgcagccacccccgctctctaagtgactagagactttgctctcag

SEQ ID NO: 503065 - DNA, 531 bp, Homo sapiens
taggatgcatgttcaggcagcctggctctggagtctaaatatctaactactttactatrctgcctctcattccattgagcaagctgtgtctcactctccaagaccctcaccctaccctcaaccccttgctaacacagaatagtggttaaggataaggactatgtagtcagccaagttggtgctggaattgtagctagtaactgatggctgtgtgaccttgagcaggtgctctctcctctctgggcctcacatcccccaaaatagggatgaaactgatagcacttgcttcataggattggcatgaggagtaaatgaagtgatgtatattgagtcctcagcacagggctggcatgcagtaggtgctcaatacacatatttggttatagctcagcagtggggtctccattcgttcctctctcccaactgtactgggggccctaaaacccaggggtaagggtgccctggcttctggggagagctgagatgtgaagctgagagggcctagacagaggaggaaagcagaaggactgc

SEQ ID NO: 503066 - DNA, 531 bp, Homo sapiens
taggatgcatgttcaggcagcctggctctggagtctaaatatctaactactttactatactgcctctcattccattgagcaagctgtgtctcactctccaagaccctcaccctaccctcaaccccttgctaacayagaatagtggttaaggataaggactatgtagtcagccaagttggtgctggaattgtagctagtaactgatggctgtgtgaccttgagcaggtgctctctcctctctgggcctcacatcccccaaaatagggatgaaactgatagcacttgcttcataggattggcatgaggagtaaatgaagtgatgtatattgagtcctcagcacagggctggcatgcagtaggtgctcaatacacatatttggttatagctcagcagtggggtctccattcgttcctctctcccaactgtactgggggccctaaaacccaggggtaagggtgccctggcttctggggagagctgagatgtgaagctgagagggcctagacagaggaggaaagcagaaggactgc

SEQ ID NO: 503067 - DNA, 282 bp, Homo sapiens
atttccttctggatagtatgtctcactaatctaggtttagtgtgtctccttagtggagyaatggcattgtcagtcattgacactttagtatgaattatgtcctgtgactccaagtcctatactctttacttgatgcccgtcatgactccccttgtaatataccaccatgttttcttttgttaaccatcctaaagtggccgaaaaagaagcagttggctaagtagaggatttcatatatgtctccacctatacttccttgcttccttgacttctctggccaaa

SEQ ID NO: 503068 - DNA, 565 bp, Homo sapiens
caggaagggcaaaagggaaagcagaaaaaaaatttgaagaaataacggctgcaaatttcataatataatgaaaaccataaactcacagatctaagaaactcaaaaagccccaaacaaaagaaacatacataaaaccacatcaaggcacatcataaccaaagtgctaaaaatcagtggtaaaaagaaaaacttcaagtgtccagaaggaaaaggccgtattattcagagaaacaaaaataaaaatgagtccgygcacagtggcttacacctgcaatcccagcactttgggaggctgaggtgggtggatcatgaggtcaggagttccagaccagcctgaccaacatgtgaaaccccgtctctaataaaaatacaaaaattagctgggtgtggtggcacgtgcctgtaatcccagctactcaggaggctgaggcaggacaatcacttgaaaccgggaggcggaggttgcagtgagccaagatcatgccactgcactccagcctgggcaacacagctagactccatctcaaaaaaattaattaattaattaattaaaaaatgaaattag

SEQ ID NO: 503069 - DNA, 624 bp, Homo sapiens
gagcagccccgcaccacagtgatgatctggggaggaaacgacccggatgcctgggtctgaatccccctcttccactttctagccccatgacctcagatatgccacttctaattgctctgcctcggttttctcatctgcaaaatgggaccagcagagttcccgcttcccaaggcacgatgaggatgatgtcataacacactyggaagcgttgatggcaataccaagcaccaaataagtgctcagtgatgagtagcggttattattgttgaaatgcaatataaatggagggagagagcacaataaggagaggcactggaatgtgacatttgtggggaggagtttggggacatgtcagtgtcaggcacacagtaatacaagctgataatcaaggcaagcaaataatcaaaaggctaacaagagccgaggctgactaagcatttgacaggtgctgccttaagccttgataggaagcagctcactgcctcctcataggtaccccaggaagctggtccagagaagatttccatttcagagaggagcaactggggctggggagtccgagtcactagacccaggccacggggctactgggggtagagccgacaccattccactcccccaggg

SEQ ID NO: 503070 - DNA, 624 bp, Homo sapiens
gagcagccccgcaccacagtgatgatctggggaggaaacgacccggatgcctgggtctgaatccccctcttccactttctagccccatgacctcagatatgccacttctaattgctctgcctcggttttctcatctgcaaaatgggaccagcagagttcccgcttcccaaggcacgatgaggatgatgtcataacacacttggaagcgttgatggcaataccaagcaccaaataagtgctcagtgatgagtagcggttattattgttgaaatgcaatataaatggarggagagagcacaataaggagaggcactggaatgtgacatttgtggggaggagtttggggacatgtcagtgtcaggcacacagtaatacaagctgataatcaaggcaagcaaataatcaaaaggctaacaagagccgaggctgactaagcatttgacaggtgctgccttaagccttgataggaagcagctcactgcctcctcataggtaccccaggaagctggtccagagaagatttccatttcagagaggagcaactggggctggggagtccgagtcactagacccaggccacggggctactgggggtagagccgacaccattccactcccccaggg

SEQ ID NO: 503071 - DNA, 654 bp, Homo sapiens
taaagggtgacgctttggcagaggctggctctggaaaacraggacgcacatttgtgcccccactttcctctgtgcggcgtccttctcttcaaggcttcccccagtttggcaaacacggccccagcaatgtcaagctgagagcaccttttaagaaagacccttccttccatgtgttttggcaaaagtcccatgaagcagtatgagtggcccggtttgggtcatgggctcacccctaaaccagccgctctggatggattagttccaattggacaggccatggtcttggactctttgggtgagtgtgggagggtgtgggagggaagattcattgaacctcatctctactacatggtacagctccctggaagaaagaggggctccattaccagaaggaaacaaggaattttatggggaaccacattatcactaccacaatctaccatgctatacataagaaatgcaccttggtcttaatgcacggtcttgagggggtgcaagctgaatccaattcccagcgtctgggtcagtgtccctcatgggggagctgcctcacttaagattcctttggataggtaaggtagaacaccaagctgcgcgggattatgaaaagaaagggagaaattcactggctcgcagaattgaaaagctgagatc

SEQ ID NO: 503072 - DNA, 562 bp, Homo sapiens
gtgttcaaagggaaagacagagaatatttttcactgctgtagaggctctgtgcctgccttttaaacttgaaagatcagtgggttttctgtggaacctgaacacagtattggaaaaagtgtttctgtaagaaaaaaactcattttctttaaagagccctactcattagcttacaggatttaactttctttggggggagggacaaaaaacataaaaatagatcactttattgagcatttgctctgcgccaagcagccttccaagtacttcacacaaatggttttatttaatctcgtaccatctctcctagggctgttgtgaggagtagaygaattaataaacacagagaacttaaagcaatcgagcatgtaatacttgttcaataagcatgagctatttgtgagtgacagtccagtgagataggtaccattatcatgcccattttacagatgaagaaacagaggcaggaaagttctggtatcttgctcaaggtgaagcaatgtgtaagtggttgagtcaaactaaaaaccagctcatagagaaggcaagatatagttcagtcct

SEQ ID NO: 503073 - DNA, 558 bp, Homo sapiens
gcgtaactcagggagctggctcaatcttcttctctgtactgggttaaatagtgtgcccccaaactatgtccccctgtaacctcagaatgtgatcttatttggaaacaatctttgcaaacatgttaaagcaagctgaactcatgctggattagggtctgtcctaaatccaaatgactggcgtctttatacgaggcaaggacacacagagacacacagaggagaagtccacgtggcaacgraggcagagcctggagtgatgcctgtgcgagccacagaacctcgaggattgccagggaccccagaagccaggcccactgggaggagccaaccctgccacactggtttcagacttccagcttccagaatgctgtgagaacaaattcctgttgttctaagccacccagtttgtggtgttttgttatagcagccccagggcactgctgaagcctccatcccatgtcctgccatagtcccaggaggtttaaacatccatacagactccctgccaacagccacagctcagaacttgaccctctttcactccactggttgacatct

SEQ ID NO: 503074 - DNA, 529 bp, Homo sapiens
ggcgctccatgtccatggagctgatggcggcgcacgagcccatcacctgcaggaccagccacaggcgggggcccgggcgctgcatgctggcgttggacgtgtcctcgcggggagctccgcgcccctcagcgccgccgctcccgggcacgggctgctgctggccccggctctccacccctgctcgggcccccgcccatgcccgcccggcctggcccgagcgctgygcacagcgcccccggctcggctctccgcgcccggcgtccgccgagttgggggccgcggcggagagcagcaaagtttgcaaacaataccgggaagcgagggaagcccccggagctcccggcgcagcggcccggcgcgagctccaactcacggccgcggcaaacttcggcctcttcttggagcgcccaggtggcgcgtctggagcgggctggcggcgcgggcacaccgaggccggcccagctcgcggcgcccccacagcccgggcggctcctccctccctgcgccggcctcggccgggaccagccgg

SEQ ID NO: 503075 - DNA, 536 bp, Homo sapiens
tgtttttgcaaatctgcaattgaaatgcccttgttccttgttaatgcctattgaatctatatgaacctgtacgtgtgtttctcactgtgataatataatcattgcatgttttatctttcccactagaaagcttctagaaagctagkactatcttttttgtctgtgtaatttttgcatcacaagctatatttaaatgtgggtgcagtgagtggctgttttctgccacatggagaaacatggtctgcagtgagagagaagaatgaagccatgatgaaagcaaaatcaagaaagagtcccgattgtgttccagtacctggttcttctggtcttcatgttcaggtccacctctgcccttttcatgtcttgattgttgaattcttctgtgagatactccaaatatcctaataaattctcatgtttgcttcatctggctcaagttgtgtttgttacaacccaaatatttctaacagaggaaatcaggctatgtcgtaacttgttctctggaagtggttactgagaagtttgggtgcaagatg

SEQ ID NO: 503076 - DNA, 526 bp, Homo sapiens
tcctgggtactgtaagatatccagcagcgtccctgtcttctacccactaggtgccatagcacctctcccccattgtgacaaaaatatctccagacattgcagaatgtcccccaggaggcaaaatcgcctttggttgagaaccactgagctagaaaaaatagcaaatgagaaggcgctcagttggagacctgccgatgttttccaggaacaagggggctggtttgcctggaatagagtgaacaagataaatgcatgagagatgaagtcaggaagaccatggaggccacaagcatgaggyccgtgggccattctgacactgaggtctactccacatgaggtaagcagccactgggggctctcagtctatgtcagggtgcaagcagtgctggacatcactgcctctccaggtctcgtctctactcttccctgccctcctccacaccattaccaattgcacccaagggctcctatggcctttggcttcctgtcagacttggcctgtggtagccagagagaggctctctct

SEQ ID NO: 503077 - DNA, 613 bp, Homo sapiens
ggctccccaggcttcccagggttgagtccagctatggggacaaggtttatgtctccattttgcctggatgcatctaatttgagagttgtctcaaagaagcagamagatccacacaacaaaagaacacgcttgggttttaaaataaactttgttaaataaaaaggctttaaacaaactttgtagctggaggccttctgccatatttacaggcaccagcaacaccgtggtagctgtttccaagatttgcagcctcccaaactcctgcagaggctggtgacaggactggcagcttatctgcgatctgggggagggcagagtgcttccattttgtgcctgtggagttctaattccaaacaccaccaccagcagcctaaaaagacaaaagcagaaattagagtggtctcagataagcaggtagcttgggaagagagattggaagggaaggtttgaggaaataatctaacagtctaaagtccgttaaagtaaatatagaccatgcattttttttttgttttttttttcttaaattatataaagtaagtcatggagcaggagggaaggctaggtaatataataatgacataatcagtgttgaggccagagaaatgtggac

SEQ ID NO: 503078 - DNA, 634 bp, Homo sapiens
ggaggaatattttgatcactgggctggtgctcaaatttccattggaaatttctaatggagacaagtctccattgcataagagacttgactccaactggcataagaagaaaaggagatttttgtggttcatacagttggaaactccatggatcatcttcatattatgtatggttcaatctacgagcacggaaaaaatagcatcagagtctgatttcccccaaatgctcctcattgtcacaagatggctgctgcaggggagaactctacatgttctccccttcaggacaaagaaagaacctgcctcactcctaaaagctcagcacaagtctcactgcacctgtttagctctcattgggccatgcaacatgactaaacccaccatggctaaggcaatgggatgctttgatgggctgacacaataaccacctctaatgcaagggatgaagaaacccaytcatgtgacctgatgatggttggtgtgaacctgccagaaagagactgacacactattttgccagaaatacaggcaatgaatattgaacagaaaaaaatacagtggtccacttagcaatgctccctcactcatagttcatattaatatttcttgcattgaatgcaggataaattaacaaat

SEQ ID NO: 503079 - DNA, 657 bp, Homo sapiens
gctttaaacttttattttattcattgtaagataactgatttcaaatattgaacttccttcagagaaacaataaattactttctgaaatataaattatgccaataatggatgagctggatataaatggaattccatcgtccttggaatgtattcgtgtgtgcatttttctacaartggaagaaaagagaattacagtggtgaaataaaacagtagcaccggtatattattatatgttctctaaagatatacagccagtgtgttgtgtgaattaaatgaaccacagaggctgaatatcctcaggaagatgaacctcagactttaaaataaaaagggaaacatgagcctcatcttacttataaaataagtgagcgctaccacctagaacattccaggcagttctgctctgagttcctcaagaaggtattgcagagctagacaaggtcctagtaagatctagtgattggtagagttagtagcttccgcaaaacagtataaaggggtttccctttcatcttgttttctgaaaaagtacagtgatgatgcaaaaagaagatgtcctttaagaaaggtacctgcactttgtcctattcactccatggatctaaacagaactcatcagtagaatgcactgtttctctacttgttttgcaggtaac

SEQ ID NO: 503080 - DNA, 587 bp, Homo sapiens
gtaaaagggggagttaaaatggattttgagttagctaaatggccctgggaagattaaataaaagcacttgtgaaatacccagatgctcaataattattgatgattgttgttgtgttggcctagcaacagttcatgttggatattccagaaatgcctctcctcattttagtagatattcataatattgtatgagttgtatatacttccacagaatcatagcatttttggcctgatcagtatttcagcatcatgttagtttaatgttttcttgatgagatcttgatgaacttcttaatgtcttaagtaacttgtctctaaatattactactactgctgggatctctttttatccctttaaaatttttattaaagtttattttttcccattacagtgggagatggtgccasgaaggtagttattgcttgacaactgttagtaaatggtagtagtgatacatccactcttacaattttgtgtgttttcttctaggcaagccaggtactagacatatcaattattgctgtcatacccttctcttctctggaattctcctgcccacccacaggtcttttgaagggtgtgcttt

SEQ ID NO: 503081 - DNA, 613 bp, Homo sapiens
ccattatccaattatctcccaccaggtccctcccacaacacatgggaataatgagagctamaattcaagatgagatttgggtggggacacagccaaaccgtagcaacataaaacaagcatgggagaaaagatgtttccaaaggatcgtccatatttagttagccaagactataaccacagctgaaatctaaggtttctgatggagaagaagaccttagtaatttggtttttgttttgtttcatagaaagaacactgaccataagatctgccctcttaacacatttttaagagcgtgatacaggattgttaacaataaggaacatggttgtttgtttttctcttaattgcttttttattacgaagctaaatgatttttaagagcgaaatttgaatataaagaaaataatagggcttttgacttttctactacaagaaggtggcttcctcaaggcatatgattgcaatccaagcgatgctatttccagatggtaaacaaccctcttttttacaatcatgttgcctacaagtctaggcagacaacccttggtacttacatacaccaggtactagagaaaagctggaaaatgcagccagtggtctcaaggctttcaa

SEQ ID NO: 503082 - DNA, 507 bp, Homo sapiens
cctgcatttgaatgtaggtgtgtcctggcaggcctgagaaagcatcagagcccagaatgaattcatttccttaaggagttttaggagaaacttaagcaatgaagatgagagttttgcattggtgcccagaaggtttggcgaaagcaacaggatgcccttcccagaggtggctgtaggggcctgtgtctgggcactagaggatggaggcagtgtgagagccctatgggcactgctgaggggtgcaaagtggctctccttttgccagttaagaaggcggctgtggggtgcatgccccgtcagccctgtcataaccggcacgaatgatgttgtccgacaggcatggggatctacacaggaatgaaaacaactccaatttcggctactttctatgtgctgaccgttgyactgatggctttaaatattttattctaaagctgtttctcaccacgaccctatagatgttattgtctccattttatggcaacggaatcccaaaagggcagagag

SEQ ID NO: 503083 - DNA, 481 bp, Homo sapiens
acacaggcataggatgcctcttgggttagatgaccatagaagacaagagatgtatctgtgcacaaaagctgatggtctcaatgcacaagagtcacccccacacaccaggtagttacacagtaaacttgggcagaaggtgaaaaaatgccaaatgaatgagttactaaagttaccaggagggagagatcaatatggtttggggtacagaagaaagacytattagaggaggtggccatgaatctagctttggggaatggagaggtcttaggaccagaaggaaatcctttgatattcttccactgagagatggagtcttcctctcctacccttgaatctgagccagcttgtgattgggtccacaaagctggtgtagctcccacctcatttgctggaacattcatggtcggagcccttggctgctgtgtaagatattcaactgcctcataactggagctttcacatgaagatgctctgatagaca

SEQ ID NO: 503084 - DNA, 592 bp, Homo sapiens
acttaacttgtctcttggctgaaagtattggtgggttagaggctataaatgcagactgagtctgcactcattgggcagagattaaccagacagctagagatggggatggcgggctggtctcaaagacaaagccaatacttgatgaaaagtgataggaagctgaagttggcctcaggacacacatgcccacttgactgtcttccacagtagttcatgctcctcaatgctcaaatacaagcaagtctccatggaaggcatcaggctttccctcatcttgctaccttttacataygacagcttctctacccagaacaaagctctctcccttttcctgcagcctgactccaactcatccaatgttcgggggacggagactgctggctattcccaagatgtatgcttcctttcttctgttagcagaaggagcctaaagtgtagctgggaacatggctattccgctcaagaatatttatttccacctcctttgcaattagcagtggccatatgctgaattaaggcgaacggtattcaggagcaaggcctgtgggcaacatctgggtcttgtcattagagagaagggctgtggtgtgcc

SEQ ID NO: 503085 - DNA, 592 bp, Homo sapiens
acttaacttgtctcttggctgaaagtattggtgggttagaggctataaatgcagactgagtctgcactcattgggcagagattaaccagacagctagagatggggatggcgggctggtctcaaagacaaagccaatacttgatgaaaagtgataggaagctgaagttggcctcaggacacacatgcccacttgactgtcttccacagtagttcatgctcctcaatgctcaaatacaagcaagtctccatggaaggcatcaggctttccctcatcttgctaccttttacatacgacagcttctctacccagaacaaagctctctcccttttcctgcagcctgactccaactcatccaatgttcgggggacrgagactgctggctattcccaagatgtatgcttcctttcttctgttagcagaaggagcctaaagtgtagctgggaacatggctattccgctcaagaatatttatttccacctcctttgcaattagcagtggccatatgctgaattaaggcgaacggtattcaggagcaaggcctgtgggcaacatctgggtcttgtcattagagagaagggctgtggtgtgcc

SEQ ID NO: 503086 - DNA, 592 bp, Homo sapiens
acttaacttgtctcttggctgaaagtattggtgggttagaggctataaatgcagactgagtctgcactcattgggcagagattaaccagacagctagagatggggatggcgggctggtctcaaagacaaagccaatacttgatgaaaagtgataggaagctgaagttggcctcaggacacacatgcccacttgactgtcttccacagtagttcatgctcctcaatgctcaaatacaagcaagtctccatggaaggcatcaggctttccctcatcttgctaccttttacatacgacagcttctctacccagaacaaagctctctcccttttcctgcagcctgactccaactcatccaatgttcgggggacggagactgctggctattcccaagatgtatgcttcctttcttctgttagcagaaggagcctaaagtgtagctgggaacatggctattccgctcaagartatttatttccacctcctttgcaattagcagtggccatatgctgaattaaggcgaacggtattcaggagcaaggcctgtgggcaacatctgggtcttgtcattagagagaagggctgtggtgtgcc

SEQ ID NO: 503087 - DNA, 592 bp, Homo sapiens
acttaacttgtctcttggctgaaagtattggtgggttagaggctataaatgcagactgagtctgcactcattgggcagagattaaccagacagctagagatggggatggcgggctggtctcaaagacaaagccaatacttgatgaaaagtgataggaagctgaagttggcctcaggacacacatgcccacttgactgtcttccacagtagttcatgctcctcaatgctcaaatacaagcaagtctccatggaaggcatcaggctttccctcatcttgctaccttttacatacgacagcttctctacccagaacaaagctctctcccttttcctgcagcctgactccaactcatccaatgttcgggggacggagactgctggctattcccaagatgtatgcttcctttcttctgttagcagaaggagcctaaagtgtagctgggaacatggctattccgctcaagaatatttatttccacctcctttgcaattagcagtggccatatgctgarttaaggcgaacggtattcaggagcaaggcctgtgggcaacatctgggtcttgtcattagagagaagggctgtggtgtgcc

SEQ ID NO: 503088 - DNA, 552 bp, Homo sapiens
acattacagtgggtagctagtcgggcatgagcaggcaggagagggctccccgccacacagacacacatacaccaggagtgttgggggccatcaggtgrtggtcaggaggttgttaactgtctctcgaaagtaataactgatcacagccaacaccagggaaaggcaggctcctaatagatagaaaacaggtgaaactcatcagcagtttcccaataagatcctgggagtgggggaagagacaccagacctcgggagtaaccaacgaataaaacccaagtcaaacagtcaagctgcacactggtcttttgagtcacctgcttggccctcttccaagtgtactttcctttccttcttgcactaaagtgttttgatcaacttccactcctgctctaaaacttgcctctctctctcccatcttgtgcccctcctcaaattcttttttctggggaggcaagacttgaggttgctgcagactcagatcccttccacggcgaacagaagcatcacaaggacggctttctcctatgtgaaggctgcagaaggagatttcag

SEQ ID NO: 503089 - DNA, 552 bp, Homo sapiens
acattacagtgggtagctagtcgggcatgagcaggcaggagagggctccccgccacacagacacacatacaccaggagtgttgggggccatcaggtgatggtcaggaggttgttaactgtctctcgaaagtaataactgatcacagccaacaccagggaaaggcaggctcctaatagatagaaaacaggtgaaactcatcagcagtttcccaataagatcctgggagtgggggaagagacaccagaccycgggagtaaccaacgaataaaacccaagtcaaacagtcaagctgcacactggtcttttgagtcacctgcttggccctcttccaagtgtactttcctttccttcttgcactaaagtgttttgatcaacttccactcctgctctaaaacttgcctctctctctcccatcttgtgcccctcctcaaattcttttttctggggaggcaagacttgaggttgctgcagactcagatcccttccacggcgaacagaagcatcacaaggacggctttctcctatgtgaaggctgcagaaggagatttcag

SEQ ID NO: 503090 - DNA, 552 bp, Homo sapiens
acattacagtgggtagctagtcgggcatgagcaggcaggagagggctccccgccacacagacacacatacaccaggagtgttgggggccatcaggtgatggtcaggaggttgttaactgtctctcgaaagtaataactgatcacagccaacaccagggaaaggcaggctcctaatagatagaaaacaggtgaaactcatcagcagtttcccaataagatcctgggagtgggggaagagacaccagacctcgggagtarccaacgaataaaacccaagtcaaacagtcaagctgcacactggtcttttgagtcacctgcttggccctcttccaagtgtactttcctttccttcttgcactaaagtgttttgatcaacttccactcctgctctaaaacttgcctctctctctcccatcttgtgcccctcctcaaattcttttttctggggaggcaagacttgaggttgctgcagactcagatcccttccacggcgaacagaagcatcacaaggacggctttctcctatgtgaaggctgcagaaggagatttcag

SEQ ID NO: 503091 - DNA, 487 bp, Homo sapiens
ctcccacagtaagggttgtttttgtgtagtatccccaccctagaataaacccagggtagccctggaccatccccagctcaatcaaacctttgtcagcagtgaccaaaagaaagcccgggttttttttccaggggtgatgtttgagaatgatgtttgaaactcaccatcctgggcattttcccaccttgctytggaaaaatccagccatcctatcatcatcctatcatcattttagtcttaggatcaatagcaacggactccacatgcagaggatatgggcctttgggggaacaaaggcagtcagtagactattgtcatggtcaagtaagagctactgtgggcccacataagggcagtggagtagggatggagggatggtgacagatttgacaaatgcttatgaggtaaagttggtcagccctggtgactcattggatatggggggtttctaggaaactctcaggcttctgccttaggtgactagata

SEQ ID NO: 503092 - DNA, 636 bp, Homo sapiens
gctgggggcatggaaaggcctggcttgcgcccgctgcagggagcccaacaggcagaagcgcctcagtcctagatggggagggagcttggactctgcaggggatgagggtcttctcaaaaacccaatgtggccggcagcccctgggcctctgagaccacaaatgccttgaccttgggggcaggagcttgaagcagagtacctcagacccacaacagcaaggtcaatacctcaggcatccctcattccccactccctkgatggggccctgcttccctccatccttttccaggctggctgtcctcctttcctttctaaatactactccagagaattcatcagaatgcatcagcctctcccagcatgactgcctccctgcaaggcctacaatggccccaacccagtgcattcatcagcctccgtgaccctctgcgtaccaggtgctcagtaactttgcctggttgagtgaatgactccaggggcctccagggcctgtcatgtctacagagctaggacctggggaagcctccactagtttgcaacagcccagaagagttagatagagaagcctcctttatgtgaggagaggaaggtgagcactgagggagctgggcccctaaggcaaaccactgagtcttt

SEQ ID NO: 503093 - DNA, 520 bp, Homo sapiens
aaaagctgttctgcagtgagaaagaacacaacagatgatctgaaaaaaagtagaaatagaagagaatgaaagtgtcttcatgtccttttaggtcctgatctcagattttccagggatctggcttcctctcttaagttttctgagaaatacttttccacctctacaaatctatacccttccccctttttaaaatgcttccactaatttgatttggtgtgtcacactggcaatcaaagagtcccaaataatacaataacttgattccagactcaatattcttttttaaaaaccttttaagttcaggggtacatgtgcaggtttgttatatagacaagcatgtgtcatgtggtttgttgtatacattatttttatcacccaggtacgcagcctagtaccccttatttacttttcctgatcctctccctcctgtcaccctccaccctctggtagacascaatatctgttgttcccctctgtgtgtccatgtattctcatcatttaactcccaattataagtgag

SEQ ID NO: 503094 - DNA, 594 bp, Homo sapiens
gagtggacagggaagagaaactctcatggaagttaggcaacaggtagctaaaccagcaaagagacaaagtaattacatattgtgatgagggctatggaggaaacgaactgaggtgggatggtcaggcgagtagaccagctcctttagataaggcccccaaggaagatctggcctgtygttctcctgcttaaatgttcccatggcttctgccattgtgcttagaataaaatccacattcctttccacagcctctaagatcctgtaggatcaggccccagcctgcctctctgacaacatctccccccagtctcctcctaaatcatggtgctcttcaaacacaccagacttgttctggcctcaggcctttgcacttactacttttctagctggaatgccctttttctgatgtttatatggcaggcttcccttcaatagcagctctcagttccgatatcagctcctgcaagaaggttttgctgaccatcctatttaaagtagcacctcataccccacaagtcactatcccattgttgtgttttattttcttcagagcattgaccactctctaaaatcattgtatttaattactttttt

SEQ ID NO: 503095 - DNA, 530 bp, Homo sapiens
aacagcttcctgcattctagatctacttactactactgcctttgctggcaatgtgaacttcaacaaattcagtattgcaacaccctcagtcaggctgagtcagctgatttgaaacatgcaaaaataaacattttaaaacatcaaaatattaaaaacattttaaaacataaattcttcaatcaatcartcaccagcacttaaaattgtaaacactagcatcactctatatgagtgtcttggggtaaagttgacaatagtgttgattaaaatatagatatgttatagctgggataaacttaactaactataaataattattcattatctttgatcattctatatagttccttattaagtttatatcagttaagtttttttaaaaattaattcaagtataattacataaacctcacaaatcttaaatggagagctcaactgattattacatttatatacacctatgtaagcatgaacccatacagatacagaacatttccaacatcccaggaagccctattaggtctcctccc

SEQ ID NO: 503096 - DNA, 530 bp, Homo sapiens
aacagcttcctgcattctagatctacttactactactgcctttgctggcaatgtgaacttcaacaaattcagtattgcaacaccctcagtcaggctgagtcagctgatttgaaacatgcaaaaataaacattttaaaacatcaaaatattaaaaacattttaaaacataaattcttcaatcaatcagtcaccagcacttaaaattgtaaacactagcrtcactctatatgagtgtcttggggtaaagttgacaatagtgttgattaaaatatagatatgttatagctgggataaacttaactaactataaataattattcattatctttgatcattctatatagttccttattaagtttatatcagttaagtttttttaaaaattaattcaagtataattacataaacctcacaaatcttaaatggagagctcaactgattattacatttatatacacctatgtaagcatgaacccatacagatacagaacatttccaacatcccaggaagccctattaggtctcctccc

SEQ ID NO: 503097 - DNA, 530 bp, Homo sapiens
aacagcttcctgcattctagatctacttactactactgcctttgctggcaatgtgaacttcaacaaattcagtattgcaacaccctcagtcaggctgagtcagctgatttgaaacatgcaaaaataaacattttaaaacatcaaaatattaaaaacattttaaaacataaattcttcaatcaatcagtcaccagcacttaaaattgtaaacactagcatcactctatatgagtgtcttggggtaaagttgacaatagtgttgattaaaatatagatatgttatagctgggataaacttaactaactataaataattattcattatctttgatcattctatatagttccttattaartttatatcagttaagtttttttaaaaattaattcaagtataattacataaacctcacaaatcttaaatggagagctcaactgattattacatttatatacacctatgtaagcatgaacccatacagatacagaacatttccaacatcccaggaagccctattaggtctcctccc

SEQ ID NO: 503098 - DNA, 616 bp, Homo sapiens
aaaaatacagatgaattgacagaaaaatataaggaaatacataccatagaaaacaatagtcataagaaagttggagtgggctgggcacagtggctcacacctataataccagcactttgggaggccaaggtgggaggattgcttgagcccaggagttcgagaccagcctaggcaacatgatgagacctcaactctatagcaaaaaatgtttttggaaagttggagtgcatatataaatattaaataaagctggcttcaggatgagaaatatcaacagagttcaattaaaaaaacttggtacagggataaaaaataaattcataaaaagagataataatctaaaacgtttatgtgcctaattatagagcttcaaatggataaaatagatcaaacctgtgaaatctaagaggaaacataaataaatttataattataaattsagatttctacatttctttctcggtaatgattaggggtatactgaaaaccttaaaaatacataaaatgaaagtaactcaaacaacttgaattagttgacagttttaggccattgcacacagaaattctatgataaatattttgttgaaaaagatataattcataaagataaactgta

SEQ ID NO: 503099 - DNA, 616 bp, Homo sapiens
aaaacaaaacaaaacaaaaaaccgagcatttatgcatgggaacattgatgtcartgatggctaacattttatcacaaagagtggaggccagcagacagtgaggatatatctttaaagtgctgaaagaaaataaatcagtcaatctggaatttcgtatcaagtgaaattatcccagaggtaacataaaggcatttttggaaaagcaaaaacaaacctaagagacttaattaccagcagactagcattaaagtaaatgacaaaggaagtactttatattgaagatagatggtaacatctgagttgttataaactcagagttgtggaaagaatgaaagagtatgataaatagtaaatataggtaaataaaaaagaatagatttttctgttaatttctttaaaatgcatataattttaaggtgaaaattataacactctagggtagagtatattgtatatgtatatgtaacacataataaatagcttaaagagtggggggaagaaaagaaaatgtttaatccaaaattcttacactatataaaattgtgtattactataggttttaatcactaccaaaaccacttgtaaaaatatcataaaatagacaatagctgaaaaa

SEQ ID NO: 503100 - DNA, 524 bp, Homo sapiens
tgcaaacgcagagaaaagatcacgtgaagacacagtsagaaggcggccatctgcaaaccaaggagagcagatgtggaagaacccaaagctgctggaaccttagtcagggacttctagtctccaaaactgtgagaaaatcattttctgttgtttaagccactcagtccaaggtattttgttaagggagcctcagcaaactaatacactcatgttaccagttagtacaatttctttttgatgttcaaaattgatgagggaactaagtctcagagaggttaaatgtgtttcccacggccacaccgctagaaagccatgggtctggaattaaaatccaggtccatctgactgcaaagccaatgggctctttgctgccattggctctatttcttttctagcgctaagtgaaaacacagcaacccccacctcccactaataataataacaataatagaccaagttctatatgcaatttcttaaaggtgatttcaaagaataacatttgagagctagatagacttagggaa

SEQ ID NO: 503101 - DNA, 524 bp, Homo sapiens
tgcaaacgcagagaaaagatcacgtgaagacacagtgagaaggcggccatctgcaaaccaaggagagcagatgtggaagaacccaaagctgctggaaccttagtcagggacttctagtctccaaaactgtgagaaaatcattttctgttgtttaagccactcagtccaaggtattttgttaagggagcctcagcaaactaatacactcatgttaccagttagtrcaatttctttttgatgttcaaaattgatgagggaactaagtctcagagaggttaaatgtgtttcccacggccacaccgctagaaagccatgggtctggaattaaaatccaggtccatctgactgcaaagccaatgggctctttgctgccattggctctatttcttttctagcgctaagtgaaaacacagcaacccccacctcccactaataataataacaataatagaccaagttctatatgcaatttcttaaaggtgatttcaaagaataacatttgagagctagatagacttagggaa

SEQ ID NO: 503102 - DNA, 477 bp, Homo sapiens
ctctgatttatggaactttaagtaggatgctttactctgaatgggtgcagagtaaagcaccctatataaagaagacagggctctctacccaccagtacccactagggctatggtttcaatttagaaggggcatgacaccagagtttcttatttgctctatagaagttgcaggagttctgtttctgtttggtgtgatcaagagaattgaaattcccttctatcatccacctccgacttakagtgaggaaactccactccaaacacagcaggcaatggatactagacacgtgactgtccctgccccagtttaatcatagggaagagtttccacaatgtaaaggcaagtcaagatgtcagagactatcaccttcccccagtgcccattggtagagcagggatgttactctgggagaggaagagcatcgtttttatcctcagcttctgttcagtggaaacagtaattttgcctgggtaaga

SEQ ID NO: 503103 - DNA, 617 bp, Homo sapiens
ctggcctggcaggcagggccggcctgtcgctccgagtgcagagcccgccaagcccacgcccaccgggaactctagctggcctgcaagtgccgcgcgcagccccagttccaggcagtgcctctccctccacacctccccgcaagccgagggagccggctccggcctcggccagcccagagaaggcctcccacagtgcagcggcgggctgaagggctcctcaagcgcggccagagtggacgccgggaggccgaggaggctccgagagcgagcaagggctgtagagggctgccagcacgctgtcacctctcaataggaagcgttcttttcctcaaagagcttacacaattgtgattacagagtttacactgtgagtacaaattttgcacaatataaaaattaccatagtgcacatcacattgaatgttatggaagtagttaccacagataaataaaaagagaaaaatcccatatcccaggctggggygttggtagacaaaatctttcctaattttttgtatgatagatgtcaaaagtgttcctagtaagcgtgtccagggtacctaccttctctttgggagcctggggaaggctacattattttatataaccatgcatga

SEQ ID NO: 503104 - DNA, 529 bp, Homo sapiens
tgaagtcgtgactcagggaggggtggtccagagctggtttagtttttagtgatttttagctacaagatttctgtcttgagaaaatagttcttgtttcaaattgggcattggtccttaccctcttataatcattcccatggttccacaaagttgaaaatcaacatggaacatatggcattcatatatcttatagtcccagaatcctatgatcaccttagttgcaatctcattctgacttattttcaaaacctctgattagctctgttctgcaccttccccattcttaatctgcattcccctgcaaggtagccatgtacaatcaacagagccccccaaatagaaagcaagaaatgacgagccagatacaaaatgtcctttaagatatagtttgcaaactcttccttgtttgctgcctactgtctgtttttaaataatgcacaaatcaacttcggtaccatggaaataatcaacacrgcatcaaaacctggagtttctggtagagcacaaatcaaaagctgtaggaatccaa

SEQ ID NO: 503105 - DNA, 644 bp, Homo sapiens
ttgtgtttgtaagtaataatcatgtcattaattaacatttatagggagctttttttgtgcctcactttatgtttcattatttcactaaatccatacaatagccaatgatgtttagagctattggtggctttcttaccttctcacagcaagagaaattctccttagtattgtttaattgcaaagtcaatgttattcaccatyccaacatgagggtgtagaaatttgtctacacagtttgcgttcacatctcttatttgaagaaataatttaaaaagaggaaaatctatcccctctacacctctggagtgtaaattttctgctctgtggagtcagaaggaaggaatcagtcagagaaacaatgaaaatgatgataactgtgtctgttctatggaagagaggaaaatgaattacttcatggcatcagggtgcatttggaaagtaagggctacaagaattccagaaagaaattttatttttgagcaatgtgtggatcctcccccatgccctacgattaggccaagaagtacctgctcattcgtagcagggatagacacacacacacacacctatttctgtctaagcttcaacattagcgtggaccctcaagttaccacttgtacaactagaagcatgagtgtttgcag

SEQ ID NO: 503106 - DNA, 644 bp, Homo sapiens
ttgtgtttgtaagtaataatcatgtcattaattaacatttatagggagctttttttgtgcctcactttatgtttcattatttcactaaatccatacaatagccaatgatgtttagagctattggtggctttcttaccttctcacagcaagagaaattctccttagtattgtttaattgcaaagtcaatgttattcaccatcccaacatgagggtgtagaaatttgtctacacagtttgcgttcacatctcttatttgaagaaataatttaaaaagaggaaaatctatcccctctacacctctggagtgtmaattttctgctctgtggagtcagaaggaaggaatcagtcagagaaacaatgaaaatgatgataactgtgtctgttctatggaagagaggaaaatgaattacttcatggcatcagggtgcatttggaaagtaagggctacaagaattccagaaagaaattttatttttgagcaatgtgtggatcctcccccatgccctacgattaggccaagaagtacctgctcattcgtagcagggatagacacacacacacacacctatttctgtctaagcttcaacattagcgtggaccctcaagttaccacttgtacaactagaagcatgagtgtttgcag

SEQ ID NO: 503107 - DNA, 654 bp, Homo sapiens
ctttcctgatgactccaccctagctgacctctggcctccaccactctgaggataagcccccataccccagctcacaccctaactgccctgaaggtgattctgcccttcccagctggcatgggggttctgccaggcagggcccaggactcctcaaccagacygtgaagtccttgggtcaggccttcggcactacctcctctctccctgtcttacctcctccacgcttgcctagtttattggaagatcatgggcttgcagagaatagctctggttcgactcctcatagcctctgagggaggaagacagataagcaagtcagttctcatggagccagggcagcaaggccatggatctcccaggcaggttggagtccagtgaagcagggagtggcctccagcattcccagcactctggcccagcacactgctttgcgcatgtgctcccaagctttgggacaccaagaagctggtgtccatgcctttccctttcagtgtcattttctgtgcgactgagtttcctaggagggtctccaaagtggggtttgaagggccagaaagtgatctcacaaagtgtctgttcataggaccacaggatgctcgaaaagtctctgttgctctttctggcagaggcctgtgtgtgagctgtgatgccaac

SEQ ID NO: 503108 - DNA, 656 bp, Homo sapiens
taccttaaaacccctcctataagtgtttacacataaaaaggtgtttaaaaaattgttgtaccatatatgtacaagtaaaaagggtcaggatttgacaaatatactccaactgtgaaattacacctttaataaaactcgaaaactaataacttacagaaaaaatagcaaccataaaacaaacactaacataaaacatgttttctwcatgagaggcagacaacatttagttaacttttgcttagagttatttttgctatgtaagaatcagaaaatgcaatccaactattctaatcaagggatttgtgcttatggtatggatcagacaaaatataatgacataatgaaatctcatttgtttgacatagtggtataaaccatggcatttaacaactatttgccttgcaaatttttgtcttttcatttttttcagttaaatgtttctacttattacaatgaattatagttacaacttctatctggctttggatatatccacttctgaactctaagttatgttttgttatgcagtaactttattaaccaaaaacaggaaaaaaaaaagtctgatacataataatctgccccattcattagaaattgaggacttgttttggaaacagcttttgaggttcacctaggtagctaattagtcatca

SEQ ID NO: 503109 - DNA, 656 bp, Homo sapiens
taccttaaaacccctcctataagtgtttacacataaaaaggtgtttaaaaaattgttgtaccatatatgtacaagtaaaaagggtcaggatttgacaaatatactccaactgtgaaattacacctttaataaaactcgaaaactaataacttacagaaaaaatagcaaccataaaacaaacactaacataaaacatgttttctacatgagaggcagacaacatttagttaacttttgcttagagttatttttgctatgtaagaatcagaaaatgcaatccaactattctaatsaagggatttgtgcttatggtatggatcagacaaaatataatgacataatgaaatctcatttgtttgacatagtggtataaaccatggcatttaacaactatttgccttgcaaatttttgtcttttcatttttttcagttaaatgtttctacttattacaatgaattatagttacaacttctatctggctttggatatatccacttctgaactctaagttatgttttgttatgcagtaactttattaaccaaaaacaggaaaaaaaaaagtctgatacataataatctgccccattcattagaaattgaggacttgttttggaaacagcttttgaggttcacctaggtagctaattagtcatca

SEQ ID NO: 503110 - DNA, 502 bp, Homo sapiens
gcatttctcatggatgtagatcattactttcarttacgcttatatgcctcagttttggtatttgggtgagttgggaaaagagaaaaacagtgctcaccctggctcttctgatcatcgtgtgctatgtctggtggtatgtgcatgcccaatctgactttattcttaggacaaccctgagaagaaggcagatcctcattttacacatggagatgaaaaggcaaagaaaggttagggaacctaccacattcatgacaaatttaaacagtatgactccttcaaactccttccgcgatagcagcagttctcaaattggaataaacattagaataatcagttggagggtttatgaaatacagattgctagaccccatcgtcagactttccgattcaatggatctatggtgaggctgataattggcagttctaattcattcccaggtgatattaatatggctattcaacaccagtgcataccatacgataggatctctaagcctccatc

SEQ ID NO: 503111 - DNA, 517 bp, Homo sapiens
gtgccacaattttggttagatctctttcagttgcaaagaatggagactcattcaagctactgcaatcaaaagaaacaaattatgcagatacatgggactagaactggtactggaaaaagtaccaaagtcaggagagccctaccaatgagttgatctatttttctcttggggctcatgatttttttctctcattgaataactatatctctctacgtaattgttacttgctctcctctctaatgccccttacaatgtctccctcctcataactctggctccttctggattcaatctccacggcctttaatatatctcatggcatcatttctgatcatctaaattccaagaggaaaggagagagagacccagctcatctttttgrgtcaggccaaatcactgcctctttcatctcagaccagttgacagctcctggcccaattagctgtggacaggtgtgagtcacatatacacctcgtggtttctaggcaagggattaccagggtggaggatgggccta

SEQ ID NO: 503112 - DNA, 565 bp, Homo sapiens
caccaaaaaggggccaaagtacagctcaagccattgcttcagagggtacaagccccaaaccttctaggcctccacgtggtgttgcacctgtggctgcacagaagacaagaattgagctttggaaaccttcacctgtatttcagaggatgtatggaaacacctggatgtccaggcagaagtctgctgaaggggtggaaccctcatggagaacctttgctagggcaatgtggaagggaaatgtggagtcagagcccccacacagagttcccagtggggctgcctgatggagctgtgagaagagggccatcatcctccagaccccagaatggtagacacactgacagcttgcactgtgcacctggaaaagctgcagacactcaatgctagccrgtgagagcagtcaggagggggtctctaccctgcaaagctacagggccagagctgcccaagactgtgggagcccatctcttgcatcagcatgagaatggactaatacaggtgggatgatactagctttagtgatttaaaatgaactctctaaccctgtcctagccaacatttttat

SEQ ID NO: 503113 - DNA, 565 bp, Homo sapiens
caccaaaaaggggccaaagtacagctcaagccattgcttcagagggtacaagccccaaaccttctaggcctccacgtggtgttgcacctgtggctgcacagaagacaagaattgagctttggaaaccttcacctgtatttcagaggatgtatggaaacacctggatgtccaggcagaagtctgctgaaggggtggaaccctcatggagaacctttgctagggcaatgtggaagggaaatgtggagtcagagcccccacacagagttcccagtggggctgcctgatggagctgtgagaagagggccatcatcctccagaccccagaatggtagacacactgacagcttgcactgtgcacctggaaaagctgcagacactcaatgctagccagtgagagcagtcaggagggggtctctaycctgcaaagctacagggccagagctgcccaagactgtgggagcccatctcttgcatcagcatgagaatggactaatacaggtgggatgatactagctttagtgatttaaaatgaactctctaaccctgtcctagccaacatttttat

SEQ ID NO: 503114 - DNA, 622 bp, Homo sapiens
tttcttacctccacattcctgtgaggtgggtactgtacccccattttcattgatgaggagcctgagtttagaaaggacatgcagtaggtcgaggagctggggtttgaacccaagtctttctgtctttttatcctcaaacttatccagacagtgcatatcctcttctgggagctacctgcaaccagtaatgcattggaaactgagagccaggctggtttgggagatgatgtgatagctactgattgatcagtgatacctttaaaggtgtctccagaagagccaatccacaagtcaaactaatgtatggagttggcttcccgagactgaggtgttctgaccgtcctagatagaagttccccacccctcaggagggttcaagcagctcatccatatcagactggtctgggccgtggagctaggcaggtggatggcgaagtggagtcctaacttcatgagaacctgaacacagaagctgcacagctgggcctgctggtgacctgctggtctccctagtcatccccactgggaggcagtgctgcagyaggtgtgttctagaacacttccattcttattcctgatttgctgtgtgacattgggcaaattgcttctctgcgtaaaatga

SEQ ID NO: 503115 - DNA, 464 bp, Homo sapiens
tttttcaatgatgatacccagatacaattatcttaccactgaggggacaagtttctaccctcctcctaagggattctgaaagccagcaggcatgatttctaaaggagctttaagcaggagcaaagcttagctgaccatacgtgtgtgtgtctctcaaaggcggcatactggggtcttggtgtgcaacctgggaacagtgttcacagatctccaatgccagttgttctcatttaaggaaaagtcattacccagagtccaggaatgtcaggcccctgcaagggattttcctatggcctgtctttcctatggcctctctttgttagcttttgctgcagcagtgcttcatcacaaacagccccagaatttcagggatgtttaatcagctgttgctcagccctgatgtctrtgtgttggctgatcttggctgcgtttggctgatcgcactgctgctcttggctgggccc

SEQ ID NO: 503116 - DNA, 615 bp, Homo sapiens
ctctatggctatgcaagtgtgtgagggtgtgtgagtgtgtatgcaagattaccagtgtgtgggtgtgtattycattgtgacactgtgaatgtcaatgtaagcatgtggtttatgtgtgtgtgaataatatatctaagtgcatggagtgggtagatgtgtgtgtgtgtatatctgcgtgactctgtagagggtatgaatagcagagataacagcaagaaaaagaccgattggccaggcgcagtgcctcatgcctgtaatcccaacactttagggggctgaaagggaagaatcacttgaggccaggagtttgagaccagcctgggcaacaaagtgagaccttgtctctactgaaaataagaaagaaaaaagaaagaaggaaaaggagacttatagaagagaagcccccaggagactcccaagacctcagatgacatccttaaaagaactttccccagccagtggccttgcctggcccccacccccactgcttccacctagacaggtccaagggacttcaggggtccccagacctcctctcaacaggctggggtgaaaagagtgagataaccgcacccatcatttgcatacatgcccatagttcccccaggcacaagc

SEQ ID NO: 503117 - DNA, 481 bp, Homo sapiens
gtcaaaagacagaggagtcaagcatatgaaatggctaaaaaaaaaaagaaaaagaagagaaatgaaaagacatagaacaatatatgtatgtatataggcttttaaatggctagaaaatatttgaacaatatcttagaaagtgataacggcagttgcctctggaacacgggacagaggctttagatgaaagaggagttttcrtttcatatactgctctgtagtgtttggaattttaccttgtatatgtattgcttttttaattaaaattgttacttaaaaattagaaaaaacttttaaaaaataccattaataggccaggcgcagtgactcatgcctgtaattccagcactttgagaggcctacacaggacagtccaggagttcaaaaccaccctgggtaacataatgagaccttgtttcttatttaagaaaaagtcattaataatagaattaattagcaaatttgaaatcacccagagaat

SEQ ID NO: 503118 - DNA, 582 bp, Homo sapiens
agcagattcctcaggcggatcaggrccatgttgaaaggtgtgagtgaagcctgagcctgggcagcctgaagctgtgtacataagcaaccagctcactgcaagagcagactcctgagcagagaaaaggcagatgcactggaaagcattcaaattaaatgtgaaatgagtctccttggagaacatgacaaagagattcaagaaaattttagaaatgtcaggaaaggtctagaaaatcataagtaagttcaaataaggccatttcctattgagagctactaattaatccagcaggcttaggaataaactgcaagataaacatgtgagtataatgtagaggacctattaatgtgcagttaggtatttgaatacactgtgtaaaaatttcttcttgtattattgcatgtaatcatcaaaatgtgtccatgaagtgatattatttcccttatatggttcaggaaacagactcagagaggttagagtgacttccctgatatcatccagctagtaagtgttggagctagctcaatctcaggtcttacaactacaaaaccagagatctagctacacacttctagttttcac

SEQ ID NO: 503119 - DNA, 582 bp, Homo sapiens
agcagattcctcaggcggatcagggccatgttgaaaggtgtgagtgaagcctgagcctgggcagcctgaagctgtgtacataagcaaccagctcactgcaagagcagactcctgagcagagaaaaggcagatgcactggaaagcattcaaattaaatgtgaaatgagtctccttggagaacatgacaaagagattcaagaaaattttagaaatgtcaggaaaggtctagaaaatcataagtaagttcaaataaggccatttcctattgagagctactaattaatccagcaggcttaggaataaactgcaagataaacatgtgagtawaatgtagaggacctattaatgtgcagttaggtatttgaatacactgtgtaaaaatttcttcttgtattattgcatgtaatcatcaaaatgtgtccatgaagtgatattatttcccttatatggttcaggaaacagactcagagaggttagagtgacttccctgatatcatccagctagtaagtgttggagctagctcaatctcaggtcttacaactacaaaaccagagatctagctacacacttctagttttcac

SEQ ID NO: 503120 - DNA, 629 bp, Homo sapiens
ttcaattaggtaatgacagaaaggagggaaaacagaagcaatggctcaaagtctgttatacgggtctgtctgttttagagataaatccttgagggtagtaactgggctattacaatcagttcacctctttctggacacagggtaagatggctcctctcttcctcaccctcaaactggatatggccctcagacttgtaccggccaatgaagtgtgaaaagcaaggtgtatcacttctgcatgaacaacagccagggcataattcatcacatgccttgctctaacatggcagagtggctctycagattggctgcaggtgttggctccatcaggaaacgtggagcagaggcctcttttaacccacactagtcctggagtgtaagaaagaaacagacctgtatttaagacttggagttttttttaaattttactaatggacttctacattatgactaataaaccatgtgcaatttcaggcagaacacttttccaaaacttagagatgagggactcagggatcctactaaagaaagctcagttacttattgggtaataaataatttgtcttcgcccaaagagaggtctgacctttgccattggcttctgggagataatctatgtcatactcagc

SEQ ID NO: 503121 - DNA, 531 bp, Homo sapiens
ttcttttggtgttgagatcgtctgccacgagtgtcgcctggatccctgtttgaaaaggggaggaaaagatacttgggaaattggactgagagcttgcttactcctccgttcaataactgtgaccaagctgaaactcgttagcaacctttccagaaacgttttatttaccatgtgtgtttgttgtgtatgcaagagaggaaaaaataagccaaagtgattaaccaatctctggttttcactattttcttcaaagctccattttgagatctataagcaagggttgactctygagttcattggagaagttacctcggctcactacaacttctgcctccttggttcaagccattttcctgcctcagcctcccgagtagctgggattacaggcgcctgccaccacacctggctaatttttctatttttagtagtgacaggattttgccatgttggtcaggctggtctcaaactcttaacctcaggtgatccacctgccttggcctcccaaagtactgggattacaggcatgagcca

SEQ ID NO: 503122 - DNA, 540 bp, Homo sapiens
actctcaagggatgtttccccgtcttattttcaatatttcaacaataagtataaattcattttaaatggaaaaagacaactcaatagatcttgtgagtatgtgtagtttggaatcactgtacgtgataagaatcagagctaaagatagtaaggttgtgtatgaacagtgtggagaaaagctgagcaccactgaggcaactccaactttctagacaacttgctataaagacaaatttactacctaattcttggtgagtcatgatttcactgactacttctcataaccatacacaagcaaatttaatgatataaataatacaagtcagcatttcctcatagtcttaaagagaagtttgtaagactcagaaatttcataaaattcscaactcctctgttatgtttttaaagaatttatacttgtgagaagtccgcagagcaactaaattaacattaattcctggaggccttcaagatagccaaacaagcctattaatagtgatatgggaagaagaaggatagcaggagagaagagaaagatag

SEQ ID NO: 503123 - DNA, 206 bp, Homo sapiens
aaccatcacatagataacttgtatatccctaaataacttcaccttttaggatatttaattaatatactattaatttattaaattgatgtaagttgtgaagcttgtacaaataagcagtagaaagcccttttttgtatttggcagatgttaattttyttttaagctttactttttatattcaagtataaaacattttaatgtatgcc

SEQ ID NO: 503124 - DNA, 657 bp, Homo sapiens
gtcattttttttgtacccaaaaacccagtgaaattaagaactcagaagggaaagaagggaaagtggagcacagaagcttgtttttatcatgaaggcatttgctaagctctgtacaattgagttttgctttacatagccaaattaagtacctgaaataaaatatagaatatagggctcaaccacagtgattaatttcatagaacatattcctcccatatgcctgaaattttactcattacactctaagtataagagtgaaytagaaataaaccaaacatctattttctttattttggcaagaaaaagttactgcatatatatataaccaaaacctgggtgctagatgtaagcagtaacaccctgtagcaatgagcacatttaggacccaggttttggtttctaatattgttttccagtgaaagtaattcaggctatttgggaaatggctgattctctgattctagaattggggcaggaaatctgcaaggtaagtctaaagcatcttgtaatgtcagaaaataagaaagagcttaaacaaaaaaatgaaacacacacatgcaaaccgcaatgatgggatatgtcaaagagacacaggagacagcagaaagagctcccagtgtccaaaacgagaacaatttgagccacaatagaaagtaa

SEQ ID NO: 503125 - DNA, 657 bp, Homo sapiens
gtcattttttttgtacccaaaaacccagtgaaattaagaactcagaagggaaagaagggaaagtggagcacagaagcttgtttttatcatgaaggcatttgctaagctctgtacaattgagttttgctttacatagccaaattaagtacctgaaataaaatatagaatatagggctcaaccacagtgattaatttcatagaacatattcctcccatatgcctgaaattttactcattacactctaagtataagagtgaattagaaataaaccaaacatctattttctttattttggcaagaaaaagttacygcatatatatataaccaaaacctgggtgctagatgtaagcagtaacaccctgtagcaatgagcacatttaggacccaggttttggtttctaatattgttttccagtgaaagtaattcaggctatttgggaaatggctgattctctgattctagaattggggcaggaaatctgcaaggtaagtctaaagcatcttgtaatgtcagaaaataagaaagagcttaaacaaaaaaatgaaacacacacatgcaaaccgcaatgatgggatatgtcaaagagacacaggagacagcagaaagagctcccagtgtccaaaacgagaacaatttgagccacaatagaaagtaa

SEQ ID NO: 503126 - DNA, 646 bp, Homo sapiens
ctctgtactgaggagtcctatttgttttaaccttaactttttctcaaatcttattggttcatagaacaattatgggaacttctagaatgataaaaatattgcctgtgatattgtgatataataagaaatacatatttgatcttcatccccagttcccagcacagagctcctaaaacccttacaatagcctaagtgtcggaggtgctaggagcattttttgttctaaaatttggtctttgaccttggtttctgaccaagagcttttaaatcttttgaaatttcctgggygatagaagcatcttttgtccaaatgaggtgactcttgatgggatcctagatagggctggtcaccaggaggccaagccatgattagaagctttgaactttcagcccaacacctatcctccaagaaatgaagaccactggagattaagttaataattgatcatgatgctatgatgaagcctccataaaaattcctaaactatgggattctgagagtttccaggctggtgaacacatccacatgctgagagagtggtgtaccccaattctttgagggacagaagtccctgtgctctggggtcttctagagcttatcctatgcacctcttcatctggctgttcatctgtatcctttacaatg

SEQ ID NO: 503127 - DNA, 527 bp, Homo sapiens
gtgtgtgtgtgtgtgtgtgtgtgtgtgtktctgtctgtctgtctgtctgtctgtctgtctatttgggtgggtgagattctccatctggggagggagggagtcagatatcgctatggtagtcagaatcacacaggtcaccgtttaacagaatacatcaaatgcgtgaagaaatgtaagggccaatttctagggtggttcagctcatccagaggctgtgagtacaattaggaaagtcaggagttgggaggggaacgaacaaaacaaactgtacttaattgactggggcagattgattgcaaaaatgaccccaattctcacccctccctatatccacactccttttcatagtgactttgcaccttctccctttaggaggcagagtctatttcttgctttgggcccagctatgtgacttgttttggccaatgggatatgggagaggtggtggtagcccagttctgagccttaggcacctgcctgtgccatgggaacaagctcccatggagaagagaccccatggaactgag

SEQ ID NO: 503128 - DNA, 518 bp, Homo sapiens
gtgtgtgtgtgtgtgtgtgtgtgtgtgtttctgtctgtctgtctgtctgtstgtctgtctatttgggtgggtgagattctccatctggggagggagggagtcagatatcgctatggtagtcagaatcacacaggtcaccgtttaacagaatacatcaaatgcgtgaagaaatgtaagggccaatttctagggtggttcagctcatccagaggctgtgagtacaattaggaaagtcaggagttgggaggggaacgaacaaaacaaactgtacttaattgactggggcagattgattgcaaaaatgaccccaattctcacccctccctatatccacactccttttcatagtgactttgcaccttctccctttaggaggcagagtctatttcttgctttgggcccagctatgtgacttgttttggccaatgggatatgggagaggtggtggtagcccagttctgagccttaggcacctgcctgtgccatgggaacaagctcccatggagaagagaccccat

SEQ ID NO: 503129 - DNA, 528 bp, Homo sapiens
aacttttatcagaaaggtggtgtcgttcactggatagtggaacaaagacacccaccctgccaaacgcggtctgaacctgaggcccacatggaaacccggcaccgctcaccccatcctcttcctcgggtgttggaaaccctcagccgcgaggcgcagcacaggtttccgcctctttgtcctgagacagtatggggtgccgatatttrcacctaaaaagcactctccctgagtcgtcagtgagcagggtgcggttaaacaccgctcagcaaagtttagcgggagttaacggggaggtggggcgccctgtggggtgggcgatgggtgggtgggcatggccacagcggcaagccccaaagctgagaagagtgggcgccaggcaatcctttctcccttttattgaaagcagcccttcaaacctggtaggtacacaggcattttgttttccaataaaaaaaaaatcacaggtagttaattagctgcacagtgaaaagggggataatatgaggttgaagggcagactctgcagtc

SEQ ID NO: 503130 - DNA, 553 bp, Homo sapiens
ttctctcaggagcttttagggcccagacctggaagtggccatatcactctggctaatgatccattggctggaactaatcacatgaccctgcctagaggcaaggggtgctgggaaatgtagtctgttggggggagtggggaggagcccaggaaggagaggaacaggggatttagaggccactggcagtctccgttaaccaacttccctgctccacagagtgactcatgttcaatgccaggatggacaggacacccttctgcttagaatcctgaagtggctcccttatcacttgccatgcactgacccaggtccttaaaatggcatccaagtccctttctactcatttcctgccacttcttgtctctgttttatgggccagcaatacccataccgcccaacaaacctttgtgtgtgtgcctttcatcctctcttcccccacacttactatggctacactccgacctgccctagggactcagccctgctcctgatggtctctactacgtgactmaccctcactcctggtgcccccagctcaatcactgtaccttgg

SEQ ID NO: 503131 - DNA, 469 bp, Homo sapiens
gtggaagagaaagacagataactgatatgtacaaataatcattttaaatattcagacaggttaagtaagtgctagatgtgaagttcaaaggctatccctgctgcatggaggaagaagaaactagacccaacagggaggctgaaaaagggctcttggagaaggtagtatttgaaatgagtaataacagatattcgagccttcaaaaaacacaaatacatagcagyatattttgttagagggaactgtatgggcacaagcacaaagacagaaaaatccagaaagtagttcagtggagatgaagggcatggtgcttgtgagtatgtgagtgtgtatgtcatgggaaaggaaaatggaaaagtgagttggggccagatactgattatatcaatagctaatgaaacaacacatgtgaagctctgtctttcataatgcttggcacaatatgtacatacttccctatctattgttg

SEQ ID NO: 503132 - DNA, 469 bp, Homo sapiens
gtggaagagaaagacagataactgatatgtacaaataatcattttaaatattcagacaggttaagtaagtgctagatgtgaagttcaaaggctatccctgctgcatggaggaagaagaaactagacccaacagggaggctgaaaaagggctcttggagaaggtagtatttgaaatgagtaataacagatattcgagccttcaaaaaacacaaatacatagcagcrtattttgttagagggaactgtatgggcacaagcacaaagacagaaaaatccagaaagtagttcagtggagatgaagggcatggtgcttgtgagtatgtgagtgtgtatgtcatgggaaaggaaaatggaaaagtgagttggggccagatactgattatatcaatagctaatgaaacaacacatgtgaagctctgtctttcataatgcttggcacaatatgtacatacttccctatctattgttg

SEQ ID NO: 503133 - DNA, 619 bp, Homo sapiens
atttcttgtatttagtagagatggggtttcatcatgttggtcaggttggtctcgaactcctgacctcaggtgatccacctgcctcagcctctcaaaatgctgggattacaggcgtgagcctccgcacccgactgggagtcrtttgtatattttagatagcaatactttatcagatgtatcttttgcaattattttctcccagtctgtggcttgtctttccattctcttgaggaatctgcctttgtaaccagctcattcatgcaataaagtttgagggtcactgacacctgagaggtgaggaaatattatttttaaccatcaaaacataacaatgcacttcagttttgcttgtaaacacaatcctataaataacagaggttataaacatataattaatgtaattaaagtatacattgctgaacttcacaaaaaatatccttattagctcctatctagtttatgaaaatggatagagcattagaaaaagtcaggagatctgtattctaaagggaattttactactaattagccatgtgaccttaaactgatctttctctacatctctagaccctagtttcctcgggtataaaatgatggggattcatgagatgagctttac

SEQ ID NO: 503134 - DNA, 531 bp, Homo sapiens
tctgctaaaagttttattaaagctcaaatatcttattggtcacatagaaataccgaggtggagtcaggcgaggtggctcatgcctgtaattcccgcactttgggaagccgaggtggatggatcacttgaggtcaggcrttcgagaccagcctggccaaaatggtgaaaccccatctctaccgaaaatagaaacatcagccaggcacgatggcaggtgcctgtaatcccagctattctggaggctgaggcaggagaattgcttgtacccggaaggtgcaggttgcggtgagctgagatggcccccctgcactccagcctgggcaacagagagagactccatcgcaaaaaaaaaaaaaaaaaaaaaaaaaaaaaaaaaaagaaagaaagaaagaaaaggaaagaaaagaaaagaaatacccaggtggtctcttgattggaagtaatttcagtttcattagctctttcatttgttaagctatattttgttggaggtatatttttccccaccaacctctggcccattgaagttta

SEQ ID NO: 503135 - DNA, 531 bp, Homo sapiens
tctgctaaaagttttattaaagctcaaatatcttattggtcacatagaaataccgaggtggagtcaggcgaggtggctcatgcctgtaattcccgcactttgggaagccgaggtggatggatcacttgaggtcaggcattcgagaccagcctggccaaaatggtgaaaccccatctctaccgaaaatagaaacatcagccaggcacgatggcaggtgcctgtaatcccagctattctggaggctgaggcaggagaattgcttgtacccggaaggtgcaggttgcggtgagctgagatggccccmctgcactccagcctgggcaacagagagagactccatcgcaaaaaaaaaaaaaaaaaaaaaaaaaaaaaaaaaaagaaagaaagaaagaaaaggaaagaaaagaaaagaaatacccaggtggtctcttgattggaagtaatttcagtttcattagctctttcatttgttaagctatattttgttggaggtatatttttccccaccaacctctggcccattgaagttta

SEQ ID NO: 503136 - DNA, 623 bp, Homo sapiens
aaaaatatggatatggaaaagggaaagcaaaaagtaagatagcagccaaaacaatagcaataaattaacattactgattgctttattaatattatgggctagcrccctgctaagtgctctacaggaaacattttatttaatccttaataaattgggatgagataatgctattctttttgtatagatgaggaaatgggacttaaatatatattaagtaagctgcccaaagccatggagccaataaatatgtgtagcccagtgattggaggggatgaagggcaaggcactcatggatgttaaggggcatcgtgggaagggtagagaggaacactgggacaggtcatggagcgtctttgatatggaggctgaccatgccagtaggcagtggggaatccttgaaacatttttgagcactggagtgacatatgaaagggcatctatgagaaaatcattttatttttatccttaaactctccccactctctgatgagaggtggaaaccctgtgtcactccagatttatagatgcattcagtgatggcaggtggtgattacaaaggaagatctgaagataaagctggagcaggatgaccttctcctttcatccctgccttgagggcccca

SEQ ID NO: 503137 - DNA, 623 bp, Homo sapiens
aaaaatatggatatggaaaagggaaagcaaaaagtaagatagcagccaaaacaatagcaataaattaacattactgattgctttattaatattatgggctagcacccygctaagtgctctacaggaaacattttatttaatccttaataaattgggatgagataatgctattctttttgtatagatgaggaaatgggacttaaatatatattaagtaagctgcccaaagccatggagccaataaatatgtgtagcccagtgattggaggggatgaagggcaaggcactcatggatgttaaggggcatcgtgggaagggtagagaggaacactgggacaggtcatggagcgtctttgatatggaggctgaccatgccagtaggcagtggggaatccttgaaacatttttgagcactggagtgacatatgaaagggcatctatgagaaaatcattttatttttatccttaaactctccccactctctgatgagaggtggaaaccctgtgtcactccagatttatagatgcattcagtgatggcaggtggtgattacaaaggaagatctgaagataaagctggagcaggatgaccttctcctttcatccctgccttgagggcccca

SEQ ID NO: 503138 - DNA, 598 bp, Homo sapiens
taagcaaagacaagttatttctggagaatagctgtcatatgtaatatgatataatgataacaatactttaaatttgggaagggatgaagccattaacctgttaacctgagtttgtgcactctggacaccagaatcttgactctaatagtcaggtagggtctgcctgatctctattaatatttagagggggcctattacctttggaattaatgaatatgacaaaaggattttctaagtatgcctgaactcaccctttagaataaggaataaatgtagctggtaaaattactggtttaagcctaggtcaggcaagcttaggcacatctttttgaatgatgagactggcatgccatatgtcttctgtaggcatggaggtctgagggtctgagaaaggggcactgaatatgtatgtatccatccctgctgtcagcacttcgccacatgttcgctggccaggggctttgtgctgctgccaggaaggagttccgtattagaagccaccaaggtttcagaggaaccttatatttttcttwtatttgatttcctggagcaattgcttttctgtatacatctggtgctataatcaatttcctataat

SEQ ID NO: 503139 - DNA, 447 bp, Homo sapiens
catgggtgcatgatgataggtaggatgtggcgtgaaaaacttaatgacacatagaagcctggccccagtagggcttcctgtttaaagtgcacygctgtgggtacaaaacagattgctttttcaccccccaccaaaaaaaacgaaaggcacttttaggtcacttatcaatgggcccagaagcgaggagatgtgcagcccccacccgccggcactcgaaagagaccatgcgacagccctcctcacccgaggtccaaccccttcattctgctattctatgtttgacaaatgctcactgtttagaagttctaagcacagcaattaagagctctttagaataaaggtgctaaagaaatctttttctttaagaataaataaaaattgcatctaaaaaaaagctagagtaagaatgctatgactaagctgggtgtgtagcaacaatcccataaa

SEQ ID NO: 503140 - DNA, 643 bp, Homo sapiens
tatagctgatcttagaccagttatagttaacctgttttgtcgatcaataacttctctacctgaacagtgactttggccaatcatttttctcaaccattgaggttagaatgttcacgatatgatccacatgccattgataatgatccaaatctcattggcatcagagtcctctggggtgtttcaaacatagagtcctgagcccagatgtactgtatggcccaggaatctgcaccttgaacatccccaggtgattcttttacacactgaagtctgtgactccttgatttaaagatttcacggttggttaaaccagtggctctgggctgggcgcagtggctcacgcctgtaatcccaacacttttggaggccaaggmaggcagatcacttgaggtcaggagttcgagaccagcctggccaacatggcgaaaccccatctctactaaaatacaaaaaaaaagtagccgagggtggtggcgggtgcctgtaatcccagctacttgggaggccgagacaggagaattgcttgaacctgggaagtggagtgcagtgagccaagatcacactactgcactccagcctgggtgacagagtgagacttcgtctcaaaaaaaaagaaagaaaaaaaaatggtggctctcaaacc

SEQ ID NO: 503141 - DNA, 491 bp, Homo sapiens
gggggcataggcttggttagcacgggccccaacaagaatggaaggaggagaattgcagccaacaaggacagacagaagagcaaaaaaaggaggaagtagctgctggcccttgtcctatgattcctctgcaatttcctgcagtcggtcaactatcttcgtgcgtctccacaccaacgggagccaggagctgcagtaccagcctggggaccacctgggtgtcttccctggcaaccacgaggacctcgtgaatgccctgatcgagcggctggaggacgcgccgcctgtcaaccagatggtgaaagtggaactgctggaggagcggaacacggctttaggtaacattcccggggacccttccctgctctrgggagctgcagaggcagtgggtgtctcgggaagaagataccttttcttcccaatcaccagtccaggcaggagagtgggtgtctgttgctaacagcctatgagactaaagatatccccctttctca

SEQ ID NO: 503142 - DNA, 599 bp, Homo sapiens
agcaaccttcattccatctgctcctttaattccctcttgccatgtaacctaacatattcacccattccagggattaggacgtgggcgtctttgggggccacattctgcctaccacacagtcctctctaatggtgtaggatgcctctctccaaatcacaaatgatgaataaataaaagcatctctacccagggctgttgcatttctacctgagaagaggtcctagcagagtcttccaaatgctgattattcctgwcttcttcaacagctcccaccccccggcccctgcccagcctcccctaccaggctcgatgtaaagtgatggtgaagtgaaaacagatttggggcccttgccacctctttctggttggtaactttgtttcttggacaacaatgcagagtttgaagcccatccagggacaacattccatctgccccctgcaagttccggtaattggtcactatttataattatataaataatagaaaaacaagcttaagctgccctccccaaaaacccagtctcctcctatttttaggcagccagcctgccctcctgtagggcagcgtccctctgaggtctgggccactcagctccagc

SEQ ID NO: 503143 - DNA, 603 bp, Homo sapiens
tggcttcatttaaggcatcccctggcagccctgcccaggggcccttgcgtcagttgaggtgacaagctaaaccagtgttccacttggctttggtttagcaagtgatggcaactggtatccttcctgagggtgacgagccccccttttccttccaggccttgccagagcccaccccagtctctgaccctctgtgtaacaggctgttctcttctctctgtagacacactgtcagtgccacgctggtccccgcagatccctcgcagagatctcggcaactccatcaagcacaggtaggctggattcctgtgtgcactggtgcctacttctcagctctgtgaggggtggggkctctggcccctgccctggggtgagagaaggctaggctattgagctccagcacctacatcaccatgtccctttctcctctgctcggctaaactttaaagtggcaaccaggggactgagacatctgcttcttactaatctgacccttataaaattagcacatagcagttaaaagccagggctttggagtcagactgacctgtgttccaatcccagctagtaaagctttgcaaccttgaggaagttacttaacctttc

SEQ ID NO: 503144 - DNA, 543 bp, Homo sapiens
cacaggctgccggtcagacacgcctatctttgaaccctgactctgctgccaactggttgtgtggctccctggagtatcagttgttttgtagaagggggataataatatccaccttactagattgcttaatgacaacgacaacgacaacaaaaaacaggtaaggtaattgttcaatgacgtgttcatccttgtacccagtccattagaagtgtttaattaatgtaagctaatgctgttactaactttatgaattaactttggggtaccctccacccaggaagccagaaacatctccttcatgtctaacccccttccctcctgctycgatttaatgcccacttcctccggaattatcattagctgtcttgttggcattctgaatagagagattaatgaactaataggaaattaagactccgaaagcaatttgcagttatctaaattgaggcgttttcatctaataggttcatgagagcggaatggagtttagctctgagtgtagaatgtcagcacaattcacatattgtctgataactggattca

SEQ ID NO: 503145 - DNA, 642 bp, Homo sapiens
atggaggtgacgtaaatacaacactcttgtcccttgctgcagtagaaagaatattgggtatggagttagatgtcctggatgaatgttctagccttgtcacttgctggctgtgtcaccttggacaaaatcacctcacctctctgagccttagtgttctcatctatcatgtagaggtaactgtgtgcatttctctaggtggttaggcaaaactgaaaattcttcataaagtaaccaagactacagaaaagtggaataatcttttaaatcacgtagtaataataatagtttaagaagtattgactgtgtgtccagaactgttctaagcactttgactttttccacgtatcagtgggcttggtgcttttggtattgatggaactaggatttgagctcatgcctgctgttgtcaaagcaagtatacataagcaccttatcgctgaagagaactttcttcttgagttggcaggtgtaggtgaccaaaatttaaagttagaactgcaactgaggggacccacagtcagcgccwctgtagtctccagggaagtgtctgtccttgctctgagactgagtgatgagaagcagaggcccttctccccagccctcttgtcatcttctccctttgatggcagtagaaagtatgca

SEQ ID NO: 503146 - DNA, 636 bp, Homo sapiens
atgacaacttttggggcacagaacccatgtttttaatctctctggacatttattttctgttttcaaatgattgagaggtgaggtcacagccctagagtggcttgctttctatctgtgagaagtaggagaaagctattaacaaaaaaatgaaattgaatctcaccaagcacagattcccatttgcctgttggtttttaaaatcattgtgctgcccatttatgtacaaatagaggtaagtgtttgtgggcatttggaaaagaactacgttttttcaacacaaaggaaaatacaactcccatcccagagtttgctttcccaaaatagtgatgtttattatggaagtttgatcctagctgcagtctcttatttttgctgattttgctgttgtccctgtctgtyttcttttctcatggcctcactcactttgtattttggggtctatcaatcaaccataattgtcaatattgagtgcttttaatgatccaacctctttgcatgtccttttaggtaggaagggataggcttgtgctgcaatgacaaacaaccctaaaatctctgtgaacatttatttctcgctactcagaacgtttatttctcactcatgtaaagttggctataggttgggcaatcctccag

SEQ ID NO: 503147 - DNA, 528 bp, Homo sapiens
ttctgagccccatagtctattatgtaaaataaaacagaatctgtcagataagttgtttttagggttaaaattataaactatgtgagggggtgtgtgcatgtgtacatatttccccaggagcaatgattcagtattctgctaattccgtgttccagtgactttatagaacgtaactgccgtgaataacaagaatccacactgtcattgaatgaagatgggcaagaaggtgggtgcctcagaggcaatggaatttgatgatggtttggatcctgagtgtttctctagagcagccttccctgcacctactactgggtctcggcctccagtaggtggtcaggcagtgctcaatgtgggaagcgagaagggcagcagagatggctccagggacgtaggktcagtgccagggggactggtccaccctgggctatgaaacagagctcatcctgtgctttgcttctccaggcgggaggacaaactgcgcatccagaatggctggctatgccacctggcaccagagatcatccgcca

SEQ ID NO: 503148 - DNA, 652 bp, Homo sapiens
cccctcttgttatgggttgaattctgtccccataacaagatctcactggggagtcctaccatatccaatggcttctgatctagccccrtgagccatcttactacgtttacctctgggtgtgagtgacaactggccctaagtagaatcccctcacgttaagaccatgacttctagaattaaatggacccaggttcaaatcctggctgtgccacttacggaatgaccctgagagtaacttcacctctctgagcctcagggtcttcatctgtaaaatggggattataggggggattgcctcatcttttcaaagatactaatgcagttgaacctagaggacgttatggtaagtgaaataagccaggcacagaagggcagataccccatgatctcatttatatgtgaaatctaaaagaaagtagaatacacagagatagagttaaaaacagtgattaccaggggtgaaaggggtaggaagtagggagatgtaggtcaaaggatacaaagggatagatatgtggaatgaagtctagagatctaatgaacaacatgctgattatggtgtattgtattgtatttgggatttttgctaaaagaatacactttaggtgttcttgccacaggaataaaaagggtaactgtgtgagttgatgga

SEQ ID NO: 503149 - DNA, 610 bp, Homo sapiens
tgtgtgcggcagggttcttagttcactccactttttgtaaatggtgacgtttatcaggcttcagtgtccrccacgtgaggttccaggtggaaacttgcaaacagaagaagtaagctcagggcgcctctgcttttttgctccccacccccaccccccagcatgccccttcatttattttattttattttatattttatttattattttttgagatagggtctcactctgtcacccagggttgcagtggagtggtgcaatctcagctcacttcaacctccgcctcccaggctcaagcaaacctcctacctcagcctcccgagtagctgagactacaggcacccgccaccatgcctggctaatttttgtacttttttagtagagacagggtctccccatgtttcccaggctagttttgaactcctgagctcatgcaatccacccacctctgcctcccaaagtgctggtagcgcctggccctaccccttctacattaaaggctgggggagttcattcggtacagcccatcataagcacaggccccggacactgttctaggggaccgtgacttgtgcttaaggctgcaaacgcacggagcccagatggtgctgag

SEQ ID NO: 503150 - DNA, 505 bp, Homo sapiens
agtcagcaagggactgggttctagtctcccagaggaagggccggtgccccaagagtggctctgatggggtggcagtggtcaaggggcccgctgaggaggtagctgccacgtctatcttagagaaacgaaaaggcagcgtttgtcctaacattgggcgagggaagaaaagacacggcttgacagctcagcctgggggggcttccccttcccttcctaggaaaagacacggcccccagtgcagagcagtcaaatggctgcttctggaagcccacgctgggcatcagaggccgaaagtgggctggggacaacatggcacccgccagagcccagcaagagggaatctgccatcgcacattagaggcagcccttgtccaagtcgccacaggcccctgcagcggtagccaggtaaccatctggcccggctgcacgggtgacgygggccggcctgtgtggctcacagcacctcggcccggccggccagcgccgtgagctcactgctgctgca

SEQ ID NO: 503151 - DNA, 623 bp, Homo sapiens
tcagagaatcctggttactgctctaacctgtcctcactgcccccactccctgtgagctgggaccatactctgcctttccctgggccttgaaagtcycacagcggagccaggtggaaatggaatcacatgatttgggagtaagaaggactcacccactctaagacacccttccacggcatcaggcacccactacatcattcctgatcagcaggctctgcccaaaatttcccaggacaacagctctctgcatcacgagatgattattcaattttaggatgacaaggtggttagaaagattttccttagattgagctttgatcgaccttcctttgtctttcacccactggtctgagtccagccctctggagtctcattatacaagttaatccttaataccccttctagttctgcctagaggaggagacaagaaggagggaagcaagaatgaagccacattccaagccacccaagctttcttacatcactctgtctacacataagctgcaggttgtcacatttgacaaattgttttaaaatcttctcttttcctaattcctgccaactcttcctcaccctcacccacagaaacttctctaagaatgacccaggaaggggggagagtc

SEQ ID NO: 503152 - DNA, 623 bp, Homo sapiens
tcagagaatcctggttactgctctaacctgtcctcactgcccccactccctgtgagctgggaccatactctgcctttccctgggccttgaaagtctcacagcrgagccaggtggaaatggaatcacatgatttgggagtaagaaggactcacccactctaagacacccttccacggcatcaggcacccactacatcattcctgatcagcaggctctgcccaaaatttcccaggacaacagctctctgcatcacgagatgattattcaattttaggatgacaaggtggttagaaagattttccttagattgagctttgatcgaccttcctttgtctttcacccactggtctgagtccagccctctggagtctcattatacaagttaatccttaataccccttctagttctgcctagaggaggagacaagaaggagggaagcaagaatgaagccacattccaagccacccaagctttcttacatcactctgtctacacataagctgcaggttgtcacatttgacaaattgttttaaaatcttctcttttcctaattcctgccaactcttcctcaccctcacccacagaaacttctctaagaatgacccaggaaggggggagagtc

SEQ ID NO: 503153 - DNA, 623 bp, Homo sapiens
tcagagaatcctggttactgctctaacctgtcctcactgcccccactccctgtgagctgggaccatactctgcctttccctgggccttgaaagtctcacagcggagccaggtggaaatggaatcacatgatttgggagtaagaaggactcacccactctaagacacccttccacggcatcaggcacccactacatcattcctgatcagcaggctctgcccaaaatttcccaggacaacagctctctgcatcacgagatgattattcaattttaggatgacaaggtggttagaaagattttccttagattgagctttgatcgaccttcctttgtctttcacccactggtctgagtccagccctctggartctcattatacaagttaatccttaataccccttctagttctgcctagaggaggagacaagaaggagggaagcaagaatgaagccacattccaagccacccaagctttcttacatcactctgtctacacataagctgcaggttgtcacatttgacaaattgttttaaaatcttctcttttcctaattcctgccaactcttcctcaccctcacccacagaaacttctctaagaatgacccaggaaggggggagagtc

SEQ ID NO: 503154 - DNA, 623 bp, Homo sapiens
tcagagaatcctggttactgctctaacctgtcctcactgcccccactccctgtgagctgggaccatactctgcctttccctgggccttgaaagtctcacagcggagccaggtggaaatggaatcacatgatttgggagtaagaaggactcacccactctaagacacccttccacggcatcaggcacccactacatcattcctgatcagcaggctctgcccaaaatttcccaggacaacagctctctgcatcacgagatgattattcaattttaggatgacaaggtggttagaaagattttccttagattgagctttgatcgaccttcctttgtctttcacccactggtctgagtccagccctctggagtctcattatacaagttaatccttaataccccttctagttctgcctagaggaggasacaagaaggagggaagcaagaatgaagccacattccaagccacccaagctttcttacatcactctgtctacacataagctgcaggttgtcacatttgacaaattgttttaaaatcttctcttttcctaattcctgccaactcttcctcaccctcacccacagaaacttctctaagaatgacccaggaaggggggagagtc

SEQ ID NO: 503155 - DNA, 629 bp, Homo sapiens
cacctccttcctcctttgctcctactaatggtctggttactcctttttgctccagcattccccaaaaccttctcaagcagggatatcgttccctcatttacccaaaatctcctttgcacacttctggcgccttcaggccacatcactccggtcctttagactcctacgcacccaacgtccccgtctctccctcacacccacttgcttcccttgctcccaccacaacagtgcccatctccyctccccgctcactcaggtctcctgctcaggacgcccttgccgagggcggagggggatttgtgctgaaggagggctccggcagcagcgcagcaactcgggggacgctccttctccttgtcagtcacggccccttgtgtccccagatgcttgtggggcgactggggtgtgtgagccctgctgccagggccccgctggggctgctccaggagctgtccgtggtgctgacgcggcggccgatcgggcgcgggatgcggcgcggctgctgagcgctgtccctggtcctggagaggttcctgggccctggcggcggcggcaggagcggtggccggagcggccggcagcggggccgatgacggggggacgagcccgggcggaggctgggcttgcag

SEQ ID NO: 503156 - DNA, 629 bp, Homo sapiens
cacctccttcctcctttgctcctactaatggtctggttactcctttttgctccagcattccccaaaaccttctcaagcagggatatcgttccctcatttacccaaaatctcctttgcacacttctggcgccttcaggccacatcactccggtcctttagactcctacgcacccaacgtccccgtctctccctcacacccacttgcttcccttgctcccaccacaacagtgcccatctcctctccccgctcactcaggtctcctgctcaggacgcccttgccgagggcggagggggatttgtgctgaaggagggctccggcagcagcgcagcaactcgggggacgctccttctccttgtcagtcacggccccttgtgtccccagatgcttstggggcgactggggtgtgtgagccctgctgccagggccccgctggggctgctccaggagctgtccgtggtgctgacgcggcggccgatcgggcgcgggatgcggcgcggctgctgagcgctgtccctggtcctggagaggttcctgggccctggcggcggcggcaggagcggtggccggagcggccggcagcggggccgatgacggggggacgagcccgggcggaggctgggcttgcag

SEQ ID NO: 503157 - DNA, 590 bp, Homo sapiens
tgctgctgtgctgactccctaacccctaacctacttccttctgtgcataagctgcctggttcctggcattggttgagtttgcaagcccaggagggtgccttcttgagtctgtctagatcacataggaaagaaaaacccagagcagagcactamataaacctggacagttaaccagccccaactctgcctgcaagtgtagacaggacagtgcccccagactcccctctccagctccaagtctcccatttctagcggcatctgcagacctcccacatggcagccagtgcccaccagaggcactttgcacaaagaagacatttctcagctaatctttattctaatttctgaaagaacaggccaggcaacctagatagtcattagcactgaagaaagaaacatctcatcccagctcctaacccctcagacttagctgaaaaatgacagcagcctctggcaacttcactcatttgagctggaagaaaagatctttgtgcctccctcgcgagggttcgcgacctcttgtgcggttcccagtttagagaatttgccccgttgaagccttgctggctcagtctcttccaggaagtagt

SEQ ID NO: 503158 - DNA, 590 bp, Homo sapiens
tgctgctgtgctgactccctaacccctaacctacttccttctgtgcataagctgcctggttcctggcattggttgagtttgcaagcccaggagggtgccttcttgagtctgtctagatcacataggaaagaaaaacccagagcagagcactaaataaacctggacagttaaccagccccaactctgcctgcaagtgtagacaggacagtgcccccagactcccctctccagctccaagtctcccatttctagcggcatctgcagacctcccacatggcagccagtgcccaccagaggcactttgcacaaagaagacatttctcagctaatytttattctaatttctgaaagaacaggccaggcaacctagatagtcattagcactgaagaaagaaacatctcatcccagctcctaacccctcagacttagctgaaaaatgacagcagcctctggcaacttcactcatttgagctggaagaaaagatctttgtgcctccctcgcgagggttcgcgacctcttgtgcggttcccagtttagagaatttgccccgttgaagccttgctggctcagtctcttccaggaagtagt

SEQ ID NO: 503159 - DNA, 590 bp, Homo sapiens
tgctgctgtgctgactccctaacccctaacctacttccttctgtgcataagctgcctggttcctggcattggttgagtttgcaagcccaggagggtgccttcttgagtctgtctagatcacataggaaagaaaaacccagagcagagcactaaataaacctggacagttaaccagccccaactctgcctgcaagtgtagacaggacagtgcccccagactcccctctccagctccaagtctcccatttctagcggcatctgcagacctcccacatggcagccagtgcccaccagaggcactttgcacaaagaagacatttctcagctaatctttattctaatttctgaaagaacagsccaggcaacctagatagtcattagcactgaagaaagaaacatctcatcccagctcctaacccctcagacttagctgaaaaatgacagcagcctctggcaacttcactcatttgagctggaagaaaagatctttgtgcctccctcgcgagggttcgcgacctcttgtgcggttcccagtttagagaatttgccccgttgaagccttgctggctcagtctcttccaggaagtagt

SEQ ID NO: 503160 - DNA, 590 bp, Homo sapiens
tgctgctgtgctgactccctaacccctaacctacttccttctgtgcataagctgcctggttcctggcattggttgagtttgcaagcccaggagggtgccttcttgagtctgtctagatcacataggaaagaaaaacccagagcagagcactaaataaacctggacagttaaccagccccaactctgcctgcaagtgtagacaggacagtgcccccagactcccctctccagctccaagtctcccatttctagcggcatctgcagacctcccacatggcagccagtgcccaccagaggcactttgcacaaagaagacatttctcagctaatctttattctaatttctgaaagaacaggccaggcaacctagatagtcattagcactgaagaaagaaacatctcatcccagctcctaacccctcagacttagctgaaaaatgacagcagcctctggcaacttcactcatttgagctggaagaaaagatctttgtgcctccctcgcgagggttcgygacctcttgtgcggttcccagtttagagaatttgccccgttgaagccttgctggctcagtctcttccaggaagtagt

SEQ ID NO: 503161 - DNA, 624 bp, Homo sapiens
gaaataactaaaaccattctttttcttgtaaaaatgtgaaatttctgatttgtccaaagctagacacataagtttcttagtatttgactttcttagacgagagattaaactgagcaatgagacgggagagtggcaatagcttctagaaatcagcacgtgttgcctggggaaagttctcactggcatgcagatcccccttcaggtgtcctgttctcatagctgagtttcatgatttccagtacttctctctggtggatgtgcttttccagcaccagttgtctgtttatccatcaggatggctcctgttctgactcagaggcccaaaatatctgggtttccagccccctggacaggagcatgtaagactggagtccccacctgctccatggtcatcttggcaggccaggctcctgccctctgtggatcccttggactctcttttccatgccctgtaacctgttgcaaggagctctcagcagagtctgacgttaccagcctccaggtgcttagtgggagatgcaagcatctctgtctttggttaatttatcacagggaaagtggtttggtgggagagccccaattaaaagtatcyttgcagttttccttaatcacaccctgaaaatg

SEQ ID NO: 503162 - DNA, 626 bp, Homo sapiens
tttcaaagtgttgggattaccggcatgaatcaccatgcctggctggtaaatatatcttgaagggtgattgtagaccctggcttcattctctttgttgatagttttgcatgcatttgtccatcctctactattacaagatatgcaatttcactttgcaatggatttgcattgcttttgcattgtatttatagttggcagtcagcagaatctgaccaatcaagatggcagagatgttgaagtggtgggcaggggtagatgctgctgtcatctaagggccatgtgtgggcagggactgacatctggaagagtccatttatcaacaagtggtttcttgttctgccaatttatccttccgtatgtaatcccataatttcaaggattcatacagcaaatgtttatgtaatgaagaacctatggaaaatacrtataattttttttttctgtatgtcagaaattggttattatgtaagtgagataaaaatggttcctgctcattggcccctgtgttgtttgtttcttcacagcaggctgggacctgttagctcaaaagcctgctggcaccaaattcatatttttacacatccaattgttttaaacatagcccaaataaacagatttttagccat

SEQ ID NO: 503163 - DNA, 535 bp, Homo sapiens
cccttccgagtttgttgcttatcaccatatattgtcacaaccagttctctttcttccctaaactcttcaaggcctgcagcattaggaatggcggaggccttctgtgaatgaatgaaggcctgggtggaggggagcatgagaaatggagggtcttttccagtgagttgctggcaagcgctgtctcttcttgggtgaccccagccaaccccagctagaactctcttctgcctgcttttgaagatctctttcagagggtgagaagtgactcagacagcgtggtccaaagcattccattaggaatcactaactaagtaatctggatgcctcttactctaaactctacgttccagtcatcattctctacatctatcgacagagttttcagcccacaaccctgcttgacccatggtttcyctgcagatttgtgtctgcctgctagacactcctaaattctgagttgttagtttctagggagccttggatttttacattgcttaggtgctttcagttgcaagtaatagaatatttacctcaa

SEQ ID NO: 503164 - DNA, 520 bp, Homo sapiens
gctgcccttagcccccagccgaccccagagggaccagcccagagttggatgtcactttgaacatcctggatcccacctgaaatgaccctgccacccaccacccacaggcactgtgttttgctgagctgagcmcagcctctggtttgtgcctcaacagatgcctcacacctgcaggccctctctcctcacccagcccccggagaaggccttgctgcctctattgtcccagaagggaaggggcttgccaggatcctggggagcagcctgggtctcctgccttcctgggtggcagcacatggctgcccaggtgccccagtgccggagagcagctccagcaaggacttcccggctggctctggggtgggtgagcgctttccatttgctgcctgcacccctcccctgcccgctgcaggaggggcttcgctgagccgcggggcacccccgccccactcggggctccccggggcgcaggggcctggggcgtgcgggttgccaagcgaccggctgttgccagtggaga

SEQ ID NO: 503165 - DNA, 487 bp, Homo sapiens
aggaagggggttggatctgatacccaccaaccactcaycacggcatctgcgagggagtgctgggaatacctgtttctacagtggctcaaatggacatgatgtgttatggtgtttgtatcccattggtatctagcctggcacaagagggtgtaccagagtgctgggagtggacagatgtagccaccatccgctgagtgagggctgctctgagccaggctttgtgctggaggtttacgggactctgcttctattcctcatcacaacccttagagggaggctccattaaagatgaagacacaggctcagagggttaagtaacttgttaatgaccaagttaagtcacaggacagagctcaacctaaatctgtcacccaagagttgaggagcctaaggggaagcttcagggtagctcttgctggtgtggaaccaggcacctaggggagccgggcatggctgtgctgcgctagggtttggagcttggcatgaa

SEQ ID NO: 503166 - DNA, 487 bp, Homo sapiens
aggaagggggttggatctgatacccaccaaccactcatcacggcatctgcgagggagtgctgggaatacctgtttctacagtggctcaaatggacatgatgtgttatggtgtttgtatcccattggtatctagcctggcacaagagggtgtaccagagtgctgggagtggacagatgtagccaccatccgctgagtgagggctgctctgagccaggctttgtgctggaggtttacgggactctgcttctattcctcatcacaacccttagagggaggctccattaaagatgaagacacaggctcagagggttaagtaacttgttaatgaccaagttaagtcacaggacagagctcaacctaaatctgtcacccargagttgaggagcctaaggggaagcttcagggtagctcttgctggtgtggaaccaggcacctaggggagccgggcatggctgtgctgcgctagggtttggagcttggcatgaa

SEQ ID NO: 503167 - DNA, 624 bp, Homo sapiens
  misc_feature (1)...(624): n = A,T,C or G
cttcggctggtcaggaacagtggctgctcatggagctgccctcccaccttcagaccctcctcctcccccgcaggggtgggctggggccctccctccctctgtacttgatccatgacttgtgagttctgagtcctcagggccgagacttgagtcagaaccttctggagcagtacgcatttcccctctgcacctggtgaggacaccaggctcctcgcttcctccccagatctctgagtgctcacccgaccccccaaccctggcgggaccttccagggctggcaagcatcgagcctgaccacgytgcctcttgggtgccagcacgcccacatcaaaggtgtcccctcttcccagaggccctgagcaacatcgggcgacgctgtcagcagacattagcagcagagctgcaccacgcatcaacttttaagtatgcgcacacacgtacgccagccaataacattaagttcattataaaaaatgggttaaataagcagcattgctgaggatggccgtgcagggctgattatcccctatttgcacgttctggcggtgggaaggctagaagtctaatgactgaattatcgccctaatgcttctcgctggctgggaatatncccagggcaacag

SEQ ID NO: 503168 - DNA, 649 bp, Homo sapiens
ctaccctctgccctggtttggtttcttctcccaagccagagttgcaagcaaccgctggctaccatcacgctgaaggtaggggagtgagttcggtagctcacccagcctgagaactgtcagggagctgcagtggggaaycactgcccacaagatcagcgagggaggaaagcagacgcttgggaagactccatccagggccctgtgtccccaagccgtgcactgcaccggctgcaaagcccaggctgccagggaaaacacacacaggccaactcccaggaggcgcccagagatgcttcctacctgaagaaaaggcggagggagcgcatgtggcccaggtccacgcggaacacgccgcaaatctgctccagggcgcacacccgctgcggctcgtcccagcgtggggtctgcaggaggccgttgctgtccgggaaccgcaggccggcgtcggagctggacggggggctggtggaacaggttatgtgatgatcgccacacttctccctgcccacactacccagagggggacgggggtcatgggggagtcatttaaacctacgcaccaagcttaaacacacatacaggcacggctgaatatgccctgtaaacacctgtgaataaatgaatgtatgaaccccactgcacagttcta

SEQ ID NO: 503169 - DNA, 471 bp, Homo sapiens
acagtttgggcagtaaaaataaagtcggcctcagccgcctgtaagtgtctggtttccccgcccagagaaagcccaccctccgccctgggcccgggtccctctgcctgtcccgcccgcctcctcttggaatccgctgcccgccaaggacaacagcgccccagccccgcaccggccgcctcagcccctcgagctggctccagggccactgtggaagtgggagggagggggccttcccagagtgggccggggggacctgacccgcctggcctcgcgccctacccccacccctggcaagctctcccgcacccgcgaagagcggtgattttccttcagatagggtttctggaacccgcttcccggagttgtgcttgcccttgatgcctttactgaycatggggtttgcgctaggcgtgcagagggcgatggtttcagtttctccccaaaaaagatagctgtagtcgttcctccatg

SEQ ID NO: 503170 - DNA, 571 bp, Homo sapiens
ctggatagggtcttaggtaattatcttagcttccccacccaattttccacctgtctttgtgcctgatggcgattatttcggaaatgcttgctctaaacaaaactatcgcttgcgaaaagtctgagtttgcaaacgtcggggaatcctgcaaagcttgtggcaaaggtggaactcgattcagaaggaaggaagaggtatagaatgatctgagggcagggagcctggctcttgtcagtagcagacgcgctcagtcccgccaaggaaggcaatccccaacggggcagagtgtgtctcatccctgcctggcgcamcccctgccccccaacccgtgagagagcagcgttgcagggggtgtgaaaacaggtcaccgggcaacctcattcctcgacagtttggagacaaagcgggaggtggcggtctgagaaatgggagcccacctcccgggctctggctgggtgggcgcgggaggaagccctgtgttccgggagagggtgctagcatgcgtgggcgtggagggggaggaggtttgcagtcattccagccgggtcagatccagaccgagaggacaggt

SEQ ID NO: 503171 - DNA, 621 bp, Homo sapiens
aaaggccacgtgaataagctgccttgcaggaaggaaaagccttaggggagaaaatgattttagaaaaagtactggagaacagacgacgcggatgctcatttcctaacaaaacgaaacaaagcaaagaaagtcagtctgcaggacttgttcggaaggagggtcgctgacccaaggaaacaagagttgccggcatccagcaggaagggtgctcagactaggagactggaagggaatcccgagggcggaacccacaagggaatgaagagcctgtggggtaaggatatgttaaggcgagtggaggagcgtactaggtataaaacaagcaaaaaaaaggggtggggctggacagggcagcgccctgagctaatgtcactcaaagccgggggggcgtccaacgaaaggaaccagaccagcagcctrggggaagggtaatctgcttccttagcagctgcaggctgcagcagccaagaccaccccgttttccctgccctgagccccacaaagtccccacggcgtgggaagggagtaaggcagagccccagagcccagtgcccggagtcggctttaccttcgcgggaggctggagaggctccagccctagctcctcccgccgccggctca

SEQ ID NO: 503172 - DNA, 503 bp, Homo sapiens
aataccttttgagtgaattctaatatgcgttgttccttttctctctgttgaatccccctcagagcagaaagaggagttctggcttctttgtattcccagcatctagtgtcctagatgctcaagaaacatttgttgatggtgatgataatgatgttgactaaaattggattgattctcaaggcttttgttgtgattagatgctgaattaatttcgggtctattatagcagtacataaaacctaaattgcttcccaccttggaaagcagggctgtgatcaggaaatgtagctccagagatttcctaagtaacgttctttttaccctgttgytagttgtgcctttgtcaggattttgagtaaaggtatgtgcagtacctcccaaagtgctgggattacaggcgtgagccactgcaccccaccacaagttacttcttattaccatatgcttccagcagatgattaagcactagttatattttttaagttgtcccatgaactcaaagt

SEQ ID NO: 503173 - DNA, 624 bp, Homo sapiens
tgaggcctagcagcctgaagaatgctctcctctctcattattggccttcattcagggctgctgcccatcagcatgaattatcacttttaataaccaaacggacattgaaatggtaatgagaatattatggttttccaaatgaaaagcctcaatctaatatattttcctttgagaacactaatttgaaaataaaatcatagttaatttaarctaagttaaatacaaagaataatggaaaataaccagtaaaagctttgtactactgcttttatttgggtgcacagagacctacatagcctatctgtaattccttatttcctgggaaacttaagatggttggagagaggtgtgtcatagctgagtattttcaaatgattataaaatggaagtattaaagactgaaaggatgagaagattttaagtaggaatattgataataggtgaaactattccaagggttagactagaaatggaatttcaaaacaatgcagggctcaggagaagaaaaaataggaaagaaaaacaaaaatcctaagcttgtcactcaagtctctctgggatctgcccccataggtcaccattctctctgccgtcttccctgcactgccctgtactgctgccagc

SEQ ID NO: 503174 - DNA, 696 bp, Homo sapiens
atattgataataggtgaaactattccaagggttagactagaaatggaatttcaaaacaatgcagggctcaggagaagaaaaaataggaaagaaaaacaaaaatcctaagcttgtcactcaagtctctctgggatctgcccccataggtcaccattctctctgccgtcttccctgcactgccctgtactgctgccagctcacagacagtcctgctattcccttgtcatctctgcctattctcrgccttctactcggaaagtctacatctctgaggacagaaattctctgagtccttctacagtcccacccccgcactttcccaatcacaattctgactccagatttttattgcattttgtattttttcctaccccatggcacttaaaatatatgaccctgtttcccagtgtttggagtacatgttctacttctgctattagactctaagctcccagagcctgctcacactttttcctgtatccttgaaatatacatttaccttctccccttgccctcaccatacctaattaactcttactcatctttacatcagcattcaaaaggggcttttcctgagaagtcttctggattcctcagcctaagttaggtgctcacatagctccttattcactttttgtcacagcaccatatatttatataattattttgtaaaggtctacctcccgctctggacca

SEQ ID NO: 503175 - DNA, 583 bp, Homo sapiens
tgtgaaatgtacagactcccaagccctggagattcaacactgggtctgagatatggcctgggggactgggagtttctagatgtagcaaggacccaggcaattctcatcatcaagaacacttgggagacattgtcccagctccccagagattcakatgtcactggtctggggcagagacttggcagagtgttggaagagacaatattttccaatctagtttctggttttgtttcatgtattttgtagaaaactttgtccttttaaaaataatatgttacatttttgatcaagactgatgaagatatttaacttctggatgaggagagtgcatagcaacaatctattctcattgagggccttagtcacacctattttaacctgtatgccttttgtatttctgcaaataatactggttgacatcctcttcattgatagtctattatggctgaggttctccacccctgccccccatattgtggactcaagaggccttaaggtaacaaataaagacagcatctttcaccagaaggatttttggggagttcattggccatagagtgtttcccaagagatgggcacaaag

SEQ ID NO: 503176 - DNA, 520 bp, Homo sapiens
agtgaacacatttgggtaaccaaagaaggagatggaraagcccccgagttgggcttgcagccttcaatatttgtcttagtaacccctaatcccatcttctctttcagagcacttgcctttctctgctcttcaatatctactcataaacactgaacccagagatgagtttcaaagctttgagaagccaaattactatatatatatagagtatatattatatatatattatatatatatttaatttccacttaggtaagattattgagagttttctcagaatttgcttttttttttttcagaaaaagcttcagattatatttaccttaagattattaaccttatctgcatacccataaacactgataattagaaatttatgtatacaattaacttgtgggacattcacctgaaagtaaatagtccctcatgaatcaccactatcttcactatcttctatatcaaaacttattaccgataaagaaatcaacacatttgtttcttccaagcatctttaaaactc

SEQ ID NO: 503177 - DNA, 428 bp, Homo sapiens
tcctgttttagagcattttatctaaaaagactgagcatttaccaaaagggactgtttatattgttgaatcacatcagtttaccatcttattggcttaaacagaaggcatttattccaattcccagtaggtaggagtttatgaggaaggtcagatcacttacgaaagataaactaaagtgtgctgtgggaaaacttgtaatcccctacaagtacaaaaaggaaagctacattaaatgtttatttccattatacgatgcatcctaatttcagaaatggtaaaaaatgtgaggtggacaatgtgggaaaatgtgtttaaattaacgaaatatggtatcttgcaaatcaagattgmgaatgcaaactgtttcctaaaagaaaaaactcatctgaaaaaccacatttattaagccttaatttatttaatttgt

SEQ ID NO: 503178 - DNA, 565 bp, Homo sapiens
tcaccaagacagtggtgactgccagcttctctcttgaccttcctcacccctaggtaccacaggatgtctaatgggaaggcacaagagcataaaacttgttgctctcagagttctatggatgaggaaactctgaaatatgaggacagatgtgagagaatctctagaaaccttaagcttaggacagaaggaggagagcatcccgctcacactgtctaacaatttaatagggattcatgcatctaagtatgtttgtgagggaggtagatgttaagaaatcatacatacagamcctcgttgagtttcgaaattggaggttcttgggcaacaagggacagcatggggtaacagactgtttggggaggagaggaagggaaagacaggaaatgaaaaattaagcacctggctagaacagtacagggatacaaggatggtatttgggaaatataccaaaataattaacttttgaaagcaagaaatgaagacattgaaaggaaataaatggctctccaagaaccagaaagacaagtatgaaatgggcaagactctatgggtcagagatcccttg

SEQ ID NO: 503179 - DNA, 735 bp, Homo sapiens
gcttaagtctgaatctcccagcacatactccaaaaataaaaataaaaaataaataaaactacagaaaacctatgctgtcagcataactagaaaagagagaacaacctagatttcaaattacacgtgaataaaaaattaacaccaactcttagcatggaatttctcacccttctggtgcaagcctacctggggaacaagggcaagatggggccagagtggagggatggtgggagatgggggagaaccatactgaaaacagaagagagaacctagcaatgaaatttaaaattgatctaaaatcacagctataaagagaaattctactctcattgcaaaaataatggaaaaagagtcctggtagatcagagcctactagaaggaggaatgagtatgtggggctctaagaggtggtcttagaaaggccttgggagagagaagggtaacaaaggaatggaraagcactctggaaactacacagtgaacataagaagaaataagaaagggaaaatcagaatccagtaagacaaaagaatttttcttaattgaagaaagctactgaggaaataaactatcttttacaaccttaacagaagagttctaaccagggatcttgtaaaccatcccaaaccatcacagaattgctgaggcttaagcaacctacaagtattctaaaaagaaaaaaaaactaatatgacaggaaaacagaaataaaaattttaaaaactcagttgaaaa

SEQ ID NO: 503180 - DNA, 586 bp, Homo sapiens
ctgcggcattagattctcataggagtgtgagccctattgtgaacagcgcatgtgaaggacctagtttgtgtgctctttatgagagctctaacgcctgatgatttgaagtggaatggtttcatcctgaaaccatycccattccccccatacaccatctgtggaaaaattatattccatgaaaccggcttctggtgccaaaatggttcggggacacactgttgctaagccacacaagtggttatttttaatgttttaaatggtttattgaagaataacatatatacagaaaagtgcacacattatctctaacaacaatacatatccacatagtgaacacactcatgtaacctccacccacgtcaagaaatagaatattattagaaccctaagagggccccttgtccccgctaccagctactactctgtcactatcctgacttctaacaccataggtgagttttgcctctttttgaacttcaaatactgagactatacagtatgttgtattttgtgtctgatttcttttgcttaatgttgtatgtctgtgagagctcaccatgtagtagttcattcattcattgataat

SEQ ID NO: 503181 - DNA, 592 bp, Homo sapiens
tccaaaaaggacttcgaagcctgaattcccttcccctgtgactaaatggcagtccagggctgctaaatgtcttcaacctctgtagaagggtgaggaaactgagcagatgcaaattctgatgaataatgcaggaatttattaataatgatgatgtaaattatgtaaattatagtcatggtatgtgattggaccaataactttccatatgcaaacctactggctaaattttcagagtataagttagaagaggacactcaacttaatattctgttcacccatttgatccaagggaaagagaattttccaagaaagcttaatatattccaagcaactttaaattcactcagtaytctctgtgactaagggtacagtaaaatgcacaaactttagagaatgattaaaacaatcacaagaaggggctcatcaatctcaggcttcagattctgtgaaccacaggaatgaaccacattttctaagactgggggtggcagggaggcctttaatacaaaaatctctaaactctacattttttatgtacccactcgatgtttcaagttatgtcataggatttcaacactgctggagcctcccc

SEQ ID NO: 503182 - DNA, 479 bp, Homo sapiens
ataaaggaatatttactaagctatcccatgcaggtgtaatgccaactgtttcaccctgagcagagccaaaagcgctccctgactttggctgaaagtttatagctaagacatgtaaaacgacaggctggaatcctggggaggctaacgagtggtactttactccctggccatagctggcaggggactctcagctcatcattttgcaagatgaaattcgtttgttgtaggggtcttcaagcagaagcacttcttagaaaatcaatcaagtctcctactgctagcaggtcagcaagctatccctccttactgtgttaaaaaaaaaaaaaaaamaaaaaaaaaacccatgcacattccctgactgtaaatcaatgattataagtcatgaaggtgaaatataagagattttgaagtatattttcaaagttgaaaatgtatgtcaccttaggtgcatgcaacatcttgccaactgaatatggaac

SEQ ID NO: 503183 - DNA, 561 bp, Homo sapiens
ttaaccagtataagggagatgttatgatgagtatttattttctcccacctttcttttgcagagttaggtcactgaagatttttgagtagacttsttttgtaagatgcatgaacatcctttgattgctatagattcagagattgttattgataaagttttttatttggataaaataaatatgcaactagaaaactagaaacctggaagaaaatttaagatgcaatatttgaaagtggaaataaaagaacaggaatcctgtgtaaatatttctgaattaatctttcagtcattcaaattgttctttaaggaagcagcatctctgtacatagcttaactgtaaatctaaatggaacagttatcttaggaaactgatatagtaatgagatgctacaaacgcacataggcatagctgcacttaacactcaaaccgtgggaactagcattgcatcaactggcgacattcacactatcgagcaaaccgcaaagatgctcaaagcgaagtgtgcccacagaacaaatgcttccccatgtcatagctaccacagctgcttttaccacata

SEQ ID NO: 503184 - DNA, 491 bp, Homo sapiens
aaataaggttacatccatagataagaggagttagaatgatcacctgtatatttttttggcaggagaggaggacggtcacaattgaacccaaagcacaggtaacgctggagaagcagttagcacaaggcctgacctctggcccacttaatctacagtagcagttggcaatgcgcaagtcaagtctckgatgctgtctgggtccctgtgggtatggactgggacagcaagtgaatgtgtgatgacagcttgagaaagcaggcctcctcccagcctccttcctgactgcccctcctatctcatgctcagcttcccttccacacctctactcagcctggcccccagcctgcagtgcccgttcccttttcccagccaatccaaatctgcatcctggccatccttcaagtcccacctgctctgggagaggccgccctcacgtgctgcacccatcggcaaggtaggtgattaaagataggaatggactgtactgctca

SEQ ID NO: 503185 - DNA, 633 bp, Homo sapiens
atccttccagccccgtggtgaagacctccaaatcaactaggagtggccactgcccctggggaggggagccacaaccaggatggtctgcatatgctttggtatctcctaggtttytcctttgaaaacttttatcctattgccttgggtggtgggataagagctatttaaatatgttaatccatagcagtagaataatagaataagtgcagagcctgatttcaaaatctgaaatcctgggtttctttggccagcaaaataaatatgacacaaaagcctattcatgtacatcaaaatcaagtctgtgccaaaactctacttgcttaacataaagtctggcaggggagatgcagaaatcccttgcctgaagatcagatggaaatttctagtttaaactcccagtcattgtgaagccaactttcaaactcacttggggctggagggtaacacaagatctcaagtgttttccaaatccaagcaggatccaagctgggagatccaccgtggaagagaaagaaccaccaaacctccaggttagtcttgaggatccactggtcctcccaccacacccaatgggatggctgttttgagcccccctcacttgtgaaagattgtgttgtcagtcttagctaacag

SEQ ID NO: 503186 - DNA, 571 bp, Homo sapiens
caaatccaagcaggatccaagctgggagatccaccgtggaagagaaagaaccaccaaacctccaggttagtcttgaggatccactggtcctcccaccacacccaatgggatggctgttttgagcccccctcacttgtgaaagattgtgttgtcagtcttagctaacagccttagttgacagagcaagccctgttgtccaactggcctccccttctcaggtttytacatctcctctcctaccctagccctgcatgggcaggggtcatccagcctcaagaccaacagagccagacactcacacagccaggccttgggaacacctggggtgagctccagaacagggtcctgccgctgctccccagcccagtgctggggtcactttcctccagtaagatcctattaaaaaaaaattagacaaaaatgtaacacagtttatttgagtagtaaaggattcatggatcgggcagcacaaaaaaccaaaagaggttcagagaactctgctccagcagcacaggcagcaagcttttatgggctgaatgtggaagtaaagaaaagaaattacttaaatgac

SEQ ID NO: 503187 - DNA, 630 bp, Homo sapiens
agaagctggttttgaaaagaacacacagggtttgcctgaatatccacttgataaggagatgagtgtgggtgggaaccatggctgtaatcacccacctcagaaggatccaggaatagagactggattacttccagagacyctgtcagcttgaaccagaggggacacagtggggacaaaataaaggaaggaatcagactgctgagattccacaggatgtgaccacagagctattctgctgcatgtgtgttttatctttcagaaaaatggaagcatcaccctgatggtgattcagagataatcaggtctgcctccttggtttctgttttaatgggccagaactccacgggtcagaaagtggggagtggggccacccagtagagccctggggtgaagctgccacccccttgggctggaaggaggaacattagccaaacaaagtgtttctcaagccttaagcttgaataaaatttgccttactagattttgggcttgcctggaaccagctgcccctttcttctttcctgtttctctctttcagaatgagaatgtgtatccctactattgttttggaatgagaatgtgtatccctactattgtactttggaagggcatatttgtccagttttaatg

SEQ ID NO: 503188 - DNA, 564 bp, Homo sapiens
gtagaagaagtgtagctcaggatgaattgtgacttgaacctcacctgtgtcagattcagatgacattgagatgagactctagactttaagcttcagcactgatgctggaatgagtgaagatgtttggggatgttgggctggaatgaacgtagtttgcatgctagggggtcaagagtttttggaggtcgtaaatttttaggtggaattttatcaactgaatgtttgtgtcaccccaacatttacatgtcaaggtcttaacatccaatatggctgtatttggagatggggtctttttagaagtaatttaggttatatgtggtcatgaggatgggaccctaatcagatagagctggtgtccttattgcaagagacatgggaggsctaagctctagctcctttctctctgccatgtgaggacacagggagaaggggttgtttgcaagtcaggacaactgctggcaccttgatcttgaacttctagtatctggaatgatgacaaataaatgtctgctgttgaaactacccagttcatggtattttgtcatagcagcctgagctgactca

SEQ ID NO: 503189 - DNA, 433 bp, Homo sapiens
acccagttcatggtattttgtcatagcagcctgagctgactcatacacatggtaatgtagttgatatgtggcctcctaataggatacagattccagtacacaagtccacttttagtgtgtttctatgaaaatataaacagatgatgtattcttgatctcaagatctataaacctctaccagattcactccgagagagttaagtagatatttataccaggacctagcatcgacatcagtgatcctaaaggagctgaggcatcactactgagtcttgactcaagccaggcttragtttgagtgatgattttactacttgctagaggcatggccttggtgaagctgcttaccttcttcacacctcacctattccattgctaatcaaaataacagataaggcagaaggacactgagtatttacagcttgcatgggga

SEQ ID NO: 503190 - DNA, 578 bp, Homo sapiens
agcctgcagaactgtaagccaattagacctttttctttataagttacccagcctcaggtagttgtttacagcagcatgagaatggactgacacagcccttgtgcctgctctgatgcctgatctcggcagcctcgggggcttttcccagggtctgctggtctctgtggcttggggagatgggcattaggagggtgcaatgacaggtggccggcgctctgttcacctgggaatatttggccttcaggactgggatgctcttcttcaggtcctgatgacaccaggatccctctcacaacttaaagcatgagcaattttggggaagaccaggtttgttttgtccccttctgggttccgccagttccagggctatggtctcactgtgacctcagtgcactctgttcttggaggtggagccaggctgagaaacctcactgtggccctggcctccccagagccaggccttcacttacctggtgtgctaccgtatgctcgcgtgggtcttccttccrtgcacatgctgttatatttccagggcttgggagctggcagggggcagaagtgacagcgtggttcccaca

SEQ ID NO: 503191 - DNA, 604 bp, Homo sapiens
tgttaaatgtgatcatcagaacactgccaattttctcggccacatagtctttttgtgcagtgtagaacatgttgcaattaagagattttcacacttcttaataattctcagatttggaagatttttcttgtrgcaacccaagtgatagtatcatactcggctccttttatgtaattttataacttgctggaagtgacaaagactgcacatacaaagatggtgattttgtgtgtctccggtagctgtcctcagagttaaacttctccaatctgacagcatgaaggctgaagcaaacctctgattgcaatttctgaaatcaaaacactctctcgaatctcacaggcttcataggacatgtacactttgcccgtctctgatgggttccagctcccattatgtctgacttctccttggagtaagtgctctttcaacactgatatctcacatctgaattgcaggccctggccaaatcaagaaaagctagatgtctgaaacaggagatgtctaggtgaccagttatatttagttattcaaaaacaatcctaaagcatttttactttgcacctcaattatatttgttccaattctctctctgtcacacaca

SEQ ID NO: 503192 - DNA, 560 bp, Homo sapiens
gttcacatgggttctggccttttcttccccgtttttatagttccttttctttagcattcgtgatgttaaaaaacaggccgaaagccccactggtcacattgcagggagtccacctctttctacaaacacttctcagtctcaacgttttctagargagcagatgaagcttgtgtgctcagaaataaagcattagaagcagcgttcacaagaggctgtctccttaggcagtggtgagggggtgcaggtctcatctcttcttccaaggatatggaaacttcctgacgggcaaatgcaagagatcaagtcagtgtcagtaacctgccctgggcctttcttggttttataaggctaacagacttattataaactgtgttgaacaaggcaagcgtagaagtttgcctagtggctgaaagatagaaattgttaaacccagtatagaatggaagacatttcacgatcccttgaatttcttcttcacccttcacacctgacatgaggcattctagcttgtggattcactagggaataatttggcctttgccccgtggaagacgcacttg

SEQ ID NO: 503193 - DNA, 560 bp, Homo sapiens
gttcacatgggttctggccttttcttccccgtttttatagttccttttctttagcattcgtgatgttaaaaaacaggccgaaagccccactggtcacattgcagggagtccacctctttctacaaacacttctcagtctcaacgttttctagaagagcagatgaagcttgtgtgctcagaaataaagcattagaagcagcgttcacaagaggctgtctccttaggcagtggtgagggggtgcaggtctcatctcttcttccaaggatatggaaacttcctgacgggcaaatgcaagagatcaagtcagtgtcagtaacctgccctgggcctttcttggttttwtaaggctaacagacttattataaactgtgttgaacaaggcaagcgtagaagtttgcctagtggctgaaagatagaaattgttaaacccagtatagaatggaagacatttcacgatcccttgaatttcttcttcacccttcacacctgacatgaggcattctagcttgtggattcactagggaataatttggcctttgccccgtggaagacgcacttg

SEQ ID NO: 503194 - DNA, 381 bp, Homo sapiens
tccactagccctcttccaaccccctgccccaaaatattttcctcctctgagcctaatttcccttagcccagacctcacaatccaggaagccctgtaaggatctgagggctactggtgcagacatggcagtcacatgcaggaaagctcatttgaggggtggctggtgagatattatggggagagagaaaggggatgggaaaagagagaaaagaaaaagtgactctgagtcatgttggtgagatttttcacagctaatcacacacaagactgattcactgctcactttgctgtgctccctcatttttcayatcatacttttcgctgccccatcagcctgttccaccaaggtcaaatgaagggaatgatagcttgcacaccaca

SEQ ID NO: 503195 - DNA, 394 bp, Homo sapiens
gctatttatatacattatttatatatcatacgtatttttatatatgtatgcctcaaattaaattaatatgtagataaaatacgtatgatataatatacattacattatattacacaactaaagatacttagagmaaaccaccgagacacaaaagcagatcttatgccttttaaatttacagtgttagatcttaattttcaaataaacatgaattacagaaacgtctcttgattttatttttaatttgaaaatgtccaaatatttattgataaagtaaacctaacatggaaaaagacaaataaaattttgtcattcatctctacataatttcctatttttccttctgttttatggcagcccttcattgttcagagcgaggtaagcaggggccggt

SEQ ID NO: 503196 - DNA, 628 bp, Homo sapiens
tgcctgtggagtaatgaagtggacaatgagggtgacagcactgtgacaccttatcagcctttatctgtagcagcagaagagcagttgtcaagtctacatgtccgtattgtcccatgaagcttgagtgtgtgtgtgtgtgtgtgtgtgtgtgtccaaactccacaacacacctgtaaaaacagaactcccaggtggtatctggccacccatcttcataaatccccacggacaattctggcgcatggccagggtcaaagagcaatgctaccttggagctacaggaatgcactcggcgtgtgtgatgccagtggtttaagtgggtgggagcagagtgacataaatgactggatgctcaggggtggtacaggacaagaaggggcacccgcagccacacctggagaacsaggagcaggcggctgacaccagcaggtgggcacggcgtgctctgctcctggagtcgacccctcacctgccctgtgggtgagcacctgcttgtgggtctctcattggtgctgtgggtgactcaggactgaatcactgtccaagcaagaaacgctgagtgtggtcagccttgcgctgatgttcgagtcttgcatttcctgaacaatcacagaagcagcaaccatct

SEQ ID NO: 503197 - DNA, 594 bp, Homo sapiens
ttcagtgcgctttcaagaagagctgacgagtcctgggttccagcaccctctagccccttagctgctggtagatctcaggtgctgaactcaggttcctcatctgtagatkggaactcgtgactcaacaaggtatgtaatcgaactctgagacagaaatgcaggagttcccacttccaacgaaggatcaacaagagagctcctcagccctgaccacaaatccacccgaactcccagaagattcagaaacagccatagcgagggcttgctctgggcaaaaccaagataaataggctctctgagctaatgcatcctgttcatcaggaagtgccgtggctggcaggaagcccagtttgcaagggcccaactggcccagaactgtgagacgggagccaaggagacagagatcttgccctggctctgcctctgatgacctgggtgagggagccactggttctctgagcctcagtttccttgctgtgcactgaagtgtctgctgaactctaagggggtgcgtgttcttcgtttggagcagaacctcatgctgcatacatcgatgtttctgtctcaaggagctatggagtcacaaaggcaggg

SEQ ID NO: 503198 - DNA, 625 bp, Homo sapiens
ctttaaaattactaaacgtccatgtgaattcagtgcgctttcaagaagagctgacgagtcctgggttccagcaccctctagccccttagctgctggtagatctcaggtgctgaactcaggttcctcatctgtagatgggaactcgtgactcaacaaggtatgtaatcgaactctgagacagaaaygcaggagttcccacttccaacgaaggatcaacaagagagctcctcagccctgaccacaaatccacccgaactcccagaagattcagaaacagccatagcgagggcttgctctgggcaaaaccaagataaataggctctctgagctaatgcatcctgttcatcaggaagtgccgtggctggcaggaagcccagtttgcaagggcccaactggcccagaactgtgagacgggagccaaggagacagagatcttgccctggctctgcctctgatgacctgggtgagggagccactggttctctgagcctcagtttccttgctgtgcactgaagtgtctgctgaactctaagggggtgcgtgttcttcgtttggagcagaacctcatgctgcatacatcgatgtttctgtctcaaggagctatggagtcacaaaggcaggggac

SEQ ID NO: 503199 - DNA, 594 bp, Homo sapiens
ttcagtgcgctttcaagaagagctgacgagtcctgggttccagcaccctctagccccttagctgctggtagatctcaggtgctgaactcaggttcctcatctgtagatgggaactcgtgactcaacaaggtatgtaatcgaactctgagacagaaatgcaggagttcccacttccaacgaaggatcaacaagagagctcctcagccctgaccacaaatccacccgaactcccagragattcagaaacagccatagcgagggcttgctctgggcaaaaccaagataaataggctctctgagctaatgcatcctgttcatcaggaagtgccgtggctggcaggaagcccagtttgcaagggcccaactggcccagaactgtgagacgggagccaaggagacagagatcttgccctggctctgcctctgatgacctgggtgagggagccactggttctctgagcctcagtttccttgctgtgcactgaagtgtctgctgaactctaagggggtgcgtgttcttcgtttggagcagaacctcatgctgcatacatcgatgtttctgtctcaaggagctatggagtcacaaaggcaggg

SEQ ID NO: 503200 - DNA, 616 bp, Homo sapiens
catcctctcctgccctgggacatctgagttcctggttctcaggcytcagatgcagactgggactgacatcatcagctctcccaggtctccagcgtgcaggagggaacatgtgggtcttcccagcctccacaatcgcataagccaattcctcttaataaacctcttctataaattcctgtctgtctgtctgtccatctatctatttatccctgtccgttatgtatctatcggtctgtcatctatctgtctatctgttgtctatctgttgtttgtctctccatctgtctatctgttgcttgtctctccgtctgtctatctgttgtttgtctttccatctgtctatctgtctctctatctgtcatctgcctatccacttatctatttatcttgttgcttctgtttctctggagaaccctgactaacacagagataaaaaggctctgaagggagaggctgtgcttcacgcccttgaggtactgagaagttcagagattaatcgaaaaacagagactatatggccaaaggcatgtcctgagtttgcggagtgacagggtaggctagatgtatatgacttccatgtaaaaataaattcaacacatgtcaaagagcatgttta

SEQ ID NO: 503201 - DNA, 616 bp, Homo sapiens
catcctctcctgccctgggacatctgagttcctggttctcaggcctcagatgcagactgggactgacatcatcagctctcccaggtctccagcgtgcaggagggaacatgtgggtcttcccagcctccacaatcgcataagccaattcctcttaataaacctcttctataaattcctgtctgtctgtctgtccatctatctatttatccctgtccgttatgtatctatcggtctgtcatctatctgtctatctgttgtctatctgttgtttgtctctccatctgtctatctgttgcttgtctctccgtctgtctatctgttgtttgtctttccatctgtctatctgtctctctatctgtcatctgcctatccacttatctatttatcttgttgcttctgtttctctggagaaccctgactaacacagagataaaaaggctctgaagggagaggctgtgcttcacgcccttgaggtactgrgaagttcagagattaatcgaaaaacagagactatatggccaaaggcatgtcctgagtttgcggagtgacagggtaggctagatgtatatgacttccatgtaaaaataaattcaacacatgtcaaagagcatgttta

SEQ ID NO: 503202 - DNA, 562 bp, Homo sapiens
tgccctacagttcacatccggaaacattaaatcaagggaaaacattttctctgtgaactgccttaaattgataggccccaaatctgccttcacctggatgtctggagatacctctgctgagaggaagagggttcattaaacatcttccttccaacactgaagtgaggaaaaccatgttcccagaaaccacccagcacctcactctgaaaaatcctttctcaactctctaggtatctctttttgttctgtttagaaaaatgaagcatgcttattgcgaagggaaaaaaagaaaagaaaaaagaaagaaatgawtctgaatggctttggtctcccatgatttcacaagtttagccagagaagccattaatagctaggtctgggctcctcttcaatacagtttcactgaaaaaaaaaatgatgtttcaaattagtaattcatcacacctgaattaacactaaaacgtccatcaaattaaaatcattttgcaagattggaattgtttctgcaacgcctgaagtccaaaaatggaggcatgagagtgaataagaatcaggatgtaaa

SEQ ID NO: 503203 - DNA, 689 bp, Homo sapiens
tgccctacagttcacatccggaaacattaaatcaagggaaaacattttctctgtgaactgccttaaattgataggccccaaatctgccttcacctggatgtctggagatacctctgctgagaggaagagggttcattaaacatcttccttccaacactgaagtgaggaaaaccatgttcccagaaaccacccagcacctcactctgaaaaatcctttctcaactctctaggtatctctttttgttctgtttagaaaaatgaagcatgcttattgcgaagggaaaaaaagaaaagaaaaaagaaagaaatgattctgaatggctttggtctcccatgatttcacaagtttagccagagaagccattaatagctaggtctgggctcctcttcaatacagtttcactgaaaaaaaaaatgatgtttcaaattagtaattcatcacacctgaattaacactaaaacgkccatcaaattaaaatcattttgcaagattggaattgtttctgcaacgcctgaagtccaaaaatggaggcatgagagtgaataagaatcaggatgtaaatgaattcctgacacgtcattccagtctctgaatggggggctggagtaggaattaaataatcacacgcaaattggatttccaagatctttccaggccagctactgtaagctgtttgttgtttggacag

SEQ ID NO: 503204 - DNA, 557 bp, Homo sapiens
atcaggatgtaaatgaattcctgacacgtcattccagtctctgaatggggggctggagtaggaattaaataatcacacgcaaattggatttcyaagatctttccaggccagctactgtaagctgtttgttgtttggacaggtcagttttgggtgagttgtgtgctttcagggaagcgaggggatagcagagtgaggggtggggaggagagaggagaaagcccacagaggtgcagcccctaaaccaggccagtgcctttcctcctgttggaagcatagaattaaatttcattcacaagcccaaagcactttccacaggtctttaaaatgggattagcctaaagcaatcaagttggagagactaaccagcaaacgctaaaagtactcccacctgcctactcaatggaactgtttgccaggggaaaaaaaaaaaagtcatcagatgcattttcgtggcattgagcaatggattaatgacacatggagacatgcagagacacttggaaggctggcctgagctctccgagaggcggtggtcagcagtttagggtctgaattg

SEQ ID NO: 503205 - DNA, 557 bp, Homo sapiens
atcaggatgtaaatgaattcctgacacgtcattccagtctctgaatggggggctggagtaggaattaaataatcacacgcaaattggatttccaagatctttccaggccagctactgtaagctgtttgttgtttggacaggtcagttttgggtgagttgtgtgctttcagggaagygaggggatagcagagtgaggggtggggaggagagaggagaaagcccacagaggtgcagcccctaaaccaggccagtgcctttcctcctgttggaagcatagaattaaatttcattcacaagcccaaagcactttccacaggtctttaaaatgggattagcctaaagcaatcaagttggagagactaaccagcaaacgctaaaagtactcccacctgcctactcaatggaactgtttgccaggggaaaaaaaaaaaagtcatcagatgcattttcgtggcattgagcaatggattaatgacacatggagacatgcagagacacttggaaggctggcctgagctctccgagaggcggtggtcagcagtttagggtctgaattg

SEQ ID NO: 503206 - DNA, 533 bp, Homo sapiens
aatttaatgaggattgcattaaaataatctcataagaaaaggaaaaaaagaggctgggcacagtagcttgcacctgtaatcctagcactttgggaggccaaggcaggaagatcacttgaggtcaagagttcaagaccagactggccaacatggtgaaaccccatctctactaaaaatacaaaagttagctgggtatggtggcacatgcatgtattcccagctactcgggaggctgaggcaggagaatcacttgaactggggtggccgagcttgcagtgagctgagatcatgccactgcactccaggctgggtgacagagtaagacaagacaagacagacaaagaaagasagagagagaaaaaaaaaaaagaaaagagaagaggagaggagaggagaggaggggagagaagagaaaagagaaaagaaaaggaaaggaaagagaagagaagagaaaagaaaagaaagggaagggaaggaaaggaaaggaaaagaaagaggagcaacgtagcaaaatcttggtatttgccgaaatt

SEQ ID NO: 503207 - DNA, 617 bp, Homo sapiens
tcatctgcccaacatttttgtcattttggaggagatgagtgcaaactgagaaagtctctctgcttgtttccctgggtggtacttatgctgtctgaatgttcctttctggratttattagttagtgattttcttttcaataaacacttgtagcatacatactagtgtgctctcctaaagggggaaataatttggcagccttatcagcatgttattggactttcgttttgtttgtaatcttaagacacctttttcccactcagccattcagcaacattttcccttccccagccttggccccgccacctgaaacattcatgttcttcctctaagacagaataccaaccaagtgcaggcagccggttgacacaaccagatcaaaaggctttgaattctgaaaatgattcccctcttggtatcaagcccagtgataaaagcaaagcagttgtcatcttgaaaacagagctgtatacacagcagagcctttccaattagcacacttaagatgcgtgttagaaatgatgggaagtgggatgttacagagtgaaatgcaggtaatagggctttaaattttcatgtttcagttgatttttttctattgcagttttaagaaaatcgt

SEQ ID NO: 503208 - DNA, 450 bp, Homo sapiens
ggatgagaatccagcatggggaagaccctctgattccaaatcaacagtccagggaccatcccggttccctccgtccactttctcatgggaaaggcggttgtcctcaggcctctggatgggcaggctcctcactcctgagacacaatgtagtgtatgaagtgagcaaatgcccacttttaggcattactatagggtcactatgtgaaarttttgtaaggtgattacctgagcaggcattcagttcttttcagggcataaagttatctctttgtgtccatggcttacagacaggcacgagtagtagttctctcaaaacttttgcaaggtaactgcccaccctccatctcctgggcctgctgctgagagcacacatcaccacacacctggccacacacctggccgcacacctggccacacacctggtggggtggggacaggacagcagccaca

SEQ ID NO: 503209 - DNA, 563 bp, Homo sapiens
ctgtgctgtggccctgcaactgggaagagtggggttgcttcccccgggaacagccataggcaggaaactgaaagggactggcttcatctgagccttggcctagagcaggcagtggaatttgtctttggagtgtgtgagaatgcacagttgcccctctgtgggggtgagggaataggattgctgtctgtggctgcctcttcagccccaggagggagggaaggtgagagagcaagggagaattcatggaactgacagtatgcatggaagcaggagaaggacargtaatcatgaggaagtgaagaaaagaaaatgtagaaaggatggggaagtttttttattgcttttggctaaagaagtgaaattcaggccaagttcaattagatctctaggccacagagaattctagttgcctattgagttaaatttagctatcctctcttcctccccttcttcattcccattagtcctcaacaatgatacagtatatctcatcttaaaagaaaaagcttcctataaccctgcatattcatccagttaccattatttttctctatttcccttca

SEQ ID NO: 503210 - DNA, 563 bp, Homo sapiens
ctgtgctgtggccctgcaactgggaagagtggggttgcttcccccgggaacagccataggcaggaaactgaaagggactggcttcatctgagccttggcctagagcaggcagtggaatttgtctttggagtgtgtgagaatgcacagttgcccctctgtgggggtgagggaataggattgctgtctgtggctgcctcttcagccccaggagggagggaaggtgagagagcaagggagaattcatggaactgacagtatgcatggaagcaggagaaggacaggtaatcatgaggaagtgaagaaaagaaaatgtagaaaggatggggaagtttttttattgcttttggctaaagaagtgaaattcaggccaagttcaattagatctctaggccacagagaattctagttgcctattgagttaaatttagctatcctctcttcctcccctycttcattcccattagtcctcaacaatgatacagtatatctcatcttaaaagaaaaagcttcctataaccctgcatattcatccagttaccattatttttctctatttcccttca

SEQ ID NO: 503211 - DNA, 614 bp, Homo sapiens
atttatcttgtaaacagacgatgtaaacctatggtattgacaaatgcagtatagtactgtaaatgtattttatcttccttatgatcttaacatttttctcttgcttactttatcgtaagagtccatataacatacaaaacatgagttaactgcttatgttactggtaaggcttccagtcaacagtaggccactggtagttaagttttcgaggagtcaaatgtyacatgtaaattttcaactgcacgggggggttagcaaccctaatccccgtgttattcaaggattagctacatataaagtagggcacaccttttgactcagcaatctaacttctaagaggaacttaataaacaaatgaacaagagtacaaagattatgagggaatttttcactgggttcttagagaaaatttagaaacgaaggcataatatccattaagaggaggtcataaaaacatgtatggggaggacacataggtatgtatgtatgcacatgtgtgtatgcaagtaaacatttacatagacatacatcaaaatgttaacattggttatctttggatagtgagattacgggcaattttaattttcttctttatacatttataaaaattgta

SEQ ID NO: 503212 - DNA, 614 bp, Homo sapiens
atttatcttgtaaacagacgatgtaaacctatggtattgacaaatgcagtatagtactgtaaatgtattttatcttccttatgatcttaacatttttctcttgcttactttatcgtaagagtccatataacatacaaaacatgagttaactgcttatgttactggtaaggcttccagtcaacagtaggccactggtagttaagttttcgaggagtcaaatgtcacatgtaaattttcaactgcacgggggggttagcaaccctaatcccygtgttattcaaggattagctacatataaagtagggcacaccttttgactcagcaatctaacttctaagaggaacttaataaacaaatgaacaagagtacaaagattatgagggaatttttcactgggttcttagagaaaatttagaaacgaaggcataatatccattaagaggaggtcataaaaacatgtatggggaggacacataggtatgtatgtatgcacatgtgtgtatgcaagtaaacatttacatagacatacatcaaaatgttaacattggttatctttggatagtgagattacgggcaattttaattttcttctttatacatttataaaaattgta

SEQ ID NO: 503213 - DNA, 614 bp, Homo sapiens
atttatcttgtaaacagacgatgtaaacctatggtattgacaaatgcagtatagtactgtaaatgtattttatcttccttatgatcttaacatttttctcttgcttactttatcgtaagagtccatataacatacaaaacatgagttaactgcttatgttactggtaaggcttccagtcaacagtaggccactggtagttaagttttcgaggagtcaaatgtcacatgtaaattttcaactgcacgggggggttagcaaccctaatccccgtgttmttcaaggattagctacatataaagtagggcacaccttttgactcagcaatctaacttctaagaggaacttaataaacaaatgaacaagagtacaaagattatgagggaatttttcactgggttcttagagaaaatttagaaacgaaggcataatatccattaagaggaggtcataaaaacatgtatggggaggacacataggtatgtatgtatgcacatgtgtgtatgcaagtaaacatttacatagacatacatcaaaatgttaacattggttatctttggatagtgagattacgggcaattttaattttcttctttatacatttataaaaattgta

SEQ ID NO: 503214 - DNA, 614 bp, Homo sapiens
atttatcttgtaaacagacgatgtaaacctatggtattgacaaatgcagtatagtactgtaaatgtattttatcttccttatgatcttaacatttttctcttgcttactttatcgtaagagtccatataacatacaaaacatgagttaactgcttatgttactggtaaggcttccagtcaacagtaggccactggtagttaagttttcgaggagtcaaatgtcacatgtaaattttcaactgcacgggggggttagcaaccctaatccccgtgttattcaaggrttagctacatataaagtagggcacaccttttgactcagcaatctaacttctaagaggaacttaataaacaaatgaacaagagtacaaagattatgagggaatttttcactgggttcttagagaaaatttagaaacgaaggcataatatccattaagaggaggtcataaaaacatgtatggggaggacacataggtatgtatgtatgcacatgtgtgtatgcaagtaaacatttacatagacatacatcaaaatgttaacattggttatctttggatagtgagattacgggcaattttaattttcttctttatacatttataaaaattgta

SEQ ID NO: 503215 - DNA, 234 bp, Homo sapiens
cttcaaagccatgcatacttttaatgtaagtagccccagcctacttctctgggsttatttaccaacgcagcctcccacagatgctgtaaacctgacacagaaagcccctggccgttccccaaacactgcccacatgcctcccagcagcgcctttgctgatactgtttctgcttcctgacacgccctccttctcgcacgtctaaggcctggcacgggccccatctcttttcgtaa

SEQ ID NO: 503216 - DNA, 620 bp, Homo sapiens
ggcagcgccctcttcacaacgttgtgcgtgacatggagttccctcccttctcctcctgtagggcctgtttctgttcccgcatgaatcccatttcctttcaccctgtggacctccaccagtcctactgttctccaaaataagaacactggaaagaaggtcaaggctgcactgccagggcctccaatcaacccacggatcgcaccctgggtcagcagcacctcccacaggcctggggttgtgttggggcctgcgrgaggtgatgatggccgatgtcacttatacagtgactgttctatgcctggagtgaccttagagacttggaaaatattcagccctcaaaagaatcccagcagcttctgaatatttggaaacaatggaacagaattcaaggtaaagctccttgtcccagttgccttaatctgcaagtgaggccagcagttgccagcacagaaatgaggggaccctcccagggtttgcctgagctgtgggaagactaggagggaaggtacctggaagacctgacacagagaacaatctgggcctgactggagtgtggggagaaggacaaggctgctgagccagagaggagggtgtgacaagacaagtgactactgtgccag

SEQ ID NO: 503217 - DNA, 507 bp, Homo sapiens
caccagtcctactgttctccaaaataagaacactggaaagaaggtcaaggctgcactgccagggcctccaatcaacccacggatcgcaccctgggtcagcagcacctcccacaggcctggggttgtgttggggcctgcgggaggtgatgatggccgatgtcacttatacagtgactgttctatgcctggagtgaccttagagacttggaaaatattcagccctcaaaagaatcccagcagcttctgaatatttggaaacaatggaacagaattcaaggtaaagctccttgtcccagttgccttaatctgcaagtgaggccagcagttgccagcacagaaatgaggggaccctcccagggtttgcctgagctgtgggaagactaggagggaaggtacctggaagacctgacacagagaacaakctgggcctgactggagtgtggggagaaggacaaggctgctgagccagagaggagggtgtgacaagacaagtgactactgtgccag

SEQ ID NO: 503218 - DNA, 560 bp, Homo sapiens
gctgattaaattcaatcactcatgccttaagactggcaatgatttgttgacttcaacttgaatatctgcatcttatttgtgccgtgtgtgttttctgccataaaaaaaatttatattgcaataggactatagctacaagtttaaaatagatttataaaaaatctatcccaaccatgaagatttctttgctaaataatgtgttttcttacaacccacaggcgaggaaacgagacctctttcgttccttctagaaggtctggaggacgtagagttattgaaaatgcagatggttctgaggaggaaacggacactcgagacgcagacttcaatggaaccaaggccagtgaataagcaastttctacagttttgcaccacggcaagaaaaccaaaaaccaaaacaaacaaacaaaaaaaacccaacaacaacccagaacaaagcaaaacccagcagactgtacttagcattgtctaaatccattctcaaattccaaatatcacagacacccctcacacaaggaatataaaaaccaccaccctccagcctgggcaacgtagtaaa

SEQ ID NO: 503219 - DNA, 464 bp, Homo sapiens
tctgttgcccaggctggagtgtagtggtgagatcataggtcactgcagcctggaacttctgggctcaagtgatcctcctgccttggccttccaaagtactgggattacaggcatgaaccactgtgcctagcctatcaattttcataaacatccagaactttttctraaatatatatcgggggagaagagagattgtgttttggtcgtgtttcacataaaaaaattctgtttctaagaagtattttctataactcatattttcacaaaacaatgtttttagaaatttttggggtggagggggtcatttcatatagaattgcctgtgattcattgctgctgagttttcataggatggatgaattataatttattttaccctatgttgatggatatttatgtcattttcaacattcactctttcggtgctgtagtgaaaatacatgcaagtattacccccagatcag

SEQ ID NO: 503220 - DNA, 572 bp, Homo sapiens
ggtgcagtgactcacgcctgtaatcccagcatattgcgaggccgaggcggatggatcacctgagcccaggagtttggaccagcctgagcaacatggcaaaatcccgtctctacccaaaatacaaaaattagcagggcatggtggccggtgcctgtaatcccagctactcaggaggctgaggcaggaggatcatttgaacctgggaggcggaggctacagtgagctgagagagtgccactggactccagcctgggtgacagagtgagaacctgtctcgaaaaaaaaacaaaacaaaaaattatccctgtttctgtgctrgggaaactaaggaaaacatatcccttgtctctgtaagaagaagcaaataatcatttatgaatctcaccaaatgaaaaaggaatagggacaggggctttgtgatcatcttaaatattatctacttaaggcattggctagtttaacacaagctaattcctcctctttttaatattggtacataatggagtaatccaccagagtctcttgtagcattgatgaacaccaggaattgcattgactctaatacacattgc

SEQ ID NO: 503221 - DNA, 523 bp, Homo sapiens
aaatacgggtgactctttgcttgctcacctgccattcacctccagccgtgcagccccgttcctacaggccaccacccagtatcggtctgtggcctgggatgtggggacccctgctttacagtacaggagcagacctgaaccaagcccaagacacttatatttccccacttctgtggtccagagaaaagtggcctggagaaactgctctcatcaaaatacagttactaaacctggagacctctcctgtcgtatttgcatttgacackgaaggaaagatgtgaagatgttacagatctttaggaaaggacagatattttctgagaagagggaaggtgggagtcttcaaatttaccttgtagcagctaccagtggtgtatcactggtaagtgaagaatgtgtattccagaagtagtaaaagttcattttaacagagtcacttagggaaaacaaaagcttcctttatatagtggaatctgcatgcatttctttaagccctaatatctgaatgccaaggcactgagtc

SEQ ID NO: 503222 - DNA, 490 bp, Homo sapiens
ctgactctaccattgatagcctacctagatttaacttcacagttcctggctttttctcactttacatgtttagtaagcaaatttctgatctgtatttaaggaggcttttctcttggaaaagaatctgytgaaaagctattttgaatattggtcctcatggccattatatatttttcattatccattacttaattgacttgctggtatgaattaattatggatttggggtagttgagaatgttgttttttttttcctccatgaactaatcatctccgaatatatcgacgattaaaaaacgcagatctatagaagcaacatagacatcgaaaatgtttttaatatcacatctgtggcattatagttatcacattatagtttactaagtgctcttacatataatacatttatttaatatctgtctcacactaagctgttatcagcagaagagcatgaaacatgtctattcaccagtgagttcccaacaatggg

SEQ ID NO: 503223 - DNA, 590 bp, Homo sapiens
tagcctctactattatgttaaccaaagcagcaatgttttcatccagtttttattttggaatttccatgtctacgaatattgaaacttgttagatgaaagtactgaagtttaatgttaaaatgcaggttttggcaaaggctgcattaagttagcccctaacctaktccaaaagggaaatggtttgaatgaatagaccctttgtctctttgtctaacactacagccacagtagaatctttatggcctatgtttgctatgagaccaagggagaagtatttaaagggtgaggtgcttgggtgagcagtcaggtgatgctgtagtggtactaggtgagagtgagcatttggagagttgcccagagaaaacccaaagcaaactttatctacttgaaatttttgttctagggcaaatcttaccaagacatgtctcactattctttttttttctagcatgaaggtagcattagattaggttaagtctgatattatatgacacaataaaccaacctctaaaagagatgaagcagtttaccaagtcacatacagagctttgaagtcagagagcctgggtctgagtcctgattcagccact

SEQ ID NO: 503224 - DNA, 604 bp, Homo sapiens
atagtatacatgacgatctttttcctcccaccytctcatgaactctgaaaaaatatgtcttactcctaaactacttagcacttttgaaatgccaactaattcttcctggttgtccaaaatgagtacagaatggcaattcccctaggaaattttctcctctgggagatgaagctattagcaaagcaagtcaaggtcctgttagacattctgctgttatccaaatgagacttccggcagatgtctggagagttgaaatccccatcactactctgtcttttctctgcactgatttcacaatctgtgtctagtaacacaccacgcatttgctccatgtgtcccagcgtactctcataatgatagcacttctgtgctcttcctttgtcctaacccatatgctctccagcatgttcctgccctcaggtctgggcatttccatatgaatgtagatcttcatgacattcacccctgctctgcctcctgtctaagcagtctgtttctttaggggtgggcacacccttccattacaatgctgtaacacccttcccttgaattataacacgaaggtctaggcttcaaagcccaagtaatagttataaaatcaggt

SEQ ID NO: 503225 - DNA, 501 bp, Homo sapiens
tttacattttgacttgtgcctcttgttatatgtggaggatcaattatttatccaccactgcccaaygttcattacaggaaaaaggctgctcagcttgtgaaaagcgtttgctccagtttctttcatttgaagcatgcaaagtagttttaacaaatggcacttaataaaaaataaatggtaccttaagaccgttcatgcagaggacttcctgacaatgactggaagtgccaactagcccatgagctaattatcctgtaaattcccttttcttccccagtgtggaggtgagatctaatttgaaagattaaaatctttgcatgattacagtatatcataattgttaagctctatagttacatgctcaatagctactaagtaagtgcaaagaattacaaggtgatttgtgcctgtaagataaattccaagaattttgcttctaaaaaggcagggaagtggaggtggcagaataaaaaatgtgctaagtgaagtgatttattgtga

SEQ ID NO: 503226 - DNA, 537 bp, Homo sapiens
tcttggctatgaaaaggtaggaggaagatacgcaaaaagattgaacatttacctcaaagaaatcaaagactaaaatatcctttaagcaagatcaagtctcccatgactcctgttttcagtataaccagagttcataagaagttttagttcactgcaaagaaacagagaagcctacatttttgcctacccaaattgtagcaggtaaatccttacctcctcattrtaatatcccaacaatattcattatgagtagttaaaagtttgtatttatttcctgaatcatcctcaacaaaactatcaacaaatattgcccaggattgttttatttcacaaccaagtccattcttcagtaggaatttggccactctgtaatgagcacctcctacagaaacaaaaagatccctgggagtcaacatggcaggctaaaattttctgtgttgggacagagatcttgtctgtcttttccctgtggcatgtagagtctttcgtagtgccttgtcctttgtagattctcaaaatagatatggtgaattaatg

SEQ ID NO: 503227 - DNA, 605 bp, Homo sapiens
acataagcatgccatttcccagcttaaaagtcatcagcaactccctattgttttacaggaaagtctcaattttcttggcttcagtgtcctccaagttctggtgccattttaatttcccacctcatacctatacttgaactactatcaagtactatcattcctcatggatctcagaataccacacatcctttacatggcagggacactgcccacattgctccttaccttggctggaataggcatctgcccctctgctgcctctcaggctcccgctggaaggtccgtaaagcctaccccatccactaggaagggttcattgctcattgtcccatcatcccacataccgtaaaagtggttctcaaacttcagtgagcatcagaatgacggcgaaggctggtcaccccacgcccagggtttctgattcggtaggcctgactggggtctaagtatgtgcatttctaacaagctccaggctgatcctgatgctgccgctctgggctccasgctttgaaagccactgtaatacaggagcaccaaccacatcgtgtggtaattagtagttttccaaatccgcctctgccacgggattctgagttcctgaacag

SEQ ID NO: 503228 - DNA, 644 bp, Homo sapiens
ctcatcatcagtagccacagcattttgggtcagcccacrctccagtgtggtgactgagcaaggcaggtgcataaagacacccctaatgggcaattctcaacccgaagccccctgctctgttggccaaggctttatcaggcctggagcgcagggtgtcttctctctctgcctagcctgctgccactccttcctttccctggcactgatcctcaatctacatcttgcactccaagactctgtctcagtctttgtcactggagaaatggatggacaccatcctgttagttcataaccttcatgactgctttatgaaataagaattattatccccatctaatagatgaagaaactgaggctcagagtggcaaaatgccttaagtcagaggttaagcatcttggaggtaggacgttgtggaactgggattggaacttagctttctttgggtctgtttcctgcatattccactctcctgagcagccttccacattcctcagtgtttttgcttctgaattttccacagccttggcatgcacagatacattcatgtaggattaggtgtgctggtgaacagggagtgggcactatattgtatgaaaagagaatattcaacattattaataatgggaaattctgcaatttattg

SEQ ID NO: 503229 - DNA, 644 bp, Homo sapiens
ctcatcatcagtagccacagcattttgggtcagcccacactccagtgtggtgactgagcaaggcaggtgcataaagacacccctaatgggcaattctcaacccgaagccccctgctctgttggccaaggctttatcaggcctggagcrcagggtgtcttctctctctgcctagcctgctgccactccttcctttccctggcactgatcctcaatctacatcttgcactccaagactctgtctcagtctttgtcactggagaaatggatggacaccatcctgttagttcataaccttcatgactgctttatgaaataagaattattatccccatctaatagatgaagaaactgaggctcagagtggcaaaatgccttaagtcagaggttaagcatcttggaggtaggacgttgtggaactgggattggaacttagctttctttgggtctgtttcctgcatattccactctcctgagcagccttccacattcctcagtgtttttgcttctgaattttccacagccttggcatgcacagatacattcatgtaggattaggtgtgctggtgaacagggagtgggcactatattgtatgaaaagagaatattcaacattattaataatgggaaattctgcaatttattg

SEQ ID NO: 503230 - DNA, 484 bp, Homo sapiens
gcaggcaggtggatctgattttcctctsctgcagagtttgctgaaaccgagctcccccgcaccccgcaggcaggtggatctgattttcctctgctgcagagtttgctgaaaccgagctcccccgcaccccgcaggcaggtggatctgattttcctctcctgcagagtttgctgaaaccgagctcccccgcaccccgcaggcaggtggatctgattttcctctgctgcagagtttgctgaaagcgagctcccccgcaccccgcaggcaggtggatctgattttcctctgctgcagagtttgctgggggctaagggtgagaaccgcgggaacgaactaacgcgctgcagtgtcgggaaacacggcccacagcgccaccgtgtggtctccgcgtccccagttcggagccgcagcttacgcgctgctggccctgagcctgttcccttcctgcagtccccaggagctgacgctattcggtttgttttta

SEQ ID NO: 503231 - DNA, 484 bp, Homo sapiens
gcaggcaggtggatctgattttcctctgctgcagagtttgctgaaaccgagctcccccgcaccccgcaggcaggtggatctgattttcctctgctgcagagtttgctgaaascgagctcccccgcaccccgcaggcaggtggatctgattttcctctcctgcagagtttgctgaaaccgagctcccccgcaccccgcaggcaggtggatctgattttcctctgctgcagagtttgctgaaagcgagctcccccgcaccccgcaggcaggtggatctgattttcctctgctgcagagtttgctgggggctaagggtgagaaccgcgggaacgaactaacgcgctgcagtgtcgggaaacacggcccacagcgccaccgtgtggtctccgcgtccccagttcggagccgcagcttacgcgctgctggccctgagcctgttcccttcctgcagtccccaggagctgacgctattcggtttgttttta

SEQ ID NO: 503232 - DNA, 484 bp, Homo sapiens
gcaggcaggtggatctgattttcctctgctgcagagtttgctgaaaccgagctcccccgcaccccgcaggcaggtggatctgattttcctctgctgcagagtttgctgaaaccgagctcccccgcaccccgcaggcaggtggatctgattttcctctsctgcagagtttgctgaaaccgagctcccccgcaccccgcaggcaggtggatctgattttcctctgctgcagagtttgctgaaagcgagctcccccgcaccccgcaggcaggtggatctgattttcctctgctgcagagtttgctgggggctaagggtgagaaccgcgggaacgaactaacgcgctgcagtgtcgggaaacacggcccacagcgccaccgtgtggtctccgcgtccccagttcggagccgcagcttacgcgctgctggccctgagcctgttcccttcctgcagtccccaggagctgacgctattcggtttgttttta

SEQ ID NO: 503233 - DNA, 597 bp, Homo sapiens
gcagccccgagctcaggcctccacggggctttgcgtttstcagcatccacacaagggccttctccacggcaaacctgctttgtttgtggcactttgttttcgggggtcgggggtcggggggtggctatcaggagccctcagcagtgcaactttccttttctgaaacacgtggaaccagaggactctgtcctcgcagacacgctggccctcagagcccctgtttctcccacctacgtcattttacttctggcctccactcttggggtccattgcaggctgagcagtttggtttgaggagcccccaaggtcctaacttgtggtgtctgagccaggggggattgaggagcctgtttagcccctgctgggggatttctcccacagcagacccgagagtgggtgccaggcactccaggggtaggggatgccttggaccagcctgctcctgcacaccttcccgcggtccccggggtctgggtccatgagctatggccacagcctcctgtggcccctgctgtgatccgggccaccccagctcccggcagaataaagggcaccagcaatgcgtgtccagtaaggcttgtcataagctgacctccc

SEQ ID NO: 503234 - DNA, 599 bp, Homo sapiens
ctcatttgcaagaggaagaggttctggtgatggtgactcagctacttacagaaaagtcttgatcacacattgagacattcatgacacgtttccatatttccaaatccattgtcatcaggtacataattaattgtaacattgctaactctggaagaagaaggagtttccataatttattcataagacgaagtcacctgtttgaagagccttgagatactccattgaggggctctcttttaagcatcacttctccttcccaaatgttggaggacaaaagaactttcctttccaaatttggaaacagtagaacttaatcctacctgaatgtgttctcccttcctgggaccagtgaaagtacccaggtagaagcaataaaggttttctgggaaaagtagaccccttctgattcctgattcctgagagatggaaggcgggtgggaatgtgggtatcatggggtggataatcggctcttctgcaaccttttgggactcctccttgggccaggtttggctcatacatcagccctgtaagggggccaagagagaattctgtgtttggygtgcagagatagagatgagggtgtttcatcgccattgtt

SEQ ID NO: 503235 - DNA, 522 bp, Homo sapiens
gtcatttccaggctgcgctcctctccagggaccccatgccgtgtggtgcaggctcctgcacagccttggtgtgaagtaccatcttataaataatccactgcctgcctctcctgccccatcactccagccrcatgggacaggtgatgtttctaacagaagaggagcgtgaccacacacagcagtccaacaggcatggcccaggaagcttccagtggctctggttcctgggccattctgggagtgggcctgggaacttgcgtctcttcagggtctccagacagtgctgttttgggcccacgtttctcagcccctacatcacaacgttatattgaagcatgaggagctctcccctgcaccctccagcatggcttattccaccctcatgcctaagcctatgtctttgcatgtggggtctttgcatgtggggcagcctgaacaatgcacacccctctggggctcagggaagacgtcttgggctgcgttttctgcaacgtggtctgccttctggccttgatgcccggg

SEQ ID NO: 503236 - DNA, 431 bp, Homo sapiens
catatgcaatgtatttttatgctattggtattgtttttaatttcatcttccagttactttgttgatagcaaatagaaacattaattgagtttagtttattggccttgtaaattcattaattctaatattttatagasttttagaatgcacataatcaagttacatgtgaataatggcagttttgcttcttactttccaacttgtattacatatggatttcatgatttaaatttgtattttttcttattgtactgggcaagattcatagaagttttttgtttgtttgttttttgagacagagtcatgctctgtcacccaggctggagtgcagtggtgtgatcctggctcactgcaacctctgcctcctgggttcaagcgattctcctgcctcagcctcccaagtagctgaggttacagacacctggcaccgc

SEQ ID NO: 503237 - DNA, 431 bp, Homo sapiens
catatgcaatgtatttttatgctattggtattgtttttaatttcatcttccagttactttgttgatagcaaatagaaacattaattgagtttagtttattggccttgtaaattcattaattctaatattttatagacttttagaatgcacataatcaagttacatgtgaataatggcagttttgcttcttactttccaacttrtattacatatggatttcatgatttaaatttgtattttttcttattgtactgggcaagattcatagaagttttttgtttgtttgttttttgagacagagtcatgctctgtcacccaggctggagtgcagtggtgtgatcctggctcactgcaacctctgcctcctgggttcaagcgattctcctgcctcagcctcccaagtagctgaggttacagacacctggcaccgc

SEQ ID NO: 503238 - DNA, 431 bp, Homo sapiens
catatgcaatgtatttttatgctattggtattgtttttaatttcatcttccagttactttgttgatagcaaatagaaacattaattgagtttagtttattggccttgtaaattcattaattctaatattttatagacttttagaatgcacataatcaagttacatgtgaataatggcagttttgcttcttactttccaacttgtattacatatggatttcatgatttaaatttgtattttktcttattgtactgggcaagattcatagaagttttttgtttgtttgttttttgagacagagtcatgctctgtcacccaggctggagtgcagtggtgtgatcctggctcactgcaacctctgcctcctgggttcaagcgattctcctgcctcagcctcccaagtagctgaggttacagacacctggcaccgc

SEQ ID NO: 503239 - DNA, 564 bp, Homo sapiens
tacaaaatccacacactgcgtgtggctgctccgtctttgaagcctaatctatgagtcccttctgtcacgctggttttaaaccaccttatggagatataattgacttaaaatagactgcatatatttaaaatctacacctgacatatatttaaagttacagtttgaagttgcatatgaaatctacgctgttttcattacccatgaaaacctaactacaatcaagacagtgtatctaccacatccccaaacttctttgtgccccttcctaattccctcctcccgccaccccatccctccatgatctactttttgctgtaacagtytgcaacatcatgagttttacataaatggaatagatacagtatgtactactgtgtgtacggcttctttgactcagcatgattatcttgagattaagccaccttggtgcatgtttcaacagttaactcctttctaatgtatctagtatcccactgaagagatggcccacaatatcctttcacctgttgatgggacatctgcactgtggtccagtttttggctgtactgaaaagctgacaacaa

SEQ ID NO: 503240 - DNA, 674 bp, Homo sapiens
tgtttcaactgaacttagagaatgttaatgccgtgcaaatgtgcatgagccaattatttaaattaaaaatttccttaggagaatcagcatgtacttgtgatgtaactacccacttcacatgcaatacttttaagcagaaaaaaagatgattcctccacagaaggagaaattgcttttgctaacaaaaaastttcagaagaatttcggcataaatattctcagcctcatctcatctggtctatgcttgcttagatttttttcattgtgtatttcagagtttcacttttttcctccaagtgtacttattttagcataagaaaatgtagttgggttatatattggcattgtaactttaatttttacaattaagccctgggcttgattctaagacatgtcttccctgaaactataaaagataagaaactttttttcagaattgccactgaggcattctattttttcatccttgttctgtataaactctaaaattttcaaaggtagctgcttcaagccataatgttagtaatcatgattgctgcctttgtaactaagtgatagctgtgtgactgccattgccttgccctccatttgcaacccattccatccataattaaaagattgaaaagagttacttcaagccagtttacccatatgtaatttcccttcaacgagga

SEQ ID NO: 503241 - DNA, 653 bp, Homo sapiens
gtgtgcagatggccacacaggaagcttccaggagtcaggcccggaggcagcccaggcctccactgaccacgacccagtccccaccaccaccgtgaactccccaggagtgggaagtgtcgactagctctgtgccctgcagaaaagggagatgggcctggacaacatctcctgtttccccgccataagagagaaactccctttctccttctcttattttgaacagacaggaccctagaaaatgaagacagcaagtggagatgttcaaagcaatgtgtagaatgtagtcactgaaaaaactgtaacctctgaatgaaaagacatttgggagaaagagaagctagaaaaatagcaaaagaaacagtaacaaagaaaggtgaacatctttaaattagaatcaaatccatagatcttattttattaagaaaaattatattaagataaacaattttgctgacctatttaacctacgcttcacaaattatcttatttgataaaaaattatttggagccaaacaaaggctctagatatttgcaagtgagttctcatggytatgggtagaacaaatgcgtgaaaacacggactggaattattccttcctggaataattgtattttaacttctccagaatgctgacagagcacttcagaattgg

SEQ ID NO: 503242 - DNA, 364 bp, Homo sapiens
ccagtgcaggttggcctttgttagagcccactccattagccaatatgccttcctgccgtccttcaggtttgtggcttaatgttttaattttccrtatgcaaaagtttgtctaccttatgttagctgtcccagaagacagaatagcagagaacagtaagtgtgtgtgtgtgtgtgtgtgtgtctatgttctctttggatggtgtctgtaaatttgttttcaatgtcttttcaatgacaaagggaatgacagcaggagtgagactgtcttaatgttacactcagctctaggaaaaggaagaggtaagaaatcaaaacaaatctatgaaaagtagagtgagggagaaattactcctcagattcttgc

SEQ ID NO: 503243 - DNA, 565 bp, Homo sapiens
tctcacccaaggttacaaagctcaaagtagcagagtcaagagaggagtggagctcttgactcccaatttcacatgcatcaaggaggcaggcttgcatgaggtacacccaaggagcagcagcctctcccgttcccacctctcacaggccctctgagggtgtttctattctatcgctcatcaccttgacagaaacctctggagaagctatggtcatctactagcaggatctgtgggtcgtctaaggtagaaacatgtagaayggccatgttattcctcccctccgtgaaactttcctgccaaggtgtgtctgatttttgctgagtgtgttcccaggctaaggatgctgagaacaagtgcaaaaccataacaggatgctgggagcctgggccagccacaaagaaggccttgacatttgcagatctgaagtcttggaccttcagactgctcggatccttaaataaccaggggctggtaagggagatctggcaaaggcaggtagcaccagtgtgcctcagtgctctgatatgccatgtagaaacacggccacttatgtgtgctaattgat

SEQ ID NO: 503244 - DNA, 622 bp, Homo sapiens
  misc_feature (1)...(622): n = A,T,C or G
tatttaatttataataagtggatggagtaggttttataagccttttttacagatgataaaatacatgctgaycatgattttgaagattgcacagacaataaatgcctttgctgtgtttcaaacccacgttagtatatctctatacctatgctgtttttcattttgctatactaaaaatatataatcttttcatgctttctttttaatgaagatggaaaaccaaatgtcatttcaaccatcattgattccaagttattgtcacataactgaagacctttgtattataatctttccttagtgttcagtgtgaaagcaattgcttgcctgaccactcactgaaaaatcttcccacctcaaaacaaattttaaatataattcaagtttctatatttcaatacattaaagagcatgccttaatatatttgaaagccattttgtttgatattactttgattttaagtttcaattctcaaaagaacaaactctgaatcatctctaggttccgtttccnnnnnnnnnnnnnnnnnnnnnnnnnnnnnnnnnnnnnnnnnnnnnnnnnnnnnnnnnnnnnnnnnnnnnnnnnnnnnnnnnnnnnnnnnnnnnnnnnnnnactgtgtgtata

SEQ ID NO: 503245 - DNA, 622 bp, Homo sapiens
  misc_feature (1)...(622): n = A,T,C or G
tatttaatttataataagtggatggagtaggttttataagccttttttacagatgataaaatacatgctgaccatgattttgaagattgcacagacaataaatgcctttgctgtgtttcaaacccacgttagtatatctctatacctatgctgyttttcattttgctatactaaaaatatataatcttttcatgctttctttttaatgaagatggaaaaccaaatgtcatttcaaccatcattgattccaagttattgtcacataactgaagacctttgtattataatctttccttagtgttcagtgtgaaagcaattgcttgcctgaccactcactgaaaaatcttcccacctcaaaacaaattttaaatataattcaagtttctatatttcaatacattaaagagcatgccttaatatatttgaaagccattttgtttgatattactttgattttaagtttcaattctcaaaagaacaaactctgaatcatctctaggttccgtttccnnnnnnnnnnnnnnnnnnnnnnnnnnnnnnnnnnnnnnnnnnnnnnnnnnnnnnnnnnnnnnnnnnnnnnnnnnnnnnnnnnnnnnnnnnnnnnnnnnnnactgtgtgtata

SEQ ID NO: 503246 - DNA, 628 bp, Homo sapiens
gatatgggtttgttgtggaagaggtgggggctgaaaccctgaggaccaagaatcctgccctcaatttctgattgacactattgactaaaggtagcttttttcattggtggaggaagggcagtagttcatttgttcagcctcaatttatctatccatatcctgggcatgagagtaccaactctctcctggatatatggagggatcacatgggacaatcaatagatataataattgtttcgaatcctgcatataccttataggtgtgaagtggttgtgtcctttgtgaattctcttggccaggcaccagtgggaggttagatagtgacctggagtttgtgttgaggaattagtagcctttgaatgcctgcctttgtagctgttgcacatacgttaggcttactttcaactaaatggaatwagctaattgatttcttcagaggtccaagtgataacagagccaaaccttgctagcccataggggtgagagtctagcttagtgacaggttgtttttgggagacacaccctttgtgtcttcacttctctgtcccctgtctccgtcctgctctccctctcacccattctgccagctctgctggccccatgggcacctagagcacatgcacttgg

SEQ ID NO: 503247 - DNA, 505 bp, Homo sapiens
ggcttggcttttctgtagtctttattgaatacctagatattcaaatggagtctttccactccaaggaataaaacgttgaatgtcattcagccctgaatgagctcagagaattgttccgatagaaaaccccggcagttgttctttgcctggatttgtggagttcacttacacatgtgcagttttggattcagccactcartgggactcttatgcaggtttctggcattcttcctttgtgtagctcctccttctctggaatgctgccctgtaatttccagctgcctcagcctttctgagctcctatctctcctcaattcagagaaactgccaagctctgcatgggccccctttcctgccctgaggttaggaaattgtttccaggctgcaagtcatgctttcagggatcatagacctacactgcctcttgtctaatgctggaaaacagacattttatatatttcatttagttttctagttgtttatgggttttggaggagggtgtgca

SEQ ID NO: 503248 - DNA, 660 bp, Homo sapiens
agctattaagcagctgcaaataagctaacaaaggagtacatatgctaagatcatggctaaggcyatgataatacagggctatgacctccaggaggaatagggaagccccagtctcaaaaggcaagcttgtgataatcaggcaaatagcagaatatacatagcaaaagactgtgttaatgcacaaaagtattaaggcaataaattctttcagaagtctttgcaaacagacatagggatggaatgtatgactggatggttacatgtcatggaaggcatatcaagaaagttcaacatctatctaataggagttttagaactgggctgcaagacagagcaaaactccatcaagaaaagaaagagagagaaagagagagagagagaaaggaagaaagagaaagaaaagaaaggcaaggcaaggaaagcaagaaagcaagcaagcaagcaagcaagaaagaaagaaagaaagaaagagaaaaattatagcaaggacactgccagagcaagaattttttttaagtcccagaaatgaagacaaatggaagaattcagtttaaaggggccttgtgagttctgaagagaatgcaaataaacagattcacgtgcagacacattgtggtgacgtttcagaactccgagaataaacacacatttcttaaaatc

SEQ ID NO: 503249 - DNA, 668 bp, Homo sapiens
atgaaaactgagaagaggcattcagtatgcaaattcccaagtctgtatatacatccatgtacagcttctgccttagaatcaattgtagagcaataaaagctactgcttttctcctccattctgattttgaaagcctggatggcagaagaatgggagttggttcccagcagaattacagagcttactcatataactgtcagactctcttaaaggaaggcaaacttagctgcactatctgtgctgggagaagtcttttctttgttggtaatctactcacagaattagcgtttaacaaatatgttaattaaagctctagactacatgttatgtttgtcatgcgtcttgtgacaagttctattgtgttttgtgttaatattattcttcagcagataacattgttcctcattcagtcaaatcaaaatgttaaaactaggcacagtatctaagtagaaaaaaacagggctttyttcctgctcactatgtttgattctgatggggacaactactaaaaaagtaaaaattttcattttatctaaaccaagtatgaaatctcattgagtattttttactgacagaaaagatgaaagaaacaaaagaaagaagaaaaggaaaaaagaggggaaaatacgtactgatttcattattctgggggggaggaaaaaaaaaca

SEQ ID NO: 503250 - DNA, 622 bp, Homo sapiens
gtctgtatatacatccatgtacagcttctgccttagaatcaattgtagagcaataaaagctactgcttttctcctccattctgattttgaaagcctggatggcagaagaatgggagttggttcccagcagaattacagagcttactcatataactgtcagactctcttaaaggaaggcaaacttagctgcactatctgtgctgggagaagtcttttctttgttggtaatctactcacagaattagcgtttaacaaatatgttaattaaagctctagactacatgttatgtttgtcatgcgtcttgtgacaagttctattgtgttttgtgttaatattattcttcagcagataacattgttcctcattcagtcaaatcaaaatgttaaaactaggcacagtatctaagtagaaaaaaacagggcttttttcctgctcactatgtttgattctgatggggacaacyactaaaaaagtaaaaattttcattttatctaaaccaagtatgaaatctcattgagtattttttactgacagaaaagatgaaagaaacaaaagaaagaagaaaaggaaaaaagaggggaaaatacgtactgatttcattattctgggggggaggaaaaa

SEQ ID NO: 503251 - DNA, 571 bp, Homo sapiens
agttaatgtctctatccagcaccaggatggtaaaggctagaacccaatggtgtgtttgaacaggtcgttaaggagacaggaatgtccacgcctgtttaaatgctgacacagactcctctaatatatgctgctttcaagaaaaaaagtgttgacatcttatccaactcactgaaactattatgcaaaaatgaaattggttaacgcagggaatttttagatgcatattttccataagcatttatttaacttaaaagcaaataaaggtatatttttgctattattttgacgtcagcccaaaaaaatactgaatgtatttattactactgatgggatttccctgttgtctttcatarcataccatctatgacgtctggttttgttttctttaaagtggagaaagaacacactaacaaagtacaggtttttaaagtaaactttccagatttaaatatttatacatctatttgaacagcaattgttagcaactcatatctaccgaatctttcaaacgcatttttcaaagtgatcaactcccttccattctatacttatattttatgagtaaaatgca

SEQ ID NO: 503252 - DNA, 647 bp, Homo sapiens
tgtatgttctcttatatgtgggagctaagctatgaggataccaaggcaaaagaatgatacactggactttgatgactcaggggaaatggtgggggtggcgagatataaaagattacacattgggtacagtgtacactgctctggtaatgggtgcaccaaagtctcagaaatcaccactacagagcttattcatgtaacaaaaaaaaaattgggtgcatagtggaactgttaatctcagtatagcgagaagataagtaggttttatttggaaatgtaatcgctgtcgtttctggaggttccagttgctcgatagatgtgcctggcagcagttattacaagggcctggaactcaagagcgaccacagctggagacataggttcaaaagtcattctgtggctatcatgaggacgattgttgtggaagattcacaggcaaagtaaatgcagtgagagaamaaacagaaagtgaactctaacatgccacaagggcaaacctctttattttttaggagctgaggatatgggtacaagagattcttgaaaatgtcaagaaacattttaaagcccatgcttaaggtcatagaataagcctatgttctttctcaagggatcgtgaaaaccagagtttctgatttatctttataggg

SEQ ID NO: 503253 - DNA, 568 bp, Homo sapiens
ttaggatgggaggggtcatgtccatcttgtgcctcactctatccccagccttctacaccatgcctcatgcatggtagatggtcaataaatatttgctgaaaaaaaaatgacaaacagcatgttcgggatagtttaaactgtaagtaaatgtgattaaacagcactttgaccattttggcatgtggaataatagaactaatcacaactagttacagtcttgtttgttcttctatgattactgtttgtttttacactgattacttcttatgtgattgataaatgtgggaatgctatggttttaatatatgtgttcctccaagattcatatgttgaaacttaatcatcaagggaatgaaatcaggaactgaggcctttggggaatgattaagtcttgaaggctgtgcctttgtgaatgggaccaatgcccttataaaagaggtttcagagacctgcctcaaccttccatctcttctgctatgtgaggacacagcatttgtcctgccccttttgcccttctgccatttgaaratatagcaagaaagtaccatcttggaagcagagagaggcc

SEQ ID NO: 503254 - DNA, 597 bp, Homo sapiens
tttggttgcctgtgctgtcggggtccacgtaaattttaatttagggggctaaaagttctcggtaaagggaaatagaaaagcaaatggcctttgacaggaatgaacacatagatgtaagtgacaagaggctgtgtagctggagacagatttgaaaggaagaaaatatgattgacttggagacactgacatgggcagataagaacacaggaggactttagaatggaaggtcctaagcaggaaggacagtcttatttgtatctttaaaaaagcttactctgacaagtcattctacctctttgagcctctggtacatcctmtataagatacaagtagtattctttttttcacagggctcttaagaaagttaaattcgatcttggacagaaagtacatggcatacagtaggcactctatgaacatgagctgaacttgaacatcttggggggaagtaataacaccacagagaggaggcagggaatgaaggtattggagatctgtcctcttgagccttgacggctcctgcttctaagagaggtcatgatcttatgacagtgccttccccaatccccttatttggatatcccatggctatgcaac

SEQ ID NO: 503255 - DNA, 498 bp, Homo sapiens
atggtatttaccttgataacttaattgtttggcacccttttaaattttgcatccaaggagggattcttaatctcttcttccttgtcctggccctgatacgtggctttccaattttctacgatgagagtagttacttttacatttagaagaatcaaatgatatgacttttttaaagagatgagttattaaaaggagacgtgatcagaagacatttagcttcgtttaggaggcaaagcagatgcacgtgggccatttcaaatagaaaaccataagactgtatgtgaaaaaggaccctaagatgaaacagtggtgggtgttataagaattctgatctcagtaaggtaagaggaggctggtgttttccagaaacakaagagaagaaggtggggtttctgtgctagcaccagaagacacaaactggaggcagcaataccactgcagttgatgtgacagaagcccctggagaagagttcaccaaaacgtgaaaggggagtccag

SEQ ID NO: 503256 - DNA, 446 bp, Homo sapiens
ggagggattcttaatctcttcttccttgtcctggccctgatacgtggctttccaattttctacgatgagagtagttacttttacatttagaagaatcaaatgatatgacttttttaaagagatgagttattaaaaggagacgtgatcagaagacatttagcttcgtttaggaggcaaagcagatgcacgtgggccatttcaaatagaaaaccataagactgtatgtgaaaaaggaccctaagatgaaacagtggtgggtgttataagaattctgatctcagtaaggtaagaggaggctggtgttttccagaaacataagagaagaaggtggggtttctgtgctagcaccagaagacacaaactggaggcagcaatmccactgcagttgatgtgacagaagcccctggagaagagttcaccaaaacgtgaaaggggagtccagcagc

SEQ ID NO: 503257 - DNA, 648 bp, Homo sapiens
atgtggcaatttctcgaagacctaaagacagaaatattcaacccagcaatcccgtttccaggtatataccgaaaggaatatagatcgttctattataaggacacgggcatgtgtatgttcttgcaggactgttcacaatagcaaacatatggaatcaacctaaatatttgcccatcagtgatagagtggatcaagaaaatgtggtacacatactccacagaatactatgcagccataagaaaaggatgagatcatgtcctktgcagggacatggatggagctggaggccattatccttaggaaactaacacaggaacagataaccaaatatcatatattattacttaaaagtgggagctaaatgatgagaacacatggacacatagagtggaaaaacacacaatggggccttgcagagggtggagggtgggaggaggaagagagtcgggaaagtaactaataggcactaggcttaatacctgggtgatgaaataacctgtacaacaaacccccatggcacaagtttacctgtgtaacaaatctgcatgtgtatccttgaacttaaaagtaaaagaaaagttgagaaccctgccctcgtgcttgtcaaatcagatcaattctctataagtgcaaggattctcgaacctt

SEQ ID NO: 503258 - DNA, 648 bp, Homo sapiens
atgtggcaatttctcgaagacctaaagacagaaatattcaacccagcaatcccgtttccaggtatataccgaaaggaatatagatcgttctattataaggacacgggcatgtgtatgttcttgcaggactgttcacaatagcaaacatatggaatcaacctaaatatttgcccatcagtgatagagtggatcaagaaaatgtggtacacatactccacagaatactatgcagccataagaaaaggatgagatcatgtcctgtgcagggacatggatggagctggaggccattatccttagsaaactaacacaggaacagataaccaaatatcatatattattacttaaaagtgggagctaaatgatgagaacacatggacacatagagtggaaaaacacacaatggggccttgcagagggtggagggtgggaggaggaagagagtcgggaaagtaactaataggcactaggcttaatacctgggtgatgaaataacctgtacaacaaacccccatggcacaagtttacctgtgtaacaaatctgcatgtgtatccttgaacttaaaagtaaaagaaaagttgagaaccctgccctcgtgcttgtcaaatcagatcaattctctataagtgcaaggattctcgaacctt

SEQ ID NO: 503259 - DNA, 648 bp, Homo sapiens
atgtggcaatttctcgaagacctaaagacagaaatattcaacccagcaatcccgtttccaggtatataccgaaaggaatatagatcgttctattataaggacacgggcatgtgtatgttcttgcaggactgttcacaatagcaaacatatggaatcaacctaaatatttgcccatcagtgatagagtggatcaagaaaatgtggtacacatactccacagaatactatgcagccataagaaaaggatgagatcatgtcctgtgcagggacatggatggagctggaggccattatccttaggaaactaacacaggaacagataaccaaatatcatatattattacttaaaagtgggagctaaatgatgagaacacatggacacatagagtggaaaaacacacaatggggccttgcagagggtggagggtgggaggaggaagagagtckggaaagtaactaataggcactaggcttaatacctgggtgatgaaataacctgtacaacaaacccccatggcacaagtttacctgtgtaacaaatctgcatgtgtatccttgaacttaaaagtaaaagaaaagttgagaaccctgccctcgtgcttgtcaaatcagatcaattctctataagtgcaaggattctcgaacctt

SEQ ID NO: 503260 - DNA, 543 bp, Homo sapiens
gttgatacggcacagagggttaggagaggaatctgttctagctgttggtatggagatgctgaaacaccctgcagtctttgttctgccagcgtgtgagtatgcaactgatagtatttagtgaagaagycttactttattagaaccttttgcctaaatggaaactctaggtttgtacatcatttggagtagttccctgagacctgagtattcccaggatttacacctaacttggtttatatttgcatgcttattggtccagaggatttggcatttccttctcatactcttgaatcacatttaataatagtaatatagttcctgacaattattaagcacacactataagccagacgttgtgctaaataatttcacgtgtgataggaagaataatggcttccctaagatgtccatgctgtgaatatgttgcttatagtgtaaaggggactttgcagttgtgagattcagggtttagtaccttgagattcggatgatcctggattagcaaggtgggaccaacttaatcctgtgaatcctcaaaagtga

SEQ ID NO: 503261 - DNA, 543 bp, Homo sapiens
gttgatacggcacagagggttaggagaggaatctgttctagctgttggtatggagatgctgaaacaccctgcagtctttgttctgccagcgtgtgagtatgcaactgatagtatttagtgaagaagtcttactttattagaamcttttgcctaaatggaaactctaggtttgtacatcatttggagtagttccctgagacctgagtattcccaggatttacacctaacttggtttatatttgcatgcttattggtccagaggatttggcatttccttctcatactcttgaatcacatttaataatagtaatatagttcctgacaattattaagcacacactataagccagacgttgtgctaaataatttcacgtgtgataggaagaataatggcttccctaagatgtccatgctgtgaatatgttgcttatagtgtaaaggggactttgcagttgtgagattcagggtttagtaccttgagattcggatgatcctggattagcaaggtgggaccaacttaatcctgtgaatcctcaaaagtga

SEQ ID NO: 503262 - DNA, 482 bp, Homo sapiens
aaacaccctgcagtctttgttctgccagcgtgtgagtatgcaactgatagtatttagtgaagaagtcttactttattagaaccttttgcctaaatggaaactctaggtttgtacatcatttggagtagttccctgagacctgagtattcccaggatttacacctaacttggtttatatttgcatgcttattggtccagaggatttggcatttccttctcatactcttgaatcacatttaataatagtaatatagttcctgacaattattaagcacacactataagccagacgttgtgctaaataatttcacgtgtgataggaagaataatggcttccctaagatgtccatgctgtgaatatgttgcttatagtgtaaaggggactttgcagttgtgagattcagggtttagtaccttgagatkcggatgatcctggattagcaaggtgggaccaacttaatcctgtgaatcctcaaaagtga

SEQ ID NO: 503263 - DNA, 497 bp, Homo sapiens
ccccacacccatttccacaacttattttcctgctgtctgccaagaaaaggaaataatggaggtaactcagcaacgatccagagagactcctggggaatttgcattctcctgttgaggaytgcccttgtgagccctggtaagccctgatgtgctttctgttactctcatagtgtatcaactgagcatttcaacatattttatttcaatttccaggggtgagaggaaaagtaaaaacatcaaataagcctggtaagcctgaggattcagatggatagcattctcacgtgcacataagctgaattggtcacactggaaaacaactactccaccaccacccacctccctcccccttcctctgtcatcatcatcctccatcatcatcacatccatcctcctcctcctcaccatcatcatcatgaccatcatcatagccaatatctctcttgggcatatccaatatgtagctctatatagcatacagtgggatgtcttattat

SEQ ID NO: 503264 - DNA, 598 bp, Homo sapiens
gcaagtttttatcttcgggaaggaccacttgagcttgagtatgaggaagggcttggaggagggaatgaatgaaggcagaaaagcaggcccagagaaatctcactraagcaactccagaaaagagagaaagatctgaactaggattgctgcaatacagatacacaaaagagaggttcaagagatgtttaggaggtacattcaactggtcttggcaactcatggatcggattggcagggagattggggagtgaaagaggattgccaagtgaatggtgatgtcacttacaaaagtggagaacaggttagggaccctgctttcttcctcacaattgtagctccagcacctagccttgtacctgacatacagtagccactctgtaaatgttttttgaatgaatgagtgagcaagggtggaagtgagtataggtagggggacagagaaatgcatatggaattcaggtttaggttagctgcttttgaaacctccctgcagggagtccaccaagaaggtggataggcaggtctgaagatgagaaaggggtcagggctgaggcttgagatttagaagttgtctatctgctgggggcggtagttgttg

SEQ ID NO: 503265 - DNA, 614 bp, Homo sapiens
taatttcaatcgagaaaaaaatacatttttttcttctagaaccttgctgaacacagcaagaaagagccatcccatgcaaaatttttagtttttctcctagcatttcccctaaggctacagcctcaatcagtatttggtcttctttccaaagacagctgttgacagttagaccaaatatttttttgccgtttgtgatggttaatattgagtgtcaacttgattggattaaatgatgcaaaatattgttcctgggtgtgtctgtgagggtattgccaaagaagattaacatttgagtcagtgggctcaagaagcagatccaccctcaatctggttgtgcaccatctaatcarctgccagcatagctaggataaaagcaggcagaggaaggtggaaggactacactggctaagtcttctggcctccgtctttctcctgtgctgcatgtcttctgcccttgaacatcagactccaagttcttcagcttttggactcttggacttccaccagtgatttgccagggactatcaggccttcagccacagactgaagggctgcaccatctgcttgtctgcttttgaggttttgggactcagactggcttcctggcttctcag

SEQ ID NO: 503266 - DNA, 610 bp, Homo sapiens
actatgtttggggtactttctaatgcagcaatagaaaactaatgaatttatcgctgagccttaacatttgagaaaaatatgcctaatccaaggttttgaggtattgtgaggatttattacgtaatgtaagagaagacacaaaaggccttctttttaagatagaaaaagatgtatctattgttttggttgagggcatgtgatcgccattcatgctgttcatcaagcatttccagcaatcccccawtctagatgctgacagccctgcacaggagtcctcttatctgaggtttcatttgtcagggctctgttacccatagtaaatggcagtcaactgaggtctaaaaatatcaaatggaaaatcccagaaataaacacttcataagttttaaattgtgagccattctgagtatcgtgatgaagtctctgaccttcccagtctgtcccaccagggatatgaatcttctctttgtctggtgtctccatgctttagatgctcccactcattagccagttagcagccatctcagttgtcagatgggaaaaacacagggtttggtactatcagcagtttcaggcatccactggagtcttgtctgtctgcccttggtgt

SEQ ID NO: 503267 - DNA, 578 bp, Homo sapiens
ctttccatcctaatttagtttgttcttcatttttatatttgctatataactgactgaatgatgcctctatggttattagctgactatgtgcacagtagaaattaattgcattacagttgtttgaaagtattgcagcatcaaatattcttgaaagcatttgcaggcttaatgttgtgcaaaatgatctattagctaaactatatttaagcctatgctgtctttatgctgaaatggaraaatttttcagcttgatagaaaaatgcactaagtatcttcaaagtacactttctaatgtgtatgaattaatattctaacaataaatttgccttcatagcaaaacataatttttcatggtttctgtcatttatattatgtttcatttacaatcttattttaaatgtgggagtgtgcaaaactactgaatttctcttcatataatgaaaatatatttatttattatttttaacagaatgtattataaaaatacttaaatgattagagggataaaataggtaggtggtagtttacatggagattttcaagaggttggttaaaatattaagaaacaattgacttta

SEQ ID NO: 503268 - DNA, 578 bp, Homo sapiens
ctttccatcctaatttagtttgttcttcatttttatatttgctatataactgactgaatgatgcctctatggttattagctgactatgtgcacagtagaaattaattgcattacagttgtttgaaagtattgcagcatcaaatattcttgaaagcatttgcaggcttaatgttgtgcaaaatgatctattagctaaactatatttaagcctatgctgtctttatgctgaaatggaaaaatttttcagcttgatagaaaaatgcactaagtatcttcaaagtacactttctaatgtgtatgaattaatattctaacaataaatttkccttcatagcaaaacataatttttcatggtttctgtcatttatattatgtttcatttacaatcttattttaaatgtgggagtgtgcaaaactactgaatttctcttcatataatgaaaatatatttatttattatttttaacagaatgtattataaaaatacttaaatgattagagggataaaataggtaggtggtagtttacatggagattttcaagaggttggttaaaatattaagaaacaattgacttta

SEQ ID NO: 503269 - DNA, 578 bp, Homo sapiens
ctttccatcctaatttagtttgttcttcatttttatatttgctatataactgactgaatgatgcctctatggttattagctgactatgtgcacagtagaaattaattgcattacagttgtttgaaagtattgcagcatcaaatattcttgaaagcatttgcaggcttaatgttgtgcaaaatgatctattagctaaactatatttaagcctatgctgtctttatgctgaaatggaaaaatttttcagcttgatagaaaaatgcactaagtatcttcaaagtacactttctaatgtgtatgaattaatattctaacaataaatttgccttcatagcaaaacataatttttcatggtttctktcatttatattatgtttcatttacaatcttattttaaatgtgggagtgtgcaaaactactgaatttctcttcatataatgaaaatatatttatttattatttttaacagaatgtattataaaaatacttaaatgattagagggataaaataggtaggtggtagtttacatggagattttcaagaggttggttaaaatattaagaaacaattgacttta

SEQ ID NO: 503270 - DNA, 643 bp, Homo sapiens
ttccctccccttctcctcacacttctactccttcatacttcttactactaaaatgttacttgcaaggggtttctctacctatcccagctgatcattgtgccagctggtggggcaccaactgaagaagaaaagcctagagtctttttttctgttttttctttctttctttctttcttttttttttgagacagtctcgctctgtcatccaggctggagtgcagtggcgcgatcttggctcactgcaactgctgcctcccaggttcaagtgattcttctacctcagcctcgcaagtagctgggattacaggtgcccgtcaccatgtycggctaatttttttgttgttgttatatttttattagagatggggttttgccatgttggccaggctggtctcaaactcctgacctgaagtgatccacctgcctcggcctcccaaagtgttaggattacaggcgtgagccactgcaccttgtccagaaaagtctagagtcttatcttggtcccagcttgtctctaggagcagaaatatttcatctcgtggctcagtgactggtgtttaccataactctatcccatgggcaggtttaacttcaagaatattctgtgtgaattaaagaagactgactttccaactcatttata

SEQ ID NO: 503271 - DNA, 576 bp, Homo sapiens
tgccacctccgcatcttctgaggaacaaagatctaagaggctgaattcttagcacctccaccctattggttcaattccctttaaacctcaattcagaggccttgccatgggcacatttgcttcactagaagccaacttttattcataccagcattgagcaggccaagtgtggttcagcaggagccagaggctagaaagcagacatcaggattctctcagggaaacagtgtgaactctggcaagtcccactttgtgctcagtttgttcttggaaacaagcccacctttcctactaacctctaggtgaggatcaaatgcagtaacacacatcaacatgccttgaaaagcatgaagtgcatcctgtcattgctgtaatagtggaactgccagagtgcacctggaaaccagtcacctccaggctgcctaggacactggactcctgccggagctgtgaaactgggtaatttcagctttctctcctttttttgcccttcttgcctcagataaatgtgttcatgcatgrggaaaagaagaaagggatgtatgacaattatcaaccagcacatacaaaaacagt

SEQ ID NO: 503272 - DNA, 530 bp, Homo sapiens
actacatccacctgtgaccacaaggagagttgcttacaagttggatggaacagaggcagataggaaggacaccagtcttgacaacatcattaagcactgaatcartccacaaagagtcaatgtctgggcttttcaccgtagacaaaataaacctcctcttgctcaaatctttgttatctaggacaccctaaatgatacagaagtgatccaatggctggtctatttctttctgtgtttgtgtttgtgtttgtgattgtgatttgtgtgtgtgtgtgcatttttattacacatggaaagagtgttctttcatagggaccatgcctctattatcaattgagtataaacgttttttaaaaagattatacggtatgacagagagctacaactacagaaatattgagaaattcagatatttagataatgagaagtcaatggagctatatgattaagggaaacaacagtaaaggaggccggctaaaattatgtgttctggtttgtcatttcttatgcaggaaatcattatgaatcca

SEQ ID NO: 503273 - DNA, 530 bp, Homo sapiens
actacatccacctgtgaccacaaggagagttgcttacaagttggatggaacagaggcagataggaaggacaccagtcttgacaacatcattaagcactgaatcaatccacaaagagtcaatgtctgggctkttcaccgtagacaaaataaacctcctcttgctcaaatctttgttatctaggacaccctaaatgatacagaagtgatccaatggctggtctatttctttctgtgtttgtgtttgtgtttgtgattgtgatttgtgtgtgtgtgtgcatttttattacacatggaaagagtgttctttcatagggaccatgcctctattatcaattgagtataaacgttttttaaaaagattatacggtatgacagagagctacaactacagaaatattgagaaattcagatatttagataatgagaagtcaatggagctatatgattaagggaaacaacagtaaaggaggccggctaaaattatgtgttctggtttgtcatttcttatgcaggaaatcattatgaatcca

SEQ ID NO: 503274 - DNA, 530 bp, Homo sapiens
actacatccacctgtgaccacaaggagagttgcttacaagttggatggaacagaggcagataggaaggacaccagtcttgacaacatcattaagcactgaatcaatccacaaagagtcaatgtctgggcttytcaccgtagacaaaataaacctcctcttgctcaaatctttgttatctaggacaccctaaatgatacagaagtgatccaatggctggtctatttctttctgtgtttgtgtttgtgtttgtgattgtgatttgtgtgtgtgtgtgcatttttattacacatggaaagagtgttctttcatagggaccatgcctctattatcaattgagtataaacgttttttaaaaagattatacggtatgacagagagctacaactacagaaatattgagaaattcagatatttagataatgagaagtcaatggagctatatgattaagggaaacaacagtaaaggaggccggctaaaattatgtgttctggtttgtcatttcttatgcaggaaatcattatgaatcca

SEQ ID NO: 503275 - DNA, 530 bp, Homo sapiens
actacatccacctgtgaccacaaggagagttgcttacaagttggatggaacagaggcagataggaaggacaccagtcttgacaacatcattaagcactgaatcaatccacaaagagtcaatgtctgggcttttcaccgtagacaaaataamcctcctcttgctcaaatctttgttatctaggacaccctaaatgatacagaagtgatccaatggctggtctatttctttctgtgtttgtgtttgtgtttgtgattgtgatttgtgtgtgtgtgtgcatttttattacacatggaaagagtgttctttcatagggaccatgcctctattatcaattgagtataaacgttttttaaaaagattatacggtatgacagagagctacaactacagaaatattgagaaattcagatatttagataatgagaagtcaatggagctatatgattaagggaaacaacagtaaaggaggccggctaaaattatgtgttctggtttgtcatttcttatgcaggaaatcattatgaatcca

SEQ ID NO: 503276 - DNA, 665 bp, Homo sapiens
ctgggctacttaatattattagctctgtgacctcgggtgtattatttaacctcccctaagcctcactttcttcatttgtaaacataaatctgtaaaaagaggataaaagcaatgctctctcttagagttgttttgaaagttaattaaattcttgcaaaacagcgtactgctgagagaatgaaatattttcaattgtctaagtttttcagaatgctgaaaggcttataaacttgtttataagtaatttttaatttaacattttggttgaaacatatctgaaatgcattacgtagtgtcttcctaaacagtttatgctaattgaattgagccttgataatttatgaccctcgtgtaaaatctaattattgctttatgctgatatacagtgatgtacagtggcttttgagatgtttgaagttttttcccttcttaaatggccccaaattgctctgacttttgagtccttgtttttaatttgttttttctctcttgctctaacactgctatcaagtacatttcatttttatcactgggctacatctrgcgacccttccatctcccaaaattttggtttctaatctcttgtggacttaaaatggagaggcaatatgtatagtgcttaagagcataagataatcctaggtgtaaatcccagcccttcgcac

SEQ ID NO: 503277 - DNA, 569 bp, Homo sapiens
ttccccgggatttaaacagtgtgatgaaatacctaaaagcagtgatgttggagttacctttcaggaaggtaaagactttgacagggttccaatgagacctggacagaaggcgtccggctttctccaggggtctggaaaactgactcaaggaccctgctttgttcatgctctacagcaccacctccctatcatcaactcagctacaggaccakctggatggatccatgagactgtccttggtgcctgcagagaagcagtggagggatgaggccccctctcctgccacagtagcatagaccaagtgtcccttagctgacagtaccttgatgctcacaccagtggggttcccaaccctatagtccatcttctgcggcacctgtagtctagctggatgacaaaagggaagaatcgaggagagggagagtcagaccaggaactgtcatgggggaaggggaagattaggtaggagaaagtctacttccaagccagccaaccttcaaccttcctgcgtgtgcaagctgcatgcctctggggacagggaagggaggggagctgcagtgccttctgca

SEQ ID NO: 503278 - DNA, 569 bp, Homo sapiens
ttccccgggatttaaacagtgtgatgaaatacctaaaagcagtgatgttggagttacctttcaggaaggtaaagactttgacagggttccaatgagacctggacagaaggcgtccggctttctccaggggtctggaaaactgactcaaggaccctgctttgttcatgctctacagcaccacctccctatcatcaactcagctacaggaccagctggatggatccatgagactgtccttggtgcctgcagagaagcagtggagggatgaggccccctctcctgccacagtagcatagaccaagtgtcccttagctgacagtaccttgatgctcacaccagtggggttcccaaccctatagtccatcttctgcggcacctgtagtctagctggatgacaaaagggaagaatcgaggagagggrgagtcagaccaggaactgtcatgggggaaggggaagattaggtaggagaaagtctacttccaagccagccaaccttcaaccttcctgcgtgtgcaagctgcatgcctctggggacagggaagggaggggagctgcagtgccttctgca

SEQ ID NO: 503279 - DNA, 641 bp, Homo sapiens
tatgagataaatctattataggaagtattcatataaaaaggaacttcatttaattcaacttttggaaaaactttttttttaaagtgtcccacragagattgcatggagagaatgagataagaaatggaaaagaaaatttgaatggaaaaacataatctctttctaaagagaatatttctctttaaaaatatttctattttttatttttgcatcttaatgatgctttctcttgagaacatatgagaaagttttacatttattactaaaataaaatagttgtttcaagcatgaacaccaaactccaaaaatacccaaaggtaatagtaacaagtgagaggtaggagtaaagatatggactcttttcatataagctaataaatttgattcatggactattttttcatcaagattttgaaagataaaaattttaaagttgaatgacttcattctttaattaaacatttatttatcataaatatttactattaactaatatagttaatagtaataatgttatattaatatagttaatataagaatatattgactactgaatggcaggcacagtactacttgcttggaattcagaaacttaggagatgattcctagaaactgtttgaggaatataattaatgttcaa

SEQ ID NO: 503280 - DNA, 641 bp, Homo sapiens
tatgagataaatctattataggaagtattcatataaaaaggaacttcatttaattcaacttttggaaaaactttttttttaaagtgtcccacaagagattgcatggagagaatgagataagaaatggaaaagaaaatttgaatggaaaaacataatctctttctaaagagaatatttctctttaaaaatatttctattttttatttttgcatcttaatgatgytttctcttgagaacatatgagaaagttttacatttattactaaaataaaatagttgtttcaagcatgaacaccaaactccaaaaatacccaaaggtaatagtaacaagtgagaggtaggagtaaagatatggactcttttcatataagctaataaatttgattcatggactattttttcatcaagattttgaaagataaaaattttaaagttgaatgacttcattctttaattaaacatttatttatcataaatatttactattaactaatatagttaatagtaataatgttatattaatatagttaatataagaatatattgactactgaatggcaggcacagtactacttgcttggaattcagaaacttaggagatgattcctagaaactgtttgaggaatataattaatgttcaa

SEQ ID NO: 503281 - DNA, 538 bp, Homo sapiens
atctctagagataatatctatgttgatataatagcatatggagagtgattaattttaccaaaataattactatgattatacttaatttataactgaaaacatacattctgaaaaaaaaaataacttgtagccactcttacccctaaaccaattcatctaggattcacarcaatttagagataataatttaatcatatagcattttatgtatttaacaatttctctgaaattcttgtagattttaaagagctagtaacaataaaattatagaacaatgaaatatatgaatttcagcaatgacaaaaacatagcaaaataaagaacagagctattaattttaagagatatagactatgaaggtcactaaattctcctgttctttaagttttggcgaaactaaacacttctctttagtagcttaattcacagttgaagaaggtgtacttttttccccatgtgtaagggccagagaaacttatcactacaatgtgccgtggggactaaagaatgctaagacagccctgacattggcagatgg

SEQ ID NO: 503282 - DNA, 535 bp, Homo sapiens
ttgtagccactcttacccctaaaccaattcatctaggattcacaacaatttagagataataatttaatcatatagcattttatgtatttaacaatttctctgaaattcttgtagattttaaagagctagtaacaataamattatagaacaatgaaatatatgaatttcagcaatgacaaaaacatagcaaaataaagaacagagctattaattttaagagatatagactatgaaggtcactaaattctcctgttctttaagttttggcgaaactaaacacttctctttagtagcttaattcacagttgaagaaggtgtacttttttccccatgtgtaagggccagagaaacttatcactacaatgtgccgtggggactaaagaatgctaagacagccctgacattggcagatgggaactcctctgacaggcagctgtgacttcagactcacaaataaccttgccaaactttcttagactggccaggttgtctacaactcttgcacccaacttatctttcttcctttttccctcac

SEQ ID NO: 503283 - DNA, 623 bp, Homo sapiens
cataccagaaacttggtttctggtctgtgtaaatctcaccataagcaagttgcttcttctctctgggaatcagtttcctggcctttaaaattaggagtttgaactatgttgtctcctaagatcttttcacctttactataatcaacaaaacagcttccatcaaacaaatcacctatatctcttttgagttttagaaaagttcaatttaaaaccatcatttgaatttctgcaggcgcygtgtgaaaagtcacatgctaaagggcaattgtttgcccttcattgtttcactactgttgccctggttggccttgggtagtgggaagcttctaagtgctctggacatggacaaaaccatcctttgccatcaaaatggcaaaagaaagtgcagttttgctctttttgtgccattcttggggcttcattggcttcttggaaggcaaataaatgaccttttaccaccttcactgctatatcccttcatattttacacttttctgaagtcccgttatgctttcatttagagtccagattctagattgactgtacttactccagcctttctccaagctccaactaaagaacatctgaaataaacacttctacatttattgtaacatcgtcag

SEQ ID NO: 503284 - DNA, 527 bp, Homo sapiens
ggaatattttgtaataacctagtaaattatgagttgtgagtttttttaatctgggaatttgatatcccatagtaacagcttcagcatttggcttgtttttcatactagggttttcaatctctatccacgcaagagagaatattatgtgccatcaatttagctaggatcccatatggagatgatagatcacacaaggatatgtattttkgaaaatgtcattttccgaataaatttttatttaaggctagatatcagaaaaattaagatcttcagaacaaaaggagacgaaaaattattttgttcattttggaagtgacttataaatgttctaaattatgtctagtaagtaggggaatatttataaagcacagaaaaatgaatgaaagcataataaaataagaaagcagtgaatcatctttgtttcattctgacattgaaaaatggttaattccgggaaaaaaaagaaaaaaacccttacaactgtttctaccaataagacctactttggcaaatgtcattattggggt

SEQ ID NO: 503285 - DNA, 507 bp, Homo sapiens
tgttcttctccttcttccagagcctgggaaggagtggtaagggcaggcagtgccaggtgtaggaacccaaagatgtggagggagaggaggagggaggctgctggaacagagagacaccacccaaggctgctggaacagagaggagggcactgctgtggggtccaggtcccagtagggtgaggaaaggggccgtgaaggagcagaaatgggctgaggaggccacctgcatgggtcagagyaggctgggcagggcatacatgatgaggcaagacagccatggcatggaagatttctcccattcaggaagattgatgtaaatgtattgagaagtaaatgtattgagaataaggggaactggactgctcactttgagagatggactttacaaatatggaaagggagaacattagaatgaaccctctggttttgcattggaattgaagatatggagtgcatatataaaagtattatatattaatagaaacaaacataggtataactgtgcat

SEQ ID NO: 503286 - DNA, 630 bp, Homo sapiens
tagtttctcctaggtcctgtgccttactcctggtggcagccaccggttttgctagtgctgctaattaagagagcccattcagagccactgagactgccttggaaaaagaaaacccactgaaaggatgtcaaagagagagagattaaccatttgatatgcttcacctgatggaaatgtcacaggttcagccccatggtgtgacagtagatatttctacagccagtagtaatgctgggaaggtgctcaaagagtgcgtttgaaagaatttccagtctaaccccagggcccccatgacagctaggagagctgcaccaatgtgcccttctctccacgagaaccaggcagtggctcaaccacaccagccagtgaatagactctctagtgttgtttgcatcctgcccctttaatctgcctccagcacccctgtagatgtcctaattggtcctctggatccagccctctttggcctgtcagytcagctctatgtacacagctcgatttcatctccttgcttgcttggcatattgctctattctcatagttttctgatgttaaaagcagcttgtagagcttggatgatcttcataccatttctgcctccctgttagtaactgtactagaaaaacagct

SEQ ID NO: 503287 - DNA, 286 bp, Homo sapiens
tctcaaaaaaaaaaaaaaaaaaaaaaaaaaagcagaagaagaagaagaaatcccaactacatttccaaccattcgttgaattkttcctagtgaggttcttctcacacttcaaaaccttcttcactctcccatcaacttctatcaacttccctatatctattaatgtaatagtcataattcagtcactgtaatgagagggtatctgtctttcagagctgccctaaatcttctgatgatcttacacacatgcaggtctatccccatcaaagcctcccttgctttacat

SEQ ID NO: 503288 - DNA, 562 bp, Homo sapiens
gcaagcttttaacattacccttttgaaaagtttctcagtaattttgcattcagaataaacataacagtgaatagtcaacagtcaaggctatacatacctccctgggactgagaatctgtaatatgaaaagtaaaagatgaagaccgtacacgctttsttggaaaaccattacattctgcaagaaaagcaatggaaaggctaaaattacttgtgataataaattatcctcaactcatgatagggtaggataaacagaattttcttttgtctacacagaccatcatttgatagcacattttaaatattggggttaatagtttgctgattgattataaacctataggcatatcatactagtatgaaacaattagaaatgagtggtgtcagcaataatttgtatatgcattctgaggtctacagagaatgcttttgataggctaaggggcaggagtggagcacaatgaattttagtcactaacatcagtgttctcagggacctatatgtcatctttcaaaacaaaagtgaatctactggcatatttaaaaaaagaaaaaacattaa

SEQ ID NO: 503289 - DNA, 504 bp, Homo sapiens
ttattcccagagctcaccttacctagcatttctgcaattttccacactcttgtccctgagctatttctggtagccttctcccactcatcctcaccctcactgactttcttacagtgtaattttatggttttccacctgctccttctcagtcaccttcttggctcaataactgttgagatgttattattccccagtcactctttccagacctgggccctcctctgagctcaagacctgtgtttccattttctccatgcaaatctcaacttgcccgtcttttagggactttatattaacagattctaactaatattttactcctttcacctttcctgcccaaacctgtgtctcctgctgcgtaaattgccccacataatggaattgtgttgcctcaacactctcattctccatacccagtcacccccaaatccactgtcagatcttcttcagaaatagctgtccagtctctttcctcttatccactcaycacctgttaccactcac

SEQ ID NO: 503290 - DNA, 606 bp, Homo sapiens
agttctgcccacctccccatgaccatgtgaccatgtggctgtggctgagttctctgtgggttggaacctgggctggaacaagcagctgatgtggctggtccaaggtctcacccccaggcagtctcatccactcattctggtggcttctggggagggctccaggacaaggggcagcaattccaagrccccctgaggccaggctctgccctgacatgaagtccctcccagggtgctccattggtcaaagcaagggcaaaaccagctgtgatgcaaggattgctatgcaaagataagtacatccatgcagcatttaggacatacttaaagcactacatgatttgttgtttatctgaatttcacatttaagctggagtcctgtcttttgtcattgttcttgtcggtgtgtttctgctatgcctggcaaccctattcaaatcacgattgatcagagacaaaggcttggtgcatggagagcttttctctgagtcctggtcagccttgccatggaatacttaccctgggatgaggctgtgtagagggggatacaccaggcttccttgggaacatatagctgacatcttaaaaccacttttaagaaggtcaggg

SEQ ID NO: 503291 - DNA, 553 bp, Homo sapiens
gctgatcaactgaaactgtagaggatgtggcactctcaggaattataccctgaaacagtaatttcagggtagttttatcatcctcccaaagtgatcattgcattgccctggctgttggcaacctgcatggtgacactctttgacacaggcgagaaataagaaatatagtcacgagtcacttcatgacagggatatgttctgagaaatgcattgttacgcaattttgttgttgtgcaaacatcgtggagtatacttatgcaaacctagatggtatatagcctactacacacctaggctatatggtacagcctattgctcctagactgaaaacccgcacagcatgttactgtactaaatagtgtaaggaaatagtaacacaatggtaagtatttgtgtgatataaatttttcagctcctttataatcttatgtataagcatatgatacacctatgtataagcattttgtcattgatcaaaatgtcattatgttgtgtacaactgcatatacgttttatagttgaaagcttsaggttatgttagttaactctcctg

SEQ ID NO: 503292 - DNA, 284 bp, Homo sapiens
ctttaaaagtatagattttggagtcagacaaacctgaattcaaattagaaactggtcatggtagtgggatagtaactaagctgtttcacttccttctataacaaacagctaacttttgctagcmgcatctagaaaggcttgcagaaacaatctgtgttttaaaagaaaatagctttactcctagagaattataaaaccatctgaagaccagaggatattgcaaaagaggcttccacctttccccttcaatctcacttcagccatgaagagttcttacagatggg

SEQ ID NO: 503293 - DNA, 483 bp, Homo sapiens
gtttttattttaaaatcaacttggtttggaggtgtcaagaaatagaaactagtaaccaagtcaaaagatgcataattattcttcctagttcactgattcattgatttagtcaaygtttatttagcgccagactttgagtagaactgcatggcagagctgaatgaatgatccttatctggttggaatattggaaactcccctgcagtggctgtcactatagcaagagtaactctgatcacaggactcactgacaacccttcggagcagtgtgggtcacaggcacagcacctgggaagcagggttaccatagaggctgattcagtcaatttagggcggggtccaagagagtatattcctaacaagttcccaggtgtggctaggctcaggcccaagcaccatacttggtggtaacaaagatcttgagctccacaaaatcaaataggatgcagtgtcattgttgttccaggaaatcatgggaagtac

SEQ ID NO: 503294 - DNA, 421 bp, Homo sapiens
gtaatgtcatgattatagctcattacagctttgaactcccaggctcaagtgatcctcccacctcagcctctcaagtagctgggactagaggtgcacaccaccaagcctggttaatttttgtatttctttccagagatggggccttgctatgttgcccagtctggcctcaaactcctggggctcaaatgatcctcccacccagggctcccraagtgctggatgagccactgtgcccagtcctaagaatcctgtcttaacagggcttcagtgttgttaagcactaaaaagaaagcagaggtcaggctgcccatcagtgcccaaatgtcagcagcaagcatcttgttccaacctgctttcaccccaactctcccaagcaccatgaggcctctcgtggaaggcccgtcctatgaagctgacactc

SEQ ID NO: 503295 - DNA, 460 bp, Homo sapiens
ttaagcgatcctttcacctcagcctcccaagtatctgggactatrggcatgtgccaccatgcccagctaatttttttgtttctttgtagatagagatggaggtcttgctatgttacccagatggtcttgaactcctgggctcaagcaacccacctgccttggcctcccaatccaactgctgggattacaggcacaagctatcgtgcctggcgttctttggggtgtgtgtgtgtgtgtgtgtgtgtgtgtgtgtgtgtgtgtgtttgttttgtttttaattgatagagatggggtcctcactctgttgtccaggctggaatacagtggtgtgatcatgtctcactgcagcctcgaactcctgacctcaagcaatcctcccacctcggcctcccaaagtggtgggactacaggtgccatcacatgcagccccagatctgagctcttctgcttacttgctgca

SEQ ID NO: 503296 - DNA, 511 bp, Homo sapiens
acgctacttcagccaggcctcctaatcataaccgttggccttgaacactccacatagagaatgctgtctatgttctctcttttaagtctgtctcggctcattctaacagacctggccctgacctctcctccccaactccctgtcttggaataggtacagccttacttccaactgaagaaaccatggtctggcaatggtcagacccaggacaagacaaatctcaagatgccacctggaaattaggcttgcttcaaggccagcaaagctttggtagtaaatgccatcatcctataaatcccctrctttaggataaaaggggagggggaaagaaagaggagaggggcagggaacagaaaaaggagatggtcattaggatgcagaatgccacaggcccaagaagcttctctgccatcctctccataagcccactgataccaggagcagagctgatccttagtgacaacagtttcttcttagtacaaaaagctggaacttgttttactgtttgaag

SEQ ID NO: 503297 - DNA, 581 bp, Homo sapiens
cttgggagattgaggctgcagtgagctatgatcatgccattgcatcccagcctgggtgacagtgcgagaacttgtctcaaaagaaaaaaagagggaaccctccaaagggcttgaaacaaaactcgaggtcaagacaaggagcacccacaaatgagtcaatggttctcctcgttggagcagaacagctcctgacagcctcctgttcaagtagcacagagagcagaaaaaccagtcacaggcagattgtttggagcgggtgggaggaagacagggaggaaaggaggcttgggacttggagttaaatgagagagggatggaaaagcaggttcccccggcacaaaccccacctcagggcttcatcaaggccttctttccctgccccccaaatacacaccccgagagagaggccctcattggtggaagcacccagcccacggtggctctatgtgyccctgccacaatccttggtcaaaagtgcattccttccggctcccggctcaaggtataaaatcctactgtaaacaagtaattccattaagtcatcatgttcttaaagtttttcctttttttttttgagacag

SEQ ID NO: 503298 - DNA, 537 bp, Homo sapiens
aacatggtgaaaccccttctctactaaaatacaaaaattagccgggcgtagtggcacacacctgtagtcccagctacttggcagactgaggcaggaraatggcatgaacctgggaggcggagcttgcagtgagctgagatggcgccactgcactccaacctgggcggcagagcgagactccgtctcaaaaaaaaaaaaagattccccaaggttgtcccttgttctgtgaagcctcctcccctcctcacacctacttgcccatctcattccctacactgctctgtggcagctcactctggcttcgtttgtgtgcttgtcaactctattttcagattgtgaatgactttagggcacagacgatgtcttgctcctcttcaggtgcctggctcctactatacagcctggaacatagaaatgtttaaaaaatatttgctgaattaaatagaaaaaatgaagaaaaagaaaaaagaggcacctggagatgttttgtccaggtcttagctggtggaagggaccttgggctgtgagcgtgcttga

SEQ ID NO: 503299 - DNA, 582 bp, Homo sapiens
ctgcacccagatcctccgggccgtttcccctcccttaaggattcctatgccatgtaacagcacaggcatgggtgtgatctcacgtgttcacagcttccgggggctaggatgagacatgcttgggggcgggggccacttagaaatgtgcctgcactgtgggcgtgatgctctgcactgtggaaggaaaaggagttaaatgagaaatgatggtgggcgctgagcctgagcagcgccgctttgtgccgcagcatcaacctgtgggaaatggcggagttcctgctgaaacaggacgtggtcaacgccatcaacctggatgggggtggctctgccacctttgtgctcaacgggaccttggccagttacccgtcagatcactggtaagcacgtgagagccgccttcgtgagggctgaagtccrggtctgccccagcctgtctcattcagccaatattgagtgcctgctatgtgccaggccccgggggttcaagagagcagaaattgctgcagtccctcccccaggatgccagtactacccaggcctaggagcagggtcagttggtcagcaaagacctccctgaggatg

SEQ ID NO: 503300 - DNA, 610 bp, Homo sapiens
cagctgcctgcttctggcctgcctgtgtctgctgcygagaagcccgtgcccccgggagggctgccgcactgccaaagagtctccctcctcctggggaaggggctgccaacgaaccagactcagtgaccacgtcatgacagaacagcacatcctggccagcacccctggctggagtgggttaaagggacgagtctgccttcctggctgtgacacgggaccccttttctacagacctcatcactggatttgccaactagaattcgatttcctgtcataggaagctccttggaagaagggatggggggatgagatcatgtttacagacctgttttgtcatcctgctgccaagaagttttttaatcacttgaataaattgatataataaaaggagccaccaggtggtgtgtggattctgaatcatggacttaggtcactgctagggcttagcaggtgtggcttatcctgaaacagaagtcacaacggcatcctggagccaagtcctgttccctgcttgtttaatccagtgcttatcaaactttaatatgccacaggtcacgaggagatcttgttaaaatgcagatttgggcctggggtgaggccagcaattctg

SEQ ID NO: 503301 - DNA, 610 bp, Homo sapiens
cagctgcctgcttctggcctgcctgtgtctgctgccgagaagcccgtgcccccgggagggctgccgcactgccaaagagtctccctcctcctggggaaggggctgccaacgaaccagactcagtgaccacgtcatgacagaacagcacatcctggccagcacccctggctggagtgggttaaagggacgagtctgccttcctggctgtgacacgggaccccttttctacagacctcatcactggatttgccaactagaattcgatttcctgtcataggaagctccttggaagaagggatggggggatgaratcatgtttacagacctgttttgtcatcctgctgccaagaagttttttaatcacttgaataaattgatataataaaaggagccaccaggtggtgtgtggattctgaatcatggacttaggtcactgctagggcttagcaggtgtggcttatcctgaaacagaagtcacaacggcatcctggagccaagtcctgttccctgcttgtttaatccagtgcttatcaaactttaatatgccacaggtcacgaggagatcttgttaaaatgcagatttgggcctggggtgaggccagcaattctg

SEQ ID NO: 503302 - DNA, 593 bp, Homo sapiens
agctggcccccagtacctttggggacacatctgcattgccaccagggctgtgggagggccgcctgcctcctgtccgtcacagggaaaacctacccttgtcccgcctcccttccaggcagcctgtgtggggawtgctgcattcacctttaatatggctaaaatttttccttcaatgacagtaatgctgccagaacccatcaagatacccaggaactgatgtgccttggcagatgatgctggaaagatgggattcccggcagcctttccatcccttgctcacaacccacgagcatctccaccgtccagcagggcttctctcacgttcagggcagaaacagagagagtccatctggaacaggctcggattttaaatgactgtccccgataattcaacacgatcgatgactgaggtatttcaccaagttcaggagtctcagttctcagagagaggcagccagccatgactgccagacctgggcaaaccatacaaaccagacggcaggtctcacccctccccagagagctccagagagtatcaaagagtgaaacagcagagggatggtctgggtggggtcatcgtggctggcaagggt

SEQ ID NO: 503303 - DNA, 302 bp, Homo sapiens
ggccggtattataccattccatcgcaaatctcccctccaaacttggtgaaaatcatctggccatttttacagattagaacgaaagcaaacaagctctcactctgtctgcccccagcacgaggctgtccacacagagcctttggaygagctgtatgaagcgctggcggagaccctgatggccaaggagtccacccagggccaccggagctatttgctggtatgagaagggcaccctcctccccctcacagcccagatacccttcctgcacagacaaagtgaaaacgtgggtgtgggttcaaat

SEQ ID NO: 503304 - DNA, 302 bp, Homo sapiens
ggccggtattataccattccatcgcaaatctcccctccaaacttggtgaaaatcatctggccatttttacagattagaacgaaagcaaacaagctctcactctgtctgcccccagcacgaggctgtccacacagagcctttggacgagctgtatgaagcgctggcggagaccctgatggccaaggagtccacccagggccaccggagctatttgctggtatgagaaggrcaccctcctccccctcacagcccagatacccttcctgcacagacaaagtgaaaacgtgggtgtgggttcaaat

SEQ ID NO: 503305 - DNA, 571 bp, Homo sapiens
cacttgtggtcaggagttcaagaccagcctgaccaacatggcaaaaccctgtatctactaaaaatataaaaattagccgagtgtgacggtggatgcctgtaatccaagctactcgggaggctgaggcacaaaaatcacttgaactcaggaggtggaggttgcagtgagccgaaatcacaccactgcactgcagcctggttgacagagtgagactctatctccaaaaaactttttttaaatggcaatctttatactcttgtcctatgattatcagcttttatgtcacttaatattaaataagttattttatcattattcctggaactaaaatcagattttgaccccataaacggtaagcatttaaactaattaatatgtatatatattcccaatgaagcaggaaatcaagcattctttgagtctgggagcaaattcataggaaaccatgtctgaaaattattctcctagggctgtgtccttttgccagttttcatagtaaagaaaattttacttctragtttgacttacacaaatggatttggaaaaggagggccattcctgtcctacatgt

SEQ ID NO: 503306 - DNA, 442 bp, Homo sapiens
gttttgtttgttttgttttgcccctcagcttgcaaatcagttgcttatacccaggcgattgcagccatttacaccctactgaggagcctatgtggggttctttaaccactgagccaggattgattgacagccactgtcttcaactacaacagagatggagtgagcgcttatacagactcagtggggtgggacttcccctgttgaatgctgctttatgtcttttcaggcaaatgccatttacatctgcccaccatttgaagtctcttttgactttctatttctttcgaaaggaagtaaaacaagtgttgcaggagccacagatagcatcatggcattttcttcattttctcaaaatgcaccttttgggtgttttgtgagcaagatcttaaggaaagtaggtcttttcaratgaaaattttgtgaagtcttactatgatgtaag

SEQ ID NO: 503307 - DNA, 608 bp, Homo sapiens
tgtccgacgcccctttgcagatgcagccctgggcacacttggcacagcccacagggcagcaggagcagcagcctgggggcagacaggaggcggcagagatgagtactagsgacaccgggaataaggattcctgctctccctgataaggatcactgaggaggcaacaatttccgcgcaatggggcatccccagactgctttaattcccctgaggatggtggagaggggacaggctggaggacagggaaggggtagaggaaagagaggatcccacttacttttcttgcaggaggtgcatttgcactctttgcatttgcaggagccggcgcaggtgcaggagtcacctgcaaggagaaaagacagaggtgagaaccgtccctggatacctgaacaagggacggcgtactaagagcccggggccgagttcctcagtccacaaccgattcctgggaacttgagcaagccattaactcagatctccttaacggtaaaaagggggctccgaataacctagaatggagagaaagataccccaaaactctttgggaaggagcaactcctgtcctgaaattgagtgaccagagaaagaaagaggggtcagaaattgct

SEQ ID NO: 503308 - DNA, 461 bp, Homo sapiens
ctgcacttgtctgagcctcctttgcagatgcagccccgggcacatttggcacagcccggggggcagcagggacagcagcctgaaagagtcaggagatgcgcagatccgctgtgggtcaacacttccatctcaccactgcccctcccactacttagaggaagtaggaaaagaggggtgtgtgcatgaggtttcaatccacattagcaaaaatgctgrgataggaggttgaggcatgttagaactggaagggatcccagggaccatctagagtccatcagaagcccacagaagggagggggtttgccaaggtcatgagacagtggcaaaagcaagactagaacctagggctcatgactccaggccagtgctctatccctgttaccactgggcaggacagaacttcccctcagtcctcttcctgctccaaacactgtggatgcccttatccctgggtagagacc

SEQ ID NO: 503309 - DNA, 461 bp, Homo sapiens
ctgcacttgtctgagcctcctttgcagatgcagccccgggcacatttggcacagcccggggggcagcagggacagcagcctgaaagagtcaggagatgcgcagatccgctgtgggtcaacacttccatctcaccactgcccctcccactacttagaggaagtaggaaaagaggggtgtgtgcatgaggtttcaatccacattagcaaaaatgctgagatargaggttgaggcatgttagaactggaagggatcccagggaccatctagagtccatcagaagcccacagaagggagggggtttgccaaggtcatgagacagtggcaaaagcaagactagaacctagggctcatgactccaggccagtgctctatccctgttaccactgggcaggacagaacttcccctcagtcctcttcctgctccaaacactgtggatgcccttatccctgggtagagacc

SEQ ID NO: 503310 - DNA, 461 bp, Homo sapiens
ctgcacttgtctgagcctcctttgcagatgcagccccgggcacatttggcacagcccggggggcagcagggacagcagcctgaaagagtcaggagatgcgcagatccgctgtgggtcaacacttccatctcaccactgcccctcccactacttagaggaagtaggaaaagaggggtgtgtgcatgaggtttcaatccacattagcaaaaatgctgagataggaggttgaggcatgttagaactggaagggatcccagggaccatctagagtccatcagaagcccacagaagggagrgggtttgccaaggtcatgagacagtggcaaaagcaagactagaacctagggctcatgactccaggccagtgctctatccctgttaccactgggcaggacagaacttcccctcagtcctcttcctgctccaaacactgtggatgcccttatccctgggtagagacc

SEQ ID NO: 503311 - DNA, 461 bp, Homo sapiens
ctgcacttgtctgagcctcctttgcagatgcagccccgggcacatttggcacagcccggggggcagcagggacagcagcctgaaagagtcaggagatgcgcagatccgctgtgggtcaacacttccatctcaccactgcccctcccactacttagaggaagtaggaaaagaggggtgtgtgcatgaggtttcaatccacattagcaaaaatgctgagataggaggttgaggcatgttagaactggaagggatcccagggaccatctagagtccatcagaagcccacagaagggagggggtttgccaaggtcatgagacagtggcaaaagcaagactagaacctagggcycatgactccaggccagtgctctatccctgttaccactgggcaggacagaacttcccctcagtcctcttcctgctccaaacactgtggatgcccttatccctgggtagagacc

SEQ ID NO: 503312 - DNA, 545 bp, Homo sapiens
ggggttataatggagatgaagaggtggttaaatctctcccaagtcccctcttgctgcttctgctttgtgtgtggtctagaaggaaaggttgcatgttctggatgggcacaactccctgattttccaccctctcactcatggggagggtgcagtcagtagaggttcttggtgggaacttctaaatctcagggccaaggatagaggcccctgcctgcccatagtaagggcttttacagtcaaccagggagataggatgaggccccgagcygaggcaggaggagcccctgtgaaggagggaacagaaatggcagataatagaatgcataggacttggagacagggtggacgtagctgccaacctgagctccatgtgtgcatttcagcctgagcctggttccctgaaaccttgccaggcgggcaggtgaggtgggtgcagccacctgcacccctggtgaaaagccacccaaatgaccgtactgctcggcctctcctctgccctcctccgcctgctcttcccaactcccagcccaaggcatctggctggg

SEQ ID NO: 503313 - DNA, 497 bp, Homo sapiens
acatctggcctggctgctttgtctgtgagtaaataaatatccctcatgctatgtataatgagaaaaaaaaagcaacagttattgttatagatgacttaccccttgccaggcaccattctaagttccttacatgaattaaatcatttaattttacaagccagatactattatcctccagttgataagactgagacayagaggttgtgtcacacacaaagtggcagaggtgggatttgcactcacgcaggctgactgcagcatcgtgcccttaccccatgctctatgccaccaagtcaatacaaggatgaggatgctgaatgtctggccgtgaggcagctttggaagcacattgagttggcagtcagatcgctgtgcatagccatggacctctctgggcttcagttcctatctctcaagccaagagcaaaatttgttcatctccaaagtcctttatagctttgaacagagattggcagggtttggcatctagggatgcc

SEQ ID NO: 503314 - DNA, 497 bp, Homo sapiens
acatctggcctggctgctttgtctgtgagtaaataaatatccctcatgctatgtataatgagaaaaaaaaagcaacagttattgttatagatgacttaccccttgccaggcaccattctaagttccttacatgaattaaatcatttaattttacaagccagatactattatcctccagttgataagactgagacacagaggttgtgtcacacacaaagtggcagaggtgggatttgcactcaygcaggctgactgcagcatcgtgcccttaccccatgctctatgccaccaagtcaatacaaggatgaggatgctgaatgtctggccgtgaggcagctttggaagcacattgagttggcagtcagatcgctgtgcatagccatggacctctctgggcttcagttcctatctctcaagccaagagcaaaatttgttcatctccaaagtcctttatagctttgaacagagattggcagggtttggcatctagggatgcc

SEQ ID NO: 503315 - DNA, 447 bp, Homo sapiens
ggctggtctcaaactcctgggctcaaacagtctccctacttctgcctcccaaagtgcaggtattacaggcatgagccactatgcccggcccacactctcatttaatccctgcattgagatataatctcctttctacaaatgaggcactagatgctcagagagtgtgggtgacttgcccaaaccacacagccagtaagtggtggagtgggctgtgaaataagactccctgacacctaaaactatgccctaggggcaggctgccttctgaaatmatttcacaaggaagcaacaggtaagtgtggtcctgacttctacacaaggagattcatcttcctctttgactgaacatcaaatagcattccctccacaagtggagggactaacttgtcattaacaagacatccagggactctttctttcctaaggaacatcaccacactcagccag

SEQ ID NO: 503316 - DNA, 611 bp, Homo sapiens
ctgctgtgcctgatgctgggacagccctgctcacagatgtagaaagagtgacctatataaacttggaatttttttccatgcaaccatgacccatttactgtatttgtctctcttttatgaaatatgtgaatgataataaaagttgttgacttattctggctctggttttctttgtatgcatggaaatagtggaccccatactcaagagagctggtatgtgtgactgcattgagagtccagagacctgggtgctgggaccatgccctatcatcttacaccatgagtgccttaaggaaaaccaggttccctgtctcagatcactttttcagctmaaaaagattcctttaagattataaaatggtatttttactgtacctttctatgtttagctacacaaatacttaccattgtgttaaaattgcataatagtgtataggtttgaagcctaagaacaataggctaaagcagacagccaagctgtgtagcagccagtatcagctaggtgtgtgtgagtacattctacaatgtttgcacaatgacgaaattgcctaaagacatatttcttagaatgcatacctctcattaagtgacacatgactgtaatagggttg

SEQ ID NO: 503317 - DNA, 611 bp, Homo sapiens
ctgctgtgcctgatgctgggacagccctgctcacagatgtagaaagagtgacctatataaacttggaatttttttccatgcaaccatgacccatttactgtatttgtctctcttttatgaaatatgtgaatgataataaaagttgttgacttattctggctctggttttctttgtatgcatggaaatagtggaccccatactcaagagagctggtatgtgtgactgcattgagagtccagagacctgggtgctgggaccatgccctatcatcttacaccatgagtgccttaaggaaaaccaggttccctgtctcagatcactttttcagctaaaaaagattcctttaagattataaaatggtatttttactgtacctttctatgtttagctacacaaatacttaccattgtgttaaaattgcataatagtgtataggtttgaagcctaagaacaataggctaaagcagacagccaagctgtgtagcagccagtatcakctaggtgtgtgtgagtacattctacaatgtttgcacaatgacgaaattgcctaaagacatatttcttagaatgcatacctctcattaagtgacacatgactgtaatagggttg

SEQ ID NO: 503318 - DNA, 298 bp, Homo sapiens
tgcctttttcgcttccttgcaggtggctcctgtgcctgcgccggctcctgcaagtgcaaagagtgcaaatgtacctcctgcaagaagtgtgagtgtgggatcatctccaggaatctggggctgtggctaagcttggaagggaacacaaggctggccctgagtgcatgcttttgggaactggtcttcctttgcccctgttggctgtgtcattccctctccaggctttctgctctgagctcagatrggtcagggcagactttttctattgggacacaaacctcaaatgtaccatcagaac

SEQ ID NO: 503319 - DNA, 492 bp, Homo sapiens
ctgctgcgactgatgccaggacaacctttctcccagatgtaaacagagagacatgtacaaacctggattttttttttataccaccttgacccatttgctacattccttttcctgtgaaatatgtgagtgataattaaacactttagacctgattctgacttcagtttcccttatgtgcttcagaaatcagagactggggtgggggatcgaactagggttgcagactcctgggctctaaatggaaatctgagtccctaacaatcagagtgcattaaggcaagccaggctgcctcactgtgcttcctcttctgtagaatggaataacacttcatcaggtcattggtggggatccagaatacaggatcaccttcattctcaaatgtggcacakaaacttctcaatgcctcctgttccttctctgatttctctgcccaacttcaattcctctttggatttcaggttagaaagtgactacacggaatggaatcaaac

SEQ ID NO: 503320 - DNA, 656 bp, Homo sapiens
ggtggccttgcttctcctgctcrgccctggcagtttgggtctagcacccacaggaaggggtgggtggctagcaaggctgctaggagaaggctcccgcttgcgtgtcccgggccccagaggcctctccctggggcttccaggccagtggttcccatgcttgtctgcacgacggcatcacctgggaagagggtctttaaaaaatcccaatgggccacactccagacccatcacagcaccatcccaggaggtagaacgcaggcactggcacttttggaagctcccggggggttccccatgtgccgatgtctgggaacaactgtttgaggctgtggcacccagctctccactcccagtggggagagacaggctcctcgctacctcccacctggggctctgcttctccagcaaatcagagctgagtgattcttgtcctctgagagccccaaaggccctggggacaggaaggccaccaagttgaccatatttagatggagaccttgaggatgtctccccataaccaacactcagctttatccccttcccagggcagagcaccttcctcagactgggagctgtttcttggcacctcgtgccccaactctgtggctctgccagggcttggcacacccaagccaaagtgaaaataaaaccaaggt

SEQ ID NO: 503321 - DNA, 656 bp, Homo sapiens
ggtggccttgcttctcctgctcagccctggcagtttgggtctagcacccacaggaaggggtgggtggctagcaaggctgctaggagaaggctcccgcttgcgtgtcccgggccccagaggcctctccctggggcttccaggccagtggttcccatgcttgtctgcacgacggcatcacctgggaagagggtctttaaaaaatcccaatgggccacactccagacccatcacagcaccatcccaggaggtagaacgcaggcactggcacttttggaagctcccggggggttccccatgtgccgatgtctgggaacaactgtttgaggctgtggcacccagctctccactcccagtggggagagacaggctcctcgctacctcccacctggggctctgcttctccagcaaatcagagctgagtgattcttgtcctctgagagcyccaaaggccctggggacaggaaggccaccaagttgaccatatttagatggagaccttgaggatgtctccccataaccaacactcagctttatccccttcccagggcagagcaccttcctcagactgggagctgtttcttggcacctcgtgccccaactctgtggctctgccagggcttggcacacccaagccaaagtgaaaataaaaccaaggt

SEQ ID NO: 503322 - DNA, 479 bp, Homo sapiens
taccggatgacttggatgctagacccctgggccagtccttcagccaggagccaggcccccaaagctgtgatctgattcttctccaggcttctcagtggacagtgaggggaggggaaagagaaacacggccatgagaatgggtgtgagagtttcctaggtcccttcctcaggccaaggtcaggggacacagtctcccacactaccttctcagggaacccaaaagacaacaggggactggtggcaggtgcagcrggaaggctgaaggctagaacccagggggaactaagcctggcaggggcttggaacaggccagagtgtgcaactcaaggaagggctttctgggaggcaggggactgacccagtggcctcttggtgttcccgggatgtaggtccccctttagcccgtcccattcctcccccggcccctcatactccactctcttcagccggcccatctgcggcagcacctgggccagctc

SEQ ID NO: 503323 - DNA, 623 bp, Homo sapiens
ctggtaatttaaattcagtgcctcaagatattgtttttaaccttcctttctgtcttccctttcacaagggtaacttaactcccagtgctcccagccccttccatcctgttgcatcagtttcaactatggttgttctagcctcattgtcagagcacgtgatgaaagatcattagcatctgatgcaaggctgtgctccctcagtgcgctccagttggctccgtgcccccatgtggaaactgggctgcctggcggtggaccatgtgccagtcccagragccccaaagattctgactttgaaagcaatcttcagggctttacctgggaagcagaagaactctggagaactctgtacacaggtgagttcactaggacggtgagcaaagtagaggtaatgtacactccaggaggaagaaaaaaccaaaacagaaaccccagcctccactgaccaaccttcctctcctgatttcccactgaaaaggctggattttccacagacaacctggaagttcttgcctggggaatgtacagtgtagagacttggcactttcattttctcatgtaattatgcattgaaaatgaagcttaatattgagccaataaggagaagttgagttcaaaactta

SEQ ID NO: 503324 - DNA, 508 bp, Homo sapiens
ttcatggcactttattttatgtcctgaaaaacaggacccaactgaaattcagaatcattactaaatgcaaagagagagagagaagcatgaattataagtgcaataaaatctcatttttttttctgtgttgctaatgaggaggaacacatttctttctgttctgagcatgctttcagagggaggcacatggaggaatccactgccagagacagtcttaagaacaggtggcagaacagtcctcgaacagctgtgagccgggtgctcagaaaggcatctttgaccacctccctgtcgcacaagccctgctctggacaccagagtccctaccacagggagcctcctgagatacagagcactgttactgggggaggataaacttatgcttccgtccacagtatcacatttctgatgaygactaactaccacccagaacagatccagataatgaggggctgggagacagacctggtaaaatgtaagcaatggaataagctggcagcagggagtg

SEQ ID NO: 503325 - DNA, 512 bp, Homo sapiens
tatttatagactctggttctgtcattgtcacagatggacatttgccattctttctggccactcagcatctgaaacttggtggtgcttgaggggtgcttgaagaacatccctcttgagtctcatccacactcctggggcacagcccatttcccactataaagatgaacatgctaggctctggatcactcagcctccttgtggctgggcacaggcacttcagcaggcttcattcatcagatgcaacccctcagcctttaaaagaggggggactgcccacatttattgtggagatacatgttagtggtggcagcaggaacatcgcttgattttcagaggcagcagtgacagcatttatrgtggccacataaatgataattaatactgtcaacttgattggattgaaggatacaaagtattgatcctgggtgtgtctgtgagggtgttgccaaaagagattaacatttgagtcagtggactggggaaggtagatccaaccttcacctggtgggcac

SEQ ID NO: 503326 - DNA, 467 bp, Homo sapiens
taaaaagcttgatgaatcacctttaggatttcacaaaactgtcttgaataaattaagcaatacctcagttatccatagttgagatatttaagactgacatctgcttttgttttcttccctctcctattttcttctttccttctctcactccttacttctaccctccccactgccccaacataaaatattttctgtmatccattacagggctgaaaattttggcattcacatattgttctccaaagacggacacatttttttcatttggggagcacctattagaaaagcacccattttttttcatattgtgctattcaaagttgattattttccagtctctgtaaagttgagaatgaggcatttttcagtctcttcagggaactccagcctccatgaatgggaatcattcccaaaaaaaacccctttttaagccaagtctgaaggatatgaaaaaacaggacccaact

SEQ ID NO: 503327 - DNA, 577 bp, Homo sapiens
ggcctactcttcaaccaactggacttgtcatgggtcactagagtgaaccaatgggaaacctccagagggtatgtaaaccccagaaaattctgtaactagtgccaagctgcttgctggagcctgttcccaccctgtggagtgtactttagtttaaaataaatctctactttggctgccttccttgtgcgtttgtccaattctttgttcagaactccaagaacctggacaactaccctcaagccataacaatgtgactttaaaaactaagtcatgraaagtcatacagctttgttctgatcctcttgggatgctcactttggaacctagtaaccatgctgcaaggaagccaagcagccacaaagaaaagccacatgtagatgttctagccccagcaccaactgaagaccaagcctatatcagcatcaacctccagatatgtgagtgagcaaatcttcagaataatccagcccctgaccttcaagtcatcctaagtgacactaagcagagcagagaccagctccgtgagaccagcctaaatagcagattcatgagcaaaatgaatgttatcttaagccat

SEQ ID NO: 503328 - DNA, 541 bp, Homo sapiens
tttttgattgaaggtgattatcaggacaaagatataaaaatctgaggaatctctaataagcatactatgaatactgtcaatacctggggggaaaaatgtcgcctacatccataatattctctccaaatggcttccagaatctagtctacccgatagcatatggcaaaagaagacactggaccctaactataaggaagcttggaacagttgtgacagtaatttctctggtagcattaggtaacaactagtaaagtcctctgattacatgcatagttcctcagaaaaatgaaaaacatgattttaaatctgacaaactcaatatacgagggctgtaaatcagagttgtttattcagcccacrcattaaatgcacatatttctttaaaaaatacttacacacctactatgttccagtcactgtgctagggatgggggtggaaaggagagtagaaagatggatcaaatggaattcattcctcctaagaaatgtacaattatacaagggaaacaaacaagggagaaagaaagcatgggaggaaaag

SEQ ID NO: 503329 - DNA, 663 bp, Homo sapiens
ctgcctttctaagtagagcaggtggggtggggaaagaaggtagatatccagaaagctaacaaacagcaagaaattggtgggattctttctcttttatctgacgctgtgtctgctgacaagagaaaaccaaaagtgtagaactttctagataaggaccccaacatcctttaattgccaacatgagcatcattctttttgttgccagcgtcctmtttacattaagtatccaccactttcaaaaacaatcccatacatcatgcagactccaaaggcaatgtttgtgctgctggtcctaaagttgcttaaggaaaaaagcagtttctgttgccctagataggcagcactttaggctgcagtttgagaaattaaatgttcacggcctttggcgcttccagttccatttggaaaaggacacaaacctggcatttggaaagcatttgctctccattaaacttaccgaaccttgacaaaccagaagggccaagaattagtctgccactggccaaggctggactttccaaaactgataacagcaatgaaaacaatagcactgccatttataatcttcaatgggattctgtcaaattttaacccaaaaggatctcacaatctgaaaagaatctcaagctttgttttataggaaaagaagaaaatgtttgagca

SEQ ID NO: 503330 - DNA, 335 bp, Homo sapiens
ttcttaaccttcttggactcagacatctctgtgaagttattttaagataaatagaggctttgtgtctctcagattaggtaggaacgcactctgatgctctttcaagctgattcctattgcttctacctttgatgtgctgagatgagatttttcactgaggctgctacttcacatcttgattggaacctgatggggcaaaaaataaacaaaaagcaagaggaagtagtggtactaggtggtctgtccatggaaagaagctctccttggactttagsgggtgataataactaagaggcagtcttggagggaaggcagaatcccaccgtggctccagt

SEQ ID NO: 503331 - DNA, 574 bp, Homo sapiens
ctggtaacgactaagccatgatactacttaactatccagaatgccactgcaaaaggaagaagcccaacttaagaaacacayctacacatcactatcctttatttcaccaatccaaatgatatttcttcccaacttatcagcctgtgtcattctggggcaattacataagaaatcaagttttaaaaatgaggttggcttcacatggatgataaaacagatgggatgcagcttacgtttatactcgttttacacggatcaaacaaacattgattaaataatgctgacttgtctttgtgcaacacagcactcatccatctgtatctatctgtctgactgaacgtttaacaaaacacaacacgggtcattatttttggagcttgtcagaatgctgacagcagtaaactcagtaaagaataacaactgaaagttggtgaggtatactaagatctttcatatttcaaaaaatacataaaactggttgaggaaaatcaaatttcagttatccatattactaagacaaagagatcatgaatgagtaagaccctaattgctggtgacagacacagttgctttg

SEQ ID NO: 503332 - DNA, 618 bp, Homo sapiens
aaaagaatagtaatttcttacatccttacaaacagctttccttttttcacttttttctttcttaaatttaaaatactttgattatgaatgtcaggactgacattgttgggtttatgttagacatctgaatgtaagagagcaagagtcaatgacttgctcaggtcctggaatatgggccttccctacaatcatagaccacagagatggactcttatttggagctcaatacatgtttgtggaatacatgaatgaattgtaagtcttgcatatttttcatcttttgatcagacattaccatatccatttgagaagtgaagaaattgagtcttacagaaggccagggtcttgctcacagtcataaaactaattaataaaagaaacaggattagactccaatcccacttgcttccaatcctgcactgataccctcttatcgtcttggtcctgctacgtacaaaccagagcacagacaaacctgggaaggaaatcgttctcagaactgcaattccatccagattgctcctctctttggaggctgcttcccycctcctttataagtttttcttttctggatgactgtccacactccatagcaggcaagccgatgctccccagtaa

SEQ ID NO: 503333 - DNA, 618 bp, Homo sapiens
aaaagaatagtaatttcttacatccttacaaacagctttccttttttcacttttttctttcttaaatttaaaatactttgattatgaatgtcaggactgacattgttgggtttatgttagacatctgaatgtaagagagcaagagtcaatgacttgctcaggtcctggaatatgggccttccctacaatcatagaccacagagatggactcttatttggagctcaatacatgtttgtggaatacatgaatgaattgtaagtcttgcatatttttcatcttttgatcagacattaccatatccatttgagaagtgaagaaattgagtcttacagaaggccagggtcttgctcacagtcataaaactaattaataaaagaaacaggattagactccaatcccacttgcttccaatcctgcactgataccctcttatcgtcttggtcctgctacgtacaaaccagagcacagacaaacctgggaaggaaatcgttctcagaactgcaattccatccagattgctcctctctttggaggctgcttcccccctcctttatawgtttttcttttctggatgactgtccacactccatagcaggcaagccgatgctccccagtaa

SEQ ID NO: 503334 - DNA, 634 bp, Homo sapiens
gaggtctggtgcctccattatgtttgattaggcaagtttcttgttctgtgacaatctgcagagaacacacataataaatcagaagtctatggmaagtttaggaatgaaagacatctcttgcagacctgaggagctgagagctcatttttgagaccctgcaggaaacaaaacaaaacaaaacaaagctgcggccttaaaaaacacatttcctttgctttcagaggaacttgtctgtaccatttttttgccacttaatatattctcctttttactggctgagttccaaaagggtggacctccattcaggacccaggctgaggaaatagaaaaaaaaatacaagaagctgggatacaaggaagctaactaagctggacagtcagtgtaggatatcaactgtgtgaatttcagcatcacatgcctaggttcaaatcccaatttctccaccagccagtatatgggaagcttcactgtagaagtttagtttcatgtatcttattaccaactggtaaaatcctaggtcttgaggtcctgtggtggttgaaaaggcaggatgaagagatgggtacatggtatcacaaaactaacattcatgctgtacttttcttattctgagcacttgctcagcacctatga

SEQ ID NO: 503335 - DNA, 634 bp, Homo sapiens
gaggtctggtgcctccattatgtttgattaggcaagtttcttgttctgtgacaatctgcagagaacacacataataaatcagaagtctatggaaagtttaggaatgaaagacatctcttgcagrcctgaggagctgagagctcatttttgagaccctgcaggaaacaaaacaaaacaaaacaaagctgcggccttaaaaaacacatttcctttgctttcagaggaacttgtctgtaccatttttttgccacttaatatattctcctttttactggctgagttccaaaagggtggacctccattcaggacccaggctgaggaaatagaaaaaaaaatacaagaagctgggatacaaggaagctaactaagctggacagtcagtgtaggatatcaactgtgtgaatttcagcatcacatgcctaggttcaaatcccaatttctccaccagccagtatatgggaagcttcactgtagaagtttagtttcatgtatcttattaccaactggtaaaatcctaggtcttgaggtcctgtggtggttgaaaaggcaggatgaagagatgggtacatggtatcacaaaactaacattcatgctgtacttttcttattctgagcacttgctcagcacctatga

SEQ ID NO: 503336 - DNA, 552 bp, Homo sapiens
catggctgagccacagtggggatgtcgtctgtgcctgggtggcaggggaagaactgggaggccttggaaaggtggaaggctctagtgcagggtgattgcccacggacgtgctgctatgcaaatgagtgcatgtgctggtgggggcaggcacagagggatgctgcaggaaggaggcaccgaccacccagaggggtgagtgtgagtggcattatgaggagaaaggtagctagggaccacagggctgagtcaggccctcaggacagccagtgcagacgcacagcagacccaggacaaaatcggcacccaactgggtcacccgtgaatccccacctggggtcatgttggtcaggacacttttcagcttcaggaggacagaacgcaactccaaacagacttagcagaaaggagactctattggctcacataaccaggctgtgcagggggacttcaggcatagctggatccaggtattcaaacatcagcatgaggatccagtctaacasggcggggagggggtcagccctcccggaaccacatgaacacagggcaggg

SEQ ID NO: 503337 - DNA, 345 bp, Homo sapiens
ctggctggtggagtgaccctgggccaaccgctgccccagcctggcctgtctcggtttccrcactggtaagatgaagtgcataagggagttcagtgggagatgaacccagctcatcagaggccctggaaccggaggaataatgtccagaggcaggcgggggccgggccccattctgtgcccccagatcctggcagggctggcctggcatgagagagggccctgagaaagcaggtgacggtggaggccctgaccgtgggggcagacccaggtcaactgcaaaggggtctgagctgcaaccagcatcctgggaaagtctctactcacagagggaaactgaggcccctg

SEQ ID NO: 503338 - DNA, 485 bp, Homo sapiens
gccttgtgttttgggggaaggcagtggtcctgctgaggcaggaatgtggtggctgatcttgggcagagccgcgtgagcagatagcaggcccctcccctcagcctcctgtgcctccgtctgcttccccagcttcccctgggctgctggctgtggtcttgggagcctcagcttccccggctgtgaaatgggtgttgggggctggtgggcagcttccgagagctcaggccctgactcccctggttccctcagttccccacctggagctgaagtgagcccggcgtgctgagggctcctgtctgctaagtgccttacgggcatccccgttctgcccttctccagacaccacttagctttgggttctccacccatttcgcacgtgagaaaatcgggggtcagagagggtgggtggctgcgctagagtctcacagcacacastggtgctctggctgtggaggcagcggcagggcagggtgaccctgctgtgc

SEQ ID NO: 503339 - DNA, 431 bp, Homo sapiens
gggggtggagggagggctgtggaagggggcttgctggcagttgagttccaccaatgttttctcaagccgacactgagccccattcatcctcctgcccatgtgtggctccggcacccctagacggggccagcccagcagcctgaagtccgcatttagaacttgatcccctcttataacgattaaattttagtaagtaaaataaaaatgcttcagaaagaaaaaaaagaaaggaagaaagagtggaacaatacttgttttatttaacgaccagaactttttgacaacaccccccttccccgcaggatatgagaatgcctggtccactgcagtccatccccagggacctcgaagcagaatttggctggagggggtgygggggggattctaatgtaaacagtgaccctgaagccctggagccagttcccccttct

SEQ ID NO: 503340 - DNA, 617 bp, Homo sapiens
aattatgcctctggtttgagctgtgctgctccctctgggtggccacaccaccccctccctccgaccaaycaaccaaagaagtgcttcatctcgagttggaagtatgtcacccccgccccccaccaccaacaaggaaggaccctctttgtccctttcccagtgacaagtgtgagtgagcttggctttggctggttcttctctaacaggctgacaacagggagataaactcagacccagcacccaggaggtgggaacctcagggaaaggacaccggctctccgtgtttgaatctgatgttctttctttcttctcatgtggcagagaagagacaggacaatggacgggtgtattacgtgaaccataacactcgcacgacccagtgggaggatccccggacccaggggtaaggacttgggctgagaggggggccgggctgggctgggtctctgtgcagctccagcactgggcaggtggctttggactgcatcgtcccagagggctgatgtcagggacctttagccacacacaagtgtcttgagactctcaccgtacagatacactgttggcctgatgagagcttaaaaggggtttcttaaatagaccttcctggtggatgg

SEQ ID NO: 503341 - DNA, 617 bp, Homo sapiens
aattatgcctctggtttgagctgtgctgctccctctgggtggccacaccaccccctccctccgaccaatcaaccaaagaagtgcttcatctcgagttggaagtatgtcacccccgccccccaccaccaacaaggaaggaccctctttgtccctttcccagtgacaagtgtgagtgagcttggctttggctggttcttctctaacaggctgacaacagggagataaactcagacccagcacccaggaggtgggaacctcagggaaaggacaccggctctccgtgtttgaatctgatgttctttctttcttctcatgtggcagagaaragacaggacaatggacgggtgtattacgtgaaccataacactcgcacgacccagtgggaggatccccggacccaggggtaaggacttgggctgagaggggggccgggctgggctgggtctctgtgcagctccagcactgggcaggtggctttggactgcatcgtcccagagggctgatgtcagggacctttagccacacacaagtgtcttgagactctcaccgtacagatacactgttggcctgatgagagcttaaaaggggtttcttaaatagaccttcctggtggatgg

SEQ ID NO: 503342 - DNA, 617 bp, Homo sapiens
aattatgcctctggtttgagctgtgctgctccctctgggtggccacaccaccccctccctccgaccaatcaaccaaagaagtgcttcatctcgagttggaagtatgtcacccccgccccccaccaccaacaaggaaggaccctctttgtccctttcccagtgacaagtgtgagtgagcttggctttggctggttcttctctaacaggctgacaacagggagataaactcagacccagcacccaggaggtgggaacctcagggaaaggacaccggctctccgtgtttgaatctgatgttctttctttcttctcatgtggcagagaagagacaggacaatggacgggtgtattacgtgaaccataacactcgcacracccagtgggaggatccccggacccaggggtaaggacttgggctgagaggggggccgggctgggctgggtctctgtgcagctccagcactgggcaggtggctttggactgcatcgtcccagagggctgatgtcagggacctttagccacacacaagtgtcttgagactctcaccgtacagatacactgttggcctgatgagagcttaaaaggggtttcttaaatagaccttcctggtggatgg

SEQ ID NO: 503343 - DNA, 570 bp, Homo sapiens
cctccatctaagggagttccagccactggttgccttgcaggaatgcaaggtcagggtggccagagctcggggttgttcaagaaaaccagcaacccagacttccactggcaactctcgaaaccacaattaattactggggttggcaatcaactyggatatatttaagacactgtgcaggtgaaacagaacctcctcaggggccagaccttgcctgggcttgtgggctgctggtcgcgcccccgtgcacagggagaagagaagcagacgggagcagaagggacccctgctcttggaagggaggctgtgcgggctgggggtgatgatagcccggccagcacacacacgtggcatcttaggccatgggcaggggtggcaggaaggggcagcctgggctctgggagccttgcctgtgtgacccagggtggggttacagaggaaaggcggggtgctggcccagatcaagagccagaaagtgcaggacatcctcgccttctatctgggccgcctggagaccaccaacgaggtgattgacagtgacttcgagaccaggaacttctggatcggtgagtg

SEQ ID NO: 503344 - DNA, 570 bp, Homo sapiens
cctccatctaagggagttccagccactggttgccttgcaggaatgcaaggtcagggtggccagagctcggggttgttcaagaaaaccagcaacccagacttccactggcaactctcgaaaccacaattaattactggggttggcaatcaacttggatatatttaagacactgtgcaggtgaaacagaacctcctcaggggccagaccttgcctgggcttgtgggctgctggtcgcgccccygtgcacagggagaagagaagcagacgggagcagaagggacccctgctcttggaagggaggctgtgcgggctgggggtgatgatagcccggccagcacacacacgtggcatcttaggccatgggcaggggtggcaggaaggggcagcctgggctctgggagccttgcctgtgtgacccagggtggggttacagaggaaaggcggggtgctggcccagatcaagagccagaaagtgcaggacatcctcgccttctatctgggccgcctggagaccaccaacgaggtgattgacagtgacttcgagaccaggaacttctggatcggtgagtg

SEQ ID NO: 503345 - DNA, 533 bp, Homo sapiens
caacctctgcctctcgggttgaagctattctcctgcctcagcctcccaagtagctgggattacaggcgtgaaccaccacacccagctagttttgtatttttagtagagagggkgtttcattatgttggtcaggctggtctcgtgctccaagcctcaggtgatccgcccacctcggcctcccaaagtgctgggattacaggcatgagccaccgcacccaaccttggatgtttctttatagcagtgtagaaacagactcagccgtcgctgcaggccatacctcagctacatagaacacctaactgcccgcaagggagttcctgctactaggatcttcagagtgacaaagaggaagctttggctggcaagggtggtggggaggggaggggctaggtacctaaggcttccctatctttccacacagcctaattttcatagcctctggtctccacatttcactctttcccaaataaagaccttttaaggtgtgggtccccttggtcattctgtaaccattggatcaagttttcagttt

SEQ ID NO: 503346 - DNA, 405 bp, Homo sapiens
tttgggagaattgtaaaaaggtgactcatttagagtcagattctgttttaggggaatatcatgcagaccctctcctgacttcgtagaaggttttctgaccttgtcaaaaggttagagagaggcagattacatgaccattttttaaaagaggaagaaagtgagttctgcaaaccacagatcagtgaacytgacattgggcctggaaaatcttcagggcagatgacttaacaaaaaaatatttgtgacctctccaaagatgaaacaacagtgacaaagaccaagtcacactaggttaaccttatttcttgatgtgaaatgtataaatgtgtaaatcaaggaaatatggtggaaatatatatctgggcctggaaggtatatttcccagtattctttcagttatagtga

SEQ ID NO: 503347 - DNA, 580 bp, Homo sapiens
gctcacctctcctggtgtggttccttctacaactttgtcacactcagttagatagacacactttattagcttatgaagaaccagtttattgtggccgttaaattggagtgtaagagacagtgttgatgcggctrcctgccttgtagcttcttttactgtctgggctgtatacagtgctgggcaaatcgctgctacagtgttgcattttcagtctgcttagtgtatgcacttaagcgcacgtatttatctattttactgttactatcccaaggggtttagagatttaggtcaatgtgtattaatatttctttctgaactcttcatctcacagatgaagaatctcttttttgttatgttttacagtgtttacatacctgaaatcaccttttagtcactttgtggcctggtacgcacgcggtggctcgtggctcatgcctgtaatcccagcgctttgggaggctgaggcaggaggatcacttgagcccaggagttggagagcagcctgggcaacatagtgagatccccttctctacaaaaaaattaaaaaattagccggatatggtggtacacgcctgaggtc

SEQ ID NO: 503348 - DNA, 580 bp, Homo sapiens
gctcacctctcctggtgtggttccttctacaactttgtcacactcagttagatagacacactttattagcttatgaagaaccagtttattgtggccgttaaattggagtgtaagagacagtgttgatgcggctacctgccttgtagcttcttttactgtctgggctgtatacagtgctgggcaaatcgctgctacagtgttgcattttcagtctgcttagtgtatgcacttaagcgcacgtatttatctattttactgttactatcccaaggggtttagagatttaggtcaatgtgtattaatatttctttctgaactcttcatctcacagatgaagaatctcttttttgttatgttttacagtgtttacatacctgaaatcaccttttagtcactttrtggcctggtacgcacgcggtggctcgtggctcatgcctgtaatcccagcgctttgggaggctgaggcaggaggatcacttgagcccaggagttggagagcagcctgggcaacatagtgagatccccttctctacaaaaaaattaaaaaattagccggatatggtggtacacgcctgaggtc

SEQ ID NO: 503349 - DNA, 580 bp, Homo sapiens
gctcacctctcctggtgtggttccttctacaactttgtcacactcagttagatagacacactttattagcttatgaagaaccagtttattgtggccgttaaattggagtgtaagagacagtgttgatgcggctacctgccttgtagcttcttttactgtctgggctgtatacagtgctgggcaaatcgctgctacagtgttgcattttcagtctgcttagtgtatgcacttaagcgcacgtatttatctattttactgttactatcccaaggggtttagagatttaggtcaatgtgtattaatatttctttctgaactcttcatctcacagatgaagaatctcttttttgttatgttttacagtgtttacatacctgaaatcaccttttagtcactttgtggcctggtacgcacgcggtggctcgtggctcatgcctgtaatcccagcgctttgggaggctgaggcaggaggatcacttgagcccaggagttggagagcagcctgggcaacatagtgagatccccttctctacaaaaaaattaaaaaattagccggatatggtgrtacacgcctgaggtc

SEQ ID NO: 503350 - DNA, 507 bp, Homo sapiens
cggcagcctagggtacctgggcacaggaaagaggtgccgcagctttcaggctttcaaaagggactgggtggccccctgggatcatcacggccttgagcagcagtggtcaggcaggggaacagaaaggctgacctgggagggcaatgggagtttcgagctgtgagggacagccttcctaaaatcccactttctcactcctctgcttacatacattccatggctccccattgcccaaaggatcaagtctagacactgaagcttggcaggcaggctttctcgagcgtctccaccagtggtagccctctctccaggcagaccagtcttacgccaaacactcccgccctgactgaggtctttgtcttggccgcygcatctgcctggaaggcccacactcctccccagagcagctttggggcggtccagtgtgtttagtgcttatcgtgattgactctgacagctcctcaaccctatggtgactgcagttctcccaggtccaggacggtgccc

SEQ ID NO: 503351 - DNA, 614 bp, Homo sapiens
ccccccgggaaggatcctgtgacatggaatggtctctttttcagagtttagtatttcaggccaaaactgagtgaggtctgctgtttcctctgcaaagtctggctgaccttgactggtcactgtcacagttgtctgttggtggtaatgggctcagggaggctgctctgggtacaactgaatggaaactcacataactcaacaattcttatttatctttgtggtaaaaatacacaggaccgtttaaacatgtaaactatgaaaatgcccagtgttggcacggatggtgggaaatgaacactgctagtctgtgttgctgaagtttaaatctgtatgacctctggaaggagtttttttttttttttttttyccagggtcctgctctgttacccaggctggagtgcagtggtgcaatcaaggctcacagcagcttcgacctcctgggctctggagggcaaggtggcactctgaaccggaggtcttggaaatgcaaagcctttcgctcagcctttcactccacctttaggaacacagtttaaggaacgagttctttagagagagcacaacacaattgttggagttcacacactgatcccctcagggtcaggctcctgtgt

SEQ ID NO: 503352 - DNA, 542 bp, Homo sapiens
ctgtgacatggaatggtctctttttcagagtttagtatttcaggccaaaactgagtgaggtctgctgtttcctctgcaaagtctggctgaccttgactggtcactgtcacagttgtctgttggtggtaatgggctcagggaggctgctctgggtacaactgaatggaaactcacataactcaacaattcttatttatctttgtggtaaaaatacacaggaccgtttaaacatgtaaactatgaaaatgcccagtgttggcacggatggtgggaaatgaacactgctagtctgtgttgctgaagtttaaatctgtatgacctctggaaggagttttttttttttttttttttccagggtcctgctctgttacccargctggagtgcagtggtgcaatcaaggctcacagcagcttcgacctcctgggctctggagggcaaggtggcactctgaaccggaggtcttggaaatgcaaagcctttcgctcagcctttcactccacctttaggaacacagtttaaggaacgagttctttagagagag

SEQ ID NO: 503353 - DNA, 542 bp, Homo sapiens
ctgtgacatggaatggtctctttttcagagtttagtatttcaggccaaaactgagtgaggtctgctgtttcctctgcaaagtctggctgaccttgactggtcactgtcacagttgtctgttggtggtaatgggctcagggaggctgctctgggtacaactgaatggaaactcacataactcaacaattcttatttatctttgtggtaaaaatacacaggaccgtttaaacatgtaaactatgaaaatgcccagtgttggcacggatggtgggaaatgaacactgctagtctgtgttgctgaagtttaaatctgtatgacctctggaaggagttttttttttttttttttttccagggtcctgctctgttacccaggctggagtgcagtggtgcaatcawggctcacagcagcttcgacctcctgggctctggagggcaaggtggcactctgaaccggaggtcttggaaatgcaaagcctttcgctcagcctttcactccacctttaggaacacagtttaaggaacgagttctttagagagag

SEQ ID NO: 503354 - DNA, 560 bp, Homo sapiens
ctgctgcactggtgggagtgaagcagcttctcagtgccatgtggcccttcactggcatgtgcttgtctaactgggggctctcatgagactggctccagcagggcagggcccacgcatgcctgtcacctgtcacgtccaccactgggccttcagagccaagcccggagcaattgctccayaaaaatgcgttaaatgagtgagtagctcaagaactcctaaagtgcaagcgcagccatcctgactgcatgtggctctgagttccaaggattttttatcatttagagaagtccaagaaaccatcacaaaattgccatcgtgtggaaatttcccagggcccatctgatgacctgtcctcacttcaggccccctggggctggacgtcgtcatcacagcgggcccccctgggggggacttggtcccgaggtggggcgggcagcgggggagtgaccgtgccaggcccacgggaagcagtgtctccttcctggacggcaccccggcctggctggggcccagtccccgcgccttggcctctgaggtggtcgtcccggccaaatgcacgg

SEQ ID NO: 503355 - DNA, 675 bp, Homo sapiens
gtatcagccagtaatttatccttttccattgctaagtagtatgcaactctgttttttacatctaaactatctctggaggttcctaaaggtccctgggaaatcacaaagatttgtttttatcaccttataacaagaaggatgttaaaactaatttctttggagtattctgtgtttcttaaatagctcaacatgattagtttctgtcaaatcaaagaggaagcatggtcttctctggatacttttgtacagataaaaacttttaacwtttttttttttagagactacacactttacaagatagaatggaaggccttagcgccttgtcaatgcccacaatatgttcttagctttcaaataaacactgctccaatcttaagaaacagttatgtactgtacctcaatagattttaactctcctccatcctgattttgttggttactgtataaactgaccatggttatccagtcttgtcattaacaagtggtttcttctttcctctcttccttgtgctatacctctgctactgactacagcatagaaagtgggtctacaacaaaggatgacagtccgagagtcttgcagaagagactatgccagacactcttgactactgatacctcaagaaactgactcatggacacaaactttggagtataagcgacatcccttaagca

SEQ ID NO: 503356 - DNA, 675 bp, Homo sapiens
gtatcagccagtaatttatccttttccattgctaagtagtatgcaactctgttttttacatctaaactatctctggaggttcctaaaggtccctgggaaatcacaaagatttgtttttatcaccttataacaagaaggatgttaaaactaatttctttggagtattctgtgtttcttaaatagctcaacatgattagtttctgtcaaatcaaagaggaagcatggtcttctctggatacttttgtacagataaaaacttttaacatttttttttttagagactacacactttacaagatagaatggaaggccttagcgccttgtcaatgcccacaatatgttcttagctttcaaataaacactgctccaatcttaagaaacagttatgtactgtacctcaatagattttaactctcctccatcctgattttgttggttactgtataaamtgaccatggttatccagtcttgtcattaacaagtggtttcttctttcctctcttccttgtgctatacctctgctactgactacagcatagaaagtgggtctacaacaaaggatgacagtccgagagtcttgcagaagagactatgccagacactcttgactactgatacctcaagaaactgactcatggacacaaactttggagtataagcgacatcccttaagca

SEQ ID NO: 503357 - DNA, 259 bp, Homo sapiens
tgaggaaactgaggctgagatgtgttaagtaacttgtccaagatcacacagctaagtagcagattataaaggacttggtccatcccgaggctgtcactgactggtgcagccaaactatttctcgtgatctgagtggacagaaagggaggagaatgtgctggggaagccagttcccacattcrcatctcaacatcaggaacccagtgatagttttagccccagtggtgggagatgctgctgctctacaactacagtctcc

SEQ ID NO: 503358 - DNA, 630 bp, Homo sapiens
aacaaacaaacaaatgaaaaaacccaaacaataacrtttgcacaaggacccaaacttggcagtgcacctagaagagtttgtagcataccattggttataaacattgtacaacacaaacctaaactattacatttgtgaggggataggttgccatttcccttgcttgtttatgagcaaaaacttgagagctgcattatttttgccttcccagatagcactgaccctcagtaaatgtttgatgagctaaaagtgcctttagtgagtgggaaattaagcaaggcccttgattgtacatctattgctccaaacttcagaaaaaccaattataacttttacagaacatctcctccctatgctgctttatttctttccatacatagctgaactcatcacctgagactcaacttccacccatcttgtcctataagttcagatttataagggcagggcaggcaaagaagcccttagactttgcttgttggtctctcctgtaaccctgaaataaccacgtttaccacgtttattcccaaagctcatattgagttcaaatcccctgttactcatttagagagacaagtggcattcatcatttttgcctctctgtgtcttcctctcccccagaacaatggc

SEQ ID NO: 503359 - DNA, 600 bp, Homo sapiens
ctctctactcggggtcgacactgtttattacacacaaattgtgtttgctccaagcctttgtcgttaaatctgtactaaataaatgtgagtggggccagcttatgggggcagcactctcatcggcggtgctgagccgtgaggtcccctacctgccctgtcaggcaaaatrcttgtgtcagcatacttctttcatccgtcactcagccagagtctgtaagacagactcagcactaggtcacattttgaaagagaaaatagagcgaaaaatcagtcagctttccaaatttgtttttaaattattgacaataaacaatattatgtgacatatgtcacatacaaatattattatgtgacatattagaacatgagatactttcacaaaatgatttaggatttaatgactgccacatcaagtagagataatttttatccaccacaggtatattctattatggagtgattacatcactcaacacaggacatattttcccccagtcattagttgtctgaatttcaatagcttgctttataggttagctcagttgactagaccctcatgctaaagaatccatcattattacacattaaactcaaagttag

SEQ ID NO: 503360 - DNA, 600 bp, Homo sapiens
ctctctactcggggtcgacactgtttattacacacaaattgtgtttgctccaagcctttgtcgttaaatctgtactaaataaatgtgagtggggccagcttatgggggcagcactctcatcggcggtgctgagccgtgaggtcccctacctgccctgtcaggcaaaatacttgtgtcagcatacttctttcatccgtcactcagccagagtctgtaagacagactcagcactaggtcacattttgaaagagaaaatagagcgaaaaatcagtcagctttccaaatttgtttttaaattattgacaataaacaatattatgtgacatatgtcacatacaaatattattatgtgacatattagaacatgagatactttcacaaaatgatttaggatttaatgactgccacatcaagtagagataatttttatccaccacaggtatattctattatggagtgattacatyactcaacacaggacatattttcccccagtcattagttgtctgaatttcaatagcttgctttataggttagctcagttgactagaccctcatgctaaagaatccatcattattacacattaaactcaaagttag

SEQ ID NO: 503361 - DNA, 623 bp, Homo sapiens
atgcatcagccttcccctattgcttcctgatggagccaagcaaagtcagtctagggcagtggttctcaatcaggggagattatgcctctgagtgggacattttggagwcatttgtggggaggggtattactggcttctggtggatagaggccagtggtgctactaaacatccttcaatgtacagggcagcccccacagcaaagagttatcaggcccaaaatgttttcagtgtcaagttattagtgagaaatcctggctagggtttttcttcacttcccaaatgtgtcctctttctcttctgacaatgaagaaggaaagaagagtataagaggaaataatggaagaacagctgtaagagatagagaacagagctgctgtgcagagagagctgagaaggaaggagaagggtgagatgttttctggaaagttgaaaagattgttcatcagccagcttattttgagcacctactatgtgctaggtccagtgttagacatgagataagcgatgatttcagcattccaggagtctcagtatactggctgcataaacattaagttcatatccagaaatagatggggcatggaaggaaggggcatgacagtgttgcctggacctggggaag

SEQ ID NO: 503362 - DNA, 386 bp, Homo sapiens
tgaagacagcagcctagtccagtgccatacctcctttctggggttgccaccattcactgcaggggagttgtaaaggcctacctagcttcttctccccaayttaggatgtatctaaaggattattccctattcagaataaccaagaggatcacctgaggcttctgttgaaatgtattgcaaatcgacttcttccgctgactgatcttgctccttccctttccttcctgctcttgatctcaagagcactacctaataacatcctatatgctaatcttggtatcagagtctgctccacagagaaaacaaaccttagtagttgatgccaggaatactctgagaaagcagatgctgggatgtaattttggagctgggtgacccactattgt

SEQ ID NO: 503363 - DNA, 417 bp, Homo sapiens
ttgttgagcactggctgagcacaagcagtgcagaggtgaaaggcagaactccaactctcctagagcttagatgaatgaaggcaagattagagttccctgacgagtcctgtgatccaggtcagcttagggcattgtggagcacagagggggtcaaatgctcttacagagcccagtctacatcctgagttagccaggactcagttcttatgtttttgttcacttattccgaaatcttttctgagtacctactataagccaggcatgctctagacattggagactgatatagcagtacacagagctaaggggaatccttgtctttgtggatcatatgttctagtggtgggagacagatgagaaacaagatgaatacatacaagkgcataatttattacttggtgattagtgctagtcagg

SEQ ID NO: 503364 - DNA, 643 bp, Homo sapiens
gctgcaacaaagggtggctccaaacatctccctgtggaccctgagaaaggacaggaattaggaccaagaaaaattctatgcactccctgagatgggccaaagggcccctgagggtaggactgctgagagggtagtaatggaagtggagaactcgcaggctcctggaaggttctcacaggagaatcaccagagagctggcccggggctgtgaggaccactggtcaccacagcctgtgcttgtcagaggccaaaggatgagctccacaagagggyacagaggtggggagaggacaggacataccacaagggatggagagacagtgtgtgaaagagggatatgggacaagaggtgacagcaggtatgggaagaaagtgctgagctgggagaaggcaggaggggtgtttagaaagagcatttttagttagtctcttcatattatttttttgcactatttattttccattgtttttcttggaagtctcgtcctgataacgtgtcctaccattttccagtaacagaaggttaatttgctgactatattttcactcttcaaaacccctaacactacagaatacatttttttctgaattaaatatcaaatgtctctgcagtgctgaaacaggtattttgctgcattataaa

SEQ ID NO: 503365 - DNA, 373 bp, Homo sapiens
gactagaatagccccataggcacccaggcctttgtatttgatggtaagacacttaacaggagatggcatagcaggggctttaatgacagacctttgttttcttctgaacaattaaattagccattgactgtttgggcataaactctcctatactcatttaactgattttgcttcccctgtgttccttaatgactcattgaaatgctgatatgaagtaatataaaatgttctgcctccttttgaaggtagtcttcaaaagcattaatagaaaacagtgtytactttgtatcatgatggttttgatcatgacttgatttatatgacagttttggacctctgctagctccatcattggttttatgataaatgagct

SEQ ID NO: 503366 - DNA, 455 bp, Homo sapiens
aaaaaaaaaaaaattgtattatactgccttcarttcctctcttcacttactaatattctgtcttggggtatttttattacagaaagtggggtattgaaatttcctactataattatattgctgtctaggtgtttcttccagtctgtcaatatttgctttatatatttggaaccttagtgtgacatacacacagacacacagacgtgcacacacacacacacacacacaaaatttgtcataggttcccagttaataaatctattattgtttaatgtctttctttgtctctttgcagttttgacttaaagtactttatgtaagatatgacagtttttgacttaagatgtagcttttgtaatactattttgacctcttctgctctcatttggttaatatttgcatgcaatgtctaaatctatcttgccaccttcagtatgtttttaatcattagatgt

SEQ ID NO: 503367 - DNA, 613 bp, Homo sapiens
ctgcaggtctgttggaatttgctgtaggtccactccagaccctgcttgcctgggtattaccagcggaggctgcagaacagcaaatgttgctgcctaatccttcctctggaagcttcgtctcagaggggcaccctgccttatgaggtgtcasttgctcccctactgggaggtgcctcccagttaggctactcaggggtcagggatccacttgaggaggcagtctgtccgttctcagatctcaaattttgtgctgggagaaccactactctcatcaaagctgtcagacagggatgtttaatatttatttttcaacatttaaaacacagaagggaaaattcagataccaaatgaaagctattactgtgtacatattctactgagtgtcataaattgaaattagtcctaggaactaacaatgtacaaaaagcatgtcctgccaactctgtggttatatttagctcctcaatataaaccaaggaattatttttccactgttttcaattcctctatgtttcatacaaataattctctaaaaatacacatttcaaagtatcctgactctaaaaatgccactcaaatgacctttcattgaaattttaagtctcctactgat

SEQ ID NO: 503368 - DNA, 630 bp, Homo sapiens
ataagatgctctattttcatcccttttacttggcatacatactaaagcaaaacagttgggttcatccaaacatggaacataattcaaatttttccataatttttctaagaactgttttgtcatgtaaattattgagtgtatctttgcctgaaattaaaatgtcaawgtatcactttttacagaatattaatttattgtcctttaactgaaaaagtcatcacactggaacaaaaggagacattgtcaaaaatataatacaaattttcaagaactactagagtaaatagtttttaactgaacaggcattatgttaggtagctctgttttcgccccagtttattaactcaatatatttttgaaagcgaaaacagaagcattaataaaatatttgcaatattttgtaaggtactctgaagatagcacacagtaacttttaataacataaacacacacacaattactaacgtaatggtctgttcattatggaaaaataagtttcgtcaaacatcatatttgcagatatcagatgtatagaagtcaaggatatctttgctttcactaaaaactcaggaagtagtgacaaaagactcaaggttttgtttaatttaaagacaactgctcaacaaggtg

SEQ ID NO: 503369 - DNA, 360 bp, Homo sapiens
agctgagacaccagcaggcctgggcaggccaacccctggcccagaggctgggtccctagggcccgagccccctacatggctcatctgcatggggcaatctctccctgtgcaagcgtcaaatccacccggtccccaggccaaggacgcctctggatctggctggctggcttggctggcttggctggctggctgactgggtggcttggytggcttggctggctgggtggcttggtgggcttggctggctggctggctgggtggcttggctggcttggctggctggctggcttggctggttggctccctgggtggcttggctggcttggctggcttggctggctggctggcttctgtggttta

SEQ ID NO: 503370 - DNA, 611 bp, Homo sapiens
catattggactcttatctaggattgtatgtatcaataagcttttccacttctaccactgtattcttttctttagatgaccttcatctttgttttggtataaagtctcctcatactatgcaagcagccactttctgctgaatgctccccacttactcagtcaactgcccccctcactcccagtttgtgttagatagtgccttctctcattacaccctgtgtttaagttgactacttcttatatgaaaatatacatcagctgcctttttcatgtctttctgctcaattagattttgaaatcccagagaaaaataagtcatattctcaactttygcctgtgtttattgccctagtctatacatctgactgcttcattgtgtgcccaacacacaatccaaactaacctaataatagacgtggaattctactacacaaccagtgagtttaatgagctgcaaataaaaggaccatgttgcttcttccccccattaaatttcatcctttatagctgttttggctatcactgattttcatgtgttcaaattcagatgtttgcatagtaaaatgaaaatgttccataaaaggattactttattcttaattggttgtttcc

SEQ ID NO: 503371 - DNA, 611 bp, Homo sapiens
catattggactcttatctaggattgtatgtatcaataagcttttccacttctaccactgtattcttttctttagatgaccttcatctttgttttggtataaagtctcctcatactatgcaagcagccactttctgctgaatgctccccacttactcagtcaactgcccccctcactcccagtttgtgttagatagtgccttctctcattacaccctgtgtttaagttgactacttcttatatgaaaatatacatcagctgcctttttcatgtctttctgctcaattagattttgaaatcccagagaaaaataagtcatattctcaactttcgcctgtgtttattgccctagtctatacatctgactgcttcattgtgtgcccaacacacaatccaaactaacctaataatagacgtggaattctactacacaaccagtgagtttaatgagctgcaaatwaaaggaccatgttgcttcttccccccattaaatttcatcctttatagctgttttggctatcactgattttcatgtgttcaaattcagatgtttgcatagtaaaatgaaaatgttccataaaaggattactttattcttaattggttgtttcc

SEQ ID NO: 503372 - DNA, 601 bp, Homo sapiens
ttatttgagccatattgaacccgtgagtttggaaaacaggcattaaagtcttactcacaggcataaattaaacggcatttcataggaaataaacattttgtaagccacgatttgctcaattgtgagacgtttttgtttgtttgtttgtaactattgtttcaactgcaaagtcaccaaaaacactgagtcattgaaaacagagcaatggtccttaggaaaaatacaggrttaggttcctgtgaatctctgatcacaacatttttatcatctgatcaatacataactttcttttatgttatttctgtttagaaatacctgattataatatatttttgatttaacattgaactgacagccaacaacattatctgcctgaacgaagctcatctagcacacacagtgtctgttctctgtaaggcacgctacagctttcttgtgtacagggacactagacaacattccagcactctgctttgaggccatgttgaacaatgaaatcaccaatacaaagcagaaaacgtggtactaaatagaccacaaacagacatgtgtttatagtacgagagctgaaaaaataaggaagattatcaccttttttact

SEQ ID NO: 503373 - DNA, 503 bp, Homo sapiens
tgatactgattttaatgataaaaaattcctccaatatatgataaatctagacaataggttttattgtatyttttgagattgtatatgtttcttttatatttcctgtttgatcacagtatttaaaatattttaatactattaaatgtaaagtattttttaaattttgtcattaatttctacttatatgtgatttctgattaatacatttgtattattcattttcttgtaatgtgtcaagtttttccttgtagtcaactacaacaaattttatgaatattctatttttatttgaaaagactgtgtgtgtgtttattaccttcttaatcatgctcttttcattttctatatctttactaatttttgttgattttatttgtcctggattgagaatctgtgttttagattcttcattttagtgtatttttctctaaagcattttttagttttattttctcttacaaacttatttttattttttcttgaagctctgtattttcttcctc

SEQ ID NO: 503374 - DNA, 541 bp, Homo sapiens
actgattttaatgataaaaaattcctccaatatatgataaatctagacaataggttttattgtattttttgagattgtatatgtttcttttatatttcctgtttgatcacagtatttaaaatattttaayactattaaatgtaaagtattttttaaattttgtcattaatttctacttatatgtgatttctgattaatacatttgtattattcattttcttgtaatgtgtcaagtttttccttgtagtcaactacaacaaattttatgaatattctatttttatttgaaaagactgtgtgtgtgtttattaccttcttaatcatgctcttttcattttctatatctttactaatttttgttgattttatttgtcctggattgagaatctgtgttttagattcttcattttagtgtatttttctctaaagcattttttagttttattttctcttacaaacttatttttattttttcttgaagctctgtattttcttcctcatgaagatttttgctgcattattgaggctatagacattaata

SEQ ID NO: 503375 - DNA, 595 bp, Homo sapiens
tgtttgcctctctgtggtgtcgcctcgccccatgtctcctgcaaatggaagctgtgctgcagaaatgcccttagattcaggctcatctttctttgccagaagccttcgtgggcagagctgtgagagccacatggaagcacctgtgatgctaagtgtgccccgtgggtccaggtggccagagcccgaacccaccctgtgatgcaaagtgtgcccagtgggtccaggtggccatagccctgacctaccctgtaatgctaagtgtgccccgtgggtccaagtggccacagcccgaacccaccctgtgatgctaagtgtggccagtaggtccaggtggtcatagcctgaacccaccctgtgatgcccttgttttgtcattactgatctcatccatgacccttgcgagaaataattatgtcatgagaggtggcaaaatygtggtttctctcatgatctcatctcttcacaatgagtagctgaaattcttctatcaaaaacaacaacaacaaaaatggctgggcacagtggctcacacttgtaatcccagagcttttgtgggccaaggtgagagaggccaggagcttgaatccagcctggg

SEQ ID NO: 503376 - DNA, 595 bp, Homo sapiens
tgtttgcctctctgtggtgtcgcctcgccccatgtctcctgcaaatggaagctgtgctgcagaaatgcccttagattcaggctcatctttctttgccagaagccttcgtgggcagagctgtgagagccacatggaagcacctgtgatgctaagtgtgccccgtgggtccaggtggccagagcccgaacccaccctgtgatgcaaagtgtgcccagtgggtccaggtggccatagccctgacctaccctgtaatgctaagtgtgccccgtgggtccaagtggccacagcccgaacccaccctgtgatgctaagtgtggccagtaggtccaggtggtcatagcctgaacccaccctgtgatgcccttgttttgtcattactgatctcatccatgacccttgcgagaaataattatgtcatgagaggtggcaaaattgtggtttctctcatgatctcatctcttcacaatgagtagctgaaattcttctatcaaaaacaacaacaacaaaaatggctgggcacrgtggctcacacttgtaatcccagagcttttgtgggccaaggtgagagaggccaggagcttgaatccagcctggg

SEQ ID NO: 503377 - DNA, 603 bp, Homo sapiens
cagccacaaatctcccaggtttgatctcgggcttctgccgagggcacctccagggctggggtctcatcgtgttgtccccactttattccaacgtccaccccaggcctgggggagcccagggaggaccgagtttcctgggccccgcagggtgcacagaggtgagtttggtagtgcggtcccracctcgacaagcatcccagcgaagcaggctgagcgcccggctggctccctcaggacccctcctccgggccttcgccctgttgatttgggtgttttaatgcaagaaagtaggacactggttgtcacctgcctgctcctacaaggaaaatgcatgtttgtgtggttatccgtggccacccccaccagggcctgcggggggtccagtgcagtggaggtggggaggcgactcatgggctccaggatccgtggagagtgagtgtcagcgggagggtgtcccctgacctcggtcaatggaagctgctcttcctgggggtcccacgggaggcccgtgatgggggtgggggaggaggggtaaacgccaggccctgattggccgcctgtccttgggtcttggctggtcctaagagggaacggggagcacag

SEQ ID NO: 503378 - DNA, 447 bp, Homo sapiens
tggggtcacagcctcagccgggactcctgccctccagcccctcagcatcctccctgcgtgtgctctcctgggggctgctcagggcaggtggcgagtaggggagctgtgggaccagagagagggggtggacgtgcccagggcctgccctcttggcctgccgtggagacccacccaggcatacctgggggctgaccctcccctgcagagagcagggtgaaccccagccctgccctcgcctaagagccaggttcgaggggagtgtaatttataatgaaccccactcctccccccaacacccaccacagggaggagccagcctctctcctggcaccaaagtcacgctcctgaccctgcaggccacaggatgaggaggacccagagaggcagcggggttggggcatttcataagccggygagagctgcccgtgtgcatcctcaggcctcaca

SEQ ID NO: 503379 - DNA, 349 bp, Homo sapiens
ccaggcaccaggaatgtgagcttctccctcccyacagtcctgctgtcctcagggcccctatgtctctgaaggcaccaccatcttccaagatacatgggcctccgcagggtctaggagtgccagacacgtaaccagaaatcagatgacatcactatctaaataaaacaccactacatggaaatagaacaccactacatggaaatagaacatgggagccccttgaatgtggcaagagcaccctcccaggcatgttccaccctcaccccgggctcatcaggagggttcttaagatgcagacagttttaagggggttggaggaatagttgagaagctgagatgttgcacccac

SEQ ID NO: 503380 - DNA, 624 bp, Homo sapiens
gcacaggtgtcttcttttccaggtgcaggaacagcttgggcacactggtggacatgtcctgctgccagcgcttgggctgaggtgaggtgctgctcttagaaagcctgtcacagttggcggtgtggggcgaggaccgcctcagagactgcactgcttgcggctcggctttgcgccttttaggggtggctggttcaccgctggtcgactgactctctgtagactgcggcctggatggattcaacaaacgtaagctgggagagagcttctcctggctcctattagtatttgtggcactttccttaattgcaagaaaaaccttagatgcagtcacctttttatactgagcttgttcatagggatagagtaaaaccaacgggagagtgtaatcaaaggttattcttaatccatccaccatctccttacaaaggtcaatattcttttctgctgggatataaggcacgttcatgctggcatgtggcatagcgtgatggtgacgaggcctctcattggctgaaaagkctgcactgatagcaaaatgcttcacataggattccaaaatcgttatgatgttggtgtggcatggaagttgcactaaccgtttcctccgattaatgtagtaacaat

SEQ ID NO: 503381 - DNA, 336 bp, Homo sapiens
cacccgagccccaggcctgcttccccactccccgttccggaggccccagtctttcctccccgtccccgcaccgaagccttcggcgctgcctcctttttccctctccggagcccccagctccgcctccaccttctctccgcatycaagccccagtcccgcttccccaacccccgctccgagtcctcagagccccttcccttcccgtcctacgtcccctcccagcctcactccgacacgcaggcctcccctcccggcggaccggcgggggccgcaccttctctatcagccgctgcatgcgcctctggaagcggcggcgactggccctgagcttctgca

SEQ ID NO: 503382 - DNA, 616 bp, Homo sapiens
attattctttttttttctttttttttttttttagctttaaatgtgtgtattcctggtctttttggtgaaaggcacagaatatggcaacttcttttttcagaaaaaagtaggtgacaatagcaaaaattagttaagtttgtcttgactttctgaattttaagctaaataaaaataaaaataagtcttctcaactctactgatttgtcaaattgagcaaggctatgccacttaaacaagaaaggtaagaatttagaagttattattaaaacttataaatactcaagttctttagtattattgttattgtaaataattggttatggtgggtatatagaactgtacatgatttataaagttataagaaaagttaaaccttggaaataaaatcaacatgaatcagatatactcatataagataaaacatggtgctttagagaaagactagttctatatgggtaggtctggaaattttacttgaatgagacatcctttgmgaaaaaatgtgaaagtacctatggatgtccttagtagctatagattagccatcttttagtgaccccgtacagataaatggaaacttatatttaaaaaatataccgtaaaacatctgaagata

SEQ ID NO: 503383 - DNA, 558 bp, Homo sapiens
ggtgtggtggctcactcctgtaatcccagcactttgggaggccgacacctgcggatgacttgaagctaggagttggagaccagcctgcccaacatggcggaacgctgtctctactaaaaatacaaaaattatccagttgtggtggtcccagatatagtcctagctactcgagggtttgaggtgggaaaatcacttgaacccaggaggtggaggctgcagtgagctgagatcacggcactgcactccagcctgggtgacagagtgagactccatcccmaaaaaaaaaaaaaaaaaggtctgttaaaatacaacaacacattctcctctcctgggcccctgtgtccagcaggctgccctgagaaggcaaggaaaagaaggctgagcacaatagaaggtaggtgaggtctgcactgccaccaattgtactgcaaaagagcatacagtttgacctggctttttccagtttcccaccggatccagccagatgccagaaacaggtaaattgtaagagagtggacagaagagaaaacatctgatcaactaataaaacattgtcaa

SEQ ID NO: 503384 - DNA, 572 bp, Homo sapiens
gatgcaatattagatgagatgactgagtatccagccaagaatttgtcctctgtagtgcagcaacagattttgatttcgttgttaccattgttattaaaaaaagtcctttacatgaaccctttgaagaaatctccagggtcacacctctgatatcgtctttgtaggcagtagtttgactgcagtactacattcgttcaatgaagtgatggaagatattgaagtctatcattatttttagtttgaggaagccacagatttggtaaccaaacttgatagtcaaataaaactccctgggaaattccatagagcttagcaaggtaacatggcacctcaactgacctctgagagtttttataaagaaaccctaagtgttccaactgtggagcacatttttcagaaactgaaagatatattctcagaagagtacctcaaagatatgttctcagaacagtacctcagaactatgatatgcttatttctggtaccttcagtcataggacagcttaaattcagtacatctgaggaacaccatgctgacaartacagaagtcacttactcagtccagacatgt

SEQ ID NO: 503385 - DNA, 549 bp, Homo sapiens
tccttgttgaagagtcatatggaaacacagagtaaagatataggacttctgtcccycatgtatgaagcattccacctgcctgacatctttttttcctaatatatatggatctttaaaggacctgtgtattctttctgtgacgaagattgagaataagtgctatgaaaatctatgaaagtgtctgaaagcatacttaaacactttgatggaacaaaggttgagtaactcagctttacttaacaaaacttttgatataaaacacaccagacttaattgggagtacatatatcaaactctatacaactaacagcttcctgtggataattcagaagccagtgaaaatgcctaagagacttttaaaatatgtcttcttttatatttgatgtttggaagaaaagctgtaaggcatatctttgcctataggctttccattgagtaccttagccattaatgatctatgtatttaaaaggcccttgttttaactctcatgctttgaagaccaatctgttcttccagaatatagtatggaaagtgctgtgtttcacttt

SEQ ID NO: 503386 - DNA, 633 bp, Homo sapiens
ctccatgaaggtattgagcaatgtctgttttacataacagtttgcattcaactcttggcacacaaaataggtattgaatacatatttgctgagtgagtgaagaacctactacctacttctctgccagtatttttaaaaagaaacaaacaaaagctttagactgtttatcaatatggtttcaactcacccctatgtgggaaaaaaatacatttttatttaggggtatgtaattattgggtctttcaaattgcagaagttytttttataaagcctatttctaactcagcttattattaaagaactttttttcatttaaataaaacattgaacatttgtaccctacatcttgccaaatgtaggatttcactaatgctcaacaattacaaaaattcaggtataaacctcaatgtttataaaatgccatctaaatatacgttgtgatcttgccttttatcaaaggacaaaagctcggattgtgggttgagtttgaccaacagatattttgtttgttttaaattacacattgttttaatttttttaagctaacattcaaaaattgggaaagtttacataaattccttttttgtgtgtcattataaaatttgacattggaccctcattttcatattagga

SEQ ID NO: 503387 - DNA, 509 bp, Homo sapiens
aaatatgggtgtattaatcctcaaattaattctaccttacactggttatgacttaataatactttatttatttctcttctttccatgaaaatgtgattaaatatgctaaatcaatggttctattccagattgtttcattatacacatacaaaacatacagtattaaaaatttcagagatgcacataacagtgtaattaataggtaatccataaataaatttatacattcaaaatagtttaaatataaaatgcaacttaaaataataaaaataactcaagattgcatactgaataattatattttatcaaaatttagtatatatttattatgtgctaaatgcattcatgtgaacaagtaaactagtagctcatacagggattggaggaacctaaactcttatgaatagtatagatcttttagtcattaaaatttactatccaaccttttatttcagyttcaacatctaaagaactcagaagtcataattcccatctttataacaagaaaa

SEQ ID NO: 503388 - DNA, 597 bp, Homo sapiens
tcagatctaaccatttggagttacatgaagcaygttcactgcaagagaccagtagagttcaataatctttaaaccctgtatagggtttggtcagagtgggtaacattgagaggcagaacaaagaagagctacatgtaaagaattatatatagcaggagctgaatcagaaaaaggctgggaatatataattcacatgaatattggacttgtggtatctctttttgctataaataaaaatcttaacaatataaatacttccagttttgaagagttaaattcctaaacaccttactttgagaaatctagaaggaacagagcagttttttccccctttagtcagacttccctgcggtttttaatcgaaagaaaattgaagtggttaaagactatttctgttcaacaaacagtgaaatgtaaatgaaatttctcaccttggactggagagaggctgctgaccagcagcatgagaagcagagatgtcgagatgaacttcattctgtctggaggtagagttcagacttgagctctgagtccaggctgtgggtttgcagtaccagagactcctatttatttataccagtaagggccctcccactg

SEQ ID NO: 503389 - DNA, 604 bp, Homo sapiens
cataggctcacacactcaaatgcccacagaggccatgctggtaagataaatatgcaacttggctcaactttaaaaaaattgagagtggtggagagtgcatgccctactttaaaaagacatctaagttttttaaaaaatcatcactgtgcaggccaagaaaatgcatttgccattggatttgacctgtagagatgtcagattgataccccttgttagatatcactgacccatcccttgaacgtaattcaggagaagtcaagacactaatgagggtgtgtttctttctcactctggtgccatgaggatcttctaggagagattcttcagtcttctcataggtcttctcttctcaagctttgatagttccaaagccagggacatctttctgagtgcaaccctcttgatatctgctacacttaaaacccttcaaagactcctattgctctttggatcaactccaaatgctctaacrcggcctctaaggggaactgacctgggttgtgttaatgccgagctcacattgtcaacactagctcttcgctcctgcaatttcagcttctataagattccccacccaccccagcccccccgcctccgctgacac

SEQ ID NO: 503390 - DNA, 558 bp, Homo sapiens
ctgccggctaggctttgggtgccgaagaatttgtggacattttacaggytaatagatttttttttttttaaactgcaggagttctgtgggaattcctctgcaaattttaaaataagttgtaggagtaggaaagtgagactttctctttctctctctctctatttttccaaagagcgaaaatgagccaaatttagagctagttttgaaagcattttctcactttgccttaggaacgaagagtgaggaaaatcaagtgtcatcagcaccagctctttgaatgcgggtgagaggaaacacaaagccccggcttatttcaattgagcaagacaatgcaagagatttagagattttaggtcgtaaaggacccgtgagctcctttgttccaaagtttgtcctattgccattgaggcatctgttttccagtaactataacccctgtttcctgaatcagggctgcccgctcgggtgggtcacagagagaaagcatcgtgggccaaaatgtgggtgttgggagccatatggtgggttaagaggaagatgaggaggaagaggttaaat

SEQ ID NO: 503391 - DNA, 533 bp, Homo sapiens
gtggacatgttgtgcgagccagaaaataaccctttgttgctttaatccacagcaaaacctacctcggtggttctcaaatagtggtcctcaaccagcagcagcagcatcacctgggcctgagcaatgcaaagtctcaacctctcacccaagaccgactgactcagaaactcaggggttggggctgagccacctgtgttctaaccagcaaccccaggtgatactgatgctggtggctaaagctggagagccaaggacctactcatccatccttctggagctacatgctcctgctgccaataccaggtggtagattacaaaaaaagtggcttcatcattttacatcccatcaacaatgtgtgagggttccagtttctctgcatcatgctcatcaacatttatcactgtgttttttattgtagccattctggtgggtgtggagtggtatttcattgttgtttttatttgcttttctctaatgacccacrttactgaacctcttttcaatgtataacttaattggtgaaatgttcatt

SEQ ID NO: 503392 - DNA, 627 bp, Homo sapiens
ttcactcaaacaccccaggtgtcttgcggagttgattggatgatgagtctagttttaatggattatgagctcataattttataytctcattcataattctgaaacagagcagtgaagattttgacttaccacatttttaattctcatttccactataggaaaaaataaaaacccgaaaaatcattgctaatgacactagttactgaaaacatgggagaaggagctgaggtgagaaaagattgacttctcttgggttttcaaaattatgtggtaattatatagatcctgaacctgcttagaggcttcctaatccaaatatattatctctgtcccaattcttgatttgtcatctattaagggaatataacagtattttccattttgttcacagaattaccaatgtaaaataagtcaaatttctgcaataaacatgctttttgaaattttaatatgcagtagaaatatcatattattttaattaatattactaccattattgaaagttaatttagactaatgatagagtagaagtctaacagtctctctgaaagtttctatgtattaccaggctatgtatagttacttcttttcttcagcatttattagttataatgattttgtagttaa

SEQ ID NO: 503393 - DNA, 627 bp, Homo sapiens
ttcactcaaacaccccaggtgtcttgcggagttgattggatgatgagtctagttttaatggattatgagctcataattttatattctcattcataattctgaaacagagcagtgaagattttgacttaccacatttttaattctcatttccactataggaaaaaataaaarcccgaaaaatcattgctaatgacactagttactgaaaacatgggagaaggagctgaggtgagaaaagattgacttctcttgggttttcaaaattatgtggtaattatatagatcctgaacctgcttagaggcttcctaatccaaatatattatctctgtcccaattcttgatttgtcatctattaagggaatataacagtattttccattttgttcacagaattaccaatgtaaaataagtcaaatttctgcaataaacatgctttttgaaattttaatatgcagtagaaatatcatattattttaattaatattactaccattattgaaagttaatttagactaatgatagagtagaagtctaacagtctctctgaaagtttctatgtattaccaggctatgtatagttacttcttttcttcagcatttattagttataatgattttgtagttaa

SEQ ID NO: 503394 - DNA, 610 bp, Homo sapiens
ccatttacagaaaatttgtcaagctctgtcgaaagggtcttataagtgataaatatcawagtgttaatagattgtgaatggtttatatccatagggtgaaaactggggtagctagaaatagatacagattctttactattatttccataaagatggtatataatttaacccacctctgccttgaatcttggctggtattaatgacttgcttgaaaaatacaatagaagcacagatgctagttcacgagaatccttgcagcttttgcttgagtcttgtggaactctgcatgtgagaataaagtcactaaatagtccaactcccttgagactaccatgatagagagttcacagagaagaatgccatttgacaggctcagctcatccagattctttgcaatgcctgcaaaggcatcattaatttgaagagaccttgtatacccttctgatcaacttatctaacagataaattctattgattatctcccatcaacatcatttggactgaaagaatcatctagctgggccatgaccaaattcctaacccagaaaaacaataaggctgtataaaaaggggttggaagtcactaagttcggggtcttcaacagtcca

SEQ ID NO: 503395 - DNA, 610 bp, Homo sapiens
ccatttacagaaaatttgtcaagctctgtcgaaagggtcttataagtgataaatatcaaagtgttaatagattgtgaatggtttatatccatagggtgaaaactggggtagctagaaatagatacagattctttactattatttccataaagatggtatataatttaacccacctctgccttgaatcttggctggtattaatgacttgcttgaaaaatacaatagaagcacagatgctagttcacgagaatccttgcagcttttgcttgagtcttgtggaactctgcatgtgagaataaagtcactaaatagtccaactcccttgagactaccatgatagagagttcacagagaagaatgccatttgacaggctcagctcatccagattctttgcaatgcctgcaaaggcrtcattaatttgaagagaccttgtatacccttctgatcaacttatctaacagataaattctattgattatctcccatcaacatcatttggactgaaagaatcatctagctgggccatgaccaaattcctaacccagaaaaacaataaggctgtataaaaaggggttggaagtcactaagttcggggtcttcaacagtcca

SEQ ID NO: 503396 - DNA, 573 bp, Homo sapiens
tatttgattaactacaaaaatttaaataagcaatgttattaagtgacaaagattaaaatattattcttttgattactgagtattgaaaatcttggtaatgaacagcaaatgcaagggtcttagtccattggtggctacagtcacaactgtgctatctctaaactgtgttcttatctaaatgttcacttaaaaacattagagtatattttgtgcattaatatatttctgcatccagtgagttagtaagaaagaacgagaaagaagcaaagtatatgactttatgaaatgttataaacattggggatacaacyttagccttgcctacaaagtatgtatctattcaggcttttcatcaactttgttagttacattggatacactgctgagggtgtaattttaacttacatttgaagttctgattgctactgcttgctacatgcctggtagtgcaattaaaattgaaatttcccacatgtatatgaacagtttatcaaatttttttcaaacctaagaaaatttgatgtaatatattcacgcatcatgaagaagaaatgatcaaagtgcttataactc

SEQ ID NO: 503397 - DNA, 622 bp, Homo sapiens
atgaaagtatagcataaggttgaactctatggcaagacagcctgggtttgtatcctagcttgaccattctctagctgtgtggccttgggcaagatatttaaccttgatattttcttgataaccaagatattttctgtgtctttagttaggtacatctcttgttaaccagttaggttaggcacgtctcttgttaaccagtttcctcatagtaaagtggagataatattaattgtcttataagtttgttgtgagaattaaatgagttactatactgttttatgaactgtagatcctactgtaataatgggttgtaaaatcaatttgtgagtttcagtctgtttttttccatgaaatataatataatcaatacttttatgataagatgttctattggcaagctatagggaaacaagtactctcatacattgctggtggcagtgtmaaatggtacagttactattgtggtagactgttacaaaatgctgcccccatgacttctatttcctgtattcatacccagtgtagtctctgtattagtccattctcccattgctataaagaaatacctgagactgggtaatttacaaagaaaagtggtttaattggcttacaattctgccag

SEQ ID NO: 503398 - DNA, 448 bp, Homo sapiens
gaaaaagaagcagcacgcatccccctcttccggaacagggaagtcagtgtagtcggcgccccctaaaaaagagggttgtgcgtggcgtggggtctctgcgcccgctcgggctgctgggtcttgcgggccccaggctcagccctgctgtccccttcccgcacccgtcccccgcgctcctcaccatactccgggaggaagagcgccgggaggccttccgcgccccacggttcccggccggcagcaygctccccgcctcccgatctcgtccggctctggaagtaacacctgcaactccgtgcataagttctctgggggtcggagcccctggactcaaagcagcggcaggaagggggcctggcgcagccatcctcagctcgctgggactgcagttgcgccccacccaacaggcttgtgcctcgaacttcttttctctgaaaaccgcttccgt

SEQ ID NO: 503399 - DNA, 448 bp, Homo sapiens
gaaaaagaagcagcacgcatccccctcttccggaacagggaagtcagtgtagtcggcgccccctaaaaaagagggttgtgcgtggcgtggggtctctgcgcccgctcgggctgctgggtcttgcgggccccaggctcagccctgctgtccccttcccgcacccgtcccccgcgctcctcaccatactccgggaggaagagcgccgggaggccttccgcgccccacggttcccggccggcagcacgctccccgcctcccgatctcgtccggctctggaagtaacacctgcaactccgtgcataagttctctgggggtcggagcccctggactcaragcagcggcaggaagggggcctggcgcagccatcctcagctcgctgggactgcagttgcgccccacccaacaggcttgtgcctcgaacttcttttctctgaaaaccgcttccgt

SEQ ID NO: 503400 - DNA, 622 bp, Homo sapiens
ctcacccaatgttatcattgtactaaatataaatgtgcccctaatggttttgacttttgcttaagtttttgagtcctcatgtatgttaggtagtgccatctagtagccagaaatttgggaactggctgggcatgatggctaatacctgyaatcccagcactttgggaggcttaggtgggtggatcacttgaggtcaggagttccagaccagcctggccaacatggtgaaaccacatctctactaaaatataaaaaaatagccaggtatgatggcccatgcctgtaatccgagctaattgggaggctgagatgggaggactgcttgaacctgggaggtggaggctgctgtgagccaagattgtgccactgcactccagcctgggcaacagagtgagaccctgtctcacaaaaacaagaaacaaaacaaaacaaaagacaagaaacttgagaagcgcagtagattcaattatatatatctacttttaatttgctagctctgtgaccttaggaaagttacataacctctctgaactgcaactgtttcatttacaaaatggagataatgatagtttttctctaattggtttgttgtgagataattcatataaagctgatggtgcca

SEQ ID NO: 503401 - DNA, 508 bp, Homo sapiens
ggctgaggtgggaagatcaagtaaacccargaagtcaaggctgcagtgggctgtgttcatgccactgcacttccagccggggcaacagagagagaccctgtctcaaaaaaagaaagaggaaatctggactcagctctgctgaccagctgtgtttgctaactgcccccagcctaaggaatcccatctctaaaatgagaacttttctttgtagggtgctatgaaaattcgacgagataaaatatgtgacgcacttggcatggctcctggcacacaaacgatggcttcataaatggcagctagctagtaccaaggagaactgagttggcttttggaagctaagggaagggagctaccgctcagagaggagtgaggctgtttctttctattctcagacctaagaaggaacaggttcaacatccgggccacatccccatggggttcttagggatgaatcccaataattcatggagattctcctcagacccataaagaattctgctgccaggct

SEQ ID NO: 503402 - DNA, 508 bp, Homo sapiens
ggctgaggtgggaagatcaagtaaacccaagaagtcaaggctgcagtgggctgtgttcatgccactgcacttccagccggggcaacagagagagaccctgtctcaaaaaaagaaagaggaaatctggactcrgctctgctgaccagctgtgtttgctaactgcccccagcctaaggaatcccatctctaaaatgagaacttttctttgtagggtgctatgaaaattcgacgagataaaatatgtgacgcacttggcatggctcctggcacacaaacgatggcttcataaatggcagctagctagtaccaaggagaactgagttggcttttggaagctaagggaagggagctaccgctcagagaggagtgaggctgtttctttctattctcagacctaagaaggaacaggttcaacatccgggccacatccccatggggttcttagggatgaatcccaataattcatggagattctcctcagacccataaagaattctgctgccaggct

SEQ ID NO: 503403 - DNA, 508 bp, Homo sapiens
ggctgaggtgggaagatcaagtaaacccaagaagtcaaggctgcagtgggctgtgttcatgccactgcacttccagccggggcaacagagagagaccctgtctcaaaaaaagaaagaggaaatctggactcagctctgctgaccagctgtgtttgctaactgcccccagcctaaggaatcccatctctaaaatgagaacttttctttgtagggtgctatgaaaattcgacgagataaaatatgtgacgcacttggcatggctcctggcacacaaacgatggcttcataaatggcagctagctagtaccraggagaactgagttggcttttggaagctaagggaagggagctaccgctcagagaggagtgaggctgtttctttctattctcagacctaagaaggaacaggttcaacatccgggccacatccccatggggttcttagggatgaatcccaataattcatggagattctcctcagacccataaagaattctgctgccaggct

SEQ ID NO: 503404 - DNA, 591 bp, Homo sapiens
cctgcagcagcctctacttgcctctggacttggagctgcgcagaactgtagcttcagtttcacttgccattgcatatttctgccttatctctggtcaatagaratgtttatctgtttttcaagagcaggcagtcttttaaaccgggcgcggtggctcacacctgtaatcccagcactttgggaggccaaggcaggtggatcacctgaggtcaggagttagagaccagcctggccaatatgatgaaaccccatctctactaaaaattcaaagaattagctgagagtggtggcaggcacctgtaatcccagctactcgggagactgaggcaggagggtcgtttgaaccccagaagtggaggttgcagtgagtcgagatcacaccactgcactccagcctgggcaacaagagccaaactccatctgaaaaaaaaaaaaaaaagactttatctctcatcgctttgtgtatggcacagatggggaggtctcaaagggtgaactcagagtaaacttgatgcatctcaaccagaagtcccgagtgaccacttcttacttttctggctccagcttgtgggtgtgaaggaagggacatta

SEQ ID NO: 503405 - DNA, 523 bp, Homo sapiens
tgcctagcccctcccagacacccccagggatgctgcacatgtggctagggttcccataggaacctctgtggagacctgccatccctgcttccccacatctccttttggactcgtgagagaggttaggaggaggaggggaggggaaaggacaggactgccaggcactttcatacacaaacacccagtctcttaatcctcacaataactctaagaaatatgctattgttatccttgtggtactgacaaggaaattgaggcccaaagacatctaacccaagttcacccaggtaacaaacaagagaactggtctgccaccttatcagtttgtactgacacagtatcagtcagtaccagccagggatctctggttgcaagccacagaaaccaactcccactatcacaagcaaaaaaattgctgaaggactgtggtgccacaccagaaggaaaggaaaagctgaagacacatgattggaaaggacaggaagmagggcagcgtcaggatctgggtgccaggaacggacca

SEQ ID NO: 503406 - DNA, 208 bp, Homo sapiens
gctggcggctcaccctgtctccccccacaaccacattcacaaggggagccagcagagggccagaggcagggagctgaacccctccagcagtccgggaggtctggcaagktaccctctgggcaggcagctcccagggccaggagcctcatctgtcctgggagctccagcaaggcaggactctagagaagggaaccaggacaaattgttt

SEQ ID NO: 503407 - DNA, 594 bp, Homo sapiens
aattgtgtgtttatctagatcacaggatataataataatatacagaaatccattatattttgatagatttgcaatgaccattcataatctgagatttaaaaaaaaaaacaaggaaaataagggagtgctcaaatgctaaggaaggcatgttaaaagagctgagaaacttgaatagttcctactagcaaaaatagcaaaactgaatcaataaaataagtaaaggaacagatcatgggccactgaaagaaataggaatccatgggtccacgtgagataaacccatgaattaatgaatgaataaaagaaggaaacactattattttcccacagagtgccaaccaataaaaggaaaagggttgatattgtatgttaaaaaattatcatttgaaaatcttcacattgtaatttgattgagtgttgaggcatcaatggatgctaaacmtagtgggtaaatgttggagaagaaatgtatctctccacaaaacacttaattttagattaattacatgtatatatacatgtatacaatagatagtctatatataaaatatcatttcatgtcatgttatattaatataaagaaaatgaggagta

SEQ ID NO: 503408 - DNA, 519 bp, Homo sapiens
tttgccacctgactttgactgtcccagtttcacctctaaaacggtcataggacacaatgattatcaccatctcactctgcatgattaatgtggaggactgagctattctttgagttgtcactttagttttatgagaggaaccctcacttgttttgaatgcccttgtatttaatccycatcaattttatggccaagtaaaacagatcaaatttactacacatgctctgattcatgaaattatttaaacaactattagcattgaaccaaaaagactattactttctaataacaaattcatgtccaaataggaagtgagtcagggatattattttctgaaaatttgttttatcaaaagacaataatacactactgggaaaagtcatgagtagctcattaaacaatgttttcacaaaaggatggtttagaatatgaaattggttgttaatggttcccaagaagttaataatcaatttataggcaaggatactaagtgcactaaaagtatcataacataaaaaa

SEQ ID NO: 503409 - DNA, 618 bp, Homo sapiens
tgcctccatctttccccctcttccttttattttttctccctccttctctacttctcacctttccttccttgggattcttatgctgtgaacagtagagacatttttaaaattatcttaagtattgaggacatatgacacaaacttacggtggaattagggcagcagagcacagtgtctctgcagtcacaggaccaggtcttagtttgggcctcaggcaggactgggtcttagttcaggaaactattgtcagataaagccaagtatctggctctgtgattgcccgtctggtgacttaacttctttctgtctctrtctgctcttataaccatacagcctactacttctctttgcttgcctcacatttagactagttttaataaagtccatttgaccttactaattaccatgaaaataaagcatgcctttgggcacatacacctcacatgagctcctgtactagccagttaatgtgtaaaagctctaccaaatggtgtattttcttggtctattaaatgattatacaaatactcttcctctaacagccttgatagacatttaatctagatctaaattctatgaaattcatgtatattagtttatgcctccacttcaattatc

SEQ ID NO: 503410 - DNA, 611 bp, Homo sapiens
cttagtttgggcctcaggcaggactgggtcttagttcaggaaactattgtcagataaagccaagtatctggctctgtgattgcccgtctggtgacttaacttctttctgtctctatctgctcttataaccatacagcctactacttctctttgcttgcctcacatttagactagttttaataaagtccatttgaccttactaattaccatgaaaataaagcatgcctttgggcacatacacctcacatgagctcctgtactagccagttaatgtgtaaaagctctaccaaatggtgtattttcttggtctattaaatgattatacaaatactcttcctctaacagccttgatagacatttaatctagatctaaattctatgaaattcatgtatattagtttatgcctccacttcaattatctgctaaagcctttgtgttgtccatgtgaggattcttctagttttaaactatcagaggaggctgttcaatagatgaggcatttgggtaatatgtggtagtgagaggtgacaatgtgctggcagccctygctggcgctcagcacctcctcagcctcagtgtccactctggccacgcttgaggagcccttcag

SEQ ID NO: 503411 - DNA, 531 bp, Homo sapiens
taagtgcagcccctgtggcttctatgcaacatcatacttgggacaatagtaaaataaatatacgtatgtccacattatcaaaatagagatgtaattgttttgcaatgattgtttaatgcagggagagaaactgagatgctcaaaagtctcataaagaatactaaatcttaacattcagaaggctagaagacttgtggaagggtctgtaggtgatacctcctcytttctactcacaaataaaatttaactgaactttcctcttcctgctgcccccgcgctccccaccaagccaagagtggagggcaggaagaagtgttttccacttacctttctatcactatctattatcaatacctgaaatgtcttccatctgagactcagaaacagcacacatgtcttcactttactttccgtgggaaatagcatagtcagatggccacacctgactgcaggggaggccgggatatgacaatgaactgagcagccatgcgcatagccaggataactcttctagggaagaaggcgaacagg

SEQ ID NO: 503412 - DNA, 638 bp, Homo sapiens
ccaataccctgagctacaaatcctagcaaattcaagctacctgaaatctaaactctgtctcctcatcaagaactctctccctgctttgtagtctataaaccaccttcaaacacataggtgggtaattgtaaggctcacctcatttgtttctcttatctcagaatttacagacatgtatcgcctaatggccaacaactgaaaacatctgttttatatactgtgtccatttttctagttctttacagtggaaaggatattcccaaaataacaaatgcctcttgatgagagactgatcgttttcggaaaatatcaatataaagaaaaaaggcaccaaggactgtgtctcaagcctgtaatcctagcactttaagaggctgaagtgggaagatcacttgaggccaggagttcgagaccagcctgggcaacataacaagacttggtctctrgaaaaaaacatagccaagtatagtggtgcacacctgtagtccaaactacttagaactacttagaaggctgaggtggaaggattgcttgagcccaggagtccaaggctgcagtgagctatgattgcaccatcacaatccagcctgggtgacagactgagatactgtctctaaaataataataataattacatg

SEQ ID NO: 503413 - DNA, 634 bp, Homo sapiens
  misc_feature (1)...(634): n = A,T,C or G
actttttagccctaaaatcatctcaattcaaattttcctcaaactgaagaaattttcttcccccaattcacaatcctctacttcctcatcttcaatgttcctacattacactattgtaaatatcccctatttgatattttggtttctagttttaaactattcaaatccatctttcactctaccactagattattctatttaaaacacaaaacatgtcttattcatgtttgaattcctaataattagactggattgttaagacaaatctctctaagaagatctcttttaagatgaaaccaggctaacaattagagccagccatgtagagattaagaaccaggcagagggatcaaataatgcaaagaagaatacaagagtaagcttagtgygtgtggcaggcagaattttaagatggctctaagattcctactctctgatttacacaccctgtatattaatcctcccctcacatgtcagctcaatctgtgaataatatgcaacatcactcttgtgattatgttatgttacctggccaaagaagttatgtagatgtaatcaagctgggttagctcaagttaatcaaaagggagagtatcctggctgagccagacctnnnnnnnnnnnnnnnnnnnnn

SEQ ID NO: 503414 - DNA, 386 bp, Homo sapiens
ttaactgaaaaataagaaatttgcaataaaattctatgacttttggtgtcggtctccattggtaagaattggcaagcataaaatacctaatccactatacaggatatgaactgaagttttttggtttatagctttctttaaaagactttttatatgattttacacattgtgaaacactatgtaagtaaacaaaaggtgaatatattctttcaccatagtatgacaatgccaagactatttctataactatagtttgccgaaaatccatagtctatgcattcactattgcaagcatctggatgaaaaytgaaaatgtgaaccatcacccatactatgcctgtatcctatattccagatgctgatctgtcacatataaacagattaaa

SEQ ID NO: 503415 - DNA, 647 bp, Homo sapiens
tcacattaactctgttatctatccaatgtttctgcttgagtgattacaaaacaaactactaaactatttcacatctrttcattaactaatctaatagcaagtcatgtttctagcagaatatcctattggtggagtttttaaaatagtttattagggaaagatgctttccctaattattttgagggtttttttctcagaagacctctatgttttcctcttaaagaattggaatgttattataggcagcatttcatttctgaatatattatttaaacaatttccataaactttcaatagcttctttttgtaatttctttctgttcaaattgtctaataatatgctataagggagctggctgatggcaagatatggcataataattgtaaatgaaaaataaaaacccactgactgaatggaccgccttgtggtcaaggagaccccagaaaaagcttaaaactgggttcttagccatgatgggataagaggtcagacatgtctaaactgatcagcgataatattaaaatagagatcataagacggacagaatagagtctttgtagcaatgagatatcaaattataaacaggacctaaggccatgccaggcaagggttaaggcaggcgcccctacacttaaagaataaacta

SEQ ID NO: 503416 - DNA, 647 bp, Homo sapiens
tcacattaactctgttatctatccaatgtttctgcttgagtgattacaaaacaaactactaaactatttcacatctattcattaactaatctaatagcaagtcatgtttctagcagaatatcctattggtggagtttttaaaatagtttattagggaaagatgctttccctaattattttgagggtttttttctcagaagacctctatgttttcctcttaaagaattggaatgttattataggcagcatttcatttctgaatatattatttaaacaatttccataaactttcaatagcttctttttgtaatttctttctgttcaaattgtctaataatatgctataagggagctggctgatggcaagatatggcataataattgtaaatgaaaaataaraacccactgactgaatggaccgccttgtggtcaaggagaccccagaaaaagcttaaaactgggttcttagccatgatgggataagaggtcagacatgtctaaactgatcagcgataatattaaaatagagatcataagacggacagaatagagtctttgtagcaatgagatatcaaattataaacaggacctaaggccatgccaggcaagggttaaggcaggcgcccctacacttaaagaataaacta

SEQ ID NO: 503417 - DNA, 387 bp, Homo sapiens
taaaatgtattcctacagtaaagcaagactggcctgtcggtaggtaggtaggtagacagatggagatatgcatacacaaacatttacaatggtgattatattaaaatgtttcacttaaaattgagactaaataataaagctcagataatttcaaatttttttattctgtgggatgttctgaaattccactatgttgcccaggttggcctcctacttttgagttcaagcgatcctcctgtctggcctcccaaaatgctgggactacaggtgtgaggcacctccycagctgtgtttttctttttttttattttttatttgtagttttctgcattgcttactttctttatagtaaacatgtgctttttacacaacatataaagtataatt

SEQ ID NO: 503418 - DNA, 605 bp, Homo sapiens
ggtagtttttaaggtgttttccaaataaaataaattctgattatagaatatttatgagtgaaagtctccaaaactgaaccagagagcaaaagyatgaaaaaaaaaagacaaataatattcaatcacgtgtcctggtaacatgcacacagattatatagcattctgaatcagaagttgacagattctctgaaataaggtccaaagcaccaggagactttgaaataatcttttgtatataaagttgctctggcttcagtaaaaattaaatcttaatgaaatataatcatttaatgattttattcaaattaatgaatttcaactcttagtaagctagttatttcaaatagtatttgaagatcaaaaagaagtttacaaaatataattctcttttcagtggatgattttaaagagatattcattgcactattacactgtgccaaacactaaaggaactgaatatagcaaaaaatgatacagagttctttgtatatgaactaccacatataagaaatatattttgatttgttttttaagaataaaataattatgctgcaccattcatacttggtttcttcttatgaccaaattcatttctagtgtaagaa

SEQ ID NO: 503419 - DNA, 651 bp, Homo sapiens
tttaaaaccaggcactatgagtggtcacctgatttttggttcttatgaaggtgttttttctctgtagatagttgttatcttggtgttctcattgaggggaatgatcactggaattttctatttcacatctttctctgccctcctccctttccttgtttgttgacgttccctagcatgcaaagtaagtcatgcatgaacggtgcacaataattcttgttttgctttgatgtgttagttcttaaggatatcaaatagcagaagtgtatatatatatgtgtgtgtgtgtatatatgtgtgtgtgtgtatatatatgtataaaacttttaaccaggaaaatttaaatttaataaatttgaagttatctaaaatagcttatttataattattagaggatttggccagttgattttcgcactgagttcagcagtagmcacacaatggttgatgaccttttttaaaaaagcaaatgggaaaactagatttatagcatggatatcaattctatttaaggcaagatgaagctttttctcttgtgtgtcaccttcttttcgatggctccactgcacagtgggtactccagggactgtcactgtgcttttttgaccttgacctccaaacattatgattcatctgggagccgacacttggcac

SEQ ID NO: 503420 - DNA, 630 bp, Homo sapiens
gtgcgcgcgtgtgtggatagatggatggagatagacagatttttaaaaaagaaaagaaatgcatgaaatgagaaaatgagtgtttcattcaaaagagctttgcagctcacagtgggaggcaggccctgcacagagcagagagaacagggccacccacagaactgtacccctctccctacatcctttttagtctgagagacacaaagatacttcaggcaggactagctatataatttgcaggacctgacacaaaataaaaatgtggggccctttgtccaaaaagtactgagtttcgagatgactatagtagagcactgaagcgggcacrtggcccttctgaatgaggaccctgtgtgcctgcccaggttgcaggccagtgaagctggccctggtttcaggcctgcaagaaggcctgacccaggtgaggacatgtgagcagaccagagaaggagacttatactctcacactacacttgtgtgcccaaagccttaggtctcagcttaatgcctcagactgggccttaccccaaacaccaacccaagtcaggcaacagagaggcctgttttctcttccttcactgaggacccaagtagccccaaatgacagcaaatgccacaagaacagtaaca

SEQ ID NO: 503421 - DNA, 630 bp, Homo sapiens
gtgcgcgcgtgtgtggatagatggatggagatagacagatttttaaaaaagaaaagaaatgcatgaaatgagaaaatgagtgtttcattcaaaagagctttgcagctcacagtgggaggcaggccctgcacagagcagagagaacagggccacccacagaactgtacccctctccctacatcctttttagtctgagagacacaaagatacttcaggcaggactagctatataatttgcaggacctgacacaaaataaaaatgtggggccctttgtccaaaaagtactgagtttcgagatgactatagtagagcactgaagcgggcacatggcccttctgaatgaggaccctgtgtgcctgcccaggttgcaggccagtgaagctggccctggtttcaggcctgcaagaaggcctgacccaggtgaggacatgtgagcagaccagagaaggagacttatactctcacactacacttgtgtgcccaaagccttaggtctcagcttaatgcctcagactgggccttaccccaaacaccaacmcaagtcaggcaacagagaggcctgttttctcttccttcactgaggacccaagtagccccaaatgacagcaaatgccacaagaacagtaaca

SEQ ID NO: 503422 - DNA, 439 bp, Homo sapiens
cagtggcacaatcacagctcactgctgccttgaactcccaggctcaagtgatcttcccacctcagcctcctgagtagctgggactacaggtgtgtaccaccacgcccagtaaatttttattttttttatttttgtagagataggggggtctcactatgttgcctaggctggtcttgaactcctgggctcaaatgatcctcccaccttgttctcccaaagtgctgggattagaggcatgagccactgcaccsggccaggttatacaaattatcgtttgcctttcttaaatgacacacaatgaccatctgtcattgtactttgctatagtgtgttgatctcttggtattttagggctgtttggtcccgggaatttgtgctttttgagttctcaggtcagctcgtcatagtatttctagctcccctctcattactaagctgt

SEQ ID NO: 503423 - DNA, 656 bp, Homo sapiens
cagcttgttgagggattggggatgaaaatctaaagggaaaatactggactcgtgtaaatttagactccttggctctgtcattctaaatgttttatgcaacaaagttggagaatcaatccattgctccaactggttccttttcctaaacagcatcttctccaaatcttgtcatagaagtggtggtagtgaaatgactgtcatgtgcaagcaaatcatgaaaacctatcagagcataatttttaaaaatcaagaatgagaaaggtgctctggagggaacaaaagtctttatttcatggaaacaattatgtgatgctcagaagttgatcaaggctctgaaagtcacagtgcatgggattatccatcttacttacctgtawgtcacgtctctgtcaatcttacctgctcacgggagttggaaactgaaaatcataacaatatcaataacactagccaacttatattgagggcttgctatgttgcaggcgctcttgtgcactttgcatgtatcaagatccttaatcctcacaacaacagcatgtgacaggtactatttttgccatctctagtctaaggatgaggaacctgagatgtagagaataatttcgataatttacccaaggtcacatggccagtaagtggcagactggattcaaatc

SEQ ID NO: 503424 - DNA, 490 bp, Homo sapiens
acaagcagctgggttcacagaggatcaaggcctgtgcctccctctgactgccatgcctcttcctcccctatcctgcccactccctctgctccggcctggtcttctgatcatgaggaacatgccaagttctttctttccccagcagggaaaagctattccttattccagaaatctgtgttcccagcttagggcaagactggctgctgcttgctctttaggtctcagaataaatgccacctcccyttgcctgaccactgcactgccctgccccagagttattctctatcacatcacactggctagttccttctttgcaattaccagaagctctaaaaattttgtttctttctttgcttgttccttgtcccactaggcttcaggctcgagacagagaggaaccgcctctgtgtttttcactgtcgtgtctcagtgctgggagtgtactccatgtggtcagtgtgtgatcaatttaactgtgcctgagggttct

SEQ ID NO: 503425 - DNA, 490 bp, Homo sapiens
acaagcagctgggttcacagaggatcaaggcctgtgcctccctctgactgccatgcctcttcctcccctatcctgcccactccctctgctccggcctggtcttctgatcatgaggaacatgccaagttctttctttccccagcagggaaaagctattccttattccagaaatctgtgttcccagcttagggcaagactggctgctgcttgctctttaggtctcagaataaatgccacctccccttgcctgaccactgcactgccctgccccagagttattctctatcacatcayactggctagttccttctttgcaattaccagaagctctaaaaattttgtttctttctttgcttgttccttgtcccactaggcttcaggctcgagacagagaggaaccgcctctgtgtttttcactgtcgtgtctcagtgctgggagtgtactccatgtggtcagtgtgtgatcaatttaactgtgcctgagggttct

SEQ ID NO: 503426 - DNA, 467 bp, Homo sapiens
gcagtaacctcacaatggtacctacagatgcacaggagttgcctaaacattgcaaaaggaaggacagaattagagcagttagttttcttaggcttcctgtagagcttgtctcaatacccacccagagggcactggagggtgaagaaatttcctttctcaagcccttcattcactcactcattccctctcagcttcagcgcactccctggtggaaacaaacaggtaacggggtggtaagccctatgacagacctttgcaaatgtcctcagaggcgtgcagaggaggaacacttacgccagactccggggagaagctgcctgcgggrgctctcacctgaggaggacacaggaagggttttccttgcagcaggaacagcttacgcaaaacctggatgtgagcaagaacatgatgtgctcccagaagaataaactgttcagagcggctggcgtgtaaagggtaaaggctga

SEQ ID NO: 503427 - DNA, 411 bp, Homo sapiens
aggcagcattaggctaaattgaatttaacaccagacatctcaaggtaaacatgtccgtgaacatgctcttttcctagcctgtatctcctttcctattaatactaccatcaattaactgcctgccatcctaatttccctccccttttctctggcctcccatatctagctggcttccaagtcctaattatctttacaattggccgctacccgctgtttccatagaccctgcctcagttcagacccatccccttctcatatgcattattcttctcacttcataactagcctccttttagtcttgacttaaagcattacctaagctgatccaagcrcaagctttataaaactcagagtcatctcagttgcataaatgatatagctaaacacccatactctgagggaaggttctcc

SEQ ID NO: 503428 - DNA, 636 bp, Homo sapiens
tggccaggaaatgagtttagagtttaggcaggctctggaatttaggcctcctgcttttcacacctaagcttcttccttggaccacagtgcctccctgtaaggaaatagatgccaggactctagcaacttttttaaagggctacatttttatataagaaaagttcaaggatcttttatcatttcattagttggagaagctaaaacaatgcacagaatttaagtcatagatgcacgatagtggcagtgyctatgcaagttctcaaatctgaatcatgagtttgctgcttttctcttgaccctttcttgcttctctgaatttacaaatgtgcatgtgagaaaacatgcttctctttaaagatccaagggtaagagagaaaataagaatccagataataaagtatagctacaaaagggagcccacttagtttggaaaaaccattactgtatcagaatgatgtatctgcaagtgacttgcatgaacatattttatgtgcccaccagcatgttttttgtggttccctgcagcagatactgctcttttattactcgttagccacttaaaatccagcccaattttaacagtgctaaaagagcaagaaaatttattttaaagaaaaaggctacattcttctaaac

SEQ ID NO: 503429 - DNA, 636 bp, Homo sapiens
tggccaggaaatgagtttagagtttaggcaggctctggaatttaggcctcctgcttttcacacctaagcttcttccttggaccacagtgcctccctgtaaggaaatagatgccaggactctagcaacttttttaaagggctacatttttatataagaaaagttcaaggatcttttatcatttcattagttggagaagctaaaacaatgcacagaatttaagtcatagatgcacgatagtggcagtgcctatgcaagttctcaaatctgaatcatgagtttgctgcttttctcttgaccctttcttgcttctctgaatttacaaatgtgcatgtgagaaaacatgcttctctttaaagatccaagggtaagagagaaaataagaatccagataataaagtatagctacaaaagggagcccacttagtttggaaaaaccattactgtatcagaatgatgwatctgcaagtgacttgcatgaacatattttatgtgcccaccagcatgttttttgtggttccctgcagcagatactgctcttttattactcgttagccacttaaaatccagcccaattttaacagtgctaaaagagcaagaaaatttattttaaagaaaaaggctacattcttctaaac

SEQ ID NO: 503430 - DNA, 636 bp, Homo sapiens
tggccaggaaatgagtttagagtttaggcaggctctggaatttaggcctcctgcttttcacacctaagcttcttccttggaccacagtgcctccctgtaaggaaatagatgccaggactctagcaacttttttaaagggctacatttttatataagaaaagttcaaggatcttttatcatttcattagttggagaagctaaaacaatgcacagaatttaagtcatagatgcacgatagtggcagtgcctatgcaagttctcaaatctgaatcatgagtttgctgcttttctcttgaccctttcttgcttctctgaatttacaaatgtgcatgtgagaaaacatgcttctctttaaagatccaagggtaagagagaaaataagaatccagataataaagtatagctacaaaagggagcccacttagtttggaaaaaccattactgtatcagaatgatgtatctgcaagtgacttgcatgaacatattttatgtgcccrccagcatgttttttgtggttccctgcagcagatactgctcttttattactcgttagccacttaaaatccagcccaattttaacagtgctaaaagagcaagaaaatttattttaaagaaaaaggctacattcttctaaac

SEQ ID NO: 503431 - DNA, 613 bp, Homo sapiens
gcaataaggcagtggaaaaaaataaacaaatctcaattcaaaacataaataagtagtgacttgtcactataacgaaaggatgaccatcatttttctttaaagattatgctagagtattttaaacacattatgacaaccaatatycattttgagcgtgaggtttttacttggtatacaaagttaagactcctggatcctttctttttttctatttttctcttttttttttttttttgagacggagtctcacacactgttgcccaggctggagtgcagtgccgcaatctcagctcactgcaagctccgcctcccgggttcacgccattcccctgcctcagcctcccaagtagctgggactacaggtgcccgccaccacgcccggctaattttttgtatttttagtagagacggggtttcactgtgttagccagtatggtgtcgatcccctgacctcgtgatccacccaccttggcctcccaaagttgctgggattgcaggcgtgagccagcacgccaggtctcctggatctttttgtgcctcctttttcttactatagaactttatccactgaagttagtaaacaaacccaccgcaatttaaataaatcaacctt

SEQ ID NO: 503432 - DNA, 400 bp, Homo sapiens
ccacccacaggcggagattatgcggctcagggcaggcaggaagtctctgctgaattccctctttcccaccacctttttggaggcgccctctctagacctacctcaattttctcagtgcctgatgtgtgaacttcctcataacaccaatcatttaaactatgagcacctacaactctgtcacctgcacatgtggggaaccgggagggaaacagtgtgaaagcaggcacaattttaaagtatctattgttctttggtgatggtgggtttttttgtttttgttttttttcttttttcacacctggctttsttctcaaggaaatttaaggtgcaaattaggagttgcgggaaaagctagggcaagggtgaagcaggctagcaagtgtgtgatctgggggagggc

SEQ ID NO: 503433 - DNA, 611 bp, Homo sapiens
aacttaatccttaaattcatgtgttgattagaggtggggtcttgggggctaattagggttagataatgtcatcagggtacagtccccatgatggaactaacggctttataagaagaggaagagagagagctctgagctgacatgcacactcttgctctcttgccttgtgatgccttctgtcatggaatgagcctcactagatgayggcaccatgctcttggacttcccagcctccataaccatgaactaaataaacatctattgcttataattttctctgtctgtggtattctgttacagcaacagaaaatggactaagacataggcttcctctatcatgttctgcaaacatttcctagcctttgtctactgtctaatcccaaagctgctcccatattttaggtatgcctcttggtaccaaaatatgcataacatcttggtggcttaaaacaacactcagtcagtttctcctgcttttcatcagtcaggagtctgggcctggctcagtcttatgctcaaagcctccaaagctgcactgaaggtattggctggactatggttctatgattctgatctagagcttggggttctctctcaggtttactcaggtc

SEQ ID NO: 503434 - DNA, 468 bp, Homo sapiens
gttgtgtgctgtactgtggcccaagcatcctcaattgcctctccctattatgtattgaatttgtgtgctcagttttaatccctatatttgttacctaggggtgcttcaacaaactacagccatccctcagtgtccaaggggaattggttcccagactccctgttgaggaggattgggtatttgaggatacccaaatctacggatgcttaagtctcttctataaaatggtgtagtgtttacatataacctattcacatcctcctggatactttagatcatctttagattacttgtaatacctactgctacataaatagttgttatacagtattttctttagacaatgatgacaagaaaacaagtctgtacatgttcagcacagacccamccatccatttttgcttctgacatatttttaatttgtagttggttgaatccatggatgtggaactcacagatacagagggc

SEQ ID NO: 503435 - DNA, 598 bp, Homo sapiens
agctggcttcacctctcactaagattatgtgcaatctattgaatagactgaatttcatgggagtgggcaagcagagtgttttttcttcttataaatgtctacgttaggccattttacatcactataaaggaatatctgaggctgggtaatttataaagaaaataggtttatttacattcacatttgtgcaggctgcacaaaaagcatggttccagcatctgctgctggtgagggcttaggaagcttcctatcagggcagaaggcaaaggaggagcaggcatgtttcatggtgagagaggaaagaagagagagagattatggggaggtcccatgctcccttaaacaagcaaatcttgtgcaaactccagtgagaactcacttattattgcaaggagggcaccaagccattcatgaaggatcctcccccatgacctaaactcttytaggccccacctttgatattgggggttacatttcaagatttgcaggagacacagatccaaaccatgtcgctgtttttaaacctttaacattgtgcaattatctttctctctctctctctctctctcacacacacacacacacacagacacacaga

SEQ ID NO: 503436 - DNA, 624 bp, Homo sapiens
taaattttattgatttttaattgaatgagtaatcttcacttagaaggttcagttttggaatatactggtagtagcaaatgaaaatagagatacaaggagaatgctttcagcttttgcccattcagtatgatattggctgtgggttcatcataaaagactcttattattttgaggtatattccttcaatgcctagtttattgagagttagttacatgaagggatgttgaattttatrgaaagtcttttctgcatctagacgtaatcatgtgttttttttctttagttctgtttatgtgattaatttgaataacgtttatttatccgcatatgttgaaccagccttgcctcctggagatgaagccaacttgaccatggtggagaagtttttcatgtgttgttggatttggtttgcaagtattttattgatgatttttgcattgatgttcatcatggatattggcctgaagtttcctctttttttgttgtatctttgccagattttggtatcagaatgatgcaggcctcatgaaatgagttagggatgaatccctccttttcaaatgtttggaatagtttcagaagaaatggtaccagatactctttgtacttctggtagaattcag

SEQ ID NO: 503437 - DNA, 624 bp, Homo sapiens
taaattttattgatttttaattgaatgagtaatcttcacttagaaggttcagttttggaatatactggtagtagcaaatgaaaatagagatacaaggagaatgctttcagcttttgcccattcagtatgatattggctgtgggttcatcataaaagactcttattattttgaggtatattccttcaatgcctagtttattgagagttagttacatgaagggatgttgaattttatagaaagtcttttctgcatctagacgtaatcatgtgttttttttctttagttctgtttatgtgattaatttgaataacgtttatttatccgcatatgttgaaccagccttgcctcctggagatgaagccaacttgaccatggtggagaagtttttcatgtgttgttggatttggtttgcaagtattttattgatgatttttgcattgatgttcatcatggatattggcctgaagtttcctctttttttgttgtatctytgccagattttggtatcagaatgatgcaggcctcatgaaatgagttagggatgaatccctccttttcaaatgtttggaatagtttcagaagaaatggtaccagatactctttgtacttctggtagaattcag

SEQ ID NO: 503438 - DNA, 474 bp, Homo sapiens
aatcaggcattttctaactcactgcatcataaagagctgaatattctttttgccttaaccaggttctgggccacacctttcttctccacaccacatctatttacatacccaaagtgccatttctctgagatgggccaaatacattatttttgtccaaaatgtaatacactttacttattcatatatatttattaataaaacagattattatccttcagaattaaattgytacactaaatttatctgtatttttgttaagtagttcacaaacacaaagacaatgttgattatatttttatctgacagttttctaaatatttgtgattcttgtgttctgatatacatttttatactctagcaatattttacacaaaataaaacaaacatagatgaaagcaaactttatattatgcttcatacttttatttgatccatttgctagctctttgaggattcatttaccttgatgtcgca

SEQ ID NO: 503439 - DNA, 646 bp, Homo sapiens
ctgctgaaacctggattttcaggctacaaggctcggcggtcatagggagtctggttggcctgagcaggctgccctctggggtggctgagggcgtgggtgctgtgctgagggtgcccttgccgcctgatgcccagccttgaaattgggccttatggtcaccacattctgagcctcatggccaccgtgtcctgggcaacatagcaagacctcatctctactaaaaaattgttttaaattagccgggtgtagtggtgcacacctgtagtcccagccactcaggaggctgaggctggaggatttgagcccgggaggtcaaggctgcattgagcctaatttttagagataggatcttgccctgtcgctcagsctacgtgcagtggtgatggagcaagaccctatcactattttttttttctttctttctctctctctctctctctctctgggcactgtcagggctctgcaaagttctgctggaaaagcttgattccagggtggccctcttaggaagtggatgggactccctcagggtgcttgtggagggctgatgctgggagccagacccaggccagactccactagacctcatgcgtggagcagggctagctaagtaggtgactatttctgtccctccatctagagagaa

SEQ ID NO: 503440 - DNA, 601 bp, Homo sapiens
gcccctcgagcagcgagtggggcaggagcggctctacctttccttgcgacctactcgcctgctgagcccagaccttgctccagggtagctccaagctgccccacaggatttagcccgcttattttctcccctaaccctgcaagttctgtagggccttgttgaagatgttaactcttctgtaataactaaccatttcatcttgcccagcaccctcttttggcacacgagagccctgagaccccaaaagaggaaatgagattctgaggccgtatagcaaggtggacccaaccggggactcctgggcggcaaatacaaggattgggttaggtatcaggatatctgagtgttcacatacagcgtcctcaccatgtgctgcgtcagtggttcacaaagtgagcttccggatcagcagcggccgtatcgcctgggaactgggtagaggcgcaggttctcggcccccattccacgcctactgactcagaacccctggggatggggctccttccggtggccctccaggtggtgccaggctcactgtgctggtaagtccagagaccaaggcacatcccttytggacagtggatttttttttttttttttt

SEQ ID NO: 503441 - DNA, 621 bp, Homo sapiens
gctttttggctagctcactggggagctagccaaattgggagatttccaatctcaaattggaaatattttaagccartggttttcaggtttcaacatggataaaaaatcacctggcaggctcattaaaacacagagctgagcctgattcgagttttgatgcaaaatgtttgaggtggggcctgagaatttgcatttctaacaagctctcaggcaaggtcaatgctgctggtctgggtgtaacacattgagatccactgctttaaacccggagcagaatggctgtaaggacctttgcaaaaaggaccccacagacacaatctcctttacggccatcatggagctcctgccctatctcctgccacttccccatatatccaacttctagccacacctgacttcttgaggtttcccaaactctccccaactatacgcatttctatgcttttgtttttttaaatgcagagccatataaaaaataaaataagatttgcatccattgaagtatagggagaaaaagaaataaaaaaataaaataagaatcagttctaattctgctcctcagaggagcagaaatggtggacaactgccacaggataactgcctggaaagaaagaacttagt

SEQ ID NO: 503442 - DNA, 376 bp, Homo sapiens
aggcgacatggagtgtggcctgaatgaacggaggtcacaaacacctgaacgaaattcactttgttcattttgcaaactaggacactggcagttccttgacacggggcctgttagtgctaaattcatcacatccggcaaaaaagaaaataaaacaaaatgaaaagcccataaagtcgaacagttaaatatttagggctcgtggtgaacagcatgtcataatatttgttgaattgcatttgctattcaatgcatcttttccacttaaggccccagcttctggaggtagatggagaaaacgagaagaattaggttgcrtcaaaaatgaaacgtgggctttattttaacctcagaagacaaatcttactgtctgcacacc

SEQ ID NO: 503443 - DNA, 376 bp, Homo sapiens
aggcgacatggagtgtggcctgaatgaacggaggtcacaaacacctgaacgaaattcactttgttcattttgcaaactaggacactggcagttccttgacacggggcctgttagtgctaaattcatcacatccggcaaaaaagaaaataaaacaaaatgaaaagcccataaagtcgaacagttaaatatttagggctcgtggtgaacagcatgtcataatatttgttgaattgcatttgctattcaatgcatcttttccacttaaggccccagcttctggaggtagatggagaaaacgagaagaattaggttgcatcaaaaatgaaacgtgggctttawtttaacctcagaagacaaatcttactgtctgcacacc

SEQ ID NO: 503444 - DNA, 623 bp, Homo sapiens
ctctgggagaagtttgcctgggagagctcctcccagaaagccaaaggccctgctgtgattgggggtggggctgtggggcgtggtgttgccacctgatgagaatgatgtgtgctttgtgtgtctgctccaccaggcccctttctgtcactccagcagtattgttagagaagaaacaaaacaaaacaaaatwgagagtggaagttgattctataattagtgcaatttcttcactgttcattcaggatctccagagatcaattagcttgcttttaagctaaaaggcatctggataagtatttaacctgcatagcaattgatatttacaacagacgaggatggaagtaataacgcagaacagggggcttctgttctcctccactaattttcccggtcttgctcccctgaccctcgcctctgcccactctcatttctggagtgaccttagattgggccttctggctttctcagggcaggtctgtgggtgggcaggctggcacagaggggctgctggtggcagggttctctccctgatcctggcattgctatggagcaggtgcccgggtttggagatgagcccagttgggatggtggtgggacacgcccccatccagggagagccaggc

SEQ ID NO: 503445 - DNA, 605 bp, Homo sapiens
cgaaaaaattagccaggcatggtggcgtgcacctgtagtcccagctattcaggaggctgaggcaggagaattgcttgaacccaggaggtggaggttgcagtgaaccgagattgtgccactgcactccrgcctgggtgacacagcaagactccatctcaggaaggaaaaaaaaaaaaaaagccctgatctgtagtatctgcttatttctgtggtgtaaatactctcactatggccgatttcaggctgccaatggtttaataactggttttcagaattcctgaaaatttaacaattggctcctgaaagctggtactagccggctgcagcacgtcactggctttggttgcaaagagaattttgccactttgtagttttaacaacatccttgacttccctggacttccattttctcctgtgtaaattgaggcaatgttacttcctctctaatggggttgtagaggttctcatgagtgttaaatgtagtgagtggaaggcatgcagcatcatccctggaacacagtcagttgttattactgctgtggttgttgttatttgttttacccgttgggcttccacacaaggttttgtttgaagaaaatattcca

SEQ ID NO: 503446 - DNA, 531 bp, Homo sapiens
ggagcatagactaagacttctaggttggatagaaaatggattaatgtcctgtaaggcaataaaaccacaaccttggggagtatctcctctatttgacaaaattctgcaaatyaacccagagtctgagcttttaacaagtagctgacaatgaagtcaaacccaggtgcattctccagaagaatgaagtaatactggagggcctggtaaactatgtttcattgtcatgttggaaaaacgcaccgctacccttctgcctgatttccaggtttgcgtggttttcaacaggacagagctcagctttgttcctcactcccacctgccacgtcctctgccgccatctctcctagcttagggacacctggcttctccctccacctgcttcccctctctgcctccttccttcaccagcccaccctgcccccagacccagagctgcagggcggggctacagccagcctcacctgcgttgagaccctgttctcctggacccttggcaggacctgcctggcccacgacagacaggctgaccgc

SEQ ID NO: 503447 - DNA, 536 bp, Homo sapiens
tggtttctggcctataccaacttgtgggcaaatatatggagccatatcccaggggcctcactaatgagttgtgaagtgctgcatgttagttkcagggttaatatatttctagttcgctctacacagaaggaacatacctctttcttttataagaaaaattaaatctgtgaggatacattttcaacctggggctgttttgggcagtactctcaagggcagtacttatgtcattaacatacattgttcccacaccagtgagtaacaatgtaaaaagccaggcctgtttacaactgtaacagctctacactgtaaatggaaaagaaaaggatgacagcataccaccagcagagacatgcctgaacagcattcccaggaatcctttagccacaggaaaaacaactccaaacaagcaaccctccgtccagcacagggtgtaaattagcttctgctgacaacacacttcatacaccgttttgcactgaagtcctctcccatgccaaagacaacagagtgctctctaacaacatggggccctg

SEQ ID NO: 503448 - DNA, 536 bp, Homo sapiens
tggtttctggcctataccaacttgtgggcaaatatatggagccatatcccaggggcctcactaatgagttgtgaagtgctgcatgttagttgcagggttaatatatttctagttcgctctacacagaaggaacatacctctttcttttataagaaaaattaaatctgtgaggatacattttcaacctggggctgttttgggcagtactctcaagggcagtacttatgtcattaacatacattgttcccacaccagtgagtaacaatgtaaaaagccaggcctgtttacaactgtaacagctctacactgtaratggaaaagaaaaggatgacagcataccaccagcagagacatgcctgaacagcattcccaggaatcctttagccacaggaaaaacaactccaaacaagcaaccctccgtccagcacagggtgtaaattagcttctgctgacaacacacttcatacaccgttttgcactgaagtcctctcccatgccaaagacaacagagtgctctctaacaacatggggccctg

SEQ ID NO: 503449 - DNA, 536 bp, Homo sapiens
tggtttctggcctataccaacttgtgggcaaatatatggagccatatcccaggggcctcactaatgagttgtgaagtgctgcatgttagttgcagggttaatatatttctagttcgctctacacagaaggaacatacctctttcttttataagaaaaattaaatctgtgaggatacattttcaacctggggctgttttgggcagtactctcaagggcagtacttatgtcattaacatacattgttcccacaccagtgagtaacaatgtaaaaagccaggcctgtttacaactgtaacagctctacactgtaaatggaaaagaaaaggatgacagcataccaccagcagagacatgcctgaacagcattcccaggaatcctttagccacaggaaaaacaactccaaacaagcaaccctccgtccagcacagggtgtaaattagcttctgctgacaacacacttcrtacaccgttttgcactgaagtcctctcccatgccaaagacaacagagtgctctctaacaacatggggccctg

SEQ ID NO: 503450 - DNA, 569 bp, Homo sapiens
ggccctcatgtaaaaatcatctcttagggtaccctatataagtgcatgaatacatacagtacacaaatgctcgtaagtgcrtgaaccatttttgaaaacatacataggaaatagttatagttgttacctgtgggaatgtattatttacattttctgcctcagggaaaagaatataatgtttaagataatttccatagtagcttaacaggaaagtagcatcagatacaccaaaatttattcacatatgctctttcaggaacccatctatccaacagaagtgctgattgtcaattattttacacatgcttttcgcacacacacaaaaatcttggttacttaacaagcacaggaattattgcaatccacaactatactgaattgccaggtactcaatcttttctaagctatgggacttgaattccaaaccctattcccaaattcattatctgaataaaaggtagcacaattgataagggatttgctcataagttcaaggtgagtaggaacagtacgacttaaagaatttgcattagaaatgttttgatgttgagagacttcggttacctttc

SEQ ID NO: 503451 - DNA, 625 bp, Homo sapiens
acagttgtgtggaccagagatcagataaaagcatttaattgctaataacatgttgtgccgcaaagggtcaggatggtcgccatctgccagctttttagttttgcccttgattttgaatggaagaaatgcactgttaaggaaggcctttttaccccctacccccaactttactagtacgaagttatatacaaaaagatgtcacttagactgtaaaacagttcttttgaagaactagctttgccagcatcagccagaggactcacaaattccattcctgctacgtgatactcaactgataktacctgcaagatgcctcccaccacacatgtagcaaagggctacagcatttaaagtaaacttaaatgactggttaaaaggatgaagaggttttggaaacaaacagcagtagttaggcagcttggcttctgagacactcaggctctgtgttctcctatctatccacttgctgtccccagctctccatgtacactgcctgacctgtttggaggtcatcagaagtggtgtggaggaagagggagtggacatctttggtcaggctccttgttgttcccacatctagaaacaaagcggcactgcttgttcctactttaccaggttagatcct

SEQ ID NO: 503452 - DNA, 628 bp, Homo sapiens
aactccagagctcaggcgatctgcccgccttggcctcccaaagtgctggaattacagatgtgagccactgcacacagccacattattttattacccttgaatctcaacatttctcttgatattaggatttgaatccaaagacaaaagagaaaacgaaaggccttccttctattcagtcttcactgctttctcctatgcaaaaaacctttctaagagtgaagagagtaagtgggaaagaaaggaagaaggmagggcagatatctggttgggagaggaacaaatgagcaatgccaatggtattaaaaaaaaaaaaaaaggaacacagggattccattctggctgatagggttggggagggatggagaaggtgcgctttggaatggtttgtatctacccagaaacagcgaactgcaatgaaagtatcaaaaagagaatttgttttccatggtatgtactacttacacacgcacacaaatctactagagaaaccattggggaagttctgttcttttctcccagactactactagatattaattcagcatctgaaagagtaaaggctgttccaaaatcttgttctggtttgttagagcaagataactaaactgtaggaaaaaataattatttt

SEQ ID NO: 503453 - DNA, 628 bp, Homo sapiens
aactccagagctcaggcgatctgcccgccttggcctcccaaagtgctggaattacagatgtgagccactgcacacagccacattattttattacccttgaatctcaacatttctcttgatattaggatttgaatccaaagacaaaagagaaaacgaaaggccttccttctattcagtcttcactgctttctcctatgcaaaaaacctttctaagagtgaagagagtaagtgggaaagaaaggaagaaggaagggcagatatctggttgggagaggaacaaatgagcaatgccaatggtattaaaaaaaaaaaaaaaggaacacagggattccattctggctgatagggttggggagggatggagaaggtgcgctttggaatggtttgtatctacccagaaacagcgaactgcaatgaaagtatcaaaaagagaatttgttttccatggtatgtactacttacacacgcacacaaatctactagagaaaccaytggggaagttctgttcttttctcccagactactactagatattaattcagcatctgaaagagtaaaggctgttccaaaatcttgttctggtttgttagagcaagataactaaactgtaggaaaaaataattatttt

SEQ ID NO: 503454 - DNA, 618 bp, Homo sapiens
gaatgtctactgtctatcaggtgctttcctaagcactacagagtgcttccattgatgcccagcaatatggtgttaattctttaaaaaaatttgcagaatattagagaaaattagaatttatggttagttattcaattggttatttaataatttgatatctttgggtgatttctaaataagcctgacttaattccaacagttaccaggaagttaacaaaaatataataattttcttactatatatactgtgacaccaattgcagcatagctaagaattttcctatgttcccagaaatrtattataatttataagaggattatctagattgttttgtttttgagacttagcagagacagaggagccaactgctacataaaaataatgccacagggaacacacacgatggcattttaatttattgctatcattcttacataataaattttggattcttttgtttatctgcttgatacacaaaaacctattcttgggagattgaggatcttttctactaaataagaggacaaaaatggcaaattgaaactatctacttaggtattttttcttccattataccatcctcccaaagtatttctttgttagtgttttcactctgt

SEQ ID NO: 503455 - DNA, 618 bp, Homo sapiens
gaatgtctactgtctatcaggtgctttcctaagcactacagagtgcttccattgatgcccagcaatatggtgttaattctttaaaaaaatttgcagaatattagagaaaattagaatttatggttagttattcaattggttatttaataatttgatatctttgggtgatttctaaataagcctgacttaattccaacagttaccaggaagttaacaaaaatataataattttcttactatatatactgtgacaccaattgcagcatagctaagaattttcctatgttcccagaaatatattataatttataagaggattatctagattgttttgtttttgagacttagcagagacagaggagccaactgctacataaaaataatgccacagggaacacacacgatggcattttaatttattgctatcattcttacataataaattttggattcttttgtttatctgcttgatacacaaaaacytattcttgggagattgaggatcttttctactaaataagaggacaaaaatggcaaattgaaactatctacttaggtattttttcttccattataccatcctcccaaagtatttctttgttagtgttttcactctgt

SEQ ID NO: 503456 - DNA, 570 bp, Homo sapiens
gttatatgctactggagtttactggtgctagaaattatgatatctctatagaacaccttttttttttccccattatttgagatggagtctcactctgttgcccaggctgaagagcaatggcgccatcttggctcactacaatctccatctcccgggttcaagtgattcttctgcctcagtttcccaagtagctgggattacacgtgcctgccaccatgcccagctaatttctgtatttttcagtagagttggggtttcaccatgctggccaggctggtctcgaactcccaacctcaggtgatccacccgcctcggcctcccaaagtgctgggattacaggcatgagccaccgcacccggcctatagaacatctttccaaatccactttgtactataaataaacttcctatgtccaggtagacaaaacagtaagtgaaatagctttaaaaatgtctttgcagagttcgttwctaagaatttcactcatcctctaaaaactttcatttggtatggaagagagatgtagattagaaatatatgctaagatgagggcagtaaaacattttctta

SEQ ID NO: 503457 - DNA, 488 bp, Homo sapiens
gcatggagggtgctgtatctcaggaggccccagttaaaacaaggtacttagaaaagagctctacaaaaattgaaatcgagagagaaaaccaaataaagtcattagatgaaccttgagaagatcttaataaaawtattctgcaagagatattaagatgttgctaagattttaaaagaaagaaaaaacagcgtgtgtttaaggaagtacaaaaatagcagtttgtctgaagcagggtgagcacagggaagaagtcaattttggacatgttaaatttgagatgagtattataaatgcaaatcaaagtgtcagaattagatataactggtttagactttaagagagagtcagggctagagttggagacagtccccagcaaatggttgatagttcacactctggtctgggacttagtgtggaagagccaaaactggatgctcagatggtggggccagtaagataaaagaagaaacaggagagtgtcatgtcca

SEQ ID NO: 503458 - DNA, 488 bp, Homo sapiens
gcatggagggtgctgtatctcaggaggccccagttaaaacaaggtacttagaaaagagctctacaaaaattgaaatcgagagagaaaaccaaataaagtcattagatgaaccttgagaagatcttaataaaattattctgcaagagatattaagatgttgctaagattttaaaagaaagaaaaaacagcgtgtgtttaaggaagtacaaaaatagcagtttgtctgaagcagggtgagcacagggaagaagtcaattttggacatgttaaatttgagatgagtattataaatgcaaatcaaagtgtcagaattagatataactggtttagactttaagagagagtcagggctagagttggagacagtccccagcaaatggttgatagttcacactctggtctgggacttagygtggaagagccaaaactggatgctcagatggtggggccagtaagataaaagaagaaacaggagagtgtcatgtcca

SEQ ID NO: 503459 - DNA, 573 bp, Homo sapiens
ctgaagggcatgtctccgcagaagacaatacctacattagaggagaagctttacttcatagattaagatcccatggcactctagggcattacttccactacttcagggatcatgtattaataggtcggaccccttttgagctccagggcaattttctgtgtcacttttatctgatattccaacctgtcagtgacatttgggtagagtgactctctagctcaaatcttgtacagccaactttgttgtaatatagtcctaacactttattccaaaactgtctcaatctttctgaatattkcagagctctcccccaaacatgaacattacacaattgtacattctctttagatcccatgaatattgtatccaaaaagaaaatattcaataaggagccaggaaatgaactcttatactcacgaccaacgctgtgaaagagagacgaatagctcgtaaaatcagcaaatctgatttcatgattacctttttacttgttttatatcttgtgtattagagagatatattatgagtaatattaagagtaattggttcacaaagttatggaagatgagaggt

SEQ ID NO: 503460 - DNA, 587 bp, Homo sapiens
ggtgcatgccactatgcttggctaattttgacctcactcttaatcaactacaaaatgaggagtcttcagtggaaatgcttaaatgtgtttgaacaataacatttaagtaaaagtcatagtgtgttgtcttgtcataatgtatgtgttgggttgcaaacaatgataaaacattattcactgtattcatctttttaataatttggaaaactttgcttcaacttgcctattttttttttgcaaccrtgtcttgctctgttgtccaggatggagaacagtggcaacccaaccacctccccccgcaaaaaagattgaatcctgaatacttataaattaacatggagatgaggaaaagaaagtgttgtatctctgtatgtcataaaccaagccagtttgagagtatttaagctaggacaatggctcacttcttctagtttcttctttgttatctactccacatcacttatttggcattaaacctatcaaacagtgcctggtagcatttatttgttggtttactatgtaggcatttattgtacatctattcagtgacaggcactattcatggctctgaaaatacaaagatgtat

SEQ ID NO: 503461 - DNA, 554 bp, Homo sapiens
tggcgacgaatgccggcaaggtaagagacgatactttacatgccagagctcacacaaaagggtcttctgccctgtcccaggtcattcatctgaagggattgccagggtgctggggcagtgttgtcctctgatcctctgaggataaagccttgattgacattgactagtgggtttgagtccagttgctcaggatgtagattggagacctgtggattgtttttcgttgttgtttttttggctgagcacaggggactttattgatggtacatgacaaggtggggcgccctaggcccctccctcttcagggtgtctgcatggaaactgtgaggaggggtgattcttagttagtgtggtgggggactgagtgtggcagggactccccagcagtgagggtctctctcttcctctggtgctctcgctggggctggtggtcagggkgtcttactccttggcggccatgtgggccctgaggttcaccaccctgttgctgtagccaaattcattgtcataccaggaaacgagcttgacaaagtggccatcgagggcagtgccag

SEQ ID NO: 503462 - DNA, 555 bp, Homo sapiens
tggcgacgaatgccggcaaggtaagagacgatactttacatgccagagctcacacaaaagggtcttctgccctgtcccaggtcattcatctgaagggattgccagggtgctggggcagtgttgtcctctgatcctctgaggataaagccttgattgacattgactagtgggtttgagtccagttgctcaggatgtagattggagacctgtggattgtttttcgttgttgtttttttggctgagcacaggggactttattgatggtacatgacaaggtggggcgccctaggcccctccctcttcagggtgtctgcatggaaactgtgaggaggggtgattcttagttagtgtggtgggggactgagtgtggcagggactccccagcagtgagggtctctctcttcctctggtgctctcgctggggctggtggtcagggggtcttactccttggcggccatgtgggccctgaggttcaccaccctgttgctgtagccaaatkcattgtcataccaggaaacgagcttgacaaagtggccatcgagggcagtgccagc

SEQ ID NO: 503463 - DNA, 533 bp, Homo sapiens
aatgaactacagtggtggcccacaggctagatgtggcctgcagacattgtttattttagcttcttttcttttttaaattttaatttaaaatagttgacaaatttaaaataagaagatttgacactttttttttttttttttaagacagggtcttactctcttgcccaggctggagtgcagtggtacgatctcggctcactgcaacctccacctcccaggctcaagcaatccttccagctcagcctcccaagtagctgggaccacaggtgcacacaccactacgtctggataatttttggtrttgttagtagagacagggttttgccatgttgctcaggctggtcccaaactcctgagctcaagcaatccacccgcttcggcctcccatagtgctgggattacaggcatgagccaccatgcccggcccataaaaaatccttacttctggtttctcttgcgggaaaaataaacacaagaagctgtagcgctactggactgaatactccagcggcagcaaccatctgggtgtgggt

SEQ ID NO: 503464 - DNA, 389 bp, Homo sapiens
ctgagcttgacggctaccgggagaccctgtctcagtgcaggcccagcagaagaccaaagctgagcacagagggactcgtgttgtctggccgagatgtccactagcatcagtgagtgaggctggtcaaggccatttcggtagaacctctattctttctgccgtacaaaaaaaacagagagttgacaacaaaaataaaacaaaacaaaaacaataaacacaagaaacaaaatgaggctattaactctgccaagcaakgccacacatgccaatgaagaaattcacttagtagttctccaaggcggaggaagtcaggggtttctgagtgctgaaaaagggggaattcatggtggtactaagcatggaaaatgagccctctggacaagatagaa

SEQ ID NO: 503465 - DNA, 535 bp, Homo sapiens
gaaaaccatgcagcaagacatttctctctttgaaaatatttcattaaccaattaaacaggcataaagagaagcaaaatgtgtgacaattttcaaaccaatctgatccttttggacttgaaaatagttattttctttcagtgtttaaagttattaaaaattataaamccttgtgaagtttttgatataaatcagtggttttagtattgaaaacaactttcttatttggagctttgaaaagtggctcaatatgttttctataataactttaccactttccaaggcatagatttaatattatacaactgtcactatccaagacaaattgagctcttagagtaaaactatgataattatagtatattcccataatggcatggagaaaaatccaaactgatatggattttgttaatctgatgattactgacacatgggttgatgttacctttgcactatctcttgaaaagagggctaagcacattactataggatgggcaaacccataaggagattgtttacctaagtatactcatttac

SEQ ID NO: 503466 - DNA, 645 bp, Homo sapiens
gtaatcccagctgctcaggaggctgaggcaggagaatcacttcaactcgggaggcggagcttgcagtgagccgagatcgtgccactgcactccagcctgggtgacagagcaagactctgtctcaaaaaaaaaaaaaaaaaaaaaaaagatttacttgaagcagggagctcatttttaaaaatttttatttttagacagaatgttgcagggcataccatggacttgccctggagaaagaattgtgcgttttccaatctctgacatcaactagcaraatgaattctggcaaatcatttaaactctcgaagctttatttttctcatctgtagcctgttttactaagcagttaggttcagaggctaccacagtcctgtatacctttaaaagacaatgtgaagtccagttctgtggtttcatttggggtagaaatgtagtaaaacacagccagcataagttttagagtgagtaaacctgggtgtgaatattgacttacattttctggttgggtgaccttggacaaatcacctgatctaccattttaatttcccatatctttaaattaggggtaataatacctaccttggagacttgttctgggtgtttaaggaaatcatgcttttgaaagatttagcattgtattgggca

SEQ ID NO: 503467 - DNA, 615 bp, Homo sapiens
tagactttcagttcactctaagtctatagttctgtatgcattgattagaagaaatgaacataatgataatgagaagtgcatgtgtgactgggaaggggtgggaatctgatatcgttggagagaggaaatagggaaggtacatgcccttgcttcttatccttgcccctgtagcttgaggcawgtatgccttcagtgggcagacatgctgaagttcttaaaacataagctagctcacattactccaatccctttccgtctcaattcaggtgaatggctcctccaatggcctatcagacttgcccgatcgccccgtcaccctttatctcacagaccttgcctgctctgcccttactctctctgccccaccctgttgacctcctgctggtcctgcaacataccagacatacttctgcctcagaccatcacacttgctggttctccctgcctgaacagcctcaaagctggacccctcaccttcctggggactttgatgaaatggtattttctccacaaggccttccctgtccacctgcttaaaatcacaaaccccttcttccccagcaatctgtatatcacccttgctttgttgtctccatagcacttatcaccattaaa

SEQ ID NO: 503468 - DNA, 626 bp, Homo sapiens
attcagtaattaaggaaatgtgttcttcttttaagtatttctgaaaatgtattgagaatataggagtcaaatatagcacatttacttctgaatctactgtatttacctgaaaggactgggaccttattattaatattctataagtaaagcatgctgaccattgtgaaatttacacaacgaatccattttccactgtacatttgaatatttgtaatatcaggtaagttataattaaatccacacacatttattctacatatcaaaataagatacatttttcactttcttggttgtaaacatgtgttctagaggtgagcaacatcaatattactttgactcgtgtagaaattgtttgctattaaactgtgcttcagtttgcaaactaaaacgtatgccatrggaccacatcaaaggccatcacgctgtcattaaaagacatcaaagggcattctctctgtagcctgtaagttttatggcaagtatctcatagagatgtcaggtcattgggaaagccaggagaagactccatctaaactcagttgtctttggttcctttcatctgtttgggaaggtaggcatcttgggttagaaagagtttggcagtgatttgaatactggacatcaag

SEQ ID NO: 503469 - DNA, 515 bp, Homo sapiens
ggggaccaggttatgaaggacttttggccttgattctatttgtaacagggattggaggtcttcaaacaagcactgatgtgaactggtttgcattgtataatcttgcagcggttgtaacagacggaataaaggggagggcgggattagaggcaggaaaagcagttaggagaactttgctagttctggcaaagagactaagagccaaactaaagcaagtagtaagtagtgaggacgaagttgaggggagggaggaaaaaattattcaggaggcagcataaccaggacttggaaactatttggatgtagatatgctagagagaggaagcagcaaagggcaactttgaggtcatgcctaggcaactggctctatcatgacaatattccaaaatgtacagacaaaaggtgtcactctggaggtgcaaagtttaaataggtmccatggaggaggagagacagaaactagactgcaggaggttgaaaagtaaatgagagattaggaagtagagacctggata

SEQ ID NO: 503470 - DNA, 390 bp, Homo sapiens
caaaagacaaatgaaagtggtaarataggcagggcggaaggaaacccaggtcatgtcagactatcaaacccgaaacaactagagacagggcatagaagtagaaaaaggaaagttggagacaggcactatattaaagacttttcttattttttgccaaatcacctttctaaataccagtcaggagatttttgtcgtgtttttgggtcataaacacaatctgagctctaagagccactgctgtgagagaagcaacttgtcatgtggtgagtgtccctatggagaggcccatgtggaacccgcatctctagtcaacagcgagaagacccaaagcctaccaacgtgagtttggacacagatcctccccagtaagatgactgcagctcaccttga

SEQ ID NO: 503471 - DNA, 540 bp, Homo sapiens
aatggttgttctgcttcctatgatgtcagcgagggctatagtcatgtgaggtcatacgtggcctacaacatccaagatggctgcctcctataactggcaacggatgtaagctgttggttgagaaatgctagtaagcaggtctcctaagttttcctccacatgacctctccatgtggctggtttctgagaaggagtacccaaagagtgaacatttcaagagaaggaagcagmagctaaaggtctcttaaggcctcctttctgtgcattcagttgctcaaaggccagcccagattcaaaggaggagaaataaacactcctgttgatctgatgtgcattaaagagaagaaattagtgagtcatttttaaagactgatcattaaatatagttatcctgttatattttttcataaatgatttccttctccattctacccctataaatttttctctatatgtgagaatttaaaatctgtggtttctttctatgtactaatctacacatagttgtgtttattatttgtctttgatgaatatattata

SEQ ID NO: 503472 - DNA, 540 bp, Homo sapiens
aatggttgttctgcttcctatgatgtcagcgagggctatagtcatgtgaggtcatacgtggcctacaacatccaagatggctgcctcctataactggcaacggatgtaagctgttggttgagaaatgctagtaagcaggtctcctaagttttcctccacatgacctctccatgtggctggtttctgagaaggagtacccaaagagtgaacatttcaagagaaggaagcagcagctaaaggtcycttaaggcctcctttctgtgcattcagttgctcaaaggccagcccagattcaaaggaggagaaataaacactcctgttgatctgatgtgcattaaagagaagaaattagtgagtcatttttaaagactgatcattaaatatagttatcctgttatattttttcataaatgatttccttctccattctacccctataaatttttctctatatgtgagaatttaaaatctgtggtttctttctatgtactaatctacacatagttgtgtttattatttgtctttgatgaatatattata

SEQ ID NO: 503473 - DNA, 550 bp, Homo sapiens
aggagtacccaaagagtgaacatttcaagagaaggaagcagcagctaaaggtctcttaaggcctcctttctgtgcattcagttgctcaaaggccagcccagattcaaaggaggagaaataaacactcctgttgatctgatgtgcattaaagagaagaaattagtgagtcatttttaaagactgatcattaaatatagttaycctgttatattttttcataaatgatttccttctccattctacccctataaatttttctctatatgtgagaatttaaaatctgtggtttctttctatgtactaatctacacatagttgtgtttattatttgtctttgatgaatatattatatgatactgaaagcctgatatcctattaaacatttaaataaatatttcacattttagaattctgagctctaactccttctttatcctcagcattagaattagacaaaagcactcagatgtaaaatataccaaatgaggcagtgggggaggtaggtggtaaaatagtttttttgttagtcttctttttctctttttgttca

SEQ ID NO: 503474 - DNA, 630 bp, Homo sapiens
ctgggatgctggcttacctgaagacagagccatggcatccatgatttggaagttcagtgattcaataaaatagatttcatttacttggtaattttaaacattttaattgttttgatgtgtgtagacttttacaacattttgttgcttctctcagcgatatgacctgaatttacctttttcatgtagatgcataatcaatttaatttccagacgaaaatggatagtcttttggattttctgcctaacatacaggttggtaaaatttctgtcaaagcatatgaggatcaatataaacctctaagtgttgtagtgtgaataagaagtgactcacttgcttttaaactaaactctttgtaattggactttttctctatgttttttaaggtctacagtgaaccacccaataatggtgcttcaatatgaacttcatacaggwtatagtcttcagaagggatagtaatatatggttgcaggtagaaagaaagggactagccaaattataccaaaagccctgtgtttctagcagaaaaaaagcaaagaaaaaagttcccgcaaaaaataaactggaacatgtgaaggtaattggtcaaaaatttaacagtagcacagacatggtatgagaaaacactt

SEQ ID NO: 503475 - DNA, 468 bp, Homo sapiens
aacttgcagctcagattggcactttgtcttcatttttcccccttattaaacaatatccttgttgagccacctgtaatttcagaatttactcatgtatatgtattcattcaacaacattcaacagcaaacacattgttgagtactatggtgactgagttcgtgaattagtggtcttaattcttcactcccctgtagtataatgtacattctcattcttttcatggcttcatggtcagaggagtgtacttttatgccccttgtctttagacttgtccatgggtctttttttaatgatgggatatagcatacatgctttaagtaaggccttgaattgtccttgttcttttctcattgccatgacaagartagctgctatccccttatccaatgggcctcagtatatgatacatggtacagagatgccccagccaactcacacatttgcagactgaagcagtaccctcccag

SEQ ID NO: 503476 - DNA, 605 bp, Homo sapiens
gcaccctgtagggcacaccacccttcatagaacactgctccatagaaggcatctcctagaatgtaggcagtagtcatgttcctagacagatagtctttcacaagaatcttgtacatgttgtctacacacgtcaatcctgaagttagtcctaaaacttagtaagtcataaagctgacataaatatgctatagcaccaatgttaaaactatgatgatggcagaaagtaggcagaataaacagtaaatgttacatgcaaaaaaatactaacgatattgggggttgggtgggagggaatctccaaaatgatttcaagttgaattcttccaaaactttttttttttgagacagggtctcactctgtcacccaggatggagtgcagcagcatggtctcggctcactgcagcctcaacctttcaggctcaagcaatcctcccaccttagcctcccaaatagctgggactacagscacatgccaccatgccaagctaatttttttgtagagacagggtttcaccttgttgcccagactggtctcaaactcctgggctcaagcaattctcctgccttggcctctcaaagttctaggattacaggagtgagcagc

SEQ ID NO: 503477 - DNA, 648 bp, Homo sapiens
aatatgcctaattccatttgccgttactcctcctttctctttccttttgtaagaggttttacccaggcagtcagaggttcccaaacttttcaaatctgagcatctctgtaacttctgcacagtgccccggggcaggagcaattccttagagttccattgattaagtggtttggtacaaaaaaactartaactgttgggtgtggtggctcacgcctgtaatcccagcactttgggaggccaaggcaggcggatcacgaggtcaggagttcgagaccagcctgaccaacatggtgaaaccctgtctctactaaaaatacaaaaattagctgggcatggtggtgtgcgcctgtggtccaagtatttgggaggctgaagtgggagaatcgcttgaacccaggaggcagtggttgcagtaagccaagatcgcatcactgcactccagcctgggcgacagagactctgtctcaaacaaacaaacaaacaaacaaacaaaaaaccaataactacctttgacccagcaatttagcaccatttgagaatataacaaataattatttcaagaaaaaatagtatttttattctattcttaaatcactcccactacttactaatgggatgtgggtgtaccctgccaacctctcataccat

SEQ ID NO: 503478 - DNA, 616 bp, Homo sapiens
attcctttcttgctctttcatgcttctcaaaagggtgggaggtctagtcacttctcacctcttattcactcctcagccacatctgtcagaccaagcactcaactggyactgctcccagtaaggccagcagtgacatctcagctccaaacccacaggttgggttcagttcttgcatcctgggccctcttgggtgccaaccatgccctctttcttgacctttcctccctggccttctcacaaccaactctcctgattctctaggactctgaacacttaagcaactctgtgtcctgctgtctcctccatcacatccaatcaatcaggtaagatcaataaatgttcactgaacagatgttcataaaaacaggtatcaccagtaaatgtgtttaggtattactgcacagcaattcacttttaaaatataaaattatcagttcagacatggaatcccactgaatggctagaagctcttaatctctgtaaataagaaagcaaactaaataatattttactgattatacggctggaggtgggtaaaagacctcaccatccctcataaattggtccattgaacagctgtgtaggtattttaacagttctttgcgaaatcccagca

SEQ ID NO: 503479 - DNA, 541 bp, Homo sapiens
gtatgaacatcaggtttagctggagttgagtgcagcaatgtccttgaacattccctccaacctccttacccatcctcctctaggggctggacaatcagattcaaacaatgttttgtgattactctctagaaaggaataatgcctggtgtagtggtactaggtggttayctaataggcaggatctcatgggtggcaggcgcacgagtggttgagcccagaatgctgtgatatatctctcttctgcctagactagtgcaagtcagaacctagcctttcactcctctctctaggtatctgttatttaccaagatagctgattttttttaaaagatagctgattttaccataatagtataatctcacgaactcacattatgaacccacaagcaatagaagaaaaagtaagaaaaagataattcattctagaagtaatcagaatgaatggacttggtgggcaaagaatttaaataaaaacagaaaatatcctcagagataagggaatatatggcaaacatgaaacaggaagcttctaagaagtacc

SEQ ID NO: 503480 - DNA, 526 bp, Homo sapiens
tattgcgtactgtgctagagctgggagctagaaagattcatgtcaaggcatctccctgcagggtttcatgatctagtggaaagagacaaacaggtttacatctaagcaggaaaagaaaagaaatgaaactgacatttgttaaatatctgctaaaggcaaggcttgtgctttatgtatgatctgctctcctctrtgtaatcttataatctctcatacagataagaaaactgaggttcagagagggtatttactcactcaaagtctcaaacctgaacacagaagagtaggttggatacccaaatttgaccttcttgaaaatccaccctcttgcccttctaccatactcaaatgcaatttctaaaatgttaaaatgacaataggtgacaaatgctatactagtaacttgaacgaagggctgtgggagcacaaagggtacagttaaactgtgactaggagaggaaaggggtcagagaaggcatcaccgaggatgtgacatttgagctgggccatgttaaacagttggagt

SEQ ID NO: 503481 - DNA, 487 bp, Homo sapiens
  misc_feature (1)...(487): n = A,T,C or G
tgattttacgtgcacagtttggtgagttttaacaaatgtgttcactcacaatcaagacacagaatgcttctaccatcccaagatttccctcgtgtcccctcagtgtaggcccaggccactgacctactttctattaccataagcttaatttgtttttttcctagcrttttctgtaaaagaaatcatagagtatttactctttttatgtctggcttcctttggtcagcttactgttccaaagactcatccattttggtgcatgtgtcaatagttcgttccttttcattgctgaatagtattccatcgttgatgtaccacaatttgtttatccacttacctgttgatggacatttgcatttttcttcattttggctgttaggaataacgattataaacaattgtttacaaattaaaaaaattatttggctaagtaactaaaagtagaattacttgatcagagcataagtgtatgctttacttnnnnnnn

SEQ ID NO: 503482 - DNA, 487 bp, Homo sapiens
  misc_feature (1)...(487): n = A,T,C or G
tgattttacgtgcacagtttggtgagttttaacaaatgtgttcactcacaatcaagacacagaatgcttctaccatcccaagatttccctcgtgtcccctcagtgtaggcccaggccactgacctactttctattaccataagcttaatttgtttttttcctagcattttctgtaaaagaaatcatagagtatttactctttttatgtctggcttcctttggtcagcttactgttccaaagactcatccattttggtgcatgtrtcaatagttcgttccttttcattgctgaatagtattccatcgttgatgtaccacaatttgtttatccacttacctgttgatggacatttgcatttttcttcattttggctgttaggaataacgattataaacaattgtttacaaattaaaaaaattatttggctaagtaactaaaagtagaattacttgatcagagcataagtgtatgctttacttnnnnnnn

SEQ ID NO: 503483 - DNA, 632 bp, Homo sapiens
tggttgtgggcaagtttcatgcagaaagatgtgagcaggacacttgactctttcactttaggtaaggctggcttggaataccacaaccataaaacagtgaaggggtttaggcacaatcagtgagtcaaggggtctaagaagaattccccttctctttttcaatrtaaattctacaacctcgccacccgaccttcttgagcagaagcctgaaataatttatattagcagtgcattcctttgtgttcccaccctctatcactttcctccagacacaagggtctgatgttctccagacagatgaggatttagagacacgggagagtacaaagggaagtgtgaggttgaggtgtccccagtgaatgggtcaatatcataagagcagtggagccctcagctacctttgccctacttgtccagtgcagggcccagtgcttggcaacaacagcacagggtgaggaacaggattgccacctttggtggatggctgaccagggcacagaaatccatgcagcaacaaatctggccagggccaacccctgcagccagcagaggccttcccatgtcataagtcactgctttcacagataaatgacctttgcagaatatttccttgtcccctaaaatgctagaca

SEQ ID NO: 503484 - DNA, 586 bp, Homo sapiens
taaaggaaataaaaggtatacgcttaggggaatggagaagaagacagcagacagagatgaatcaacacaatgttgggcagagtgaagcagatgcaagagtgttcactgamctagcggtaagcagtgcccaggtaataccattgtggtccaagagaggtgccatataggaagcattttatccagttctgctgaggtcttctaagcatcattggaggggcagcaaatggttcctcagtaatgctaggttataatctgatgcagtcactgtctgagttggcacccttagctcatctgtaaaactcaaagtaattggttttgggggaaaggggccctaactctaactgtaaatatattggtattcagacgacttagacaagaatagtgccaacaataactagcagtttaacattcactgcttttactgctattaagctattctgaaaccctttccctctagcctgctttctaagacccaaaggaaatattcgcagtattttcagtcactcttagtactcattgatgaggagctatcatgtaaggaaggagtagaaaatgagaagacaagaaatgccagaaggaggattct

SEQ ID NO: 503485 - DNA, 586 bp, Homo sapiens
taaaggaaataaaaggtatacgcttaggggaatggagaagaagacagcagacagagatgaatcaacacaatgttgggcagagtgaagcagatgcaagagtgttcactgaactagcggtaagcagtgcccaggtaataccattgtggtccaagagaggtgccatataggaagcattttatccagttctgctgaggtcttctaagcatcattggaggggcagcaaatggttcctcagtaatgctaggttataatctgatgcagtcactgtctgagttggcacccttagctcatctgtaaaactcaaagtaattggttttgggggaaaggggccctaactctaactgtaaatatattggtattcagasgacttagacaagaatagtgccaacaataactagcagtttaacattcactgcttttactgctattaagctattctgaaaccctttccctctagcctgctttctaagacccaaaggaaatattcgcagtattttcagtcactcttagtactcattgatgaggagctatcatgtaaggaaggagtagaaaatgagaagacaagaaatgccagaaggaggattct

SEQ ID NO: 503486 - DNA, 497 bp, Homo sapiens
gtctcaaaaccaaccaaccagccaaccaaacaaaaaacccaaatagcacccatagttataatttactattttgccattgaaaaattaaagcagatatgtaatgttaggaagctaatataggaccstattttaatcattgatagacagaggatttaaaggatcaggcttcagtcttagcaaatgaagtagctgtgagagagacatatcatttgtccataagtaagtgccaggcacaagcacattagtatgattataataatagtggccttgagagcagcagccaacatagattaaatgcttatatgccaggtactgttctgcatgctctgcttgtattaattcatttgatcttcacaataacctaatgaggtaggtattgtggttgcacccattttataggcaaattggggcacagagtggttaaatttcatgcccactagagagaggccgaataggaattggagcatttggagtatcctttggtcttttagctggtt

SEQ ID NO: 503487 - DNA, 496 bp, Homo sapiens
aaatatagcagttgtgactataatgctactaggaaaatatttcatcatctattcctgggacaacaaccatatgacagcagtttctgaatgaaaattttgaaattgtaaaaaattgcaaactactgttgtttcatcttctgttaaatagaaacactmtacagttaagactccagtctctctagaggccacacatgccgtcttaatgaagtaaaacagttttccttgctggagtgactcacggaagctggttcacccaaggatcagaaagatgggttacactttggattctgaaacaccacttagcaattggttacctataacacagtgagtcatcatcatctcatgattctgcatgtgactggacctccccaactggttcacaaacactgtgcaggcaggactcacatcctaggctttgtttcatcttgggtggtgtccattgattccctccttgtccccacctcctcctaccaggtccatcacctacatgtacaca

SEQ ID NO: 503488 - DNA, 496 bp, Homo sapiens
aaatatagcagttgtgactataatgctactaggaaaatatttcatcatctattcctgggacaacaaccatatgacagcagtttctgaatgaaaattttgaaattgtaaaaaattgcaaactactgttgtttcatcttctgttaaatagaaacactatacagttaagactccagtctctctagaggccacacatgccrtcttaatgaagtaaaacagttttccttgctggagtgactcacggaagctggttcacccaaggatcagaaagatgggttacactttggattctgaaacaccacttagcaattggttacctataacacagtgagtcatcatcatctcatgattctgcatgtgactggacctccccaactggttcacaaacactgtgcaggcaggactcacatcctaggctttgtttcatcttgggtggtgtccattgattccctccttgtccccacctcctcctaccaggtccatcacctacatgtacaca

SEQ ID NO: 503489 - DNA, 495 bp, Homo sapiens
caccagcgttataatcccaamcaaaaaagtcacagtagaatgcatatttgcttgtgcccctcctccccaggccgagggctcaacaagcagcaggagcaagcaggttgacccccaaatccgcagcgccccacagaatgtcaggtatgtaatcggttcccaatcaatctggctgggcgaatgaaccattggttggcttaatccgtttccccaggaaatgctccaagaggagctgggcagaagatgcagaggagctactttcctggtccaaccccctgcagagcgcgaaacagcggccctgggcaggatccccgcagcaaaccgcagcccctggacacacagcaagcttaatagtcactggatgaatgaaaagcgctgcctcctggtgccctggctgtcacccaaagcgccccgcgtagcccgcacagcctttccggcagtacctgcggcccctctccgccgggcctgcgcttcccgccaccgccgaccattctgcag

SEQ ID NO: 503490 - DNA, 563 bp, Homo sapiens
tgtctcacacttgttgtttgttgttttgttcgtttctttctaatttagaaaaaaaaaaagtagtagtcagggagtctagtcaaatacatcggagttggggggaattattagatacccaaatcttagtgatgcatttgactatttttcgggatgaaaagcatatatgggtagacattggcttggaggggaaatggtgacacaggagagatgaaggagcagcactttgaagttgatttttgaagaaaaaccattagttttcatcattgtataaggacatcactctatgaatcatagcaataggcaatttgcaatttaaaaaataaataaaaaggcatccttgtggctaaatggcagtttagatyacagttcctaaggcccactgaaaatcataagctactgtctttcctgagcacataaatgaatttttcttccattttgacagctctatccctccaggtcatccagctattttatcccttaatattggctactcttcctcctctctcagacgtctcactttttgcacccagcccccaaacacactaaaagattaaactcaagca

SEQ ID NO: 503491 - DNA, 563 bp, Homo sapiens
tgtctcacacttgttgtttgttgttttgttcgtttctttctaatttagaaaaaaaaaaagtagtagtcagggagtctagtcaaatacatcggagttggggggaattattagatacccaaatcttagtgatgcatttgactatttttcgggatgaaaagcatatatgggtagacattggcttggaggggaaatggtgacacaggagagatgaaggagcagcactttgaagttgatttttgaagaaaaaccattagttttcatcattgtataaggacatcactctatgaatcatagcaataggcaatttgcaatttaaaaaataaataaaaaggcatccttgtggctaaatggcagtttagattacagttcctaaggcccactgaaaatcataagctactgtctttcctgagcacataaatgaatttttcttccattttgacagctctatccctccaggtcatccagctattttatcccttaatattggctactcttcctcytctctcagacgtctcactttttgcacccagcccccaaacacactaaaagattaaactcaagca

SEQ ID NO: 503492 - DNA, 500 bp, Homo sapiens
cctcaccgcctctccacgaacagacctcagagttttgttttctctgtctctctcctttctttctcctttatctctgtctactgaggtcctggctgtccccctgccccaccctaccctatgctcttgggcttctggcctcatctctaacttagcttctaattttttctcttcttttcctttctttttttgaaacagagtctcactctgtcacccaggctggagtgtagtggcgtgatctcagctcactgcaacctctgcctccagggttcaagcgtttctcgtgcctcagcctcccaagtagctgggactacaggtgtgcgtcaccttgctcggctaatttttatgttttcagtagagacggggtttcaccgtgttggccaggctggtctcaaactccggacctcaggtgatccacctgcctagcctcccaaagtgctgggattacaggcatgagccaccacgccyggcctaacttagcttctaattctaatgcctggtga

SEQ ID NO: 503493 - DNA, 670 bp, Homo sapiens
ggtcagtgtcatctttgtgtttagctcatccaaaggtgttaccctggtttcattgaacctaaccccattctttgtatcttcagtgttggtttgttttagctgatccatctgtaacacaggagggatccttggctgaggattgtatttcagaaccactgactgctcttgacagttgttaacccactaggctcctttgagtagagaagccatagtccttcagcctccaattgatatcaatacttaggaagaccacagctagatggacaaacarcattgagaggccttagccctgctcctttcaattccatcctgtaaagaacaggagtcaggagccgctggcaagagacagcatgtcacccgggactctgccggtgcagaatatgaacaatgccatgttcttgcagaaaacgcttagcctgagtttcataggaggtaatcaccagacaactgcagaatgtagaacactgagcaggacaactgacctgtctccttcacacagtccacgtcaccacgaatcacacaacaaaaaggaggagagatattttgggttcagaagaagtaaatgataatgtagctcatttctttagttattttgaaccccaaatatttcctcatctttttgttgttgtcattgattgtggtgacatggacttatttgtagaggacaggt

SEQ ID NO: 503494 - DNA, 544 bp, Homo sapiens
ccttggctgaggattgtatttcagaaccactgactgctcttgacagttgttaacccactaggctcctttgagtagagaagccatagtccttcagcctccaattgatatcaatacttaggaagaccacagctagatggacaaacagcattgagaggccttagccctgctcctttcaattccatcctgtaaagaacaggagtcaggagccgctggcaagagacagcatgtcacccgggactctgccggtgcagaatatgaacaatgccatgttcttgcagaaaacgcttagcctgagtttcataggaggtaatcaccagacaactgcagaatgtagaacactgagcaggacaactgacctgtctccttcacacagtccacgtcaccacgaatcacacaacaaaaaggaggagagatrttttgggttcagaagaagtaaatgataatgtagctcatttctttagttattttgaaccccaaatatttcctcatctttttgttgttgtcattgattgtggtgacatggacttatttgtagaggacaggt

SEQ ID NO: 503495 - DNA, 564 bp, Homo sapiens
tgcagcttgttctctataggatgttcacagggaaccatatatgcatggttccatacatagattttgagtcaatacttgtaactttagtttccttctctccattactttttataaataaaaaggctgtagtacacatccttgatggcaccaagtagcaaacgtgctgtggagactagatctcactctcaaatctgtcctgggatgcaagtgcctctaygaatgtggtgcagaagctacaaatgtggtgcagaagacagcttcaaagaggaaaggaatataggtaaaaatctgaggttttatctgagaaaaaggtggcaaagaaaatttcagtcttgaacagggtcagcagatagcacaatgtggtcagcctgcaaacccagaggtaagtattattgtcccctgtttataatcccagggaggagaggtgacatgcctgttgtcatggaacttagcaaagaaaaagcttagctcaggcctttgttaagtctctccttccttctagcacattggccaactgtatgaggaaagtagaggtagagttgggttcatgtacaacaatatggc

SEQ ID NO: 503496 - DNA, 564 bp, Homo sapiens
tgcagcttgttctctataggatgttcacagggaaccatatatgcatggttccatacatagattttgagtcaatacttgtaactttagtttccttctctccattactttttataaataaaaaggctgtagtacacatccttgatggcaccaagtagcaaacgtgctgtggagactagatctcactctcaaatctgtcctgggatgcaagtgcctctacgaatgtggtgcagaagctacaaatgtggtgcagaagacagcttcaaagaggaaaggaatataggtaaaaatctgaggttttatctgagaaaaaggtggcaaagaaaatttcagtcttgaacagggtcagcagatagcacaatgtggtcagcctgcaaacccagaggtaagtattattgtcccctgtttataatcccagggaggagaggtgacatgcctgttgtcatggwacttagcaaagaaaaagcttagctcaggcctttgttaagtctctccttccttctagcacattggccaactgtatgaggaaagtagaggtagagttgggttcatgtacaacaatatggc

SEQ ID NO: 503497 - DNA, 529 bp, Homo sapiens
tggctgttcaccagagatgaatacacagggtttccagtcaactttcagcattttggtgcatgatacccaagccctagccagtggaaaaagtgagcaattatctgctgaagaaatgtccrtagtggtgagtggtggtaggctgggtggaggaaaagcggtggcatgtgcagtggagattcaggtactgaaagggtatatggtgtgatcacacaagtccgtataacccaaattctcaaatgtcagtctgatgaatgaatacagggaagcattcctggggaggcgagtgggtgtaaaggctcctgtagtccaagaatcttgaatgtttatatgcaatccattagctcaatagtagctgtaattgttatttactctctttttgagttttagtgtttgtgtgtggtaagacacacctgtgtttcaagtagtcccaggacggccgggaaaagggtggaggaaggaagggtgtttacctgctcatattcagagaaactaattgcctgggaaaatttaggctaaaccaatgaagatg

SEQ ID NO: 503498 - DNA, 594 bp, Homo sapiens
tggttgggtggtcctctgctgtccagaggcccaattctgcttatttgagggtgcagcrtcagagcttaggtatcaaggaagagagaagaaggggtagtaatttttttgttgctgctgatattaggaacacttccttgggaccaagagaacaacaacaacaacaacaaaaaggcttgtagaaaccagattttcacatggggttctttctcaaacaacaaaacctaagtaactaagttaaatgcccatgtaggagaggctcataaacactcaaatcttcttcatcctcaatgattaaaaacctttcattcccctctactataatcagaactaaaactacaaatgcagaaccctccttggtacaaggcagggcagaaatctagttctccctgagactgtccttggaaaatctctgcccagacacagattaggaatgattctctggacctgccctatcaacccacccagtatataggtacaaggaaagagactgggcagagaaggagctaggaattgtgtcatgtgaggcactagggatggcttatgggaaagagaaggcttgggtgagtaagagcattagctgcaccatccaaacag

SEQ ID NO: 503499 - DNA, 554 bp, Homo sapiens
tgtaatgacagtctgtatacctccttccaaccttccctgcccagtgggagtggagacttgtttttgttgtccctccctgggtagaggatcatgccttatacctgtgcaaaatatatttttctcattcatatttccctagaaacttttatacagagacattgagttatctcaggacacagtaactgtgtgcttctcccattttaacaaaggctttgtgggaaaacaacatcttaagctaaaatgatgcatctctaacgatgaaatatctggcttcaaagcaagcatgaggaggagaattatgaggggaaggggggcatttctgtgagataaaagtcaaacctcaaagctgaatatccccttccccttacttgggccygggtgactctgaatagttacagcaaatcatcaccttccagagaaaatgggggcagtgcagccctatttcttctagtttcatctgctgggaaatcctgggcacactctaaccctaaccccatatctctaagagaggagcccaactcttgccttacctatcaatggtaccgaatcggatg

SEQ ID NO: 503500 - DNA, 554 bp, Homo sapiens
tgtaatgacagtctgtatacctccttccaaccttccctgcccagtgggagtggagacttgtttttgttgtccctccctgggtagaggatcatgccttatacctgtgcaaaatatatttttctcattcatatttccctagaaacttttatacagagacattgagttatctcaggacacagtaactgtgtgcttctcccattttaacaaaggctttgtgggaaaacaacatcttaagctaaaatgatgcatctctaacgatgaaatatctggcttcaaagcaagcatgaggaggagaattatgaggggaaggggggcatttctgtgagataaaagtcaaacctcaaagctgaatatccccttccccttacttgggcctgggtgactctgaatagttacagcaaatcatcaccttccagagaaaatgggggcagtgcagccstatttcttctagtttcatctgctgggaaatcctgggcacactctaaccctaaccccatatctctaagagaggagcccaactcttgccttacctatcaatggtaccgaatcggatg

SEQ ID NO: 503501 - DNA, 461 bp, Homo sapiens
tgtcgcccaggctggagtgcaatggcgtcatcttggctcactgcaacctccacctcccgagttcaagcaattctcctgccttagcctcctgagtagctgggattacaggcacccaaaaccactcccggttaatttttttttttttttttttttttttgtatttttagtagaggttgcaccatgttggccaggctggtctcaaactcctgacctcagttgatctacccgcctcagcctcccaaagtgctgggactaccagcgtgagccaccgygcccagccagttctcttctacttttattttgttgttgttgttctaagttattcaatagatgcctaattcatgtgtttccaattattcttatttaatcagataagtatttttggctctgcattttattctgatcaaagctttaacagcagtccatacgtcttaatatgcaatgttttcatttgtattttc

SEQ ID NO: 503502 - DNA, 604 bp, Homo sapiens
gtctttagaaacaagtagaagtgttttgatatataaaaggaatgcttcatttcttatcattatcccaaaattgatccctcccacatttttgctttaaaaagaaacctttttggttttgtattttatacaggaacacaaaatgcaaacaagttgtgcatattttggactctcaaataactwctctgtcctttaataaagtaataataaggaatagatgtgcacatagttagaaaagtatgagtggttaaaaacaacagtctcccatactgcctgttttctctctcagaggggaccactaatgagcttctaagggcatttctagaaaggaagaaaagaagataagaggccaaagaaggagggacgggggttatggagagagaccttccctttccagcactaacgctctgtgaagggcgctgcaccttgcattcttcatgtggtgttttgtcttagaggtcgtcccataataacatataaagatctacctcattcctcctagtagctgcttagcattccattatctcagcggactatcatttatttgaatagccttttattggtgaacatatggatacttccagtttttatttttatatacaaatct

SEQ ID NO: 503503 - DNA, 569 bp, Homo sapiens
cctccgccttaaaggagtatgattgtcaaccccgcacctgccgccaccagcccaccttgacgtcatggtccgaaaaaaggagggggcggggaagaacccaagcaacggatccgcccacacatttgcttgtgatcacagccccatagtttcacgtctaggacatgactccatcaagagcggggatgaggagtgctcatttggcataaacggtgtctctacgggcgaggaacccactgacctccctaaacacttgtggggcaggcgtccccacacccaagggcgggactgggggggacaccgaaaaagagcggaggcagctaaccacgcggaccaccsctcccagacccaatcttcttcctagcatctgccctacacatctcgcgtcccgacagagggactggcattcgggacccaaccttgggtagccccagatcccgactctcgcaagagtagaggaagggcggagggttcgcgctgaggggcagctcagcgtagggggagggcgccggccggggctggcggggactctttgccgacatgcggcggaaggcgcggcggcggcactgcgg

SEQ ID NO: 503504 - DNA, 569 bp, Homo sapiens
cctccgccttaaaggagtatgattgtcaaccccgcacctgccgccaccagcccaccttgacgtcatggtccgaaaaaaggagggggcggggaagaacccaagcaacggatccgcccacacatttgcttgtgatcacagccccatagtttcacgtctaggacatgactccatcaagagcggggatgaggagtgctcatttggcataaacggtgtctctacgggcgaggaacccactgacctccctaaacacttgtggggcaggcgtccccacacccaagggcgggactgggggggacaccgaaaaagagcggaggcagctaaccacgcggaccaccgctcccagacccaatcttcttcctagcatctgccctacacatctcgcgtcccgacagagggactggcattcgggacccaaccttgggtagccccagatcccgactctcgcargagtagaggaagggcggagggttcgcgctgaggggcagctcagcgtagggggagggcgccggccggggctggcggggactctttgccgacatgcggcggaaggcgcggcggcggcactgcgg

SEQ ID NO: 503505 - DNA, 470 bp, Homo sapiens
gccaatacgaagctcttaagttcgtcagcttccccacccaggtgctggccaaggcctctaaggtgatccctgtcatgctgatgggaaagcttgtgtctcggcgcagctacgaacactgggagtacctgacagccacmctcatctccattggggtcagcatgtttctgctatccagcggaccagagccccgcagctccccagccaccacactctcaggcctcatcttactggcaggttatattgcttttgacagcttcacctcaaactggcaggatgccctgtttgcctataagatgtcatcggtgcagatgatgtttggggtcaatttcttctcctgcctcttcacagtgggctcactgctagaacagggggccctactggagggaacccgcttcatggggcgacacagtgagtttgctgcccatgccctgctactctccatctgctccgcatgtggccagctcttcatc

SEQ ID NO: 503506 - DNA, 460 bp, Homo sapiens
cacaggacaccggtcccgcaaagaggaagccaaattgcagtccaagcagccaggatgcgkagggcccggagggcttggaaccctgcaggcagcctggctgtggagacagagcaggacaagctctgagacacccccaggagtggcagacagagacaattcatgcctcccgtcccgggagcaggcaagggttcctgggttaaggggaaacaaaggggtccatctaaaaaatatgaaaggcctggctgtgctgagtgtgggtgaataaggtggagtatggttaacaaaacgattccacatcagcaaatgctaacacagggctcctgggatcccatagagagagagtctatttccatttttatttcttaactcaaaaaataaaattaaactttactttctagaagaggacgatgagagaagatcgctgggtggccacgtgatggataagacatgcaggcctccc

SEQ ID NO: 503507 - DNA, 607 bp, Homo sapiens
ctgtgttagagagctgagatcctgatgtgagtacctcatgtggcctcgtgtgtcctctgctgagtctcactgggaagcagcacaagaaatggatgaggcggagcagacctggccttggaatctggccccgcgcttaagcgaggatggtcttcgtggcctttctgagcttggcttcctctgagtggcgggaagcctcattggtcatttttcagagccccttggtccactcctcggcactaagacacttgagaaaggctcctctcttcactcagcatgctatggggttacttaagtttatttcttaattgaattttctcattaaaacctgctttcccagatctgtttggcagcaggacagtttcgaggtggtagaagagaggcccagcttcctctgtatttcctttccctgactttctggaggcattatcgaagyacgctaagccgcacgtagctgaagtgcacaactggatggcttgtgtttgtttcagtgataacacacaacatctgcctccctgctctccccagcctcccgtctctgatcgcgcactccctagttttccagcctcttcttaagcagcgattccagctggcagcgccgtgacaagtg

SEQ ID NO: 503508 - DNA, 530 bp, Homo sapiens
atagctcctatcataaaaaaaaaaaagttttaagaaccaccactcaaaactcctggatcctgcgtctccctgtagccacttcccccatttttctgctctcattcacaccaaaaccttgtaaattctttgcagttgttgattccacacctgctccattttctcctccagtcagtctgatcaggcctctgcccccacctgcscaggaagagacattgctctcctcaagctgacctgggaactcgatgttgcagaagccagtgctcactttggggactcatcttactcctggcttctcctccttcatgtacctctcttggcttgcctgagatcagtaaggctaccacatcccagcacatagcatggcagttacacatagtaggggcccataagcatttcctgattggaggcaaggtggaaaggaagccttctcctggtgctcaagtttcccctgagtttcctttgatggttcttcctttcctgaaggcttagttctgggacccttgttcttctgcatctgagtcctcttttgg

SEQ ID NO: 503509 - DNA, 586 bp, Homo sapiens
aggtgtgagccaccactgctggctaatttttatattttttgtagagacagatttttgccatgttgcccaggctgctctcaaactcctgggctcaagcratccccccacctcagcctcccaaagtgctgggattataggtgtgagccaccatgcctggccagaacttttattattaccaatttatagaagaagttgggtcttagatgaaatgacttgcctaaagtcacacataatacgtggatggatttattctcactttggtcttcctgactcaaaatctgttctcagaatcaccagattgagatcataggtaggaaagggctttgtaagctgcaaaaggcagtgctaccacatcccggcacatagaatggcaattacacatagtaggtgcccataagcattttctgaattgaggcaaggtggaagggaagccccaagccatataataccatcacctgaggaaggaagcagcaaccttgaggtccttgaaagacagccttctaccctatgccaaatcagctcatacaggacccattaaagcagacattgcccagaagttgcccaacatctgtctttccttcttcaa

SEQ ID NO: 503510 - DNA, 586 bp, Homo sapiens
aggtgtgagccaccactgctggctaatttttatattttttgtagagacagatttttgccatgttgcccaggctgctctcaaactcctgggctcaagcgatccccccacctcagcctcccaaagtgctgggattataggtgtgagccaccatgcctggccagaacttttattattaccaatttatagaagaagttgggkcttagatgaaatgacttgcctaaagtcacacataatacgtggatggatttattctcactttggtcttcctgactcaaaatctgttctcagaatcaccagattgagatcataggtaggaaagggctttgtaagctgcaaaaggcagtgctaccacatcccggcacatagaatggcaattacacatagtaggtgcccataagcattttctgaattgaggcaaggtggaagggaagccccaagccatataataccatcacctgaggaaggaagcagcaaccttgaggtccttgaaagacagccttctaccctatgccaaatcagctcatacaggacccattaaagcagacattgcccagaagttgcccaacatctgtctttccttcttcaa

SEQ ID NO: 503511 - DNA, 586 bp, Homo sapiens
aggtgtgagccaccactgctggctaatttttatattttttgtagagacagatttttgccatgttgcccaggctgctctcaaactcctgggctcaagcgatccccccacctcagcctcccaaagtgctgggattataggtgtgagccaccatgcctggccagaacttttattattaccaatttatagaagaagttgggtcttagatgaaatgacttgcctaaagtcacacataatacrtggatggatttattctcactttggtcttcctgactcaaaatctgttctcagaatcaccagattgagatcataggtaggaaagggctttgtaagctgcaaaaggcagtgctaccacatcccggcacatagaatggcaattacacatagtaggtgcccataagcattttctgaattgaggcaaggtggaagggaagccccaagccatataataccatcacctgaggaaggaagcagcaaccttgaggtccttgaaagacagccttctaccctatgccaaatcagctcatacaggacccattaaagcagacattgcccagaagttgcccaacatctgtctttccttcttcaa

SEQ ID NO: 503512 - DNA, 499 bp, Homo sapiens
tatttcagcagaggctggaaggaccattcaaatctcagctttttttttttttttttttttgagacggagtcttactctgtcacctaggctagagtgcagtggtgcgatcttagctcattgcaacctccacctcccgggttcaagcagttctcctgccttagcctcccaagtagctgggattataggtgcctgccaccacgcccagctaatttttgtatttcttttagtagagacgagrtttcatcatgttggccaggctggtcttgaactcctgacctcaggtgatctgcccgcctcggcctcccaaagtgctgggattacaggagtgaaccactgcgcccggcccaaatgtcaacttttgtatcaccttatcaagatgtcttttttgactgccctggctaaaatagcacaccttctttacctcttacttttatttttttaaatttcaaaatagccaggaattgtataattaatctggtgtctctgttaccctctggac

SEQ ID NO: 503513 - DNA, 499 bp, Homo sapiens
tatttcagcagaggctggaaggaccattcaaatctcagctttttttttttttttttttttgagacggagtcttactctgtcacctaggctagagtgcagtggtgcgatcttagctcattgcaacctccacctcccgggttcaagcagttctcctgccttagcctcccaagtagctgggattataggtgcctgccaccacgcccagctaatttttgtatttcttttagtagagacgagatttcatcatgttggccaggctggtcttgaactcctgacctcaggtgatctgcccgcctcggcctcccaaagtgctgggattacaggagtgaacyactgcgcccggcccaaatgtcaacttttgtatcaccttatcaagatgtcttttttgactgccctggctaaaatagcacaccttctttacctcttacttttatttttttaaatttcaaaatagccaggaattgtataattaatctggtgtctctgttaccctctggac

SEQ ID NO: 503514 - DNA, 431 bp, Homo sapiens
gctgcatctaacgcacaccctcttccctmcagcaccagcagcaggtggcgcaggcagtggagcgcgccaagcaggtcaccatgacggagctgaacgccatcatcggggtacgtggactccccaatctgcctcttaccgtgtgtatagcccttttattcctctcatttatcataaccagagattgaccctgaccttagctggcctcaaagaatggcggccccagggctccggcttctacaagcaccccaagggcttggacccatgtagggctgtttcccccttggctcccagttgcctcctagtcctcaaactaaaggggagccagacacgcctcaaatccacctcttcagccatctgcctcatcttccactggcttttggtgtccttgccattgaggagggtgggggcctagggtcaccttcaaggccagg

SEQ ID NO: 503515 - DNA, 535 bp, Homo sapiens
ttagctctcattccactggcccccagctcatctggctctggggcctttgctgtgatgacctgccctgcccctgctctgtaaggcaggcttggagttcctaagaaataaggagccttccccagggtccagcctcagggtggaagatgctggcagctaatgctgaaggcatgtatgcatgagcaaacactgccagggctgtgagcttaaaaatggatccctctctactcagagggaaccccakgactctgcggttttttaaatgcatgcattctttatctcaggcttggaaacaaacattgagaaattatttgtgaaacgggggtgcagggagttggggggtgcttgaagacataaatctttacattacagtctattaacagacttccttcagcgagacattcatgtgaactgagctgggggcaaaggttttgggggtgcttccccctgccacccacccagtgaaggagcaagaggaatgggaagagccactccctccctccctcctgaggtggccacgcctcccctgccctcccca

SEQ ID NO: 503516 - DNA, 609 bp, Homo sapiens
tggttgatcaggctttgactttgggtcttctaggtggaaattctgcattctgctctccctcttgtctcctccctgctctactggcagccctcgagggcagaggcggaaataccttcaatcaatatttgttggatgagtggatgggatgrgttggaatggactggaatcttctttgagttgttcccagaataggctcttatagaaaagcttggcctttggttgacaaaatgccttaaatccttcatgttgcctcagagaacagttacccatcttcccctctagaacccagaaattgcagactctaaaatccctgtctggggtcagaccaccctttctcaagctttgcttcatgatgaaccaacatccttgagccatccccttcccctgccagcaaggctgagaaactccatggtcatcttatccctccaggtggcccccaatcatcttcccatcgtcccagaaccatcagcaaaatcctaggaaatgtggttacttccagtgagcaagggatacccatgacttgtgacttatagaaataaagggtcttggggagagtgaatcgaaacaagggagagaaaggggtgggtgggtggatggtgcttcttgcag

SEQ ID NO: 503517 - DNA, 609 bp, Homo sapiens
tggttgatcaggctttgactttgggtcttctaggtggaaattctgcattctgctctccctcttgtctcctccctgctctactggcagccctcgagggcagaggcggaaataccttcaatcaatatttgttggatgagtggatgggatgagttggaatggactggaatcttctttgagttgttcccagaataggctcttatagaaaagcttggcctttggttgacaaaatgccttaaatccttcatgttgcctcagagaacagttacccatcttcccctctagaacccagaaattgcagactctaaaatccctgtytggggtcagaccaccctttctcaagctttgcttcatgatgaaccaacatccttgagccatccccttcccctgccagcaaggctgagaaactccatggtcatcttatccctccaggtggcccccaatcatcttcccatcgtcccagaaccatcagcaaaatcctaggaaatgtggttacttccagtgagcaagggatacccatgacttgtgacttatagaaataaagggtcttggggagagtgaatcgaaacaagggagagaaaggggtgggtgggtggatggtgcttcttgcag

SEQ ID NO: 503518 - DNA, 609 bp, Homo sapiens
tggttgatcaggctttgactttgggtcttctaggtggaaattctgcattctgctctccctcttgtctcctccctgctctactggcagccctcgagggcagaggcggaaataccttcaatcaatatttgttggatgagtggatgggatgagttggaatggactggaatcttctttgagttgttcccagaataggctcttatagaaaagcttggcctttggttgacaaaatgccttaaatccttcatgttgcctcagagaacagttacccatcttcccctctagaacccagaaattgcagactctaaaatccctgtctggggtcagaccaccctttctcaagctttgcttcatgatgaaccaacatccttgagccatccccttcccctgccagcaaggctgagaaactccakggtcatcttatccctccaggtggcccccaatcatcttcccatcgtcccagaaccatcagcaaaatcctaggaaatgtggttacttccagtgagcaagggatacccatgacttgtgacttatagaaataaagggtcttggggagagtgaatcgaaacaagggagagaaaggggtgggtgggtggatggtgcttcttgcag

SEQ ID NO: 503519 - DNA, 609 bp, Homo sapiens
tggttgatcaggctttgactttgggtcttctaggtggaaattctgcattctgctctccctcttgtctcctccctgctctactggcagccctcgagggcagaggcggaaataccttcaatcaatatttgttggatgagtggatgggatgagttggaatggactggaatcttctttgagttgttcccagaataggctcttatagaaaagcttggcctttggttgacaaaatgccttaaatccttcatgttgcctcagagaacagttacccatcttcccctctagaacccagaaattgcagactctaaaatccctgtctggggtcagaccaccctttctcaagctttgcttcatgatgaaccaacatccttgagccatccccttcccctgccagcaaggctgagaaactccatggtcatcttatccctccaggtggcccccratcatcttcccatcgtcccagaaccatcagcaaaatcctaggaaatgtggttacttccagtgagcaagggatacccatgacttgtgacttatagaaataaagggtcttggggagagtgaatcgaaacaagggagagaaaggggtgggtgggtggatggtgcttcttgcag

SEQ ID NO: 503520 - DNA, 625 bp, Homo sapiens
gatatctgggcatcctgtgatccattcaggttgacacataaaattaaccatcacagtagctttcttcttctgtaggtacattcattgaaatacatgaccaggacagagggccagagagaggaagaagacatgctggctcctagcttcaatctggaagctacagaccatcggcctgaactagcaacrtggtctcaaccctttcacacaagagtctgggaaaggtagcatgtggtcacacagtgagcatgaacagtccttgctacaggtattgacctaccatatgccaggggagaccaaaaccaaaccatgcagaggaaaaaataccctctgctgtcaagaaggtcactgcatctgggcaaggccaggtatgtttttggtgtctaagaaagggccccaccctggggaagccctgaaggagtctggggcctgcacacagatgatggccagggctgtggaggggtctcagttggagaggtggcagtggagcagggctggatgaaggggagtgggctgcagaggtgagaagcagaggggaaggtggtgggaaggagaggaggagggaggaggaagagcttcctggagacctggtgcatctaagccaagttaagtcccataagcctgctgt

SEQ ID NO: 503521 - DNA, 625 bp, Homo sapiens
gatatctgggcatcctgtgatccattcaggttgacacataaaattaaccatcacagtagctttcttcttctgtaggtacattcattgaaatacatgaccaggacagagggccagagagaggaagaagacatgctggctcctagcttcaatctggaagctacagaccatcggcctgaactagcaacgtggtctcaaccctttcacacaagagtctgggaaaggtagcatgtggtcacacagtgagcatgaacagtccttgctacaggtattgacctaccatatgccaggggagaccaaaaccaaaccatgcagaggaaaaaataccctctgctgtcaagaaggtcactgcatctgggcaaggccaggtatgtttttggtgtctaagaaagggccccaccctggggaagccctgaaggagtctggggcctgcacacagatgatggccagggctgtggaggggtctcagttggagaggtggcagtggagcagggctggatgaaggggrgtgggctgcagaggtgagaagcagaggggaaggtggtgggaaggagaggaggagggaggaggaagagcttcctggagacctggtgcatctaagccaagttaagtcccataagcctgctgt

SEQ ID NO: 503522 - DNA, 463 bp, Homo sapiens
gtttttaagctgaaaagttcaactctctctagacttttgaaacgtcatcctcacctctgcttacagttctacctctatattccataagtgggttcgatgcaattgtaaagaaatagccatctgtccagggctgttttccaggacttcaagatgagggatcacaagtttctttttaataaaaaatatagcatacactagtaagttttaaacaaggaattctaggcacataataaaataacccaaacataatttttgtccccatttttttatggcaagcactaacttccattctgaaatgagctttttttcactcaatactttgatttaggacttatgcttcttaaagtggaaatacttggaagacaattgcattgatagagtgaaaacaaagcaataataaatataatacattttagagaattccarccagttgagacttccttccactaaataggaacagcaa

SEQ ID NO: 503523 - DNA, 502 bp, Homo sapiens
attcattaagaattttttttttttttttttttttttttttgatacagggtcttgctctgtcacccaggctggaatgcaatggtgcggtcatggctcactgaaacctcaaccttccaggctctagggatcctcccacctcagctccccaaagtgctgagattatagacatgagccactgcactcactctatctcagattcctgaagctggcttctcacttaatrtccttaatgtaagaaaagaacaggagttcaagtagcatgtacttgcaagtgttagagagttttagcctaatacgaggcagtatttaaaatttttattcaaaatacagacaaaaatatattaatggatgtccaacatggcacccaaaagacaaagaagcttcttaagtgtgggcagactacatctcacttctggacttaagaaagtatgaaaacaatttgtgaaatgatacagttttatcatgtgtctcctcacccatgctagggactcttgatcaccca

SEQ ID NO: 503524 - DNA, 387 bp, Homo sapiens
tcccaaatacacctatttagattgaatgtaattcaaatcaaaatcctcactttttgtgtgtttatgtgtgtgtgtgtcaaatgtgacaagccaattctaaagtttatatggaaaaacaaagaccaagaaagtgaacacactcttgaagaaaaagaactagatgggcagggaagggatggggcttgccatgccaaagataaaaattattctaaagctttaataattcagatgctattgaccacccatagattggttgcctatggaccagcattaaaagtgcagaagcagacccactcatataaagaaacttgttctgtggtgggaacktgatctatgctggactttacaatagacagtgtttggtaattgagaatccttacggaaaaa

SEQ ID NO: 503525 - DNA, 255 bp, Homo sapiens
cactctcctcctaacctcagctgtgtccctccagctccggacccctgtcacatgactgcctgatagatggttgtggatccccactgataacccatggctgctgttcatacgtmcttgtccccactccctccccctccccacaccctcccagtcaggcatccgggcctctggaaggcccacagcttggcaaggtcatcccttttctgaacaccaagtatgcgcagagcacggtagaagcggccagtgagttaggat

SEQ ID NO: 503526 - DNA, 459 bp, Homo sapiens
tagctgggattacaggcatgcaccaccacacccagctaattttagtagttttaataaagatggggtttcaccatgttggccaggctggtctcaaactcctgaccttaagtgatctacacacctggcctcccaaagtgctgggattacaggcatgagccaccacactcagcccttaaacacacttttaccttcccttgtgtatgtggtccagagctgtgcacatgttgatatcccactgaaacctgttgatttcatttgaaatttctgacatacataagagaagtctccatgttctctgattctgcacttagtttaattcttaagagatgactagatctcagcaaacctggtggtttctttttacttgtacttctagtaaatgttaatgatacaaatacacagcttttaattacagtgaagatattaygggatttactctttcaatcagccaagaatcac

SEQ ID NO: 503527 - DNA, 548 bp, Homo sapiens
tgacccaacctgtacccatggctcactcgctgcagggaacctcacagctctggggcagggacrtggaataaagccccaggaagccagcttccagcccagcccagctcctggagacatgtggctgagtccactacagccagagctggctcgtggcatccaagtacctttccaggggtgggcccttgggaggccagtctctctaggtctccatctggaaaggggactggcctgagaatactgagacctggctctagacccagctctgctgttcccagggggagaactctgcccaacccactcacctcctgggcctcggctttctcatctgtaaaatgagaccccagccaggctcccgaggtccttgcaatgccagcagtccctgagttaacacagcggttcttgacttatttgggttgagattggggcagcaagcttgagggcactggaagactcagatcaacactgaatgagtgtggccacagagcacctccacctccaaggctacgacaaccaccatcggtggtctgcaccatttgctgtctgcacca

SEQ ID NO: 503528 - DNA, 548 bp, Homo sapiens
tgacccaacctgtacccatggctcactcgctgcagggaacctcacagctctggggcagggacgtggaataaagccccaggaagccagcttccagcccagcccagctcctggagacatgtggctgagtccactacagccagagctggctcgtggcatccaagtacctttccaggggtgggcccttgggaggccagtctctctaggtctccatctggaaaggggactggcctgagaatactgagacctggctctagacccagctctgctgttcccagggggagaactctgcccaacccactcacctcctgggcctcggctttctcatctgtaaaatgagaccccagccaggctcccgaggtccttgcaatgccagcagtccctgagttaacacagcggttcttgacttatttgggttsagattggggcagcaagcttgagggcactggaagactcagatcaacactgaatgagtgtggccacagagcacctccacctccaaggctacgacaaccaccatcggtggtctgcaccatttgctgtctgcacca

SEQ ID NO: 503529 - DNA, 575 bp, Homo sapiens
ccctgtccacccctgccgtagggagcagaaggcccctctgccccagtgatgattctggacggctgcaggtcagtcctgcaggtgtctcagcattctcattgtaaatatcttgctgagtcaaggtgtggggtcttctgcgggctgccactggccccgtgccgctggagcacagggccagtggggtgggtgtgggctgggtgtcctgcgccaggctgcctagactttatcccyaggccctggagaggcccaggaggtcaccgggtcatggggcagggggctgggtgaggtgggggctgggtgatgtggtagaaagagcagtcaagcagggtcaggagatgggctcccctgcctaccgtgctctggcatgtccttcgccacccagtgagggcttggacaaagtgagcagacctcaagccagatggacgtgaggctcacccagtgggtggcttttgggccacaccagtgcccaggtgctgcggaggtccaggcctggccttttgttggcattcctcactgggtttcagtgcatgggccggagaactgttggactggacgctctgttgtttctttacagc

SEQ ID NO: 503530 - DNA, 575 bp, Homo sapiens
ccctgtccacccctgccgtagggagcagaaggcccctctgccccagtgatgattctggacggctgcaggtcagtcctgcaggtgtctcagcattctcattgtaaatatcttgctgagtcaaggtgtggggtcttctgcgggctgccactggccccgtgccgctggagcacagggccagtggggtgggtgtgggctgggtgtcctgcgccaggctgcctagactttatccccaggccctggagaggcccaggaggtcaccgggtcatggggcagggggctgggtgagstgggggctgggtgatgtggtagaaagagcagtcaagcagggtcaggagatgggctcccctgcctaccgtgctctggcatgtccttcgccacccagtgagggcttggacaaagtgagcagacctcaagccagatggacgtgaggctcacccagtgggtggcttttgggccacaccagtgcccaggtgctgcggaggtccaggcctggccttttgttggcattcctcactgggtttcagtgcatgggccggagaactgttggactggacgctctgttgtttctttacagc

SEQ ID NO: 503531 - DNA, 592 bp, Homo sapiens
ccctctccctgggaggatctcggtgccaatttcttagcacccgggactgagaatcaagagggtctaaggactccatcctcttcccttgctccaagggctctagaacctttccagaaagagagcctctgtcttgtaaagttggcctgccttcccagggagagtccacgctggagagcacccaggcttccagcacagatcgtctgaatttcctccttccggagcttgcctggaatccctcctgtcatgatctggaccaaaccttacttggctcatgcccagggcatagagggctgaggtcactccgaggctgaaaaagggcctaagagcttctgtcacggtcgtgggtgttccagggtcgtgggtgttagatctgcatggtgttccgtggtcaagtcttcgagtctctgggcaggagcagtgtcatgtgctcatgtatgaaggagatgaagatggtccagtcttccagtgtctgggcaggagcagtgtcatgctcgtgtatgaaggagatgaagatggtcaagtcttcgagtctctgggcaggagcagtgtsatgtgctcatgtatgaaggagatgaagatggtcaagtcttcg

SEQ ID NO: 503532 - DNA, 592 bp, Homo sapiens
ccctctccctgggaggatctcggtgccaatttcttagcacccgggactgagaatcaagagggtctaaggactccatcctcttcccttgctccaagggctctagaacctttccagaaagagagcctctgtcttgtaaagttggcctgccttcccagggagagtccacgctggagagcacccaggcttccagcacagatcgtctgaatttcctccttccggagcttgcctggaatccctcctgtcatgatctggaccaaaccttacttggctcatgcccagggcatagagggctgaggtcactccgaggctgaaaaagggcctaagagcttctgtcacggtcgtgggtgttccagggtcgtgggtgttagatctgcatggtgttccgtggtcaagtcttcgagtctctgggcaggagcagtgtcatgtgctcatgtatgaaggagatgaagatggtccagtcttccagtgtctgggcaggagcagtgtcatgctcgtgtatgaaggagatgaagatggtcaagtcttcgagtctctgggcaggagcagtgtcrtgtgctcatgtatgaaggagatgaagatggtcaagtcttcg

SEQ ID NO: 503533 - DNA, 622 bp, Homo sapiens
gaggcagggaaactgggcgtggcctcatcgccaggaccctccttcttaggcagcctctaccttcatccccacagcagatctttggggcrggaactggtaagaccctcattttctagagcaagaaatggaggctcagagaggcatggccactggcctgaggtcacacagagggtccaatcctggtccccttagccttgagtgactgtgtcttgactgtaggctacccaggtttctgcgactgcagagaacacagagcgggtggatggggagcccccagaggtgattagcggggaggtgtttgtggcctggcccctgaggggtggcttcctgggaagggggtgataggcactagggtagagcgccctgtgtacttggggcccattctggctgtttgtgtggccgttgagaggccaggccttgattgtcagaggggactgattgtgctgcctgagtctatccatgcccactctgatgagcacttagtgggcagagaggcttggaagagcaggcgagtgctggttccgtttgctgcaaaggtgagatgcctcccttctggattcccgggcagcttatcgtggcaggcgatgttgctagcgctgcaattccatttagacaggtgtga

SEQ ID NO: 503534 - DNA, 557 bp, Homo sapiens
tgccacacaggcatgtccccgaatgtcactcctgtactctgagcacctgtggcatggtgggctctggggtctgcagcagatgaagatgccaccactcctgccctcaatgggacagggcctcccaggctaagggaacagaagagatagggcccctgaaaacaggatggaccaagtcacagaggctgggatttgatctcacagcacaggggagctgctggagggttctgagcaggggggtgacatcatccagcccgtctctgaacacatccttccgggacagcattactgtcagaccagagacaaggggaggcgagaggcagtgaagccggcagtgcggccatccaaaacagacaaggccaggcaagtttctggaaaagagacattgtccaggccagtttcatctatggcccttccacaatccctggcatggcccaaagaggtctttctgtctgtccccgggctcagcccctccttcctccccgtgcctggaacaccctctccccgacctccgctccagtgaccaccccagcatstccgctcctcctccctttaccctc

SEQ ID NO: 503535 - DNA, 528 bp, Homo sapiens
ggccaactctcgtccccgcccacgcttgaccccagcaggtagcccagagcctcgaggaaagaaggtgtatggtaaccactcctcaaaccgaattccattcccactgcttggcagctccatttcagaggcactaaaaaagctgaaaatacctcaaaaatcttcagcagcaagccaaagccacatgcctgtgtggagggcaggttctcactcctccatttcaaatgcttccgacaaagagcccatcgtctgtgtcgcccggtgtcaaccaggcccctctgctcaagtccaaactagcttttgatcgggacctgcctcaagggaaaggcctcagcgttctcacacttgctaaagatagatttggctgccagacgggctgaggctcccgtgtggtttacaggtacataaaaagagctctgggtccctgagtcctgcgttgctaggaaacgagaccagaagtcaggaagcctgagctccatcaccagtggcatctccgattcactgggcraccgagggccaatcacttaacct

SEQ ID NO: 503536 - DNA, 568 bp, Homo sapiens
ctgggggagctgggggacccaagagggggtggcggggccagaacggcccttttgtgaggcctcccgctaatgccccactaatcctgcaatttgcacaactctgcgatgctgggtcacttttaattatcttcccaccrgccttgtcccagaagaggacaaacacttgtttgaatggaggcgggcttgcgggctgattccgccaggctctgcagtggggcaccggatgcagcatgaggatcccagggatgtttgcagaacaggggcccagcacccggcctgggcacagctaggcccggggacctcaggctcacaaatgtttgctcaggtctttggttagcatggacatgagccccgctccctatactacggcgggagtgctggcttcctcctcctccatgacaccagcggcatggctgctgcagaagctggaaatcagacaggcagccctctcccgtcaccgtgggagcggcagaaacctgggtccttcacagccgccagtggctccaagaaacatgctgtccacaaagaagcctgctctgaagctgctggggcaccctggtcagtagtt

SEQ ID NO: 503537 - DNA, 605 bp, Homo sapiens
ctcagctccttgtcaccacttctgggagaccttccatgtcccctgccccggcacctccatgatgtttgtcaccatcagatggcctgtgtgctcaccacatgtgtttcatgtctaccccmccaacccccaacagcttcacagggccagggacctgcccacttcctcctcaagtgtgtccctggctcacagctaggtgcatggcaggttctcaggaagtccttgttgaatgaaggcattcctttgctcctttgttcatttattctgtcaggtgtactgagtgcctacgcctgagaggccaggtcggaaggacttaaattcagaggagcaatcttatcagatggatataggctagtgcagtgagcttcccaagccggctgccccagaggaagacaccaagcagtggtggatgttaaaatagcctctgggtctcctcggagtacaagatccccaaaggggagccccgtgatgtggccccagcaatgacattatcaccttggctgcattaacagaagtatagggtctgtggcaagggaggtggtagtctcgtacttggcaatgacttggccatccttggaacaccgttcaggtgaggtcacactacttca

SEQ ID NO: 503538 - DNA, 393 bp, Homo sapiens
tgctccaaggtctcagctccttgtcaccacttctgggagaccttccatgtcccctgccccggcacctccatgatgtttgtcaccatcagatggcctgtgtgctcaccacatgtgtttcatgtctacccccycaacccccaacagcttcacagggccagggacctgcccacttcctcctcaagtgtgtccctggctcacagctaggtgcatggcaggttctcaggaagtccttgttgaatgaaggcattcctttgctcctttgttcatttattctgtcaggtgtactgagtgcctacgcctgagaggccaggtcggaaggacttaaattcagaggagcaatcttatcagatggatataggctagtgcagtgagcttcccaagccggctgcccca

SEQ ID NO: 503539 - DNA, 412 bp, Homo sapiens
gagactggtccaaggccacatctggtaaaaggctgagctgggacgtaagcctgggggtggcagagtccacatcctgccctcctcctgcctcacccacactctgccccatcccsagtggccaggccaccatgtccccatcagaggctgaggtcatgtcatccacaggcagcgctgggagccaagaggggcttgtgctcactcgggtttgtttggatttggaggctccagccctgcacagggtgtgacttccccatctgcctctagacaggtggcccagtggattgggtgagttttgagtccttcagggtgagcacccctcatatgcttctagatgctttgcttcatggggctgaagtctgccgtcaacatgcccagcccggagagtgttgcctaggccagggtcgggggtcac

SEQ ID NO: 503540 - DNA, 412 bp, Homo sapiens
gagactggtccaaggccacatctggtaaaaggctgagctgggacgtaagcctgggggtggcagagtccacatcctgccctcctcctgcctcacccacactctgccccatccccagtggccaggccaccatgtccccatcagaggctgaggtcatgtcatccacaggcagcgctgggagccaagaggggcttgtgctcactcgggtttgtttggatttggaggctcyagccctgcacagggtgtgacttccccatctgcctctagacaggtggcccagtggattgggtgagttttgagtccttcagggtgagcacccctcatatgcttctagatgctttgcttcatggggctgaagtctgccgtcaacatgcccagcccggagagtgttgcctaggccagggtcgggggtcac

SEQ ID NO: 503541 - DNA, 582 bp, Homo sapiens
acaccacatccccctgaagctggatgtttgaaaagtcatgtctggggactaattgttgctaagaagattgttgcttagaacacttaacctaaaattaaaatgtgcctttccactaaaaaaagatccctcctagatccatccgttgcccttcaagccactgtcaaggaggtgaagaccaaaatacagatttcgttttctttttgtgaagcatttaccaaatgtgaaataaatagaaatttcaggacttaaagaacatcaaggaagaaaaacactttatttttctgagttagaaccacacaccccactggggaatgaagttcctggttagaaacccagccccaccgaaatgaaacaaggggttgtttaggatacttacgttctctccagttctcgcttgttcgtttgttggttcatccattcattcatgcccatgcttgatgctgctgtatgcactgggcaggcatatgaaagagtggagcacagctcttgctaagggaaggggacatttccatgacaaccacaagccagcccccaagygatgaggctactgtgggaagcttgatcatggaggtaggtggtact

SEQ ID NO: 503542 - DNA, 649 bp, Homo sapiens
gctggcctctaacaaacattaaactttatgtggtatcgccccatatctaccccttggtctatccctcatatagcagttttttaaattacttgcacaatctgtatgcaattggtattatttagagaatatgacatattagaggacctaataggttagtattaagcttccaatatgaaatacatcaaagcgtacttgattttcaactttaagttgaaaccgtgatgaaaacagtattgacatatttaggaaaatttaagactcaacatataaagttgatgtattcgatgaactagaattattttaaaataagaaagattttcttattataacaattatttaacatagtttaaatgtctaaagcatatcaaatgtaatagcgcagcttaaaatgtaaaaggatatgtaaataacttgtttgtgtcaacaaaaattaatcagagacctctacgaaagtagaytaacttactagatttataaatagaataaaaaactatatgaaatagcattgaccttaataacttaacaaaaagctaggtttttggcttttgaaagtcaaatgaaatattacacacacacacacacacacacacacgcacacacacacataaatccaaccaaatagccaatgcagaaaagctaccatcacaga

SEQ ID NO: 503543 - DNA, 510 bp, Homo sapiens
ctggtggattcccattttccttcttgaagtaaagctccagagtttatctttatgcactatcttgctgtttccaagtggctgaggcattctaataccttttatctgcatctgggagggagaaaaaaaccctgtcatcattttaaattttcttgaatccaactgccttttcaaccaacatttagtttttaatagtttcaccttgtatgttctccttcataggtttaagttccattatttcagaggatgactgtcttgttatttttccttttcatagatgctggctttctatgttatatgaaacttgatttaagtttatgtttattccacctctattttaaaaaggatctcagtcctttgtaggagaaaataaasttgctcaatttcttctgttgtctgactctctgtccagatattcatcctttactttatccatcaacagacatttattgaacacaggtgctaggaattgagctaaatgtcacaggagacacaaggttgaatatacatggt

SEQ ID NO: 503544 - DNA, 614 bp, Homo sapiens
attggcgtattgcagattttcaaaatggctccacactgagctaaggaaggccaggaagcgctctctctctctctctctctctctctctctctctttctcttgctgtgtctcttcaaataggctgaatctcctttcatatagacttgggtttgaatttcagcttcactctttattagctgaatgatcttaggcaagttttttagccttctaacctcactgtctacatctgtaaaattgctataacaccaattcctgtattttatatgttaaacgcttagggaaatatctgactggtggggtaattctkgtttttttttttttagtattttcttctatttgaaagagtttcaaataaagtaatatatatctatggcacaaaattcaaaaacacctcttgaagttcattgaaaaattcttcttctcttcctttcttctagtcacatagttctttagccaaaggaaattactattattcactttagaaataggccacacattttccatatacataaattttgtatatccatactattctgaactctgtttttttgttcacttaatattgaaagactttcagataagtatacattgcactgtgtcattcacttttttaa

SEQ ID NO: 503545 - DNA, 614 bp, Homo sapiens
attggcgtattgcagattttcaaaatggctccacactgagctaaggaaggccaggaagcgctctctctctctctctctctctctctctctctctttctcttgctgtgtctcttcaaataggctgaatctcctttcatatagacttgggtttgaatttcagcttcactctttattagctgaatgatcttaggcaagttttttagccttctaacctcactgtctacatctgtaaaattgctataacaccaattcctgtattttatatgttaaacgcttagggaaatatctgactggtggggtaattctggtttttttttttttagtattttcttctatttgaaagagtttcaaataaagtaatatatatctatggcamaaaattcaaaaacacctcttgaagttcattgaaaaattcttcttctcttcctttcttctagtcacatagttctttagccaaaggaaattactattattcactttagaaataggccacacattttccatatacataaattttgtatatccatactattctgaactctgtttttttgttcacttaatattgaaagactttcagataagtatacattgcactgtgtcattcacttttttaa

SEQ ID NO: 503546 - DNA, 636 bp, Homo sapiens
ccatgagaacagcacatatatatctacagagtcatagtgatgaggctgtgcctcccagtgactatggcatggaccctagagttctggagacctggcctggaatcttggccttgtcatttactttggtgagttgtctgagtctcagttttcttagtaaaagtttccacctcatagggtttgaggattaagaactgcatttagcccagtccctagaacatattaaaaactccgtaaaggacagttacaataataataataaactcttaagaaaagatttagggagaaagttaggttaagcatgatgaacaaaagttgatggtggtcagaaaatatttgtggtgctgaggagtttgattctttttaaagtattgatgagtgttctgcaaatttttgtaatgagaaagtcatcacattttatgacataatttatagaaaaagtattaaaatracattggcatcactcacccttgctttttacactagtctttggcagttgggggaaagaccagggcaagccatattataaggcagcattttctaaaatatacgttcagaacacaagtttcttgagaaatgtttgtgagattcacactgaacactattgtgttaaaggctctgtgatgtccccaagtaagt

SEQ ID NO: 503547 - DNA, 594 bp, Homo sapiens
tgccttgaattgtagcagactatatggatttttagttttgaatctgtagtatatgcagtctcatctctgaaaaaccagatattgatccctgtctcactgggtctacacraactggattgcctgaattcatggatttttttaaaggaacaaatgcagtaaattaaagggagtgtatttttttcctactctattccagatagcaagtttgactgcatcttttgcttgttgtctagtttttctggtgatacagaaatctacaatgcaaaatggtatacagggaagccagtataccttctgatggctcatcaagttgactttgccgtatgtataattgtgccccagccaagtcccaaaatcagggtacacattatacccagagaaggattaaagaggaggaaaaccaacctggtggctgattcacagatcagcaacaaaacatcacagatgttgcctccatggtcagccagtcatagagtctgcaaacatttgttaagcacctcatgatgtaccaggttccaagtaaacaagacatggtacctgtactcaaaaactttctgtctaccgggaaaaatacactttaaattagtcccactt

SEQ ID NO: 503548 - DNA, 594 bp, Homo sapiens
tgccttgaattgtagcagactatatggatttttagttttgaatctgtagtatatgcagtctcatctctgaaaaaccagatattgatccctgtctcactgggtctacacaaactggattgcctgaattcatggatttttttaaaggaacaaatgcagtaaattaaagggagtgtatttttttcctactctattccagatagcaagtttgactgcatcttttgcttgttgtctagtttttctggtgatacagaaatctacaatgcaaaatggtatacagggaagccagtataccttctgatggctcatcaagttgactttgccgtatgtataattgtgccccrgccaagtcccaaaatcagggtacacattatacccagagaaggattaaagaggaggaaaaccaacctggtggctgattcacagatcagcaacaaaacatcacagatgttgcctccatggtcagccagtcatagagtctgcaaacatttgttaagcacctcatgatgtaccaggttccaagtaaacaagacatggtacctgtactcaaaaactttctgtctaccgggaaaaatacactttaaattagtcccactt

SEQ ID NO: 503549 - DNA, 533 bp, Homo sapiens
atacttctcttttgtcttactatccctgttagagataaactcagaacgacatacgaatttagttcctgtatttaaactgaacatcattccagtctgctgctttcttaatttgttgtgcaaattaagagtttatattaaactgtgcagcccaccatttatattaaatattctctattattcaatcaatggtaaatatatacttagaatagatattttataaatatctggggggataaaacatagtttaactgctcactttatactcaaactttggagaacaacrtttgatttcttagccataaatatataacattattctctggaaatatttctccaagaactaacaatataaaaacttttctatgaaaactataaagcattgctgataaagtacacaataccttttaaattacggttttcaggaaatctagcttatattgacattagaacttttttctaagcacttctttttacattattcaaaataaatatgttaatttaaaaaatgatgatttcagaaaacaaatgcgcaa

SEQ ID NO: 503550 - DNA, 628 bp, Homo sapiens
aggctagcccatgaccttctattccttcttccagattcacttatcagccattcctcttaacttatgcagaatgagtaaggaagtccagggagaggccagtggtattactccagcaaaggccctttgatatggagacatgaggtaagggaaaatgaaagctcctccataatagatattttatatgacaattctaaattagtgactgtgagtgtaatatgaaaaatacatagaattccatatttcccaaaatttatatatggaacatttctatatttataatcaggaaaaaaagaatattaaaaaaagttttccttctggccacgwtggaggaactaggaatagacttgccttctgctgtaaataaccagactggataaaatatatcaaataactgttttcagacattagccaatgggcagtgcaggactgtaatgtctgagaaaagggaaaccaatgaggtgagctttatggttgtccactttcttcctggaggttttgctgaattaaggagacaggtgtcagatttcaaagagattaaagaggctaaaatttgtggattagaatactggagagaaagagctctagcaaactggctaactatttgtcaagttggctgctgattaatcag

SEQ ID NO: 503551 - DNA, 585 bp, Homo sapiens
agtgtctgaagattatattataatttctaatgagtaacttgagtctggaaataagaaaatacagattatttttgctaccaactttctgagtatgtgtctttggccaagccacttcacttgagctcaatttttttcatctattaartgagattgaatgaaatgttctttttaattttctgaattttcaaatttctggttctagtgaaatatctcagtatgtctggttctccaagtttctgactctagtgaaaatttttagaaaatgtaaagcagtaaactttacagttgcaagtaagtacaattaatataatgcaagcaaaagatataagtattgacagaacataggacttctagatgtgcatagagttaattggaaagtcttcagaacagatgtgacatattttgaaagcatatcaagtgagataatgagtaagtggagggcaggagaagtgtgttactaggataaaaaagtatgtataggtggcagtcagttgaagaccacaggcagatttgattgactgaagtgacgacttcatgctgaggaatactaggaaatgaggcttttgagactgtgaagagtagaat

SEQ ID NO: 503552 - DNA, 671 bp, Homo sapiens
ctgaaaagactctcaagtagtcctcatgggcatgtgcccagtaatgagcttagagacctgatccaagttgttataacagttgcttcacactgtcatccatgcaatagttagaagctcttctctgctctttctggcatggcctggtcttgtgtagcaaacaagttaagcttctctaagggctacgaaatgagatcagaggaaaccatcataggcaataaaacatgttgctcatctagagataaaccttttaaaawatataatgtataatatttcatattaagtctgcatcagagttaatgaatcattcttctcttaatagagatcaaagtggtacacacaccttttttgaaaagcttttttttcttgatattttgctcagttaacaagtgtgaggtaaaattattgttattagtttctattcaacctcattgaattcagttttctctcagtttttaaaaattcttttaatgaaatcaaagcacagaagttagagatctgataatagatgggatggatcttgagaagttacaggttttactcccctgcctttaattattttatatttaaactatttctaatactttcaaatccatgttgagctaatactactcgtctgggttttggtagagccacaagctcctatcttcttctttgttagtaaatataaacaa

SEQ ID NO: 503553 - DNA, 647 bp, Homo sapiens
gaggcctgggctgttgtgttttgaaaagctgtgaaaatgccttaggtggttttaatgtggcattgcctttggaaatataatgactagaacctagtacagtttgtttcacatggaagactgttgccctttttagtatatttacaattgagtaagattttaaaagtcagggygattttttttgaagagaaaagcatgatagtttcctgactaaacatcttcagtgacttctcatggcactttgaataaaatccaagtcctacatgttctagcccagggccacctctccaatgtcttttaccactctcttgctgccttagtctgttctcactgctataacaaaatactgaaactgggtaatttttaaacaatggaaatttattgctcacagttctggtggctgggaaatccaagatcaaggcatcaacatatttggtgtctagtgagggcttagtctctgcttcaaagatgatgcagtctatctgtgacctcacatggtggaaggcatgagaaagctccctcaagcgcctttcataagggcactaatccaacctcttaaaaattccacctctaaataccatcacattgagggtttcaacagatgaattttggaggtagaggcacaaacattcagattatagcacttgccc

SEQ ID NO: 503554 - DNA, 609 bp, Homo sapiens
atagtagcaattggtgagtttaagcaaaagatatatagtagtacttgcaactgtcttgtaagtttgaacttttttcaaataaagttaaataaaaaactttataccctcactcactcccaacatgcaattctccctttcagaattcactcttggggagacacarcatggtgaagagtgatgatatcatctctaaagtatgttccaacagtaaaaattttttatttatttatttttcttttttttagagatggggtctcgctacatgacccaagctggtctcaaactcctgggctcaagcgatcagcctgcctgggcctcccacagtgctgggattacaggcatgagccaccgtgccaggacaggacttttgatttctatgtatctgcatttctctgtaatatcagtcctgatccaataaaacatacaaagaaacatactgataccttcaaagccacatatacaaacactgtaaagagatccctttgccggaaattttaaaaagaccgataggctgggccaaagggacagttttggggagattggtgatgatgaagaagttttgtcaccttgaattgtagtcggtcctattctgaaatgcatgactggggc

SEQ ID NO: 503555 - DNA, 609 bp, Homo sapiens
atagtagcaattggtgagtttaagcaaaagatatatagtagtacttgcaactgtcttgtaagtttgaacttttttcaaataaagttaaataaaaaactttataccctcactcactcccaacatgcaattctccctttcagaattcactcttggggagacacagcatggtgaasagtgatgatatcatctctaaagtatgttccaacagtaaaaattttttatttatttatttttcttttttttagagatggggtctcgctacatgacccaagctggtctcaaactcctgggctcaagcgatcagcctgcctgggcctcccacagtgctgggattacaggcatgagccaccgtgccaggacaggacttttgatttctatgtatctgcatttctctgtaatatcagtcctgatccaataaaacatacaaagaaacatactgataccttcaaagccacatatacaaacactgtaaagagatccctttgccggaaattttaaaaagaccgataggctgggccaaagggacagttttggggagattggtgatgatgaagaagttttgtcaccttgaattgtagtcggtcctattctgaaatgcatgactggggc

SEQ ID NO: 503556 - DNA, 553 bp, Homo sapiens
ctgcagttttcattgtgcggacggggtatgtctcaaaaatgtatatttatttattcgttattataaattcagggggtacatgtgcagatttgttacrtgagtgtattgtgtaatgctgggtttgggcttctagtgaacccatcactcaagtagtgaacatagtacccaatagacagttcttcaacccttgcctctattactccctccctgcttttgatgtccccagcatctattgtttccacttttatatgcttgtgtaccattgtttaccttccacttataaatgagaacatgtggtatttgaattgctgtttctgtgctatttaatttaggataatggcctctagctatgtcgctgcaaaggaaatgtctcaatcttttttatggctgcatagtattccaggatatatatatgtatacatatatatatcacattttctttatcccattcaccatggcacctatgttgattccatgacttggagcaggtgtctctctttttaaatttgtttatttataatttttgtggtacatagcaggtatatgaatttat

SEQ ID NO: 503557 - DNA, 553 bp, Homo sapiens
ctgcagttttcattgtgcggacggggtatgtctcaaaaatgtatatttatttattcgttattataaattcagggggtacatgtgcagatttgttacatgagtgtattgtgtaatgctgggtttgggcttctagtgaacccatcactcaagtagtgaacatagtacccaatagacagttcttcaacccttgcctctattactccctccctgcttttgatgtccccagcatctattgtttccacttttatatgcttgtgtaccattgtttaccttccacttataaatgagaacatgtggtatttgaattgctgtttctgtgctatttaatttaggataatggcctctagctatgtcgctgcaaaggaaatgtctcaatcttttttatggctgcatagtattccakgatatatatatgtatacatatatatatcacattttctttatcccattcaccatggcacctatgttgattccatgacttggagcaggtgtctctctttttaaatttgtttatttataatttttgtggtacatagcaggtatatgaatttat

SEQ ID NO: 503558 - DNA, 445 bp, Homo sapiens
tttggctttcatatgtccatctgcaaatctctccttgagccactttttgaatccgaatcatgaagtttttcattttcaggatctgcagagatagttgcaacaagggttacagctaaaattgtaacccttgtccctgctggcattaaatctctggggctggcagtgtcatctgttgaaaatgatcctgaggagaccactgaaaaaggtgagcagaagcagtgtctgtcctctccgctgctgggatcttttggtgaggctgtgaacaatcaccgtaggccaccttttcacactgtgaccttctcatgggggtgtgaygagaagacatcatccccctgactgcatgagcaccttgaggctcagaggagatgtaagctgcctgtagccactcagccactgggaggctgagcctggggggaggagccactgtcttctgagcccctgacct

SEQ ID NO: 503559 - DNA, 587 bp, Homo sapiens
gtccattagctggacaagtccatgtcccccagcagcctctccctccagtcaatcttctccatccccactgcccctacctttgttccctgaagccctcatcatgacaccrcatttcccccaactgccttctgaccggtcccctatcagccacactgcccaaatgtgcatctgaacatgactgactcactggtaaaaatgctttctcggcttctcatggttttcaaagtaaaatccagctcctgggacaacctgcacaacatgccatggcctgggcaaggcccagcctgcagcctcatctttgccattctctcacccgtgccatgaatcctggcccagctcagcttcctcccacatgctcctctctctatctggaatgtcttttccatagttgtcactggacaactactttgtaccctttaaaacttctccagaactctcttcctgacaggcaggcctccttcacaagccagagttgagggggaagtctcactccactgtgtccaggagcccctgtgctcaccgctgccagattcattccacttggttgaactatgcctagcccattgtcttaatacatctgggctgcc

SEQ ID NO: 503560 - DNA, 587 bp, Homo sapiens
gtccattagctggacaagtccatgtcccccagcagcctctccctccagtcaatcttctccatccccactgcccctacctttgttccctgaagccctcatcatgacaccacatttcccccaactgccttctgaccggtcccctatcagccacactgcccaaatgtgcatctgaacatgactgactcactggtaaaaatgctttctcggctyctcatggttttcaaagtaaaatccagctcctgggacaacctgcacaacatgccatggcctgggcaaggcccagcctgcagcctcatctttgccattctctcacccgtgccatgaatcctggcccagctcagcttcctcccacatgctcctctctctatctggaatgtcttttccatagttgtcactggacaactactttgtaccctttaaaacttctccagaactctcttcctgacaggcaggcctccttcacaagccagagttgagggggaagtctcactccactgtgtccaggagcccctgtgctcaccgctgccagattcattccacttggttgaactatgcctagcccattgtcttaatacatctgggctgcc

SEQ ID NO: 503561 - DNA, 594 bp, Homo sapiens
tgttacaagcagcagcccggtgatgctgcacaggccagtctcgtgtaacttgtctatagccactgagctgaaacctcaggctttcctgactactccatgagttacccagttatcatgtcctgaattcctttttggcttaaatcagtcagacttgctttctattgattgaaatttagaactctgactaayacataccatgtatttaatgaagattaattgaacttatatcatgtgcccggcactaggggctatcagatgctacggaaacgatattgaacaaatgaagatgaggttgctgcctacatggaacttataggctagagatggagatattaatagaataataatgaaaatacgtttgatattaattctgttgtcttttccacatttacagttccttgaagttcatgacattactttctcctggcattaaagcaagagtatttaaatcagaaggaaagaggcaaaatgttattcatgacttaggggagaggtgaattagacataattagtattttttaaaatacttttctgcattttacagtttctctataattggcatgcatgtcttcttaaaacatttccattagacag

SEQ ID NO: 503562 - DNA, 594 bp, Homo sapiens
tgttacaagcagcagcccggtgatgctgcacaggccagtctcgtgtaacttgtctatagccactgagctgaaacctcaggctttcctgactactccatgagttacccagttatcatgtcctgaattcctttttggcttaaatcagtcagacttgctttctattgattgaaatttagaactctgactaacacataccatgtatttaatgaagattaattgaacttatatcatgtgcccggcactaggggctatcagatgctacggaaacgatattgaacaaatgaagatgaggttgctgcctacatggaacttataggctagagatggagatattaatagaataataatgmaaatacgtttgatattaattctgttgtcttttccacatttacagttccttgaagttcatgacattactttctcctggcattaaagcaagagtatttaaatcagaaggaaagaggcaaaatgttattcatgacttaggggagaggtgaattagacataattagtattttttaaaatacttttctgcattttacagtttctctataattggcatgcatgtcttcttaaaacatttccattagacag

SEQ ID NO: 503563 - DNA, 599 bp, Homo sapiens
gcccggtgatgctgcacaggccagtctcgtgtaacttgtctatagccactgagctgaaacctcaggctttcctgactactccatgagttacccagttatcatgtcctgaattcctttttggcttaaatcagtcagacttgctttctattgattgaaatttagaactctgactaacacataccatgtatttaatgaagattaattgaacttatatcatgtgcccggcactaggggctatcagatgctacggaaacgatattgaacaaatgaagatgaggttgctgcctacatggaacttataggctagagatggagatattaatagaataataatgaaaatacrtttgatattaattctgttgtcttttccacatttacagttccttgaagttcatgacattactttctcctggcattaaagcaagagtatttaaatcagaaggaaagaggcaaaatgttattcatgacttaggggagaggtgaattagacataattagtattttttaaaatacttttctgcattttacagtttctctataattggcatgcatgtcttcttaaaacatttccattagacagattggactttactctccag

SEQ ID NO: 503564 - DNA, 529 bp, Homo sapiens
tgtactgaatactgtaggcagttgtaacacagtggtaagtatctgtgtacctaaatacgtaaaawgtaatatgttgcactaggatgttatgacaactacaacatcattaggtaatggggatttttcagctccgttataatcttatggggccaccatcgtatatatggtcgtttgttgactggtgcatgactatacatgtataaatacatatacatatatctatcctcaattacaagtgcttatttagttgtttagagaactgtgggttctcaggaacagagaccctttataaatatcctgacattcatccctactccaacagccaggcacctgatgcttgttagacgcttaaatctacatggaggtgaattaaaaggaatctgtttgaaggtaatgggaggctgtagtgacagcttggttatgatttctgtccaacagctcccagaaacacaactgataaatgcaaacccttgtcaaaaatgacagtgtctgctgagctatacgttccaagcaagtgtttctgaaatgt

SEQ ID NO: 503565 - DNA, 532 bp, Homo sapiens
gtacataaatcaaataattggaaaaatgacattctttttccccctccaggtatcttgatgtgctgagtgatgwtactggcccccaagtgtcttgttatattacagcaccatcatatgttctacaacaactagaatgccggataataaatcacatgagttctttaatagtgggtgataatgaagagttagttagcaacgtcataactattgaatgctcagataaggaaaagagagttccatttccaataggcattgcaattccatttactgcacgttacagaggaaattacagagatatcatggtgaaagtgtgtgacataaaccttcaatcaagttacctaaacccaaattcactagaaggaatgaagggaggttataaggttagtaaattcttggctatatctacatttgctgtttggctcctcttataaatatcactcagactaacagattgtagtgtagatataattgctccactagtaataaatggaaggacttttgaatttgtgccagtgcgttcacagtttattgc

SEQ ID NO: 503566 - DNA, 481 bp, Homo sapiens
ttttgcagtttccttttacattttattttttcctttttaaatttcttccttccttccttttttcatctcttcatttcacccttatgtaatgtaaaatcttctaccttttattgaacacccattctattcatgttttctaattatcattatatttttgaaatacaggaatttcccaccctcaatgatgaaggtaacttgcttaaaaatttaagtagctttgtcaatatcacacagctcatgagaagcagagtcatgcaaatcttggttcaaatttgtatttccatagatataaaacagcataaaakttgcttcttccttatgaggctggctaaattgtgaactctgccaatgtgggctcttgaagcttccatgtgacttcaggccattctttctttctttttctatttagttgagtgacaccgctaggctatagattgaaaatttccctctggctcattaggtatgaaaaagtttaagaaga

SEQ ID NO: 503567 - DNA, 482 bp, Homo sapiens
attagatgaagtccacccacattatggaggacaatctgttttattcattctactgattcaaatgttaatctcctccaaaaatgccctcatggacatacccagaatcaaatatgaccaaatatctggacctcttttgacctaatcaaattgacatacaaaattgatcagcatttaggatgtctttctttacagcttagataggatggtgggaaaccagctcacttggaatatatctgtctcacataaacttataagtaaatatatatcatatatagtaaataatcttcatgtaggcaactttacaaagttttgataaacacacagcaccctgtcaatcccctgtaattttatctccaacctaccattcatagcccatagatcagaccatcatcttcctctcctcataaagcaaattcttctttaattatcataagagcatggttttaaaatatatakttatttaatgttttaaaaaatacaag

SEQ ID NO: 503568 - DNA, 561 bp, Homo sapiens
gcgcccctcccccagcctcgctgccaccttgcagtttgatctcagatggctgtgctagcaatgagcgaggctctgtgggcgtaggaccctctgagccaggtgcaggatataatctcctggtgtgccatttgtgaagcccgttggaaaagcgcagtattagggtgggagtgacccgattttccaggtgccgtctgtcacccctttgtttgactaggaaagggaattccctgagcccttgcacttcccaggtgacgcggtgyctcgccctgcttcagctcacgcacggtacactgcacccactgtccggcactcccctgtgagatgaacctcgtacctcagttggaaatgcagaaatcacccatcttatgcgttgctcaagctgggagctgtagactggagctgttcctattccaccatcttggctcccgtgatctttttattgaatattttgatttactttctgcctttccttataattgaaggccaaaaaaaaaaaaagaccccttctcacctttctatgcaatttcctcaaaaactttcaacactgtcttcttttgtcct

SEQ ID NO: 503569 - DNA, 531 bp, Homo sapiens
aatcatatgggagagtacctagcaataggatccataaaacaacatktcagattaaagatgacaattctttctggaacactgttgtattactcttataagagttactgtatgccactaaaataatccttgagccagaatatttattgaaaaactaatcggtggaagaaaagagaagaggataggcacaggtcagcactcataatcagcagtggatacaactccatgctgaagaagaccagagccttgttgatgaccagttgcctcctcaggtctcatccaagctctcttcccttgctagtagacagagacatgcttaaaaattcagaggtatatttttctcatttccctccaccaaagctgcattggaaaaactgcattttcttctatttgctttatctgtttttctcttattaactcctaaatcgtttttttcctcctaattcttactaataatcgttaaaactcatttgaccctcatatgaggcattatcattggtaaaactgcctcaacaccagacttcatagactaag

SEQ ID NO: 503570 - DNA, 531 bp, Homo sapiens
aatcatatgggagagtacctagcaataggatccataaaacaacatgtcagattaaagatgacaattctttctggaacactgttgtattactcttataagagttactgtatgccactaaaataatccttgagccagaatatttattgaaaaactaatcggtggaagaaaagagaagaggataggcacaggtcagcactcataatcagcagtggatacaactccatgctgaagaagaccagagccttgttgatgaccagttgcctcctcaggtctcatccaagctctcttcccttgctagtagacagagacrtgcttaaaaattcagaggtatatttttctcatttccctccaccaaagctgcattggaaaaactgcattttcttctatttgctttatctgtttttctcttattaactcctaaatcgtttttttcctcctaattcttactaataatcgttaaaactcatttgaccctcatatgaggcattatcattggtaaaactgcctcaacaccagacttcatagactaag

SEQ ID NO: 503571 - DNA, 531 bp, Homo sapiens
aatcatatgggagagtacctagcaataggatccataaaacaacatgtcagattaaagatgacaattctttctggaacactgttgtattactcttataagagttactgtatgccactaaaataatccttgagccagaatatttattgaaaaactaatcggtggaagaaaagagaagaggataggcacaggtcagcactcataatcagcagtggatacaactccatgctgaagaagaccagagccttgttgatgaccagttgcctcctcaggtctcatccaagctctcttcccttgctagtagacagagacatgcttaaaaattcagaggtatatttttctcatttccctccaccaaagctgcattggaaaaactgcattttcttctatttgctttatctgtttttctcttattaactcctaaatcgtttttttcctcctaattcttactaataatcgttaaaactcatttgaccctcmtatgaggcattatcattggtaaaactgcctcaacaccagacttcatagactaag

SEQ ID NO: 503572 - DNA, 591 bp, Homo sapiens
ctgtcaatccattgtgcttttggtagcaggtcctcttgcggggagctctgagtgacacaactccatggcctcttaactgcgttctttaatgcttcattcatgtgccaccccctcttcaaagctctccctattcacccaacctggcaataaactcttcctctaaaacttttggcactttcatcttgtgttttgccttttcatgtatcatattaaattttagtttaattgtgtatgagaaagttcatgatggggctggggcactctgwcctgcatgcttatattggctattctcaaatttcggaactcacaatgacctctggacacccatggcctttgcaaagaaaatgcaatgagaactttgacaaagagatcattgaaatgcttttggtgccatcctaacgaatactgctcttggtatcctgagtaggcatactgagtaaaggcaaaacatatgcccctccgtgtacggtgttcaggattggttgggaaggatatttttaagtggcacatagtgtgtggccacttgctgtcccttgagggacttgttcttaatccttggcagacaggatatcacactggaaggaccagctt

SEQ ID NO: 503573 - DNA, 611 bp, Homo sapiens
tggaggctgtcaatccattgtgcttttggtagcaggtcctcttgcggggagctctgagtgacacaactccatggcctcttaactgcgttctttaatgcttcattcatgtgccaccccctcttcaaagctctccctattcacccaacctggcaataaactcttcctctaaaacttttggcactttcatcttgtgttttgccttttcatgtatcatattaaattttagtttaattgtgtatgagaaagttcatgatggggctggggcactctgacctgcatgcttatattggctattctcaaatttcggaactcacaatgacctctggacacccatggcctttgcaaagaaaatgcaatgagaactttgacaaagagatcattgaaatgcttttggtgccatcctaacgaatactgctcttggtatcctgagtaggcatactgagtaaaggcaaaacatatgmccctccgtgtacggtgttcaggattggttgggaaggatatttttaagtggcacatagtgtgtggccacttgctgtcccttgagggacttgttcttaatccttggcagacaggatatcacactggaaggaccagcttatctttgtgttcta

SEQ ID NO: 503574 - DNA, 588 bp, Homo sapiens
aatagatttctctatttgtgtaatgagacagtagtgctatcaatatgattattgaaatattaaaataagatatctacaaattttaagggccatataaatattatctagtaytgttttggtaataattcttctctaaagattgaatgtaccaaaggtttccaggatttaaataatgggcacattttctcttcagaaaaaagatgttaccacacaataaacattttctatttcaaagtaaaagctctttgggtttaattccaagatctcccatgagagaccataatttaaaaatgaatatgacagggaactcagaattcttttaattttccatcaattatgtataatataaatgtgcatataagcaagtattgcagtagaaaaataatactttatcctcatttttctagagtgtcaaaaatgataaatttgaatatttgtggtaaacactcagcgaaaatgtcagaaacattacttcctcaagccagcatctcattgtcagctttttgtaatcagtttaacttttattgaggaaaaggaacaatcacaaatcagcctttttgtgtcctttgaattcttatggctgcaaat

SEQ ID NO: 503575 - DNA, 460 bp, Homo sapiens
aggtttggttctcataatgaactttgcagtcccaaactaccaaattaaaatggaaatcttttctgctcttcaggtacagaagcaattgctacatcttaaattgggggcagatcacctagataaaataaaatgctggggaaaataaaattatatgcaagttctctacacaagtaatggtggtctgaacatatatctttttttcatcaactttcaagttccggggtacatgtkcaggatgtgcaggttagttacataggtaaatgtgtgccatggtgatttgctgcacagatcaacccatcacctaggtattaagcctagcatccattagctattcaagactgaaccaggaagaaattgaatccctaaatagaacaataacaagttctgaaattgaggcagtaataaataccctaccaaccaaaaaaaaaaaaaaaaaaaaaagtccaggaccagacagatt

SEQ ID NO: 503576 - DNA, 238 bp, Homo sapiens
taaatgtggtgggcaagagccactttccaaatcgccaaggtggtcaaaaaaacaaaaaaacttagagagggctgagaaagaaggtcastcaaggaagagcagaagagaagaaattttatttacttttttttctgagacagggtcttgctctgtcacccaggctggagtgcagggtggggccatcatggctcactgcagtcttgacctcccaggctcaagcgatcctcctgcctccgcc

SEQ ID NO: 503577 - DNA, 632 bp, Homo sapiens
aagtcacaaagatttaaaaaaatgcagtccaaaaaggtaggaatgaaaggcttcagcttggccttcagtgagctgcacttggagtattgtcaygatgctctcagttgctctattttaacataggctaaacaggtagaacagaaaggtccagagaaataaatcaaaaactaatgaggttcctgatggtccattttataagaaaagatggagaatatgaagatttgaatctgaaaaacataacactaagcagatatcaaaccttccattcccccacccccaaactgacaaaatgtgccaagggctaaacatgaatttgttaccaacactagaaactggaactaagaggacagggtcttcaaactcaagagagaatttcttttaacttgagataaaagtattcacagaacaagtaatcagccatggaagttgttatatccagagcagcagtataggctaaaaatatggaaaggtcaagaagggtttagctcaatttatagatacaggatctgtaacctgttattaaggaaatgagagtgtctggtgctgaggcttgacaaccaagcacacaggcaggcattccaatgacatgtctcctggtgccatcaccagagacaggctcctgggcagatggg

SEQ ID NO: 503578 - DNA, 592 bp, Homo sapiens
ctgcctctattaaagaaaattttttaaagaaaatctacaaccgtggaatataggaattcttttacattttttttttaaatggggaaactgaagataaaaggtgaagtgacttgcctaagttcaaacagctagcaggtggcaaaactgagctttgaaggttggttgtatgattccaaacccagagtgtgttttyacgtcattacagttggagagctgatcaatatgaggcactgttatcattattagtaatcagcattacacggaaggaaaggaaagggttggggacggtgttttcaatacagaggaggctgtggggagggaacgggtgaggctgcgaggaagaaaagggcatccttgagtcttggagcatctaagtctgcccctctcttacctctttggccccatctagttgttttttttaagccaacgcccattgtggtggcctttgaagggaggaagttgcacataaggagtacctacctgtttggtgccaagggctcaaactccacccgtttgccccgtgcccacagcgttggtgccacaggcagcgttacatgaggctccggccgctgctggccaggtctcctgccca

SEQ ID NO: 503579 - DNA, 592 bp, Homo sapiens
ctgcctctattaaagaaaattttttaaagaaaatctacaaccgtggaatataggaattcttttacattttttttttaaatggggaaactgaagataaaaggtgaagtgacttgcctaagttcaaacagctagcaggtggcaaaactgagctttgaaggttggttgtatgattccaaacccagagtgtgttttcacgtcattacagttggagagctgatcaatatgaggcactgttatcattattagtaatcagcattacacggaaggaaaggaaagggttggggacggtgttttcaatacagaggaggctgtggggagggaacgggtgaggctgcgaggaagaaaagggcatccttgagtcttggagcatctaagtctgcccctctcttacctctttggccccatctagttgtwttttttaagccaacgcccattgtggtggcctttgaagggaggaagttgcacataaggagtacctacctgtttggtgccaagggctcaaactccacccgtttgccccgtgcccacagcgttggtgccacaggcagcgttacatgaggctccggccgctgctggccaggtctcctgccca

SEQ ID NO: 503580 - DNA, 592 bp, Homo sapiens
ctgcctctattaaagaaaattttttaaagaaaatctacaaccgtggaatataggaattcttttacattttttttttaaatggggaaactgaagataaaaggtgaagtgacttgcctaagttcaaacagctagcaggtggcaaaactgagctttgaaggttggttgtatgattccaaacccagagtgtgttttcacgtcattacagttggagagctgatcaatatgaggcactgttatcattattagtaatcagcattacacggaaggaaaggaaagggttggggacggtgttttcaatacagaggaggctgtggggagggaacgggtgaggctgcgaggaagaaaagggcatccttgagtcttggagcatctaagtctgcccctctcttacctctttggccccatctagttgttttttttaagccaacgcccattgtggtggcctttgaagggaggaagttgcacataaggagtacctacctgtttggtgccaagggctcaaactccacccgtttgccccgtgcccacagcgttggtgccacaggcagcgttrcatgaggctccggccgctgctggccaggtctcctgccca

SEQ ID NO: 503581 - DNA, 546 bp, Homo sapiens
acaggattcagctcactaagagtaacagacacattcccagagagacaacgcccattgcagcatcaagttcagaagacaagggtgaggttgggggccaggctgggtctgggaatgatgccccaaatgaccacttgaatagtgagaggccttcaagaggtggcctgctcacctatatttcaatttggatctttaaggtatagcctctctcttcagtatgcactcctcatcattttcttcttctgcagtgtacattgcaataaggttctacttacacatgccttgagaaaattctcaactcatgttgatcagtttaactttctatatcttatttatttgcatctgaaaataccaaactagcagtgccaagttgcctgctttccctctggacttgctcatgtgctcaaagttaatttgaagctggcaacacattcagagaatgactgaagtttaggccaggtgcattggctcacacctgtaatcccagcactttgggaggccaaggcaggcrgatcacttgaggtcaggagttcaatacaagcctcggcc

SEQ ID NO: 503582 - DNA, 502 bp, Homo sapiens
gttaggtaatctggggacgggcagcctgtctgccaggactggagatgggaagagggcacatgcggagcacctgagaggggaacaacctgcctctgtaaggggtcyggctgggagcggggtgacttacagattcgtgttcagaagaaacagcgcattctaaatgctttgattcagaaagcaaatactcctggtcactgtctctcaggccagaagaaatgtcagcagacatcttgttaatttttcatcctcaggcagactaagataataattaacatctgtatggccctttatagtttataaactatttcatagacatcatctgaccctcatagatctcataaggttggcattatcatccaattttatagatgaggaaattgaggctcagagaggtaaaatgactagctaaagattgcatcctaatagctaactgcaaaggcaggactccaagcctaatgagtccagcctcctcatccatgcacttattcttcttcaccagcca

SEQ ID NO: 503583 - DNA, 502 bp, Homo sapiens
gttaggtaatctggggacgggcagcctgtctgccaggactggagatgggaagagggcacatgcggagcacctgagaggggaacaacctgcctctgtaaggggtctggctgggagcggggtgacttacagattcgtgttcagaagaaacagcgcattctaaatgctttgattcagaaagcaaatactcctggtcactgtctctcaggccagaagaaatgtcagcagacatcttgttaatttttcatcctcaggcasactaagataataattaacatctgtatggccctttatagtttataaactatttcatagacatcatctgaccctcatagatctcataaggttggcattatcatccaattttatagatgaggaaattgaggctcagagaggtaaaatgactagctaaagattgcatcctaatagctaactgcaaaggcaggactccaagcctaatgagtccagcctcctcatccatgcacttattcttcttcaccagcca

SEQ ID NO: 503584 - DNA, 560 bp, Homo sapiens
ttaccccagaatctgatacctgccctcaatacttgccaactgagccttctaactgtgaatactgacttctgacactgccttgcagagcacttggatctgatactcttgacagagggggagctgtgcccaagagcgcccatcagataagtccgacctcctcttcctccyctggctgcctgccctgcaacttcttccatctgatcatctgattcctccacaactcttagccagccttaggcaccaagttcacatgaattaacatctacatatgaacagcctcacaggaggccagagctggctggcaaaaaatgtaaagctggagcatatctacttggcacagtttcaagggcaccgtgaagtcctgccaactcctgtgcaaaaactgtctttctctcctcccctcaacactccctgcacctgctgctaatgcctggaattcctccatcagaaagtgatttcatttaattaggtaatgtcccttaacatgaaacacctcaaaccagactatgattcccttccaaatgcaaaaagatgagatgcaccacacaagtgacatgcag

SEQ ID NO: 503585 - DNA, 482 bp, Homo sapiens
tgcctggcattcaatgcaccttagttgtcatgataagtttttgctattatatcatttgccatagattatccagcaaaataactacacactcccacaagtccagttgagagacccatctgcagagacaaaatcaagcacagcaattcatttgccgcaaaaggctaacgttccttggatccccaggtgtgggtcgttttcatcaggagggactcagcttcaagggaagatgagacttcctgacctagacctggcctcctagcctgaggctgggtaaaatgtgcactccctccctgctggggctgccacatgtgcaacttcrcaggagcaaacccaaggtggaaagccagagagcagtgtcagagtcaatctgtgatcccgaagtgggaggtggaagcattcagggtaagaattgcacaggactgggggttgtctcgactataggacagattagtggagatttaactaaaaataggagatgaaga

SEQ ID NO: 503586 - DNA, 482 bp, Homo sapiens
tgcctggcattcaatgcaccttagttgtcatgataagtttttgctattatatcatttgccatagattatccagcaaaataactacacactcccacaagtccagttgagagacccatctgcagagacaaaatcaagcacagcaattcatttgccgcaaaaggctaacgttccttggatccccaggtgtgggtcgttttcatcaggagggactcagcttcaagggaagatgagacttcctgacctagacctggcctcctagcctgaggctgggtaaaatgtgcactccctccctgctggggctgccacatgtgcaacttcgcaggagcaaacccaaggtggaaagycagagagcagtgtcagagtcaatctgtgatcccgaagtgggaggtggaagcattcagggtaagaattgcacaggactgggggttgtctcgactataggacagattagtggagatttaactaaaaataggagatgaaga

SEQ ID NO: 503587 - DNA, 522 bp, Homo sapiens
tattattaccactagcaactttgtcctagaatattttcagtttcacagatcgataatgaatgatggaaaaaaaaaaaggaaagactcaagaataaaaatattttaagtatttcaaattctagatgtgggatcctcaaaataattaagtgaatttctaagaaagagtaaattccatcacctaaatgataacttccccattcaccccaatacaaggtccaggaatatccccaggggagaactgctctgaaatacagaagtcacagtcagctctgccccttccctagggttatgatatcccctggcgcttttcatgatcctcaccaaccactgcrtctcacactaggcttcttggacccactgatattttatgacctggcctctttatggtctctgctgggaataccaaggaatgatggtcttcttctttttcccatacacacaaattaagtcaatgaatgaaagtttcttgattctaggtgcttcttccactaatgtttctcaagcatctagggcttgctacca

SEQ ID NO: 503588 - DNA, 598 bp, Homo sapiens
agaatgagacagatcggtgagtttaagaaacttaagggacataagatgtctaaagcatagagttcaagaggaagggcggcactttacaagactgaaaagttgggcaagggccagatcctgcaaatgcttttcattttttaagcacctaaatttccttaagagcatttgttttctataaaagcaatatgacaagccaagtccacaaaccacaacatgataaatcctataaatctttcaaagtataatctcacatcttctgcaaagtctccctctgctattcyatccccctctcttctggtacttattctgtccaccattcaatgaacaaattaatccctcagcgcctgttatccagctaaaactgctcttgctggtcattgtgcataggtggcatctgaatggaccaaaaatggacaccttgacccagggcggcccacccacaggctgccagccacctgtgcagaggcttgctttaaagattctgggcatgatggttatttagctaagctaatggaatcagaagaactgaagaacacctcaaaggttggcagaagagtgaaaggagaacagagcagaccatgggagacagaaggagcag

SEQ ID NO: 503589 - DNA, 598 bp, Homo sapiens
agaatgagacagatcggtgagtttaagaaacttaagggacataagatgtctaaagcatagagttcaagaggaagggcggcactttacaagactgaaaagttgggcaagggccagatcctgcaaatgcttttcattttttaagcacctaaatttccttaagagcatttgttttctataaaagcaatatgacaagccaagtccacaaaccacaacatgataaatcctataaatctttcaaagtataatctcacatcttctgcaaagtctccctctgctattctatccccctctcttctggtacttattctgtccaccattcaatgaacaaattaatccctcagcgcctgttatccagctaaaactgctcttgctggtcattgtgcataggtggcatctgaatggaccaaaaatggacaccttgacccagggcggcccacccacaggctgccagccacctgtgcagaggcttgctttaaagattctgggcatgatggttatttagctaagctaatggaatcagwagaactgaagaacacctcaaaggttggcagaagagtgaaaggagaacagagcagaccatgggagacagaaggagcag

SEQ ID NO: 503590 - DNA, 564 bp, Homo sapiens
catagtactctgtcatgtgtgtgtaccatagtttattcaatcagtctccagttttggggcactaagattgtttccattatgttacaattacagatgatgctgtaatgaataatcttctgcgtatatatttttgtattgttggaggtgtgtcttcagggtagattcctagaactgggattactgggtcagagggtaaagacattcccctacatggtagttgtaaccttctgaattccctctagcagtggatcagtgctggtttccatacagctcacccaacagaaggagtggtcagacttttgaatcttaatgctaatctgatgggagagaaatggyatctcagtgtaggtttaatttgagtttctcctgttatgaagttgaatgtgttttctatattaagatttgtttttatatttttgtcttttgtgacttatctgttttgccttttattcacttatttttatagggctttttatcctttaccctaatttttaaaaagttctttatatatgtatatacatgtaagtaataacatataaacatacataaaaattacataatatt

SEQ ID NO: 503591 - DNA, 592 bp, Homo sapiens
tctgcctgcacctttgatttatatctgtctgggatttacttgaggggaggggagagcacgttgaggggggaagcagacaagctcctctctgctccactgatttgctggctgtttaatttctgtttctgtcttcacacctactctgctgcagagctaggatgccctgcccccacctccacctgtcctcgtttcacccaccctttgccacaggcagtaaaatacagccctgaagggcccagaaagatgcaaggcgtaatccaaaagatgtatctcccaatccttgggagatactaaaatattcctgtaggatgcagaacctccagggtcaacaaggcccgatgggaaggcttttgcttgccactgacagatgtcacagagcttaggcccttccctgggcttctcctgacttgtggttaaggattctcttctgagccatctgagttcctgtgatgccrtcaaaatgagtaagttctctaaccttgggagaccatggcattagagaaaatggaaattgtttgcgaggctcgcagttcattagcctcatataaaatgaatttggaaccctctgaaaagaggagtttgggggcttcag

SEQ ID NO: 503592 - DNA, 412 bp, Homo sapiens
tgctggatgcctgtaaaaggacaattgatagttctgccccatccttcacctccatttgtgtgtagcatttgccagtgctgccatgttgtgcattctgctcagagaaggttcagtcttctccatgactcatgtgatattggggagaaatgatgcatttagtagtttctatgatgcccagtagcatgacataaagacctctgcccagttactctgcccagttaccattctgtagcagagacccatctccttgtaattcagaatatcccagagcgaatccttgtggatgttaacttactatgcataacttcatgcaattttaacagaagacactcctgcagrgaaccaatttttctccaggtccttttctcctctaccatcactctcatttccctcataccctgccccactgagg

SEQ ID NO: 503593 - DNA, 580 bp, Homo sapiens
ggggtcagcctcaggcacaagtgggctgtgarttcgcattttatagataacactcagacaattaatgaataaaataccagccttgcccttgtcacctgggtcctctcctcttctctcctctttgcccactgctgtgggctcctttggccacaggggaataaagaaaggaagacttgacaggtcactttgaaaaagtcattggtgtccaggaaaaaaaaaaaaaaaaaggcctccaacaaaggaaagagctggccatgaggaaaggcgagcaccttgcactcacaagcagaatccatggctttgagcttttctctacgcccttttttctttttatcaaacgcccagatggcatgtattctctaagtgagcaatattagaagtcgacatggatcttttcgctgagaaccttcctttcctgtttcttactctctagctttctcacagagaaagagcttacttgaatgcttttgtgggaggattaaaataaaatcttcatttctgaaatcattcctgcatattccccctgcagctagaatgcctgcggggtgagcatccgcagagcagcctttgattggccatg

SEQ ID NO: 503594 - DNA, 580 bp, Homo sapiens
ggggtcagcctcaggcacaagtgggctgtgaattygcattttatagataacactcagacaattaatgaataaaataccagccttgcccttgtcacctgggtcctctcctcttctctcctctttgcccactgctgtgggctcctttggccacaggggaataaagaaaggaagacttgacaggtcactttgaaaaagtcattggtgtccaggaaaaaaaaaaaaaaaaaggcctccaacaaaggaaagagctggccatgaggaaaggcgagcaccttgcactcacaagcagaatccatggctttgagcttttctctacgcccttttttctttttatcaaacgcccagatggcatgtattctctaagtgagcaatattagaagtcgacatggatcttttcgctgagaaccttcctttcctgtttcttactctctagctttctcacagagaaagagcttacttgaatgcttttgtgggaggattaaaataaaatcttcatttctgaaatcattcctgcatattccccctgcagctagaatgcctgcggggtgagcatccgcagagcagcctttgattggccatg

SEQ ID NO: 503595 - DNA, 499 bp, Homo sapiens
ggtcctctcctcttctctcctctttgcccactgctgtgggctcctttggccacaggggaataaagaaaggaagacttgacaggtcactttgaaaaagtcattggtgtccaggaaaaaaaaaaaaaaaaaggcctccaacaaaggaaagagctggccatgaggaaaggcgagcaccttgcactcacaagcagaatccatggctttgagcttttctctacgcccttttttctttttatcaaaygcccagatggcatgtattctctaagtgagcaatattagaagtcgacatggatcttttcgctgagaaccttcctttcctgtttcttactctctagctttctcacagagaaagagcttacttgaatgcttttgtgggaggattaaaataaaatcttcatttctgaaatcattcctgcatattccccctgcagctagaatgcctgcggggtgagcatccgcagagcagcctttgattggccatgccctggtctttcccttc

SEQ ID NO: 503596 - DNA, 590 bp, Homo sapiens
ttcccagccaagaagtggatttgccttgggaaaggactgttgtcatctttgttttaaactacaaatttcctcccaaagttagttcagcctacacccaggaaggaacaaggacagcttggaggttagaagcaagatggagttggttaggtcagatctcttttattatttcatttacaattttggtggtttccttatcaaataagtagcagaacattttcaaagacccagtccagtgggcttccttctacccagcccctggctttggtggttatggcagagctgagtgaaagtcaggaataagaatctgctccttgcacagagactcctgcaaaagttgttccaatggttttacttcagtcagacccactgaactagggtttagcagaatgtgggagaacttctgcacatttttaggcctgatttcctggcaaacagtggagctattgagtgagcacttctagsaaatgagaacagattgtgagaaacagtgcaaattgcaggaattaaataagctggtaacagcaggcctgtaacaggcgagaaagaaggaaaatggcaggaatgcgagtcctgcagagatgtgtatgtag

SEQ ID NO: 503597 - DNA, 505 bp, Homo sapiens
aacaagtttaatttgctgagtgctttgcattaaaatcactgaagtgagttgggctggccaattcccaaactctattgccaaaccgagaggcactttctcatccttcctttaaatggcaatgagccattggatcgctgaacttggacctatattggaaggaagaatagagtatgaaaaccaattttcccatggggttgaaaaggccagagtgacttaccatacttttccaactctagtttaaagtctgtaaataataatgtaactcacatttgtaaagagcttatataagccttagacatctgtcctatcttttttaaagaaaatatgggagcaaacaatttcttctattaaaacactaatatattgtggcacagaatgcaacactggcrtgatattttaagatagaattatcttcaaagaaactctgcattcgtgacggagtgcttagagctatatttccggaccattctctcacttatgtttgtaagtgaagttaatggaaaat

SEQ ID NO: 503598 - DNA, 640 bp, Homo sapiens
ggtcaatatagacataaatagctcaaaaggccgggcgcggtggctcacgcctgtaatcctagcactatgggagactgaggtaggcagatcacgaggttaagagatcgagaccattctggccaatatggtgaaaccccatctctactaaaaatacaaaaattagccgggtgtgttggcgcatgcctgtcatcccagctacttgggaggctgatgcaggagaatcgcttgaacccgggaggcagaggttgcagtgagctgagattgcgccactgtactccaggctggcaacagagcaagactccatctcaaaaaaaaaaaaaaaraaaaagaaaaagaaaaaaaagaaaaaagtcaagagagtatttacacataggtgactgagcatgaagagtgcactgggatcccagaaaagtctctgaatgtaggaatggataagattcctgcacagtagaccagggatgcctttttgttctctctctcaatctctttttctctctctctcagatgtacctgatttagaaaaagtattggacttaaaaaaaaaacaaacaatttctgagatccattccagccttacaattctatgcttccatgttttgtagtttctattgtttttattcatgaagagtttatgatcagt

SEQ ID NO: 503599 - DNA, 458 bp, Homo sapiens
tcagtgtcatttgcacatgaagtggaggtggggacactytggggacatccctagccatttgcccctcagggtgaatccagactcagcaaccttcctcccaacttcaggattaattcccagatgtcctttttttcaaatgtagggagtgcttctgggtggttttttttttttttttttttttcagacatcaggcacaaatgatccaagcagagcctgcagagtacattagactcggtctgaaggcactagcctgaggggaaagaatttccccatgtgaaaagtgtctttcttctacagattccaggtattgactctgccaggcatttatgaagatcacatgagttagacaaagcctttttggagagtgcatggcagagtgagctctttcccacttggcaaatgagaaaatggaagttcagggagattacataaattgctccactatcatgtgatgaaaa

SEQ ID NO: 503600 - DNA, 458 bp, Homo sapiens
tcagtgtcatttgcacatgaagtggaggtggggacactttggggacatccctagccatytgcccctcagggtgaatccagactcagcaaccttcctcccaacttcaggattaattcccagatgtcctttttttcaaatgtagggagtgcttctgggtggttttttttttttttttttttttcagacatcaggcacaaatgatccaagcagagcctgcagagtacattagactcggtctgaaggcactagcctgaggggaaagaatttccccatgtgaaaagtgtctttcttctacagattccaggtattgactctgccaggcatttatgaagatcacatgagttagacaaagcctttttggagagtgcatggcagagtgagctctttcccacttggcaaatgagaaaatggaagttcagggagattacataaattgctccactatcatgtgatgaaaa

SEQ ID NO: 503601 - DNA, 458 bp, Homo sapiens
tcagtgtcatttgcacatgaagtggaggtggggacactttggggacatccctagccatttgcccctcaggstgaatccagactcagcaaccttcctcccaacttcaggattaattcccagatgtcctttttttcaaatgtagggagtgcttctgggtggttttttttttttttttttttttcagacatcaggcacaaatgatccaagcagagcctgcagagtacattagactcggtctgaaggcactagcctgaggggaaagaatttccccatgtgaaaagtgtctttcttctacagattccaggtattgactctgccaggcatttatgaagatcacatgagttagacaaagcctttttggagagtgcatggcagagtgagctctttcccacttggcaaatgagaaaatggaagttcagggagattacataaattgctccactatcatgtgatgaaaa

SEQ ID NO: 503602 - DNA, 458 bp, Homo sapiens
tcagtgtcatttgcacatgaagtggaggtggggacactttggggacatccctagccatttgcccctcagggtgaatccagactcagcaaccttcctcccaacttcaggattaattcccagatgtcctttttytcaaatgtagggagtgcttctgggtggttttttttttttttttttttttcagacatcaggcacaaatgatccaagcagagcctgcagagtacattagactcggtctgaaggcactagcctgaggggaaagaatttccccatgtgaaaagtgtctttcttctacagattccaggtattgactctgccaggcatttatgaagatcacatgagttagacaaagcctttttggagagtgcatggcagagtgagctctttcccacttggcaaatgagaaaatggaagttcagggagattacataaattgctccactatcatgtgatgaaaa

SEQ ID NO: 503603 - DNA, 691 bp, Homo sapiens
ctttatctacaataatattcaaaatacatttccaaggaatacctatgttttattattcaacaaaggacagtccaatcagggtcagatcagagaatatgatatatcgtataatagaaagcaaatgaaagttttctaatagaagaatctgaaaagttgctggcaatgaagccaggcagtgtgtgagcaagaatgttcaaggaaatattttatttttatttatgttggctatgaaataaatattgcatagttgaatcagtggattttatgtgtcaggcactatatcctgctgcacccaatcactgcagagctgtcaaaarcaaagtgtgcatttgaagaggccaccctctctgaaaggaaagagagaaaaaccaggagggttgacaaaatgcattctgatgagtgtctctccctctctttttaaagctatttgagtttattccaattttagcaaacgtgaactctgaatgaaaagtagcttgaaggcaacagcttttaaaggatgtagagaaagaagacggaagacttgcatttttctaagcagatgacatttcacaaatgtaatgtatgtccaaagaatataagatagaatggttcaattacagattagacactccctccccctactcaataacaaaatgtatagaatgtgatgagatgggcattttatattgtgggcatctggtcaccgacc

SEQ ID NO: 503604 - DNA, 639 bp, Homo sapiens
gttttaggctatttatatttaatttaatgcctatgtaattatatttttatttaacattttattatttattttctgtatatctcttttgttcatctgtttctttctcactagtttctttagtgctaattaaatatttttgtgtgttattttaattctttgatttttttcatatatactttttttcttagtcacgttggggattacaatatacattctaatttatacattctacttcagattaatactagcataattctagtaaattataaacaatttgctacagtgtaagtccatccccttatttgcaccattattgtcaagtattagatctatataaacaaaayacagagctattagtattgctttatataatatgatgtccattttaaagttaagaaaagactgataaacacgtatttataagatattttatattagttaacagttaccattaacagtctctatttcgtcctatggattctacttacccttaggtgtcatttcttttcatcctgaagaccttccttcagtatttactgtaaagcggcatgttagcaacaaattccttgtttttactttcctggaatatctttattctgcctcatattgaaagaataacgctgctggatatagaattct

SEQ ID NO: 503605 - DNA, 645 bp, Homo sapiens
ccattattctacattttagtaaaataatgagttttacactttatttcaaactttatgtacacttacacatacaagtaataagcatatatgcataaatatgttgcattcaattttatcatatttatttaaaatagtttacaatgagaattttaaaaacatgttttctcatgtagcgattttgacattttatttttctgcttggaagtggcaaatgctctactttagagcctcttatttctttgcgcatgtaaatacattccaaaggttaaatttaaaaagttagctccttgcaattggcttagaagaaagctaaacctataccttccatacatctccttcacagactgttttgcttttccttcttttaggactgaacatgtggcctgcatttttctcattcataaccaagattcacctctaaagtaraaaaatatccagaatatgagttgagtctaattcttcttaaaatcgaagacagttaagctccaaggttaaaattggtaagctcaggaaatcctaagtgtaaacatcacctttcagtcacctacaaatcatctcctgctcctttttctctgaaatgcaggattgcagcctcactgcaaattttctttctaaattaagcagcacatttcaggtatctaagaa

SEQ ID NO: 503606 - DNA, 438 bp, Homo sapiens
tgggacaggcaggacatttcacttgaagaaagttatatatgaatgtgttttgggggtgtagaggtgagggatgggggaagataaattaggctaggtactctatgttgatactgggatggtgaattcactaagcatcttcaagaaccaactgtataaggagtgtttattaattagtaatactagagaatgaccaaagatccatgaaaacatggatcctttgctcttgagattcttactaactagaggctggaggttctgaggagttccagaggacacacacacacacacacacacacacacacacacacgtgaaatgacctaccagtgtgtgtgtctggtgaaggttgcagcactactcacactcatctgaatttcttcatactcwttgtcccttccttattctttgacaccagagttttgaagccctggtgtcttatt

SEQ ID NO: 503607 - DNA, 504 bp, Homo sapiens
tggattctcagattagtttctgcattcagtttgttgtgatctcagatatcacactgactctggaaagctccactgtatacttgtaaaaaaaaaagtgactacaaaaagcaaatcacgtctcagtattagtatgaaaatacttgtgaccttacagcttcctgtgatgaagacttgaatcatattacttcacctaatttctaacgaagaaagaaagagtgctgtgatctgatagtttggggaaactggcaggcagagtcacagattggaagccatagtctagaattagagccttggttctgccaattacatactagctgtgtgaccttggcaagttagttaacctccttatgcctcagtttttccatctttattttattttaatttaatttaatttaattttttattatactttaagttctggggtacatgtgcagaacrtgcagttttgttacataggtatacacgtgccatggtggtttgctgcacccatcaacccgtcaccta

SEQ ID NO: 503608 - DNA, 640 bp, Homo sapiens
ctgatgctgagcacttcccttttcaatcacagcctttgcttctcctcttcctcataacttctatcatgaaacagaataataggttacgttttcagattaagacagaagatatgagacctctgaagaataaatatgaacttccatggatatctgtcttctttctcagaactttatactctcaatagcagactgagcttgacctagatcctgaaacatcctgcgaactgattgtgaccttaagcaaatctcagtgagaccaacaattttctttctttctgaagaaggtgtggttgggggaggggaattaagaagatggaagtaacaaaataattaatattacaaagcaattactgttaccgaacttttttatcaatcatctcagtttattccaggataacaaatatatgaactctgtatggtcatcttgtcaacataattcatggttatcttgtctacataattttacatctgaatctctctttgaaacttactaaaagaggaatgacaaagttttcaaggatrctaactacagcaagagaatcgtggaatcgtgaatttgtttatacatctttctgctaagatattcatttataaaagtagttctcaatgtgtggtccccagaccagcagcatcaacagcg

SEQ ID NO: 503609 - DNA, 528 bp, Homo sapiens
atgatttcaaagatcatggccaattcaaagaatctatgtttccaccgctcttaggcaggaccttatatattggacaatttccttcctgttaccacatactcggttctcctcactgctgcatgtaacattatgggtttatcacattctaccctgagggacacttagcttttcagttcaccccatccttgtgggagaaaatcttcacaagtggagattcaaaattcgcaataatgcatagaaaaataccaagattctccaaacttacaaataacagagaaaagtagaaatggtcaagtcgttcaagaactttgtagcaagtgaaagttttaaatatttaatgtgctttgcaaggtctttttagaagagattaatattattcaaatgcagtttgtttgtattaaagtatttaaatgctatgcatttagtataagatacatattctcacttcttccctgatgcaaagtcacactgggaattatgtgatyatgtgtaatttgttaaatggaaatcactttttaaatattcata

SEQ ID NO: 503610 - DNA, 653 bp, Homo sapiens
ttatttttccaaatacggtcatattcacagctaagagggggttcagacttggagatattcaacccactacaattaggaacactgtataaatgttaattttctgtttttgataattgtactatggttgtcaaagatgctgatattagagaaaccatatgtgtttcacaacttactggaaagtctaaaacaacagtaataatagtctaaaatagtagtaataatattacctcaaaatgaagtttttaaaaaagaaaacaagttccttaaataaggytttctaaacttactgaattcaaatttccatgggagaggatgggcaaatttaataagttctccagatgatcattgtatagaatcagaaattataattcccctcttagagaaaaggaatgcaaaatgaaataagtctcttttctcacccagtattggttaaaggataattatgggtcacagttcagtatatggctattacacatgaaagtctgggtgctgctcctgctggtttgcatggtggccctgggttccaagaggttgtccaaggctagcacttcaacattgcaatgcatttgagcttaacaactcctttataaactttcatcatttttgcagtactggaatccactccacaatctcttgtataaagacttctgttt

SEQ ID NO: 503611 - DNA, 525 bp, Homo sapiens
atgttacctgtctcttgatgagacatcggcttttatcaacacaagcctttatgttttagaacctatatctatgttggagctcttccttttttttttgtctaatcctttagacaaaatactattagctcttccttaataattatttatctttctttcttttggagtataggtatcgacatagacatagatatatagatatatagacatagatatagagaaatagtctcaactaggtctaagtgttttgaagaaaaagagggccatgccagttgagtctgcaatgytgccagttgagtccaccatattggtaaggatatccttctcaatccaccacaatcagaatgatacttctacaacacaagtcttgtcctattacctgccccacaaacacacacatttgggacaccttcctgcttaccttcactttatgtcttcccttttattaaagaactgaatctccatcctcatctccaatcaaacccattctcaccatgatctccagccaccctggtctttctcaaataa

SEQ ID NO: 503612 - DNA, 596 bp, Homo sapiens
aggtgcaggcggactggggacgtgagcaaaggccagctaagacagggcctgagctggaacactgagttacactctcccctgaagacaatgccaaggcattgaaattttccttttttgaaacagggtctcattctgtcacccaggctggtttgcagtggtgcaatcacagctcactgcagccttgacctcctsggctcgggtggaatttctaggagagaaattacatgccacatagaacacattggccttggccaagagaacagatagaaggaagcaagtccagcaggggagacacagaatcctacctgattctaaccaaaatggcagatgaggaaaccaaggcacagagaggagagcttgtttgcccaacatcactcatctagaaagtgaaggaatcacatgtgaacttgagttcatcaaatgccagagcccagcttctgggcacctatgcaagccacttcccatctaggttccttctaggttcatcaatctcttggccaacaaggatctgtaagagattccactgtgtccatttctcctgcatcaggaccagatcccacacccagtactgggcaaagaaaataagtgtaagctaa

SEQ ID NO: 503613 - DNA, 475 bp, Homo sapiens
tgagaacaactgaggcattcatttgttgagagcctggtaaaatacttacaaagagtgtctctgtttgggaagcctgggtcagctatattttgtcccatccaatgctactgcattttccattcattgcagccaagcaaattggccaataatcctacacactagctcctgaaggtacaaattctgtcaatgagcagaaagaagccacaagcatggtttcagtcttttactgaggggcaggtaacgagtgccttctggaagctaatcaacatgaacacacagttccyggctgaggtaaaggtagcgaccagtgcaagattcccagtgtccttgtggccactgtgttttgcagactgtctacccaacagatcagggaacagcttggcaataatcccagttattacaatacagaactgcctccatagttgttggtaattgccactgccctgagaacactaaatatccccctgattagcca

SEQ ID NO: 503614 - DNA, 437 bp, Homo sapiens
taaactgtcagggcctgggtctgaagccrggtctgagtgacttcagaaccctcgtgttccttcctttctgttttctttagatggaacttttgctcttggcagtctttgacaaagaacaggtgtgtggggtttgtgcattccctgtacaccaactactcctcatttggagaggaaaaataaacctcatactagttaatgccacactgtttattgatttaggcaaatgtttggcagctccaattcatcttccagagggtaatgtaataagggcttatattatactctgtgtttctctgggctctcaatatgtcatcctccttaatctcacagcctcctctataagtttcaaaaaaaaaaaaaaaaaaaaccccatgacattgacacattgggcaggcatgtctttttgcaaataatgaagctggggatgagaccatgga

SEQ ID NO: 503615 - DNA, 507 bp, Homo sapiens
taaactgtcagggcctgggtctgaagccgggtctgagtgacttcagaaccctcgtgttccttcctttctgttttctttagatggaacttttgctcttggcagtctttgacaaagaacaggtgtgtggggtttgtgcattccctgtacaccaactactcctcatttggagaggaaaaataaacctcatactagttaatgccacactgtttattgatttaggcaaatgtttggcagctccaattcatcttycagagggtaatgtaataagggcttatattatactctgtgtttctctgggctctcaatatgtcatcctccttaatctcacagcctcctctataagtttcaaaaaaaaaaaaaaaaaaaaccccatgacattgacacattgggcaggcatgtctttttgcaaataatgaagctggggatgagaccatggaaagacctggaagtggaggttctttaatctgtattaccttgtacaagtcacttagcctctctcagcctcaa

SEQ ID NO: 503616 - DNA, 564 bp, Homo sapiens
acacataatcataatcaacctcagaataatgcaattcacaagaaagtcccctttactctgaattattgagctctgtggacaaacctctatcaccaacatgggattctgggtgcagatacactgtagggatgtaggaagattgatagagtgaaaaagacctgccatgttwtctcaaaccaactctttcctagctggttgaccccttgtgagtcatttaatctccatcattctcacagttacctacaaaaaatagagctagtgcaacctacctaaatgtgtcatcaggaagaccacagcaatgtacatagttgtatgctgcatagtgaatactcaaaatatagagctattaattctattatattccaaacatatcagttttctgttaccataataacaaatatgttggatttgttgatagtatcaatatcagatttaagtgggcaaagattttaacagacaatccaccaaataatgttgatgttaaaaccaccctccaaaacacaatagcttttttttcttttaaaaaaagcattttattagctcccaaatctgtaattggttatt

SEQ ID NO: 503617 - DNA, 424 bp, Homo sapiens
tgatagagtgaaaaagacctgccatgttttctcaaaccaactctttcctagctggttgaccccttgtgagtcatttaatctccatcattctcacagttacctacaaaaaatagagctagtgcaacctacctaaatrtgtcatcaggaagaccacagcaatgtacatagttgtatgctgcatagtgaatactcaaaatatagagctattaattctattatattccaaacatatcagttttctgttaccataataacaaatatgttggatttgttgatagtatcaatatcagatttaagtgggcaaagattttaacagacaatccaccaaataatgttgatgttaaaaccaccctccaaaacacaatagcttttttttcttttaaaaaaagcattttattagctcccaaatctgtaattggttatt

SEQ ID NO: 503618 - DNA, 424 bp, Homo sapiens
tgatagagtgaaaaagacctgccatgttttctcaaaccaactctttcctagctggttgaccccttgtgagtcatttaatctccatcattctcacagttacctacaaaaaatagagctagtgcaacctacctaaatgtgtcatcaggaagaccacagcaatgtacatagttgtatgctgcatagtgaatactcaaaatatagagctattaattctattatattccaaacatatcagttttctgttaccataataacaaatatgttggatttgttgatagtatcaatatcagatttaagtgggcaaagattttaacagacaatccaccaaataatgttgatgttaaaaccaccctccaaaacacaatagcttttttttcttttaaaaaaakcattttattagctcccaaatctgtaattggttatt

SEQ ID NO: 503619 - DNA, 647 bp, Homo sapiens
tgtggttaaaatcaagcacttacctactctttgactttgaatccaaaaataccccaaatgtgttaccagatcttataatccccacccctggagcaaaatcaggtcaagctaagaaaagcacttaagaacaaaagatgcagtctctggatgttccgtcacgaatgctgggagcatcccctgtgctcccaggataacttttagtaaaagtacgggaggaaagtgggatgtattatgtagtggatacaggggatggagggaggaggttcttcttgcttaccttttcctggttttcgatctttgtgtgttattgaagttgcccattttatttcactttttaaaacaatttcagctttcattttagattcagggggaccatgcacaggtttgttacatgggtatattgtgtggtgctaaggtccggggtgcaaatgatcctgtcacccaggtggtgagcatagtgcccagtagatagttttccagcccttgtatcccatctctcccttyctcgccctctagcagtcccagtgtctgttattcccatctttatgtccatgtctacccagtatttagatcccacttataagtgagaacatgtggtatttggctttctgttcctgtgttaacttgcttaggataatggcctccag

SEQ ID NO: 503620 - DNA, 647 bp, Homo sapiens
tgtggttaaaatcaagcacttacctactctttgactttgaatccaaaaataccccaaatgtgttaccagatcttataatccccacccctggagcaaaatcaggtcaagctaagaaaagcacttaagaacaaaagatgcagtctctggatgttccgtcacgaatgctgggagcatcccctgtgctcccaggataacttttagtaaaagtacgggaggaaagtgggatgtattatgtagtggatacaggggatggagggaggaggttcttcttgcttaccttttcctggttttcgatctttgtgtgttattgaagttgcccattttatttcactttttaaaacaatttcagctttcattttagattcagggggaccatgcacaggtttgttacatgggtatattgtgtggtgctaaggtccggggtgcaaatgatcctgtcacccaggtggtgagcatagtgcccagtagatagttttccagcccttgtatcccatctctccctttctcgccctctagcaktcccagtgtctgttattcccatctttatgtccatgtctacccagtatttagatcccacttataagtgagaacatgtggtatttggctttctgttcctgtgttaacttgcttaggataatggcctccag

SEQ ID NO: 503621 - DNA, 509 bp, Homo sapiens
gaatttgaggctgagagaggctaagtgacttgtacaaggtaatacagattaaagaacctccacttccaggtctttccatggtctcatccccagcttcattatttgcaaaaagacatgcctgcccaatgtgtcaatgtcatggggttttttttttttttttttttgaaacttatagaggaggctgtgagattaaggaggatgacatattgagagcccagagaaacacagagtataatataagcccttattacattaccctctggaagatgaattggagctgccaaacatttgcctaaatcaataaacagtgtggcattaactagtatgaggtttatttttcctctccaaatgaggagtagttggtgtacagggaatgcacaaaccccacacacctgttctttgtcaaaractgccaaaagcaaaagttccatctaaagaaaacagaaaggaaggaacacgagggttctgaagtcactcaaacccggcttcaaacccaggccctgacagtt

SEQ ID NO: 503622 - DNA, 425 bp, Homo sapiens
catccccagcttcattatttgcaaaaagacatgcctgcccaatgtgtcaatgtcatggggttttttttttttttttttttgaaacttatagaggaggctgtgagattaaggaggatgacatattgagagcccagagaaacacagagtataatataagcccttattacattaccctctggaagatgaattggagctgccaaacatttgcctaaatcaataaacagtgtggcattaactagtatgaggtttatttttcctctccaaatgaggagtagttggtgtacagggaatgcacaaaccccacacacctgttctttgtcaaaaactgccaaaagcaaaagttccatctaaagaaaacagaaaggaaggaacacgagggttctgaagtcactcaracccggcttcaaacccaggccctgacagtt

SEQ ID NO: 503623 - DNA, 499 bp, Homo sapiens
agtggaatctcaggattggccagcccagggaggagagggaggagcaggtccccggaccctgcctgcccctaattattgtggcgatctggagtctgtgccacaagccaacaagaaagttgcatctcaaaaagaagtcacctggctgggcacggtggctcacgcctgtaatcccagcactttgggaggccaaggcgggcagatcacctgatgtcaggagttcaagactagcctggccaacatggtgaaaccccgtctctactaaaaatacaaaaattagtcaggcatcatggtgggtacctgtagtcccagytactcggcggggtgaggcaggagaatcgcttgaacctgggacgcggagttggcagtgagccaattgcaacactgccctccaacctgggtgacagagtgagactccatctcaaaaaaacaaagaaagaaagaagcaacccaagatgagggcagttgcctgacccctctctggctattttcatctcccagc

SEQ ID NO: 503624 - DNA, 623 bp, Homo sapiens
atgtaaattatactgataaaaackagtctagcctaaggatttggcagttgggggctgcagaagtgaatttcatgcaagctgagtggttttattccccaaaggacttgggtgacttatataaagctaattttggcatccatctttttcgaattttcttagccacgaaactttttttaaaattaaaatattattcaccattccaaaataccagacctagaggaagctgttctgtttgaactacagataagaaattaaaggccccttggaggctctaccctcaagatctccccttcaactctatgggacccttgagacacatccaaagaccctgaggacccatagatcccaggttaaaaaccactgatccagcggagccagcaagactcctgagttcggttgcacagttgaacactgcacaaatccagactacgatatgaattgtaggagtggagatgtgcaatgtagtcaccctgggggccatgctggtaaagtgggcaagtcagcaagtcaagctgacctgggaaagatggtaagtggtaacaagcactcagccagagcatcaggctcaggagggtgttctgggggcctgtgccaaactgaggaacagagccctgtttaaaggg

SEQ ID NO: 503625 - DNA, 669 bp, Homo sapiens
gactaagacactacatctatttaagaaaaaatagcgagcaattttttaaaaaawtttcgaattatatatttcatatgcatatataaatccatatattaaatattattttttattccaaatttgtttttgagggaaatctatgttaataggtagatagtatatgctatttaggattgttccatgatatctaattattttattgatagatctaggctctttgatttttcattatttcaaacaataatgaaatgagtattctttagatgtcattttgaacttgcataagatttccatgtgatggtgacaagatattcaggtctgagtgggggcagtcatggcttatgcctactgtaaatcagatattacttttagcaccctttcatattctactatctatgattaattgctcatggagattccttttgaacgtattccttaggaatggaatcactgggtttgaagttaaacatatagtccaatttattaaagacttgactttgtcttcaaaattactacattggtccaagctcccaccaaaattttctgtttccaaattcccttgacaatgaattttgtatctaactttctaatcttcagcaataggaaaacacagagtggcatttcaattttcaatatactatcttttcattattaataagcatatgaagg

SEQ ID NO: 503626 - DNA, 669 bp, Homo sapiens
gactaagacactacatctatttaagaaaaaatagcgagcaattttttaaaaaattttcgaattatatatttcatatgcatatataaatccayatattaaatattattttttattccaaatttgtttttgagggaaatctatgttaataggtagatagtatatgctatttaggattgttccatgatatctaattattttattgatagatctaggctctttgatttttcattatttcaaacaataatgaaatgagtattctttagatgtcattttgaacttgcataagatttccatgtgatggtgacaagatattcaggtctgagtgggggcagtcatggcttatgcctactgtaaatcagatattacttttagcaccctttcatattctactatctatgattaattgctcatggagattccttttgaacgtattccttaggaatggaatcactgggtttgaagttaaacatatagtccaatttattaaagacttgactttgtcttcaaaattactacattggtccaagctcccaccaaaattttctgtttccaaattcccttgacaatgaattttgtatctaactttctaatcttcagcaataggaaaacacagagtggcatttcaattttcaatatactatcttttcattattaataagcatatgaagg

SEQ ID NO: 503627 - DNA, 541 bp, Homo sapiens
tgctgagatcataggcgagagccactgcgcccggccatggggtacacttatgattaacagaatcaaacatctctaagcattatgaatgtccccatgaaagcaatattttatgctatgggagcttccattgtgctcgtgtctgggcatatgaggtccaggttggagtatgcatattgtgtcagaccccaccatcaagaggggagacacctgatagtgtttattacatatttaatctaaaaagaaagataatttgctataccaccaaaaatgacagtacaagagttggccaggtagacccttccttattcatcatgatgtttactaaacacaaagccttcacatgttctatttcaaagctagaattttactttgagaataagaaacgataatcaggaatagcatacaattttctcttatgmctcaaatttctaaagaatatttttatttttaaaaaattttcccctagaaagtgacagaaagccacaaaaacagaactagaatcataacatttaatgataactgttattgtgtcttcttctgt

SEQ ID NO: 503628 - DNA, 622 bp, Homo sapiens
gggaaaacaaattcacaaacatatatactcaatacacttactctgtaagtgtgtatccagtgtcttatgtgcagggttccacgaataataagtggtagagctagttttgaatccaggacagtctgattttgaagctcatgcactttcactaggtttactacctctagtaataattaaagaattgaaaattctgctgggcctggtggcagatacctgtagttccaggtatgccagaggctgaggcgagaggatcacttgagcccaggtgtttgagaccagcctgggcaacatagcaagaccccccacctctaaaaaaaaaaaaagagagagagagagagaagaaaagaaaagaaaaatgtataaccttgccaracctgctccataatttacagataacggcatgtacaaaatgggagctggttaggctgggtttagatcacaccataagcctgtacccctgaccttttatccccaactcagaatactcctatgcctgacaccaggatatcttgccacgggtggagacagggagctggccggctctgtgtgtctgcattcccactcgctgtcccaaaggcccaatcgcttgcagttccccgacgtcgtgccttgattgctaagt

SEQ ID NO: 503629 - DNA, 536 bp, Homo sapiens
ctttccattctagaaaatgagatccatgaaagcrgggacctcatctgtcctgtgttcctcgcaatgctcagtggggttcaataaatgttggctgaataaatgaatgggcaattttcatttaaattaataaagaagtttgggcccgctgtggtgggtgacacctgtaatcccagcacgttgggaaggctgaggctggaggattgcttgaggtcaggagttcgagaccaacctgggcaatatgctgagacctcatctcttttggcagtttatggaatgtttcattgaaattctgttggtgccaattattaatataatattagtgcaggagtatggggggaggtctttaacaaaattaagcatcccacacacactgtgagaggctgaatggtttttcttttctttcccttttttctctttctttttcttttttttttttctttttcttttttttgagctggaattttgctgtgtcaccctggatggagtgccgtagcacagtcttgactcactgcaacctccacctcccgggttcaagc

SEQ ID NO: 503630 - DNA, 536 bp, Homo sapiens
ctttccattctagaaaatgagatccatgaaagcggggacctcatctgtcctgtgttcctcgcaatgctcagtggggttcaataaatgttggctgaataaatgaatgggcaattttcatttaaattaataaagaagtttgggcccgctgtggtgggtgacacctgtaatcccagcacgttgggaaggctgaggctggaggattgcttgaggycaggagttcgagaccaacctgggcaatatgctgagacctcatctcttttggcagtttatggaatgtttcattgaaattctgttggtgccaattattaatataatattagtgcaggagtatggggggaggtctttaacaaaattaagcatcccacacacactgtgagaggctgaatggtttttcttttctttcccttttttctctttctttttcttttttttttttctttttcttttttttgagctggaattttgctgtgtcaccctggatggagtgccgtagcacagtcttgactcactgcaacctccacctcccgggttcaagc

SEQ ID NO: 503631 - DNA, 279 bp, Homo sapiens
cctcacctcaagcattattaatggtaatatttctcagagaagacaggagatgtgatcattattgcccaagtcatctagggatcctagcctggaagtggggtagagagatgggagattaaaaccattgtccatatttacacagcacttttgcccccargtccgttgcacttgccatctgtttgctctggttgctgcctctgccttttgcaggtatctgtacaattccagtttctcggtggtcccttgatatgtccattctccactgcccacagactacga

SEQ ID NO: 503632 - DNA, 581 bp, Homo sapiens
tcaaaactatattaatctttctttcactttacatactacatacattttttatacggagttcatctcatctctgtagaatgtcaggtaaacaccttgtccttggatttaaggcctctacaatctgaacgaccttgtaattctggctacaattactctccaacacagatcttctgccctagacaagctgttgttattctattcacttgtaaatagagatactgtcactggattgttgtggaaatttaagaaatgcctgtgccaaggtagtttacagtaaatgatagagtcacttaccattttctgatagtctgttgatattcagccccattcatacttattgccagcactgaaattttagttaaataaataaatgaatagtagcatagtttttatatatatttactagcttatatatacatatatacacacrcatgcatactcatgatgattagagtatttgcttaagtttttatataatttcaacaattttttaaaaatacatattcaaataaacaattgagataaccttaaatactaaagttagatatgaagtgatattgagtcttatttctaaattacca

SEQ ID NO: 503633 - DNA, 485 bp, Homo sapiens
gtgagaaatgtctacagcttatatatgctggacaaagggacgattcattttctgggctggatggaataggacagtgtgagatttcatcatgctactcagaagagcatgtaacttaaaacatgatttgtttatttctggaatattctacttaatatttttggaccacagttgacctcaggtaatggaaaccacagaaagcaaaactacagatmaggaaggactcctctatactcaatgcacatctatagttgaggagctaaaacagatggtcaatgctttgctatcaaagatcaccaagaacacagctgtaggtgaacaaagctgggtttattgacttatcgcaatgaagaatatcataggggaagcatcatggggatctcaataagaagggagaagtcctcaaaggcagtgggtctgaagtaaaagtgtaaaggctctgaagcagatatggacttgttggaaaatatactcagaaaagccagcca

SEQ ID NO: 503634 - DNA, 485 bp, Homo sapiens
gtgagaaatgtctacagcttatatatgctggacaaagggacgattcattttctgggctggatggaataggacagtgtgagatttcatcatgctactcagaagagcatgtaacttaaaacatgatttgtttatttctggaatattctacttaatatttttggaccacagttgacctcaggtaatggaaaccacagaaagcaaaactacagatcaggaaggactcctctatactcaatgcacatctatagttgaggagctaaaacagatggtcaatgctttgctatcaaagatcaccaagaacacagctgtaggtgaacaaagctgggtttattgacttatcgcaatgargaatatcataggggaagcatcatggggatctcaataagaagggagaagtcctcaaaggcagtgggtctgaagtaaaagtgtaaaggctctgaagcagatatggacttgttggaaaatatactcagaaaagccagcca

SEQ ID NO: 503635 - DNA, 642 bp, Homo sapiens
aaaatgtcttgaaacaaataataataaccttgcttgttttctagctattacaatttgggtgatgtgagccatgattctgtgaacaagtttctgtcccatctgattgagaagtccctgattgaattggaactttcctactgtattgaaattggagaggtatgacttagtcatatgcattctaattgaaaagattgcccagctttttgacaggtcttttgcttttaatactatcaaaattttttaaaaaattgtttcaaaagcwcctgtctgaattattaattttataaagatatgtactttcgtcgtactcttcatttgttattcttttgaaataggataatcgcagcattgaacctctaacttatggccgaattgcctcctattactatttgaagcatcaaacagttaaaatgttcaaggaccgcttgaagcctgaatgcagtactgaagaactgctttcaattctaagtgtgagtttttcatatatttcatatcttctcttttaatttagggcttaaagttttgccacctagtttgtcttgaaatttaacagaaaccatttgtaaagccctttcctctgtcaaacaaggtcactacaaagcaacacatctagactaagatacccatagataaggtgaccac

SEQ ID NO: 503636 - DNA, 642 bp, Homo sapiens
aaaatgtcttgaaacaaataataataaccttgcttgttttctagctattacaatttgggtgatgtgagccatgattctgtgaacaagtttctgtcccatctgattgagaagtccctgattgaattggaactttcctactgtattgaaattggagaggtatgacttagtcatatgcattctaattgaaaagattgcccagctttttgacaggtcttttgcttttaatactatcaaaattttttaaaaaattgtttcaaaagcacctgtctgaattattaattttataaagatatgtactttcrtcgtactcttcatttgttattcttttgaaataggataatcgcagcattgaacctctaacttatggccgaattgcctcctattactatttgaagcatcaaacagttaaaatgttcaaggaccgcttgaagcctgaatgcagtactgaagaactgctttcaattctaagtgtgagtttttcatatatttcatatcttctcttttaatttagggcttaaagttttgccacctagtttgtcttgaaatttaacagaaaccatttgtaaagccctttcctctgtcaaacaaggtcactacaaagcaacacatctagactaagatacccatagataaggtgaccac

SEQ ID NO: 503637 - DNA, 565 bp, Homo sapiens
tggaatgaaacattgttacataaataaaaggtctggcattttagctaacctaaaaggctgtctgtccctcagcatgaaggggtattttccatgattattttttccttttaaaattctgtttccaaagtaacataatattgtagggctctgcttatagygggttggattgaatgttggcatgcttaatttttctttttctctgttacataaaaatgatactgaaacatattcagatggccttaaatattggaaatgatcactcctatttacctactgggctgctttctgaggataaaaagtaggataatatgatttttagttaaaacagcattttggtattatttgtactgaggagacatctgggacatgaatcatgaatcttttggaaacagttgtaatcaccattattcatggaggaaggaggtcatagtgatttctgaattgccccacctgctggaccaaagagaccctaacaattttagagtacttaaactttattgggatgaaattagaaacatttaagcagaagccaatttctagcatatgaaaattagattttaatatt

SEQ ID NO: 503638 - DNA, 623 bp, Homo sapiens
gtacttttctaaatttggaatagttctatttacatttagacatgaaactcattcttttagtcaatatccaagcttgtgtgaaaataagaatttcactacttttaatattcgatatataaataaaatctcatttcatgttgtcataagaaccataacaaccgagtgtacrttataaaaattaactgaaaattattgagacataagacatttggggcatattttgctttctttcaaaattgtcaatattatagcagcatattctaaaaaatctgttcaaaaaaaattttccctaactttgaagcttttcatttctattccagttttaaaatagactaccttctaaaagtccactgaacatatcagatcatgatcctggtttgccacgatgacaggcactttctactctggacttcggatttcagtgccaacatcattaagagattcttcaaattactttcaaaatgtccttttccctcaggatttttacttatatctaattagactacttactccatgccacgtaatccctgttgccaaaactgctaaatgcttcaataactaggaggagggcatcaatggagcaagacagatgtaatgtcaccggttaacagtagaggtgtgaa

SEQ ID NO: 503639 - DNA, 430 bp, Homo sapiens
ctgcttttaaaacaccaactacttcttggttaattatcctggttcccaaagggggcagtgtagaatctgccctcaggtgccaaatacattaaattaattataatcccaccatgtacccaaggctgtacatttactttttatcccattatccatcccacatatgtacaactcactctattaatttgcccaattgtctgcaataagattaaatcatctgagaaaggcaatgctggcaatataaaagtatcccctatatgactaggggatactttattaccctgaaagagacaaaagatatttctgtgtcttcctctgctaccgtctctccttcattcattcatggctccttatttktccggcccaattaacctaagaccaattgcaggactgtactccaacaaagtcaggcttatgaacccagctcagtgag

SEQ ID NO: 503640 - DNA, 289 bp, Homo sapiens
tttttttttcagaacatttgttttgatggctgttagtccccctctcttggagcattttggggcactaatcttgttctcttgtgtcccagcttttagacctcttacttccactgctagtagctagcacttactgagcacctgcratgaggtaaagactcagctaagggttttacaggaagtagattaattgatcctgtcaccaaccatatgaagtaggcactgtacccatctgcatctccagatgagcaccctgaggtttagagagattaaatcacttgcccaaggtgaa

SEQ ID NO: 503641 - DNA, 653 bp, Homo sapiens
ttcctcattgtgaatgtgctgccttggggcatatcgtcccaaaaagatatttgcaggagcaaggtcaagaaggggaggtggagttcatcatctgtattacctttctctcattctccrtatccactccaacagcaagtccagttaagaccacctttgaaatttacattgaatctgagcgcttttcaccatcttgagtctgctgatggtcatatcttggttccttgactcactagcagtgtaactttgggaatgttctttaatctcactctgccttgcttatctatcaaatggagataataaagtagcagttacatagggtcatatgcacattaaattagggcaagtaaagtgctaaaaaagtggctggtatctccaagtgtaagtattatggacacatcttttcagggtcttacaaatgtgcctgtctagtatgaattacagagaatcagtgttaaaagggacttcaaggatgaactagcctaatgcccttgtttaaaaagaagcaacctgaggtgcagggaggtgaaatatctttgaattcacgtaataactttgggtgggcgagtttggattaggatgaaagcctctctgatggattaaggaccctggttgagaacatgagtccctgcatgtctaaagtattctgtgtttcc

SEQ ID NO: 503642 - DNA, 653 bp, Homo sapiens
ttcctcattgtgaatgtgctgccttggggcatatcgtcccaaaaagatatttgcaggagcaaggtcaagaaggggaggtggagttcatcatctgtattacctttctctcattctccatatccactccaacagcaagtccagttaagaccacctttgaaatttacattgaatctgagcgcttttcaccatcttgagtctgctsatggtcatatcttggttccttgactcactagcagtgtaactttgggaatgttctttaatctcactctgccttgcttatctatcaaatggagataataaagtagcagttacatagggtcatatgcacattaaattagggcaagtaaagtgctaaaaaagtggctggtatctccaagtgtaagtattatggacacatcttttcagggtcttacaaatgtgcctgtctagtatgaattacagagaatcagtgttaaaagggacttcaaggatgaactagcctaatgcccttgtttaaaaagaagcaacctgaggtgcagggaggtgaaatatctttgaattcacgtaataactttgggtgggcgagtttggattaggatgaaagcctctctgatggattaaggaccctggttgagaacatgagtccctgcatgtctaaagtattctgtgtttcc

SEQ ID NO: 503643 - DNA, 653 bp, Homo sapiens
ttcctcattgtgaatgtgctgccttggggcatatcgtcccaaaaagatatttgcaggagcaaggtcaagaaggggaggtggagttcatcatctgtattacctttctctcattctccatatccactccaacagcaagtccagttaagaccacctttgaaatttacattgaatctgagcgcttttcaccatcttgagtctgctgatggtcatatcttggttccttgactcactagcagtgtaactttgggaatgttctttaatctcactctgccttgcttatctatcaaatggagataataaagtagcagttacatagggtcatatgcacattaaattagggcaagtaaagtgctaaaaaagtggctggtatctccaagtgtaagtattatggacacatcttttcagggtcttacaaatgtgcctgtctagtatgaattayagagaatcagtgttaaaagggacttcaaggatgaactagcctaatgcccttgtttaaaaagaagcaacctgaggtgcagggaggtgaaatatctttgaattcacgtaataactttgggtgggcgagtttggattaggatgaaagcctctctgatggattaaggaccctggttgagaacatgagtccctgcatgtctaaagtattctgtgtttcc

SEQ ID NO: 503644 - DNA, 634 bp, Homo sapiens
gaacatccaaatccctggaaagagagtttccagcagttggtatgaaatataaatagaatatattggtttatattatacatttgtaaataactttcttttaagaaataagtttaggctgggcgtggtggctcacacctgtaatcccagcaccttgggaggccgaggtaggaggattacctgaggtcaggagttcgagaccagcttggccaacatggcgaaactccatctcttctaaaaatacaaaaattagccggacatggtggcgyacacctgtagtcccagctacttcggaggctaaggcaggagaatcacttgaacccaggaggcagagttgcagagagctgacattgcactgctgcactccagcctgggcgacagagtgagactcttgtctcagggaaaaaaaaaaagttgagtaggttttaatgaacatttatcaaccaacagaatattcagcaattcttttcactactgacatatccccccattaataagttagtacagtaagcattagtagcctaagagcagttgtgatttcaatgggtctgtttgaacttgtatttaaattattagtgttcagcatttgttttaaagttccacatttagcttaattgttatacggcccttcgtgagt

SEQ ID NO: 503645 - DNA, 615 bp, Homo sapiens
ttccagcagttggtatgaaatataaatagaatatattggtttatattatacatttgtaaataactttcttttaagaaataagtttaggctgggcgtggtggctcacacctgtaatcccagcaccttgggaggccgaggtaggaggattacctgaggtcaggagttcgagaccagcttggccaacatggcgaaactccatctcttctaaaaatacaaaaattagccggacatggtggcgcrcacctgtagtcccagctacttcggaggctaaggcaggagaatcacttgaacccaggaggcagagttgcagagagctgacattgcactgctgcactccagcctgggcgacagagtgagactcttgtctcagggaaaaaaaaaaagttgagtaggttttaatgaacatttatcaaccaacagaatattcagcaattcttttcactactgacatatccccccattaataagttagtacagtaagcattagtagcctaagagcagttgtgatttcaatgggtctgtttgaacttgtatttaaattattagtgttcagcatttgttttaaagttccacatttagcttaattgttatacggcccttcgtgagtgagtctca

SEQ ID NO: 503646 - DNA, 565 bp, Homo sapiens
cactaacaccagttagaagtgaaaccctgaagcattataatcccaagtagacaaaaccttcagagacagtggataagggaaattctctttttaaaaagaaatttcgagtaatacatctgttgcccacttgaaggaacaaaggcaagaaatatgtatctacatttattcacaagatacagctaattatttgyctacacggtcaaggactgaaatggaacatgattggaaaatttgtgaaaagaagacctagaaaacagaatggtaaaatggacatttcttaatgggcccagaatgttaggatatttatgtcccatatgattggtcactaatgggtatcaactaggatgaaattttttgatcatcaggtgaacaagattacttgctctggggttatgaatcaatctctctccctagctgtgatggttaatgctgagtgtcaacttgattggattgatggatgcaatgtatggattctgggtgtgtctgtgaggatgttgccaaagaagattaacatttgagtcagttggctgagaaaggcaggcccacccttaatctgagtaggcac

SEQ ID NO: 503647 - DNA, 354 bp, Homo sapiens
agtcctgacttctagctatttcttttttaatcatactagttttccaactttttgtatgccacatttgatatattgattaggtaaatgccttgaagaaatgttaattgtctcaaaggcaaagagtgcccaaccaacttaatcatatagtactccattgtctaccattagccataaaaactctgtaactttcctgattgtattactgtagaatcatttaatttaatataatttaattatttaatttttttgagatgggmtctcactgtattgcccaggttggtttcaaattcctgggctcaagagattctccttcctcagcctcctaattagctgggattacaaggtcatgccaat

SEQ ID NO: 503648 - DNA, 613 bp, Homo sapiens
gaccccctgagtgttggttatatatgttgaaatttcttggcatactgccattccccaaaatatgcacagatagaagcttagtaaatgctgcttgaaggtaatgttcttctttctcagggcaggatctgatttttttgaaactccctatatgcctgatacaatagtctgctcacagcaggtacataggaacagttagcaggtaccccggggcaactctgcttccaagatcttaatctcctttctgaccttgccctttctttcctactggagttgctcttggttctcaccatgagcttcattccaaagactatcactacaatgctgggtttactttcctgcttctcagagcagacattcaatgacacacaaagtagcayactcagatccatcactcccttcaataagcattagcagcaaagcctaagcattacttagaataagatattgcctaagtattacttagaataagattcctaaactattgtgtggggatctatctcatcatattagaataggttacactttttcagtaccatattccgttaatcacttaattatctccatgatcatattttttttaaaaaaacagcaaccttccccccaaaccagagca

SEQ ID NO: 503649 - DNA, 609 bp, Homo sapiens
gattattcgtgcccagtagcaggacactctgtaagtcttggggtctagagtccatgtcaatgtcaatatcattgaaacaaaatcagaaagggatgtgctgttctagattgaaagaactaaagacacacaataataaaatgcaataaagcttcattaagcctcaattaaaataaaaggcatttgaggcaatggggaatctgaacatagactatataagatgatattatgaattattaatttcttaggtatgaaagtcatattgtggttatgtagaaaacatggcttattctgaggagatgcacattggagcatttaatagtaatgagttatgatgtctgtgatctactttaaaatggctcaggaaaggaaaagtatacatatatatgtatattgctaaaataggaatgagtsaaacctataccataatattattttgaagagcaagtggaatgatgaacatgacaggcttctctcagagtggcaggcaaggtacattctcaaaggagcattctctgggtgcaagaatggagtcttatccccctagtcccagaaccagggctgtacatgaaggagagaatgattgaaaaataacatctcctaaaagtaagt

SEQ ID NO: 503650 - DNA, 475 bp, Homo sapiens
atttttcaactcaagacaagtggctctgaaaaaaataatctgggactacataacaacactaatccattttttaaaatttttttggttttagaatagtcttacttttaaaaaactagaaaaaaactgccaagacagtacagttcccaaatactacactcggtagtttatcctattaataccttgcattagtattatacstttgtcacaattcacgaaccaatattgatacataattattattaactaaagtccatactctactctgatttccttagtttttctctaacatcctttttctgttccaggatcccattcaaaataccacgttacatttagttgccacgtctccttaagctcctcttaggctgttgagtttctcagactttccttgtttttgataactttgacagttttgaggagtaccgctatttatttattttttttacaactctctatcaacagagctacacacttc

SEQ ID NO: 503651 - DNA, 475 bp, Homo sapiens
atttttcaactcaagacaagtggctctgaaaaaaataatctgggactacataacaacactaatccattttttaaaatttttttggttttagaatagtcttacttttaaaaaactagaaaaaaactgccaagacagtacagttcccaaatactacactcggtagtttatcctattaataccttgcattagtattatacgtttgtcacaattcacgaaccaatattgatacataattattattaactraagtccatactctactctgatttccttagtttttctctaacatcctttttctgttccaggatcccattcaaaataccacgttacatttagttgccacgtctccttaagctcctcttaggctgttgagtttctcagactttccttgtttttgataactttgacagttttgaggagtaccgctatttatttattttttttacaactctctatcaacagagctacacacttc

SEQ ID NO: 503652 - DNA, 519 bp, Homo sapiens
attgcagttagaagaagaagctgccgtttttcctgaagttgcgtaagtaaaattcacaaatactttatctagcaacttatagcagagttttaggatttgatgagtaattgtcatgacaagtggtttggaaaaagcagtgcagaagaaagcaccatattgagagtccagtgatacttgaattttggtcctgattttgcattggttttcattattatcttggacaaaccactgtttctgtgggttttagttatatcgcgttaatgctgcagttgaactagatgaggtacagttttgatcaagtgtttgtagtttatcttttcatgaatatgtatctattctttcattatggatgaatgaaacatccagactttcttttttttttttttttggagatggaatttcgctcttgtttcccaggctagagtgcaatggcacaatctcggctcggcacaacctccgtctccygggttcaagtgattctcctgcctcagcctctcgagtagctgggattacaggcat

SEQ ID NO: 503653 - DNA, 515 bp, Homo sapiens
gggtgcttttgacacctagtgggtagaggccacagttattgctaaacatcctgcaatgcacaggctggccccccacaacaaggaattatcctgtcccaaaatttcaataatgctactttttagaaaccttgagttacaagaatagaatatcctagcatgagctccttaagatttactagtttatgccaaagcatttttttttctccgtttacaccaaaccatacaactgaatggttagaggacttaaacagttgctattctaaaaaaatgtgtggattacattataatcatgtgtttcttagctgtctgctatacttgggtttaaaaatatttatatttctaaataagcaactgattctttgtatagggaaaataacatgcattagagctccagggrgtatgttgcagataccaccttccacgcttcctctgcccagcattttgcgggccgattaatcgctgccttcaaggactcccaaggcagtgactgccctacaatcagagtgttgtggttg

SEQ ID NO: 503654 - DNA, 549 bp, Homo sapiens
atcctcctgcctgctcttcttcctcaaggtgagggcttctcaactccagctctactgatgttttggtcctgaaaggtctttcttatgggggttgccttatgcattgtaggatgtttagcagcatccttggcttctacccaccagatgccaggagcatccctctcagtgtgacaaacaaaaatgtctccagacattgccaaatgttccccatgggagcaaaatcaccctcagttgagaatcactgctctttattccaaagctcatgggacacygaggagcacatgacagattccccagaaagctttaaaatgatggtagttccacagaagtgcacaaacagcctttgtaaatgtcagagaagctaataagcaaagaacacttaattatccagtttccaaaaatagttccttactgctatcaaaccttctcgagttctttaagattgcctcttggcttagcttcagcaggagtatcattatgtattgcaaagagcacagtacctgcgacttggtaggtgtttaataagcgtttgttgaatgaaagagcagc

SEQ ID NO: 503655 - DNA, 549 bp, Homo sapiens
atcctcctgcctgctcttcttcctcaaggtgagggcttctcaactccagctctactgatgttttggtcctgaaaggtctttcttatgggggttgccttatgcattgtaggatgtttagcagcatccttggcttctacccaccagatgccaggagcatccctctcagtgtgacaaacaaaaatgtctccagacattgccaaatgttccccatgggagcaaaatcaccctcagttgagaatcactgctctttattccaaagctcatgggacaccgaggagcacatgacagattccccagaaagctttaaaatgatggtagttccacagaagtgcasaaacagcctttgtaaatgtcagagaagctaataagcaaagaacacttaattatccagtttccaaaaatagttccttactgctatcaaaccttctcgagttctttaagattgcctcttggcttagcttcagcaggagtatcattatgtattgcaaagagcacagtacctgcgacttggtaggtgtttaataagcgtttgttgaatgaaagagcagc

SEQ ID NO: 503656 - DNA, 549 bp, Homo sapiens
atcctcctgcctgctcttcttcctcaaggtgagggcttctcaactccagctctactgatgttttggtcctgaaaggtctttcttatgggggttgccttatgcattgtaggatgtttagcagcatccttggcttctacccaccagatgccaggagcatccctctcagtgtgacaaacaaaaatgtctccagacattgccaaatgttccccatgggagcaaaatcaccctcagttgagaatcactgctctttattccaaagctcatgggacaccgaggagcacatgacagattccccagaaagctttaaaatgatggtagttccacagaagtgcacaaacagcctttgtaaatgtcagagaagctaataagcaaagaacacttaattatccagtttccaaaaatagttccttactgctatcaaaccttctcgagttctttaagattgcctcttggcttagcttcagcaggagtatcattatgtattgcaaagagcacagtacctgsgacttggtaggtgtttaataagcgtttgttgaatgaaagagcagc

SEQ ID NO: 503657 - DNA, 587 bp, Homo sapiens
aattttcctcctccatggattgaaatgggggaaggaggagagaggcctgaaatagcttttgacagtgataattgctctattataaaagtaaggtaaccatatttttgtatagaatactagaaacctctagactttcactttacttttaatgtgtagagccgtatggtgaattgtgtttaaagagatcataatatgtctggccagattttattgyaattttttagtgtctcaggaggggctggcagcaggaaaaaaccacgtgggatgggtctgttagaagctgtggtttggggctgataaggggtcaagactaggaagttccttgcagaatggagcagagagacactgcctacaccctataaggcagagttctggaggctagattatcagcaaaaaggcaatagtgagttgggttgatgaactctgatccaggatggaggttgcttgcacactggcctgatttacagggcctcctgagcgcagatggcctgtgtctaccaatgcaggtccccagaaggctctcacgggaccgtccccatggccagaaggcaatgatggagattcacgccggcatctttgtcatttcc

SEQ ID NO: 503658 - DNA, 607 bp, Homo sapiens
acaaagacataagtttgatgcttggaaagtggaaaatgtcaagagattccaactagagacaggaggagcaaagccggccaagagagacagaggcccctctctgagcacacaagggcctggccacgtggcttgcgggtacaaaggcgcctccaagggttccagagccaagccatcactaccttacagccagagtaacccgmggaaataggctcctgagagctgaggttgcaatccacgcatcccaaatgagaaaaaagtatagaaaagcagggctatcagctacatataggatggatttgatttgggatgggggcaagggaggtaaataaacaaagagaagcttacagggaggctgaggcaacaatgtaggtacgggatgtggagtggggtgtggggaggtagaagaggcaagtctacccaacatcacaaaagaacaactagggggcctgagcatctctttatgtgtcacatcctctagagctgagttctcaagaaactacaaatggaaaatgtgatggagagtgactgaggaggacgctttagctgggatagttagggcgggtgatatctgagtgtggcctgaaagacacagggaacacggaggccc

SEQ ID NO: 503659 - DNA, 607 bp, Homo sapiens
acaaagacataagtttgatgcttggaaagtggaaaatgtcaagagattccaactagagacaggaggagcaaagccggccaagagagacagaggcccctctctgagcacacaagggcctggccacgtggcttgcgggtacaaaggcgcctccaagggttccagagccaagccatcactaccttacagccagagtaacccgcggaaataggctcctgagagctgaggttgcaatccacgcatcccaaatgagaaaaaagtatagaaaagcagggctatcagctacatataggatggatttgatttgggatgggggcaagggaggtaaataaacaaagagaagcttwcagggaggctgaggcaacaatgtaggtacgggatgtggagtggggtgtggggaggtagaagaggcaagtctacccaacatcacaaaagaacaactagggggcctgagcatctctttatgtgtcacatcctctagagctgagttctcaagaaactacaaatggaaaatgtgatggagagtgactgaggaggacgctttagctgggatagttagggcgggtgatatctgagtgtggcctgaaagacacagggaacacggaggccc

SEQ ID NO: 503660 - DNA, 607 bp, Homo sapiens
acaaagacataagtttgatgcttggaaagtggaaaatgtcaagagattccaactagagacaggaggagcaaagccggccaagagagacagaggcccctctctgagcacacaagggcctggccacgtggcttgcgggtacaaaggcgcctccaagggttccagagccaagccatcactaccttacagccagagtaacccgcggaaataggctcctgagagctgaggttgcaatccacgcatcccaaatgagaaaaaagtatagaaaagcagggctatcagctacatataggatggatttgatttgggatgggggcaagggaggtaaataaacaaagagaagcttacagggaggctgaggcaacaatgtaggtaygggatgtggagtggggtgtggggaggtagaagaggcaagtctacccaacatcacaaaagaacaactagggggcctgagcatctctttatgtgtcacatcctctagagctgagttctcaagaaactacaaatggaaaatgtgatggagagtgactgaggaggacgctttagctgggatagttagggcgggtgatatctgagtgtggcctgaaagacacagggaacacggaggccc

SEQ ID NO: 503661 - DNA, 538 bp, Homo sapiens
acaatttacccacataacaatcctgcacgtgtacccccaatcctaaaataaatagatgaaaactaaataaatacaaataaaaataatgtcttaaattgttactgtgacagaaatgtctcctacctgttcaactagtgagtgggtggacaagctgccatcattagatacataacccttataaytccagagacataagtgggtcagtcttgcaggagtatggcatgcgagaatcacaactcgacactcaaaataattaaacaggaatttgtttatgtacatctgttcccaaaggacattaaaattgatattcagttatcgcttggagttctaatactcaaaaacaccaaagtttgggttcatttgtgtctctacaaaacccttgtattaaattagcatctatgtacatcctgtgttttttaggttaactacttctgccattagcagtccgtttggtagtcaggaatgaattcctgccatcatcttggaacccatggcgacagtgccttgttggttacaactctgaatggatcatttgaaa

SEQ ID NO: 503662 - DNA, 551 bp, Homo sapiens
aacccagcattttctgagaagccaccatattgcagaattctgctaattacattctatgtttgcctcatttgattttcccaacagtcctaaggggtagctgctccatccccatccaggcagaaaaaaaatcccagggctcagaacagctcatcaaaatgtccaaagatacagcactcgtcagcagcagagacagcacaagaacgcatattctcctgcccacccaaagcagtggtgcctcrgaaagagtctagacataggtcagcactaagtcgtccctatcagcgaccaattgatcagcctcctgatacacaaaccagaattcaagccagattcgtttctgaacactgtccttgggaagaagatctggatggtggtggaaatgttttcagcacctacctcaaagagaagtgaccaatccagcatcacacaacaagccagggactgggccaggactgcaccccaggttttctggtttgcagcccaacattctttccattattccaaactgtttttcctgataaatgacatcagctagtgattatacctaatga

SEQ ID NO: 503663 - DNA, 498 bp, Homo sapiens
ggcttcatggtaactatgctttgaacttgttcctctgcacctaggtcactgtcacgatctactccttcaacaaagctagaaccctcaacacgacctccgatcctttgacctccracttttacctaatggttaaaaacatggactttgatttggggccttgctttaaatccaagctctatctattattagcattttagccttgggcaaattaacctgtcttctaagtcttagtttcctataaatttcagcaatctcacagatggctttttaggattaaatggaaaaacatatatgtttccgaggacctagaagatagtaaagactgtaaatgttagacatgataatgttgaggaagatggcaaggaggaggatgaggacagtcagaaaggcctgttcattttgcatcctaagcatctctcaaatcccttcacgccatccccagtcccctcattcaggctgggatattgcaacatcctccagactctatgtacccaattg

SEQ ID NO: 503664 - DNA, 498 bp, Homo sapiens
ggcttcatggtaactatgctttgaacttgttcctctgcacctaggtcactgtcacgatctactccttcaacaaagctagaaccctcaacacgacctccgatcctttgacctccgacttttacctaatggttaaaaacatggactttgatttggggccttgctttaaatccaagctctatctattattagcattttagccttgggcaaattaacctgtcttctaagtcttagtttcctataaatttcagcaatctcacagatggctttttaggattaaatggaaaaacatatatgtttccgaggacctagaagatagtaaagactgtaaatgttagacatgataatgttgagraagatggcaaggaggaggatgaggacagtcagaaaggcctgttcattttgcatcctaagcatctctcaaatcccttcacgccatccccagtcccctcattcaggctgggatattgcaacatcctccagactctatgtacccaattg

SEQ ID NO: 503665 - DNA, 498 bp, Homo sapiens
ggcttcatggtaactatgctttgaacttgttcctctgcacctaggtcactgtcacgatctactccttcaacaaagctagaaccctcaacacgacctccgatcctttgacctccgacttttacctaatggttaaaaacatggactttgatttggggccttgctttaaatccaagctctatctattattagcattttagccttgggcaaattaacctgtcttctaagtcttagtttcctataaatttcagcaatctcacagatggctttttaggattaaatggaaaaacatatatgtttccgaggacctagaagatagtaaagactgtaaatgttagacatgataatgttgaggaagatggcaaggaggaggatgaggacartcagaaaggcctgttcattttgcatcctaagcatctctcaaatcccttcacgccatccccagtcccctcattcaggctgggatattgcaacatcctccagactctatgtacccaattg

SEQ ID NO: 503666 - DNA, 498 bp, Homo sapiens
ggcttcatggtaactatgctttgaacttgttcctctgcacctaggtcactgtcacgatctactccttcaacaaagctagaaccctcaacacgacctccgatcctttgacctccgacttttacctaatggttaaaaacatggactttgatttggggccttgctttaaatccaagctctatctattattagcattttagccttgggcaaattaacctgtcttctaagtcttagtttcctataaatttcagcaatctcacagatggctttttaggattaaatggaaaaacatatatgtttccgaggacctagaagatagtaaagactgtaaatgttagacatgataatgttgaggaagatggcaaggaggaggatgaggacagtcagaaaggcctgttcattttgcatcctaagcatctctcaaatcccttcrcgccatccccagtcccctcattcaggctgggatattgcaacatcctccagactctatgtacccaattg

SEQ ID NO: 503667 - DNA, 631 bp, Homo sapiens
catctttggcgactctcattcattcttgaaatatctctgacaccctagttacaggagagggactcactggacggttcattgtctccactctaggtaaggcccgctccacactgcagtcattgttaycaccgaaaagcaagtctgagcatggctctccccttctccagacatctgggggttgctgatgccataggatgaaaatctaattcttcaatctggcaaacaagattcttgacaagttccgctgaactctccagcctcgtattatccctcccagcaggcttgcacttcagccgtgtcattctgtgttctttcctacctgtgtacacattgttccctttaacagaaggacccctatgagaatgagctcagtctggacaagtcgagtccaggggtagcagcaacagactggaggttgggaagggagggagtgtgagatgtcactagacagggcaggcaatgggtgttgaccacctctcctgtctaccttcccccttgatgacagtcagaggcatctccttgattcagttggaatcttgccttgataacatgggttctactattcaaaacccctgttgatggtgacatttttgttgttgttgtttcaaagcaagggagaattcaagggggg

SEQ ID NO: 503668 - DNA, 631 bp, Homo sapiens
catctttggcgactctcattcattcttgaaatatctctgacaccctagttacaggagagggactcactggacggttcattgtctccactctaggtaaggcccgctccacactgcagtcattgttaccaccgaaaagcaagtctgagcatggctctccccttctccagacatctgggggttgctgatgccataggatgaaaatctaattcttcaatctggcaaacaagattcttgacaagttccgctgaactctccagcctygtattatccctcccagcaggcttgcacttcagccgtgtcattctgtgttctttcctacctgtgtacacattgttccctttaacagaaggacccctatgagaatgagctcagtctggacaagtcgagtccaggggtagcagcaacagactggaggttgggaagggagggagtgtgagatgtcactagacagggcaggcaatgggtgttgaccacctctcctgtctaccttcccccttgatgacagtcagaggcatctccttgattcagttggaatcttgccttgataacatgggttctactattcaaaacccctgttgatggtgacatttttgttgttgttgtttcaaagcaagggagaattcaagggggg

SEQ ID NO: 503669 - DNA, 479 bp, Homo sapiens
taatcagcaagaataatgagctactcttggtgccctgctaatgacatatcatcagacaaaaagttggccttgaattcctgggctcaagtgatcctcctgtctcagtctcctgagtagctgggactccgggcatgcaccaccatgcccggcgaattttgttattattattatttttttttgtaaaaacagagttttgctatgttccccaagctgatctctaactcctagtctcaagcaatcctctcaccttgtccccttgaaactctgggattacaggcatgagcccccacacccagccagacaactatgtttttaaataccaataatatgttagacaccatattaagcatttttcattagttagytcacttcattcttaacaactcaattttttggatgagaaaacagaatatcagaaatgttaggtaactttcccaaagcctcacaggtactaaagtggctgagctaggctctgaagc

SEQ ID NO: 503670 - DNA, 353 bp, Homo sapiens
ccctcatcagaagtagatgctgcagccatgcttacacagcctacagaattgtgagccaattaaacgtcttttctttataaattagtccatttcaggtatttctttatagcattgggaaaatggactgacatgtatgagtagtaaatggaatttgcctcatagacatactctagatttcccracaatttcatagtgaagcaggtcactgagcagggccatcatccagggatctctaaaagcccacggacattgacatccaatcagagaggtcaggcaagatacaaataaactgtcagtaatgattttttaaaaatattcttttcctgtatgttgaaagaaagtaactgctgatc

SEQ ID NO: 503671 - DNA, 353 bp, Homo sapiens
ccctcatcagaagtagatgctgcagccatgcttacacagcctacagaattgtgagccaattaaacgtcttttctttataaattagtccatttcaggtatttctttatagcattgggaaaatggactgacatgtatgagtagtaaatggaatttgcctcatagacatactctagatttcccaacaatttcatagtgaagcaggtcactgagcagggccatcatccagggatctctaaaagcccacggacattgacatccaatcagagaggtcaggyaagatacaaataaactgtcagtaatgattttttaaaaatattcttttcctgtatgttgaaagaaagtaactgctgatc

SEQ ID NO: 503672 - DNA, 585 bp, Homo sapiens
acatctattacctacttagaagtcagacagcagtgtgatgacatattcaaagtgctgaaaataaaaaactgtacatcaataatttttaataagcaaacctatcattcagaaaggaaggcaaaataaagacactcctagataaacaaaactgagaggacttcttgctagcacatctactttacaagacatactaaaggaagttcttcaggctgaaatcaagtaacatcagacattaatacaaatcaacttaaaaaatcaagagtgctgataaagttaattatgtagataattataaaatacgctataattgcatatctcttcacttttcttattttaactgatttaaaagcaatcgtataaaccaaggtgtatataagtatattattgacctgtaatatatagacatgtaatatatttgacaataatggcacaaataagacagatggaagcaaagctgttttagagttaggaaatgacacaagacgataagtcaaatccacaggaagaaataaagagaaccagaaatactaaatgagaaggtttacgtaacaaactctrtgaatatacaattgctctatcttctct

SEQ ID NO: 503673 - DNA, 466 bp, Homo sapiens
aggccactgtgtctgtagtaggagtgatcatggggctcagggcagcaraaaactgagagggaatagaggtggaaaggtcatggtgactcttgttgaccagtgaaatgcacaattttgtccataacagcatgcacattgaaaattcacctgacagaagttgatgatgaattacatgtgggtgtggaagaaaggtagaagttgaagatgttgctaggttttagctagactaagtagaatattattggtggcatttactgcagtggtaaacatttgggtttgacagcaggtttggcaggaaatgttagaagttcagttttggatacattgagtttgacatgcctattagacattcatatgaatatgctgagtagacagttggattttggaggttagggtagcaatccaagctggaaatgtgcatttgggactgtcatttaatagatggtacttgaaatctataaattta

SEQ ID NO: 503674 - DNA, 664 bp, Homo sapiens
ttacagtttggggctgttattttaaattcactttctttgtcacttttctgtgtctatgtcaaagtgttgctgttttgctcaaatattttgtctcctttctaaccccaaattctcagtacatagcattactttctatttcacaagaaagaaaaccattgaaaataaattctttcaacttcctgccacttatacgtctcctctccatgtcccttgccccaaaaaagagaaagaaaaaaaaagtcatatttctgaataaaagccaagcagctttatgtggatgcaatttaaaacatttgagaatctcttgccaaaaagcatgcttttgtattgtaccttaaattagttgcaaatattaatacacaacttacaacgatttacttgtttaacatttaagatgacatgctccctgcatctattttatctttttttgttcrtgccctgatggagaaacaattaccctgctcatgtctaaggacaatcactcaacctctgcctttgatttctcccactctgaattctctaggacttctttccattgattattctgtctccctttcctttctctcaccactggttccttttcttcattcaaaaaccatgtttgcctgtcttctatattaaaacaaaaatatctcattttcccgtccaatcaataattatgtca

SEQ ID NO: 503675 - DNA, 518 bp, Homo sapiens
ccctcctgaaggcggcggctcacrgtggcggaactccctccgactcctccccaccccctccccacaggtcaggaacacggggagactacagctagctcttcatatttttttttgtttgtcttttgaggagaatccagagatctcgatttcagtgtgaaatatcttgattccggcacattagcaattgagaacatgtttttaaaaggcagcgccgcgtgggtcaaagaaaaaccctgatgagccttctcatttgcaaactcagatcagaggcatagatgtggaggggactcctgctccctgaacacccttcctgcccacagcaggcggggttattcagaacgcagacgctttgccaagggcaacaagaatccccaggttctgggaggaagcttgtgtgtggaagagtaaggagggatttctaggtagagaaaaacattccaggtgttcactcatgtcactcatgtggccacaaatccccggaggcctcctgtgtgccaggccgcgggctggggacaaag

SEQ ID NO: 503676 - DNA, 171 bp, Homo sapiens
tgtgaggcctggaacttccctgcaacccagggcactgctgtcctcttcctgccaggaaaggtgtgtaaggcaggaagaggggaggagtgggtcttggaggggaggagctggggcctggacaggtgtgtttggggagacaygtgccttgctttccagtgcctggactagggt

SEQ ID NO: 503677 - DNA, 615 bp, Homo sapiens
ctgtggatgctggtgactttgccatatgtcatggtatcatatgaggtatttttaagaagtatgactatggattttttcccctggcagttagtacactgatttgcaatgtttcagcgacatctctaaaataagaaacatgtagtattttcatgtaaaacgaaagcttctgtgaacaagtccagaagaaatttcttttccattagtgttgccattccctgcagtggggacagcagcaatttttttatggggcttaccatagagattagcattttctttcatgtaaaaatacatttctgataattaaatgaggcccaaagacataatgtttccagacaatatgagttgaatgtacagacaaaattaaaatttagcttcagctcatatggttttttattttactctctgtggtacacacctgggagatcctcaatgcctgagacatatcagtatttgcaaccatatacaggtaaaatctctatacacagtagtatctataaaaatgttcattcatcctacctaccatagagaggtatttccatcctctttttaaatataaggaagtgagtyctcaatagataaaacaatatcttgctgtaagttattttaaaagatagt

SEQ ID NO: 503678 - DNA, 635 bp, Homo sapiens
ctttgaagaccagagttcaggttcaagctctaccaccttgagtaattctcttcagtttgctcacctagacaatggggtgttccccttctacagagcaaaaggaaatttatttgtggaaaccattcaaccacaacaatcctagctttcacaaggctgttggggaggggagggagttccaaatgagctaatgggtggtgagcacaattattcactaacggttcactatgacatggtctcttgtaatgtaatgtgactgaagtcaaaatctgcagttattacagagggccatgtgcctctgtagttatggtccttaattatcacaatactgtagcattggtattatcgtacccacttctctgattgagaaactgagattcagaaatgatacaacatgrcccagatcacaagatacggttaataccaacaagaagagcaataaaaaatccagcagactagattggggtggtgcagtttaggagtccccccaagatgcctctgattcagtgatccacaagaaggactcaaaactcagcagaactgttttactcatgattgcagttgattatagcaaaagagtacagatgaaaatcagtacagggaagaggtgcatagggcagggttcaggagagagcagg

SEQ ID NO: 503679 - DNA, 312 bp, Homo sapiens
gtattatcgtacccacttctctgattgagaaactgagattcagaaatgatacaacatggcccagatcacaagatacggttaataccaacaagaagagcaataaaaaatccagcagactagattggggtggtgcagtttaggagtccccccaagatgcctctgattcagtgatccacaagaaggactcaaaactcagcagaactgttttactcatgattgcagttgattatagcaaaagagtacagatgaaaatcagtacagggaagaggtgcatagggcagggtycaggagagagcaggcatgagctttcag

SEQ ID NO: 503680 - DNA, 387 bp, Homo sapiens
ttcccacaccctctgtgcagtggtggatgggaggagtccccgtgggtgtggatggcatggatggcagcctccaagtgacttccaccatgcttggcccctgggctaacagcaccatcagcctaactgaagagccagaaatgggcatgagacttctctgtgaggggaagaaccaaaacggaacccatgctttgagcatcctactgatgtcaagtgagggtggagggggctcggtgactgggtgaggacaataagcgggatggggacagtcactggkgctagagaatggagcagagttttggctccgatgccaaacttctcacatgctctctgcttccaggaaagagttctttggctgcccaggccttcgtgaaagggctgatccagggt

SEQ ID NO: 503681 - DNA, 447 bp, Homo sapiens
ttccccaaaaatatccaagaaacccatcacagttgtagactccatggttggagtagtggtagatgggggttaggtgtactggtagcaaggaggtttttcaccatgctttttctgtcttttgaactttgaattatctgaatatattaactaaaaatttaactgtaagttaatacacaagtaagtaaaattggattttaaaaaagtcagggtcacaaatataagcagactcacacaaaaataaaatcattcgttggaaaagacatggaaaataaaaayacaaaaaggaaataaaatcacttagtaatgccatagttctgaggttatcacggttaatatctaagcataattccttctagtctctttattctagtgattttgaggatattacattttggtcttaatactttgttttcaatggttatattttagtttttgctctaatcaaca

SEQ ID NO: 503682 - DNA, 651 bp, Homo sapiens
caccagtagtgtcgttgttggtttcttttctgtgtaaacaaacatttttcaatagcaaaattgaagggattttctcttaatttataataggaacaatgatatcttcagaatgaaacccagtttgctgagggaagaaaatggacaatcgatagggatggtgttcttaaggttgcagggctgttttctttttttatgaacatttcaaaacatgaayattgtctttcaaaatggccacctgggtactctttctctcctaatgtccccacacagaaaattaactaacgaaacatgtaagctagaatgctgtttgtttgaagggtagtatggaattatgaaaacaaattaattaagatgtctctttttatgggacttaaatatgtttatattgatatgcaagtgtgaattgagagaaacactccagcctactgagttttttttaatggaattaagaagctcccagtagtttgttacaatacctcaagaccatgtgagtcacttacattttagaaagtgctttcccatatgtgatctcatttaatcctatggcatgcttgtaacatacaaagtgttttagaaatgtttgtagatttggcaaaatatagctgaactgaaaatttaattcttttagaaagatatactaactgtcttgta

SEQ ID NO: 503683 - DNA, 639 bp, Homo sapiens
tagttcactattatttttaaaaaactggagtaaaatatacatcacaaaatttgccattttaaccactttaagtgtacaactcagtggtattaattacatttacaatgttgtgcaaccatcatcaccaactrtttctaatttttcatcacttcaaacagaaactctacaaccactaagcaaaacctccccatttcctccttcccacaggccctggtaacctctaatctactttctccgtctatgaatttgcatggtgtctggctcatttcacttataatgttttcaaggtttatacatgttgaagcacatatcagaacttcattcctttttacagctaaataatgggtcaaaatatgaaaggtaaactgtatagtttatagaaaataacagagtatatctttatgacactaagtaagaaaataattcttagccatgacattaaaatgctagtcaaaaaggaaaaaaaaaagtgttaaaactgtatcaattaagaatgtctgttctttaaaagacaccaaaacatgtactgaaaaagctagtcacagagtaagagtagattttgcaacccatataaccaatgatatgccagtattcagagaaatatatttgaacacccatctaaatcgggagggagcgggc

SEQ ID NO: 503684 - DNA, 639 bp, Homo sapiens
tagttcactattatttttaaaaaactggagtaaaatatacatcacaaaatttgccattttaaccactttaagtgtacaactcagtggtattaattacatttacaatgttgtgcaaccatcatcaccaactatttctaatttttcatcacttcaaacagaaactctacaaccactaagcaaaacctccccatttcctccttcccacaggccctggtaacctctaatctactttctccgtctatgaatttgcatggtgtctggctcatttcacttataatgttttcaaggtttatacatgttgaagcacatatcagaacttcattcctttttacagstaaataatgggtcaaaatatgaaaggtaaactgtatagtttatagaaaataacagagtatatctttatgacactaagtaagaaaataattcttagccatgacattaaaatgctagtcaaaaaggaaaaaaaaaagtgttaaaactgtatcaattaagaatgtctgttctttaaaagacaccaaaacatgtactgaaaaagctagtcacagagtaagagtagattttgcaacccatataaccaatgatatgccagtattcagagaaatatatttgaacacccatctaaatcgggagggagcgggc

SEQ ID NO: 503685 - DNA, 542 bp, Homo sapiens
gcttcaccataaactagtaaaaagcatctaaactttttctagacacttggataaggaaaataagttttatgaatccatcctgaaaaaatgagaaatgaatgtgaacatgactaatttaatgaatatcagcatttataatatttacacgtggtgaagatgagggccttaaatgtctgttcgttttgtactttacaggaatatcttctgagaccactctaatggaagttgatacaggacttccagtaaaagggaattcaccaccatattatacagcccgttcacagttagtggctcaatattaagaaagtccttttatgccttaaatggagtatacctcctagaaatgcccacgaattgctctgacttttatttctacagtgcatatgcagcctttcctccctcktatctggcttggtaaatttaaagtcacttttcttcagaattctgtttaggacctttctctttccactctgtacattttcttaggggtgatctcatttgtactcatccttgcaattaccatctgtatgttattgattgtt

SEQ ID NO: 503686 - DNA, 504 bp, Homo sapiens
tgtttatatagctgggaaacagatgggaacttcaaaggacaggaatgctttgcttctcttgaaaattctgctctgagtatttgtcttagtcttctcgtgctgggtacttaaacaacagacatttatttctcataattctggatgctggaagaacaaaatcaaggtgcaggctgatttgattcctgttgaggccscactttctggcttgcaaacagccatcttatcactgtacgctcttagagacttctctctagagtctcttcttataaggcatgaatcccatcgtggggtctccacccttatgacctcatctaaaccaaattacctcccaaaggacccacctcctaatcatcatactggaggttaggcattcaacctatgaactgggtggaagggagcacaaaaattcactcataacaatcctagatgtctggatgtttgcccatctccatgcatggtagaagccatgtaatccccctaccctgtcagggtttcctgtgacac

SEQ ID NO: 503687 - DNA, 504 bp, Homo sapiens
tgtttatatagctgggaaacagatgggaacttcaaaggacaggaatgctttgcttctcttgaaaattctgctctgagtatttgtcttagtcttctcgtgctgggtacttaaacaacagacatttatttctcataattctggatgctggaagaacaaaatcaaggtgcaggctgatttgattcctgttgaggccccactttctggcttgcaaacagccatcttatcactgtacgctcttagagacttctctctagagtctcttcttataaggcatgaatcccatcgtggggkctccacccttatgacctcatctaaaccaaattacctcccaaaggacccacctcctaatcatcatactggaggttaggcattcaacctatgaactgggtggaagggagcacaaaaattcactcataacaatcctagatgtctggatgtttgcccatctccatgcatggtagaagccatgtaatccccctaccctgtcagggtttcctgtgacac

SEQ ID NO: 503688 - DNA, 504 bp, Homo sapiens
tgtttatatagctgggaaacagatgggaacttcaaaggacaggaatgctttgcttctcttgaaaattctgctctgagtatttgtcttagtcttctcgtgctgggtacttaaacaacagacatttatttctcataattctggatgctggaagaacaaaatcaaggtgcaggctgatttgattcctgttgaggccccactttctggcttgcaaacagccatcttatcactgtacgctcttagagacttctctctagagtctcttcttataaggcatgaatcccatcgtggggtcwccacccttatgacctcatctaaaccaaattacctcccaaaggacccacctcctaatcatcatactggaggttaggcattcaacctatgaactgggtggaagggagcacaaaaattcactcataacaatcctagatgtctggatgtttgcccatctccatgcatggtagaagccatgtaatccccctaccctgtcagggtttcctgtgacac

SEQ ID NO: 503689 - DNA, 638 bp, Homo sapiens
ctgcaaaattaggaaagtgaaaaagtgatagtactgaaagaagaattagataaatagtactcagcaataaataggaatacattttgatacacagaagcaacttggaaaaatcttcaagaaattacactgagaaaaaaaaaagtcaatcacagaactttccatattttcctggaaagataaatttgtgaaaatagagaagaaattagcagtcgcaaactattaggtctggagtaagtatggtaggcaacatgggagtgagtttggttataacagggcaagaggagatattctagtgctggaactgctcactctccaagtaatatctacaatatggcagatatgggaactctggaccaaccttcctctgacacacacactgattagcaaaaattaaccctcaaattctattgctgagaattacaaattagttgaaatactcccctgtactctggaagaactaatagagtttttgttgggttcttggggtttctatatataagattatgatgtctgcagacaagaataattttgacytctttttaaaaatcaatttggatgctctgaatttggtgatatgtatatgttctttattacgttgaaatatgttctatctacacctaatttggtgtttaattaat

SEQ ID NO: 503690 - DNA, 576 bp, Homo sapiens
tccagctgtggggaggggagggtcatcttcaccaaaccagtccgaggggtcgaagccagacacgagaggaagagggtcctggggaaggtgggagagccaggcaggggcggccttgggaatcctgccacagacaggggcgagggccctgtggagctggcccatctggccggcccgggagccagaggctgaggagtggggcagcccccatggaggcctgcaggaggtggaggcactgtcagggtctgtccacagtgggtctgtgccaggtctcccgccggtggaaactgttggcttccatggcagcaggaagcggagtcgagaccacttccggaacaagagcagcagccccgaggacccaggtgctgaggtctgagagggagatggcccagcctgaccccactggccactgccatcctgctgccttcccagtggggctggtcagggggcagcctggccactgcctagctggaatgggaggaagcctgcaggtgrcaccggtggccctggctgcagttctgggcagcatcctcccaagcagagaccttgctgaagctcctggggtgtggggtgtgggct

SEQ ID NO: 503691 - DNA, 458 bp, Homo sapiens
aatttgcctcaagatgaatgttacctagagtgtcaatcatatctgatgtagacgatgtttaaataagactttggactttgattttaaagttgatgctggaatgagttaagacttttggagttactgggatggaatgtatgtatttttaatgtgataaggtcatacattttgggggactaggagtagaatgctatgatttgaacataccccctagaaattcatgttgaaatgtaatcccattgtggtggtattaagaagtagggcttttgggaagtgattaagttatgcaggctctgtcctcataactgaattactaccctgtcaaaaaggcttcaaggacagttcaccctgtattgctcttccactatcctccatgcgaggaccccagcattcrttccctctggagaaggctgccacaacacaccatcttggacgcagagatagggtccctcaccaga

SEQ ID NO: 503692 - DNA, 543 bp, Homo sapiens
tcttaaaacacagcctgggatggaatggccatggcatttttttcagagaacatcctttatctgctatgactgaatccttaggaaatgtaagctataaccctttgattttcaagaactaccgaataagtgtatgaagaggtggttttttaaaacttcaagttggaatttttatgaggtcactgtgtaatttgaagaattgtgtgagattgtcatgatataaattccttttaaggactgataaatagaatgaaaagtttccaggtagtttaaaactccacaggtcagtttccttttcattcctgcttcactgtggtttataagcctacgggagagcaccgttgctcagatgctactgtgagcttcctgtcyggtgttagaaagtaactagttaaaagttcattttagaatgtatggtttttggggatgaactaagaattagttattagttccaaaggactgagaaccaattttaatattttcacatttataggaaagaaattcatatgtccctgaaacttctaggacaaaaccaaacaagtaagg

SEQ ID NO: 503693 - DNA, 645 bp, Homo sapiens
ggtctcctgacttttaaaaaggatctacacctatatttaaatgtttacaaagacaatttcactggaaacccacatgagagcgcggtgacttctaactttgattgtggttatattcttgggctcaggcagtgttcttagattggcaaaaatacttcaattcagtcagactgaaatccaaccccttcctaaaaataggatgcacagttttgcatggatgtttgcttcagaaccagcagtgctacgtgttttatagcacttggacttgccacctaacttcctactattctctcacttctatctatccctgtctgcaaggcaggttccatcttactttgcagtcacaaattcccatcacactggagtgcagcagttaatcaagtaggcagaaaaatcaggaaaaaagaaaaacttttatcttttgtggaatgtaactggcggccctatattgtgggaagagctatcagagataccaaatggaacagcactgtggcatttggcaccagacatgagactccagcagacaatgggctgattccttggacaaagggaataaagggccaggaactgtaggagttgccttctttgagcacagtaggtcagttcctctcagcacattccctgtttcrggctactatttcattagca

SEQ ID NO: 503694 - DNA, 532 bp, Homo sapiens
atgcattgattcatgtttcattcaagttttattcggtatatcctccactgaaacattctgttaggatagactcctattcaaaatatactgttaacaatcacttctcatactgagtcagccagttgaggggagtttatcctggaaaattaaatttattaagtatttaatatagtttttgcagaattatgcatcttgtgtaatggttaagaacatgagcattgaaaaaaatctctacatctaccaagtctggtaccaaatcctgactctatcattctctagctgagaaacwctacaaagttacttaacttctctaattctcagttttttcacctttaaaatttggaaaataatagtacctacttcataaggctattgtgtggcctaaagagacaatgatggcacttagtatagtgcctggcagacagaaaataataaaagcagctattatttgagtatctaagtacagaaacaaaaactaatgaaacaagatttctgaacaaaaaaactctaagtttataatactgttattaat

SEQ ID NO: 503695 - DNA, 597 bp, Homo sapiens
  misc_feature (1)...(597): n = A,T,C or G
gtgcctgtcagtaatcacgcataattgctgccggcgccgccgccgccgccgtcaccgctactcttgccaccgccgncgctgctgcttgagatcctgttgctagtttgattaactcagggttgggctgctgcgtgcgactcttccagctcccggcgcgtccccagaggtccctaccgggtggcacgatctattatctaggaagccaatcgatgtatgaccgcccggtgtaggtcaggagagaggcgggagacggcaggggatggaagactctttaggtgcctgttccttgacttacatccacaaaaatcaatgggattttattaaaatgcattttctcattcgaacttctatctgtccaatgtacttggtatttgatctgtgaaaggaggagggggtggggttcaagagagaacagggccctttcagaagcacaagattagaaaagcgtgatactcaatctccagctacggaaaactaaaatagagtagcccttaagttgaggtgggcctctcctgcttgggtggccggaagcatttatctgtgctctaacaatgggagtttgacaagtgcagytggagccagagctcactcaggtgg

SEQ ID NO: 503696 - DNA, 625 bp, Homo sapiens
tagctggcttaggacagagtctataataaaagaacatatgtaactcatgacaatggagatcagacctgtgacctcatgaacagtgtttgaaaattttttacttttgtttattgactgtatctcacctcttgtgaaaagaattatagcaaatgtaaaacaaatgatatatacaacaagttaataaggtrgaactacaaaaacaggaagagagaaaacagataatattaaatataagagttaacagttgtctctttgagggcagcaactatgataacacggttcaatctaacatagttctaagtatgtacttggcacttgttatgtgtgaacatttgagcaaatgaataccgtgaatgagagtctaatttgcctttgagcttcctggcggctagggcaaaaagagaaataaccagcttatagatatttttgcacctggattagagtggtaattgtggatttgtttgattaaacacaaaagaaaatgtacccttaatcctcatacctccagattcttgtgcccaaggaagtaaacagtgaatctttccatcccgctcctcagcacagtgccttgcataaaataaatatttgttgcatgaatatattaataagatcattaaaataaagg

SEQ ID NO: 503697 - DNA, 625 bp, Homo sapiens
tagctggcttaggacagagtctataataaaagaacatatgtaactcatgacaatggagatcagacctgtgacctcatgaacagtgtttgaaaattttttacttttgtttattgactgtatctcacctcttgtgaaaagaattatagcaaatgtaaaacaaatgatatatacaacaagttaataaggtggaactacaaaaacaggaagagagaaaacagataatattaaatataagagttaacagttgtctctttgagggcagcaactatgataacacggttcaatctaacatagttctaagtatgtacttggcacttgttatgtgtgaacatttgagcaaatgaataccgtgaatgagagtctaatttgcctttgagcttcctggcggctagggcaaaaagagaaataaccagcttatagatatttttgcacctggattagagtggtaattgtggatttgtttgattaaacamaaaagaaaatgtacccttaatcctcatacctccagattcttgtgcccaaggaagtaaacagtgaatctttccatcccgctcctcagcacagtgccttgcataaaataaatatttgttgcatgaatatattaataagatcattaaaataaagg

SEQ ID NO: 503698 - DNA, 541 bp, Homo sapiens
tagagctggaatagaccttaaagttcatctcgtctgatgattttaaaaaattaagtcatcaagtcttttcttcagatgaaagcatagttggaagcctgatatacacataagataaaagcagatctggttgagccagggacaaaagacttgaagcctcaacctccctccccaccscccccagcaacacacacactcacctagaaatggggaaatagagtctttgctaagtgaagtgacctgattaggaagtcgcaggtttagaccaaacccatgttggaggtccaggcttattactcctcatgatgaaggccttagctagattaaggctgtgccactataagagttctgctccctggaacgggagtgcctgcctgcagcctaacctttggtggaaggatttgggtgaacacagttcagaaatgcaggactcaatgttcaaggatggctccagaagcatgcagaatgaattggtccctggctgagtctgcaaaagggaagacgatccagcagacaagtatgtttctttcctgttctcagggag

SEQ ID NO: 503699 - DNA, 541 bp, Homo sapiens
tagagctggaatagaccttaaagttcatctcgtctgatgattttaaaaaattaagtcatcaagtcttttcttcagatgaaagcatagttggaagcctgatatacacataagataaaagcagatctggttgagccagggacaaaagacttgaagcctcaacctccctccccaccgcccccagcaacacacacactcacctagaaatggggaaatagagtctttgctaagtgaagtgacctgattaggaagtcgcaggtttagaccaaacccatgttggaggtccaggcttattactcctcatgatgmaggccttagctagattaaggctgtgccactataagagttctgctccctggaacgggagtgcctgcctgcagcctaacctttggtggaaggatttgggtgaacacagttcagaaatgcaggactcaatgttcaaggatggctccagaagcatgcagaatgaattggtccctggctgagtctgcaaaagggaagacgatccagcagacaagtatgtttctttcctgttctcagggag

SEQ ID NO: 503700 - DNA, 541 bp, Homo sapiens
tagagctggaatagaccttaaagttcatctcgtctgatgattttaaaaaattaagtcatcaagtcttttcttcagatgaaagcatagttggaagcctgatatacacataagataaaagcagatctggttgagccagggacaaaagacttgaagcctcaacctccctccccaccgcccccagcaacacacacactcacctagaaatggggaaatagagtctttgctaagtgaagtgacctgattaggaagtcgcaggtttagaccaaacccatgttggaggtccaggcttattactcctcatgatgaaggccttagctagattaaggctgtgmcactataagagttctgctccctggaacgggagtgcctgcctgcagcctaacctttggtggaaggatttgggtgaacacagttcagaaatgcaggactcaatgttcaaggatggctccagaagcatgcagaatgaattggtccctggctgagtctgcaaaagggaagacgatccagcagacaagtatgtttctttcctgttctcagggag

SEQ ID NO: 503701 - DNA, 541 bp, Homo sapiens
tagagctggaatagaccttaaagttcatctcgtctgatgattttaaaaaattaagtcatcaagtcttttcttcagatgaaagcatagttggaagcctgatatacacataagataaaagcagatctggttgagccagggacaaaagacttgaagcctcaacctccctccccaccgcccccagcaacacacacactcacctagaaatggggaaatagagtctttgctaagtgaagtgacctgattaggaagtcgcaggtttagaccaaacccatgttggaggtccaggcttattactcctcatgatgaaggccttagctagattaaggctgtgccactataagagttctgctccctggaacgggagtgcctgcctgcagcctaacctttggtggaaggatttgggtgaacacagttcagaaatgcaggactcaatgttcaaggatggctccagaagcatgcagaatgaattggtccctggctgagtctgcaraagggaagacgatccagcagacaagtatgtttctttcctgttctcagggag

SEQ ID NO: 503702 - DNA, 440 bp, Homo sapiens
agtgggatctaaatgatgagaatacatggacacatagaggggaacaatagaaactggggcatacctgagagtggagagtgggaggagggagaggatcaggaaaaataactaatgggtactaggcttaacacctgggtgatataataatttgcatatcaaacctccgtgacatgagtttacctttataacaagcttgcacatgcaccccktaatataaaattaaagttaaagaaaaaaaaaacacaaaatgcccttctgattatatatttttcttgtaccccaaatttgattaaatgacttaataagaaaaattggaattatttctataagtctttttcccccctaacatccagcctatgctgatttattattctaatgattgaagattctctagtgtcttaacataactattatcataatctggggctctgatgaagagg

SEQ ID NO: 503703 - DNA, 440 bp, Homo sapiens
agtgggatctaaatgatgagaatacatggacacatagaggggaacaatagaaactggggcatacctgagagtggagagtgggaggagggagaggatcaggaaaaataactaatgggtactaggcttaacacctgggtgatataataatttgcatatcaaacctccgtgacatgagtttacctttataacaagcttgcacatgcaccccgtaatataaaattaaagttaaagaaaaaaaaaacacaaaatgcccttctgattatatatttttcttgtaccccaaatttgattaaatgacttaataagaaaaattggaattatttctataagtctttttcccccctaacatccagcctaygctgatttattattctaatgattgaagattctctagtgtcttaacataactattatcataatctggggctctgatgaagagg

SEQ ID NO: 503704 - DNA, 597 bp, Homo sapiens
cagtgcgaccccggcgtctccggctcttagtgacgggcgcggctctgggcgggacctcggggccgcctgcggtctgtgattggttctcgagtgcaatgctccgccctggggcggggctggagggaccaaaggctacgtgcgcgccttgcgcttcccccagctcctctgactggggcgtccgactggagctcagccgcgcttgtccggtgctaggtcatcctgccaaacacccgaggccccaaagatggtgcaaagtgaacttcagctacagcccagagcaggcggacgagctgaagctgcaagctggggagatsgtggaaatgataaaggaggtgaggggtgaggtgatgggaccgtttgggggaggatgatggaacgcgcctccctagtgagcggggtgggaagtgagggtgtggacggtgggaatggcgacggtgcagatacggggaagcgcgggagggaaggagggaggaaggggcgcttgggcagaaccaagggtggcagattatcctagggactcttggggcagaaccagacgcctctgcgtcctcccctctccccagattgaggacggctggtggctggggaagaagaacg

SEQ ID NO: 503705 - DNA, 599 bp, Homo sapiens
tgtggtcgccaggacccccccagagccaagaccttctccagaaggtgacccttcccccccaccaccaccaatgtcagccctggtccccgacactcccccggacacccctcctgccatgaagaatgccactagctctaagcagctcccactggaaccagagagcccctcagcgagcgctcgggcctaggcagcccccccgcaggaagagtccccttcctctgaagcaaagagcagaggacccacctcacgcaccatgggcccacgggatgccagacctcctcgaaggagcagccagccatctccaacagcagtgccagcctccgacagccctcccaccaagcaaggtgtgtgtaatgaccccrgcctgggcctaaacctcttggctcagggtcctggccctggatcatgccaactgaaagagtcctgtttgccctagaggagataaagaaaggatggggtgaggccggagggagggatctgaggctgactcctctttggggacagccttttgacctgtctgttcttgttccctctgctcagaggtgaagaaggcaggagagagacacaagctggcaaaggagcggcgagaagagcgggcc

SEQ ID NO: 503706 - DNA, 568 bp, Homo sapiens
attttaaaacataaatcacccctgaaaccccttccttcctccctccatctgttgtaggctgggcgcagtrgcttatgcctgtaatcccagcacttttgggaggccgaggcaggcggatcacctaagcgtgggagtttgagaccagcctgaccaacatggagaaacactgtctctactaaaaatacaaaattagccaggcgtggtggcacatccctgtaatcccagctacttgggaggctgaggcaggagaatcgcttgaactgggaggtggaggttgcagtgagccaagatcgcgccactgcactccagcctgggcaacaagagcgaaacaccatctcaaaaaaaaaaaaagttgtaaataatgttatatatgtatgtgtctatacatattaaagagagagacggcaatccttcctaccatcagaaggcttcaatggcttccctaataaccttctctctccaactcatctgtaatcactctccaaagtgtcaaacacaattggcctcccttcagttctgaaagcacactaaattcttcccatcttccagtttgtgcacttactgtttc

SEQ ID NO: 503707 - DNA, 629 bp, Homo sapiens
tgaaaaagtgagacaacagcacaataaatacccaatcaacctggaggcttctgatctataataaatgctgtggtcttcagtcattgagttttgatgtgatttgttttgcaggaatagctggcttcctttatggctcccagtcctgttgccctaatgccactgtggcttaaagaacacaagcaaaattgcagctttctggggtccaatttttggggacattattccttttcatgagggctctactcttatgacctaattttctccccaaggtcacatctcctaataccatctgctatggtgtatatgttttccccaacaaacctcttgttgaaattttatccccggtctggcagtgtaggcagatggggcctggtgggaggtgtttgggtaacatgggtggatccctcatgagtaagtgagtaccctccttttcgggtgagtgacttctcagtatcttacttctcacaagagctggttgttaaaaaaaaaagcctggacccctcaccttccctcttctcttgccatgygatctctgtacacactggctcccctttgcttctctgatgagtagaaacaaccagaaacccttaccagatgtaagtgcccaattgtgaactttctagccttca

SEQ ID NO: 503708 - DNA, 478 bp, Homo sapiens
aggtttcttagttgtagtagaaagacattgaaaaagtaaatttaaaaaggaaaaagtaaatttaaaaaggaaaaagctcccctcagagggaaggttgcatgacacaatagtgaatacaacaggaagaaggctgtgtgacttagtatcttttgcattctgtgcgccaaccaggtcatttcccccaaaatatcaactatgtgatcaataagccttatgtcttttttcagtactgtgactagataggactactagctctctcatttggttgatcaattgatctattggtaaatagtcaggtgaaagggacccaatcyacaataatacccaacttttctgaaggttagtctttttctaggctcaaatttttccagtccagaaaagagaactcctcacagccttggaaagacttacctttagccattataaaggtgacaggttcttactccaatttgacaaacttagttgctatagtgggttg

SEQ ID NO: 503709 - DNA, 585 bp, Homo sapiens
catcatgcctactagtagaatactggagccagtcctattaatatcgyttataaaagaaggagcttgcagccatcattactgtttaacttagtattacatgctcagaactcaaaatagtcaactacaaaactgttgaaatttatttaaaagtttagtgaagtgtctactatcaagataaaagtttaaaagttgatcatttccttctttcccaataataactagttataataaatgacaggcaggataatatttccttcacaatagtaacaaaaatacaaataatataggaatacatctatcaagacatatgtaggactttattaaagaaaagctttctaacggttgtaaattgttttaatacgtggcaggtatacttcctcataggaagactaaatattataatatatcagaccttctctaaataaatttctagcctttccatagtcctatcgaagcctataggcctttacaaaatgattctaaagatatttggaataaaaattcataagaatagctaagcatagtttcaagaagaagagaaatatgtgaagagtttcctcagtaaaagccaaaatataaaattat

SEQ ID NO: 503710 - DNA, 585 bp, Homo sapiens
catcatgcctactagtagaatactggagccagtcctattaatatcgcttataaaagaaggagcttgcagccatcattactrtttaacttagtattacatgctcagaactcaaaatagtcaactacaaaactgttgaaatttatttaaaagtttagtgaagtgtctactatcaagataaaagtttaaaagttgatcatttccttctttcccaataataactagttataataaatgacaggcaggataatatttccttcacaatagtaacaaaaatacaaataatataggaatacatctatcaagacatatgtaggactttattaaagaaaagctttctaacggttgtaaattgttttaatacgtggcaggtatacttcctcataggaagactaaatattataatatatcagaccttctctaaataaatttctagcctttccatagtcctatcgaagcctataggcctttacaaaatgattctaaagatatttggaataaaaattcataagaatagctaagcatagtttcaagaagaagagaaatatgtgaagagtttcctcagtaaaagccaaaatataaaattat

SEQ ID NO: 503711 - DNA, 633 bp, Homo sapiens
tgtcggaaaccaagtccaacattctttccactaattctttcatctttactgataccataatgatgcagacatgcttttccacatgttctggttgatatcycagatgtggagacgcaagacaaataaatttgaacactggtagttgtggcagaaataagccttgtgtaatttggagcaaaacaaagtcactgagccacagaaggcatgttgaggcagcaaagtgcttgcgaatctgttcctgaggtggtgtaaaactgaaaacagaggagtaaaaaaggtataattcactgatttgacatgaatcaagctaaacagcatcagcaattttattttggcaacttgaaatgtgccttgacttttgtaaatgtatacctctcaagtgaatgaccctggaaataactatttaagtgagctagaaaagtcacttataaccatagtaaaatataaataatattgaaattccttgtcaaaaagcccttagtattttaataaattaatctctatttgtcacatttaaaagctacttctttgtctctcaacagtttcattcatataattttttatttatattgatgtcaggcaaaatattgatcataacaaagaaaatttctacttacgttatacaaatgtctt

SEQ ID NO: 503712 - DNA, 633 bp, Homo sapiens
tgtcggaaaccaagtccaacattctttccactaattctttcatctttactgataccataatgatgcagacatgcttttccacatgttctggttgatatctcagatgtggagacgcaagacaaataaatttgaacactggtagttgtggcagaaataagccttgtgtaatttggagcaaaacaaagtcactgagccacagaaggcatgttgaggcagcaaagtgcttgcgaatctgttcctgaggtggtgtaaaactgaaaacagaggagtaaaaaaggtataattcactgatttgacatgaatcaagctaaacagcatcagcaattttattttggcaacttgaaatgtgccttgacttttgtaaatgtatacctctcaagtgaatgaccctggaaataactatttaagtgagctagaaaagtcacttataaccatagtaaaatataaataatattgaaattccttgtcaaaaagccctyagtattttaataaattaatctctatttgtcacatttaaaagctacttctttgtctctcaacagtttcattcatataattttttatttatattgatgtcaggcaaaatattgatcataacaaagaaaatttctacttacgttatacaaatgtctt

SEQ ID NO: 503713 - DNA, 633 bp, Homo sapiens
tgtcggaaaccaagtccaacattctttccactaattctttcatctttactgataccataatgatgcagacatgcttttccacatgttctggttgatatctcagatgtggagacgcaagacaaataaatttgaacactggtagttgtggcagaaataagccttgtgtaatttggagcaaaacaaagtcactgagccacagaaggcatgttgaggcagcaaagtgcttgcgaatctgttcctgaggtggtgtaaaactgaaaacagaggagtaaaaaaggtataattcactgatttgacatgaatcaagctaaacagcatcagcaattttattttggcaacttgaaatgtgccttgacttttgtaaatgtatacctctcaagtgaatgaccctggaaataactatttaagtgagctagaaaagtcacttataaccatagtaaaatataaataatattgaaattccttgtcaaaaagcccttagtattttaataaattaatctctatttgtcacatttaaaagcyacttctttgtctctcaacagtttcattcatataattttttatttatattgatgtcaggcaaaatattgatcataacaaagaaaatttctacttacgttatacaaatgtctt

SEQ ID NO: 503714 - DNA, 486 bp, Homo sapiens
ttatcctcataaaagcccagcatggcaattacactttccttgttttacatttggaatgcccaacagttggtgagggcttaagtcattggctttggagacaaagggaggataggttaatcacatacttgcccatgagaaataataaggagtcttctattccagttgtggaatggtgtttggcaacactggttcctaattctcctaggatgaattattttaagatagaaaatataatttttgtttttaagtaggtagcccgttatgtaactgacattatcctaggtattttacatgttacgctattcctttacgcagtgatccttccctgtgattaaagcaagttgatataatttcaataatacttgtgcmcctgaaatcgcaaatgagaggttagatacagccaatgcctaaaacacataggtttgaggcatagataatttgatgaacaaaagcttttaaagagattgcaaatccagtggcttgcag

SEQ ID NO: 503715 - DNA, 616 bp, Homo sapiens
gtttatttttcagtctaatttgatcccagtggcacaccctcactggaagccttgtccgccactattgaacccttgttaaatgacaaagatgtacatacaatggatctaagtgacctgaagtatcttccacttggaactttctgtgcttctttttgactttcttcagtgtctctataccttgaagctttgcactactcatgtttgtgccttacttctgagtttttaggaggcatcttrgtatgttaactattctatacaacacgcatttgtatttccttgatttttacatttataatctctaactgagatgaaaactttaccaattagggatgtgctgatgggttcctgaacatgacatactcaagttctgctgtaataatatttcttagaaacgtatcaggaggaaacttcagttaccatcagctataaactaatgtgaaacaagtttctcatgcagtggagtcctcaacaattgtgtgttctcatctgtgaactattaaaggataataatagcagctaacgattactgagcacttacaaaggcactatgtactacattgtcatgtttgaattctctacagccctacgaaccagacattattatcctcatttgaca

SEQ ID NO: 503716 - DNA, 593 bp, Homo sapiens
acttttttttagaagtgaacagaccacttgtcttgtataatatccaacaagttggatgtgtctaactggtttctcatgcttaggttcaggttaaacatttctggcaagattaatttacagaagttttgtactcaatgcacaacaacaaaggacattaaaaagaactcacactgatatttttaattcaaatttgatattacatggtttcttctttagctattcaaatgttatatttatatttctttatctctcacagtgaaacccttggttcctcttagtaatatacttatttcacatactataaatcaaacagtttcagaattaaaacaatattacagcctgcaataaactgttatgtamagcttaatatttctttacagttcttttttcttttataatggaccctattaagataaaacaaatgttttcaaaagtatgtgaattaattcctctccttgcatagctatatttaatattcaatttaatatgaatattcaatttaatgaatttaatattcagtttaatattcaatttaatgaatttaatattcaatttaatattcaatttaatatgaatttatattcaatttaata

SEQ ID NO: 503717 - DNA, 637 bp, Homo sapiens
ctgctacagcttcctcaagttagcaagaccatcttgttttgctgatttcagcttgctgggtttcagtacmgatagtcctaggcagggagatgagacaaatgtcagattccctttggtagtttccattctttcaaagacttcagtcatgtatagcctgttgtctagttttacatgtgtataatgtagatgggctagtccagtacccattacaacatattaatcaaaaccaagaggtgttgggcacttttttgtaatgaatgtaatacgctttaggagaacaggctcacgacatatttaagttagaaatttgtagtttaattccactttgctttctataggactcatctaagagtccctattgatgcaacttgaatttaagaagatcatagaggttcttgaaacattctgaacgaattttatttttcaaattctgagcattttagaattttctccacagtttctctagcattgcttatcttcttttgccttctttactttcttttttaccttcatgttttccttgtctttttagttaacaaatacttgtgcagcacatagcatggacctgacattattctaaatgcttaatagatatttatttaattttcaagtgcaatggatgaagtaaaaactggag

SEQ ID NO: 503718 - DNA, 637 bp, Homo sapiens
ctgctacagcttcctcaagttagcaagaccatcttgttttgctgatttcagcttgctgggtttcagtaccgatagtcctaggcagggagatgagacaaatgtcagattccctttggtagtttccattctttcaaagacttcagtcatgtatagcctgttgtctagttttacatgtgtataatgtagatgggctagtccagtacccattacaacatattaatcaaaaccaagaggtgttgggcacttttttgtaatgaatgtaatacgctttaggagaacaggctcacgacatatttaagttagaaatttgtagtttaattccactttgctttctataggactcatctaagagtccctattgatrcaacttgaatttaagaagatcatagaggttcttgaaacattctgaacgaattttatttttcaaattctgagcattttagaattttctccacagtttctctagcattgcttatcttcttttgccttctttactttcttttttaccttcatgttttccttgtctttttagttaacaaatacttgtgcagcacatagcatggacctgacattattctaaatgcttaatagatatttatttaattttcaagtgcaatggatgaagtaaaaactggag

SEQ ID NO: 503719 - DNA, 595 bp, Homo sapiens
tggaaatgccatcctcagtgttaatgaaagcaaagattactgttccagattataaaatgcagggcaatctcaggccrtagaaaagaaaagaatgaattaattaaagagagtaataaccctcttaaacaccccatcctttgctcctttctccagactgcaggtggccttctttgtcacagtggaggagacagctatatgatctattttgttccccaggacttatctccagaggcacccagtgctttttaaatgtagtttttagtcctaatgtaggcattgtcctcctgtttaacttagagaaagcgtaggctctggagggaggcagaataaaagagttcaggctttggaatcagacagattcagcttcgagtttcactctgccactttctagctgtgtgatcctgcaatagacacttaacatgtctttttctataaaatgagaatgcctacctcagagttttgaagagtattcatgtttatatccctgaatttttgcacacgggttgacatagaatagatgctcaataaatgtgttgaactaaacttataaagagagagaagctattcgaaagcaccatgtatatccagtcccagg

SEQ ID NO: 503720 - DNA, 595 bp, Homo sapiens
tggaaatgccatcctcagtgttaatgaaagcaaagattactgttccagattataaaatgcagggcaatctcaggccatagaaaagaaaagaatgaattaattaaagagagtaataaccctcttaaacaccccatcctttgctcctttctccagactgcaggtggccttctttgtcacagtggaggagacagctatatgatctattttgttccccaggacttatctccagaggcacccagtgctttttaaatgtagtttttagycctaatgtaggcattgtcctcctgtttaacttagagaaagcgtaggctctggagggaggcagaataaaagagttcaggctttggaatcagacagattcagcttcgagtttcactctgccactttctagctgtgtgatcctgcaatagacacttaacatgtctttttctataaaatgagaatgcctacctcagagttttgaagagtattcatgtttatatccctgaatttttgcacacgggttgacatagaatagatgctcaataaatgtgttgaactaaacttataaagagagagaagctattcgaaagcaccatgtatatccagtcccagg

SEQ ID NO: 503721 - DNA, 595 bp, Homo sapiens
tggaaatgccatcctcagtgttaatgaaagcaaagattactgttccagattataaaatgcagggcaatctcaggccatagaaaagaaaagaatgaattaattaaagagagtaataaccctcttaaacaccccatcctttgctcctttctccagactgcaggtggccttctttgtcacagtggaggagacagctatatgatctattttgttccccaggacttatctccagaggcacccagtgctttttaaatgtagtttttagtcctaatgtaggcattgtcctcctgtttaacttagagaaagcrtaggctctggagggaggcagaataaaagagttcaggctttggaatcagacagattcagcttcgagtttcactctgccactttctagctgtgtgatcctgcaatagacacttaacatgtctttttctataaaatgagaatgcctacctcagagttttgaagagtattcatgtttatatccctgaatttttgcacacgggttgacatagaatagatgctcaataaatgtgttgaactaaacttataaagagagagaagctattcgaaagcaccatgtatatccagtcccagg

SEQ ID NO: 503722 - DNA, 595 bp, Homo sapiens
tggaaatgccatcctcagtgttaatgaaagcaaagattactgttccagattataaaatgcagggcaatctcaggccatagaaaagaaaagaatgaattaattaaagagagtaataaccctcttaaacaccccatcctttgctcctttctccagactgcaggtggccttctttgtcacagtggaggagacagctatatgatctattttgttccccaggacttatctccagaggcacccagtgctttttaaatgtagtttttagtcctaatgtaggcattgtcctcctgtttaacttagagaaagcgyaggctctggagggaggcagaataaaagagttcaggctttggaatcagacagattcagcttcgagtttcactctgccactttctagctgtgtgatcctgcaatagacacttaacatgtctttttctataaaatgagaatgcctacctcagagttttgaagagtattcatgtttatatccctgaatttttgcacacgggttgacatagaatagatgctcaataaatgtgttgaactaaacttataaagagagagaagctattcgaaagcaccatgtatatccagtcccagg

SEQ ID NO: 503723 - DNA, 576 bp, Homo sapiens
tggagagtggcgtaactgagattcccagctagagcctgaattctctgaagagggggctaataatgggcaaacatagctgyccttgctgctgagcagagtagatgggtcatctaaaagtccaaatttccccctcatccactcttccccctttaggatcccaagttcaaagtgggacaatctcctatttcctggggacaacagtaaactcagaacctaatttttgggggccttacctgggggataaaactcagtttatcagggctggctttggggcaggagcgtgtgaggtaaaatccagcagagatttagcgtccagtcctccagttgaaatgagaatgaaatagtaaccccattagtacctttcctttaaatcacagctatatctggacagaaattaatgtcagcttcttttcttgaatatccaattccaatcagcatatccaattaactcgcttacctgcagccccctctaaactccttttcttgtgcttcgatttcttctctagttagccctaatttatggagccctttggtactctaatatcacattattattagtagtagtagcagtagcag

SEQ ID NO: 503724 - DNA, 507 bp, Homo sapiens
accatttgctaaacagatcaggtgtgtggtttatggatccattcagccctctcagcagaagccagtaataaaaataagattatcaaggaaagatctgtggagaattcttttgtctggtggctttgacccacatggatcacatgggacaaagtttttgagacctttataccagaggaaatgctgctagcttgaactgattcgaacagagatgggacaaaatgaaggaaggatgtcagacttctgagaatccacaggatgggccaatagagctacatggatataaacaagatattctgtaagaaaaaggaataatgacccaaaagttagttcaggagttgacaggaatggcattataaccagagggtagagggcacaggcctggaagtaatgctgtctcctyctcagttacagagagccagacacctccactcagggctgagggggtagagttgcaaccctgttgggtcgagaggactaggtattaatccaaagccttaaaacctaata

SEQ ID NO: 503725 - DNA, 479 bp, Homo sapiens
ctgtgttgcccaggctggttttgaactcctagcctcaagtgtcctcctgccttggccacccrggctcctatcttaaaatttattttattactgtccttcttttaaaaaactactggatatgtgaatagtctgcaatttcaaacagcttatttataatcattctgagtatttatatcctcttaacttgaatgaaatagaggtggcaaggaccttagtggagtttagaatcaacctttttatctatctctaagttgctgtgatgggctagttattttacttcttggtgattcagtttcctcttgtataacgtgggataacaatacctgggtctggctggtggtaagcactgaatgaggtgaggcgtataacaggcctggcactgggtaatgctgctcagtcagggttaattcccctttcttccttgtgttcctgaattctttgacctttatttatagttcattgtctaggttagctcatcg

SEQ ID NO: 503726 - DNA, 538 bp, Homo sapiens
tccttttccctataacctgcacttttagacaaaactccaaaattaatctccccaggaaccctctctgaccaaactgatcccctccatgcattctctctcttgaaaagttgagacctgaacctcagtaatacatcaaattatttgaaataagccattggctcttgattcacgtaaatttgtcttgtcttcgaaactagatttttaagtgtcttgagaggaggaagccaacatgactcaaagtccttgtacccttgacatcacccagcttagggatgagcatactgaatatacttaccatgccagtgaggtaaaggatgggatgctggatgaatgttcaaagatttcgagcccaagaatttttttctccgcttttggctataaccattctcaccagggcaacaccttctaagmatattcagaaatcattggctgttagggaagtattgcaatattcatggaggttaagcaggtaacataaatgtataaattaatcggcagagtataggagtgatgagtcctgaggcaaaagtggaaaaca

SEQ ID NO: 503727 - DNA, 595 bp, Homo sapiens
attagttttttaagaccatcagaatgctgcacatgaaaggaattgtaaccatacaccaattaactctgcaatgaaatcacaaataatttgttgtgtatcatattgatataaayccttatgttggtaaggaatctcttccttgcaagtaactaaaaactcaaagtggcttaaaccataaaggaaattacagtatttctgttgcatatttgacagaaggcagtttagcctacagatgaggtttgattcaggggccctctgaaatcttttaatttctcctcttggcattctgcagtatctatttaaagtaagactggctttccccagagttgcaagatggtttccatcacttagggactttaattttcctcattcatgtccatcagggaaagaatatttctccagttctgcagaaaaacaaggaaatgcatgctctcactttcctccagcagacctctcattggttgatgttgggtaacctgctttttcttgaaccagtcactatagcttgagggttggggttcagccaatcagaaaccacccttgtggatggagacggggtcagctcttcaagaaagtttccactgactagggaaat

SEQ ID NO: 503728 - DNA, 398 bp, Homo sapiens
agatgagtttcagaagttgctggctttggggtgctgtcaagaggtctgccctggctctcctctttccacatgagcyaaaccatactgattgtctttccttttatcacagtctcactgccaatgttgttgctcctttcctctccttggaccacaaatgctgcctccagcagcactcaaaggcttttcctctagtttgcctacccaacctgatgcaaaactccccattcctccaggcatcctctacctcgcagggaatcactgtgtacaaaggcatttttggggcacagggcaaaaacataggatgtcccccttggggaaacaggtacaaaaggacagaccacaaacagaatgtggcgtaggcaccgcaggtccttctcagctgctgggcctggagataa

SEQ ID NO: 503729 - DNA, 398 bp, Homo sapiens
agatgagtttcagaagttgctggctttggggtgctgtcaagaggtctgccctggctctcctctttccacatgagctaaaccatactgattgtctttccttttatcacagtctcactgccaatgttgttgctcctttcctctccttggaccacaaatgctgcctccagcagcactcaaaggcttttcctctagtttgcctacccaacctgatgcaaaactccccattcctccaggcatcctstacctcgcagggaatcactgtgtacaaaggcatttttggggcacagggcaaaaacataggatgtcccccttggggaaacaggtacaaaaggacagaccacaaacagaatgtggcgtaggcaccgcaggtccttctcagctgctgggcctggagataa

SEQ ID NO: 503730 - DNA, 482 bp, Homo sapiens
gcctgggctctgactgctggaaagacacagaagagctggggcagaaccttctgaaggagtatccacaggggtctgtgcagtcctggcttcaggaggcttttagggagaggyctctgcccaatgccccctttcctgccccgagccttggccttgggaagttgaccgagcctgaacagtagggagaagttgctgaactttctcattattggacggaagtcagtgggcagcagaggggtctaggggacttcattctggtggggcaaatttctcatatccaagcaaggaagagtttcacagacattgtcttatgggcttctcacagccatcctgagaagaaggaatcatcatctacattctacagagaaggacactgaggcacagagacggcagtagcagaaggggcaagctgggatgggaatactgctcttcagacaaggagtctgagtgctgcctcattgggctgtggattggccttgggggct

SEQ ID NO: 503731 - DNA, 643 bp, Homo sapiens
gctggaggcctgggctctgactgctggaaagacacagaagagctggggcagaaccttctgaaggagtatccacaggggtctgtgcagtcctggcttcaggaggcttttagggagaggcctctgcccaatgccccctttcctgccccgagccttggccttgggaagttgaccgagcctgaacagtagggagaagttgctgaactttctcattattggacggaagtcagtgggcagcagaggggtctaggggacttcattctggtggggcaaatttctcatatccaagcaaggaagagtttcacagacattgtcttatgggcttctcacagccatcctgagaagaaggaatcatcatctacattctacagagaaggacactgaggcacagagacggcagtagcagaaggggcaagctgggaygggaatactgctcttcagacaaggagtctgagtgctgcctcattgggctgtggattggccttgggggctgctgggccaggctttatgctcctgcctgctatagcctcaaggagaggaggcacctccaggtggtcagagtggggtctcccttggctgcaagaaggacagctctgtagggttgggggtcctggaactgagagactgtgcagcaaggggggctcat

SEQ ID NO: 503732 - DNA, 620 bp, Homo sapiens
ttattactaataaccgtctctagtcctgcctactttcagagctcagaagccagtttacccaatttcacctgaagtcaaatgaggggggaacattaggctgctctcttatgttatgcggcattgcgtcagaggttgagctgaggggtccggctcaactcctacacttgtggagmcagaggctggggaggacccttgtctattgccctctgttccctgagagcttgatctgtggaaagaccccgcaggccctatcctggttgaccccgaatgggaggaataaaagcttagggttctgccttgccacgggctctgtgccttgtagcaaattcctgccacaatcccataggcttggaaggaacagagtggggggcaacttgcttaagaaaacccgaagctctgagcgcccccgctatccccctccttggcccaggccagactaaacacctctgcagaaccgtttcaactccaagtacagatgccgccaccagagccagtccttggggagcctcaggctgggcttgcacacagatcagagcagggtggcccaggtggccagagtagcagcgacagctttgggcaaagaggctgggcacgtccttccctgcattctttctcttcca

SEQ ID NO: 503733 - DNA, 654 bp, Homo sapiens
cccacctcccactcaagaaaaaaacaatgcttgcagcactattctcaattgcaaagacatggaatcaacccaaatgcccatcagtgatagactggataaagaaaatgtggtacatatacaccatggaataatatgcagtcataaaaaggaggaatgggatcacgtcctttacagggacatggatgaagctggaagccattatcctcagcaaactaatgcaggaacagaaaaccaaacatcacacgttctcacttataagtcggagctgaacaatgagaacacatggacacagggaggagatcaacacactctggggtctgttgggggacgggaagaaagcatcaggaaagatagctaatgcatgctatgcttattacctaggtgatgggttgataggtgcagcaaaccaccatggcacacgtttacctatgtaacaaacctgtgtgtcctgcacatgtaccccagaacttaaaataaaaaaaaaaaggcaaggctgagtactccytttcccaggctcccttgcagctaggatgtgggtgtgtgagcaggagggtgtgcaaggctggcagctctccccaacagtcagggtttgagtttgggggtggggcagtgctgctgtgggagggtcaagggtcagtgcttggtgatggtggt

SEQ ID NO: 503734 - DNA, 509 bp, Homo sapiens
atcaccaatgaggagaactaaaagaagtttggaaggagaagaaaggtcaatgagattacggtatttatttccccaggtgcctccaacaagtcaccataggatgcctgcatcccttgaccaaaatataaattcgtataaagtaactttcttcacactatctctctgcttctagctattagtaaaagctccccttccctttcatgttaggggtgataaagcccctaactctaatcctgatccaggcttctgctgttactagctcccaagtctgcactatcccctgctgtttcgttatatcttacccaatgcattaattatctattatctaygaggtctgacagatggtggccatatctaggtataggataataaaactactagaagagatgaaagagaaggaggaagaggaggagaaaggaagaaagagaataaatcttaaaagcaccagagaaaaagaattcctacgatggacaacaattaaactaagagctaaattatcaaaagaaata

SEQ ID NO: 503735 - DNA, 530 bp, Homo sapiens
ccctaacagcttctcattctgcagtatcctcattggaagattttcttcttgatatttagttctacaaacaaacccttatcaagctcttcttatacaaagcattgggctgtccctattctctgttaccagctttgcatataacaccttctccctcctttacacactcatccaacacctaccaaagtccctggtggaattgtggaaccattcatccacattaatgaacaaacaacacacacaaggggtagttaaagaatggcattaacatcaactagcaggccatctgtggccctggagtgaacactaggcagaaacaaaggttctgaaagggaagcatctttaccttcatttatgccatttaatttgcatcgtttccattttcagaagaagaaacgggcccaggacttaagtaccttsctgactattaagtagtgcagacaagatccatacccatgcttgtctccttttgatcccagggactgtctatgctatacaatttcaaaaatggaagtttttctcctgacctaatg

SEQ ID NO: 503736 - DNA, 595 bp, Homo sapiens
  misc_feature (1)...(595): n = A,T,C or G
aatatttagttttcctgctgcacatcatcctctggggatttagccaagttgtaatgagatgttcakagcagacaggggaggtcacagaaagctcggataatctatattatggctaatatactgncacaggatagccaagaaacactattactaaggcatataaaatttcatgcaaagaggaaaaaatcataacatacccagcactccaaaaacccactggctttttgtctctttttaccccttaaggagtgctaggcctgactaccagagtgacctggtagtcagggagggagacaacaccgagcctttggtgtaagtgcaggctgtggtcaatgctccccattactgttgatcccaaatctgatgtcagtctaatcccatgagctgtacaggaaggaggtcagtgtatacatgtgtatacacgggcaaaaaagggtaaaagagaactcggtaaatctagtaagacatcagcagttgtcctgaacaaacattgtttggagtataagtttacaaggataattaccaacgcattacgccaagtgcagtaactttcttgttagcacaatttggcagatgtgtatcacatggaaagtgg

SEQ ID NO: 503737 - DNA, 595 bp, Homo sapiens
  misc_feature (1)...(595): n = A,T,C or G
aatatttagttttcctgctgcacatcatcctctggggatttagccaagttgtaatgagatgttcagagcagacaggggaggtcacagaaagctcggataatctatattatggctaatatactgncacaggatagccaagaaacactattactaaggcatataaaatttcatgcaaagaggaaaaaatcataacatacccagcactccaaaaacccactggctttttgtctctttttaccccttaaggagtgctaggcctgactaccagagtgacctggtagtcagggagggagacaacaccgagcctttggtgtaagtgcaggctgtggtcaatgctccccattactrttgatcccaaatctgatgtcagtctaatcccatgagctgtacaggaaggaggtcagtgtatacatgtgtatacacgggcaaaaaagggtaaaagagaactcggtaaatctagtaagacatcagcagttgtcctgaacaaacattgtttggagtataagtttacaaggataattaccaacgcattacgccaagtgcagtaactttcttgttagcacaatttggcagatgtgtatcacatggaaagtgg

SEQ ID NO: 503738 - DNA, 595 bp, Homo sapiens
  misc_feature (1)...(595): n = A,T,C or G
aatatttagttttcctgctgcacatcatcctctggggatttagccaagttgtaatgagatgttcagagcagacaggggaggtcacagaaagctcggataatctatattatggctaatatactgncacaggatagccaagaaacactattactaaggcatataaaatttcatgcaaagaggaaaaaatcataacatacccagcactccaaaaacccactggctttttgtctctttttaccccttaaggagtgctaggcctgactaccagagtgacctggtagtcagggagggagacaacaccgagcctttggtgtaagtgcaggctgtggtcaatgctccccattactgttgatcccaaatctgatgtcagtctaatcccatgagctgtacaggaaggaggtcagtgtatacatgtgtatacacgggcaaaaaarggtaaaagagaactcggtaaatctagtaagacatcagcagttgtcctgaacaaacattgtttggagtataagtttacaaggataattaccaacgcattacgccaagtgcagtaactttcttgttagcacaatttggcagatgtgtatcacatggaaagtgg

SEQ ID NO: 503739 - DNA, 595 bp, Homo sapiens
  misc_feature (1)...(595): n = A,T,C or G
aatatttagttttcctgctgcacatcatcctctggggatttagccaagttgtaatgagatgttcagagcagacaggggaggtcacagaaagctcggataatctatattatggctaatatactgncacaggatagccaagaaacactattactaaggcatataaaatttcatgcaaagaggaaaaaatcataacatacccagcactccaaaaacccactggctttttgtctctttttaccccttaaggagtgctaggcctgactaccagagtgacctggtagtcagggagggagacaacaccgagcctttggtgtaagtgcaggctgtggtcaatgctccccattactgttgatcccaaatctgatgtcagtctaatcccatgagctgtacaggaaggaggtcagtgtatacatgtgtatacacgggcaaaaaagggtaaaagagaactcggtaaatctagtaagacatcagcagttgtcctgaacaaacattgtttggagtataagtttacaaggayaattaccaacgcattacgccaagtgcagtaactttcttgttagcacaatttggcagatgtgtatcacatggaaagtgg

SEQ ID NO: 503740 - DNA, 620 bp, Homo sapiens
atacaagaggggccattcttgcaggaagcagtgtgattctgtggcaacctagaaggagaaaaggtttgagttgagaaaaaccgagagcatgaaaactgtcacatcttcttctgccacagaaacttcctcctgtaaacagctgcccaggaaagtcctataatttgatgaacgacaagaacatcaaaacaagtgagagagaggtgatcaagaacaaaagtagaaaaaaagtagtaaaatttacaaacacatgaaaaacatgtatcagtaaaatgatgccgtggcacatgtaaaaaaggtgagcaaatattttgtcacaatttttaaaacacaatgaaggcttcacctctatggaggaagcaataacttccatgaaggaagatcatgatgcagacggaagagaaccagaaggatcttgatgtgcagatatggaaatgwctttgagatgtattgttaagtgaaaaaggacatagaaaacagatacagaatgttactatttaggtataaaagcagtgagggggaaataaataagaaagtagattcttgcctttacagtgttttgtaattttatgtctaaaatgaaactctgagaggatatgcaagaaataataacagaggctaca

SEQ ID NO: 503741 - DNA, 627 bp, Homo sapiens
tgctactttccttcaaactgtaatatagcatctggttagacctatgcatctgacttgacaaaggctgcccctccaggtgccgtaaaactatgagaatctgttgtcttccaagccattatgtattaatccaaatacacaagagtcacaggaaatttattacaaaacaggattaagcagcaacaatgaaaactactttagaattctsaaatgattatattttagttaaagatcttcgcatgatgtttacaaaagcatggaggaaaagaatgaagtaatatgttcacatcacaaatataaagaagttggcaattgagaacatactaaattatatggagtttagaacaacacatttataaaatactactgaactaataaacttctcaagataactttaaggaaacactggcttattttaagaattattaaaaaatgactgaaaagactgataatcttttcaaaactccctagcagtaaggtccctcacttttaaatttttatgtagttcagtgttatggaagatatttaaaacttttggccaaatacaccggaaacaatgataagatcatctgtcatgaatggtcagctactcctgagagtgaggcaacttcaactgttaaaaattgcaac

SEQ ID NO: 503742 - DNA, 616 bp, Homo sapiens
tacaatagaggataggaactgatccagggctaatttaattccataaatatttgggtacccttgacatatgtcatgctaggctgcagtacatttatcagtgtgggggttgtctagtaaccaatctctcatgttattttatcagtctagttactgatacaaaaatatgagaaaatgaaatccagagtcccattttgagatatcaggaacatatctcccatagcaaaagaaatcataactttcctcatatcaatgtgagaaattaatgtatatgtgtttaaaatgcaggcatcaaaaactccagtagagaaagaaagatttgggatctagyagagaggttaggaaagagaaagtagaaaagagagctggaagagaaacttctggcaattggggaggaggaagatgagggagaaagaaaaaatgaaaagagaagatcaagactggagcatgaaaagatcctggagccctaatgggaaacgatggcatttcccctccttcctctctccctacctccttgtcttaaggctgctgtccctctggtaagcagcccttaggcagggtaaaaagcaagcaccaggactaggggatggcactgagaaaaccatccccagtggtctca

SEQ ID NO: 503743 - DNA, 616 bp, Homo sapiens
tacaatagaggataggaactgatccagggctaatttaattccataaatatttgggtacccttgacatatgtcatgctaggctgcagtacatttatcagtgtgggggttgtctagtaaccaatctctcatgttattttatcagtctagttactgatacaaaaatatgagaaaatgaaatccagagtcccattttgagatatcaggaacatatctcccatagcaaaagaaatcataactttcctcatatcaatgtgagaaattaatgtatatgtgtttaaaatgcaggcatcaaaaactccagtagagaaagaaagatttgggatctagtagagaggytaggaaagagaaagtagaaaagagagctggaagagaaacttctggcaattggggaggaggaagatgagggagaaagaaaaaatgaaaagagaagatcaagactggagcatgaaaagatcctggagccctaatgggaaacgatggcatttcccctccttcctctctccctacctccttgtcttaaggctgctgtccctctggtaagcagcccttaggcagggtaaaaagcaagcaccaggactaggggatggcactgagaaaaccatccccagtggtctca

SEQ ID NO: 503744 - DNA, 616 bp, Homo sapiens
tacaatagaggataggaactgatccagggctaatttaattccataaatatttgggtacccttgacatatgtcatgctaggctgcagtacatttatcagtgtgggggttgtctagtaaccaatctctcatgttattttatcagtctagttactgatacaaaaatatgagaaaatgaaatccagagtcccattttgagatatcaggaacatatctcccatagcaaaagaaatcataactttcctcatatcaatgtgagaaattaatgtatatgtgtttaaaatgcaggcatcaaaaactccagtagagaaagaaagatttgggatctagtagagaggttaggaaagagaaagtagaaaagagagctggaagagaaacttctggcaattggggaggaggaagatgagggagaaagaaaaaatgaaaagagaagatcaagactgsagcatgaaaagatcctggagccctaatgggaaacgatggcatttcccctccttcctctctccctacctccttgtcttaaggctgctgtccctctggtaagcagcccttaggcagggtaaaaagcaagcaccaggactaggggatggcactgagaaaaccatccccagtggtctca

SEQ ID NO: 503745 - DNA, 594 bp, Homo sapiens
cagctgacaaagagactaaaccagttcatcttccttctagtcttatgcctgggccattcgccagtgaagagagtgaatagattgcagggcaactgctttaattacatcctcacagtgctgaatgaagcttgttcaacaattgccaagctgatcatcaaacatattctttgytattgcttacaacagttcctgacttctaaaattagatttgcgtatagcctcaaagcccagcatatcccagtacctcactgttcaaactaataaatattttgttaggtctataaggctaaagatctcaaaatttctaagaattttgtgccatagacaaaatctgttggttattttctttatatatcagtccagatttcactgtattagtatttctacatgcttttttttttttttttttggagacagagtgtcactctatctcccaggctggagtgcagtggtgtgatctcggctcactgcaaactccacctcccaggatgaggccattctcctgcctcagcctcctgagtagtgggactacaggcacccgccactgtgcctggctaattactttttttgtatatttagtagagatggggtttc

SEQ ID NO: 503746 - DNA, 537 bp, Homo sapiens
ctgctatgagcgaacacagtttctattagcatctcctctctgacttcccataattttttgtgggcttctctcatgagatttatgacacattgttttatgaacacattgtagaagtcatctcagattccctactccccgcctgtcacctggggctgttccttctcatggaaggacatgcttggtgttgtccctccctctcctggtgagtgtctgtctctgtgatggtctccactgcaccttctgtaagtaggtccctttcccatggtgtcttgaccatagtaggtgattgaagaaataagtgtaaagaaatatgacatgacataattattttaaagttgaaattcaaatgccatcatgattagccgttttaaggtaccattattattttaagagtgataattactagaagttgcctacagagctgttatactcattcatgaatgaagcagtcattctaagttaactgttaagaatgattccttttacattttctayttttctacttttctcattaacatactgataatttccattttt

SEQ ID NO: 503747 - DNA, 396 bp, Homo sapiens
agactttccaaatttgttctttagaaccctatgggatccccagaaacrccttgcagagagtaactaggctgatataatttcccttattcttactgctaagacctttactatctgcataaaatacaaaaatgtaaagacacacacacaccccctctagctctctgttctataatgtaaataactggaatagatgtttagtctaaaatgtcacatttaagttgttttaccttgctcttttggactttactttaaatgcttcaaatagataccctatagtgaaggagggaaagactgaaagaaaatcttcttctgattctttcttatggaattctcttacaagcgaagatcaaatatatgtacaatggaagcaccccagattcctatgctttacagaac

SEQ ID NO: 503748 - DNA, 634 bp, Homo sapiens
cccctagacaggacacgcacaccctagactaacacggccccactctgcctctgtggacatttgagaatgcaactkgctaagaaaaactatgcaaaacttggaaataaggcaaaacgattactgcatgccctttcaaaatcatgctagaacattcgacaagtccactgaaatgtcatgggagactctagggaaagagaactttatttgacataccatttactattgatcagggcccaaactctgtcaatttagatgttaacttggagtagattgatacattacaaatgacttttgtccagtagagatgggaataatttctgtcttacagaaaagaaatcctcaaaggggactgttctattgccccagggcattaaactcgtctgcatcaaacttctcaatctcttaaagcgttctttttccctgtgtatatgtatgcataaatatatatacatatgtgcgtatatatataaaacttctcataacctaattttatctagctatgtcatcttgttggcttctgtattagtccattctcacgctgctataaaaacatatccgagactgggtaatatatataaaggaaagaggtttaattgactcacagttctgcagggctggggaggcctcaggaaac

SEQ ID NO: 503749 - DNA, 634 bp, Homo sapiens
cccctagacaggacacgcacaccctagactaacacggccccactctgcctctgtggacatttgagaatgcaactggctaagaaaaactatgcaaaacttggaaataaggcaaaacgattactgcatgccctttcaaaatcatgctagaacattcgacaagtccactgaaatgtcatgggagactctagggaaagagaactttatttgacataccatttactattgatcagggcccaaactctgtcaatttagatgttaacttggagtagattgatacattacaaatgacttttgtccagtagagatgggaataatttctgtcttacagaaaagaaatcctcaaaggggactgttctattgccccagggcattaaactcgtctgcatcaaacttctcaatctcttaaagcrttctttttccctgtgtatatgtatgcataaatatatatacatatgtgcgtatatatataaaacttctcataacctaattttatctagctatgtcatcttgttggcttctgtattagtccattctcacgctgctataaaaacatatccgagactgggtaatatatataaaggaaagaggtttaattgactcacagttctgcagggctggggaggcctcaggaaac

SEQ ID NO: 503750 - DNA, 634 bp, Homo sapiens
cccctagacaggacacgcacaccctagactaacacggccccactctgcctctgtggacatttgagaatgcaactggctaagaaaaactatgcaaaacttggaaataaggcaaaacgattactgcatgccctttcaaaatcatgctagaacattcgacaagtccactgaaatgtcatgggagactctagggaaagagaactttatttgacataccatttactattgatcagggcccaaactctgtcaatttagatgttaacttggagtagattgatacattacaaatgacttttgtccagtagagatgggaataatttctgtcttacagaaaagaaatcctcaaaggggactgttctattgccccagggcattaaactcgtctgcatcaaacttctcaatctcttaaagcgttctttttccctgtgtatatgtatgcataaatatatatacatatgtgcgtatatatataaaacttctcataacctaattttatctagctatgtcatcttgttggcttctgtattagtccattctcacgctgctataaaaacatatcygagactgggtaatatatataaaggaaagaggtttaattgactcacagttctgcagggctggggaggcctcaggaaac

SEQ ID NO: 503751 - DNA, 614 bp, Homo sapiens
aaactatgctgatccttgttctatgtaaaataattcaacatcgaggtgaaatccaaatcactcaagtacgattaatacaataccctactccttcaactcctccctaaaatgaatgcaagagaaaacaacagttttgttttaacagccacataagcttcacttttgttattgttgttattttctaaggaagagcaagagggtttttgagctgctagcctaaggctagcctggaagacagaatactttcatttctaggtcacccacatacatttatttctggcaaagcactcaagcaaaccatctttgttgaaaattcagacattccccccactgtcttcatcctcctgccaaaggamgctcacacacaggtagagagtggctcattctccttcctatctaccttagatttaatctccactttattgaggaagtcgtcttcaatttcctaattgcaaatgagtactccacctttgtgtttccacagaatactatcccaaccccactgatcataaccagcactgtgatttttttttcaaaacacgcatcaccagaaccatgaaaataaatcaaatcaaaatggaaaaaaaaagcagaatgtagaatatgtagtaatg

SEQ ID NO: 503752 - DNA, 591 bp, Homo sapiens
cccgtgggggtcaaggagcttgcccggggtcactgagtaaaaacagcgatacctgtggcctcgggacaaggatgcaggactctggttcctgtccctaatcgcttgggcaaaggctctttcataaataatagaaataacaaggcttcatttttcttcagaggataaactccccaaacggccaccggggctgcggtgtgtgagctgcaggttctcgccgggcgagaaggcaaggtcggagctccagcagcccggggatgaggggcttggagcacaggctggctcctgcaaaggcattaatttgtaacagacgcccgaagagctggaaagagcgtggatgttcgttgcacgtgacaacggctgattattcattgctgacagttattagcctattattaaacgtatgaatygcctctttcataccacattgcctatccttaaagtgctttattaactaacattaaccaatccaattagcaaaagacactgtatttgtgtaattagtaatttgaggctttgttctgtcttggtcttaaagagaacgggcattggatgttgattagcgcggagcactgtacaattaggagaagtgct

SEQ ID NO: 503753 - DNA, 375 bp, Homo sapiens
tgttgaaaaaaaagatctacccgggatgcacggcacggggacctggccccaggaagagcagggccgttgagtgaaaacgctgcttctggacagcgtgcactcagccacagtrgctgggagaacccctcaccctcgccgtagacttaggccagcgcactcagcatggctgccaagctcgacagaggccagtttatgctcccaggcactcttgagatccactttcatctggaataaggagcagaaaggagcggttttcctcttgagttctgacctggcccaaaccagagaagccataaatccaaccaggagggctgttcccatgagatccctgctcccattccagaccaaataagccgagaagagctggggggcagc

SEQ ID NO: 503754 - DNA, 642 bp, Homo sapiens
gatgggctatgcacccagccgccmagctcagccctgcacgggtcacccccagtaaagggctctttctttcccctaaatttggaggtctcaagaatgccctgagaccagaaagcagagatacacacatgtctcagtcaccttgggtcagggggcccttctgctcttggccaccaggtaagggttgggctggcagtcaggtaaacccagaggtcctcactctctcctcccacctcccagtgaacccccagggcctcaggaacccctgtgcggcttcaggtgaggtcacctgagcgagaaatgctgggagcagcctcagcccctctgcccactcgtcttggaaggaacaccctagatgtccctgcacttggatgtctgtggagccagcccaagtaggccccacgcaggggctgacctggcaggtgatcgtccatgccacccagccaggcttcctaggagccgtgtgcctggtgtcagcaggaaaccgcccccacccctctttgggtttgagctcctggttgctatctaggaacgtccacgtgcagatggagagggtgcatgcggcacggtgtcagttcctcaaagcacctgtcagcccgtaaaccattgccatgggatacggggtggctcttcaggggcctgcag

SEQ ID NO: 503755 - DNA, 548 bp, Homo sapiens
cagctgaaggcccagccgggggcaggtggcctccccagtgcctcacccatggcctcctccctctgggctgtcaccsggcagccgcctcttaattagcaaaataaacagcatgatgataaatgtcatgatttactcaacaaatgtgaaaatcattgtttttgcagaccccacggcgagcaaatgcgctcacgggtgatttcctccaggcaggtgggcttcggcggcgaccggcggggcgtggtatttgggaagagactgagcccggctgtgtccagatggaggaggccaggaatttcgggtgcacttcctgacaagccccctccctgagatgaagcccagggggcgtttccacacacccctggggcacacacacagccatgcacagagtgagcccccaggtcgggggtggggcatctgactcagggcacagctcaggatgcctcgcagcacccaggaacaaagcgggtttagtcagcgactattcctaacacacaggagggagagaggagggggcggccctcccaaaagcgtcacgctcagcgtagaag

SEQ ID NO: 503756 - DNA, 548 bp, Homo sapiens
cagctgaaggcccagccgggggcaggtggcctccccagtgcctcacccatggcctcctccctctgggctgtcacccggcagccgcctcttaattagcaaaataaacagcatgatgataaatgtcatgatttactcaacaaatgtgaaaatcattgtttttgcagaccccacggcgagcaaatgcgctcacgggtgatttcctccaggcaggtgggcttcggcggcgaccrgcggggcgtggtatttgggaagagactgagcccggctgtgtccagatggaggaggccaggaatttcgggtgcacttcctgacaagccccctccctgagatgaagcccagggggcgtttccacacacccctggggcacacacacagccatgcacagagtgagcccccaggtcgggggtggggcatctgactcagggcacagctcaggatgcctcgcagcacccaggaacaaagcgggtttagtcagcgactattcctaacacacaggagggagagaggagggggcggccctcccaaaagcgtcacgctcagcgtagaag

SEQ ID NO: 503757 - DNA, 371 bp, Homo sapiens
gagctctcgcctcctccactgagtgacaggctccggaaggccaggctgtgcccattcctacctctgcccccggccccagttccgcacagagtggaggaaggagaagtgtctgcaggagaatggacgggtttatstccatttctgcagctccctggctgctctcggaccataacgactctgagcacctctctaggaggcgaatgtgactctgggtccctgcagatgggaactggggctggacggcagctccagagggcactggtcgtgtgcctcacagccagcagggacccattaaccaagccgacagccacttccccaggacgctccaccatgacccgtacggttccggaacgtaaggaagtgagaccctc

SEQ ID NO: 503758 - DNA, 566 bp, Homo sapiens
ctgctgtgcagaatgcttaatgtgaatgatttgattaaatccttgtagcagcctawgaggtaggtgctgttgttattcccattttacagaggaagaaactgaggcttgctgaggttgaatcatgcacagagctgagctgccaccaggcaaccagtccagtgccagagccacctggtcctgaggaggtgtctagttggcaagtaccacgtgtagcattattgttcctcatggcacatatggatgttaggaatgcctctgcagttccatggtgcatggttttcctacaatactcagaatcaatccacgagaggacggatggtgcatccatcaagtctgacacatggtacggaattatcagcaacgttggacaaatatattggcccagattcatcataagctccttgtattgattgagcaaaatcgatgaatgtgttaattgcttcaaaccgtaggagaaagataattattacagctttatttattttgtatatgaaagggaaaggcattttagagattctgaaaataactcaagaaagaagtgctttttgaacataattgttacattg

SEQ ID NO: 503759 - DNA, 566 bp, Homo sapiens
ctgctgtgcagaatgcttaatgtgaatgatttgattaaatccttgtagcagcctaagargtaggtgctgttgttattcccattttacagaggaagaaactgaggcttgctgaggttgaatcatgcacagagctgagctgccaccaggcaaccagtccagtgccagagccacctggtcctgaggaggtgtctagttggcaagtaccacgtgtagcattattgttcctcatggcacatatggatgttaggaatgcctctgcagttccatggtgcatggttttcctacaatactcagaatcaatccacgagaggacggatggtgcatccatcaagtctgacacatggtacggaattatcagcaacgttggacaaatatattggcccagattcatcataagctccttgtattgattgagcaaaatcgatgaatgtgttaattgcttcaaaccgtaggagaaagataattattacagctttatttattttgtatatgaaagggaaaggcattttagagattctgaaaataactcaagaaagaagtgctttttgaacataattgttacattg

SEQ ID NO: 503760 - DNA, 571 bp, Homo sapiens
caaaatatgttttcaggaaacctcgaaaatgctttctgcataatattatatctccctctgctagaactgccaattttgagtttctcactatttttattttcttgagaaatgatcatttttataaatagccttttaaatgtcaaactaactggttgaataatttatctctacttcttatcctgaataactcaacccttgcttgattttctaaagggttgggggaaaggggttctcagacataagcgcccagaataaatccttctgtctgttagaggctttggctgtctcctttcccgcgggtggtgtgggctccctgtggctggaaggcggctgtccttccgacggcttcsttccgcttggctctgctcgctcttcagtcacagccacagcagggtccatgaaggcagatgacagacgggaacccccaagaggcacctaaccagggatcacgtgtgctttccatgaagccacaggaggaccatgactcactcctcagagcagcaacccagggctgcggcatgatgggcctggtcggcgctgggtgcctcgttcggtgccggcaggaaccagc

SEQ ID NO: 503761 - DNA, 623 bp, Homo sapiens
ctgctctaaagcaattactgctgttaacacagttaatggactgtcaatgtcaaatgtgaaaccttttctcctggaaaggcaacaatgacttcgtgaaatcgttttctgtgctgtagcagaaagggaggaattctggaggatcgctctttctgcaaacatcgcggtctgtgaaatctgccccctaaaaaacaaacaaacaaaaaaaccaaaccaaaacaaaaaaaccctgatcataygcctgttatcctaaaatagcaccttcctccattatgccgaggttcagcgcaaaactgactcatgcagtaccgggatcgctgccagagcgacggagcgcgcgagcagcgcggcatcaacaggcagaaggtgccacggggcggacgggacccactgcccgggtccagactttccatccgagaaagcaaaagctttcagtatccaacttattagaagataacatcttgatagggttctcgggccttcttaaaataaatctgtcagactgtgcttttgaatctgtcctgtgtcaaggttgctcccccagggcagggcagcaatttagcttttgcaagatcctgcacttgctcctcaaacgccaaagcagcaacgcgagcaacttccgagca

SEQ ID NO: 503762 - DNA, 529 bp, Homo sapiens
cagctgtaatgctagtaacattatctccacacagcacctcacactttacaaaactcccacagatactttctctcgtctacttcttaccaccactctgagaagtcaacaggaaaaggatcatgctttgtgtggaggataaagatggaaagtttactccaggtactagaagcacctcagaggctcaaaggtgagacaaagatcaaaactttgtcgttgtttcttttaggatatgatctggggaaatatatatgaatgggaatactctaccttcaactttatggggaaaaaatctaaggcttttttaatagaactgggaaatttttaaggggttggggctgaaagttattcctcaccgaagttggagaaaaaaaargggaaaagataaggaaagggaaagggctttattttttaagtaacaaaggctaaaaattttcttagagattattagagaaagcttaactggagagaaatatgcctggggggaaaagcatgtatcctccaaagggtgcttgcaacattttaaagggcg

SEQ ID NO: 503763 - DNA, 442 bp, Homo sapiens
caactgtaaggcactatctaaatgcaagtaaatgcaaagtggatatatatatatatatatatatawatatatgtgtgtgtgtgtgtatatgtatatatttgttgttgctgttgttgtttgtttttgttttgtaaaggggtgagtgtggagctacagaggggagattcggaaagcgtctgtagcctgtgcttgctggttgcagagcacgtgtactctgcttgcgggtttaaaggcacttatgtgacatttgtttcagagttgattctcagagacctgatacatgagccttatattccactgtttttcagtggacatcctgaacttcgctgccattcctctagctccgctctgaggctgtgggcaaagctcagacagagaactcaggcaggtttctgaatttagaaaaaactccctcttcctacccgaacttaagcatgagtag

SEQ ID NO: 503764 - DNA, 442 bp, Homo sapiens
caactgtaaggcactatctaaatgcaagtaaatgcaaagtggatatatatatatatatatatataaawatatgtgtgtgtgtgtgtatatgtatatatttgttgttgctgttgttgtttgtttttgttttgtaaaggggtgagtgtggagctacagaggggagattcggaaagcgtctgtagcctgtgcttgctggttgcagagcacgtgtactctgcttgcgggtttaaaggcacttatgtgacatttgtttcagagttgattctcagagacctgatacatgagccttatattccactgtttttcagtggacatcctgaacttcgctgccattcctctagctccgctctgaggctgtgggcaaagctcagacagagaactcaggcaggtttctgaatttagaaaaaactccctcttcctacccgaacttaagcatgagtag

SEQ ID NO: 503765 - DNA, 538 bp, Homo sapiens
  misc_feature (1)...(538): n = A,T,C or G
ggtccatctgaggttccccgacatgtatatatctaggaatgtgtccagtggaggcaggcttttaaggtcagaccttaccctgtaatgatgaataacaattctctttgactaagagatgggcttgagacgccaaggggttttgttattaaaagtaaatagcaacatgctctattcttcctccaagaatccagaataaattgatttcctaggcagggtttgtractaagtaccgagtctctcacactgttctctgaaaggtcccagttaagcccctgagaggcatgaatagttgatgaaggttttatatttggacccttaataaaactgggcttggcagcttttagaaaagtgcttcagttattaaatgggtaaggctgtgtgggcctaaaggtacctgtttggctggcaaggtattcaggagcatcanggagtatttccctgatgggatgctacaggaccagatctggnaagggaantntaacctgtntctgactgcaggtntctgaccaagcttnggcaatagctccctgctggaaat

SEQ ID NO: 503766 - DNA, 629 bp, Homo sapiens
taattaggctattctgtctttacagtggccttctaagaagccagtgtgttttgcccatcttcaatcgctgcttcaccctgatgtcagatataccttctccttaaacttccattcccatgctatcatttccctgttcaagaatttccarcagctacccagttcccacagaataaggctgaacttcttacccttgaacgaagattctgcatggtctctgccttcttttccatcatgtcttcctgttcctgaggacactccccaaaactgatgacttgaggttttcccaaatgtacctctgattttaggggctccaaagttttcttcagcctgctctaccgtcccctttgaaccctatgagggaaatccttccctccccctggactggtcacactgggctccaggtcctctctggaacagctgcactttaaatatttcagcccagtctcccactgtacaccctacagagccagaacaggtgttttgaattttgtttggggttactgatatttaaattgttcaccaatggtccttcctcttctaaactccaaattccttgtgggcagggactgatgactgggaatggggaatactaaaatgaaaagatatcctgacttccaagtagcttaaaa

SEQ ID NO: 503767 - DNA, 629 bp, Homo sapiens
taattaggctattctgtctttacagtggccttctaagaagccagtgtgttttgcccatcttcaatcgctgcttcaccctgatgtcagatataccttctccttaaacttccattcccatgctatcatttccctgttcaagaatttccaacagctrcccagttcccacagaataaggctgaacttcttacccttgaacgaagattctgcatggtctctgccttcttttccatcatgtcttcctgttcctgaggacactccccaaaactgatgacttgaggttttcccaaatgtacctctgattttaggggctccaaagttttcttcagcctgctctaccgtcccctttgaaccctatgagggaaatccttccctccccctggactggtcacactgggctccaggtcctctctggaacagctgcactttaaatatttcagcccagtctcccactgtacaccctacagagccagaacaggtgttttgaattttgtttggggttactgatatttaaattgttcaccaatggtccttcctcttctaaactccaaattccttgtgggcagggactgatgactgggaatggggaatactaaaatgaaaagatatcctgacttccaagtagcttaaaa

SEQ ID NO: 503768 - DNA, 452 bp, Homo sapiens
gccaggcactggcccttgcctttaaatggtctatttgaggtgacagtgtgtttaatgggatttttaaagggggcacaggcccctcaccagaaaaagccagtatattttcaccyacgtaagactgcttagagcatgctaacatacctttaccataacacacatgcatgtacatgcatgcgcacgcacgtacacacacacacacacacacacacacagttaataatactgatctctgtactttggtgcctgcaatatggcttccagagcaacagcaagaaaatggtacagtgagaacaactacttcaaggggctcacaaggagagccatggttgagactaggtcaaggacagagctgacagccttttctttgctcattcccgagtcacatagaggtctggtgacaggtgaagagttctctagagttatttaaagttgtggttcctctttccgcc

SEQ ID NO: 503769 - DNA, 599 bp, Homo sapiens
ttgggagtaagactgtgattttataatttttaggcttgctcttagtttaagccagccttctcctgctgcagtgctgctgaactgacagaggctgtagagtcaactggaaaggattttytggggctcccctcatcattcattggcatctagagcaacatgccattttctccattttcaagcagctaaaaaggaagactaaaggctcacatttgaaaggactacgattttccaactagtttgagcctgcctgcaagtgagctttgtaaactaagaacagtttccagtgcacactttcttccttctccataaggctgggtaataatctcctttctagaagaaagtcacgtaaatctggggctgctatgaattttcaactggtgtcagaccaacatgagagctaaagtgcacaaagcgaaatgcaggcgtggtgtggtctttacaaaacaaaaccagaaagtcttctatcaaaaaaaaaaaaaaaagcccgaatttagaatctaagtttgtacgaattttagaaatggagactttctgcttcctgcccactttcctacacaagagaggcactctacttgtagaacttttgaacaatcattgaa

SEQ ID NO: 503770 - DNA, 599 bp, Homo sapiens
ttgggagtaagactgtgattttataatttttaggcttgctcttagtttaagccagccttctcctgctgcagtgctgctgaactgacagaggctgtagagtcaactggaaaggattttctggggctcccctcatcattcattggcatctagagcaacatgccattttctccattttcaagcagctaaaaaggaagactaaaggctcacatttgaaaggactacgattttccaactagtttgagcctgcctgcaagtgagctttgtaaactaagaacagtttccagtgcacactttcttccttctccataaggctgggtaataatctcctttctagaagaaagtcacgtaaatctggggctgctatgaattttcaactggtgtcagaccaacatgagagctaaagtgcacaaagcgaaatgcaggcgtggtgtggyctttacaaaacaaaaccagaaagtcttctatcaaaaaaaaaaaaaaaagcccgaatttagaatctaagtttgtacgaattttagaaatggagactttctgcttcctgcccactttcctacacaagagaggcactctacttgtagaacttttgaacaatcattgaa

SEQ ID NO: 503771 - DNA, 391 bp, Homo sapiens
agcatttccttcattctgttatgcaagcaaaaagctcaagatttttcctgggtcctccctcatccagttattatggaaatcatcttttaccagttttactgctctcagagtttacattcatgataaatacttcagaatcttacgattgtttattattatttggttgaawgtttttaaagaactacataacactttttttccctccaacacaccaaaacaagaaagaattataaatggggaaatgatgtaagtgtaaaatactgcacagggtcaagtcttttttgaaaaaaacaattacatgccaggaaacattttgttttttaaaagaaaaaccacattaatggtaggcaccatttctgttacctcctcaaggtcagagtcactaaactac

SEQ ID NO: 503772 - DNA, 584 bp, Homo sapiens
taaatgcagtatgtggccttatgcctggggcgtttgtcaatcagttatttgtcactctgaagacacctcgctttgaaataataggggagtatgtgagactggtttaggtaaaatatatatcatataattttaagagaaatggaatttatttcttccagtataatgactagatcatattgacagcagtaacatgaggtgaatgaaaaaaaaaattcctgacggacccatattttactttaatattataaacactttatttaatatacatactttgacataattgwtggctcctaaatgtaaatacatttctttatttttatgttacaggtaccttataagcaaggttatgaacatacagagggaaaaacatatcacctattttacccaacaataattgcttattttatcagaatcatcattaagttaaattattatggattatattttttgtacataggactttttaaataaccactgctatctttatcagaatttttagtactctgaaaccacttggattgaaggaatgtttttcagtgtcaaaccctggcaagcatttgaaagatgcctgaatgccataacct

SEQ ID NO: 503773 - DNA, 552 bp, Homo sapiens
ctgaccataaatatccctggaaggtttgccaagaatagagtataagctctttcagaagtgcatatgagttctgatatattccccttgggaaataaaaaggagaaaaagagaggatttctaagaccttgggaaacgcttgaaaccagtatctagaagtctaaagaaattcctaaaacactaaagtttctatggggacattttcaaagccattggcagttcacccagctaaggggagctctaaattttcattatgttttggggtatgtatacctgctgtatctcagcctgcaggaggagcattccattgctctaacttccccttttgcactagtttgctctccacttgtatcctggggccccatctagataagaggaatcttgcctgcttaggggcctcagtattcttgaaaacctatatgtatcccagtacatcagtttcctcatctgtaaaataggaataataayagaccacacttcatcaaataattataagaatctgaagtgttaatatatgaaaagtacttagaatagtgtctggcatatggcaagtgt

SEQ ID NO: 503774 - DNA, 537 bp, Homo sapiens
cttcctcatattgcaaacatactractgaaatacagccaaagaatggtgaagatgcaagacacctcataaagtcaatgaacttcagccccacattcagaacatccaatcttaggccatctgtcctttgtactgaggtttctcaaagtcaattggaggacctcctacttgctttagaatcacctgctacatgtgctaaaatctaaattccatggccccaccccagaaacactgaatgagaatatcaaaggatgaggcctagagacctccatttctaagaaggcaagcaggcactctaggccagtgtttttcaaactataagtcatgaaatcaatttgatagataatacctagtattttttgtttaataaaatggcttgaaaaagattggatttataaagattagttaggaatagaaaatatcagagggcactgcactttgtcctgtttcaggaaacttgtttcagttcttttatgtggattgggatggtaaaggtattttttataatatacctcagtcaaaagtatttgagaaataca

SEQ ID NO: 503775 - DNA, 619 bp, Homo sapiens
ctaaacactaagaatcataaactgacttatgctgtgggaaactcagtgagacaaggtttctggggtgctgtaaccccaataaagcatcttcctctgtgaacaataaagacccttatgtcattactaattgtcatcctgcttccctgtacgaacagtttgcatacttacccaggaaggcaaatggaaagtacacagggaggaagatgaactgcggcaaagcctttgtcatatgatagtgacctataaagtatcaaataaaggtacatcatcagtatagtagggctttacaatagtacagtcccaagtcctgtaacatctatgaagagaaggtaccaaaacccaggagtccagctcccactaacccctcccctttctctaccaccccccracactggagaactgtgggaacagaaggcaaagaagctccccgtattgaaagggcagaggctggggggcaacccaactggcattctagggtatctcccgtaccctcgcttcctactccccacatgtacaaagcagaaagttgatccattctgcaaacgcaaaaaccacaccgcgatcattcatcaacttgcacaagtgatcaccgcccccaggacaaacacaccagtaacca

SEQ ID NO: 503776 - DNA, 570 bp, Homo sapiens
tttggaccttactgataatataaccattaagtatgagaaaaaataccctaaaacataactgtcactcaggctgcagtggtttcacgagaaacagaatacagaccacacaaagtagaacacaaagcctcaaaatgaaaggcagccaatgaagagctggtagtattcatgggggtgaacatgccaagtaaagctaaccctgggagaaatgtgggaaggacctcaggtggccatacttgaagaccagacagaccagcaagggtcaggaggatccttggcacaaagggaagcttcaataattctacctrtttccgtcccttcctatccacaatctgttaccactatgataaatctgctgtgattaaaaacatactgccttgctccgcagtggaggtcatagtaaacggagcttctaagcaacggtgagcaggacttcctgtttcattccccaaagggtttcttgttagactgtgataaccttcaggcattagtttcctagggttgatataacaaagtaccacaaactgggtggcttaaaacaacagaaatgtattctctcacagttctaaaggc

SEQ ID NO: 503777 - DNA, 279 bp, Homo sapiens
attgaagcattttaatttcccccaaatgtgccacaccacctatttcttcttccatgcctcacactaagagtcagtcatctctcctgagaaccttttacccatcagcagcctcctgccccagctaaggtactttcctgctttgtactcccaccgcattcccacatttcccatcctgatagatcacaccccrcagaagtaactcatggttcactaatggatctgaatgacaactttccaccttagactgtgagactcctgagggtaaaagtgaggtctgga

SEQ ID NO: 503778 - DNA, 575 bp, Homo sapiens
aatcttttcttgtgagttgactcaagtcctactttgtaaaaggatagratacaagtaagaagtagattacttgctaattattggagatcacttgcttctctacatgagatgccctgatgcaacaggaagatgatttcagaatagttttttaaatatgtggaaagtagcttgaatatttatatctatatggttttaattatgtggcaaaaatatactggtatcatttcttagatttagagtctgagaccacataaggcaatatgggcaatttcagtgatctgttatgtgcatgaatgctttacacaagcaaaagttttgccatcatttccatggatatattctgggcattttaacctatgtcatgctttagcctggcacagagtaagcaagtgaaacattcctcagtaatcccatcagtgctgatagcatacaaagtagttgctttttaaacttttactttgttttcatgagttgtttttaaaaacaaacattgattgggccttgctttaacagtcacaataatgccttgtagataccagtaaactgtagcggctgttaagtgtgggctctggggt

SEQ ID NO: 503779 - DNA, 649 bp, Homo sapiens
ggttagtgttcatgaccttattgctattaaggcccaaagattgtttgccacttccattcaacatcttctagggtaatgataaggcttccctttaattgaaaataaagatagagactcgtctatcacaattcttctgttgtaacttctttaaactttctacaaatgatgatgaaaacagcctcataactccctgtgctccacatggccatacagggcatatgtgaatattggagctgtactatctaaaatggcagccactagcctcaggtggctatttaaattgaaattaattgccagtaccatttctctgttgcggtgccctcatctcaagtggttaagagctacacatggctaatggctaccatattaaccatacatttgtatagatatggaatatttttatcatcacagaagtttctaggtactagagctgtaattcacaaataatatgtttgggggattttgatagtaaatgatttcaggtatattacctaataataagaattattacatcactgtgagcatttagggtttactaatttcacatttggtgacttctcactgattaacaaccagaatgagtgacttcagaaatgtgtcaagacgcattttctrgctatgttgttttatatgactattcttgttaaat

SEQ ID NO: 503780 - DNA, 302 bp, Homo sapiens
tttataaccttttcaattcactatcaaaagtcctggctcttcagatatactttaaactataaataaacactgcatagttctcttttgtttgttttgttttttgttttttgaaaaattattgcagtacaattactcctatttggaatttagtaaggagcaaacagcacaggagtgtgggcggtccgaatgggtccrggagctggccgcaggagtgccggaggaagcgcagaagtctggaacagtgttgctgctggagcagttcgaagactgaagggggaactcactgccactgctgctgcggc

SEQ ID NO: 503781 - DNA, 612 bp, Homo sapiens
tgctatttaagtgcttttgggctatcctgttgagagtgtgagcctttgactcaaggcgcaacacaaaagtcatggtagaagtttggtgattccttctctttaggcttataacaccttgtctatattgctattttggtactaattatgttactataattattttttaaattactaacctttttcccagatggtgaatctcaaaagggcactatctggaatatggtaagctcctcaataaagtacttattatgtggctggctggatgaataattgaatctagtgytgtatttatctctgtttcaaggaaagaggagaagagcagaatgaaatattatactaccatataaatgcaaaaaaaaatttaaataatataaatggtataggcaatcacaaattaaatggtgtggacaatattgtgaaatcagcacaagatggccagtcaggacatgctctaccctcaatcagttctcaatccctatcaagaaagtattccaccatgccgaggacattttagttttaaacaacatggcccataaacacacaactatcttatcttgtacttgccaaatgtatcataaactattatgttgcttgatgaaaaatggacaaatt

SEQ ID NO: 503782 - DNA, 612 bp, Homo sapiens
tgctatttaagtgcttttgggctatcctgttgagagtgtgagcctttgactcaaggcgcaacacaaaagtcatggtagaagtttggtgattccttctctttaggcttataacaccttgtctatattgctattttggtactaattatgttactataattattttttaaattactaacctttttcccagatggtgaatctcaaaagggcactatctggaatatggtaagctcctcaataaagtacttattatgtggctggctggatgaataattgaatctagtgttgtatttatctctgtttcaaggaaagaggagaagagcagaatgaaatattatactaccatataaatgcaaaaaaaaatttaaataatataaatggtataggcaatcacaaattaaatggtgtggacaatattgtgaaatcagcacaagatggccagtcaggacatgctctaccctcaatcagttctcaatccctatcaagaaagtattccaccatgccgaggacattttagttttaaacaacayggcccataaacacacaactatcttatcttgtacttgccaaatgtatcataaactattatgttgcttgatgaaaaatggacaaatt

SEQ ID NO: 503783 - DNA, 506 bp, Homo sapiens
ttttcttcatttcctagcaagtctgagtgagacttaaattcacataggaaagaagaaaataaatcagatgtaattctgagccttcaatctacaggaaaacatgatgaacatctttgggttataacactaatccctgttacctgagaggaaactctagtaactcacctatggtttttccacttgagttatgaagtctgtaaccagaggaataaatttcttgcccagaccatgtaacttggctgctccatgttactatccaaaattcaagtgttgatattttttggaatcctttcttatgctttatggatttttttaaagaagtatttacagtgtttttatacaagacgaargtcacaaatgggccactttgaatactgatgtttccttttattctcaactgaagccccattccacaacgtattagcaacctgttttgatgccaaagccaaatagtgacagttgcagtaatgaatatttgctacagggcgctggcagaaaaatggcac

SEQ ID NO: 503784 - DNA, 615 bp, Homo sapiens
gatctctacgaaatgcatgctcttaaattttatatgcttatcagaggttggccataaacttgctagctttgaactaatttatgaaggagtgcatgaggatgttggaagattcatagcatttrtaactgggtagtaagcatttagaattagctggacagtgggctaggggaatttgtttagccttcacatttagtccttacagttaatgtatgaaatgtgggttttactatttttgttttacaaatgagatacttgggtaacttgtccaagacatacagtcagcaacagttctgcttgactataaatccagaaatcttactaatgtgccactttgataaatagttaattgaatgtattttgcaaggctgtgttaaaagaataagcatctttgaaagtatattaatcagtgtcatacacattctaaccaagctttgctcatctctctgcatgctttgaaactatttccagttgttatgcaactgattgcctagggattgaaatgacttttagttgatgacaaacaagataaatatgttgcaaaatcattaaaaatacttcaccttcactgattccttctctactgctcttttttcctttatatagacctgagtttct

SEQ ID NO: 503785 - DNA, 452 bp, Homo sapiens
tgctctggaggctgaggcaagatgatggctagaagacagatttcaaaccagtatgggcaacaaagcaagatcccaactctgaaaatgtttaaattagccagacgtggtgatgcatgcctgtagtcccaactactacactagaggtagaaggattgcttgagtccaggagtttgaggctatgtgagctaagatcatgccactgctaaactgaattcaatccagttctttcactttgcagctatgtaatcttggaagaatcatctacttcctttttcatcagaaatactctgagcacacgtgktaagtccaaaacactatgaaaatataagatgttatattatctcagaaagaccagccaatgaaacaactgggtttatattagacactgaaggttccttctcaaagtaactgccatcaggttttcctgccagaatgtccagttatttttaaat

SEQ ID NO: 503786 - DNA, 602 bp, Homo sapiens
tttctgtgtgaagcacacatatacatttctttgaatccttgtataactcaactctgactggctgtttaatggaatagttctgactattcacattttccaggttattatctcttagtttcatttagtataatgcctggctttgaaatcataggtaaatattcaacaatgcctatcagttaagattttagggcactagattcagatagacctgggttaagcattcatttgttagttggcctttctaaacttcagtttcctttacagtaaaatggagatcataatagtgctttctttccttaaagaatttaattatgaacctatgaggcttgaaaaatatttaacatagtatctggaccttcacaaacactaaataaacatcagaaattcttttatatatttttgtatttttttttgacacggcctctrgaaaactttctatccaccaaccaagccccaaatgacattcttctaataaaacatacggtagactatttaaattcattacagagttcacttgtattagatttaaattcattacagagttcagttgtattagttccttttactacatttgaaaaagccttttctcagtgtgcacattc

SEQ ID NO: 503787 - DNA, 631 bp, Homo sapiens
acctgcattttttctggacttttaattttattccattgatctatttagttaagtttgtcataagaaatggattatactgagatgctgttaatcaagaaatatcatatctcctccctcccctcaacacccactccctggctgcatgagaattatagaagacaaagtaattgtttactgttagcaagggctttatccccaaatcccactaaagaaccacagtgagtttgcttaagccatgtccagctatggcctgtgcattctctcaccctactacctcaacttggctctcagagcctaccactgagtagaaatgaaacccatacctgccagcaccagagaaaacagaagcaaaggaatttagcagatatatatcacaggcctatcctatgtgggtaacaggggaagtgttacaaactccagaatgagctgcctccaggcatggaagaaaatagagaaaagagcacatctatgtttattaagactttttagtytgtttgagtgctgtacccaaacaacatggcccactcaatgcaacgaaaaatgataagtcaagatcagtattcttgctagaggcagagtaagagatctagaatgaatatgagtgcctgagctcctaaaagaagccaattta

SEQ ID NO: 503788 - DNA, 508 bp, Homo sapiens
tcttattgttgcacacttattagaactcaatgtgactgagatgtgaaaggttgatataattctatttatgacagggacttagggaacttattctaattgagaatcagaggcttaataaacctgaaggtttaagtgaaagaaatgacattgaaagaatcactgcatatctgatgttttcaaataaaacaatctctgttttctggttttgatagaatattgtgttctawagctatatttctcaatgtgtggttccactgagggaaagaaaaaaaaaaaaacctagcatagccaaatacctcaaatggtataaatgctatgtgtatttactctgttgttctttagttgtatcaatattctgttaaaaacctgttcgaagtagggcaagatgagaattatattaaaaagccctgagctatcctcttggatttgaatgtttctgtttggtttgtttcctttgctttgttttttttttcaaagagctcctgtttgtagaaattagatatttttc

SEQ ID NO: 503789 - DNA, 575 bp, Homo sapiens
tttgtgtggtggctttcttaaatgctgattgtagtagcaatgtattgggtatataagcaggctcactaccttctgccgggctgagagtgcagaggcctcaggaagcttatctcattccctagcactgtgctcttcagtcagcaggttttatatttggttgggcacttcaatttccagtccagtaggtggtgcttatgggtaaaagctggctaccacagaggttgatgcctatgttctttttctttgttcactgggaggggatttctgttgtcacaggcagttggctggtctgtggactactcaatgccctgagttcctcactcagcccagagcaagggacaaatttgggcagagctggacttccaaactcgtctttgaataccccagttactagtggaarcacccaccctgatggggcaggggggcagagaggggctcagggtcctgaggtctccactatggggggataaaggaggctgcactaaacaagaagacagtctgcttccctatcacacacctgtccaggggcttttgttatttggttcaaatagatattgtccttatcctcagcccac

SEQ ID NO: 503790 - DNA, 554 bp, Homo sapiens
agctgtagcatgagttttaaatgaaatttgagccaattgttttgggactataaaattggaagaaacaagactctcagacagaaacatcaataagaactgatgcttccacaacctctcattctctcaaacatcgactgaaaacctactgtgtgccatgcactaggcaccacgcacggtgctacacaaggagggagaaaaagtcagtcccaggccaacagagaggccaacgtgtaaacttatatgaaccattctgagggtattctgcccccagaatccatattattwgtcccaatagccacattcagagccacccattgagttttttttttttttttaatttttactcaagctgattctggctccctaaccctacctcacatttgcagcatgatggaaacaactctctagggagcatctgtcataattgtcttcagacgctgccttcctgtcctggctacattttgtttatttactgtcacttcctggccatccttgtcaaaccaataacgtacggtacttaacctataattgactgttttggggcacaaaaaatc

SEQ ID NO: 503791 - DNA, 243 bp, Homo sapiens
ggttgaccaaaggcttttactaggctactgaaacagcaacataaagccaaatgtcaaattcagactggatggggaagraagaggccaaggtgtactccttagagaccattttgagataaagtgaaggcttctggagttgcaaagcaagggccgtgaaggctggctggtgtccttctgtcaccagcagccccatctgccttcagacaggaatgtgctgaggctcttattctgattggttttctt

SEQ ID NO: 503792 - DNA, 605 bp, Homo sapiens
atgtcactatccccatcgcctacggcaatgaagattaacgaggtctgctggtagtacagtccatctggaggtcagcagaaagtgttttagtggctcaatagtgtatttagtatctctctagcttctagtgcacatgcacacatgcacctctcggtatttctgtacaccaaaaatcatctttctccaagaagaggggcaaggcctgggaattctccatcttatctgcaggctaccccacctctcccagcctggcctcaggcagtaccctcaaggctgccctttgagtccctatctcaggtgacacagagagcctttggctaagatggcactgtgggtacaagatgtttattataaaccaacctaaaaggggcttgtcagaaacaatgagataaaatcatctagaaggtttgtctctgagggcctctgtccagactggctcattctgccaaaacagtgrctgggacagaagtctgaatgcctgtggcagccatgtcctttccctcctccaaacgcttcagcaccaagcccaggtggggagcaggggctttttctgggagcagccacctctgaggactgacaccctggctcccagcccagctctgtca

SEQ ID NO: 503793 - DNA, 344 bp, Homo sapiens
tttccaaggaagactgtctctgtaacatctctcggtggtgctaagtctaattgcactcatctgcaggcctgcaactttcccaaaccgcttccccagtgttatctcccccagcccttgcaaccacatgtggacaaggttaggcaaggatttgcatggccatgggagcctagaagcctttctggctatattttctcagggcactcttccctgcatcctggcgctgtgtcctaggcccttcttctccttctgtacttccaaagacatctcattctgtctgtggctgcagttacctattttctgacaagtcctaaactgctcttttctayactagtcgtgtagaggca

SEQ ID NO: 503794 - DNA, 640 bp, Homo sapiens
ctggttcctctgggaaggatgtagtatgggccaccatgttgtggggaagcccaagtgggtgttaatccttggctggtggccactgagggaagccaggctcggcagacagtaagggcattgccttcattttttctctgattccacaatcaccagagaaaagacaccatttggcccaaggctgagcctyctgctgaggttgcccacgataaccgtcccccattctgctttcctcgggggctggaatcccagttagaaatgttcaactgcgataagtccaattttccccttcttgtttctgttggccttgataggattaatagggctcatgtaaccttagaaacatggaggatcaattcagatattatggaagagggagtagaacaaagagaaaaataattttaaaaaatagaaaactttcttgaggcttcagtctataattggctgagctgagtgagtatctcagccaaatcgaacaaaaatcaatgtcaggaatttcagaatacgaaaaaatttctgcaagtatttaagaaaaaaagtgaagcaaaaccaaaccccaaaccccaaatgaccaccaccactacccaggtgatctttataaaggaacagaatcaggcttgccacagatttctaaaacttgata

SEQ ID NO: 503795 - DNA, 491 bp, Homo sapiens
taccctgtctctatacagaagaaaaaaatcagacattcaggttgaaaatttaaaaaaatattctctatagcttcataaatattttagcattgacagggcttgtgtgcttttatcatctcacagtggtatagtragctgggtgggagaggtgtcatgctaggtgaagaagctaagacctaggctcttggatgtttataatgtaccaggcttggtactgggtactttaatggcatgacatcatgtaattctcactaggatacaatgggacaggtctggttttcccattttacaggacactggaaaagtttaagaatgttttcagctgggaattggcagagctgggaaggaagccatatctacctgaccctggagtggccactccactactgtgggttgcatggacaggtctggagagtgggcacagtgttcagttggtgccatgctgtctgctctccatctactccagtagcccacagtggcttgcaatgaag

SEQ ID NO: 503796 - DNA, 626 bp, Homo sapiens
gatctctgttgctcactgctttatgcccagtgccttgaacagtgccaggtacagatgagcagtaaacacttagtgaataacggatgtgctcgtctgggagatcctacagatattctgaggttgtattggcaaattcttscccagctggaccttactcatgatgtcccagcttcgagattcacacctgtgacaattagacaggtgagatagaggcccagatgaggaggccaagctcctgagcgtgcatcaaggaaaacaaattaaaaattgaaacgggaaactgaatagccagctgtctggtcttgctttggtcccattgttgcagggataaacatttggacggctcaagacaaacacagctttgggttctgaacaggcagtgctgctttctcttgcccgccattacttaattgtgaaatctcttctttgttcagtgcagggacctgcctgctcctaaagggcaggcctattctcaggataccgcctggagctctgagatgcctgctttctgtgcagcaggtcccacttgctctgcatggccccaacagcctgggcaggattttctccaaggagaccttcagagagcagctggcaccttgggcaggctcaggcaaagaggcctgagt

SEQ ID NO: 503797 - DNA, 598 bp, Homo sapiens
gcttcctcagaattccctactttgagtgctcctttgccatgtgaggctcagtgatttccttctccgagtccactcacatttgataggctcctatgaaatgtaggtgagcttcacctgaatctgcacctgtcctcattgctaaggtgatgagctagtgtcaagaaaggctgagggatccaaggatgaactcaggcagggcttgaggccactactcccggttcccctcctctcttccccatgaatcaccttcaaggacacttccatcaaacctgactcacacagaaggcccagacctgagaaatgaccagcccctgggccagagcagagagccagaaggcaattccctcccccatcactgctgcactgggtggaaattgggtcagagctggccagsccattcatttaatccaaacgccccctttccattcagctcttagtcctcagagctttcagtccaaggaagcactatttcctctgcaaaataaacaaaataaattaagcccatgctctttgatctcagggcttttgtgtggctgatgaattgaacagaaatgatctgccatcctcctggcatctcaaagacactgcaaaaattcag

SEQ ID NO: 503798 - DNA, 487 bp, Homo sapiens
ggaaaattaataaaccagaaaggaaagggacacagtattcaagacactaaatgctcattgcaaccagggagcctccaggtttctaagcattgctcttctgaatcccacactggagatattttcctcttaattcaatagatgtttatcttgcgcccaccaatgctgagtactttgcttagcactgggaatataaagatgaagggatgtggtccctgcccacagagaacccacagtctagaatgattatgtggtgatgggatcctccactggggaaaatgcagtggcttttacttgatgcagtttatgatgtttggytaatagaatgtcacataaaaacaaatcccctgattatcccactgccaatgggtggcactgcattctaataaaggcagcacttctttggtggtgtgggggaaaagaattgcagcccagtgcaggagagcctgatgaagactttattatttaatgaaccatgtcatatgaacag

SEQ ID NO: 503799 - DNA, 615 bp, Homo sapiens
ttcatgcattcctaggattttacacattgtctctctgtcacccacagggtacatactcatcacgcttcagatgtgttacacctgggagccgctcccaatcctccattcaggcatgcacagagaccaaagtcatatggtagaaacacataaattctgaatactacacaaatgcagggtttcacacataatctcattgccacaatttaaaccagcttgtatcttcctaagattctccacaattgtattmgcaacacaaacttccaaaatcccatcatacattttgtatattctcagtgtcaccgctaagccttcagtgcacaagtacacagtcacaatatctactacatatgcacaggtgctcacaaatagaggttctcacatgctcacacataacacacatacaaatgtgtggcccacgcgcctgcccatatgagtcctagttgcttttatgatgttacacagatcactcaaggttgtatacatcccccatatatctggcctggttagtgtggtggggaatgcattatcagtactgggtgaggagtcccagtcctatgacaccccttgagggcccctgagactacctggcagccccccatgggtcttaaagagcag

SEQ ID NO: 503800 - DNA, 463 bp, Homo sapiens
agcccttggcaaattaaaaagtcacaatatctgagcctcagtttccccatttgcaaaataagcactgggggaggtgttcccttccagctctgctgaggcaggattctaagtagctaaggaggaaacctgctgtgtggctgaaagtagtggctgctgcctagatggggaggccaggcttgctcttggactcaggcaataataaacatgggtttgtttaatttaaaatctctgatccccaaactgagatgcttcctaactttgggtagaacctgaccatgttagattttgaaggrctccaagaaattgaaacctattatttttgtccttcccttctctctggacctaagtttattttaaatttttaaaaaaattattttaactgccaacaatacttgaatgtgtcttccttattttaaaaaaaaaacatgctgatgaagttaaaatgctctagacaagtctcatc

SEQ ID NO: 503801 - DNA, 546 bp, Homo sapiens
actaaccctgaaccgtctctgcaacctcaccctgccctgattatctcaacacgcgggtccccagcctcccctggctgaacccactgaacacgtggtctgtagggttaccacgagatcacgccaggtgggctctgccctttaggttacttgggggttaaagtgggtgatgggcacattctttggtaggcattttatattcttcgcttcatcctcacagcatctcgaaataggtggtatcatcttacctcatttacagatgagggaaagtaagaattcaaaatcaccccattagtaacctgggaatcatctttgattcttcccttcctcccactgcccgcaaaccgacccattccctatcctgaccatttttatctgtggagtgtttctcaaatccataattttctctccatgctactaccaccagcccaatccaagccaccattccctcttgcctgtgtaaacaccataacttcccaactggtctccctgtcaccactctgacctcagtactgtagmcaatgactttttggctgaaaatattttcag

SEQ ID NO: 503802 - DNA, 443 bp, Homo sapiens
gaaaatctagcaaatgaggacatccttgcagcagaaaggacttaaagtaggatatgccacatactttcccacctcaggatttttcagaggccatttcacatttcctttcccaccttcttggtttccttacctggaaacaatgcagacagaagaaatgaccgtggtgttcctgccaaagatgcgtagcctggccctaatcatcaaacgaaacccaattaaggcccattcttcaagctagttggccagtgagctccaaaatgtcaagatcacaaaattcagagaaagtttgaggacttgtttgaaggraaccaaagaatgtggcaactaaacacagcacgttgttctaacccagtgagaatcttgtaggggatctgaggattcgatggtaggaatgtgtcgatattaatttcctgatggtgatggctgtattacggtttgtaaga

SEQ ID NO: 503803 - DNA, 458 bp, Homo sapiens
cagctgggcatggcggcatgtgcctgtggtcccagctactcgggaggctgaggctggagaatcgcttgaacctgggaggcggaggttaccgtgagccaagattacaccattgcacaccaagctgggtgacagtgagactccatctcaaaagaaaaaaaaaraaaaaaaaatatatatatatactgcaatgtgtgctaacaaacagcacttgtttgcagatgtgtaccagccctagtaggtggccaataagtggcacacagcaaatacatttgtatatagtaggtgcttgaatgtgaactggtacaaagcaggtgcctgataaatgctggctgtgagcaagtgcttgatgtagatgtgtatacaataggggtccaataaattctattggtatttgataaacgttgatggacacaaaagtattcagtacacctctttagtgagcacagtgtgtgtttaac

SEQ ID NO: 503804 - DNA, 458 bp, Homo sapiens
cagctgggcatggcggcatgtgcctgtggtcccagctactcgggaggctgaggctggagaatcgcttgaacctgggaggcggaggttaccgtgagccaagattacaccattgcacaccaagctgggtgacagtgagactccatctcaaaagaaaaaaaaagraaaaaaaatatatatatatactgcaatgtgtgctaacaaacagcacttgtttgcagatgtgtaccagccctagtaggtggccaataagtggcacacagcaaatacatttgtatatagtaggtgcttgaatgtgaactggtacaaagcaggtgcctgataaatgctggctgtgagcaagtgcttgatgtagatgtgtatacaataggggtccaataaattctattggtatttgataaacgttgatggacacaaaagtattcagtacacctctttagtgagcacagtgtgtgtttaac

SEQ ID NO: 503805 - DNA, 656 bp, Homo sapiens
agctgcctgatggtagctacaggagtccagcagatcttgctctttcacctcccttactacattaattcaaattaattagttaattagccactcagttggatgctttgtcaagcaccaagctaaatacttaaagggaagtttgaatcccctgtatttcacttatgtcatgaaaaacacacaaacacaaacagaaaaaaaaaaactatttgaggatattttccctttggtgtttcatattaggtgagtggttgggatgatgtcaaaaggtctttgtgaatgtcacacacgtgctggattttgcagtgtacacaagacatctacgcgaggcttttagttctaaaggatccccacaagttattcagagactaagaaatagttagatcaatgtcctttggcatccattttaactcccaacacaygttacacttttctatatatttgaatctgttttacattttttagataatatttgtagttctcttaaaaaaaatacctaattctcattaaaatctctctagttagtactttttctgggagaggattttgaatttttttaacgcagttgtgatattggaactatgtttttataaataggtgtatctgggttttcatttaaataatttttattacaaaaataatgacatgctattttgaaa

SEQ ID NO: 503806 - DNA, 656 bp, Homo sapiens
agctgcctgatggtagctacaggagtccagcagatcttgctctttcacctcccttactacattaattcaaattaattagttaattagccactcagttggatgctttgtcaagcaccaagctaaatacttaaagggaagtttgaatcccctgtatttcacttatgtcatgaaaaacacacaaacacaaacagaaaaaaaaaaactatttgaggatattttccctttggtgtttcatattaggtgagtggttgggatgatgtcaaaaggtctttgtgaatgtcacacacgtgctggattttgcagtgtacacaagacatctacgcgaggcttttagttctaaaggatccccacaagttattcagagactaagaaatagttagatcaatgtcctttggcatccattttaactcccaacacacgttacacttttctatatatttgaatctgttttacattttttagataatatttgtagttctcttaaaaaaaatacctaattctcattaaaatctctctagttagtacttyttctgggagaggattttgaatttttttaacgcagttgtgatattggaactatgtttttataaataggtgtatctgggttttcatttaaataatttttattacaaaaataatgacatgctattttgaaa

SEQ ID NO: 503807 - DNA, 660 bp, Homo sapiens
ggaattggctcacttgattatggaggctgacaggtcccatggcaggccatctgtaagctggagatcctggggtkccagtagattggctcggtccaagtccaaaggcctcaaaactagggaggctgatgtgattctcagtatgaggccaaaggcctgagaactttggagggccactggtgtaattattggagtccaaaggtcagagactctggagttctgatgttcgacagcaggagaaaaggaacatgccagctctagaagagagaaagaggaaatcaccttacttatccctggtttttttttttctctatccaggcccccaattgattggatggtgcccacgtgcattgagggtggacctccttcactcctcccgacgactcacaggccagtttcctccacgagcaccctcacagacacaccagaagtaaagccttaccagctttttacatatttcttaatccattcaagtcgacacagttaaaaactgactgggaaaaaaaatgtaacctcaataccctaaaagcttggagagtgactgaaaccttgcctatgtccaggtgagcttttattaggaaacaaatatttttcacgaataatgtaattcctggctcagcacctgcttcagtagatgctatgtctgcctagttcgggctaaag

SEQ ID NO: 503808 - DNA, 513 bp, Homo sapiens
tcttggcgtctttctcagtgctatcttactacgtggtaattgtttggggagctcaactgtatcttgttctccactcccatctccagtttgactgcctaaatgttaaggttcagagagattcatttccttwtggattcatacattcatgcatttacacatgctttcaagaagaattcattgagtattattggcaccgtgctctatgctgagggtgactgtttcaaaggtttttaggttagaaaattgactttttttttttttacgtatttttattatcctagttcaagataaggaaagtgtgatcattgataatgtaagtctcaggatatcgttcttaaaatgtattaaatttaaattccagaaattggctattgatagaaaacacaatagccatctgtaagtaagatgttctgacatcttactcgctgtgaataggtgtatgataccttcttcctgtgggtcatctaatgatacagtcccattaatttttacacaatgaaaaaattcaggcca

SEQ ID NO: 503809 - DNA, 663 bp, Homo sapiens
cctgaagagtgtggttgggcccctgacttgggtgagggcaggtagtatgtaaagaacagaaagcaayagagtagcccagaagtaagcacatcgggttgagaaacctgaaaatggattctccaggagctagaggacattatccctggcttcgcaagctttacccctttatgctcttactttgtgactgaaaagttcagtagcctcagtttctccattagagaaacttgaaggaccatgcttatgttttgctattcaactgggaatcagggatgccacactggaccaacctgtaagtgacagtgagtagcaaggtggataaggaggggcagaaggaggagcatctcagctccttagaaagagctgggcagggatgtcattctgttgccttctttaccaaggagccccagaatccaagactcttcctttttgcaaaaccccagctcatcttttatctgcacaagccaaaattactgcctctccatactcctaccaccatagggtgggccctcagccctgtgggtagggaggagggagctgtgtcaagtagggataacaaagaggggcacagatccaccttccagctagttaagcaagagctttatcttctgtttactcttgcatttttttcagatggatagttaccatagtaaccccatcgttaag

SEQ ID NO: 503810 - DNA, 663 bp, Homo sapiens
cctgaagagtgtggttgggcccctgacttgggtgagggcaggtagtatgtaaagaacagaaagcaacagagtagcccagaagtaagcacatcgggttgagaaacctgaaaatggattctccaggagctagaggacattatccctggcttcgcaagctttacccctttatgctcttactttgtgactgaaaagttcagtagcctcagtttctccattagagaaacttgaaggaccatgcttatgttttgctattcaactgggaatcagggatgccacactggaccaacctgtaagtgacagtgagtagcaaggtggataaggaggggcagaaggaggagcatctcagctccttrgaaagagctgggcagggatgtcattctgttgccttctttaccaaggagccccagaatccaagactcttcctttttgcaaaaccccagctcatcttttatctgcacaagccaaaattactgcctctccatactcctaccaccatagggtgggccctcagccctgtgggtagggaggagggagctgtgtcaagtagggataacaaagaggggcacagatccaccttccagctagttaagcaagagctttatcttctgtttactcttgcatttttttcagatggatagttaccatagtaaccccatcgttaag

SEQ ID NO: 503811 - DNA, 625 bp, Homo sapiens
agaggattgggtggctaaaaagaagtggcaagagggagctttgcgatggaacagttctccatcttgattggttgctgcacatgctactgcagagaactatacatgcaaacacacaaatgagtgcaggtataactagtgaaatatgagtaagctctgtggtgtgctaaggcaaacttcatggtttgaatactgtattatatttatacaagatactaacattggggaaggaaggatgaaggatgtaacgacacctctttgaataycttttggaatttcctgtgaaatctataacaagaaatttaaaaagcaagtgtattaccttctataagcctgcatataggtaccaagagacaaacacattttcttggatgattgtaagttattttccatatttttactactgattaaaagaaaatctgggtttttctttgaggatcagccttgtgagacactcccggtcaaagggggatcttctttgttgactgaagcctcctaatattttccatatatttaatgaaaaacatttcccctttatttttaggaaaaacatagaaacatgtcattgtaaatgttcactcttgtttcaaagagtaaaaaaaagcatatacatctttttcaaaaagat

SEQ ID NO: 503812 - DNA, 625 bp, Homo sapiens
agaggattgggtggctaaaaagaagtggcaagagggagctttgcgatggaacagttctccatcttgattggttgctgcacatgctactgcagagaactatacatgcaaacacacaaatgagtgcaggtataactagtgaaatatgagtaagctctgtggtgtgctaaggcaaacttcatggtttgaatactgtattatatttatacaagatactaacattggggaaggaaggatgaaggatgtaacgacacctctttgaataccttttggaatttcctgtgaaatctataacaagaaatttaaaaagcaagtgtattaccttctataagcctgcatataggtaccaagagacaaacacattttcttggatgattgtaagttattttccatatttttactactgattaaaagaaaatctgggtttttctttgaggatcagccttgtgagacactccyggtcaaagggggatcttctttgttgactgaagcctcctaatattttccatatatttaatgaaaaacatttcccctttatttttaggaaaaacatagaaacatgtcattgtaaatgttcactcttgtttcaaagagtaaaaaaaagcatatacatctttttcaaaaagat

SEQ ID NO: 503813 - DNA, 477 bp, Homo sapiens
agcttataagaagtaggtctatctgaatccaaacaacagtaccgagaacgcagcaagcactcagtacagatttattgaattgatgtaatcttttccacattatgttctaaacaatttaaatcaccagcttactccacgccaagatgcagtctcagtggaatctgctaacatggctatctccgtctattaattaattcaatgagcaaagattgagctcctacggtgttcaggcactgttctaggtgctgctgtcagatgctatcccctcttctttctctgagagaagaattctctctgggatctcctgcctgctgagggctcagatccccatgctgactggtacacagtcctgttctacaatctgcatctagccaaccagtctccaaggtctctataccccaggactcccactcattcccaccaatagcatccagaacacctacatcccctcyttccacaaagaattggccagcaaga

SEQ ID NO: 503814 - DNA, 610 bp, Homo sapiens
tgtctgggtttgaatcccagccattccattactaagcgtgtgatcttgggtcacttcatgcttctgtgcctccatttcttcatctgggtagcaatcgtatctacctcctagggctgctgtctagacttaggaagttcattcttatcatgtctataacactgtcccagagacagtcagggctcaataaatttgagctaccatcatcattctttctcatctcttactataccccagggacccagcctgtaaatgagcatccaccccaaggtttccagatggctctagttctgaaacctgtgttgtcatgcacttacccagtattaatttccttctcaaatgcagtcctccgyctccttctggacccctcccctgcacagctccctgctctctgtaggatccagacgtgggactttgctcccatcctctcttgctgctgcctgacaaagctactcacctcctttgggcctcatctgaaaaacctgagaattcctccaagaaaagccaccacttgggagccggtgacaagatccaagagctggaccataagtccactggacctcagacccctcttttcctaactctttggcattatgtttggtctttactagag

SEQ ID NO: 503815 - DNA, 608 bp, Homo sapiens
ccttttcttttattcctattgctcctctcactaggcatgtctctccccttagctacgcccctcacccaccaaaaaagttctgaacactgtctggacctgtgagtacattttttattcattgcacaaatgaacgatctaagagctattaagaaagaagaatgtaatccctgtgtagagaactgggggtttccttgacaacaacaaaaagacagcagggaatgtccattcattctataaatatgcaagaagctaggctcaatacctggggaaatgtatcaagaatttgtaaaatgatktttatgagaaaaaaattaaattggtagttatcaaaatcataagcccaactttcacaactgaggaaaagcaaaaagctaataaattctactcttaggtcctatagagccaatactatatttaaattttaagtaagggctgcagctgcttctgatttgcacccaaaatggcaccacccaaaaaaacacaacctatgtcgggttcggatttttaagaagttatttcagttaagcagacactaaagtacaattatacttggcttcttgtggcataaatgatcttgaattttaagatcatttggcttttacctattt

SEQ ID NO: 503816 - DNA, 653 bp, Homo sapiens
ttctctccactttcccgtccgacgcccgccctgaagttgaggaagtttaagttttggattaggagcccttcttttgcaatatcctggggcggggccctaccgttgggttcaagtggtcatgggttttgagagcacggtatgtgtattatctttcttaaagacgcccagggtggcgcgtctagacctccgaaacctggctccaccccggccatgtgcgttcgtccactaagcggcgaactggacccagggcgccgcgtgcgttccagccgactcgcgagaaggcatctctgcactttgcacagaccaagaccttttttcagggtcctccaaactcctagatgtacgccgcagattgtggagtgcaaaatgaatgacttaagggaaaactagggccttccatccttgaacacaaggttgtgaaagatgcwcgcttggtctggggggcttgtttttctccgcctgtgcgggacttctccatcagggggcgcccacacccgccgcaaaactcccaattcctagacatctaggttctgcaagtcttgtgagctgaactgggggcagatccgaaggagcgcaccgcctccctcgctcctccctccctgctgccttggagcacgggaaaggcagggatttcacactagccattcatttgt

SEQ ID NO: 503817 - DNA, 482 bp, Homo sapiens
tatctaaaacaaataccacttatcatttattggcagttacctcgagagagacccatacaccatcttctagcagagcacagtcaatcaaattaccttcgggtaaagctatagcatgtctagtcgtttgacagatattaaaggtggtcataaaagaaacataaaccataggctgtgctccaaaggcatattggccagctaacattaacacaatcaaatacagttgtcatactaaacatatagttacacagtaggtgtatggtgtgacagattgtgaatggtaggtgaggtcagaaaaagaaggaatcaagaaaggcaggaagttacagaatatttcatgagaaagaggagacttacgtcagtctctgttggagggatagattacaatccaattatgagaggccagttattagccaattgcttcccaacttaggctcaccagtggggttaaggagccccaagtrtaaacagctgtttttctaaat

SEQ ID NO: 503818 - DNA, 563 bp, Homo sapiens
gcgttatttattctagcatgatgattgtggccaaagatcacctctggcattggctctctattgttttgtacatattatttctcagcacrggcttgagaacaatgggctcattgattccacctgactcttgggaaggatggactttgccagactaaggctctctgaatgccagcctggaagttcatgaatccccttttaggagtaagctgagcctttgcggttgggagtggtgaggaagggaatgtgcctctattttccttgctatttattgctctgcattaaaaaaaaaatctctttgcttctctgaccagaaagatggtgtttcattgaggtagagcccatagtaattaggccagcaatcagcttgtccacaccaaagtgcatcacttgcattctctgtgcacactctctctgcctgctccaccccgccacatccctcctctgcctccctgtttacgcgtttggttcagaatgcagaaacaatgaaggtgtttagggatcctagcctcacggggtagcaattggtacagagaggctgtgacacagagtgacctggaattcca

SEQ ID NO: 503819 - DNA, 554 bp, Homo sapiens
gtgctgtggtcctttcttagctgtattcttgtcctgtgagggtccagtggtccagtctttaactgaactgttgtcctgggatgtgaagattactattgggtggcattgaaaggccccttatagagggtctttgatatttcttggccactgccagacttgaaacgttagttttggggatgtgtctccttagcagtcactaccgaggggatacaatcaacccagtgctctcttttggtggccagatggcaacaaaactggtgtatcagatatgtaatcctcctctccctcagctcagaagggctggaggaaatccactctcrgggagttaaggctgctctgatattataagggtgtatgttggccaaggctcagagtgagtcctctgggaaccaaaagtcctgaatgatggtattgttgcacttgattgcctctgaggagtggtctgaaagaaaagaagagataaagtagaaatgttaaatgtttccaacaaaagctattaggggagaatttcctgactcagtacttgttggcattttttgaggttttttacagac

SEQ ID NO: 503820 - DNA, 603 bp, Homo sapiens
acgcctggctaatttttgtatttttggtagagatggggttttgccatgttggctaggctgatctcgaactcctgaccttgtgatctgcctgcctcagcctcccaaagtgctggattacaggtgtgagccaccacgcctggtctctgtctctctctcttttttttttttagagatgatgtcacccaggctggagtgcagtggtacaatcatagctcatagctcactgcagccttgaactcctgggctcaagtgatcctaccatctcarcctcctgagtagctgggactacaggtgcaagccaccgtgcccagccctatttgacctctgataaagagtgttgtttggctagaaaaccttatcctcagaagcagagtgaggaggggaacttgcatctaggccatttggggcctgccatactttgccagatgtcaagacagcacgtaatattgggtgttgactttaggtcttatatcacaccttcttcttttgtcttcatcctttcccccacttcctgtgctttccttttgtctcctctcattcttaggcaatgggtttaaggtcaaagacacaggcctgggctcagattcttgccctatcactgac

SEQ ID NO: 503821 - DNA, 603 bp, Homo sapiens
acgcctggctaatttttgtatttttggtagagatggggttttgccatgttggctaggctgatctcgaactcctgaccttgtgatctgcctgcctcagcctcccaaagtgctggattacaggtgtgagccaccacgcctggtctctgtctctctctcttttttttttttagagatgatgtcacccaggctggagtgcagtggtacaatcatagctcatagctcactgcagccttgaactcctgggctcaagtgatcctaccatctcaacctcctgagtagytgggactacaggtgcaagccaccgtgcccagccctatttgacctctgataaagagtgttgtttggctagaaaaccttatcctcagaagcagagtgaggaggggaacttgcatctaggccatttggggcctgccatactttgccagatgtcaagacagcacgtaatattgggtgttgactttaggtcttatatcacaccttcttcttttgtcttcatcctttcccccacttcctgtgctttccttttgtctcctctcattcttaggcaatgggtttaaggtcaaagacacaggcctgggctcagattcttgccctatcactgac

SEQ ID NO: 503822 - DNA, 605 bp, Homo sapiens
acgcctggctaatttttgtatttttggtagagatggggttttgccatgttggctaggctgatctcgaactcctgaccttgtgatctgcctgcctcagcctcccaaagtgctggattacaggtgtgagccaccacgcctggtctctgtctctctctcttttttttttttagagatgatgtcacccaggctggagtgcagtggtacaatcatagctcatagctcactgcagccttgaactcctgggctcaagtgatcctaccatctcaacctcctgagtagctgggactacaggtgcaagccaccgtgcccagccctatttgacctctgataaagagtgttgtttggctagaaarccttatcctcagaagcagagtgaggaggggaacttgcatctaggccatttggggcctgccatactttgccagatgtcaagacagcacgtaatattgggtgttgactttaggtcttatatcacaccttcttcttttgtcttcatcctttcccccacttcctgtgctttccttttgtctcctctcattcttaggcaatgggtttaaggtcaaagacacaggcctgggctcagattcttgccctatcactgacca

SEQ ID NO: 503823 - DNA, 603 bp, Homo sapiens
acgcctggctaatttttgtatttttggtagagatggggttttgccatgttggctaggctgatctcgaactcctgaccttgtgatctgcctgcctcagcctcccaaagtgctggattacaggtgtgagccaccacgcctggtctctgtctctctctcttttttttttttagagatgatgtcacccaggctggagtgcagtggtacaatcatagctcatagctcactgcagccttgaactcctgggctcaagtgatcctaccatctcaacctcctgagtagctgggactacaggtgcaagccaccgtgcccagccctatttgacctctgataaagagtgttgtttggctagaaaaccttatcctcagaagcagagtgaggaggggaacttgcatctaggccatttggggcctgccatactttgccagatgtcaagacagcacgtaatattgggtgttgactttaggtcttatatcacaccttcttcttttgtcttcatcctttcccccacttcctgtgctttccttttgtctcctctcattcttaggcaatggrtttaaggtcaaagacacaggcctgggctcagattcttgccctatcactgac

SEQ ID NO: 503824 - DNA, 587 bp, Homo sapiens
ctcttcctatgcaggaaacagagaagtcacagagaaattaagtgatgtgtttaagcttttgtagctaattagccgtactggagttctagaactcagtttaatcctatgctagtcaatatttttgaatgtagcattatattttcttagtccactttcttttgctcataaragaatatctgagactggataatttataagaaacacaattaattttttatagttccgaagatggggaagtccaaggttgaggggttatatctggtgagagccttcttgctgagaccctgcagagttccaaggtggcacagggcatcacatggtgaaggcgctgagcatgctggctcacgtctctcttcctctttctataaaaccaccagtcctactcccataataacccattaatccattaacctgaaaatccattaatgcacgaatggctctaccctcatgctccaatcaccttttaaaggggtcacctctcaatactgccacattcgggattaagttttcaacatgaattttagaggggacctttaaaccataatgaatatcttcttacagtgttatctctatttcctagtgctatg

SEQ ID NO: 503825 - DNA, 600 bp, Homo sapiens
ttgagcatattgtagggtaaggcattagcgatgaggtgtttgttttgcctgctgcaacattatgaataatgcggttcacatgtgtaatacactcccacagaaatggccacacgttgttaccctgtatcccaattttcgggctttacagcattctgttcctttgagatccctgatgcataaatgtccatgggtagctgagataggccgtgggctayggacaattcccagatagcaaactagagctttctcactcaaaaaagcatgcggaatatgagagtaatattacagagcagctctggaatactctttaatttatataaacagtgtaagaaatcagggctaacaagccacatggtgttacaccccaccaggctgactgcctctgcagttgggagcccctgcgctggttggaggaaccggggaatagggaaaggttaaacaaatatatactagagagggaagaaaattggtggagctaggtcctcagaggaaccagagtgttacaggatccccttcttgggggcgggtgaggaacagccacttgctcttcctcagaggagacaccaaagggacacaattttctaggcaggatactgagca

SEQ ID NO: 503826 - DNA, 494 bp, Homo sapiens
tgcatgggtcctgggcagctcttgatctgaagtccctcatcctggcctttgatctcccactcctttactgttgccaggatggagggtgatggagttgagttcacatcagcatttgaagtaatgcggtcctcatactgtcttctgctcgagtttactcaggttcattacaggggtggggttagagggccatttgtcttgggcctcagattgaagaagggcctcaaagctgaactttaaaatctttctccaaaacatggtgtgcatatggttattaaaattattattgggacaaaaacatttatttgctaaatrtaaatgtatgaaaaataccataatttttgtagcagtattttaacacattttaaaaaatatattagaagtgtccaaatgtggaattggctcagatgtctcagcttctgagaagctcagaatttaccaccaaacagcagccaacgtatgaggtcccttgggctttcgtcccatgccaaatgacc

SEQ ID NO: 503827 - DNA, 477 bp, Homo sapiens
tactgactggcctctagttggcagagaccaaggatgctgctaaacatcacataatgcacaggagaatccctccacaacaaagaattatctggttcaaaagtcagtcttgtggaggttaagaaacactkccctgccctccttggcttaaatggcaattactcagaagttttccgtgactcctctgggatgggttctcatcacagcctgggcttttctttagtgtatgtgtcacaaatgtaatgaaaacccatcatttgttgttatatccgtgttcggtgctacactgggatccccaggaggaccaagctcatacccgtcttgcttgtctctgtatattcagggcttagcacagggcatcacatttgttagatgacaggaaagactttagggatccccagtggagaacagccttcaaaacaattcaaaagccacgcactggcccactctcaacacttatgctcatacctcgtttttcat

SEQ ID NO: 503828 - DNA, 396 bp, Homo sapiens
atggtggcatgtggcatgtgtctgtaatcctagctacctgggaggctgaggcaggagaattgcttgaacctgggagacggagactgcagtgagccaagatcacgccacgcactccagcttgggcgacaaagttaaacagccaaggaaggaaggaaggaaggaagggagggagggaggagagaggagagkggaggggaggggagaggagatttgttaaaatatgtacttttaggtaatgtctcctacatggaatataaataaaggtttatctcctatactttaagactttcaagtgagaaagaaatgcatgaaagagtaaataaaatgagggatacattgagtgaagcacactcaaattccattgaaaggaaggtttgaagagcttaattgtttttg

SEQ ID NO: 503829 - DNA, 582 bp, Homo sapiens
ctttgtccattatatattggggtaatttgttaatttgctattcaattgttctttatatgttttggatattaacccttatatgagttccttatatgttttggatattaaccccttgtcagatatatggtctccaaatttataaaaacaaaagaggtttaattggtgcatggttctgcaggctttacaggaagcatggtactggaaactacttracttctaggcaggtctcaggaaactttcaatcatggtggaaggtgaagggagagcagacatgttacatggcgagaatgggagcaagcaagatagtgcaggaggtgacatacactttttaataaccagatcttatgtgaactcagagtgagagctcatttatcaccaaggggatggccaagccattcatgagggacccactcccatgatgcaaacagctccaggccccacctccgacactgcagattacatttcaacatgagacttaggtaggaacaaatatccaaactatatcaaacaattctttgtgtgttttaatctttatgtatgtttctgaattctatataatttttattgataatttttgtcttt

SEQ ID NO: 503830 - DNA, 582 bp, Homo sapiens
ctttgtccattatatattggggtaatttgttaatttgctattcaattgttctttatatgttttggatattaacccttatatgagttccttatatgttttggatattaaccccttgtcagatatatggtctccaaatttataaaaacaaaagaggtttaattggtgcatggttctgcaggctttacaggaagcatggtactggaaactacttaacttctaggcaggtctcaggaaactttcaatcatggtggaaggtgaagggagagcagacatgttacatggygagaatgggagcaagcaagatagtgcaggaggtgacatacactttttaataaccagatcttatgtgaactcagagtgagagctcatttatcaccaaggggatggccaagccattcatgagggacccactcccatgatgcaaacagctccaggccccacctccgacactgcagattacatttcaacatgagacttaggtaggaacaaatatccaaactatatcaaacaattctttgtgtgttttaatctttatgtatgtttctgaattctatataatttttattgataatttttgtcttt

SEQ ID NO: 503831 - DNA, 541 bp, Homo sapiens
attaatgtacctccagtttattaagaattgaagactgtttttctcttctgcaatggtaacattgattactactcttcttgttcttaggtaaatacattgcacacatctttacaatgattttatgacagcagtgatcaatctctgaaatgccagtttgaaaattaggaaacaatatttcaaaactatatttttcaagaaaaaagtgatagtgagaaatcagattattttaaccttacctgttaattctataacaatagttttcaattctggctgtgcattaaatttaacctttactctttacaggatctgggattttaaaaaattatagatgtctgcttttaagatttataaacatgacacttctacattaatcttttgcaggaygttttcaatccacatttagtctctaaatttcatagatatgttaattcagttgtagcttattttcttccttgaagtgtattttttgtatataaatatagcatagtataactatccattctctgttgaatggagttttgaactgatctcagtgccagca

SEQ ID NO: 503832 - DNA, 488 bp, Homo sapiens
taatagtgggttaggtgtggagataaggaatttggacaaagttgagtaagtttttactgggtatctgctttgcacccagtagtctgcaacatgagtttaaactcaggttactactttcacttatactttatggagaagatagacagtgagggaggaatgggaagctgtcatgagagtgcaccgtcttggaattacataactggggtctttcctcaataacattttgagcatctgaaaaatagtttaaaaaattgtcttaatatctattaaaaggcatgtctagtgaggaaacaggagagtctgagcaatcccttggtggcgatgaaggtggtagttcacacaagtaacagtggaggcaaaggtaagcgcaagctgcctgtcccagatgctggcccatgtgtgagtgcttccctggagaagtcygcttctgttgctcccacctgagtcacagttaacagattatttctgtgtgaggcacatttcccttc

SEQ ID NO: 503833 - DNA, 500 bp, Homo sapiens
tcaaaccaaactaaattatgtcaaaatgtcatagtccaaattctacagataatgtctatctattcagctcatttatgtctgtatgtagttgataccaaagtaaagtaagagaatattaagtaaagcaaaagattattaagttaaccatctcagtcagatgcaggatgtgcactaaacatctgtgtgactggctccttttaaaagttttcaaaagatttagccaggcacagtggyttgttcctgtaatcccagccactcagaaggctgaggtgagaggtccacttgaggccacgatgttgagactagccgggacaacatagcaagacaattgtctgtaaaaaaaaaaaaaaaaaaaaaaaaaaaggtttcaaaagatttaatattgtgtttagagaaattagcttggctgaaataagaataaaaccacattcaccagttttctttcttcttcctttctgatctttatgacttttatttcttttccttgccttattaaactg

SEQ ID NO: 503834 - DNA, 500 bp, Homo sapiens
tcaaaccaaactaaattatgtcaaaatgtcatagtccaaattctacagataatgtctatctattcagctcatttatgtctgtatgtagttgataccaaagtaaagtaagagaatattaagtaaagcaaaagattattaagttaaccatctcagtcagatgcaggatgtgcactaaacatctgtgtgactggctccttttaaaagttttcaaaagatttagccaggcacagtggcttgttcctgtaatcccagccactcagaaggctgagrtgagaggtccacttgaggccacgatgttgagactagccgggacaacatagcaagacaattgtctgtaaaaaaaaaaaaaaaaaaaaaaaaaaaggtttcaaaagatttaatattgtgtttagagaaattagcttggctgaaataagaataaaaccacattcaccagttttctttcttcttcctttctgatctttatgacttttatttcttttccttgccttattaaactg

SEQ ID NO: 503835 - DNA, 642 bp, Homo sapiens
aaatgtattacaagtaaaaggatgtaattttccttctctaggtttgattagttttccataatttatgtctcccaataaggagtatcattaaaaataatcactgaacatttattttgatttaagtcaataaagactattattactagataaaacatatttctttattttaattttaattttttaaaaagttcaaaataaaatgatcaagataataaaagtctgaaaatattttatttctaaatttagaaatgcaagctatgacaggttataactttatctttgaaaaaagtgcatgcaaaaagcatagtatttttttaaatagtgatttaacttcggtwtcccaaaagggttttgaaaattaaataattggatgagaaactaggtagtcagatttccaatatgataatcactcctatcaacattccatgcatcttagctattgatttataatacaaatatatataataaagtttacaatttatttttacattatatactcattcagtgcattaaaatcatggtcaatttcattacagtatttacaaattgaaaatcttgttagttttgattaaatttatccatagcaagatagtaaaaattgagagacatattttcattaattaattttcaattgtttatggt

SEQ ID NO: 503836 - DNA, 417 bp, Homo sapiens
aagaagaaactcacgtcaaagccgactttctcctgcagstgtaaaataaactcttaagacccttcctgctgaaactctggagaggaaaactggagtggcgggtgggctttgcctgcagctcaactctccctcgcggcgcgggcgcggctgggttcagcacctcggaaagcgcccctcgcggcgccccgggattacgcatgctccttggggcccgccgccttggccgtgcaagtgccaccgtaactggtgagagccgctggcaacccacccggagttgacaaccgcggtagagacgcagacacccactgacctccaggaagctgagcgtggtggatggaactctacgatctctttctctccaaggacggaaacctcatccaagcagtcccagaggaaacggataaaggtatttgaaag

SEQ ID NO: 503837 - DNA, 633 bp, Homo sapiens
actctaacttccagtgtttgtgtttagcagaacagcttcgttggtctgacaaaataatatataaatattgaatatgtaaacataaaatgttttatgctaataaaatacccctttaatctcttttatatgttgaacgccctgatgagactgctgaaaaatagacgtgttaacagagttacagatccagttgggtccactcaggacaaaaacaagctctggtctaatccttagcatcagaggaggtacaggacaagaaatacagcaggaaccctcctcgtctcatcataaggcctggcagtggctaccctggcacacggcttctcttgccccatcactcatataccatgcatgcgagtgaagagccccctgacacagggaaaccgcagcctcaatttgccaccaacctttgatactgttaaaagaaaaactttagacraattaatttaagagtttaactgagcaacgaatgactcatgaattgggcagtctgtggaaccagactaggttcagagcgactagtgtagccctggggccaaagaggacttatggacggaaaatgatgtacagaaaacagaagtgaggtacagaaacagccggattggttacaagtgggcctttgccttgtttgaacat

SEQ ID NO: 503838 - DNA, 467 bp, Homo sapiens
tcatttgtttctgccccacacccccttttctgccttctctggcagaagtactgtaagattatattctatttcctctcttagcattcagttctcttaaaaatatttactgtgctgggtatggtggctcacgcctataatcctagcactttgggaggccgaggagggtgtatcacttgaggtcaggagttcaagaccagcctggccaacatggtgaaaccccatcactataaataaacaaataaataaataaatattagctgggtgtggtgacctgcacctgtaatcccagctactcgggcggctgaggcatgrgaactgcttgaacctgggaagtgaggttgcattgagccgagatcacaccactgtactccagcttgggcaatagagtgaaattgtgtctcaaaaaaaaaaaaatgactagctgtcccagacttttctcaagggcatgttaactaatgtaagtctac

SEQ ID NO: 503839 - DNA, 562 bp, Homo sapiens
gccactctgcagggagacagaaatgacttgctcatttggggctgcctctctttatatttgactcttagcagcttccaagctgcgtactatgctattccatggggtgttttatctttccacccagcctagattrtagatactcaaggttaatgttttcagtgtatttatctttacaatcccacagtctctggcccataacagaccctcaataaatatctgcttaatgtgcttcaaatctggctggctcaacaagggcagccgtctctcttctgtggcaatgacaactaaattatcacttagttcaatttattacccattgatgcaggtcactgattaatcaatgaaagtatggggcttgctatgaatcactgggataagagaaatgagtaaagtccacacattctcgtccccattcatgcatagacaagccttatttaagatgcaggctaagaaaatgaacatattcctttcagagcctttgaaaggagaacactgaagaaccccagattgcttgctgaagatttgcactaaattatattcctctcatgattccccatcccct

SEQ ID NO: 503840 - DNA, 657 bp, Homo sapiens
tcttttacagctgcctgtagtgctgggattaattatttaatgcttaattcttcgggaaatgagaaagttttgattaatgctgtccagtgtggtttcttgcgtgtttgatatgtgtcagataatttttcctcggcagtcactctgaagaagccagaggcttctgtcacggggatcagacaccaaatttctagagattaattgaagtgaaaatttagagaaaagcaccataagtgcccgcctgagataacctttctgggctgaatttggctttatccggggggcaggactcactgtgcctttatgtaaaacactgattttcattgctgtgaaaaaccagatttggtttctagtagatttttttttcatctttctaccaacttaacaggattaaaatagttgcttggcagatgtttcatcattaattctatatctggtaaaatagtaatgggtggatatcaaaagtcaatgtttctttatgatctctgaagcccattcagtgaattggactcaaaaatccttctgtggagttcaagtccggtttcaaaacttcaactccttctcttcctcctcctcctcctcctcctcctcctcctcttccttcttcttctttgagagagagasagagagagagagagagagagagagagattggggtcc

SEQ ID NO: 503841 - DNA, 588 bp, Homo sapiens
cttaaggttgagaagtaaaacttkcattaatcataaaattcttgttcttgtccagaaaagtattaagacatcaaatctcagcctgaccaaggaatggcagggtgtctgttctgtattagaaacctcctcccgctccagtcgcaaaggctgttaatcgccaacgtggcatctccggttaacaaggtcagaaacgccaggagaacaggatctggttcctctctccttgtgccatctatggcctgactctgaaccattcttcctacacccaggccaatgtcagagaaaaaccctgggtgcactgggggctttttttggattaaaataatattggtcttcacacttgagagccaagggacccagaaaatgcaagatgccaaaagccaaggatcaactaaggaccagaaagcatcatgtcctgcagcggagaccaagtgcctagaattttttaaatctccccaaagaaaactcccatgcgcaagaaaaagttttaaactgtacatattgtgatggctgaaaagagactggaagagtgaatagcagccaaatggatctcatgatgaatggacagacaaaacagacgtcagggca

SEQ ID NO: 503842 - DNA, 622 bp, Homo sapiens
  misc_feature (1)...(622): n = A,T,C or G
ctgggaannccagtccgtgggtcggggttntgagtcttccctcgtaaaccttggagaaaagatttgactttgtacatgtgtttttcttttctgatgaaaacaaatgctcaatttttcagagaaatataaacacatggaaaaattaaaaccataaaatgctgcccctagtattcactatttcagtatgcactttttttttccattactatttttgggagagaagaggatgggatgggcccaaggaaatgagggtgaggcaatagctgtccttcactttcggctctaacaagctccacactgcacactcacaatgtgcacgcatggcattcacagcagaacaatcaagccccagttccrgtgtttccagagtcaggggtctcccctgtgaagccccggcctagccagctccagcctcacctacacagccatgttctccctggcagccgggggtcctgcccactcccactccagcatcacaggccccctcccttgcagcctccatgacctgatgctgtgaccatgcgatgacagcgtgcccatgagactctctactccttcagtggggactgtgcgtgcccctcggctctgcccccagaacccggtgagatgcctcacaaatcac

SEQ ID NO: 503843 - DNA, 622 bp, Homo sapiens
  misc_feature (1)...(622): n = A,T,C or G
ctgggaannccagtccgtgggtcggggttntgagtcttccctcgtaaaccttggagaaaagatttgactttgtacatgtgtttttcttttctgatgaaaacaaatgctcaatttttcagagaaatataaacacatggaaaaattaaaaccataaaatgctgcccctagtattcactatttcagtatgcactttttttttccattactatttttgggagagaagaggatgggatgggcccaaggaaatgagggtgaggcaatagctgtccttcactttcggctctaacaagctccacactgcacactcacaatgtgcacgcatggcattcacagcagaacaatcaagccccagttccagtgtttccagagtcaggggtctcccctgtgaagccccggcctagccagctccagcctcacctacacagccatgttctccctggcagccggsggtcctgcccactcccactccagcatcacaggccccctcccttgcagcctccatgacctgatgctgtgaccatgcgatgacagcgtgcccatgagactctctactccttcagtggggactgtgcgtgcccctcggctctgcccccagaacccggtgagatgcctcacaaatcac

SEQ ID NO: 503844 - DNA, 622 bp, Homo sapiens
  misc_feature (1)...(622): n = A,T,C or G
ctgggaannccagtccgtgggtcggggttntgagtcttccctcgtaaaccttggagaaaagatttgactttgtacatgtgtttttcttttctgatgaaaacaaatgctcaatttttcagagaaatataaacacatggaaaaattaaaaccataaaatgctgcccctagtattcactatttcagtatgcactttttttttccattactatttttgggagagaagaggatgggatgggcccaaggaaatgagggtgaggcaatagctgtccttcactttcggctctaacaagctccacactgcacactcacaatgtgcacgcatggcattcacagcagaacaatcaagccccagttccagtgtttccagagtcaggggtctcccctgtgaagccccggcctagccagctccagcctcacctacacagccatgttctccctggcagccgggrgtcctgcccactcccactccagcatcacaggccccctcccttgcagcctccatgacctgatgctgtgaccatgcgatgacagcgtgcccatgagactctctactccttcagtggggactgtgcgtgcccctcggctctgcccccagaacccggtgagatgcctcacaaatcac

SEQ ID NO: 503845 - DNA, 620 bp, Homo sapiens
gcacacaaaggaaagcagtagacatgtgtattagtccgttttcacgctgctgacaaagacatacccaagactgggtaatttataaaagaaagaggtttagttggactcacagttccacgtggctggggaggcctcacagtcatggcagaaggcaaggaagagcaagtcacatcttatgtggatggcagcaggcaaagggggagcttgtgcagggaaactcccatttttaaaaccaacatatctcgtgagacttattcactatcacgagaacagcatgggaaagacccacccgcatgattcaattacctccgactgggactgggtccctcccacaacaggtggaaattcaagatgagatttgggtggggacacagctaaaccatatcaatgtgtgtgcctgtgtccgtgcagtgtgcatccatgtatgtacccatgatgcatgtgtgttcatgtgtgtgtatgcatgtaccagtgatgcctgtgtgtgcctgtgtacacacatgtacctgtgatgtacatgtgtgcccgtgtgtgtgtgcatgtrcctgtgatgcacgtgtgcgcatgtacctgtgatgcacgtgtgtgcctgagtgtgcatgcatgtacccatgatgcct

SEQ ID NO: 503846 - DNA, 534 bp, Homo sapiens
ggctctccacagaatgttgctggacaccacccagaggatttccctacagccaagagccccgacctgatggaaaatgttcacctgtgcccactgttctttactcaaataaaagagttgacaaatccagaatgaaagagctggaacaacactatattggtccattattatactgatatgaagaaatatccgagactacataatttatgaagaaaaagaggtttaatggactcacagtcacacatgactggggaggtctcacaatcacgggggaaggcaaacaaggagtaaagtcacgtcttacatggcagcaggcaagagagcatgtcccagggaactgccctttataaaaccatcagatctcataagacttattcattatcatgagaacagcatgaaaaaaactcaccccagtgattcaattatctcccaccgggtccctcccatgactcatggggattatgggagctacaaatcaagatgagatttgkgtggggacacagtcaaaccagattagacactaatagatgactttgg

SEQ ID NO: 503847 - DNA, 609 bp, Homo sapiens
gctgcctctcagccatgtcccgatgtgcrgaggattggggaattttcagtgtccccagtattcccatgcacatctacagaggaaacagagactttgccttggacttttctggcccctgtcatccctctggtctgtttttctcactgctctcacttcacagggacatttggaaacttttatcaaggatcacttattagtccgttttcacactgctgataaaggcatacccaagactgggaagaaaaggaggtctaattggacttacagttccacatggctggggaagcctcagaatcaaggcgggaggcaaaaaacacttcttacatggtggcagcaagaaaaaaatgaggaagatgcaaaagcagaaaccctgataaaaccatcagatctcgtgagacctattcagtaccatgagaatggtatgagggaaaccacccccatgattcaagtgatctcccaccagatccctcccacaacacatgggaattatgggagtacaattcaagatgagattttggtggaaacacagagccaaaccatatcattccaaccctggtttctccaaatctcatgtcctcatatttgaaaatcaatcatgccttctcaata

SEQ ID NO: 503848 - DNA, 609 bp, Homo sapiens
gctgcctctcagccatgtcccgatgtgcagaggattggggaattttcagtgtccccagtattcccatgcacatctacagaggaaacagagactttgccttggacttttctggcccctgtcatccctctggtctgtttttctcactgctctcacttcacagggacatttggaaacttttatcaaggatcacttattagtccgttttcacactgctgataaaggcatacccaagactgggaagaaaaggaggtctaattggacttacagttccacatggctggggaagcctcagaatcaaggcgggaggcaaaaaacacttcttacatggtggcagcaagaaaaaaatgaggaagatgcaaaagcagaaaccctgataaaaccatcagatctcgtgagacctattcagtaccatgagaatggtatgagggaaaccacccccatgattcaagtgatctcccaccagrtccctcccacaacacatgggaattatgggagtacaattcaagatgagattttggtggaaacacagagccaaaccatatcattccaaccctggtttctccaaatctcatgtcctcatatttgaaaatcaatcatgccttctcaata

SEQ ID NO: 503849 - DNA, 637 bp, Homo sapiens
aattgtttgcactaagcctagccagtggagtggagagacagaattttttaatcaccgggattatatggatggagccttaaatgcctcattatagtttctctctctgtctctccctctgaagcagagacagcatcagccacgtgtcacaaaagctagacaagtgcagggcckgtactctgtgatggtgaaatgaccaggagcagagggtaatagggctttcagaacattcctacctgcgggctcccatgggccctcccacttagagcaattaatagcattatgctctcattgtttcagacaatcagcttttgagctgacagacatgggtgtgcggtgtgcacaattcaaaccacctccccaaaatgcacatgcaaagtttgtcacctcgttcctggtctattcttgggggtcctggtttggccctcaatgatacatacaaattagctacacaatactaaagtacagttgtgatttttcttttaaataaagcataaacactaacaaatgtgtcaccaaagtctctggcaaaagcattgagacattgtcccaagagttgacacttgtttgggggtacatctatgtaccaatactcaccattcccaattcggggtctccacagccacctttgggagggctt

SEQ ID NO: 503850 - DNA, 567 bp, Homo sapiens
ggagccttaaatgcctcattatagtttctctctctgtctctccctctgaagcagagacagcatcagccacgtgtcacaaaagctagacaagtgcagggcctgtactctgtgatggtgaaatgaccaggagcagagggtaatagggctttcagaacattcctacctgcgggctcccrtgggccctcccacttagagcaattaatagcattatgctctcattgtttcagacaatcagcttttgagctgacagacatgggtgtgcggtgtgcacaattcaaaccacctccccaaaatgcacatgcaaagtttgtcacctcgttcctggtctattcttgggggtcctggtttggccctcaatgatacatacaaattagctacacaatactaaagtacagttgtgatttttcttttaaataaagcataaacactaacaaatgtgtcaccaaagtctctggcaaaagcattgagacattgtcccaagagttgacacttgtttgggggtacatctatgtaccaatactcaccattcccaattcggggtctccacagccacctttgggagggctt

SEQ ID NO: 503851 - DNA, 637 bp, Homo sapiens
aattgtttgcactaagcctagccagtggagtggagagacagaattttttaatcaccgggattatatggatggagccttaaatgcctcattatagtttctctctctgtctctccctctgaagcagagacagcatcagccacgtgtcacaaaagctagacaagtgcagggcctgtactctgtgatggtgaaatgaccaggagcagagggtaatagggctttcagaacattcctacctgcgggctcccatgggccctcccacttagagcaattaatagcattatgctctcattgtttcagacaatcagcttttgagctgacagacatgggtgtgcggtgtgcacaattcaaaccacctccccaaaatgcacatgcaaagtttgtcacctcgttcctggtctattcttgggggtcctggyttggccctcaatgatacatacaaattagctacacaatactaaagtacagttgtgatttttcttttaaataaagcataaacactaacaaatgtgtcaccaaagtctctggcaaaagcattgagacattgtcccaagagttgacacttgtttgggggtacatctatgtaccaatactcaccattcccaattcggggtctccacagccacctttgggagggctt

SEQ ID NO: 503852 - DNA, 637 bp, Homo sapiens
aattgtttgcactaagcctagccagtggagtggagagacagaattttttaatcaccgggattatatggatggagccttaaatgcctcattatagtttctctctctgtctctccctctgaagcagagacagcatcagccacgtgtcacaaaagctagacaagtgcagggcctgtactctgtgatggtgaaatgaccaggagcagagggtaatagggctttcagaacattcctacctgcgggctcccatgggccctcccacttagagcaattaatagcattatgctctcattgtttcagacaatcagcttttgagctgacagacatgggtgtgcggtgtgcacaattcaaaccacctccccaaaatgcacatgcaaagtttgtcacctcgttcctggtctattcttgggggtcctggtttggccctcartgatacatacaaattagctacacaatactaaagtacagttgtgatttttcttttaaataaagcataaacactaacaaatgtgtcaccaaagtctctggcaaaagcattgagacattgtcccaagagttgacacttgtttgggggtacatctatgtaccaatactcaccattcccaattcggggtctccacagccacctttgggagggctt

SEQ ID NO: 503853 - DNA, 684 bp, Homo sapiens
tgtttagacttgcaggcacatggttataattgraaaagcaagctgacttttagttgattttattattgtagttaaactctcagaccatgtacccctcattgcctccctgggtgagcattcctacaatctgggcaccactgtgccaagtgctctggaagctgggcactgctggaccccaggccccctctcccagagctgacatccttccttgagcccagaagggcctccgggaccctggcctcaaatgtgagctgcccactagagtggtagagtggggagagagcccaaagtctggcatcagaagggtgggctagaatcccagctctgacacttcacctctttaagcctcagtttcctcatctgctcaaagaggttaagcaaacaaaacaggcgtgcagggagaggcaagcaagatagcaaactatgagctagggttcagagcgtggacagggttctcagtggatgagagcttccgaaaaacctagaacagtctgaaggtgcattcttggaggtaaaaatagctgccatttatgagcactcactatacatctgccactttgcatacattatctcatttaatgtcaccctcatcgtaattctgtgaggtggatgctgtcatcctcattttcactgtgaggaaactgaggctcagagaggtgagtggacttgcccgaggtgtcacag

SEQ ID NO: 503854 - DNA, 539 bp, Homo sapiens
tgaactagcgcaagaagtagctgaaatgagcattttaacttatggatgccaatttgggttggaaacaactatgtatttatattaacttaaactttatggggacgaaatgatttgtttattgmatcttgatatttgaagttcatttcaggaacatactgctgaggggaaaaaatacaaggactggctgttctctgttcaccaaatgtttcagaaatttagtgcaaaatgtatgcttctattagccttccttcaattagtgattcatagctatcttggatttacttctcagtgtaacactcggcacagttttcagttattcagaacataataatgtccccaaacattaaataattatttccaccatcttttacacaaacagctttgttctccctaattttaactgatgctcaaactctcaaacaaatgtggcctttaaattttaatggaagtccatacaaaaaaagacataaaatgatatactattaaatataaacatatttaaacaaaattgttattcctttatacactatattttatat

SEQ ID NO: 503855 - DNA, 524 bp, Homo sapiens
gagatctgatggttttataaggagttttctccttcactcggcgctcactctctatcctgcagccctgtgatgaggtgccttccaccatgattacaagtttcatgaggcctccccagacatstggatctgtgagtcaattaaacctctttcctttataaattacccagtttggggtatttcttcatagcagcatgataacaaactaatacacatatgttgcccaaagaattaataaatcctcagagtttttacaaaactgataaagcttgcttataatctacattctgtaagaattatagtaaagcctcttgtttgttttacactttggttacaatttagaatttatttaataatttacaaagtactttcacctacattatcttaattgatgctggcaactatacacatatgcacacagccctgtgtatgatcagagatggtatcattcctaccatccccctccttgtatctcccaaaataaggtaatcaatgtttctagaagtaagtggttccctgacatgtgc

SEQ ID NO: 503856 - DNA, 580 bp, Homo sapiens
tgaacatttaatgatatcacctttttagccaacgatgctctgcagaaaccatgtagcttctctgacaagtagacttagagtccctgccccaaataggacctcataccattttcctgatgcttactgacaaggaagaggatccagatgagggtacattttgggtatccttcttattattcataaaattgccaataatggtcaatcttctaacatctccaagcttcatgtctcagataatcattcaaacattggatggcaaagaggtcgtcgatgtcaagcttattggcaaacaagtggtgcttgcacagcatccatttcaagtcaccagctctgaaaatgcacaccaagtgcacgtggtccccatcgtagggtgggtagggagcatcctcagaaacatcaccctccaagtactgccacttgacaaacctggcgactgcatgcgtgtcagacaagtcrtacttatggcttgtagagagtgagccggggacttcaggaatactctggatggtggctcagagatgctcatcagggctgtatgtgtcttgtgctcactccataaacttttggatttttttaatcc

SEQ ID NO: 503857 - DNA, 580 bp, Homo sapiens
tgaacatttaatgatatcacctttttagccaacgatgctctgcagaaaccatgtagcttctctgacaagtagacttagagtccctgccccaaataggacctcataccattttcctgatgcttactgacaaggaagaggatccagatgagggtacattttgggtatccttcttattattcataaaattgccaataatggtcaatcttctaacatctccaagcttcatgtctcagataatcattcaaacattggatggcaaagaggtcgtcgatgtcaagcttattggcaaacaagtggtgcttgcacagcatccatttcaagtcaccagctctgaaaatgcacaccaagtgcacgtggtccccatcgtagggtgggtagggagcatcctcagaaacatcaccctccaagtactgccacttgacaaacctggcgactgcatgcgtgtcagacaagtcatacttatggcttgtagagagtgagccggggacttcaggaatactctggatggtggctcagagatgctcatcagggctgtatgtgtcttgygctcactccataaacttttggatttttttaatcc

SEQ ID NO: 503858 - DNA, 620 bp, Homo sapiens
aaagtagattttggtctttcctagagcataagcatttcaagaaggtgtctcagaggcactttgtttttgttaactgttttataagcttgcaatctgcgtaagattgcttttggaagaaaaaaagttcctttgctaaaaagtaacattcagtaactacaaatttacatgaaggagacaggatgatctcacaaataacaaaaagtacactcagaattcctgtcccctggacagcacttagatgggcaaagcaaacatttacgctgtgattttccttattctgtcattccactattgaccaatcttccttcatgttagttaatacattctctttgtgaaaatggtaatacaacatatcagttaatagtgtagtaatataagactaggacccattctctctttaagatattttgtgtttattatgagttatcaagtgttgagtttactttatcctgagattaaatattattttcagttgcttggatgatactttaatrtattcctaagttttataaatgtttccagtcagaatgattaaactgaaataatttttgattttttaaaaaaggaaagctctgaagcttggatattctgaaagactctattcttaagactatattcag

SEQ ID NO: 503859 - DNA, 465 bp, Homo sapiens
ccagccacttgaaatctgaagtgtcacgctgagggattgttaccaagaagtatttacattggagccgtggttttagctctcttttggcaattgattaatttagtgcgagagccaataaatccctggacagatgaggaacagattggaggggaggagcttctgtttcggccttttcttttggaatgcttttaacacttggccaggggaggaytgtgtccttttgttttgttaaatagttcaagttggccattttctggtgctgttcagaaaggcctgtcaggccaacaggagggaagtgattggttgtcctggaccctggctttgcacagacctcacactcctgttgagaaaatgtttgaaatgcattctcttaaaagtaggactgtgtaaataatagattaggtctgaaagggccatctgagtataaaggcagtgggagccaagggggaaaagccctttactcgc

SEQ ID NO: 503860 - DNA, 469 bp, Homo sapiens
acctgttttggcccttggccctttcttagttactgtggaagcagaggcaggtaaccaactgcaatgagtaggtgagccgttcctatgaacttcactcccattccacctgggtttgccaagtacagaaatgaacagacttgcacttgcatcttctggtgttggaggrcaacaatatcaaaaggtgacctcttgctggaggacaacaatatctgctatttaaggacccaaatatataactcttgtacaatgtaaaatgaaacaaagctgtaaacagttatatagatttcttcatgggattcttcttgagatgtgatctttctccaaagattttgaggatgagagtttgtttaaaatgttctgaagctctgatactagtggccttttcattttttatttttttgagacagagtctcgctgtcgcctaggctggacagagcacaatggcacgatcttggttggctcaatgcaa

SEQ ID NO: 503861 - DNA, 469 bp, Homo sapiens
acctgttttggcccttggccctttcttagttactgtggaagcagaggcaggtaaccaactgcaatgagtaggtgagccgttcctatgaacttcactcccattccacctgggtttgccaagtacagaaatgaacagacttgcacttgcatcttctggtgttggaggacamcaatatcaaaaggtgacctcttgctggaggacaacaatatctgctatttaaggacccaaatatataactcttgtacaatgtaaaatgaaacaaagctgtaaacagttatatagatttcttcatgggattcttcttgagatgtgatctttctccaaagattttgaggatgagagtttgtttaaaatgttctgaagctctgatactagtggccttttcattttttatttttttgagacagagtctcgctgtcgcctaggctggacagagcacaatggcacgatcttggttggctcaatgcaa

SEQ ID NO: 503862 - DNA, 571 bp, Homo sapiens
cctcatcatgttggccatgctgtcctgtgggagaggcacctgtttctgtgttcttgggacccaacactttggattcctccggagttccctagctctagcttggggaattctactcaggacttagtaccataccgtctgagtcacctgctgagggaaaagggcatttgagagaaaatgtggaaaataagttatatagcttaccacatatgcccacatataaggtgkagagtccaccccggcccctgcaaaaagttatcagaaatgagacagttgccttatatttaagtctctataaattttctcacactgtgggagcgtcttgcaattattttgttttgaatgaagtattatttagagaacacacattaccttgaaatgacctcagtcagtgctggtttggatgctttagaggtcagctaaggaaatcatatttttaaaaaggaagagggtggtttaaaaaatctagtaatatcccagagcatctgacctcacagtagcaagtgtcaggtttctttgtaaacaagtcttttttaaagatcatttaaaaatggaacaagttggccaggcgtgg

SEQ ID NO: 503863 - DNA, 571 bp, Homo sapiens
cctcatcatgttggccatgctgtcctgtgggagaggcacctgtttctgtgttcttgggacccaacactttggattcctccggagttccctagctctagcttggggaattctactcaggacttagtaccataccgtctgagtcacctgctgagggaaaagggcatttgagagaaaatgtggaaaataagttatatagcttaccacatatgcccacatataaggtgtagagtccaccccggcccctgcaaaaagttatcagaaatgagacagttgccttatatttaagtctctataaattytctcacactgtgggagcgtcttgcaattattttgttttgaatgaagtattatttagagaacacacattaccttgaaatgacctcagtcagtgctggtttggatgctttagaggtcagctaaggaaatcatatttttaaaaaggaagagggtggtttaaaaaatctagtaatatcccagagcatctgacctcacagtagcaagtgtcaggtttctttgtaaacaagtcttttttaaagatcatttaaaaatggaacaagttggccaggcgtgg

SEQ ID NO: 503864 - DNA, 486 bp, Homo sapiens
tgtcacctaattgggatagtagaggatcacctgtatttggaatagccttttgatctaatggagaagtctttaattcgccccaattttatagaaagtgcatgtcaagaagtattttaataatatatattgtcatcttgaatcattgcttccataccttcattctcgtttcttgcttgagctttttttgttgttgagacagtctcgctctgtcatccaggctggagtgcggtgacatgatctcggctcagtgcaacgtccgcctcctgggtcaagtgattctcctgcctcagcctcctgagtagctgggattacaggcgtgtgccaccatgcccggctaatttttgtatttttagtagactgggtttcgccatgttggccaggctggtcttgaactcctgacctcaagtgatccacctgcctcagcctcccaaagtgctgggattacaggcrtgagccactgtgcctggcccgtacttgagctttcat

SEQ ID NO: 503865 - DNA, 521 bp, Homo sapiens
ccagatcttggacttctggcctccaaagctatcaggaataaatttctgttgtttgtgattttttttttttttttggagacaggggtctcactctgttgcccaggctagactcaaactyctgggctcaagctttaacctctgaaatagctgaaactgtaggcatctcaccacgcctaacaaatttttgttgtttaaaccatccagtttgttgtatgatgttgccacagttctagcaaactaatatacttgctattgacatacaatggttgccgactttttggcacctgtgtattgtcttatggaagacaatgtttccatggacggggtggtaagggggacggtttcaagatgaagccgttcacctcagatcaccaggcattcgactctcataaggagcgcacaacctaaatcactcacctgcgcagttcacaacagaactacgaagaaccatgagaatctgatgccactgccgatctgacgggaggtggaactcaggcagtagtgcgagtgatgggaagcag

SEQ ID NO: 503866 - DNA, 521 bp, Homo sapiens
ccagatcttggacttctggcctccaaagctatcaggaataaatttctgttgtttgtgattttttttttttttttggagacaggggtctcactctgttgcccaggctagactcaaacttctgggctcaagctttaacctctgaaatagctgaaactgtaggcatctcaccacgcctaacaaatttttgttgtttaaaccatccagtttgttgtatgatgttgccacagttctagcaaactaatatacttgctattgacatacaatggttgccgactttttggcacctgtgtattgtyttatggaagacaatgtttccatggacggggtggtaagggggacggtttcaagatgaagccgttcacctcagatcaccaggcattcgactctcataaggagcgcacaacctaaatcactcacctgcgcagttcacaacagaactacgaagaaccatgagaatctgatgccactgccgatctgacgggaggtggaactcaggcagtagtgcgagtgatgggaagcag

SEQ ID NO: 503867 - DNA, 521 bp, Homo sapiens
ccagatcttggacttctggcctccaaagctatcaggaataaatttctgttgtttgtgattttttttttttttttggagacaggggtctcactctgttgcccaggctagactcaaacttctgggctcaagctttaacctctgaaatagctgaaactgtaggcatctcaccacgcctaacaaatttttgttgtttaaaccatccagtttgttgtatgatgttgccacagttctagcaaactaatatacttgctattgacatacaatggttgccgactttttggcacctgtgtattgtcttatggaagacaatgtttccatggacgggktggtaagggggacggtttcaagatgaagccgttcacctcagatcaccaggcattcgactctcataaggagcgcacaacctaaatcactcacctgcgcagttcacaacagaactacgaagaaccatgagaatctgatgccactgccgatctgacgggaggtggaactcaggcagtagtgcgagtgatgggaagcag

SEQ ID NO: 503868 - DNA, 521 bp, Homo sapiens
ccagatcttggacttctggcctccaaagctatcaggaataaatttctgttgtttgtgattttttttttttttttggagacaggggtctcactctgttgcccaggctagactcaaacttctgggctcaagctttaacctctgaaatagctgaaactgtaggcatctcaccacgcctaacaaatttttgttgtttaaaccatccagtttgttgtatgatgttgccacagttctagcaaactaatatacttgctattgacatacaatggttgccgactttttggcacctgtgtattgtcttatggaagacaatgtttccatggacggggtggtaagggggacggtttcaagatgaagccgttcacctcagatcaccaggcattcgactctcataaggagcgcacaacctaaatcactcacctgcgcagttcacaacagaactacgaagaaccatgagaatctgatgccactgccgatctgacgggaggtggaactcaggcagtartgcgagtgatgggaagcag

SEQ ID NO: 503869 - DNA, 446 bp, Homo sapiens
atgaattactacttgtaacgaactcagaagagtggcctataaatagcaagcacaatgtgttgtattgccctattattagtggtagaacagtatcctgggcactatgctaggcacagtcttataacagtcttayaactttgatctacttagggatttaatttattggaaaactaacaaattacagcaatagcaagacctagaccttgaccccacactgtcacatcttttctcttatttgtctagccagtgtttatactccaaggggaacatggctgaaaatagggaaggtctggatgaaatgtcagcctagagtggcccatttcccaagaccctccagggtaattctggatatggtgatgttcgcatgctcccctgcctagtcagcaccagggcagcatgcaacctcactggccacacatgggctgctgcccaagacctttcaatgt

SEQ ID NO: 503870 - DNA, 548 bp, Homo sapiens
aatagcagcctaataccttccagcttatcttgtaatttagaaataaaacatggaaattatcaaaattaactaactgatttttaaataaaacattcaaaacttctaaacattacatgaaggcagcttttattcattgttgatgtcatgatccataaacaatctatatttcattatggttttaatctctaagccaaaaatgatataatgtttataaatttacatattgccaaatcatgatttttcttatttttttgtagtaaattcaacgtgtgatatttgttaaatggacaaaaattaattgttatacattataaatgtaatcaaagattataaamattaaaattacaccctataatatggccattaacttacactcatctaacaaagtattttagaattaaaaaaataaattatgtgaaaatgaaagaataattacaataatctttaatagagtcacaagtatttaatcttgtgaaaagaccagaaacaaaagaaaagttgtaaaatgctagtatagtagaaatagtatgaattttggagagtgactt

SEQ ID NO: 503871 - DNA, 585 bp, Homo sapiens
gcctgctgaatgttaatgagacagattttctattttaatatgtgtttttgtacaaactgattatattaaagtatgttgtaattgaattattttccagactattatttaggagtacttgttacttttgagctctggttttttaacataccaatagtgatgttgaaatgtttaaaataacacagtttgtaaaagaaaaaagatcctattaccagtaaaggttacttgtataacacrtaaaaatagacttcttggaggattttatagttctatttggaggttgtttccctgtgcttttccattgcagcaaattgatttagactcagaccaaacactctacttctcttcaatccaccaagagccaaacattgtaaattagttaaatctctggtcacataaaaagcaattgtgtcattaaagttcctattttattcacctaccaaattctcccacatggtcaatattctgaattatgaaaccatctgcatacacataattgaagccagtttcccacaggtggccctcaatttgtgaaagttcatttccaaggtagtaaaattgattacatttgcttctggaagggcaaca

SEQ ID NO: 503872 - DNA, 585 bp, Homo sapiens
gcctgctgaatgttaatgagacagattttctattttaatatgtgtttttgtacaaactgattatattaaagtatgttgtaattgaattattttccagactattatttaggagtacttgttacttttgagctctggttttttaacataccaatagtgatgttgaaatgtttaaaataacacagtttgtaaaagaaaaaagatcctattaccagtaaaggttacttgtataacacgtaaaaatagacttcttggaggattttatagttctatttggaggttgtttccctgtgcttttccattgcagcaaattgatttagactcagaccaaacactctacttctcttcaatccaccaagagccaaacattgtaaattagttaaatctctggtcacataaaaagcaatygtgtcattaaagttcctattttattcacctaccaaattctcccacatggtcaatattctgaattatgaaaccatctgcatacacataattgaagccagtttcccacaggtggccctcaatttgtgaaagttcatttccaaggtagtaaaattgattacatttgcttctggaagggcaaca

SEQ ID NO: 503873 - DNA, 482 bp, Homo sapiens
gtggttctgctattcctcatgtgagtcaggccagagcagagctggagaaaaatgtaggacttcaggggtttcagggtagtgcccccttgggccaccactggggaccctgagggcccctgaaaatggtacttctttcttttcctttccattagtttcctgtgactgcttcagtggattaytacaaacagggtgacataaaaaatcagaaatgtatccctcacagttctggaagtcacaagtctgaaatcaaggtatcagcagacagggccatgctcccgcctaaggctctaggggaggcctggcatttattctggtggctcctgacatttactggattggggctgtgtcttagtccatttgtactgctataaaagaatacctgagactgggtaattcgtaaagaaaataagtttatttggatcatggttctgcaggctgtacataaagcatggtgccagcatctgcttttggtaagggcttca

SEQ ID NO: 503874 - DNA, 452 bp, Homo sapiens
gccagctggagaagcctggctcacacagcccgagagatctctcaggcatggagctcaggtaaccttctccacctacctcttttttttttttttttttagatggagtctctttctgtcacccaggctggagtgcagtggcgcaatctcggctcactgcaacctccacctcccgggttcatgccattctcctgcctcggcctcctgagtagctgggactacagacacccgccaccacgcctgactaagcttttgtatttttagtagagacagggtttcaccgtgttagccaggatggtctctatctcctgacctcgtgatccgcccgcctcggcctcccaaagtgctgggattacaggcctgakccaccgcgcccggcccttctctttccatttagcggcatcattcttcatctgtggccaatgctatcctagaccatcactcaaggtgaagcc

SEQ ID NO: 503875 - DNA, 631 bp, Homo sapiens
atttccctcctgataattacacagcacctgtttatgtcactgcattcatggagcactcattgtgtgcaaagcattatgccaggactgtaggacttcaagatacccaggacagtccttgagttgctgttctcttttggaaagtctgcaaaatgaatcartaagtgatttcaatacaatggtgtgatagcgatgtaacagattcctggggaagctacaagggcagactcacagttgagttgggaccttaaaatgcaggtcttgagtggtgtattagtctgttctcatgctgctaataaagacctacccaagactgggtaatttataaaggaaagaggcttaattgactcactgttccacatggctggggaggcctcacaatcatagcggaaggcgaataaggagcagagtcacatcttatacggcagcaggcgagagagtttgggcaggggaactcctatttataaaaccatcagatctcgtgaggcttattcactaccacgagaacagtatagggaaaactgcacccatgattcaattatctccacctgatcctgcccttgacatgtggggattattataatttaaggtgagagttgggtgaggacgcagccaaaccatatcaactggaaat

SEQ ID NO: 503876 - DNA, 391 bp, Homo sapiens
gtctcacaaggccacataaattttccaaattacaatcacttgaacccttatcctgctcagttgcaggacagcaaattctgctctccaaggatatctgggaagcctcagggatttcttagatgttccccagtctctcttggttgccaggccagctgccacctagctcaggaccactgctcaatctgctctgcctgtggttcacrccagctcttccgcaagttgccttctgcagagaaagcatttctgtgcttgttgtagaattctcctttttctcagtcttccataggttgagcatcagccactactcctccagcaaatgttgccaagtctctctccttgagcctctttctgttcggctttggggaatcatcacactaaaagccccgtggtc

SEQ ID NO: 503877 - DNA, 391 bp, Homo sapiens
gtctcacaaggccacataaattttccaaattacaatcacttgaacccttatcctgctcagttgcaggacagcaaattctgctctccaaggatatctgggaagcctcagggatttcttagatgttccccagtctctcttggttgccaggccagctgccacctagctcaggaccactgctcaatctgctctgcctgtggttcacaccagctcttccgcaagttgccttctgcagagaaagcatttctgtgcttgttgtagaattctcctttttctcagtcttccataggttgagcatcagccactactcctccarcaaatgttgccaagtctctctccttgagcctctttctgttcggctttggggaatcatcacactaaaagccccgtggtc

SEQ ID NO: 503878 - DNA, 544 bp, Homo sapiens
tggctccagagttctgactgctggacaccatcctcacagcttctcctggttctctgatgaatgacaatggctaaatgtaatttgaatmcccaagatgtcctagtggacatttatcacattttctggaggtggggcattgttaggacatatttgctttagtctaagtccagtcttcccaaggcagagaccagaacatttggatcctgagtggtcactaagtcagcgatgcaggcatgtgacctgggctccaaccatcagcttctgccctgaggcctttcagttgagtgacttgaggaatgtggctctgggcagaatccattctctcaggacaggtggtggcacagctgtctcgcaagaccctctgtcttaatccatttgtattgctataaagaaatacctgaggctgagtaattcataaagaagaggttcatttggctcacagttcttcaggctgtacaagaagcatagtgccagcatctgcttctggtgaagttttaggttgcttccactcatggtggaaggcgaaggggagccagtgtgtgca

SEQ ID NO: 503879 - DNA, 606 bp, Homo sapiens
tctcgcaagaccctctgtcttaatccatttgtattgctataaagaaatacctgaggctgagtaattcataaagaagaggttcatttggctcacagttcttcaggctgtacaagaagcatagtgccagcatctgcttctggtgaagttttaggttgcttccactcatggtggaaggcgaaggggagccagtgtgtgcagagatcatatggcgagataggaagcgagagaggcaggcgagggaactaatagaccaagaactcactcactctcctcaccccaaggaggacattaatgtattcctgaggaatctgccctactacccacagtccttattaggtgatgccttcaacattagagatcagagttcaacatgagatttgaaagggtcaagcaaatcaaattatagtaccctccctgggmaaaagtgggttgatgtggactgaggctaccatgctgtttcctctggcacccagaagacaacagcagaggcttggctccctggccaggcagctcacggctggattttagccactgtgcccagaaccttagcttttggtctgtttcaccagccatcccaacaattctgtaaaagtacctccttgttct

SEQ ID NO: 503880 - DNA, 653 bp, Homo sapiens
agcagcaaggacccttaccccaaatttagttcaggtatggaggttgatgactctccatgcacaaaagtgtttgagagaaggtttattgctcacacaagggactctctggtagaactgagcaggtgccagcaggcccggggttggctcaggcagagtggaagaatgggcttgggccttcaaataagtggctaagagcccagcacatgctcactggatttagggcccagtgaaatccagtttgacttmatctctcaccttgattacatctgcagagatctattcccaaatgagggcacattctgagcttctgggtggacatgaatacttggaagaaacagttcaacccagtccacaaagtgaaagcacttcattatcacttctgaaaaatcacctttatcacacttaccatattgctgaatttctgcttccccaaatgggactggaaagaaccttcacaggctcatgggattcccaggaaagtttgaccctggaagaggattgagacctaaagaatggatttgctcaaagcagagctgagacggggaagcggtggaacagggatgccacctcttcagccctcacctgagggcaacactggctgggggtggagaaccttagtgtcccatactggcctgttttcccagcagagacac

SEQ ID NO: 503881 - DNA, 653 bp, Homo sapiens
agcagcaaggacccttaccccaaatttagttcaggtatggaggttgatgactctccatgcacaaaagtgtttgagagaaggtttattgctcacacaagggactctctggtagaactgagcaggtgccagcaggcccggggttggctcaggcagagtggaagaatgggcttgggccttcaaataagtggctaagagcccagcacatgctcactggatttagggcccagtgaaatccagtttgacttaatctctcaccttgattacatctgcagagatctattcccaaatgagggcacattctgagcttctgggtggacatgaatacttggaagaaacagttyaacccagtccacaaagtgaaagcacttcattatcacttctgaaaaatcacctttatcacacttaccatattgctgaatttctgcttccccaaatgggactggaaagaaccttcacaggctcatgggattcccaggaaagtttgaccctggaagaggattgagacctaaagaatggatttgctcaaagcagagctgagacggggaagcggtggaacagggatgccacctcttcagccctcacctgagggcaacactggctgggggtggagaaccttagtgtcccatactggcctgttttcccagcagagacac

SEQ ID NO: 503882 - DNA, 532 bp, Homo sapiens
atttttctaaagcttggtttattattatttcttttctttctttctttttttttttttttttgagacagagtcttgctctgtagcccaggctggaatgcagtggcacaatctcagctcactgcaacctctgcctcctgggttcaagtgattctcctgcctcagcctcccaagtagctgtgattacaggtgcctgccactacgcctggctaattttttgtatttttagtacagacaggtttccccacgttgaccaggctggtttcaaactcctgacctcaaatgatccacctgcctcagccttccaaagtgctaggattaaaggcrtgagccactgtccctggcaattattatttcatcgtaataacaattagcattatccattacttactataatattaatagtaaatgaagagttacttgtttaatattctccctccactttctttccttattctactgatattattctattactattttgtattaaaccagtcatcaatattgcatattatgaatatgtatatattttaaa

SEQ ID NO: 503883 - DNA, 603 bp, Homo sapiens
atcttcagtttggattccaataaacttgttactgcttccaaataaaatatttctcaaataagatttaaaccttgatagggcaaaataaaaattaaatgacatggaacataaacacgttgattttatatatatttatgttatatataacattgttgtaaaaatcataatgatagtgcaygtgaaatgcacatagaacatgtatcctttcttatttctgacctgtattttctatgaaaagcttaaatgtaattttaagtatgctcatttatttcagattatgacaaattaatcattcagtcttctgaactattcacctataaaatcaaaaatatttatacagtataatatcccattcttgatacttcatatatttttctcatatctttctatatatatgaaagtctctgaagatatgagctctatattaatacttatttatatttgttcactattattattcagagcaagacattactcagggtaagtagttggtaaaaagtattagcttttataaatcttatgtaaagtatattataaccaaccaaactcttccatgattattttactctaaatacattttccaaataagagtcatttctgttt

SEQ ID NO: 503884 - DNA, 603 bp, Homo sapiens
atcttcagtttggattccaataaacttgttactgcttccaaataaaatatttctcaaataagatttaaaccttgatagggcaaaataaaaattaaatgacatggaacataaacacgttgattttatatatatttatgttatatataacattgttgtaaaaatcataatgatagtgcatgtgaaatgcacatagaacatgtatcctttcttatttctgaccygtattttctatgaaaagcttaaatgtaattttaagtatgctcatttatttcagattatgacaaattaatcattcagtcttctgaactattcacctataaaatcaaaaatatttatacagtataatatcccattcttgatacttcatatatttttctcatatctttctatatatatgaaagtctctgaagatatgagctctatattaatacttatttatatttgttcactattattattcagagcaagacattactcagggtaagtagttggtaaaaagtattagcttttataaatcttatgtaaagtatattataaccaaccaaactcttccatgattattttactctaaatacattttccaaataagagtcatttctgttt

SEQ ID NO: 503885 - DNA, 638 bp, Homo sapiens
tatctatctatctatctatctatctatctatctatacaaatttctggtcagttattacttaaataaatgctttttagcctgttccccctcctcagttttcgaatggttactcttacattttatgaaagaaattagcatttatctccttcrtaagtgacagcatattctgcacgcagggtataaatagcaataccatatacatatcatctgcctcaaatcattttttggaacaggtaaggtacaaatactacaaatgaataaatacatgtatgcaatattcatattatggcttgttagcatgtttgatttgtcattgctaattaaatgacgatttttatcttccaggaaatttgctaaatttaaacattggtttcacttatttatttatttgctcgttcaaacaaaacttgttgaatacctactatatttgaatacttgtaggtgctgggaatttagtggtgaataaaacaaagtccctgtctttgtgaaacttacattccaatggtgggagagagaatataaacaaacaagtaaatagtctgtcaaatggtgatgcgtgctataaaaaaatcaagtaggatgagggagataggatctcccttatgagtgtgtgtatgcatacttgtgtagattcatgt

SEQ ID NO: 503886 - DNA, 621 bp, Homo sapiens
gctgaaccatctgtctttgaaaagctttgaaaagcactcccagaatccctcaagaatctctccttgcatctcattccctatgcctagctatgagggaggctgggagttttgaaataaaatcaggtctctcagttaagggagaaaagtagatggatatagagtgggcaggcaactgtagctagcagtctgccatagaaggtagcaattaaagtaatgaaaagaaagtagttaaatttatagaatatattatgagagcaaggaaagagaaagtaccagtgaattgaatgaaaaggcacaattgaatatccaaattaataagaggaaaatataataaataacttcatgactataccagcaaaattagggaaagagaaaaggaaaaaaataataaaaataaatataaggtgggaacaatgaaacaatgtattgcagtccttacagtaaatgtaagcacactgcattatttcattaaaaaacagttaatgttasattgagttaagaattaaaacccaatttcatgtgtttacatgaaacacttgaaccagttacttacaaaagttaaaaatacaggattgtgtaaagatacaccagaaatatgcatacaaaacgaaggtagaatga

SEQ ID NO: 503887 - DNA, 670 bp, Homo sapiens
ctggagtgatgtggcatgttcataactcactgcttgaactcctgggatctagtgatcttcctacctaagcttctcaaatagctgggactacaggcacgtacgaccacacatggctaattaaacaaaatttgttttgtagagatagggtttctctatgttgcccaggctggtcttgagcttctggactcaaattatcctcctacttcagtttcccaaagatctggggttacaggtttgagccaccatgccctatctgcaattctttttatattagcccttatctgtgaagtacaaacatattttttgactttgttagagtgttttgaaatataaattttagttggtgttaaaaatacacacagcaaagtgcacaaatcctgaatgtacctctcaatgacttttcacaatgtaaacactcatatgtaacatgatcaagaaacaagagtattaccaaaacactagaggcccctttgtggccccttccagtgactatcttcccccatagatgtcaccttcttcccttcaaatttaactacctatcttcacctctaaaattttttctataatttcgctcttgagctttacatcagcagaatcacacggtatatactcttttgtttcyggctttctttgtccaaattcatttggatgagattcattcatgttgtat

SEQ ID NO: 503888 - DNA, 520 bp, Homo sapiens
ttataaaaaatgtgaagtactctaataattttaaattactctatattgcacattttcaggtctctgatcacctccaaattcaagtgcttataaaactgctcccataattttaaattgctatgtgcacagtgatttaaaattgtgagagtgcttcaaagttttttaataagtgctttaatttagaagcaagttgagcaatactccagtataacttcaagaaattatcaaactgatataaaaatttatcctctggaaagaaaattacgttatgtataaaagggtgtgggcttcaaatgaatatatatggggacgaaggtacccagtgcttgggaacaatcagtgaatggaatgtaataatagggtcctggaagtttgttttgctaactttgctgattgctggcatgaggctacagttcttgtaactgtaacaggaatttccattcctttaaggtgaaaagatcgcatgtagaggacttcactctcaattstcaacattctcaaggatattgtcacatttctt

SEQ ID NO: 503889 - DNA, 611 bp, Homo sapiens
aagtgtataattgataaaatatatatatcaatctctaaattataattatgataatcccatggttcaggagaaacttaagaaaaaatattttgttgtcaacagtgttcaagtatatggtctttcaagggtatatgcaagcaagagtgtaaaacctttgttcttggaaggtcacttttgtggctggcaactgagaaacctctgaggaatcaagaaccacataagaataactttgccaaagtttggcaagttgaaggatttacctactaactctcatccctcataggttgagggttgctactgagggtgttaaatgttcaacaatattgggttgccccgtgcttggactgaacaatctccaatgtcactagagaaaggcttcaggcagaccaaagagtcagaggtggaatctactagcatgtagggaactgtmcattgtagcaatggacaatgaactcagagatgtgaactcagagatggactgaagagacatggagcatggaatcaaaggtatcttgcactactcatgctccacattgaatcctctctactactgacatttgatggtggttgctgaccacagtttctagagatgacttcaaacaggaagttca

SEQ ID NO: 503890 - DNA, 570 bp, Homo sapiens
ggaaattgaaagagtgggtgacagctaaattcctgaagggcctctaaactgtcctaagaaatcatatgtctattcacagatgatgggattgcacacacaattttgaacagaggaatgaccattgtgttaggcagaatagtagccccccgcaaagattctacctgctaattcctggaacctacaagtatattcctttacctagcaaaagggattttgcagatctaacttagttaaggatcttcttttttttttttttttttttttgagacagtctcactctgtcgcccaggctggagtgcagtggcacgatctcagctcactgcaacctccgcctcccgggttcacgccattctcctgcctcagcctccccagtagctgggactacaagcgcccgccaccaggcctggctaattttttgtatttttttagtagagacagggtttcrccatgttagccaggatggtctcgatctcctgacctcgtgatctgcccgcctcggccacccaaagtgctgggattacaggcgtgagccaccgcgcccggccagttaaggatcttaaaatgagattt

SEQ ID NO: 503891 - DNA, 238 bp, Homo sapiens
aacttccagaattattttcaataacttgagccctcaagcacatggaatgttgacatctaggtccttcaatgcagagagtaaaattcctcctgacctcaaagctactcacaaataggttatgttccaaaagtgtttgtgagcaaaattttagtcagaataattttgcartggaaaatgtattatatacggtggtgtgacaggccaggtcagaagataataaactttaatactaggtgag

SEQ ID NO: 503892 - DNA, 579 bp, Homo sapiens
gtgtaaggctgagctttcaaactagccactgtcaacttatctcaaaaccctgtgaaataagtttttcataaactgtaatgctaaactgattttcagggtatgttgatactgctgttttgtgcacagtgtggaagaattccttactctgggtactggggaaggcagtgaggcaatgttatccaaactgacttgaaagtttcctaaaccaagtccttgaggttttccagttcgcgaagtcaaactggaataacacacctgaaattcactrccaaaggaggcactgctggagacaaataaatatgcattgttaagacacagaataaggatgtctagccatcacaaagcatagagcagtggttctcaactgggagacgttttgctccacagagaatgtttggcaatatctgaaggcatttttggttttcacacctgaggggtgagggggggatgggtgctactggcacccagtgggtagaagccaagggcgctgctaaacatcctaccataggcaggatatctctctgctgcaaagaattttccagccccaaatgtcaatatagttgagttttgaaaaatcca

SEQ ID NO: 503893 - DNA, 617 bp, Homo sapiens
tagtgagaaggcaaataaatggcaaactgaaggtacgtaaaagctagtaagtaaagtttgtgaaayagattcatctggtggtgtctccaggctgataaaagttgaaagctttctatgatgatcaacttttgtcctttctcattaaaaggaggagtaaatttgtatcctgtgtaaatttatgtcctgcttttaggcaaatgggtgagggcacagagcttttcttctatctgtttcttatcagttgccttcagctcaaaagaattcttacgccaaagtggcatattttggatggcattatgtgaccctttgggcacctgctctgctttaactctgaggctcagactattccttattaaaagctactagtttttccagaagttttatcatttttcccagaaacaggatggcaaatttttcatgagtacactatagtcttccagaactacagcctgtcgcctgttttggcatatgccatttccacttcatgaatgaattctgaccagctacttaacatatcaaaataaatatttctaatgttactacaatacttaataatacttacttaaggtatactaggtaccttaagtctaaaaattatttgatatttctcaatattt

SEQ ID NO: 503894 - DNA, 590 bp, Homo sapiens
ttcacaaaacttaacccagttttatatatgacacccaaactttgcactggtcaaattttgtcttaaaaatgtgaggrctggagctgtttcttacaacttaagctatatgtagacaaatagcttcatcagtccacataatattcccattgttttaatgttgtgggctacatctggagctatcagaataaatctgaatactgcttcaagctgggggtgtaagctaacaccacaaagaatctggctcactgtaggaaggccaggactcgcaaaaggccaggtgacagtgaagcaggcttgaaagcataagagtgtcatgttccttgttcatttcataccctactaatgtttccattcatgtgtgagccccagcagcagaaaatctagtagaacatagagatagagagtgccaacatttcatcaggtgagcagcagtcatattcagatacctttccagtataagcgggatcggccagcattctgtaaggagaggaggaaagaataggccctgatgcagagatcagaaagatctaagaagattcccagccaagaaatcaacagccacttagggcctttgctgaaaaggaggacaa

SEQ ID NO: 503895 - DNA, 590 bp, Homo sapiens
ttcacaaaacttaacccagttttatatatgacacccaaactttgcactggtcaaattttgtcttaaaaatgtgagggytggagctgtttcttacaacttaagctatatgtagacaaatagcttcatcagtccacataatattcccattgttttaatgttgtgggctacatctggagctatcagaataaatctgaatactgcttcaagctgggggtgtaagctaacaccacaaagaatctggctcactgtaggaaggccaggactcgcaaaaggccaggtgacagtgaagcaggcttgaaagcataagagtgtcatgttccttgttcatttcataccctactaatgtttccattcatgtgtgagccccagcagcagaaaatctagtagaacatagagatagagagtgccaacatttcatcaggtgagcagcagtcatattcagatacctttccagtataagcgggatcggccagcattctgtaaggagaggaggaaagaataggccctgatgcagagatcagaaagatctaagaagattcccagccaagaaatcaacagccacttagggcctttgctgaaaaggaggacaa

SEQ ID NO: 503896 - DNA, 538 bp, Homo sapiens
atatttttctgctctctttagtgcattgaaattgcactagtttctttctacttaaagaatatctgatagtttgtatacatattaatttgattacttgcaggttgattagtgagcacttttggggaaggcatgttgattccaattttgattaaaaataagcagagaacatctgaagtttgatttgggcaaatgaaccaatgtctggtgtaataagtggaagaatggctcttagctaaagacacttgagagttatcacagaagattgggaataaaaggtacttaaaagtttgaagcactatataatacttcatgaaataatcactctttaggaaataaacaatgatgacacaataacacaatgattttggaataattaaagaaaaatttcaattcattttaaaattcttactgcagaaaaactctcattacctactcagaactttttagaaactgatttgtggctttttttttyctcaattttttgagtcctcttgggattttgatgctatttttgagggaaaatggtctcaattttact

SEQ ID NO: 503897 - DNA, 598 bp, Homo sapiens
cagggttagcaaaatgtatgttttattgtgatagcttactggactttgtatgtgttaaatgtagattaagtgcttaatacattgcctgacagtaaacatttaaaaaacaaaaaaaaaattagttatttcctatgaatgaaacaaacataagtactgagtatgaattgaataataattataaaattataaacaaatgataaaaaattgaggcacacacacttattttacaatttatctattcatcattaactctatcaaataactgttatttgataaaataaataacagttatttgataaaaattattttaattactcccccaaatatttcaaggtcaccctgagcaacaggccgtatttatttcttggcacatagcttccaagaggctttcataagctgattcctactctgttagatatcaaaygtcttccactccttctccagctatttctcaattctcacgttctgtgcagttttcaacacctatttcacatactagcatttcagataagtgcttcctatcatccagcctcaagcaatttcttgcttctctgatgttcctggcaccttttctaacatttttgttgacaggcattgc

SEQ ID NO: 503898 - DNA, 598 bp, Homo sapiens
cagggttagcaaaatgtatgttttattgtgatagcttactggactttgtatgtgttaaatgtagattaagtgcttaatacattgcctgacagtaaacatttaaaaaacaaaaaaaaaattagttatttcctatgaatgaaacaaacataagtactgagtatgaattgaataataattataaaattataaacaaatgataaaaaattgaggcacacacacttattttacaatttatctattcatcattaactctatcaaataactgttatttgataaaataaataacagttatttgataaaaattattttaattactcccccaaatatttcaaggtcaccctgagcaacaggccgtatttatttcttggcacatagcttccaagaggctttcataagctgattcctactctgttagatatcaaatrtcttccactccttctccagctatttctcaattctcacgttctgtgcagttttcaacacctatttcacatactagcatttcagataagtgcttcctatcatccagcctcaagcaatttcttgcttctctgatgttcctggcaccttttctaacatttttgttgacaggcattgc

SEQ ID NO: 503899 - DNA, 461 bp, Homo sapiens
agttcccgtatccatgtctgctcctgggcactggtgccacctttctgttggtgtagaactgtactcttttcctgtagagcccagaactgtacccatgtctctgctgggagggatgcatttaccttcttctcacaagcggagagatctctggcagaagagagcgcacaatttsgtttcctttctcccagagggtgctttggtatgctgcatgcttcccctagaggcagcctatgctgagggttgaactctaggaacatgcagcaccccagggtcccaccagccctttgcagttgtcacagtctaaaataattctgggaaatatttgtggaagatatagtgatgcaaagacataagggctgagaattcctgggcaggatagaggcacacaattgatgcacaaccagtatggtgccctctacctcagctcaggtgttgggggaaagtgagtgaacttatgccag

SEQ ID NO: 503900 - DNA, 461 bp, Homo sapiens
agttcccgtatccatgtctgctcctgggcactggtgccacctttctgttggtgtagaactgtactcttttcctgtagagcccagaactgtacccatgtctctgctgggagggatgcatttaccttcttctcacaagcggagagatctctggcagaagagagcgcacaatttcgtttcctttctcccagagggtgctttggtatgctgcatgcttcccctagaggcagcctatgctgagggttgaactctaggaacatgcagcaccccagggtcccaccagccctttgcagttgtcacagtctaaaataattytgggaaatatttgtggaagatatagtgatgcaaagacataagggctgagaattcctgggcaggatagaggcacacaattgatgcacaaccagtatggtgccctctacctcagctcaggtgttgggggaaagtgagtgaacttatgccag

SEQ ID NO: 503901 - DNA, 483 bp, Homo sapiens
gcgcaaaatctaatttgtttctccccactccatcatgctgctgatgcaggaatggcagatatctagcacttgtgccatatctccccacgctgtcacccatggcagacattaatagtcaatcacgatactcctcatctcaggacttcaggcaactactgtcaattgataggaattgttagatgagaagaaaactcttcattctcattgtcttataaatgaggaaggtcattattgtacttaactgcattttctttaagtactttgtagagtcttgagatgattaatgcttaggattgtaaatactgttatttcaggaaattgggatttatgtgggaatttgttttttactgtgaacttctaatttgatttttatgtgaaaatgaaagttacctagtcacaagttgaaagtctagcatattaatatcagttccacacatcaaaatttccytttcatcatgatatattgagcttctccttttacat

SEQ ID NO: 503902 - DNA, 598 bp, Homo sapiens
aagaatgcattaagattctacagtcctgttaagagctactgttgtgtggcttggtttcctgtaattctgtccctatgttcctcagcctctagcctgccctgccttttctgcttaatctgtcttcccactttgtcacagtggtgtatttctataaatccattatttctctgcatgccagttcccaggasattgtagcattgtctggtgcggcatgagcatatctggagctgctgattactgaagcaggtgcctctgatggatggtcactgtgcaaagagctgcttggagcattggatatccttgaaaaatgggactgcccccagagggaatcagacacgttaataaatcacagccacggttgttaaattctgacagtggctgacaacgggaaaagaaatggtcagttttaaggactggccctgtgaagtccttaaagatcaaattctcttgtagctttggctttgcctatagaatttctaaaacaaagctgatcagagattcaagcagagctgtctccggttactcaaaggagttactcaaattggttacctcgaagcaccttgcttaaatcatttgatggatctaaaggaaatttaat

SEQ ID NO: 503903 - DNA, 598 bp, Homo sapiens
aagaatgcattaagattctacagtcctgttaagagctactgttgtgtggcttggtttcctgtaattctgtccctatgttcctcagcctctagcctgccctgccttttctgcttaatctgtcttcccactttgtcacagtggtgtatttctataaatccattatttctctgcatgccagttcccaggacattgtagcattgtctggtgcggcatgagcatatctggagctgctgattactgaagcaggtgcctctgatggatggtcactgtgcaaagagctgcttggagcattggatatccttgaaaaatgggactgcccccagagggaatcagacacgttaataaatcacagccacggttgttaaattctgacagtggctgacaacgggaaaagaaatggtcagttttaaggactggccctgtgaagtccttaaagatcaaattctcttgtagctttggctttgcctatagaatttctaaaacaaagctgatcagagattcaagcagagctgtcyccggttactcaaaggagttactcaaattggttacctcgaagcaccttgcttaaatcatttgatggatctaaaggaaatttaat

SEQ ID NO: 503904 - DNA, 466 bp, Homo sapiens
ctgtaggcatcagtgtaaactggattgtgcactaggcacaaatggacacaagttatttctggatgtggatgatgaaataccatggtcctgctccctgctcagaacgttcagatgaaaccaacgcacactggaccaccgtgcctgcagcccaagttctggtgaggaatgttctgggggagtgaagagaaccatagaggagactggtgaaggttttgagatcattggtgggctctcatgggcaactttgttggggcgaggmtgctggcatgaggaggctggccgggcagggagaggacctgctgtgagtgcctcctccaggaggctactggccggggagtcccaggctccacctccaagactcacacatcttggagaccatgagcaaggctacagtggagcaggtgaccacatccaggcagcacactagccttttctgtctccaatcacctgctgggcttcctctgcc

SEQ ID NO: 503905 - DNA, 570 bp, Homo sapiens
agcaatcctcccacctcggcctcttgactagctgggactataagcacacaccactatgcctggctaatttttaaaattttgtagmcatgaggccccactatgttgcccaggctggtcttgaactcctggcctcaagtgacctgcttgcctcagctccccaaagtgctagaattacaggcgtgagcctccatgcctggccaaacacggtttcttttccacccatcctctttgctgttcctattgtgtggagcttctaattctctcaccaattacaagcagtgtgtgtttgcataatccatgccttcctttgctgattgttgcagtttaaaccatttcagatcatttcatgaacgtgtaacttttgttattgtcctttttgtttttttgttttgtatgtgattggttggttagtgaaattggcttgcttctgttagtttcagtcattatagccatgtgaggacaggttctgcccactgaggaccaggtctctccatgtgtggaaggtgctttcatcctctccaggttgagctctgcagttggactcagaagctttacattaacaaccagcag

SEQ ID NO: 503906 - DNA, 554 bp, Homo sapiens
catgaaaaatgagaccaaacattgcttcttagtaatttttgtaaaaaatcaaaaatatgtagtaggtcaccccatgcactagcagtgaacttcttatttttgattaatgactcacttgagctgcgagcattcatttatttgactggggttttattaaacttatttcaaaaagctctaggatcctgtagaagccagtgccatgacaaaacaaagcatgacattacattttctctgtctgcatgacttaattcaatagctgaaacgtgggatcttattttacttacattgcacgagtctcttccacctcggaggcttccagcacaaaccatattcattccaatcacagggttaaaattatagtgatttcgatcattgcagacttttctgtctatgatggtgatattgacttctctcagagtatcggaccaagatgcactattgtgagtcctgccccaccctgcaacttggcacatggttcctggtttcacatcrtccccctttttaggtagatgaaggatagtcacatatttgttaatttttgctttttccgtcag

SEQ ID NO: 503907 - DNA, 674 bp, Homo sapiens
accatggcattcagttgagaaaccccaggccccctagggtcactgagacatggatgtgtggggacaaaggggcctggggaacagttggcctgcgttcggtgccttggggcactggaaccatatttctgaaagtaggatgtgttatttctcactagagccttcctcagtggggaagtggtgacactgtgtccggaactggtgggttcttggtctcaccaacttcaagaatgaagccgcagaccctcgcggtgagtgttacagttcttaaaggcggcgtgtctggagtttgttccttctgatgtttggatgtgttcagaatttcttccttctggtggtttggggtatccctggttcaggaatgaagctgcagaccttcactgcgagtgttagagctcataaaggcagtgcggagccaaagagtgagcagcagcaagatgtattgcaaagagcaaaagaacaraacttccacaatgtggaagagaacccaagcagtttgctgctactggcttgagcagcctgcttttattcccttatctggccccacccacatcctgctgattggttcattttacagagagctgattggtctgttttacagagagctgattggtccgttttgacagggtgctgattggtgtgtttacaacccctaagctagacacaaaagttctcca

SEQ ID NO: 503908 - DNA, 476 bp, Homo sapiens
tgcttgaggtacattgaacttcttgcatctgtaggttactagtttacatcgaatttggaaaaaaatgttgtcattatttttccaaacatcttttttaatgcactaccctcattcctcatgttttcttctgtcctttggggacttcaattaaacatatattaagccacttgaagttgtcccacagatcacagataattggcttaaatttttttaaatcctctttgcttttggtttcatttggatagtttatattgccatggtttcacaatgaataatcttttcttctttaacatctaatctgccattaatcccatgcagtgcagttctcattttatacrttctagctttcacctctagaacagtgatccagagtgttgttatatcttctgtgcctcaaattagcttttacaatacgtggaatgtagttttgatattgtttaatgcccttgtgtccgttctggatcagttttaataga

SEQ ID NO: 503909 - DNA, 476 bp, Homo sapiens
tgcttgaggtacattgaacttcttgcatctgtaggttactagtttacatcgaatttggaaaaaaatgttgtcattatttttccaaacatcttttttaatgcactaccctcattcctcatgttttcttctgtcctttggggacttcaattaaacatatattaagccacttgaagttgtcccacagatcacagataattggcttaaatttttttaaatcctctttgcttttggtttcatttggatagtttatattgccatggtttcacaatgaataatcttttcttctttaacatctaatctgccattaatcccatgcagtgcagttctcattttatacgttctagctttcacctctagaacagtgatccagagtgttgttatatcttcygtgcctcaaattagcttttacaatacgtggaatgtagttttgatattgtttaatgcccttgtgtccgttctggatcagttttaataga

SEQ ID NO: 503910 - DNA, 603 bp, Homo sapiens
aatttaaaacaatttcctgggtctactttgtgctgtgttcctaatggaaacatcagaaaatgcccaattgtagctttcatctcctgctgtgtcctagccacagtttcagcatgctatcttcttttcacttttagaaaccacagtggtgtatataacagacgcactggagcaccagagatatcattaagaaatggaaggtcaaatatttagttacaagtatgggaaatgctttaaagtttgtagttaagtatgattttaaaatgtgaagaatgattttaagcaggatggatattttcacttccctaaaacagtataaccaattgagggatttatttgagctcaagatcttaacaattaggtgtttcttttttaagtgcaaagaagaaacaaagaattagaaaactcartgttcttccaaaatcaatcttgttctccagatgatgcaattttcctgtgttatttccttctgttttatcatcatcatcagttatgaattcttctattcagcaagaatgattttgtgtgtcccgaattatgtaggatggccatcaatgtggaaaagaaaagaaaggaaacaaaacactcagggtgataaccagtaca

SEQ ID NO: 503911 - DNA, 585 bp, Homo sapiens
tgcggatcatgaggtcaggagatcgacaccatcctggctaacatggtgaagccccgtctctgctaaaaatagaaaaaattagccgggcgtgctggcgggcacctgtagtcccagctactcaggaggctgagtcagtagaatggcgtgaacccgggaggcggagcttgcagtgagccaagatcacgccactgcactccagtctgggtgacagagtgagactccrtctcaaaaaaaaaaaaaaaaaaaacaaaaacaaacaaacaaaaaacaactgagtggagacctgccccagctttataaatggtttggttttcatgcaaatcatacttaggttaagacttctgttttaactgtagggcagaggagttaaaatctcagaaaagctgagagcaagttactataggagcagaagtgtggcaggcacacctgtgagtgcttgtgtgtatgcatgtgtatgtgggtgtgtgtgtgtgcatgtgtgtgtgggaacactgcacaattcaaagcaacacctgatcaatgagagtataaatggtgaacaatacagagggtttggcccaggattgggtcggaagagtcatggtt

SEQ ID NO: 503912 - DNA, 585 bp, Homo sapiens
tgcggatcatgaggtcaggagatcgacaccatcctggctaacatggtgaagccccgtctctgctaaaaatagaaaaaattagccgggcgtgctggcgggcacctgtagtcccagctactcaggaggctgagtcagtagaatggcgtgaacccgggaggcggagcttgcagtgagccaagatcacgccactgcactccagtctgggtgacagagtgagactccatctcaaaaaaaaaaaaaaaaaaaacaaaaacaaacaaacaaaaaacaactgagtggagacctgccccagctttataaatkgtttggttttcatgcaaatcatacttaggttaagacttctgttttaactgtagggcagaggagttaaaatctcagaaaagctgagagcaagttactataggagcagaagtgtggcaggcacacctgtgagtgcttgtgtgtatgcatgtgtatgtgggtgtgtgtgtgtgcatgtgtgtgtgggaacactgcacaattcaaagcaacacctgatcaatgagagtataaatggtgaacaatacagagggtttggcccaggattgggtcggaagagtcatggtt

SEQ ID NO: 503913 - DNA, 585 bp, Homo sapiens
tgcggatcatgaggtcaggagatcgacaccatcctggctaacatggtgaagccccgtctctgctaaaaatagaaaaaattagccgggcgtgctggcgggcacctgtagtcccagctactcaggaggctgagtcagtagaatggcgtgaacccgggaggcggagcttgcagtgagccaagatcacgccactgcactccagtctgggtgacagagtgagactccatctcaaaaaaaaaaaaaaaaaaaacaaaaacaaacaaacaaaaaacaactgagtggagacctgccccagctttataaatggtttkgttttcatgcaaatcatacttaggttaagacttctgttttaactgtagggcagaggagttaaaatctcagaaaagctgagagcaagttactataggagcagaagtgtggcaggcacacctgtgagtgcttgtgtgtatgcatgtgtatgtgggtgtgtgtgtgtgcatgtgtgtgtgggaacactgcacaattcaaagcaacacctgatcaatgagagtataaatggtgaacaatacagagggtttggcccaggattgggtcggaagagtcatggtt

SEQ ID NO: 503914 - DNA, 600 bp, Homo sapiens
ctgtctgaaatcagaagactgtacccttgtagatggcaatagcaagttctaaacaaaatactcatttaccactttttgtgtccaccacaggcatatyaaagactttttctacaaaatgaggaagacattattaatcactatgtcttgccctctgtttccagatcctgggatccagagcaacaaaaagaccttaatttagttaacatctttatgaatctattgtaattcttgtgttaaaaattgtgtcatgaggctgggcacagtggctcacatctgtaatcccagcactttgggaggccgaggcgggtggatcacgagttcaggagatcgagactagactggccaacatgatgaaaccccgtctctactaaaaatacaaaataaattagctgggcatggtggtgcactcctgtagtcccagctactcgggaggctgaggcaggagaatcacttgaactggggaggcagaggttgcagtgaaccgagatcgcgccactgcactccagcttagcaacagagcgagactctgtctcaaaaaaaaaaaaaaaaaaaggtgtcattagccgtataaaacaatgtaaataaaaacctctaataatt

SEQ ID NO: 503915 - DNA, 600 bp, Homo sapiens
ctgtctgaaatcagaagactgtacccttgtagatggcaatagcaagttctaaacaaaatactcatttaccactttttgtgtccaccacaggcatatcaaagactttttctacaaaatgaggaagacattattaatcactatgtcttgccctctgtttccagatcctgggatccagagcaacaaaaagaccttaatttagttaacatctttatgaatctattgtaattcttgtgttaaaaattgtgtcatgaggctgggcacagtggctcacatctgtaatcccagcactttgggaggccgaggcgggtggatcacgagttcaggagatcgagactagactggccaacatgatgaaaccccgtctctactaaaaatacaaaataaattagctgggcatggtrgtgcactcctgtagtcccagctactcgggaggctgaggcaggagaatcacttgaactggggaggcagaggttgcagtgaaccgagatcgcgccactgcactccagcttagcaacagagcgagactctgtctcaaaaaaaaaaaaaaaaaaaggtgtcattagccgtataaaacaatgtaaataaaaacctctaataatt

SEQ ID NO: 503916 - DNA, 617 bp, Homo sapiens
atatactatgaataacagtaggagggaaatttcctggctccttgatgacatagatgcgcttctgcactaacctatcctgaaatacattatctccaacttccagttgtatgggacattgaactccttattggttgggtgctctttagtatgcagtcaaaaaaggttttttcccacaaggtatatatttcactgaaacagcaagtagagacaatactatgaaactcctaatgaagaggcaataataaattttgaaaccataactgatgtctcaaataaatagtttaagcccttttcttgaaattattctacgtagctcattcattcaaaatatgcaagaaattccacataaacagaactggccctccactttcctgatgcttctgtttttgactttataatcttaaaataattgggaatcttttttctcagaatcattcttctgaaaataatgtatgtgtatgaaaggarttctgccctatttcaaaatttaatatcaggtagtttatattaccttttctgattttaatcaaacgcttatgccatatgttaatataatttgcatgtcagtttccctagcagaaaaacaaagtcccatttaagacatctgcatcaccaac

SEQ ID NO: 503917 - DNA, 563 bp, Homo sapiens
aaaaaataaataaataaatataaaatgaaataaagatattacaaataataaggataaaccaactgttctaaaaaaactggtgaatgtgaatctccaaagaaaaataaaagacaaaatttagaaaacttgtttgacctccagaactccttttctcraagcttcttgtaggacccatattctgtgtaaaatgcttcaggaaatgctgactagactttcccatccattgaggatgggaaaggagtggagggtgcatgtctgagaactgcttcagtggtgtcaccaacaggatgatagaaactttcatggggtggagggatagataattcaaacatggtggatctggccgggagcacaaggaagggttttgctgtgtggctgtcgggccctgcccatatctctggacacctctcccttctggttcacaccacttccctcctcttgaaacacctgtgactccttctctggtggttttctctggtcacaagtgtgcacatgagactatgtcagctagtcaatgtccttgaagtccgcttccagaaaatgaagaaaggagtgggtggtca

SEQ ID NO: 503918 - DNA, 563 bp, Homo sapiens
aaaaaataaataaataaatataaaatgaaataaagatattacaaataataaggataaaccaactgttctaaaaaaactggtgaatgtgaatctccaaagaaaaataaaagacaaaatttagaaaacttgtttgacctccagaactccttttctcgaagcttcttgtaggacccatattctgtgtaaaatgcttcaggaaatgytgactagactttcccatccattgaggatgggaaaggagtggagggtgcatgtctgagaactgcttcagtggtgtcaccaacaggatgatagaaactttcatggggtggagggatagataattcaaacatggtggatctggccgggagcacaaggaagggttttgctgtgtggctgtcgggccctgcccatatctctggacacctctcccttctggttcacaccacttccctcctcttgaaacacctgtgactccttctctggtggttttctctggtcacaagtgtgcacatgagactatgtcagctagtcaatgtccttgaagtccgcttccagaaaatgaagaaaggagtgggtggtca

SEQ ID NO: 503919 - DNA, 563 bp, Homo sapiens
aaaaaataaataaataaatataaaatgaaataaagatattacaaataataaggataaaccaactgttctaaaaaaactggtgaatgtgaatctccaaagaaaaataaaagacaaaatttagaaaacttgtttgacctccagaactccttttctcgaagcttcttgtaggacccatattctgtgtaaaatgcttcaggaaatgctgactagactttcccatccattgaggatgggaaaggagtggagggtgcatgtctgagaactgcttcagtggtgtcaccaacaggatgatagaaactttcatggggtggagggatagakaattcaaacatggtggatctggccgggagcacaaggaagggttttgctgtgtggctgtcgggccctgcccatatctctggacacctctcccttctggttcacaccacttccctcctcttgaaacacctgtgactccttctctggtggttttctctggtcacaagtgtgcacatgagactatgtcagctagtcaatgtccttgaagtccgcttccagaaaatgaagaaaggagtgggtggtca

SEQ ID NO: 503920 - DNA, 508 bp, Homo sapiens
cttgtgcttagaattgcactgggaagaagagacactcaaatgtaggaagccaagtgacaacgcaggcagcaggataaggtgagggctgtatggctggacaaacccagtggcccctaaaccctaggatgccttagaatccttggggtgtggagccgttaaaaatgcacagtccttggctctacctaggagatcagattcactaggtctccagtgagtcccagaaatctgcattttaaataagcttttaaactattcgaatacacgtggtccacagaccacctttgatgarcactagtccagtcagcagtactctgtagatgtccagagggaaaggaagcccactgggcaggcccaggaagagagctatttttgtgtttagacatgaaaaagcttacaaggaatccttttctttcctctgctgcacaatgagtgttttgaaggagagccataccttccattatctggagaatgtgcaatcggcacaaggaataaaaagggacgcatacag

SEQ ID NO: 503921 - DNA, 670 bp, Homo sapiens
caggattacaaagacaatggaatgcacggcctcaacagatgttctttgcaaagtcaaaactcctaatatgaaaggaataggatcctgagacctggaataagaatatttgagtaaacaagcctgcaaatagtaaatctccagctttatgaacactctggactcaaaggaaaaaatcatctccctgtttctaaacagcctgcwcttatgcagaaatgcagcaaaggcctcagctgaagcaagtgctttgcaggacaatgcttgtcctcaaattctgaccttgccctcttctcataaccaatagctggagtcatgtctcagcacagcctgatccaggaaatacaatgcctgttccttctataccaaaagccttgcaagacctagcaaacaggcactggcagaatccaggaaaacacaagtgggaatacatcttgagagagttggacgaggaaatcctgaatataaagatggataggaagaattaattgatatgcaagtcttcttccatgactcaatttaatatcctggcaaaaacatttgaatccagtcctaacacattggtagggtgactctttgaagcttgaacacaataggcaatagtgaataaggtagagttgctagaataaatttggtggagtatcaaggaagggtcagaaggagatagaaatgttaa

SEQ ID NO: 503922 - DNA, 503 bp, Homo sapiens
ctgcccgagactggctcctgtgccygccgcagcctcctctgcagcctcgcttctccctccgccgctgccttgtttcttccatcttaggcatcaattgctgtcttttggcttttgtttttgtactttttttttttttttgtggaaaataacatgtgcacagaagagtacatctttattttttagtttagttttcttgagatggagtctcactctgttgcccaggctggagtgcagtggcgcaatctcggctcactgcaacctccgccccttgggttcaagcagttctcctgcctcagcctcctgagtggctgggattacagacgcctgccaccatgcccagctaatttttgtatttttagtagagacagggtttcaccatgttggccaggctggtcttgagctcctgacctcaagtgatccacctgccttggcctcccaaagtgctgtgattacaggcgtgagccaccatgcctggccagaaaagtacatttttaaatatgcag

SEQ ID NO: 503923 - DNA, 553 bp, Homo sapiens
gtttctggtaatggctttcttcctggttttcagatggctgtcttcttgctgtgtcctcacacagtgagctctggcatctcttcttcttataaggacaccagccccttcatattagggcccaacccttttgacctcatttaatctttattttgacctcatttaacctgtaatccttgtaggccctatctccaaatatagtcacattgggggttaggacttcaacatatgaattttggggagacacaattcagtaattcaatctatagcagaaactaagctaccaagagtatggaattccatttcagaagctctccaaaaaagttaagattatcatctgcctggatgattcttaagggtgaaattccrtttagctagaggcaaatgactgatttaatattttccagaactccaagtctgtgaattataatggcatcattctctctcctccttatatataaatggtttcattttcatgataaaataaatttcattatgacccatacttctcccaataaaaactcctggggaaagttttgggggtttccaggtaaac

SEQ ID NO: 503924 - DNA, 642 bp, Homo sapiens
tatcatctccaggtcactttctactcacgatatttttcttgagtrtaggtcacctctccagcccccgcatgtccagtatgttttgattttatactggatgttgtggatattatgttataaagattgtattcagagtatttatttgaagtcttaatttttgttctagcaggtaattaaattactgactgacgtccttgaacttttggaaacttggttttggtctttcttagggttgctctgttttggttttgcttttagtcttagaatgaattgttagtctttggacatagtcttgactcctaacctgtggtccttttgtagggttttcatggaaagtctgaggcattccccagtttcctctagcttggtggggttcaaactccaaactctcttccgcacagagggcagcagttcagatgttcctcagcttctcagcctaccctctttctactggactcctgatgtctccttcgtgcatgtgcagtttagggatttaccatggacagcagaagtttatgaaagacttgggtgctcctttctctgtggctctgttcttcccaggaattacccccttgatatcagctctcacctatctcttctgatctttaaagccaagaagcttgtgaccttctgcttgagtgc

SEQ ID NO: 503925 - DNA, 615 bp, Homo sapiens
taaatcagaactgacctttctgaagctggcacaagttttgtctttgttttgggctctatgaagggtgaggggatggaggagcccaggggtgagaataagccagtgggtggagtttcccgctgcttagcggctccttgaggggcccattccatagacatacacrgagggcctcctgcatgcctcccatgtgggtctcctcacgctccttctctctgcccccctgcactgaaaggactctgcagggcccagaacttcaggcttcctcatcttggtgcctgcctcccgggagaagccacggctgccttcctgattgataacacagcgctgacaagacaagtgctgctttgggttccagtggtcacaaccaagctattcttatgctcccctcctcattgtttccactcgttcctaattgcacttacgcagagggctccagaagcagtaaacagacggccttctcctatactcacaattagctagaagaatccaggtcaagcttttccaacctgcagcccatgggtggcatgtggcccaggacagctttgaatgcagcccaacacaaatacttaaactttcttaaaacattatgagtttgttttatttttttaacatgtc

SEQ ID NO: 503926 - DNA, 390 bp, Homo sapiens
tgtttaaatagccacagtgtttacatcatcctaatcactgctgcccagccattctcctgtttatgctggaagaagccccgctggtagggggaatcccaagtcagagctgcagaccaaagagcagacattaaattccacttaaatactggatgctctcccctcccaattgttctggatgctgctatacttgccccccgcctaggggmcccattatgtaggaggtcccaaatagccatcggttgtacttgctttcctgttgctcatgccttatccagccgaaagatcaaaagcaaatggaaccatagtgagattctgcaccacccatcgggtttctgtagctccagagagggcgaatgagcatgatgatcacatattcccaaaaccggccag

SEQ ID NO: 503927 - DNA, 545 bp, Homo sapiens
ctgtttaaatagccacagtgtttacatcatcctaatcactgctgcccagccattctcctgtttatgctggaagaagccccgctggtagggggaatcccaagtcagagctgcagaccaaagagcagacattaaattccacttaaatactggatgctctcccctcccaattgttctggatgctgctatacttgccccccgcctaggggacccattatgtaggaggtcccaaatarccatcggttgtacttgctttcctgttgctcatgccttatccagccgaaagatcaaaagcaaatggaaccatagtgagattctgcaccacccatcgggtttctgtagctccagagagggcgaatgagcatgatgatcacatattcccaaaaccggccaggtgctgggccaacaggtgatttactgctgtggaaagccaataggagattactgaaggggtcaggccataggacatcagtggctaaatgatttcctaatggcctgaaagagtcacagtgcctccctccctgcctaatttcatagcagagggtgtc

SEQ ID NO: 503928 - DNA, 512 bp, Homo sapiens
aggtagagaattgcctgtggtttactggtagtggtgacggtgaatttcctccagggcacgaaactagctttccaggggtaatacgaatcagctacagagcaacacaaaaggaattaatagaaatgtaatctcaaaaggtacttctgtttaaaaccacaaaatcttatgtactatttattatctgtaaaamcacaaaatcttatgtactatttattatctgtgggttgaaaataaatttcagaatccaaagaggattgaaagggtacaaaaactaaaggattgtttgacatatatgagtattttctgtttttcactgattgttaccagagactagaattgtatgattaaatgaatggaaatattgtatctgtaatgatacttagagagactttataaatatggcggtccttacactctttcatacttatgagaggaaaatttttgctggagtatgtgaaaatgctgatcaatctgtctgctctgctcacatttttctcagatcatttgtgtct

SEQ ID NO: 503929 - DNA, 625 bp, Homo sapiens
actacggctcaattatgcatgtgacttcatgctagttttagcgccatttagattttgaactgtaagtttatcttgcatgattttattatttctttccatcccacttaaagaaaggtagagaattgcctgtggtttactggtagtggtgacggtgaatttcctccagggcacgaaactagctttccaggggtaatacgaatcagctacagagcaacacaaaaggaattaatagaaatgtaatctcaaaaggtacttctgtttaaaaccacaaaatcttatgtactatttattatctgtaaaaccacaaaatcttatgtactatttattatctgtgsgttgaaaataaatttcagaatccaaagaggattgaaagggtacaaaaactaaaggattgtttgacatatatgagtattttctgtttttcactgattgttaccagagactagaattgtatgattaaatgaatggaaatattgtatctgtaatgatacttagagagactttataaatatggcggtccttacactctttcatacttatgagaggaaaatttttgctggagtatgtgaaaatgctgatcaatctgtctgctctgctcacatttttctcagatcatttgtgtcta

SEQ ID NO: 503930 - DNA, 587 bp, Homo sapiens
ttcccacagaattgacaaattagggatctaggtacgatgagccaggctaactgtgttcaagtacctgagggataacagaatgaaagaaattctgattatctctaaacaaaaccttaaataaaacacttgagtaaatgggcagaagatwcagagaataaaatattcagaaggatttcctaatgtttggaaaactgtgtggcaggctagagtagaaataatttcattccccatcttaggcctgtcgttttggttcctctctgatgcaagtgattgaaaatcctgctcaaaactatgtaaatctaaaaggagatgtagtggctgagaagtggtgggcttaatcaagctttagttttgcagaagctacatgcagggctctgatgatgcccacaaaattcacttcccctcctttcttgtggtttcattctgacagcagcttggtttcatgatagccagatggctacagccctctagatttcccaccctgtatctcacgtctaaggaaaaacctcccttataaacggtataatgaaaattccaaacctgatttgccttacccataattagcttcctttcccactcctgaggca

SEQ ID NO: 503931 - DNA, 596 bp, Homo sapiens
ccttatcaattcaaaaaaggattatatagatatctattaaatgcttaatttccataataaagtcataagtgctgcttttcttttttttcctttttcttttaaatagagctgttaatatgctgttatttggagtctgtgctcttcttacttacctttagatgtctgctcataaatcaagagctatcattcatagagacaggagatgaytgacttctcagcttcactaagaattcttctgaacccctagtcctatccatcaactttggcagtgagaaaggcaccatgtgaagagactcctctatttattattttctccagagctttgtttacattcaaatttcacctctcttaaaagtttttaaaatatttctcttttcttatagtcagtatcttttaaattataatattaacatacatgcagaccatcatcgctatatttctggagtactggaaattgtgcaattgcgtgcataaaccatttgctcacctcttctttttaagagcatctatgtttcttcatgactgctcatttctatagtttataattttcattttggaaaattctgtgctctagaccattctacactgggcagtgg

SEQ ID NO: 503932 - DNA, 478 bp, Homo sapiens
tctctttctgtctcagacagacatattaaaatgaactagattragtaatacctaatgagcacccttaagtgtaaaataatagttgctttaaaataatttttaaaaaataaactatattgtcaacattaaattaagggcagaaaaatgtattaaagttctaaaactacagaatgaataattgaaatattctaacctagaagagtaaaaaattggtgaatgtcattaaaggtttctaacagaagatccactaggaagagaagtgggatacaaattgctagtaagaaaagggagagggggaatagaatataccgtatgtttaaaacttccaacatccttttcctagcccctgatctatgcaaaatgaagtcttactaagtctcaaaacagtattctttacatttcattttctttctttttcaatcattgtttttgagaaaatcctaaaccaaagcaaaaaagagagaatctgccagtgaag

SEQ ID NO: 503933 - DNA, 478 bp, Homo sapiens
tctctttctgtctcagacagacatattaaaatgaactagattgagtaatacctaatgagcacccttaagtgtaaaataatagttgctttaaaataatttttaaaaaataaactatattgtcaacattaaattaagggcagaaaaatgtattaaagttctaaaactacagaatgaataattgaaatattctaacctagaagagtaaaaaattggtgaatgtcattaaaggtttctaacagaagatccactaggaagagaagtgggatacaaattgctagtaagaaaaggragagggggaatagaatataccgtatgtttaaaacttccaacatccttttcctagcccctgatctatgcaaaatgaagtcttactaagtctcaaaacagtattctttacatttcattttctttctttttcaatcattgtttttgagaaaatcctaaaccaaagcaaaaaagagagaatctgccagtgaag

SEQ ID NO: 503934 - DNA, 670 bp, Homo sapiens
ggcctgcttttttttttttttgagacggagtctcactctgttgcccagaccggagtgccgtagcgcgatctcagctcactgccacctccacctcccgggtttgagcgattctcctgcctcagcctcccgagtagctgggattacaggcacacgccaccacgcccggctaatttttgtatttttagtagagacggggtttcaccatgttggtcagtctggtttcgaacccctgacttcaggtgatccacctgcctcggcctcccgaagtgctggaattacaggcgtgagccactgcgcctggcctatcacaaatcttttatccatctctctagtcatcaactcatcttaattttggatgaatttcaaaggaacttttagacatcagtagtgtctaatttgggatgatagtgacttgaagaataatggggcaatgaatccttgtagccctggtgaaaatacagtggccttccttgttggacagaattggtggcatcttggccttgggaggacattcagagtgcatgtaatcagagacagaaggktagttctggctggttgtaggtggcccctgcagggcagtatctacttgtctctattcatttgaatgggagcttttgtttgttactggaagaagaaagggaggtttggggccacggagaagatgtagcag

SEQ ID NO: 503935 - DNA, 537 bp, Homo sapiens
tagtagcacagaatggcttatccataagatccttgaaggttcggtgctgtctgagtgcctgcctcagtctcccccagctttggaaagcaactggcccctcttctagtggcctgctttgaaacatattctattatctatatctgtatctatatatctacrtctatatttacatctatctctatatatctgtattcatagattttcttactaaatgcggcaatgatgtcaacagttcactttaactgagtgtgtactatgtgctggccctgttctctattttgcacattcacagaagccctgcaaagaaaataccacatgctttagagttcccaggtgctggaagaaggcaccccagagctgcacccccaaaccccgtggcaggccctcagcagacgaggtttgccttgcaccaccactccctcctcctaacttatttttgttttgtggttctctccacagaggtaagctattagaaacatttatttcagcctacatacatgatgttttctaaaaaccataacattcttctttctaaac

SEQ ID NO: 503936 - DNA, 537 bp, Homo sapiens
tagtagcacagaatggcttatccataagatccttgaaggttcggtgctgtctgagtgcctgcctcagtctcccccagctttggaaagcaactggcccctcttctagtggcctgctttgaaacatattctattatctatatctgtatctatatatctacatctatatttacatctatctctatatatctrtattcatagattttcttactaaatgcggcaatgatgtcaacagttcactttaactgagtgtgtactatgtgctggccctgttctctattttgcacattcacagaagccctgcaaagaaaataccacatgctttagagttcccaggtgctggaagaaggcaccccagagctgcacccccaaaccccgtggcaggccctcagcagacgaggtttgccttgcaccaccactccctcctcctaacttatttttgttttgtggttctctccacagaggtaagctattagaaacatttatttcagcctacatacatgatgttttctaaaaaccataacattcttctttctaaac

SEQ ID NO: 503937 - DNA, 537 bp, Homo sapiens
tagtagcacagaatggcttatccataagatccttgaaggttcggtgctgtctgagtgcctgcctcagtctcccccagctttggaaagcaactggcccctcttctagtggcctgctttgaaacatattctattatctatatctgtatctatatatctacatctatatttacatctatctctatatatctgtattcatagattttcttactaaatgcggcaatgatgtcawcagttcactttaactgagtgtgtactatgtgctggccctgttctctattttgcacattcacagaagccctgcaaagaaaataccacatgctttagagttcccaggtgctggaagaaggcaccccagagctgcacccccaaaccccgtggcaggccctcagcagacgaggtttgccttgcaccaccactccctcctcctaacttatttttgttttgtggttctctccacagaggtaagctattagaaacatttatttcagcctacatacatgatgttttctaaaaaccataacattcttctttctaaac

SEQ ID NO: 503938 - DNA, 537 bp, Homo sapiens
tagtagcacagaatggcttatccataagatccttgaaggttcggtgctgtctgagtgcctgcctcagtctcccccagctttggaaagcaactggcccctcttctagtggcctgctttgaaacatattctattatctatatctgtatctatatatctacatctatatttacatctatctctatatatctgtattcatagattttcttactaaatgcggcaatgatgtcaacagttcactttaactgagtgtgtactatgtgctggccctgttctctattttgcacattcacagaagccctgcaaagaaamtaccacatgctttagagttcccaggtgctggaagaaggcaccccagagctgcacccccaaaccccgtggcaggccctcagcagacgaggtttgccttgcaccaccactccctcctcctaacttatttttgttttgtggttctctccacagaggtaagctattagaaacatttatttcagcctacatacatgatgttttctaaaaaccataacattcttctttctaaac

SEQ ID NO: 503939 - DNA, 533 bp, Homo sapiens
tttgatgtgggaatttcctgtgcccctgaagtccttcccttaagacagagttgcagaaagaaacacagacasgcccgcagagggggcatctgaatgcctggctggctgtgggtgtagtgaggggcagcccacatgggcacaggccatctccctctcatttcccaccgttcctgctttgaacgctgaaactggatgaaggccaatttaagcaaagcccggcacatctctgcaattgatcctctcaaagtggctggcgtgcagacctaaaggccgtggagagacagcgggtaaattttttaataactcccctgggttttatgtccgtctcccatcctacagatgagaagactgagacaaagataggtcaggaacctttggcctcatattagagcagaatttttgacccaggcagtctctttcaggaatctgcaaaatacagtgcatgtgtgtattgcaaaaatacttttggttacacagatacggtggtctctccaggtgtacctgtattcacacacagcaccgctgtcatgggg

SEQ ID NO: 503940 - DNA, 533 bp, Homo sapiens
tttgatgtgggaatttcctgtgcccctgaagtccttcccttaagacagagttgcagaaagaaacacagacacgcccgcagagggggcatctgaatgcctggctggctgtgggtgtagtgaggggcagcccacatgggcacaggccatctccctctcatttcccaccgttcctgctttgaacgctgaaactggaygaaggccaatttaagcaaagcccggcacatctctgcaattgatcctctcaaagtggctggcgtgcagacctaaaggccgtggagagacagcgggtaaattttttaataactcccctgggttttatgtccgtctcccatcctacagatgagaagactgagacaaagataggtcaggaacctttggcctcatattagagcagaatttttgacccaggcagtctctttcaggaatctgcaaaatacagtgcatgtgtgtattgcaaaaatacttttggttacacagatacggtggtctctccaggtgtacctgtattcacacacagcaccgctgtcatgggg

SEQ ID NO: 503941 - DNA, 533 bp, Homo sapiens
tttgatgtgggaatttcctgtgcccctgaagtccttcccttaagacagagttgcagaaagaaacacagacacgcccgcagagggggcatctgaatgcctggctggctgtgggtgtagtgaggggcagcccacatgggcacaggccatctccctctcatttcccaccgttcctgctttgaacgctgaaactggatgaaggccaatttaagcaaagcccggcacatctctgcaattgatcctctcaaagtggctggcgtgcagacctaaaggccgtggagagacagcgggtaaattttttaataactcccctgggttttatgtccgtctcccatcctacagatgagaagactgagacaaagataggtcaggaacctktggcctcatattagagcagaatttttgacccaggcagtctctttcaggaatctgcaaaatacagtgcatgtgtgtattgcaaaaatacttttggttacacagatacggtggtctctccaggtgtacctgtattcacacacagcaccgctgtcatgggg

SEQ ID NO: 503942 - DNA, 582 bp, Homo sapiens
acaactcaattctataattccaggtttatgttgacaatgtctaaaattttaatgtttttctaaaaaaatgatttttctatggtactggggaaacaaacgaatgtccaaaactgagccctaccaacagatattgcaagtatctgttaggaattacacttgtctccacaaaacaaaaacctgactctagtggctttagcaaataggggtttgttttgctcacataacaagaagtcatgagatggaaaagcctggctgatgcagcaactccactatcttcccgctccaccctccttagtgcatggctttcatataygtggtgacctcgtggctgcaaggaggctgccacacctccagacctgcatctattccaggcgggaaaaagaaggaaaatcccagatggaggctaaagaaataaaccaaacctttatggcattatcagtctctatgaccttttgaaaaattttaaggcaatgttgagcttttaaggcaacgttgattagcttcagaaggagtgtagaaggtaggcaattcatagaggcttaatgccagattgtgagaaactctttagagtacagacaatgg

SEQ ID NO: 503943 - DNA, 582 bp, Homo sapiens
acaactcaattctataattccaggtttatgttgacaatgtctaaaattttaatgtttttctaaaaaaatgatttttctatggtactggggaaacaaacgaatgtccaaaactgagccctaccaacagatattgcaagtatctgttaggaattacacttgtctccacaaaacaaaaacctgactctagtggctttagcaaataggggtttgttttgctcacataacaagaagtcatgagatggaaaagcctggctgatgcagcaactccactatcttcccgctccaccctccttagtgcatggctttcatatatgtggtgacctcgtggctgcaagraggctgccacacctccagacctgcatctattccaggcgggaaaaagaaggaaaatcccagatggaggctaaagaaataaaccaaacctttatggcattatcagtctctatgaccttttgaaaaattttaaggcaatgttgagcttttaaggcaacgttgattagcttcagaaggagtgtagaaggtaggcaattcatagaggcttaatgccagattgtgagaaactctttagagtacagacaatgg

SEQ ID NO: 503944 - DNA, 582 bp, Homo sapiens
acaactcaattctataattccaggtttatgttgacaatgtctaaaattttaatgtttttctaaaaaaatgatttttctatggtactggggaaacaaacgaatgtccaaaactgagccctaccaacagatattgcaagtatctgttaggaattacacttgtctccacaaaacaaaaacctgactctagtggctttagcaaataggggtttgttttgctcacataacaagaagtcatgagatggaaaagcctggctgatgcagcaactccactatcttcccgctccaccctccttagtgcatggctttcatatatgtggtgacctcgtggctgcaaggaggctgccacacctccagacctgcatctattccaggcrggaaaaagaaggaaaatcccagatggaggctaaagaaataaaccaaacctttatggcattatcagtctctatgaccttttgaaaaattttaaggcaatgttgagcttttaaggcaacgttgattagcttcagaaggagtgtagaaggtaggcaattcatagaggcttaatgccagattgtgagaaactctttagagtacagacaatgg

SEQ ID NO: 503945 - DNA, 441 bp, Homo sapiens
ctgtccttgtcacatcctgaattctgaacctccaaggctcaacccaaggatcgtccatgttagaagtctttccgggcatcatgcagcagactctaaaggcctgacatgttcttttttttttaattaatttttttttggagacagatcattttattttatttatttatttatttttagcagartctcactctgtcgcccaggctggagtacagtggtgcgatctttgcttactgcgacctctgtctcctgggttcaagtgattctcgtcccttgagtagctgggattacaggcaagcgccacaatgtccggctaattttgttttttggtagagacagagtttcgccatgttggccaggctggtctcgaactcctcttgccttggcctccctaagtgctgggattacaggtgtgagccaccacatccagcccctggcatgttc

SEQ ID NO: 503946 - DNA, 605 bp, Homo sapiens
agtcattatttcctcctccctactctttctacccaataaatacgaagggctgtagaggttcaggtggctgcctttgctcactagaagcagggagccctcttcatctctcttcttcttccacatgttacctttcctttaaaatagttacttttgtcttaagttttcatttctgcatacgtcccccttcattcagtcttgtaatgatggtcttaagtagtaacagtagtaactgtcatagtgatggtctcaagtagtaactgtggcagtcagccacattcaacaactacctacactaaaatatcaccttcataagaactaaaaatcatgtgaacaatcacagtacctggtattaacttcatgtcactgaaagaggcactgaggagggtaggatagacagtcttgaattgctgatgtcacccttcccccatcctcacagtggctgtgtaccatgaagactctgtgcacttggaggagggagagtgcagcaattatgggactttgcattggaactcagtactacccagycacagtggaaagcaacacagggcagaacttagctggtgcccatggagggagcatttaaaccgtcctagccagatgggaac

SEQ ID NO: 503947 - DNA, 537 bp, Homo sapiens
ctggtggtttctgcttcatttcttgatgacccgcagaccaatctgcctggccttaaaagaacacttgggtccctcctatttttgatatccaactctgttggccctaatcagtgagtaaatggatcatctagtattagacraataaatcattagagcaatgcttcagtcctggagtgggatgtgtgtccccagccctttcactgacgcctggagcttataacgaaaagctatgaatgatgggagaatgtgttaccaagtgtaactgcctacagtttctgaatgtgggcagaaaaaaaggttgagctctgttgatctagagagagggatgaaccaggataatttaaaattttttcaaaaagcatttcaagtgttctgctctaaaaatgacctcttgcacgattgctgaaaatgtaatttttaagccagtgcacctgctcacattttttgtgtggccaaatgattgttacctaatgtgatgtggccttgttctaaggcataggcgtctagaaacactcctttcacatgtttttttctgtc

SEQ ID NO: 503948 - DNA, 537 bp, Homo sapiens
ctggtggtttctgcttcatttcttgatgacccgcagaccaatctgcctggccttaaaagaacacttgggtccctcctatttttgatatccaactctgttggccctaatcagtgagtaaatggatcatctagtattagacgaataaatcattagagcaatgctwcagtcctggagtgggatgtgtgtccccagccctttcactgacgcctggagcttataacgaaaagctatgaatgatgggagaatgtgttaccaagtgtaactgcctacagtttctgaatgtgggcagaaaaaaaggttgagctctgttgatctagagagagggatgaaccaggataatttaaaattttttcaaaaagcatttcaagtgttctgctctaaaaatgacctcttgcacgattgctgaaaatgtaatttttaagccagtgcacctgctcacattttttgtgtggccaaatgattgttacctaatgtgatgtggccttgttctaaggcataggcgtctagaaacactcctttcacatgtttttttctgtc

SEQ ID NO: 503949 - DNA, 537 bp, Homo sapiens
ctggtggtttctgcttcatttcttgatgacccgcagaccaatctgcctggccttaaaagaacacttgggtccctcctatttttgatatccaactctgttggccctaatcagtgagtaaatggatcatctagtattagacgaataaatcattagagcaatgcttcagtcctggagtgggatgtgtgtccccagccctttcactgacgcctggagcttataacgaaaagctatgaatgatgggagaatgtgttaccaagtgtaactgcctacagtttctgaatgtgggcagaaaaaaaggttgagctctgttgatctrgagagagggatgaaccaggataatttaaaattttttcaaaaagcatttcaagtgttctgctctaaaaatgacctcttgcacgattgctgaaaatgtaatttttaagccagtgcacctgctcacattttttgtgtggccaaatgattgttacctaatgtgatgtggccttgttctaaggcataggcgtctagaaacactcctttcacatgtttttttctgtc

SEQ ID NO: 503950 - DNA, 537 bp, Homo sapiens
ctggtggtttctgcttcatttcttgatgacccgcagaccaatctgcctggccttaaaagaacacttgggtccctcctatttttgatatccaactctgttggccctaatcagtgagtaaatggatcatctagtattagacgaataaatcattagagcaatgcttcagtcctggagtgggatgtgtgtccccagccctttcactgacgcctggagcttataacgaaaagctatgaatgatgggagaatgtgttaccaagtgtaactgcctacagtttctgaatgtgggcagaaaaaaaggttgagctctgttgatctagagagagggatgaaccaggataatttaaaattttttcaaaaagcatttcaagtgttctgctctaaaaatgacctcttgcacrattgctgaaaatgtaatttttaagccagtgcacctgctcacattttttgtgtggccaaatgattgttacctaatgtgatgtggccttgttctaaggcataggcgtctagaaacactcctttcacatgtttttttctgtc

SEQ ID NO: 503951 - DNA, 552 bp, Homo sapiens
tgtggtgattaggcatactacagttkcctcctggaactgtccacctctactctggggaaaagagtcatcacttgcgggttttctgtgagattcaaacgtgaaaaatttatatcaagcacttagcacgatgcttgtcaagtgacatatcctcactaaatgttgtaggccattgtcattcttatgattgtgttattatgattcttttattactaaaaataatcttaaaaccaagagggctgaaaatacccttttagcacactccgtattcctttggctcattctcagtacccagtactgtgtttggtgtactcttttcttacatataaactgttactgtacacttagatatttagtaagtgagtgacttcacggaagaaaaccaaatccagaagttctcctaacttgttaattagtggagatctttactggttcatcaatttttcaggttcttatgaagaaaacattaatagtagaaattatatacacattattcctctttctgtcagcactgaaaaattctcgttgattcctctttatgaaatgagattccac

SEQ ID NO: 503952 - DNA, 552 bp, Homo sapiens
tgtggtgattaggcatactacagttgcctcctggaactgtccacctctactctgggraaaagagtcatcacttgcgggttttctgtgagattcaaacgtgaaaaatttatatcaagcacttagcacgatgcttgtcaagtgacatatcctcactaaatgttgtaggccattgtcattcttatgattgtgttattatgattcttttattactaaaaataatcttaaaaccaagagggctgaaaatacccttttagcacactccgtattcctttggctcattctcagtacccagtactgtgtttggtgtactcttttcttacatataaactgttactgtacacttagatatttagtaagtgagtgacttcacggaagaaaaccaaatccagaagttctcctaacttgttaattagtggagatctttactggttcatcaatttttcaggttcttatgaagaaaacattaatagtagaaattatatacacattattcctctttctgtcagcactgaaaaattctcgttgattcctctttatgaaatgagattccac

SEQ ID NO: 503953 - DNA, 515 bp, Homo sapiens
tctctggatgtaaaacattattagttagaagagtaaagtcatgctgaaaactgtagacttgcttttcacaatcacatttacctcattcgtttgccctgatacccaaatacaaatgatagttgttatacacattgaaactactgattagctgtaattatttttaagatggacaaatgaaccacacattaaactcttgaacttgccagcaaggggaattaaattactctttaaaactttaaccagaatatcaattataaacaatgccttcttttagaatacctccagaaagacctgcctgaggctgttttacagttaacttctttataagtaggaatacattctaaaagtttagtatagtaaatataatcatttattatcgttatcaagtatcaygcactatgcataattgtatgtgctccacttttatatgactggtagcacagtagttttgtttccaacagaatcactgcattgctcttcgacattaccactgtaataggaatttttcagctgta

SEQ ID NO: 503954 - DNA, 639 bp, Homo sapiens
ccatgacattagcaactacatggtctttgcttgcaaaattggtgaagaaatgatacttggtgactgtgggagctgttggaatcttcartggtaaccctgggtctagagaagagcacggctggggagggacgggggctcaagccacagtggtgatggctgaggcttgcagtaggggccagggctggctttagtcatgattgtgcagtgatgaggcccagataaatgaataattatgactatttcttctcatttcctccctctgttttcttacactccatcttcctgaacttctctttctcttcttcttcctcctggttctcattatcctctttctgctaatcctctaccaaactccctttactttatatgcagggggtgatttttctttgaattaccacaatcttaaagttatgcaggctgcctcttgaaaagtcattctattctggcaccttatgggtcgatgtccctgcaaaaagtttataaaatcttcaaaaccaggtatcaagacacacgcccattggcatattcaacatgttgggtagtttttgctgcaaggaattatccttcctaatattagcaggataatgcataagattaggagaattctatttagaatgtagacaactgaggaattcactt

SEQ ID NO: 503955 - DNA, 639 bp, Homo sapiens
ccatgacattagcaactacatggtctttgcttgcaaaattggtgaagaaatgatacttggtgactgtgggagctgttggaatcttcagtggtaaccctgggtctagagaagagcacgsctggggagggacgggggctcaagccacagtggtgatggctgaggcttgcagtaggggccagggctggctttagtcatgattgtgcagtgatgaggcccagataaatgaataattatgactatttcttctcatttcctccctctgttttcttacactccatcttcctgaacttctctttctcttcttcttcctcctggttctcattatcctctttctgctaatcctctaccaaactccctttactttatatgcagggggtgatttttctttgaattaccacaatcttaaagttatgcaggctgcctcttgaaaagtcattctattctggcaccttatgggtcgatgtccctgcaaaaagtttataaaatcttcaaaaccaggtatcaagacacacgcccattggcatattcaacatgttgggtagtttttgctgcaaggaattatccttcctaatattagcaggataatgcataagattaggagaattctatttagaatgtagacaactgaggaattcactt

SEQ ID NO: 503956 - DNA, 554 bp, Homo sapiens
tgtgagcaaaagtctctaacttaaagtggctctaaaaaataaaaaagaggaaatgtattactacacaacagaggtagggctgttccagacatggcacaccagggttctggcaccacttctctgaaattcacttgactcttacatccttcatgtgttatgtcatcaggctccctcccctccatgattccaggatatttgcaaagttctatatgtcacattcaagcaaataatgtctaaagacacaaatgggacttctttgctgcatttatattttcgggagtaaggaaagctttcccaaaagctgtctagaaatcttccctgcaaatgtcattgagcagaattgtgttacaaatccatgcccaaaccaataactgaaagggagagakgaattatcatgactgatttggaccaattagaatgtaatgagcccattccctaaagcccactccctaaaggtcatgtgaaaagtggtagatctcagtttgctgagggggtcggagctctgggcaagaatctcgagagcttgtcagaagaagatggcagtggagtcatgc

SEQ ID NO: 503957 - DNA, 475 bp, Homo sapiens
tgtctggccctatgtagcattggggagacastagacttaacccagcgaagttttcttctgtttgctcttgctgtgcccaagtttcctctggacttgtcttccagcgtcggggtgggggctgggggaagtaggcaacctagctctgcctggttgctccctggaagccaagtcgaagtgaacaagtcagtcccaggcccggaaatagaatacaaaccctctttttgtccggtgctaacagagtccagcagtcagaactccctcgcgtctcacgctggacctgacccggggcgccgccaagtgcgcaacgcacagtcacagttggtgactaattaaggactgccgcccctctccttcacctgctacaaactcagagccctgacttctccagaagtacctaccacttggaggtggctctccttccccgccccctgccccagtcccacaccgcagcagcgcctcagcaccgcgacttgcc

SEQ ID NO: 503958 - DNA, 601 bp, Homo sapiens
ctgctggagaactgcttggtgtgtggagaaatacccccacatatctggtgtcagaggtattgagtgactgtgtcagacagtaggaaaaacactttttcctctgtcttttcagacttaggttcaaactagacattgaacacattaacttcccctactcatttgttccctcacctgagttcccatctactgctagcactaccttgctctttccctaggacttgatgtcatccttggctcttttctctgcattttcccttacttaatccttttaggtcaaaaatatacatctttgacatttttgtatccctggcagttgctctgatgccgggcacaaagtgaacacatcctaagcctttgcctaatatattgatgagtcctgttggtttcaccyttgggcagttcctctccactctgttcctactatcacccccagaggcagctcaggcctttgttaccactagactgtggctctagcctcacctgcctggtgtccctgtctgcctagtctatcctttcccatacagtggacacatgctgcaaggttattctttatgtggccctcctgttactatttgctacaaaacaaagctcatacttctta

SEQ ID NO: 503959 - DNA, 542 bp, Homo sapiens
cgggagggcaccaaagccattcatgagggatttgccccatgacccaaatatttcctaccaggccccacctccaacattagggatcacattttaacatgagatttggaggggacaaaaatccaaacaaaggccaggcatggtggctcaagcctgtaatcccagcactttgggaggccaaggcaggattgcttgagcccaggagtttgagaccagcctgggcaaaataggaagaccctgtctctacaagaaaatttaaataaaaawtttaaaaaatccaaactatattagaggggtagaaagaaaaccaggataagtggtgtcacttcatgagagcaaaagggaagacagagttgaaagaaagatggtttggtcactggggtcaaatgttactacgagatcaaatataacaaggaatgacaaatagccactgcacttatactgaacttttgttggagggcttcattggaaggggaggaaaattttttaaatcctttctcttatagtgcctaaatcacacatatccatctatcaatcaatgcaag

SEQ ID NO: 503960 - DNA, 542 bp, Homo sapiens
cgggagggcaccaaagccattcatgagggatttgccccatgacccaaatatttcctaccaggccccacctccaacattagggatcacattttaacatgagatttggaggggacaaaaatccaaacaaaggccaggcatggtggctcaagcctgtaatcccagcactttgggaggccaaggcaggattgcttgagcccaggagtttgagaccagcctgggcaaaataggaagaccctgtctctacaagaaaatttaaataaaaattttaaaaaatccaaactatattagaggggtagaaagaaaaccaggataagtggtgtcacttcatgagagcaaaagggaagacagagttgaaagaaagatggtttggtcactggggtcaaatgttactacgagatcaaatataacaaggaatgacaaatagccactgcacttatactgaacttttgttggagggcttcattggaaggggaggaaaatttttwaaatcctttctcttatagtgcctaaatcacacatatccatctatcaatcaatgcaag

SEQ ID NO: 503961 - DNA, 501 bp, Homo sapiens
aagtcaatggcatgataaaaagggggaagtcactattctagataaatacttaaataatacaccatgttgagtggtatcctggtctctaaaaatgtctacaatttgttttatttttattttatttatttattttattttttttattattttgagagatggagtcttgctctgtcacctaggctggagtacagtggctcgatcctggctcactgcaacctccacctcctgggttcaagtgattctcctgcctcaagctccaaagtagctaggagtacaggcgcacgccaccacgcctggctaatttttatacttttagcagagacagggtttcgccrttgttggccgggctggtctcaaactcctgacctcaagtgatccacccgccctggcctcccaaagtgctgggattacaggtgtgagccaccacaaccagctgaatttgtttaaaatactgcaggaaaaaaaataagggaatcaaatttaataaccaccactaagcct

SEQ ID NO: 503962 - DNA, 612 bp, Homo sapiens
ctgggactctgtccatcgacattgttctgttttagcctcacaagcaaacaagagaataagcaggcatgccagcttgccctttagtcatatccctatacacacagtgcattccaatcctagttgctattgatagatggtgtgaagtatcatcatatttctgtgaggcatgaaaaggggtagccagtagaaaatatttggggaggaagctgaggaattagagttctttattatcacttgcacctccttgagtcttattcctaatactaagatttcactttctggtactcagtgtaaaaactctagtattagaaaaaatgtggcaaaaaaatgctgcaattaaacacgcctctcgaataatttgatctggtcaaacattctcagaccataggctacaggcagaaatggcttccaataattgtcaaatttgcagagtttgctccaatctgctttgtttctggaaaacttgtttagaatgcctctcttttccaatgtgcttttcaaaactcatatatagtaaccaatatacttgacatttaaaaatatttggctaccaaattctgtaatgcaacactcaatgacygagttctaaaacactgttggagaaagtctgga

SEQ ID NO: 503963 - DNA, 481 bp, Homo sapiens
tgaccaaggctgagtcctcagttatggtgaaggtgcttctgatcaactgacagtgggtattccaaacatttayttcccttactgtcaaaaccaccaactcttcttacactcagcaaatgatgattctgtccttttcattgtgaaaaggcaagggcagaaagtgaaaacggcaccttcctctccctcttacttattcgcttatttattggcatttttacttctccttcctgttggaaaaggtgcccatctaactcgaggctcatttctcaacctgtagattggattccatcctcttctgtgtactcaatgactttattatatcaatcatcgccctctttcctgttttacttcagaaaataaacagaacagtggtttgtcttattgaaaatgaaagcaaaagtaaaattaccttggcagttttgggtctctaattataagccaaagaaacaaattgagaacaacttatggaaaaaatgatatt

SEQ ID NO: 503964 - DNA, 509 bp, Homo sapiens
tcttggagaaaaatcacacagccataccaattgatgtcactgtatgttgttgctttctgaccaaggctgagtcctcagttatggtgaaggtgcttctgatcaactgacagtgggtattccaaacatttacttcccttactgtcaaaaccaccaactcttcttacactcagcaaatgatgattctgtccttttcattgtgaaaaggcaagggcagaaagtgaaaacggcaccttcctctccctcttacttattcgcttatttattggcatttktacttctccttcctgttggaaaaggtgcccatctaactcgaggctcatttctcaacctgtagattggattccatcctcttctgtgtactcaatgactttattatatcaatcatcgccctctttcctgttttacttcagaaaataaacagaacagtggtttgtcttattgaaaatgaaagcaaaagtaaaattaccttggcagttttgggtctctaattataagccaaagaaacaaat

SEQ ID NO: 503965 - DNA, 627 bp, Homo sapiens
accctaatcttaggtcaatataaaaaaaaaaaaccaccttcactgctcttacatctaagttgctaagaaacaaaactgaaaaaaaaattaaaaatcataaaattggagtatttcaagtttatagtcttaggttggcccttagcatcacttagcaattacttccaagtcttkggttagatatcacttctgtttttcataccattccaaaatgtttactacctttttcaagccctctaaacttatctccctttctctagcaaatacagttaaattaaagtttactaagaaaattgagaataccaaatgtgatattcctcagcctcttaaccacagacctaaaaatgaacatatctggggaaaaaaaaaaaggcgtccttttcccctgttcaaagctaatctctctaccaataattttgtattcaagccttctggtcaccttaagggcacaaacacgtctaccagtatttcagtcctgctcctgtatttttaatctctccctctctaggactgccttatagtccataatgaggcaaaagtatcacccatcacgtaaaatgttgtctttcacatatttagaatcctcattttaagaaggcagaggcattctgggcaatttggcaatgaaag

SEQ ID NO: 503966 - DNA, 635 bp, Homo sapiens
actgcattaacaaagtgatgtatattcatacaatagagtattattcagctataaaaaggaatgaagtactgatgtgtatgctacaacgtggatgaaccttgaaaacatgctaaatgaaaaaagcaagacacagaaggccacatattgaatgatttcatttatataaaatgtccaggatgggataaagacagaaaatagattagttgttgccagggagcaggagaagtgactgttattgggtacaaggtttcttttgggggtgatgaaaatgtttgggaatcagatagtacagttgcacaactttgggaatatatttaaaaaccactgaactctacactttaaaagggtgaattttatggtacaattataactaamttaaaaaattaaagaacaaaagaataatagaggaataaaaaagcagcacaactaaggaatgaagcagatgttgcttttctgacccaacatttctgtacacttactatgtttcagacccatgctggttgataggaacccaaagatgagtaaaacaaagttgctatattttcttcaaggtccttctccttagcctacaaatgtcttatttctcaagagtgtggcagctttgaaaatgcaaaaacagcaagtataaaccacag

SEQ ID NO: 503967 - DNA, 558 bp, Homo sapiens
tcattagtcattagtggccagacaatggatctttaagttaaaaagactcytatgtgggaaaaatatatatattacagatgtctctttctaaacaattaccttatttttatttatggaaagaaagatcacaattagataacagatacaaaacataaagagcataaatctgacccagaacaaatagtttatatcctttgaaagctcaaacttcctgttttgtgattttctgtgggatttgcaagaaaggcactgcactctgtagcctcatggctaggattgggcactttcaccactgcaacccaggtttgattccaggtcatgaaatcagttccttggaaatgtaaatcctttgactcaggaaaaagaaaaacattcatacaaattagtttacattgttttcaatttatatttgcatgactcttgacctttggggatatccatttgtttataatcctttcttctcccatagacaggtttttaatttcctgttgtcaaactatttgtctcctttaattttctgtccatgcagcacatgggttgtcaggcctttgtgtacag

SEQ ID NO: 503968 - DNA, 538 bp, Homo sapiens
ggttttctggcatataaactaagaagctcgaaactcagatgagaaaagtagcacaagcagttaaaacaaaacaaaacaaaacaaacaaacaaacaaamaaaaacgcactttattgtccagaggagctcagccagggagaagactacagggaaggtgaagggacagatcttgagaccagcccacagatgcagtctccacaccctccagtcactgtgggacgcaggtataatgagccgcttgctgaaagcagagagggtggggagagagtcagctcatagtctccccagtccccacctgccaggatggagctgagtaaaacagggtgacctgaagcttattaagataatactaaaggaggccaagttcaaccacatattctcatccaatatcctgaactgactactcccatgtttagagtttggcgggactcagaacatgctgtgccaagcttttgtctctgcaattgctaaacccatgtttatttgaaggtagaattaatccatgtatttctgattgcccattagaactcatcaaaacg

SEQ ID NO: 503969 - DNA, 496 bp, Homo sapiens
acaaacaaacaaacaaaaacgcactttattgtccagaggagctcagccagggagaagactacagggaaggtgaagggacagatcttgagaccagcccacagatgcagtctccacaccctccagtcactgtgggacgcakgtataatgagccgcttgctgaaagcagagagggtggggagagagtcagctcatagtctccccagtccccacctgccaggatggagctgagtaaaacagggtgacctgaagcttattaagataatactaaaggaggccaagttcaaccacatattctcatccaatatcctgaactgactactcccatgtttagagtttggcgggactcagaacatgctgtgccaagcttttgtctctgcaattgctaaacccatgtttatttgaaggtagaattaatccatgtatttctgattgcccattagaactcatcaaaacgaagccctgcaaaaagcctgtttgatgttcaaaaaaataatct

SEQ ID NO: 503970 - DNA, 580 bp, Homo sapiens
ctgactatgttaatggaagtgtctggtgtatgcaccatttaccaaagcgataagaaatgcactggtaagaagttcaatggtgtctttcctctgtaggtgagggctgatgtataaaatgctactgtaaaaccaagcttcctgatgggaatggaaatgaaaggatccagaactaatggagaccaggtagcagcacttggtcatcagaagcaaggtgagcacatttatcatgagcatcacagtcagagaggtagccaggatgtgtggatgcacagagaggcatagatgcgtttaatagaggaccactttgctaagggaaagatagatgggcagtgaacaaatatattgcttaatccatataatcaaaagatatcaaggaggctgagagaatatgccctaatggaaaagttaaaaccccactcaaattttgttcaagtctggccttcaacagattagatgagacccacscacataggagagggcaatctattttactcagtctactgatttaaacgttaatctcatcccaaacagcttcactgacatacccagaattatgtttaatgagatatctgggcaccct

SEQ ID NO: 503971 - DNA, 494 bp, Homo sapiens
attttccaaatcaccctgtgatgtatccttcttcagattaggaatctgctttaattttctacagccttagctttgattgaaaaaataaggttagagaaagggataaattagattcttttatgttgttgttgctgttttcatgagaatatttttstcttttatctaggagtatggtctctaggacccttggcatactctcattttccagttcaaggaacatcaactcatagctccattaaaaaaaaaaatacaggcactgaaattggccacggtagggaaattacacagcctaaagaccatctttagatgtaggaggttttctatgaaagaaatgtatctactggtgatttataaacaaataaggcaaaagggtgctaatctggaaattctgctctgtcaccaataattgttcatggctattcagtccactggcattgccaatcttgtgtaggtagaaatttcccacgatgtcaaagacctgtcagtggcaccac

SEQ ID NO: 503972 - DNA, 598 bp, Homo sapiens
tggcctcttattaccttattgtaccactgttttctcaatttttgtctttggccatatatctgttatagtgatgttgaatcttcctcaccccatcggattctccatgatgcagtatgtcctctgtcctctgggacttccaaacaactccagatatagactagtcagagtagtctggctgttatgacctctcctgctttgcatcttacgttagattcatctcccagttcaagatcctgctgaagtaaaggaaaattttctacccttggccatggtacaccattacatgggccccaaagctgatgctttcaatatcacatagcggttttaggaaaaattgcatatttgcttctgctcttgccctttcttcttcagaggcttcattatgcaggactctggcacaaacctaaagtgaaagaaagaraagtagagaacaacatacacccagctgtgctcacaaaagtcatcccctctcacacccctgcccttgaaccgtacttgtgtgaatcacatttttctttccttaggacgtgttatttttcatgaaattcttcatttcctcatgcaaacattgtctttgaggccctacccaccttgctca

SEQ ID NO: 503973 - DNA, 562 bp, Homo sapiens
gtgctcacaaaagtcatcccctctcacacccctgcccttgaaccgtacttgtgtgaatcacatttttctttccttaggacgtgttatttttcatgaaattcttcatttcctcatgcaaacattgtctttgaggccctacccaccttgctcagayaggtgtggatttgtatggtacataactcaagttcctaagttgagtacatttccttctacaacaatgaaagaatgcatttaacttaaagatgtttctgatttctaccagagttcaagacacagagaggctttttgtcaagtaattaatttattttgattcatagttattcataaaacttgaagtcaatatggtatcatttgtagtacaaatgacggaaaactttagacactgatgtgctaataaatgatcagcaaccaccactctggagggcaaaaaccttgatttatagcaattattgacttctgctccataaatgccagtgttgatttcttgccatcaacgtaacatcagtgaaagtcgaattgggaagagatgatcagtagaacaccactatagagtatttccacc

SEQ ID NO: 503974 - DNA, 562 bp, Homo sapiens
gtgctcacaaaagtcatcccctctcacacccctgcccttgaaccgtacttgtgtgaatcacatttttctttccttaggacgtgttatttttcatgaaattcttcatttcctcatgcaaacattgtctttgaggccctacccaccttgctcagacaggtgtggatttgtatggtacataactcaagttcctaagttgagtacatttccttctrcaacaatgaaagaatgcatttaacttaaagatgtttctgatttctaccagagttcaagacacagagaggctttttgtcaagtaattaatttattttgattcatagttattcataaaacttgaagtcaatatggtatcatttgtagtacaaatgacggaaaactttagacactgatgtgctaataaatgatcagcaaccaccactctggagggcaaaaaccttgatttatagcaattattgacttctgctccataaatgccagtgttgatttcttgccatcaacgtaacatcagtgaaagtcgaattgggaagagatgatcagtagaacaccactatagagtatttccacc

SEQ ID NO: 503975 - DNA, 648 bp, Homo sapiens
tcaggtgtaaaggttctctttcagccttcctgcccttcctttctctctccacactctgtaataatcaggacacatcagcatttaatggaagccccagtacctcaggggaaatgggaacasagagctgaatcacaggcactttctatgttggctgagagctttcattaggcccaggctttggaattgctgctagactgcggcactgtccgctccattaaaccctctgtcatcattttcccttttaaattcatgtgcgcatcagatgaggtgttctcccctgctgtgtgcattacagtgtgtagcaaaggtgttcaattagctaaatgggaaagttcttgttttagcccgaaaggccacagctctgaaagcccacagcacactgggcctcatctagcccccagaatagccccatggcctctatctggctagcccttcactgcagatgttatagggtcaaacttggggctcccataaacgtcagacttaccccaccctacgtctccagccatgatgcgatgtccaggcttaaaaatacatatattcccaaggttgtccaaattaccaaaacatccctacttcctttggctggcaggagaggcaatagctatctaattgaagaaggaagcagggaaggattcctgattcctc

SEQ ID NO: 503976 - DNA, 490 bp, Homo sapiens
gttctgctcattgaaagtttagaagctaagaagactgggctggtgtaagaaatagatcctgctcctaatttaacattaacaggaaatataagtcggcacattattgcatttgtgtctgagaagagggattcttttttttttttttctaacagagtgatatttcctgttwacttagaaaaggacacccagtaattctcactgtatagcagagcctttcaaagaaaaccatgtggcaccaaacagggctggttggggctctttggggcaagacaattaaggtgaccgctgacaagaaaaataaaagctctgcaattagcagcaaaaatctgagtgtgctgcataagcaagatttctgtcagaaagcccaattaaacctctgaaaagtgtgaggaaaaagaactgtaacagtatctgtgactgtggcatgtggttcagaatgtttgaaaatcagagatccgagagagagcttctgcctccatttaccactccc

SEQ ID NO: 503977 - DNA, 650 bp, Homo sapiens
tcccaatagttatatgatattccattgtaaggctataccatagtttatttaactatctcccctccatgtgcccccctccacctactacttggccttttttttcctttttctccttcttttttttttttttctttttacaaattgagaaggagatgaaaaatctctgctggtattagcaacaggaaccatccagctgcatctggttaaatctggtggagtcacagatgcatgacaacctgagtttccagccaaggattaatgtttcrtgcagattacatagtatttatatgtttaaacctgtgacatgttgaggggataaaatttatatctgtaggaacaaaatcagaaattatctgatcattgtcctcttcctaagcttgttgggcccttgaaaaaatggattttgggcccctttttaaagaaaattttagttggccaggtgccttgtgagtaaagaagaccatagacaaatcaatacaggtgatttacttcttagcttaaaaattgatctcacatatgatacttaatgttttcgtttagaaccttgggtttgtgtcttgtacctaaaatctgcattcctaccaaaaactatttcattaataatatcacataaccgacagtcaaatacagatcagtaggccaggtgcagt

SEQ ID NO: 503978 - DNA, 538 bp, Homo sapiens
cctggaagactcagacccaagtaaccttaaatatgagcctttgttacaagaaggcttttataggcaaaaaaaaggggacagraagtagctattacaaacttgcttgacagggattctcattggtttacaaaaataacattgattagtgattgcctgtacatttttctttgtatcacaaattccagaaacatgaagacagtagtgacagtcacatggtgcaacttgcagtgacattttagataatttatcagctagtttggaaactaccaggaggaaagaaagaataaagtgcctttaaacaattgtccctaaacgtgggtgcagggatggggggcaaatgactgaagtctcatgctcgcatctttctgggcctgataaattttgcatatctgacattcctcagaatgctctgagctatttttctttctcacccacgactaaaatgttaccggtcatgttttttcaacttcacttgtaagatagctctaacaaaaatgtccatatgccaacaaatttccccctaaaataactctaacca

SEQ ID NO: 503979 - DNA, 481 bp, Homo sapiens
caacacggtcttttaatcactacagcatcattttcagatgttacagaagttacagtatgactatagcattccacaaaatcctcacactccccttgctctcagtctatactctgcctttccagaagaggttgccttggatacaagtattgtcatgcctgtaaattttatcccctgtggcaagttagcaaattggcatccaggtttaataaatctgtctgttattaatgaataaatctagtctttctagcaagactcatacccacaatgcttgataacctctgagaaaatgggtaaaaccagttggtggactctcaaagtggacaattgcaccctacacccgtgtgacccaggggagcacagggaccccatgaactactcccccatgggaatgagtagtatccctctcycttgagactctgggactgcagttagtgaggttgggttctgaaaagatgctttcacatccccaattatgactacc

SEQ ID NO: 503980 - DNA, 647 bp, Homo sapiens
gcttcctagggttccatttttcctgcgtcacgagtgtccttctgggcataggtcaacgtttttctgcttgcattaaactgggagaaaatcagagagaacatgtaggagatgcctttcctaattgttcttgatcacttttctctcgatacgatttacatttggggctggtcattctttgttttgatgggagcagyggcaggggctgtcctgagcattgtaggatgctgagcaatatccctggtctctagccactagatgccagtagcaccctcccagttgtcacaattaaaaaatgcctccagacatcgtcaaatgtccctggcaggcaaaattgctccccccaccccaccctacccctgcctttgagaacgacagtgatagaggaactcatttattttactttacaaatggaccagtaaatatgcagactaacaattttataattaagtaatctgtgaccattgtattaatcatataattaaatattagaacatggagtttctgcgatatcactttctagataaaactgtgtcacttgaccagaatcaaacttagtcaatgtttgtttttctcccagaaagttttctccggacatgttttctcctgcttcctgttcaaaaccattgtttactgcctgtaagaaacag

SEQ ID NO: 503981 - DNA, 537 bp, Homo sapiens
ctttagcatccagttatgtgctccacagtaggatacgctggggtgtcctttctggagtcctggtgtgaaccggggagaaggtctcccgctgtaggatggtgtcatctgtcaaagaaaaccacagcttgatagtacaccttgaaaggattaaaatggtcagtgtgcattatctatgttttaccaccatagaaaatatagttggtcaatattatgttatgtatttcagaacataattgcagcaataattakgcatccaatataccttatgttttaaatcaatgggaagaattaaatgaaatttcaccaaatttgagaacgatttggtgaaacactgttgtgaacagttattttagtacaatttgataagaaaagaaaattcacagtagaaactaatttttttcgcagaaccacaacttctgagttcgtcttctgatgcaggaatattacaattgagaggaaaacagagatatagaaattaccaagaaaaatccagagctagccattatatcaggaacgaagaagccagtcactgtgctc

SEQ ID NO: 503982 - DNA, 653 bp, Homo sapiens
gttaaatttttaaaagcaaaatttaaagccatatctatcagataattgcaattttatttgaaaatatttatcatacagaaaatgactatagaagtgaaaatagtaattataacttggtaactgtacttgtggattattttattttcttctatgtgtcttcctgtatttatttattcatttttttgagatggagttttgcttttgttgcccaggctggagtgcaatggcacaatctcggctcactgcaacctccgcctcctgggttcaagcgattctcctgcctcagcctcccaagtagctgggactacaggcatgcgccaccatgcctggctaattttgtattttttagtacaaaaktagacagagtttctccatgttggtcagcatagtctcgaactcccgacctcaggtgattgctcgcctcagcctcccaaagtgctgggattacaggcgtgagctaccgcgcccagctgtcttcctgtatttattatcctgtagtgctctccaaacaagcatgctttattttaaaaagtaaaataacaaatgctacatttaaaaaatacatctgattatcttttgtggtttttaaatacatgtaaagtactcaaccaagattaaaaagtgtgaggtgttggggctcagaaaccaataca

SEQ ID NO: 503983 - DNA, 600 bp, Homo sapiens
tagctgttcctctagaaatgaagatggattcacagatacgattacacrtaggtgaagttctggaacaggtaaaactaattgatggtgacagaaatcgcaacagtggtttccttcttggtagaactcattggaaaggggcacgagggaactttctggggtgttgaaacgttgtttaacttaatttgggtggtggtttacatatgtgtatacaattgtcaaacccccttgaatcacaaagatctctacatttcataatatttaaattatacttcaattaaattagtggacagtgctgagatgagcacgataaagcccatttctttccaaacacacttgttccctgttacatattaatttatgcctgacccaatgcccagtgagctccccttcacaatggcaccgatgtagagggatgacaaattctcaggttggtttagattacaacagtgggcagaataaatgttatttctccaaaaaaagtgatgggcttggaccttgcctcaagttatggacctcaatctttcacagacctcaatctctcagaaatccaaggcccagatgaatcacggcatttttcctaaggccacacagtcaaccagt

SEQ ID NO: 503984 - DNA, 436 bp, Homo sapiens
gctgttttaaacatctaatgtgcagaaaaacgaattccaccatgaccgtcgtttcacagactgccaacagcttccctcgggttctttttcctgtaaaagctgcmcctctttattacaaaatcacagcgtctgcttataaggtctgcgttttattttcattaatcctgaaagcaaaaaaaaaaaaaaaaaagtcatcctttccttttgaactttaaaactattctgaccagtgtagaaaatacttctgcgtagatggtattaatctcttcatcataaaacaacatgaaatgaaatgcattttgaaatgcaaaaaaccagtttcacaagaaacaaatgaaatactcatgctaatctatttcatgttaatttggaggatgacaataactgggggtgtgtggtgtgtgtgtgtgtgtctgagagagagatcttttaataa

SEQ ID NO: 503985 - DNA, 564 bp, Homo sapiens
acatcagtttggaaattgtttttctttatgcctacacaggttttcacatcaacagcaggtgtggatggtacctcaacagcaccatgaggttactgaaactggtcataatttggttagctagaattcagaaaaaaattaaaacttgcaaattttcaaaacggaaagaaattcctatgtaaatgcttataatgcttgctgaatcattttctctgttagttaggaacttgcattcacaggaaataaatggttgaagaagtatggataatttgctttgggtatgaaattcccaaagcatcatatgtatgtttctctacaacttgtcgtggaatgaaacaggtctccagccaattacaaagtcccagaaattccaaatgcatgggcttgtctccgatggttccagagcttggtgggattttctggagtctttagggtttgtgcacatgtgggtgcagcaacacagacttcactggacaccatgcttagggtagtcrgcaaggatcttcaaggatctgcgatgttaacttctcagaattgtggaagagctgatactgggcatgtgttact

SEQ ID NO: 503986 - DNA, 614 bp, Homo sapiens
gctcaaactggaaccctgggacctactgagtggcctccccttctctctagtgaagtcgtgatgctctgcctccttgggattttgcagttctccattgcccctccacgctgagtggcttccttacctggggttactcgcggctctgctgttcctgattgctcatggtcaggccttctgccaaaccttcagatgctggaactttaaggaaaccaagaagcctggtctaaatgacagggatctgtargctcttcagacggttagaagccccctgaaggcagacatgaggtggtacccctctgtttgttcatcttttaattccccacccaagcagtgtatgttacatgtggcaggaagccaaaatcagttgttgtgaggttgcatgttaatgttctaccagatcacactggtagtgggttgggccataggcagacaagcatcctttaccacacacagaggggctgtccacacaagggagaaatcagaactgcctcattcccctcctggctgtgaaaatcatgtccggctctggagacatctggtgtgaacctagagacctaagaccagacatctcggtcatcctggatggccctggtaagaggtgccttgtgtctact

SEQ ID NO: 503987 - DNA, 632 bp, Homo sapiens
tcagcagtgtatcttagagtccaaattctaaagcttacttctttgcaccctcttgaactcagacctatagcacacctcagacctcacatctttccactagactagaccatcctgtaygctatttctgctcactatgtgtattagtttgctagggctgccatgacaaagtaccacagattgcctggcttgaacaagagcaacttactttctcatagttttggaggttagaatttgagatcaaagtgtctacagggttggtttcttctgagacctttttccttggcttgtagatggctgtctcctcactgtatcttcacatgatcttccctatatttttgtctgtgcccaacttctccttcttataaagatgccagtaacataattgggcccacattaataacttcattttaacttaatcactatttaaagaccttatattcaaatgcagtaatattttgtgttactgggagttaaatcttcagtataaatttggggaaaacacaattaagcctgcaacagagcaattacagtctacatcaggtagtgagctgtttactttctatataagtcatggttctccagagaggcagaaccaatgaggaggggtagaaagagaaagagagagatgtgag

SEQ ID NO: 503988 - DNA, 594 bp, Homo sapiens
ttttttaataatcccattaacctagataaaaatgccaggagagaaatgcttattgatgaggcatgatggaagactggcagtaatgactgctgcttttaaaacagaaattgccagccaggcgcagtggctcaggcctgtaatcccaggtctttgggaggctgaggcgggtggatcacgaggtcaagagatcaagacaatcctggacaacatagtgaaaccccgtctctactaaaaagacaaaaattatctgggcgtggtggtgcacgcctgtagtcccagctactcgggagactgaggcaagagaatggcgtgaacccaggaggtggagcttgcagtgagccaagattgcgccactgcactccagcctgggcaacagagtgagaatccgtctcaaaacacacacacacacacacacacacacacacacacacacacacacacagaaattgccaatactatggaactacttgagaaagatattagtgaaaaattaatcttagaagaaataatatatatgaaatttttaaaatacagcatataattagaataagggarccacactgtcctataaggttaaaggttaagaaaaaagag

SEQ ID NO: 503989 - DNA, 646 bp, Homo sapiens
ccgcctttccttcctactgctcccaccctacatctatctcgtttctgtgaaattcagatagaaaactcaaaagtggttacagaagacatgaacagatggctcccaggaaaggacctgaaaatggtttacgcaaatgaaaacatgctcagcctttctcaagaaacgcaagtcagacttccaagccatcagctcagcaaagatcaaaatgtttgataaagccagtgttgtaagagcctaaggaaacatactcgtgctctccaatgggactgtacatcaatggcaccacttacgaggacaacttgttaagacgtctcaagccacacaggacaactagggagagtttaatgtcagaggcaaagaacatgaacaggcaaccgagcccagacaaaaggcaagggtaggggtgaggaggtgagacagaaaattcagagaaactacagaaagaatgcccaggtttsaggcaagacggaagcggtcaatagaaaaatactgtacaaacaacttctcgttctaaacacacataatgcagctggtgttctttatttaatggttgtaaagggcttccacaagacccacagcctgcatccctgtttttctctccactttcttgagtgggaaaaggcggtggaaaaggaaattcaagaaa

SEQ ID NO: 503990 - DNA, 515 bp, Homo sapiens
cagctactgtgctaaacatcttacataygacatctccaacccttctcaacaacctacaaggcagttactattaatatcccccgttttacaggtgagaaaacaggctgagagaagttggaagaaacacaggagcagggatcccacattagacagtctgattccagagatcaggaccttggctgcaacactatatgggctctgggaaatccaaggttagtaaaacatggtccctactctcatgaactcatgatttagaggaggtagaattgtaaaataagcataatgaaaaataaatgttatcctaaaggaatgtgcccttaatacagcatgtgaggcaggatctgcctacctggctgggagggatgaaaatcagggagatgactggtgatcaggggaaactgactttccaagctgagacacaaacttcagttcctctcattctttctctaataaagacataacagacaataacttaggctttaacagactcacatcctttgtagcacaagtgaacc

SEQ ID NO: 503991 - DNA, 515 bp, Homo sapiens
cagctactgtgctaaacatcttacatacgacatctccaacccttctcaacaacctacaaggcagttactattaatatcccccgttttayaggtgagaaaacaggctgagagaagttggaagaaacacaggagcagggatcccacattagacagtctgattccagagatcaggaccttggctgcaacactatatgggctctgggaaatccaaggttagtaaaacatggtccctactctcatgaactcatgatttagaggaggtagaattgtaaaataagcataatgaaaaataaatgttatcctaaaggaatgtgcccttaatacagcatgtgaggcaggatctgcctacctggctgggagggatgaaaatcagggagatgactggtgatcaggggaaactgactttccaagctgagacacaaacttcagttcctctcattctttctctaataaagacataacagacaataacttaggctttaacagactcacatcctttgtagcacaagtgaacc

SEQ ID NO: 503992 - DNA, 515 bp, Homo sapiens
cagctactgtgctaaacatcttacatacgacatctccaacccttctcaacaacctacaaggcagttactattaatatcccccgttttacaggtgagaaaacaggctgagagaagttggaagaaacacaggagcagggatcccacattagacagtctgaytccagagatcaggaccttggctgcaacactatatgggctctgggaaatccaaggttagtaaaacatggtccctactctcatgaactcatgatttagaggaggtagaattgtaaaataagcataatgaaaaataaatgttatcctaaaggaatgtgcccttaatacagcatgtgaggcaggatctgcctacctggctgggagggatgaaaatcagggagatgactggtgatcaggggaaactgactttccaagctgagacacaaacttcagttcctctcattctttctctaataaagacataacagacaataacttaggctttaacagactcacatcctttgtagcacaagtgaacc

SEQ ID NO: 503993 - DNA, 516 bp, Homo sapiens
agtgctgttaagattcctgtggccytattgatgaatgaaagcagctttgtcttaccaagggactttgccaaatgtagcatgttactgggccgctggaaaagaggctttcagccatccagtgtttcaattcaggagccctctaccatttctcaatccttgtgtgtccaccccctgccaacatctttcttcctcaacttctgctggtgggctgtcctcctggtattcagaacactgatcattctttactttttgtcttggggcagtttgattctagaatgtgccaaaagaaaatgagctcaatggaaaatgagaacagatggtgtatttgcaggcagaggaagtataggcccaggttctgctcccttcttgctatgagaaagttgcttgagctgcttaagatgcagcttccttttctgtaaaaggggagtaattttaatcacaccagtatttagggttgcctggagaatcaaaaagaacttttttttttttttctgagacagggtcttgttgtcaccc

SEQ ID NO: 503994 - DNA, 516 bp, Homo sapiens
agtgctgttaagattcctgtggccttattgatgaatgaaagcagctttgtcttaccaagggactttgccaaatgtagcatgttactgggccgctggaaaagaggctttcagccatccagtgtttcaattcaggagccctctaccatttctcaatcmttgtgtgtccaccccctgccaacatctttcttcctcaacttctgctggtgggctgtcctcctggtattcagaacactgatcattctttactttttgtcttggggcagtttgattctagaatgtgccaaaagaaaatgagctcaatggaaaatgagaacagatggtgtatttgcaggcagaggaagtataggcccaggttctgctcccttcttgctatgagaaagttgcttgagctgcttaagatgcagcttccttttctgtaaaaggggagtaattttaatcacaccagtatttagggttgcctggagaatcaaaaagaacttttttttttttttctgagacagggtcttgttgtcaccc

SEQ ID NO: 503995 - DNA, 562 bp, Homo sapiens
aggtgggaggtaggcccacacccctctgcctttctgcccccttggacagtgtttctcagtcctgcaccctctgtcttttcaccatcagatgtcagagtctggcccggcatcatctctgcagtggcaagactgcaggacttggatggctccgtgtgcatggctgcaatcatctctgtctctctcttttgctccctctagctctacgttacatgatctccccatgatcctttacaaactgtacccattgaaagacttgacaaacaaacttacaggtcagactgccattgcctttgtcagttggttttctttttttttactgaaatgaaaagtaagttgatctgctgccaaattaccaccacaggaatttactgggagcttgtttgagaatgctgcctcctctctttgagctgcagggtttctaccagcccgaagatgctaaggaaagagactggaccttcttctcaggccaagacagaggcgggagcacccttcctttggaargaggttggatgtagttcacagagcggaagtccaacagattctacgtgccgaagccagccag

SEQ ID NO: 503996 - DNA, 428 bp, Homo sapiens
tgctctcattgctcattagcacaagatattcccagcagagccgtgacagtctacaaatgccatggcaacaacccagaagtcgccactcctttccatggcacccagaagttaccgccctttttctagaaagayctaaataacttggacctcaatttgcatttactcaccatttaatttgcaggtaattgaaagtgggtttatgtgagtataaatacagttgccaactgcccaaacattgctctgggctcaatgcctatgagttcgccccgctctgcatggagtagctctggttcaatgaaagatttctgtctaacaccacaggcttgcccttaaattctttcctgggtgaagacaagaaccattgcaagattattgcatcagaatcttgcaacagaatgttgcatcagcatcactttggaccttataat

SEQ ID NO: 503997 - DNA, 543 bp, Homo sapiens
cttactcaaagtaaaaagaaaacctgttattttatagtaagttgtttacatctcccaaccatcttgtctttggagaaccaggtctttttccagtgggtgttgcttatgcagaacagcttttgttcacagcagggacaagttaatgcattgcgtrcacgacataaacggtctccatcttacaatcaggatgtgttccaaaccttcatttgtaaggcatttgtttaaaactcagaatgtgcttgtccacagaaacagtggtataagtgatggttggagggccaagctactccaccaaagcctatttaatgcatcatgtaactaaactcatacacagttatgcttcatacactctggaaggagggatctcatataatataacaggaggaggaggaagagaaaatctttgtcttcttacttccaagaatctctcttccttcatttttaaattttgttcatcctcctccttttgggaggggacagagggattcctgtctctcagtatcctatgctgatgaaacaactctcccccacacctaccctaaa

SEQ ID NO: 503998 - DNA, 543 bp, Homo sapiens
cttactcaaagtaaaaagaaaacctgttattttatagtaagttgtttacatctcccaaccatcttgtctttggagaaccaggtctttttccagtgggtgttgcttatgcagaacagcttttgttcacagcagggacaagttaatgcattgcgtacacgacataaacggtctccatcttacaatcaggatgtgttccaaaccttcatttgtaaggcatttgtttaaaactcagaatgtgcttgtccayagaaacagtggtataagtgatggttggagggccaagctactccaccaaagcctatttaatgcatcatgtaactaaactcatacacagttatgcttcatacactctggaaggagggatctcatataatataacaggaggaggaggaagagaaaatctttgtcttcttacttccaagaatctctcttccttcatttttaaattttgttcatcctcctccttttgggaggggacagagggattcctgtctctcagtatcctatgctgatgaaacaactctcccccacacctaccctaaa

SEQ ID NO: 503999 - DNA, 584 bp, Homo sapiens
gaagaagaagccctgtcctggagctaatgatatactaatagctaacatgaaaggaacacttagtgaatgtcacacactgtgctgatttatgagtattatctcatttaatcccataacctcatcaagtaggcatccatattctcattttacagagaagtaaattaataacttggttagggtcatgtgattagtaagcagcagagctgtacctctataaatcggcttcttctgaactaccacattgctgtcttaatgctaggctttgagggcgacgtgagtttactgcctagctttattccttcmggtttatgttagaaatcatgtccctatcccctagttgggagagctatgcccttcaattttaccttgtttgagatggagaaggttaaatcctgaatccttgcctctctcatacctacaggtcacagcaaaccgagatcccagctcaccagcaaacagatgagttgtatcccactggtgggtgtggagagagtgaagaggaaactaaagctaaagagaaggagaaggccatagactgtatgtctcatcccaaagagaaattagcccaatcccagaagaaagta

SEQ ID NO: 504000 - DNA, 377 bp, Homo sapiens
acagtgctgtgcattacaaagcacagaggcaggctccaggccagaaagggcaagggcrgcgtgagaagaactcctatctacttgcagaggcccctgcactcccagctctgccacttacctaaaaccggagcctacactctcttatctgtaaaatgggaataatttctacctccatgaactgtgaagattaaatgggatttggatgtgaggagatcctcagtgcttggctgatggtagcaatgaaggtttgcatggatagtggagggaaggttaaggagaggaaaaaaagagggaagatctgtagggcagaaggctcctaaaataagccctgtaggccgggtgaggtggctcacacctgtaatcccatcactttggga

SEQ ID NO: 504001 - DNA, 377 bp, Homo sapiens
acagtgctgtgcattacaaagcacagaggcaggctccaggccagaaagggcaagggcggcrtgagaagaactcctatctacttgcagaggcccctgcactcccagctctgccacttacctaaaaccggagcctacactctcttatctgtaaaatgggaataatttctacctccatgaactgtgaagattaaatgggatttggatgtgaggagatcctcagtgcttggctgatggtagcaatgaaggtttgcatggatagtggagggaaggttaaggagaggaaaaaaagagggaagatctgtagggcagaaggctcctaaaataagccctgtaggccgggtgaggtggctcacacctgtaatcccatcactttggga

SEQ ID NO: 504002 - DNA, 377 bp, Homo sapiens
acagtgctgtgcattacaaagcacagaggcaggctccaggccagaaagggcaagggcggcgtgagaagaactcctatctacttgcagaggcccctgcactcccagctctgccacttacctaaaaccggagcctacactctcttatctgtaaaatgggaataatttctacctccatgaactgtgaagattaaatgggatttggatgtgaggagatcctcagtgcttggctgatggtagcaatgaaggtttgcatggwtagtggagggaaggttaaggagaggaaaaaaagagggaagatctgtagggcagaaggctcctaaaataagccctgtaggccgggtgaggtggctcacacctgtaatcccatcactttggga

SEQ ID NO: 504003 - DNA, 563 bp, Homo sapiens
tcagttgaatgcctacaatagtcaatacataatattaattcaccaaatgttttaaaaactattttaaatgtttacaaaactttgcgaaatgaataaagctactttttcttttttaaaacacatattttaccttagtgaaagtatgtaaaacaccccaaagggagcagcagctattagatcacactgagatagttatgtccaaaagtagtatgacttttttcccccttttttggcacaactgagttggaatgactattaaattatgataaaataaggtaacattttataaaattcccaatttcatacaaagcagcatttcctaaacttccacaatctcaattgcatattaaatttcaatgtcagtaccaggttaattttctaaaaacactctttagaaaagaggtttattgaatgtcttttatgtgttcagcattatgctaagcaattttcatayattatctaatttaattctcacactataagataaataccattaaagtcctaattttacagcagagaaaaggaggtttggagagattaagagatttatccaaggtaacaca

SEQ ID NO: 504004 - DNA, 632 bp, Homo sapiens
tctatcatcttaaaaagcaggactcccacctctttgaacacataaagaatgtttttttttttttttttgacattggctggtcaaggttgacatgtaagtgttaaaatcatggcacatttcagtaattgcaacttccccagtctgtggaaggtctgataaatggtcatcgtgtgaacaacagcaataacaattactatttgcaaaaacacttggacaatttcaaagtgtttttatatgaactttaaaaaaaaactaaatcttccagcccatttttgagttgcttcatccagccaaaatgtcaacctggagcaaataatgattrttacaatgattattacaatatttttctttaacagaaaaaccaattctatagcagtctcagtagaagttcagcaaatattcctaaagaaaaaagggaaaatagctccaggtctgcttgatagacatcaaactaccccaaattatagactgagcagacaagattacacaatggggatgctatgaaaatcgaaagcattgattttttttttttaaggcagaacacagattcccaatactgagataacacctaatgctctagctgggaaacacaaagcaaccacggccacggtcgggagtgggtgtgggttgca

SEQ ID NO: 504005 - DNA, 594 bp, Homo sapiens
ctgctggttaccctgggctggaatataaaagagatacaattagatttaggagaaaaatggctttttgacagtgaactttactattagtttataaagtttttttctcaatttttaaaaccttgtggtaaaatacaattaatataaaatttaccatcttaagcattttaagtgtacagaccagtggtatgaagtacatccatattgctaaccctataccttcatccatctccaaaactcttttcatctttcaaaactgaagttctatatccacaaagcaataactcctcattcccrtctcctcccagcccaagaagccatcattctattttctgtctctgtaattttgagtgctctaagcacctcatgtaagtggaattacatagtatttagcttttttcaactggtttatttcacttttcacttattttacacttcaaagttcatccatgttatagcttgagcatgggtagaagggttttattctttcgaaaggctaaataatatttcattgtaggtatatatcacattttgctgattcactcatccattgatggacagttgaattgctcccacattttagctattaagaataat

SEQ ID NO: 504006 - DNA, 594 bp, Homo sapiens
ctgctggttaccctgggctggaatataaaagagatacaattagatttaggagaaaaatggctttttgacagtgaactttactattagtttataaagtttttttctcaatttttaaaaccttgtggtaaaatacaattaatataaaatttaccatcttaagcattttaagtgtacagaccagtggtatgaagtacatccatattgctaaccctataccttcatccatctccaaaactcttttcatctttcaaaactgaagttctatatccacaaagcaataactcctcattcccgtctcctcccagcccaagaagccatcattctrttttctgtctctgtaattttgagtgctctaagcacctcatgtaagtggaattacatagtatttagcttttttcaactggtttatttcacttttcacttattttacacttcaaagttcatccatgttatagcttgagcatgggtagaagggttttattctttcgaaaggctaaataatatttcattgtaggtatatatcacattttgctgattcactcatccattgatggacagttgaattgctcccacattttagctattaagaataat

SEQ ID NO: 504007 - DNA, 571 bp, Homo sapiens
taaacagtgctttagctgtgtcccagaaattctggtatactgtgtctttgttctcattggtttsaaagaacttatttatttctgccttaatttcattatttacccagtagtcattcaggagctggttgttcagtttccatgtagttgtgcaattttgagtgagtttcttaatcttgagttctaatttgattgcactgtggtctgagagactgttttttatgatttgtattcttttgcatttgctgaggagtgttttacttccaattatgtgatcgatattagaataagtatgatgcggtgctgagaagattgtatattctgttgatttggggtggagagttctgtagatgtctgttaggtccgcttggtccagagctgagttcaagtcctgaatatccttgttaattttctgtcacattgatctgactaatattgagagtggggtgttaaagtctcccactattgaagagtatgggcattaaaatgtaagatttatgatgaaaatctatgtggagtggttcttgttagtttacttttcatattgagtgatgcatgaggtaggtgttcagag

SEQ ID NO: 504008 - DNA, 571 bp, Homo sapiens
taaacagtgctttagctgtgtcccagaaattctggtatactgtgtctttgttctcattggtttgaaagaacttatttatttctgccttaatttcattatttacccagtagtcattcaggagctggttgttcagtttccatgtagttgtgcaattttgagtgagtttcttaatcttgagttctaatttgattgcactgtggtctgagagactgttttttatgatttgyattcttttgcatttgctgaggagtgttttacttccaattatgtgatcgatattagaataagtatgatgcggtgctgagaagattgtatattctgttgatttggggtggagagttctgtagatgtctgttaggtccgcttggtccagagctgagttcaagtcctgaatatccttgttaattttctgtcacattgatctgactaatattgagagtggggtgttaaagtctcccactattgaagagtatgggcattaaaatgtaagatttatgatgaaaatctatgtggagtggttcttgttagtttacttttcatattgagtgatgcatgaggtaggtgttcagag

SEQ ID NO: 504009 - DNA, 571 bp, Homo sapiens
taaacagtgctttagctgtgtcccagaaattctggtatactgtgtctttgttctcattggtttgaaagaacttatttatttctgccttaatttcattatttacccagtagtcattcaggagctggttgttcagtttccatgtagttgtgcaattttgagtgagtttcttaatcttgagttctaatttgattgcactgtggtctgagagactgttttttatgatttgtattcttttgcatttgctgaggagtgttttacttccaattatgtgrtcgatattagaataagtatgatgcggtgctgagaagattgtatattctgttgatttggggtggagagttctgtagatgtctgttaggtccgcttggtccagagctgagttcaagtcctgaatatccttgttaattttctgtcacattgatctgactaatattgagagtggggtgttaaagtctcccactattgaagagtatgggcattaaaatgtaagatttatgatgaaaatctatgtggagtggttcttgttagtttacttttcatattgagtgatgcatgaggtaggtgttcagag

SEQ ID NO: 504010 - DNA, 453 bp, Homo sapiens
ctggggttgcatatcttcggttgggagagtgaggaagaagaaaggagggcaaaaaatgattttcctgaaattaaaaaacattcttttaaaaaccagcttcttaaagaaccagaaaaagaagtttttgcctccatgaatgtaacataatcttttcaatatataaaccataaggaaacctgttgagaatgttaatacttatgattgatttacaggtgtgtactgatggattaggactgcttttctgaaccttccctgaggtactttacattgccatttgttcaaaataaagcgaagtattattaaaacacctgattattcaamaatacattttatgtagtttaatgcacaccttaaaattcagaccttctttatttcagagagtctacatttatatcattacctctgcagcttcttcatctcattagttttgaaaattgatatttttagtatgta

SEQ ID NO: 504011 - DNA, 559 bp, Homo sapiens
ttaaatgtaattaaattactagtgaatcattttactgattgtacttttatgctataaaatgcagtacatttgaaaatttttaggttatgtgtaagcttaattttgtaattaaacatttctttaacatgttaaaaaaagtctcccactattattgtgtgggattctaagtctctttgtaggtctctaagaacttgctttatgaacctgggtgctcctgtgtcgggtgcatatacatttaggatagttagctcttctcattgcattgatmcctttaccattatgtaatacccttctttgtcttttttgatctttgttggtttaaagtctgtcttatcagagagtaggattgcaacccctgcttttttttgctttccatttgcttggtaaatattcctctatccctttattttgagcctatgtgtgtctttgcacgtgagatgggtctcctgaatacagcacactgatggatcttgactctattaaatttgccagtctgtgtcttttaattggggcatttaccccgtttacatttaaggttaatattgttatgtatgaattt

SEQ ID NO: 504012 - DNA, 684 bp, Homo sapiens
ccagctgggaggtgtgttttcagcaggggctgacatggttaggttgaccgtttgtaaggatcactctggtagtgatctttggagaaataattgaaggaggacaagggaagaatgatggaaaaaccaactgagagtttctaagagtagctcaggcaagaaatgatggcttgttagatgagagkggaagtagtaaagctggagaggagagaaaggatcagggatatttgaggagaattcggtgatgaagggaacatggtaggagaaggaaggggagggctaaagatgaactctagatttcttgctgagagacctaagtggatgaaggtgctgaccacagagatggggaacatgggaaggtgatcagattgggtgacaaggtgcaaagatcatggtcttgattagggacatgagtctgatatttcacagactgtgtttggggtttccttgaaacatctcagcagggaagttcagtaggcaaatggatgtgggtcttgcctggagatatgaaagtgattgaagtcatgggtgtaaatgagctcacccagagggggaacataggtgggaagaaatgagggtaaaggaagggcttgactaatggtctaggagaaggttgaggccatgaggagactgggaaagtcaacagagccatgggagaatcaggtttctgctacctgtgttcattca

SEQ ID NO: 504013 - DNA, 557 bp, Homo sapiens
tgaaagtataatttctattctagtttgtcatatgagaaggggttcccagccccggggccgcagaccagtatgtgtctgtggcctgttaggagcagggctgcacagcaggaggtgagcagcaggtgaacatgcaaagccaagttctgcctccagtggcattagattttcataggagcccgaaccctgttgtgaatgctcatgtgaaggatctagttgcacgctccttatgagaatggaatgcctgatgatctgtcactgtctcccatcaccctcagatgggaccatctagttgtaggaagacaagctcagggcacccactgattctacattatggcgagctatataattatttcatagtatattacaatgtaataataatagaaatcaagtgcacaataaatgtaatgcgcttgaatyattccaaaaccatcactcagccccgtcccatccgtggaaaaattgtcttccacaatactggtccctggtgccaaaaaggttagggactgctgatatgagtcattaccgtatccatttttaggacagttgatcctcaaagg

SEQ ID NO: 504014 - DNA, 577 bp, Homo sapiens
gcaccaggcaacaaagagtgttgataggcttaaagtgtttttatagttttatatatacaacagaaaataaaattgttgatgttayaggcctggggccaaaaatgctgacacagatctacctagctggggctacaaaaatggtttgcattcctaagaaatgtctaagttttagaaataaacagttaacttttaaaagggtaacttacatacatatttcacacactgtcatctttattctctctagtgtctgaacacttcctcacttcctatgatattgactgcagtttggaaatcaagaaggaggtggtccaatgcatgggctccttccaggatggggtggctgagaagtgtgttgattattttcagagattccgacgttctacccacgtgacgcccaaatcatacctctcctttattcagggctataagttcatatatggagaaaagcatgtggaggtgcggaccctggccaacaggtaagtgtgatgttcttatacaaagctatattaaagccgtggctctcaaccagggacagatttgccctggtggctattttgcaatgaccggagacattttg

SEQ ID NO: 504015 - DNA, 572 bp, Homo sapiens
tgcacattcacagagacttaatttctagcttaaaaaagaggctcaatgagtggacataacgtccttctcccccttatacacagagctagacgtccattttcaaactttcagatgtctagatctaaatcatagtaaggtcatacatccatgccatctttactagagaatctttttttagattcaactgacaacttctggtatttgtcttttgtttttgagacagggtctcattccatcatcaggttagagtgcagtggcatgatcacagctcactgcggcatcaacttcctgggctcaggtgatcctcccccgtcagcctccaagtagctgggactayaggcgcatgccaccatgcccggctgattttttttgtattgtctgacagggtttcaccatgttgcccaggctggtcttgaacaccgaggctcaagcaatccacccctcttggcctcccaatggtatttatcatttttcttgtgctttccagtaaaatataatgctagatccaaaaataataaacacaaagagtctgaagtagttgagaaccacaggccatttaaaaaattaaaatt

SEQ ID NO: 504016 - DNA, 465 bp, Homo sapiens
ttcatgaaaaaaaggtatggggaagcrgccaggcttagtggctcacgcctgtaatcccagcactttgggaggccgaggggggcggatcacctgaggtcaggagttcgagaccagcctggccaacatggtgaaacgctgtctctactaaaaatacaaaaattagtcgggagtggtggcacgcacctgtaatcccagctactcgagaggctgaggtgggagaattgcttgaacccaggaggctaaggctgcagtgagccgagattgtgccactgtactccagcctgggtgacagagggaaaccctgtctcaaaaaaaaaaaaaaaaaagtaaaaaagaacaattaaaaaaagtataactcaggggctgggtgcggtggctcatgcctataatcccagcactttgggaggctgaggtgggtggatcacttgagcccagtagttgaagaccagcctgggaaatatggtg

SEQ ID NO: 504017 - DNA, 579 bp, Homo sapiens
actgtaagaacccttccaattctgaggttgaaagaatgtatgacattcaattattccatgttccagaagcccacaatttaaatttgggggttgagagaaatgtagctagaggtacactayagggtatagtttagggtaaagtatagcctgatgtctcaagcaatttttccctattccatgaattttagggatgtctctgtgtgttgtcatggaaacaaagcacaaggattccaaattttcctgctgtgtgatatagccattgagtggaggttctgagtacgaggtctttggtcctgctttgggtcctctgctgactcacaccaaacctgggatgtttattactctctaacttatcacctcctttcaaaactatcatggagatactgaaaacacttttcctaggatagtcatgatgattacatcatacaaaatgttcttagtatttggaatgaaaggtatggtaattaattccggttagcccagccaggaaagtcacctgaatttccgtggaatgacatttcctgatattgttatgtgctaggtgcaaaaatttggcccaggacaaagttccagtaggca

SEQ ID NO: 504018 - DNA, 513 bp, Homo sapiens
tgctcatagcacgttctgagtaagtaaacagcctttgcttattctcatttgatttttcttcatttatttccacacgacaaaaataaaaattctttcccrataacttccggtatttcttcaagggcaattctattacatgaatgggctcagctttttgagaaagagtctggtatccactgcaagtaggaagagatgacttccgaatttctgcgggattttcccagagggctctgtgaggcgagtgacttgttacactgccctgtgcaaaatgtccatgggtcagagaagagaatgaaagtgtagactttacagccccactccccagggacatttggactcctgtgataattcaaaattttacccagaccccaggactcatgtcaaactctatttcttcccaaaatatcttcccaagcccttccagaggagaagacttaacccgagggctgccttcccagcctcagccctcacactgtacttgaaatccaaccatcctggtcctatttgtgcccc

SEQ ID NO: 504019 - DNA, 670 bp, Homo sapiens
tttatccattgagttgcaaacaatccaattacactcttgataaatctgccaggccagggctggagtttataaccaccttccagagaaaaacctgaagaccaaattagaaaaaaatgcaacaaattcacccagatgaattttggaaacattcaaacctaaaatctagtccacagcctacatacatttattttaatagtagacgatatatcttacagtcttttttgaagataaaattaaaaaaaaaactaatgcaaatgcatcttagtttaagtgatctgagataacctttggtaaataaagctagatttaaaactctgaactaaaagtaaaaatgtcttcagaagtgtcagaatttattattatacaagcatacttttttaaacctagagttcctattcaagcaagcttgttacctcctggatatttaaaggagaggaaaaaaccaggtttaaattttagcttttcgttatctctgcttttataatattgttgatgcattcttgatttgtctgaggaggaggaacctgaggaggcyggatgctgggctcccagaaaacatacatcttgttgtgagcttatgtacttaattttgagcctctgtattctgggatctagacagatcgccattgtaaatcctggggacgtgagtgtgcttaaagcacctgggcca

SEQ ID NO: 504020 - DNA, 670 bp, Homo sapiens
tttatccattgagttgcaaacaatccaattacactcttgataaatctgccaggccagggctggagtttataaccaccttccagagaaaaacctgaagaccaaattagaaaaaaatgcaacaaattcacccagatgaattttggaaacattcaaacctaaaatctagtccacagcctacatacatttattttaatagtagacgatatatcttacagtcttttttgaagataaaattaaaaaaaaaactaatgcaaatgcatcttagtttaagtgatctgagataacctttggtaaataaagctagatttaaaactctgaactaaaagtaaaaatgtcttcagaagtgtcagaatttattattatacaagcatacttttttaaacctagagttcctattcaagcaagcttgttacctcctggatatttaaaggagaggaaaaaaccaggtttaaattttagcttttcgttatctctgcttttataatattgttgatgcattcttgatttgtctgaggaggaggaacctgaggaggccggatgctggsctcccagaaaacatacatcttgttgtgagcttatgtacttaattttgagcctctgtattctgggatctagacagatcgccattgtaaatcctggggacgtgagtgtgcttaaagcacctgggcca

SEQ ID NO: 504021 - DNA, 535 bp, Homo sapiens
tttttgttaatgctttattatgttagtttttgccacttaaatttatttgtaaaagtattacttctcttatgctcttgcaaatgcctaattgatgattatataaaatatatccagtaataatgaatatttaatgtatcaatatctaaattgaatttgaagtttatgctaatcttatttccaacacctttgataacttcacagcaggatagcttcctacaaattaattgagttcatactaagctaagaagatattttgccataaaccaagaagttgttgttgtcttcaggtgtaagagtcaactttctaaagaaaaggtaataataaattgwtagaaatctcatcatagtcttctaagtttaccatcataaaatttaaaagagacatagtattttcacattttatttagtaatacacttacgtttatcaccatcaacatgttctgagattaaaaaacaaaatttaatgtgtgagaagctactccacagttatggatctattcaagagctaagtcaaaatatttattttctaacttat

SEQ ID NO: 504022 - DNA, 535 bp, Homo sapiens
tttttgttaatgctttattatgttagtttttgccacttaaatttatttgtaaaagtattacttctcttatgctcttgcaaatgcctaattgatgattatataaaatatatccagtaataatgaatatttaatgtatcaatatctaaattgaatttgaagtttatgctaatcttatttccaacacctttgataacttcacagcaggatagcttcctacaaattaattgagttcatactaagctaagaagatattttgccataaaccaagaagttgttgttgtcttcaggtgtaagagtcaactttctaaagaaaaggtaataataaattgttagaaatctcatcatagtcttctaagtttaccatcataaaatttaaaagagacatagtattttcacattttatttagtaatacacttacrtttatcaccatcaacatgttctgagattaaaaaacaaaatttaatgtgtgagaagctactccacagttatggatctattcaagagctaagtcaaaatatttattttctaacttat

SEQ ID NO: 504023 - DNA, 535 bp, Homo sapiens
tttttgttaatgctttattatgttagtttttgccacttaaatttatttgtaaaagtattacttctcttatgctcttgcaaatgcctaattgatgattatataaaatatatccagtaataatgaatatttaatgtatcaatatctaaattgaatttgaagtttatgctaatcttatttccaacacctttgataacttcacagcaggatagcttcctacaaattaattgagttcatactaagctaagaagatattttgccataaaccaagaagttgttgttgtcttcaggtgtaagagtcaactttctaaagaaaaggtaataataaattgttagaaatctcatcatagtcttctaagtttaccatcataaaatttaaaagagacatagtattttcacattttatttagtaatacacttacgtttatcaccatcaacatgttctgagattaaaaaacaaaatttaatgtgtgrgaagctactccacagttatggatctattcaagagctaagtcaaaatatttattttctaacttat

SEQ ID NO: 504024 - DNA, 614 bp, Homo sapiens
ctgcttggtgtaagagtgcgatgacattggtgattcaggactgtttttctctccgttcagtgcctcattcagtgatatgaacktaaaaccaagtactgtgagtgcttacctgatttttggttcttattaaggtgttttttctgcgtaaatagttgttaacttggtgtccctgcaagggggacaattgctggaggtttctattttgccatcttgatcccaatctccttaattaattttaatttaattcccccttctggcttcttagcaatttttctatacttttagtgccccaaggtgttctttttttttttgtacaagaaatatgtcacacctttgtcatcaatttatccatcttttcctcatcaaaataaacatttgtttagtgcccactctgcctcatagtgtatgataacttcttgacatacagtgatacgcaagagcagcaggtccattttattttatagagcttatattccaataaaataaacaaaaaataaatgagcaacaaatgaataaataggataaatgctttccaggtctttatcccatggtcttggctattagttttttgctcccttatagttatgaaaatttctctagcaagtgctttctct

SEQ ID NO: 504025 - DNA, 614 bp, Homo sapiens
ctgcttggtgtaagagtgcgatgacattggtgattcaggactgtttttctctccgttcagtgcctcattcagtgatatgaacgtaaaaccaagtactgtgagtgcttacctgatttttggttcttattaaggtgttttttctgcgtaaatagttgttaacttggtgtccctgcaagggggacaattgctggaggtttctattttgccatcttgatcccaatctccttaattaattttaatttaattcccccttctggcttcttagcaatttttctatacttttagtgccccaaggtgttctttttttttttgtacaagaaatatgtcacacctttgtcatcaatttatccatcttttcctcatcaaaataaacatttgtttagtgcccactctgcctcatastgtatgataacttcttgacatacagtgatacgcaagagcagcaggtccattttattttatagagcttatattccaataaaataaacaaaaaataaatgagcaacaaatgaataaataggataaatgctttccaggtctttatcccatggtcttggctattagttttttgctcccttatagttatgaaaatttctctagcaagtgctttctct

SEQ ID NO: 504026 - DNA, 582 bp, Homo sapiens
acaaggcagggttctatccacaagcctttcctagctagcctgtcatctctgctcagccgcagagcattcagtggcaatttgttgtttagtgtcctcacttgtgaaatgggagtctctttctacctatctcataggcctgttgtgaggctgaaatgagatcctatatgcaatgcccttacattacttaaaacagcaagagttggccgggcgtgatggctcacgcctataatcctagcactttgggaggcaaaggtgggtggatcatgaggtcaggagattaagaccatcctggccaacatggtgaaaccccatctctgctaaaatacaaaaaattagcaaggcctggtggcgggcgcctgtagtccccactactccggaggctgtggcaggggaatcgcttgaacccgggaggcggaggttgcagtgagccgagatcacgccactgcactgcagcctgggygacagagtgagactccgtctccaaacaaagcaaagcaaaacaaacaaacaaaaaaacaccagcaagagttaatgaatggaagtgatgatggtggttgtggtagtgttagttcaaacgatgct

SEQ ID NO: 504027 - DNA, 632 bp, Homo sapiens
agaacatgatcccctattggtgacaagatggaggtcatccttgttgaaacttgggcagtcagcttccctagtgccttttccattcttaatgggtacaacattgatgccacaacaacatggcacccaggcatctagtttaccatggcatctgttctaccgtgatcagaccagacatgaacttgctttgttagttatctaaatgaggatatctacttagaaattccatagaataggtagatcattgaatattgttgttgatgtgaatgtgaacagtttctcatcctcttttctcactgggatggaaaagaacagatttgcagagtcagtagttgcatgccgtatacccaaggtctgatgaatctgccctagcagtgacaccatatctggcacaccagctgcaactggtgctaytacctggttgagtctgcgggagtcaacagtcattctctaggatccatctgttttctgcagactggcgattaaacaaagatacaacagggaccaccaaccctgcatcttttaggtctttaatgatggtaataatatctgcctccccctgcaacccgccagaataacagttttctcactttgtcggagtttgtggaggggccagtttcagaggtttctatttg

SEQ ID NO: 504028 - DNA, 425 bp, Homo sapiens
ctatcattgataggcatttgtgttggttccaagtctttgctattgtggagagtgctgcaataaacattcgtgtgcgtgtgtctttatagtagaatgatttataatcttttgtatgtataccctataatgggattgctgggtcaaatggtatatttctggttctatatccttgaggaattgccagactgtcttccacaatgtttgaactaatttacactcccaccaacaatgtaaaagtgttcgtctttctctacatcctctccagcatctgttgtttcctgactttttaatgattgctattaagtgtctttctagatgttcatcagaattcattctttctgtctaacacagtactagaattacaactggaaaattgttgcytagctggggactgttttttttcagattctctgccatggtcaggt

SEQ ID NO: 504029 - DNA, 524 bp, Homo sapiens
cagctgtgcaccaagcggacctaataaacatctaaggaactctccaccccaaatcaacgtatatgcattcttttcaacaccacaccacacctattccaaaactgaccacatagttggaagtaaagcactcctcaacaaatgtaaaaggacagaaattataacaaactgtctctcagaccacagtgcaatcaaaccagacatacttttcatctgttatactggaaacatgttaaagagttaagttgtatacctatgaaatttgtcattgttgaagcctcttgtgagaatgttttatatatggggaaaataggtatgctctatagaatggaactgcaacagagggcaatttatatctgctacaaatttaaacatgccggccatggtgggtggctcacatctataatcccagcactttgggaggctgaagtgggtggatcactgtaggtcaggagttcgaaaccagcctggctaacatggtaaaaccacctctttactaaaaatmcaaaaaaaaaaaaaaaattagc

SEQ ID NO: 504030 - DNA, 668 bp, Homo sapiens
tgtgggatatttgacaagctatttcatctctccatgacttcagtttcctcatctgttaatgggggaaattatagcattgatatatatatttaacacagtaagtgttacctaaacgtttgataaagaaagatagtcaacaaacaacaccaagtctctcctataggcgagatcccatatattattagcctcatagatttataaaacctgttcacagtgcatttattttcaaatgctgttgcttacggtttcactatctctgtatataggggccattaaaattagtattccatttgcactacaacaaatatataaactatcacccaaatcacagttttcctatttgataaattttcagtgcatcatgaaaatattttggatatcaycatatgtagtagaaatttaaatatccctgatttggggccatagattaaaagcctacagttggttgtcttggttgtcatcctttccagagtaagtgttataaatcttcacactttttccataaaaatcttgtcaagagaagacattaaaaattcctagatttgaattccagacttcctcctaactgccatgcaatggctgtcacttgttcaatgcctataagtaagaatgtgggcctgtgtgcaaaatttgtaaggattaaatataaaatcttacttttataatta

SEQ ID NO: 504031 - DNA, 515 bp, Homo sapiens
tatcttcagtatttgctagatatacaaatttttttcttcagactattttccagttttctgttactattaaaatatctggtgtaattcaagttaatcttcgtatgttatttttatttgttcatttcctctctgaaagtgtttaaaatctcttttcatttccaatattctgaaattatattatgatatgtgtgtgggcctttttaaacttttgccagggattggtgggctttaaaattttaaaacgtaggtctttcagtccttgggaattttactattatttataatttcttctcctctgattttgagtatttctagaactaccgcaattagattttgaatatcttagttaagctgtctcgtcatttttgcttacattggtcatctttttttctttttctttctttttttttttttycttattttaaaagagatcccttttactccctctgagactttgagatattactgcccctggataggatacatccttcttgcattagttttttagtcatttc

SEQ ID NO: 504032 - DNA, 566 bp, Homo sapiens
tgtgttacccttatcttctttggatttatctgagcctgtgctgccctgggctgtggtttctaaccagaaatcattgtaggtagtataggtagaattgagtgtgtataggccaggcacagtggctcacgtctgtaatcccagcattttgggargccgaggcgggcagatcacttgaggtcaaaagtttgagaccatcctggccagcaaggtgaaaccccatctctactaaaaatacaaaaattagccgggcatggtggtgcatggcagtggtcccagctactcgggaggctgaggtaggagaattgcttgaagccaggaggcggaggttgcagtgagctgagattttgccactgcactccagcctaggtgacagagtgagactctgtctcaaaacaaaaccaaaattgagtgtgtgtgtgtgtgtgtgtgtagggaggacagttgatggttaacctgtgagctattttcagtgtttcaaatatcatcacactttcagtgcacactcactaaaatctcgagtgcttttgcttttagtttatttaaacatagcagggtaatgcttatgc

SEQ ID NO: 504033 - DNA, 590 bp, Homo sapiens
gttgtatagcctatggaagacaaagactgaggcccaagaatcctttacacactcaagaatgttacctgccagggtgaaagaaatatttgcagatataaacagacttagagactatcttgcctacttaacccatatggggaacatattcatatttaaagaaaaactgtaaccaaacagtaaataacactgaacaccatcaaagaagatgaggggagaagaaataagtgaggaacaatacgatatgtacatgtgtttcatgcactcaatgtgggtttttgaaatggaagtcacacattacaggggaaggtctactgagaatcaattacacgmattctcaatgggagcgatattgccccaaagggactgaaatagtgttactctttcgatgactaacacacagatatacatagaacacatatgcagtatatctgtgatattataatatcatgggaggcagtattaagaaaaaaatatattagaaggctcctcaggaagataataataaaaaacaggttgagaaatgctgatctacaatcaacaggataaacaatctcagtaaaagttatacgaaaaatggaggtgagctttaa

SEQ ID NO: 504034 - DNA, 393 bp, Homo sapiens
tgagatgtatatttcactttttccccaagactttggatcagagtgaatttacttgtgaaaaatagcagaaagaataccagcaagagctggctggctaacagtatgctgattattttttttttagagatggggtcttgctatgttgttcaggctgaagtgcagtagctattcacaggcatgatcayagcacactgcagcctcaaatttcttggctcaagtgaccttcctgccttacagcctcctgagtagctgggactacaggtgtacgccactaggcccagctaattatttatttatttactgttgtagagatgaaatctcactatgttgcccaggctagtcttgtgcacctggcatcaagcaatccttccaaagtgctgggattacaggcac

SEQ ID NO: 504035 - DNA, 393 bp, Homo sapiens
tgagatgtatatttcactttttccccaagactttggatcagagtgaatttacttgtgaaaaatagcagaaagaataccagcaagagctggctggctaacagtatgctgattattttttttttagagatggggtcttgctatgttgttcaggctgaagtgcagtagctattcacaggcatgatcatagcacactgcagcctcaaatttcttggctcaagtgaccttcctgccttacagcctcctgagtagctgggactacaggtgtacgccactaggcccagctaattmtttatttatttactgttgtagagatgaaatctcactatgttgcccaggctagtcttgtgcacctggcatcaagcaatccttccaaagtgctgggattacaggcac

SEQ ID NO: 504036 - DNA, 314 bp, Homo sapiens
gggtgactggaacgtctgggatggctgagtctctctgcatgttctgtcatgattcagtaaatcatcttgagctctttacatggtggttggatcctcaraaggcaaagagctctggaatcctagcatgttgctcccaatctattccactggtagaagcacgtctcaagtccaggaagggaggagcaacatccaagtacaggaatgaggattattggtggccatctttggaaataacataccacagcccattctctggccatagcaattcatatctctcttttacatgcaaaacacattcaccttattcctcaaag

SEQ ID NO: 504037 - DNA, 314 bp, Homo sapiens
gggtgactggaacgtctgggatggctgagtctctctgcatgttctgtcatgattcagtaaatcatcttgagctctttacatggtggttggatcctcagaaggcaaagagctctggaatcctagcatgttgctcccaatctattccaytggtagaagcacgtctcaagtccaggaagggaggagcaacatccaagtacaggaatgaggattattggtggccatctttggaaataacataccacagcccattctctggccatagcaattcatatctctcttttacatgcaaaacacattcaccttattcctcaaag

SEQ ID NO: 504038 - DNA, 314 bp, Homo sapiens
gggtgactggaacgtctgggatggctgagtctctctgcatgttctgtcatgattcagtaaatcatcttgagctctttacatggtggttggatcctcagaaggcaaagagctctggaatcctagcatgttgctcccaatctattccactggtagaagcacgtctcaagtccaggaagggaggagcaacatccaagtacaggaatgaggattattggtggccatctttggaaataacataccacagcccattctctggcyatagcaattcatatctctcttttacatgcaaaacacattcaccttattcctcaaag

SEQ ID NO: 504039 - DNA, 314 bp, Homo sapiens
gggtgactggaacgtctgggatggctgagtctctctgcatgttctgtcatgattcagtaaatcatcttgagctctttacatggtggttggatcctcagaaggcaaagagctctggaatcctagcatgttgctcccaatctattccactggtagaagcacgtctcaagtccaggaagggaggagcaacatccaagtacaggaatgaggattattggtggccatctttggaaataacataccacagcccattctctggccrtagcaattcatatctctcttttacatgcaaaacacattcaccttattcctcaaag

SEQ ID NO: 504040 - DNA, 613 bp, Homo sapiens
tgctgttcccaagtggaacctccaagctttccagcaattgcctgcttgctattttgagattatcagatttatcagagtctcatgaattccctccactttctattatacagttgctgataccacctagcccttgtatctgtctatggctttcctcaattccttatgttctagggttcgtggagacacttcatcacctaattttgttatagatgttgtccacgggttttttattttatcttttstcctttgtctatatttgtggcagaattttaaggttaaaaaatgatgacccccggatacaggtgaccattgtaagggtacaaggaaaatatcccctttgtcctctgaagatttgcttaaaaatcaactcataaaagtcagattaattggagtaaatgtatataaattttattaacgtgtacatgagagcctttagaataaagacccaaagatatagagaaaattatctttttttgtttgtttttgtttgagacagggtctttctgtcacccaggctggagtgcagtggtgcaatcacaactcactgcagcctcgacctcctggactcaaggggttttcccacctcagcctcccaagtagctgggaccacagg

SEQ ID NO: 504041 - DNA, 613 bp, Homo sapiens
tgctgttcccaagtggaacctccaagctttccagcaattgcctgcttgctattttgagattatcagatttatcagagtctcatgaattccctccactttctattatacagttgctgataccacctagcccttgtatctgtctatggctttcctcaattccttatgttctagggttcgtggagacacttcatcacctaattttgttatagatgttgtccacgggttttttattttatcttttgtcctttgtctatatttgtggcagaattttaaggttaaaaaatgatgacccccggatacaggtgaccattgtaagggtacaaggaaaatatcccctttgtcctctgaagatttgcttaaaaatcaactcataaaagtcagattaattggagtaaakgtatataaattttattaacgtgtacatgagagcctttagaataaagacccaaagatatagagaaaattatctttttttgtttgtttttgtttgagacagggtctttctgtcacccaggctggagtgcagtggtgcaatcacaactcactgcagcctcgacctcctggactcaaggggttttcccacctcagcctcccaagtagctgggaccacagg

SEQ ID NO: 504042 - DNA, 589 bp, Homo sapiens
caaataaaaattgttatttgactgacttatgaggattttaaaatattaacatacaatcttttttgttattttttattttgatttctaattgcattgccttacgactgaagaacaattggataacgtctgcatatctttattgaaaattttcttgtatttatggcacatagcccatttttataaatgttccatgagtgaatgagaatatgtactttctaattatttgttgcagttaaatattgacacacttgacaaatatgtgatcactttacttaccaatttcttcatgaagttctgactgtgcatagttgatattatgttcttaggtttagacaaaaactgttgtctatttctgaggagttgwatacttgaccctcatgtactgaatgtatttattcctaatgatacattttactgtatggtttatttttctggatggtaataataccatggtggctttcttctgattagaaaatgtctgctatatattttccttccttttatattaatatgtctatttccctatactatacacatgtttactctcaacatttttctgttataaaatatttcaatacgaatatctatg

SEQ ID NO: 504043 - DNA, 600 bp, Homo sapiens
cacggtccctacagcaccccaccctctcactctccactgcagggtgggcaggaggcagcacgggctgcgggaagaggctgaatgtagtcccaagaatgccaaccacttgtcatttgactccaaacaaatccctttgtgaaacttgatttcttcaatatacaattgtggaaaataatacctacttttcagaactgctgtgaaaaatttaaaaataaatttggttgtgtctggcacatagagggcattcaataaatgtgggttggatgtgaatctgagaagtgttcattgaaccttatctgaggcacctggaagtggccctggcactgtagagggacccaaggttcatggtggatgcgggctttctctccaagactgaccatccagaaatggtcctgtagcaaagtaaagctgcttggagtgaaataaaccagccaggaatgaagatgtttaatgctccagaggttcagggaacctgcaggccaggaatgaagggggagaactgcatttcaggagtgttggagtccaagaaaaggaggttagacttccctctataccyagcaggaaccactgaagggtgctgagcagttataagtggggttt

SEQ ID NO: 504044 - DNA, 641 bp, Homo sapiens
gtctggggagggaggctgggggtgtggagagatgcctgctcccagcctgctgggccacaggtcaaggtctgaagaggaaggggcctgggaggccccaacaagggagaagacacacargggaagggactgaggaagggtctctcaggcttggcctgcatcaagcccccctggggagtttgttaaaatgtagaccctctgccatcgcacctgtctcccagagcctaactcagaaaactcagtggactggaatgtgcccagggatctgcatggtaacaagcacccccatttcctctcatgcaggtgatctgggcaccacactttgaaaaaatgaggttctaagtaattcagaaattcttgccagagaggtcaaagtccaagcccagttgctggaagtaaaataagcctcagaggcactgcggacctggagggcatcaaggcagggcaggcaggaggacattggtggcaacaacaggttcaatcaccataaccctgtttggtgagcacacagatgttctcatctaacccacctgggaggagggcacaattaccagcatcatttcaaagacaaggcaaattctgctcagacaggtcgtaagtgacctgcccaaggtcacacagttgatcagaataaagaaccgggt

SEQ ID NO: 504045 - DNA, 641 bp, Homo sapiens
gtctggggagggaggctgggggtgtggagagatgcctgctcccagcctgctgggccacaggtcaaggtctgaagaggaaggggcctgggaggccccaacaagggagaagacacacaagggaagggactgaggaagggtctctcaggcttggcctgcatcaagcccccctggrgagtttgttaaaatgtagaccctctgccatcgcacctgtctcccagagcctaactcagaaaactcagtggactggaatgtgcccagggatctgcatggtaacaagcacccccatttcctctcatgcaggtgatctgggcaccacactttgaaaaaatgaggttctaagtaattcagaaattcttgccagagaggtcaaagtccaagcccagttgctggaagtaaaataagcctcagaggcactgcggacctggagggcatcaaggcagggcaggcaggaggacattggtggcaacaacaggttcaatcaccataaccctgtttggtgagcacacagatgttctcatctaacccacctgggaggagggcacaattaccagcatcatttcaaagacaaggcaaattctgctcagacaggtcgtaagtgacctgcccaaggtcacacagttgatcagaataaagaaccgggt

SEQ ID NO: 504046 - DNA, 618 bp, Homo sapiens
tgcccgtaggcagtgaagcgatagtgggttcggaacggcatgggttccagcgcctcggagctgcgtttctgccggctgaagtggtggctctgagggaacacttctccaaactcattgacccgctcggggatcactacttcgtaggaggtcagtgtcctcaccagggcttctgcaacaacagcgacaggaccagtgagctcccacgcgttcctcattgtccaactctaaacttcttccaccaaacgtccccgctaaaggtcccaggtcccagtacagccaggggcaagacaaatgcacacatgctgatgcgcacgcacacacacacacgtgcactgggacggttagtgctctgctttcccacacccccaacttgccctaccctccccaagcaaagaccctaccactaatggccctaagcaacccacttccttccccagtacctcctaacctccccgcagccsccaactcgttccctccgggtgcaagcgaccccctgccccttgcgcccccgccgtgtggtcctgggagtgcgatgcgtcttaggcgcgcgcgattcctcgaaacccggcgcagtcgcgacctctccggctgactggtccgggagtcccgggagctcca

SEQ ID NO: 504047 - DNA, 568 bp, Homo sapiens
taatgtgtgtttgtatatttatacataaaatatatacataaaatttatctcatacattaatttataagcctcctgaaagttaaggaccagagcttttgcatctatatctcccactggctgtgtacagtgacattaataaacttttaatgcttattttatgaaaaatatcttttatcagtaaaatagtggaaccttttctgatcaaaggtatcacattttctgatcaaactctattgagaattgtttagaagaatgaaaagcataaaacatatgttaaaatgaaaaaagaataaagggttacccagaaacatatcaatagaacaaaaatatatctctgctaagaagaccattcatatactctgggaaataaacgtattaaagtctttcaactgaaacacactcacatacrtatacatgcacacacagtacttttatctttgccataaagaaaaggagaatcataaattggagaccctcacactgtatttaagagcaacctacaattagctttaaaatgagttactttatccagactaaatgaagggtaaaagctttgaaaaaaacccag

SEQ ID NO: 504048 - DNA, 628 bp, Homo sapiens
atcacctggggacatgcaattcctctactgaatcagaaatgctggagtggacttctacaatctatgttttaataagccctccaggttatttggatgattactaaattttgaaaaccactggcctataataataaggtggagaaactagaatttcttttgcacagtatttaaggaaagagtcaggggctcagggaaatggaacttttagaatggatttattaagtaagacacaagaaccatgttggatatattcccttggggggttctaagtgcaccctttccttaaggcaatacagaaggcacaggctaggggaacactagaatcttttaagaaacttggtggtgctstcatctgtgggacggggttaactacaggagatgctgtcatgaacctgggctccctaatgccaatgggatgataagattataggatgatggaggcaggtggcagcacttagggtcagaggttgctataataggcaagtggtaattggggtgcattgacttacaggggcttgtagaaatgactaaacagatcatggcagtggtggggaagggcagtgtgcagtgatagagggatagctgattacagtgttgctccatttgtaaaataacaaaaaaggccatc

SEQ ID NO: 504049 - DNA, 590 bp, Homo sapiens
tgcaaacaaaagggaaaagcaaaracagggatcttttctctcatatttttgagccaatgaccaaggcaacctctttaaacttctaattgaatgaaaaagaaaaaaaccctgtatatatggaagtactgtcatcagaatgttctgttattcatagtcaaatgaaatccctcactattataccagcaaccacagcacagaaagggcattttgggagaagaaataacatgcctgaaaaccttaaagcaggaaaaagcttggcatgtttaagggtagaaaggccagtgtggctagagtacagcaggcatggaggaaagtgagaagagctaaggttggacatataagggaagggtcaattaagcctgcaggccagggttaggagtttgaattttattagaggagtgaatgacagccactggatggctgatttacactctacaaagatcctctgcctgccttgtggtgaaggacttggaggcgggcaggaggagaagtggcgagacaagccagggccattgcagttgtcctggggaaagaagacattgacgtaggcagggacaaaggcattggtggtggagaaaactacactgaaa

SEQ ID NO: 504050 - DNA, 590 bp, Homo sapiens
tgcaaacaaaagggaaaagcaaagacagggatcttttctctcatatttttgagccaatgaccaaggcaacctctttaaacttctaattgaatgaaaaagaaaaaaaccctgtatatatggaagtactgtcatcagaatgttctgttattcatagtcaaatgaaatccctcactattataccagcaaccacagcacagaaagggcattttgggagaagaaataacatgcctgaaaaccttaaagcaggaaaaagcttggcatgtttaagggtagaaaggccagtgtggctagagtacagcaggcatggaggaaagtgagaagagctaaggttggacatataagggaagggtcaattaagcctgcaggccagggttaggagtttgaattttattagaggagtgaatgacagccactggatggctgatwtacactctacaaagatcctctgcctgccttgtggtgaaggacttggaggcgggcaggaggagaagtggcgagacaagccagggccattgcagttgtcctggggaaagaagacattgacgtaggcagggacaaaggcattggtggtggagaaaactacactgaaa

SEQ ID NO: 504051 - DNA, 633 bp, Homo sapiens
agtggatgccatgtggggccaacaagccccctaagcaaggagagtgatcagcacaagtgagagcccgagtgtggaaggtggtagattgctcaggtataggtgaggctgtagtttaatgtaatccgatgtacctacccctgggtaatgctgtgaggaggggcagtctgtgcagcaaaactgagagctgttgtattctcatcacagaattaaatcacattgtaagtgatgtaaatgatgtgtaaaccaaaagtttggagatggacaaatatacataatgtgcttggcaaccaataatttcagcagggcaagagaggtgaaatagattagtgaaaaaagaagagttgattcactacytgatacatgtcaggtacacattgttcccaaggaaacctatgggagtttctaatgtgcatatgaaggtaatgtataaaaaaggcaccagagaagtgaacagcatgcacatttacctggttatgtatatttgcacctcataaattcagcaccacagttgaccagcttgagttcttggaaaaaagcaaattgacatcataaatttgcatttagctttcatacagcataagagagaaaagagagctatttgtccatcagcattgaattattgaacagacaatt

SEQ ID NO: 504052 - DNA, 596 bp, Homo sapiens
ggctcactgcaacctccacctcccagattgaagcgattctcctgcctcagcctcccgagtagctgggattacaggcgtgtgccaccatgcccggctaatttttgtatttttagtggagacgggggtttcaccatgttggccaggctggtctcgaactcctgacctcaggtgatctgcccgcctcagcctcccartgtgctgggactataggcatgagccaccatgcctggtcgacaggtggtttttcaaatgtgtttcccagcatatgctctgttgggaattttaaagaaaaatcttccatggtgtggattcttacatcttctgccttagtaagattcacaatcaaggtgagtactggcctctaaaactcctcagcttttcctgttacaggtgaggaatggtgctggtatcagccagaaatctgttggatgctggccagcaatggcagagggggtatttactgaaaggttgatcacagagtaagtaagaaggcatgagaggcaggctcagaagctagtagacacaatgcagccaggatgctgccaccatggccaactgtggccaccatccttggacactgatcttaatgcttgacc

SEQ ID NO: 504053 - DNA, 596 bp, Homo sapiens
ggctcactgcaacctccacctcccagattgaagcgattctcctgcctcagcctcccgagtagctgggattacaggcgtgtgccaccatgcccggctaatttttgtatttttagtggagacgggggtttcaccatgttggccaggctggtctcgaactcctgacctcaggtgatctgcccgcctcagcctcccaatgtgctgggactataggcatgagccaccrtgcctggtcgacaggtggtttttcaaatgtgtttcccagcatatgctctgttgggaattttaaagaaaaatcttccatggtgtggattcttacatcttctgccttagtaagattcacaatcaaggtgagtactggcctctaaaactcctcagcttttcctgttacaggtgaggaatggtgctggtatcagccagaaatctgttggatgctggccagcaatggcagagggggtatttactgaaaggttgatcacagagtaagtaagaaggcatgagaggcaggctcagaagctagtagacacaatgcagccaggatgctgccaccatggccaactgtggccaccatccttggacactgatcttaatgcttgacc

SEQ ID NO: 504054 - DNA, 522 bp, Homo sapiens
gcatgtgggtgtccccactgttcctaygtaaaccccccatgggacaggaatgcaggcttctcagcaaaggtgatggaggcctatagtcctccagatgactgagggtggatgatatggtttggctgtgtccccacccaaatctcgtcttgaattgtagctcccataatccctatgtgtcatgggagggacctggtgggaggtaattgaatcatggaggcaggtttttcccgtgctgttctcacaatagtaagtctcatgagatctgatggttttataaaaggcagttcccctgcacatgctgccctgcctgctgccatgtaagacatgcctttgctcctccttcaccttctgccatgattgtgaggcctccctggccatatggagctgtgagtccattgaatctctttcctttataaattacccagtcacgcatatgtctctattagtagcatgagaatggactaatacagtggaggagaatcctaagtaaaatcttcagagacacattggcttccccaacag

SEQ ID NO: 504055 - DNA, 555 bp, Homo sapiens
cagctgcaggtgccagtctgaaagaagagagactcccctgcaccccaactattttttaatacaggttgagcgaccctaatcccaaaatccaaaatccgaaaggcaccaaaatccaaaattttctgagccacaagtggaaaatgtcacacctgacctcmtgtgacaggtttcagtcaaaatgccatcgaaactgtttcatgcacaaaatcatttaagataatatataaaattaccttcatagcctggacaacatagcaagaccctgtctctacaaaaaatttaaaaattagccaggactggtgttgcacgcctgtactcccaacgactcgggaggctgaggcaggaagatcacttgaggtcaatcaatctgcattatacttctaagtagctgaagtgaaacattaaacagtaaagagatcattcttacatagctaagagtattcaattattcagctcctgagaactatttggctacacttacttattatctttcttttgccaactggtaagacatcctagcctgaatcacaaaaacactttctggttcacatctta

SEQ ID NO: 504056 - DNA, 555 bp, Homo sapiens
cagctgcaggtgccagtctgaaagaagagagactcccctgcaccccaactattttttaatacaggttgagcgaccctaatcccaaaatccaaaatccgaaaggcaccaaaatccaaaattttctgagccacaagtggaaaatgtcacacctgacctcatgtgacaggtttcagtcaaaatgccatcgaaactgttycatgcacaaaatcatttaagataatatataaaattaccttcatagcctggacaacatagcaagaccctgtctctacaaaaaatttaaaaattagccaggactggtgttgcacgcctgtactcccaacgactcgggaggctgaggcaggaagatcacttgaggtcaatcaatctgcattatacttctaagtagctgaagtgaaacattaaacagtaaagagatcattcttacatagctaagagtattcaattattcagctcctgagaactatttggctacacttacttattatctttcttttgccaactggtaagacatcctagcctgaatcacaaaaacactttctggttcacatctta

SEQ ID NO: 504057 - DNA, 624 bp, Homo sapiens
agctgcaggtgccagtctgaaagaagagagactcccctgcaccccaactattttttaatacaggttgagcgaccctaatcccaaaatccaaaatccgaaaggcaccaaaatccaaaattttctgagccacaagtggaaaatgtcacacctgacctcatgtgacaggtttcagtcaaaatgccatcgaaactgtttcatgcacaaaatcatttaagataatatataaaattaccttcatagcctggacaacatagcaagacsctgtctctacaaaaaatttaaaaattagccaggactggtgttgcacgcctgtactcccaacgactcgggaggctgaggcaggaagatcacttgaggtcaatcaatctgcattatacttctaagtagctgaagtgaaacattaaacagtaaagagatcattcttacatagctaagagtattcaattattcagctcctgagaactatttggctacacttacttattatctttcttttgccaactggtaagacatcctagcctgaatcacaaaaacactttctggttcacatcttagagtcgaaaaaggcttgcgaagcccctaaaggtgttgaggcagcttggcctgagaccgtgatagcttctg

SEQ ID NO: 504058 - DNA, 424 bp, Homo sapiens
ccatggggaggaactcctagactgtgggaaagtgttcagagaccccagtccagagcaggrtggtggagggccctagagggtcagtaggcttgggggggccgccgagggccctagagggtcagtaggcttggggggccgccgagggccctagagggtcagtaggtttggggggccgccgagggccgctgctctctagcaggtagcccctgaccctgggctgccctcatctgaagtcttcgctcccccaccctttggtctccgagtcagggaggggggcccttgtggacatctgggccagaggagctgcaggcctggcggtctctggaggcccctcctgaaggtctgggtgcggtgcggcacctccccaggccgccctgctctctctgctcgctctctccctgagcccccagaggcttcccttgag

SEQ ID NO: 504059 - DNA, 593 bp, Homo sapiens
tcattcttttctctagttgtaatctctcattacttattctgagtgtcttgtttctgcagttgctttacttacttgacctatataaaatagtaattcttacccctacaactccattatgtcctatcttctttgccttgccttatgtttttttcttggagttacagatacctgatgtagatagtatttactttttttatgcttgcattaatcacctagaatataaactccaaaagaggagctatttctcttttataatctatctaatatatcttggatatttgctcccacctaaatttcatgttgaaatgtaattccctgtgttggagatggggtctggtgggaggtatgtggatcatggsgcggatccctcatgaagggcttgggccatccttttggagagaagtgggctctggctctgacttcacacgagatctggttgtttaaaagtgtgcgacagctcccctgagcttcctctctcacttgctcctgcttttgccatgtgaagtaccagctactgcttcattttccaccatgagtaaaagatccctgaggccctccctcagcagtacatgtccctatgcttgttgtgcagc

SEQ ID NO: 504060 - DNA, 377 bp, Homo sapiens
catggtaagtatatgcttaatgttacaaaaagcttctaaactgtaattcagatttagtgtaatcatcaatgtataaaagttcctgttgcttcatattcccagcaacacatttttttgccattctaatatatagtggtactatattgtagttttaatttgcacttaattataatgttaagcatatttttatatgttgtgtgccatctatctgtctatcttatttggtaaagtatttcttcaaasttttgtccattttaaaattggtgtttggttattgcattgagttttgagagctgtttctgcaagttgaatagattttttttaatcagaatatgtgttttgtatttttttagtctgtatcatttaagagtgtctta

SEQ ID NO: 504061 - DNA, 484 bp, Homo sapiens
tgtgacttgatatcaaaagaattttttaaattgtgaatatagagtcagttaacaggattctaagttgtttcttgaaagctgttttgcaaataaaatgataaaatcttgggaaagctttagtaagggtagtgtttgtcatgcaaaataaagtcacaaaaccaggacttgaaagttatagagatgaagaaaactgaaatctctaaatgtgagaaaacaacctatgttactgtatctgagtgtcctggttggctttctctatgtcatccactgattggaactgctttcagaaataactgttttaagcaaataaaatagaaaattacctatactctggtctttgttcgcatacagattcacctctcaaatgttttacrtaagtagtctacctagatattctagaactcaaaatctaatcaaatgatttcagttctatgaatgcaccagtagagaaaaagattatctgtggtgaaacaccattaattaa

SEQ ID NO: 504062 - DNA, 588 bp, Homo sapiens
ataagcattttaagcatcattaatgattgtacagtgatttatttataataccattttcatccccttttatgcctcargtgtttaggattcttccttctcattatttcttcctttcctttttcccctttctttcttttccctctcccctcttcctccttccttccttcctttctctttctttcttttctttctttctctctctctctccttccttccttctttccttccttccttctttctttttttctttcttttcctccctccctttccccttctttccttcctccctcccttccttcttctctttcttcttgcctattttttatttgaaatgtctttattaagcctgatatttatacacagtgaataagaatactaaatactttctgaactgaccattgtgttggctgctgtaagaattaaaagcaatactaagtcacactactggaataaactagactattctaagtatcacaagcatctgtagctaggagagcctatataaatatcttaggcatcaccttctccattatctcattcaatgcaaaaatctcagatgaatagccaacttcttcaaaatatttaaca

SEQ ID NO: 504063 - DNA, 500 bp, Homo sapiens
gatacttctttatagcaatgcaagaacagcctaacacaattaatgtactcaagatcatgcatctagaaggagaagtataaaaaaaattgaaccaaggtaatctgctaagttgaagcataacactatacyatagttgcttataaaaagaatctatccatacacagatgcttattgaaattcatgtatatgattaattttttctggcaatcatttttattctgagctgaggaaacccaggtggagattcatgtggtctcagggtagagttatgcctcctttttttctcttcgctgagattctcttacccaggagaattgagaatgagtccttaaatatgtaaatgtattttctttagggcacaaatcctactgaaagagggaggatggtaagtaaaatgaataaatttcattttgttgtcattgttgtttatcttttgtccttaaattttcccccagtcaaaatatgcttttaatgacatggaatttgaaaaattattgtgt

SEQ ID NO: 504064 - DNA, 571 bp, Homo sapiens
ctgtgtgactcaggcaaattacttgatctgtttctgtctcagtttctttattggtaaatgaggatagcaacagtatgtaccttatagaggtcctgtgaaggatcaggtgtaaaatgtttgtggatagcaagtgattaataagtgctagctgtttattactcttctaattataaaaattayatatcttcattgttctaaaaattcaacaatataacaaatttaaaaaaataaaataaatcccccaaattattccatgactgttagcattttagtgaaaaatccttccggtcatatttcttcgtacatgtgtgatgtgcagaatctgaaatttatagcacaggaggaaaaattacagtaagctccactggtgcctccaagagggatgagtttcatatccttctttgatattcacttatttagtgtggcagtcaactggtctttcagacaacagtgcctatgaccatcaaaacagagtgggcagtggtctggcttcttcactgaagttagggttaggaagatttagaatctatgggcagtagatatcaacctctgcactatttcggtttttatg

SEQ ID NO: 504065 - DNA, 571 bp, Homo sapiens
ctgtgtgactcaggcaaattacttgatctgtttctgtctcagtttctttattggtaaatgaggatagcaacagtatgtaccttatagaggtcctgtgaaggatcaggtgtaaaatgtttgtggatagcaagtgattaataagtgctagctgtttattactcttctaattataaaaattacatatcttcattgttctaaaaattmaacaatataacaaatttaaaaaaataaaataaatcccccaaattattccatgactgttagcattttagtgaaaaatccttccggtcatatttcttcgtacatgtgtgatgtgcagaatctgaaatttatagcacaggaggaaaaattacagtaagctccactggtgcctccaagagggatgagtttcatatccttctttgatattcacttatttagtgtggcagtcaactggtctttcagacaacagtgcctatgaccatcaaaacagagtgggcagtggtctggcttcttcactgaagttagggttaggaagatttagaatctatgggcagtagatatcaacctctgcactatttcggtttttatg

SEQ ID NO: 504066 - DNA, 571 bp, Homo sapiens
ctgtgtgactcaggcaaattacttgatctgtttctgtctcagtttctttattggtaaatgaggatagcaacagtatgtaccttatagaggtcctgtgaaggatcaggtgtaaaatgtttgtggatagcaagtgattaataagtgctagctgtttattactcttctaattataaaaattacatatcttcattgttctaaaaattcaacaatataacaaatttaaaaaaataaaataaatccccmaaattattccatgactgttagcattttagtgaaaaatccttccggtcatatttcttcgtacatgtgtgatgtgcagaatctgaaatttatagcacaggaggaaaaattacagtaagctccactggtgcctccaagagggatgagtttcatatccttctttgatattcacttatttagtgtggcagtcaactggtctttcagacaacagtgcctatgaccatcaaaacagagtgggcagtggtctggcttcttcactgaagttagggttaggaagatttagaatctatgggcagtagatatcaacctctgcactatttcggtttttatg

SEQ ID NO: 504067 - DNA, 615 bp, Homo sapiens
gcttcccagctactaggtgccaggtgctctgtaactcccctcatccttggcacagcccaatgcagtcagtagcattattgcttccattttacagatgaggaaatagaggcatggagaagctaagtcacacagccagcaagaagcgtggctgggatttgaagccaggaagtatggtgctaaagtttgggctcatcgtgaccatgccctcctgcctcttatgcaaaaatcactgcttctgggtccagtctgccaggctctgacctgggctggaagggggctgccatgaaccagttattccaaggctacttgggcagcacgacacgtggagacttcaggagaagtggccttagcccaggggctcacaaaaagatgaggcacaaggcaaggccctgcacctccttagactcacagagctcaaatttgcaagtctcctctttgactagagaagccgggatgggctggggagaggagggaatggttgggagaggcacttcctaggccctcaaatttcatctttgsttctgctcccatccttcccagccttggccctcaaatctggccatttgctcctgcccacgagctgtcccaccctttgggttatactgggggcagcca

SEQ ID NO: 504068 - DNA, 606 bp, Homo sapiens
tgtctggggagatttccttccagttgagccatccaaggactcctccccagcccttatctgtggaatggaaaaaatactagcccacacctcatagattaagagaatcaaatgagctcatttatagaaagcacatggaacaatgacaagcatgaaataatagtcactgatgtttactgagactaacagcatgtcacacccagtgcaaaatgcctcacgtcctcccacagagtcttcataacaacctttagctcatggaagtactatttttaccctatttggccaatgaaaaagcagaggcccaggaaggtgaagtaacttgtccaaggtcacacagcaaggaggcaatagagctgggatttgaaccccggctgcctgactccagagctgtacaaagccagataccacagaggctgggttattgttcgtccagacccatgttcccacaggtcctctcatcccttacctgctccctttctaccttgtayttctatcctcctgctctgaggagattcctctccctgaagatgcttgggcttgagggaaccaggaggagaggaggtgaagttggcctggatgactctgtggtcaggatcctaatgacccagt

SEQ ID NO: 504069 - DNA, 582 bp, Homo sapiens
ctccaccacctacaagctgtgcaagcttggatgggctagatgacctctctggccctcagcttcccaacaggaataaaaagaacacccaccttgtgttctgacagcattaaaccccttaatccatgtaaatccacagctgagcctgggctcaggcacacagtaggtgcttagtaaacatatgcagatggacagrtgccagggcagtggttctgactgctctggggtaagcagtaggtgctgcatagggacaagtgtcttactttagtcactgttcccagcctacctcctcccctctccactcgctaaacccctgaagggtagggatcatgtctcagtcatctttctttgcacatagtaggtgctcattaagtgctggcattgagaggaggacattgatgttggaggagtgcctcctgtttgccctgcaaactgagaggcagattctcctaccccaccttacaggtgaagaaaccgaggctcagggacccctgagagcagagggaagggacgtcattctgcagagtgaccagcagggggcgagcgggactgctctgtggctccgaggacccagcggcaggtgca

SEQ ID NO: 504070 - DNA, 582 bp, Homo sapiens
ctccaccacctacaagctgtgcaagcttggatgggctagatgacctctctggccctcagcttcccaacaggaataaaaagaacacccaccttgtgttctgacagcattaaaccccttaatccatgtaaatccacagctgagcctgggctcaggcacacagtaggtgcttagtaaacatatgcagatggacaggtgccagggcagtggttctgactgctctggggtaagcagtaggtgctgcatagggacaagtgtcttactttagtcactgttcccagcctacctcctcccctctccactcgctaaacccctgaagggtagggatcatgtctcagtcatctttctttgcacatagtaggtgctcattaagtgctggcattgagaggaggacaytgatgttggaggagtgcctcctgtttgccctgcaaactgagaggcagattctcctaccccaccttacaggtgaagaaaccgaggctcagggacccctgagagcagagggaagggacgtcattctgcagagtgaccagcagggggcgagcgggactgctctgtggctccgaggacccagcggcaggtgca

SEQ ID NO: 504071 - DNA, 642 bp, Homo sapiens
tcaaacagtgtccagaaacacataaaagagtaaaaatattttatattttaggtgtaacctagtaataagtatgttttaatattatgaaatctgtttaagcatttacattaatagatctaaaggaaaatattttgatcaacttcactgaggtttgaaagtaattagaaaatttcaacaaatattaaaaattaaaaattagagaaatatctcactcaacactaaagtaaacaccatggttcaggagaaaacatttggaacttcccccactaaagtcaaagaaattcaatattactaattcaatttaacattattctagagagaccagctataaaactagataaaggatataaattaaatgttacatgtgaacaggaaaaaaataaaattgacattattagacaatgatatcattgcacacataggaaacacaagaaaataagctgaaaaacaattgagagcaccaaacttagagttattaaagataaatggaaccaaaatgttaaacatgacaaatattcaatgtttaaaaggctagggtagctaaattagtatcaaagtatattttattaaaaaatcagtatcatggataaaatgtcackgcttaatgattaaagcattgtaaatctcttagcttacgttaaa

SEQ ID NO: 504072 - DNA, 612 bp, Homo sapiens
agcgtggtgtcagacctgacatcaaaagagactccttcagctgaatctcccactgagagaaagagaagaaaagaaagattcctaaagcctttgtcctaataacctacacagccaccatcaaggccaaattcctccagcctagaccactgaggcagctgtagtaattgctgacatttatcacaactgaagaagctgcgtggtgctacactagtactcatttttcactaatgtactaagataaaagagcaaaacaaaactgtaaactgcttttatttttacttcttatttttttaatttattattatttttatttttacttcttagctgcactgttttgtttctagtagggctttgctatgtcttattaatctcagtgtctgagattaataagaygtattgtcttaatatgtcttaatatgacataaaaagacatattgtcatttctctgaaaaatttgttttgcatttctccaagcatacttgttgccaggtgtttttgggaagcaatgggaaatactatgctataattagtagccattttaaattcttttttttttttttttgccagaaaatagtgtttactaatagaactcagaggaaaaattgtatcttt

SEQ ID NO: 504073 - DNA, 584 bp, Homo sapiens
actttaaattttcttcagaaactttttcccttgcattagcaatttggctcactgtttggcgcaagaagcctaactttatgcctatctcagctttcaacatgccttcctcactaagtttaatcgtgtccaatttttgattgaagtaagagacatgcaactctcctttcacttgaaacttagaggccattttagagttgttaattggcctaaattcaatattgttttgtctcagggaagaggatggtcccaggtaagggaataagaaggagaaatrgttggtagttgcagtcagaacacacacatttattcatcattgcagataactgaaagtcaaagaatttgtagctttgtaacataaaaaaaattctgtaaagttgaaaggtgagtcaaacaattagaatgtatttcattcacaaccactgttgtatgtatctacattgatattttttcctcatttttctgattgaaatatgttttaagacctaaaatatgggttacaaagcaacttccttgccctataaagttataccatatcacagagtatttacagatcattgcataaccaacatagatcataacatcac

SEQ ID NO: 504074 - DNA, 584 bp, Homo sapiens
actttaaattttcttcagaaactttttcccttgcattagcaatttggctcactgtttggcgcaagaagcctaactttatgcctatctcagctttcaacatgccttcctcactaagtttaatcgtgtccaatttttgattgaagtaagagacatgcaactctcctttcacttgaaacttagaggccattttagagttgttaattggcctaaattcaatattgttttgtctcagggaagaggatggtcccaggtaagggaataagaaggagaaatagttggtagttgcagtcagaacacacacatttattcatcattgcagataactgaaagtcaaagaatttgtagctttgtaacataaaaaaaattctgtaaagttgaaaggtgagtcaaacaattagaatgtatttcattcacaaccactgttgtatgtatctacattgakattttttcctcatttttctgattgaaatatgttttaagacctaaaatatgggttacaaagcaacttccttgccctataaagttataccatatcacagagtatttacagatcattgcataaccaacatagatcataacatcac

SEQ ID NO: 504075 - DNA, 422 bp, Homo sapiens
ctgccatacatcttttcagactctttagtttttatgtttgagggatttttgttgtttatttgggtttttttttttttatttttaggcagaaattgtcagtcgacaaagtagcctaaagtccttcctttcttaaaaatcttatattaaatgtatccattcataatggttattggagcataattttgttagcatgattattttatggggactccttgccaaagaacttttatccttacagactttaaattaattaatttgtaaggccttgactgaatcattcagaattccaagagataaacatcaaattggttttttttcaaaccatgttccttttaacatgagattgcattagataataattacaaattattgtaagtgggcttgagttcttgatttsgctctcagcttgaacattactggta

SEQ ID NO: 504076 - DNA, 639 bp, Homo sapiens
ggattacaggcactcgccaccatgaccagctaatatttgcattcttggtagagatggggtttcaccatgttggccaggctggtctcgaactcctgacctcgtgatccacctgcgtcagtctcccaaagtgctgggattacaggtgtgagccaccatgcttggccctctgatccttctttaaatcaaaaccattagaatttgaactgcaaaattaagggatacacctttttaatgcttttaatacacgctgccaattgccctctaaaaatatatttattaattacaaacccaactgtaggctaggagtgcctgtttcccaaaaactcaractaaattttgtaaattttcattattttttataagtaggatggggtattatttcatatgtctgttacttttaattcttctgtgacctttctgtttataatcattacccatttctatagagtatttttaattcatatgtgtaatttagatagacctacatttgcttaaactttactttcctcataagcttgtaatgtcacctttattatctgcaggttcttatatattgcaaggtcatttacagggctttttactgactttgtcccttggttcaatgtgttagtcatttttgcaagtaagtcccattctctt

SEQ ID NO: 504077 - DNA, 536 bp, Homo sapiens
tgtatcaatgcctgatagacaagaggtggactgtgccagtttttaagctattgtttccagccccaacgatgtcctactacattccactttgggatactggggctgagaatgtgtaagctgcatttctcttttgctagttgaacccctgatagacactacatataggctagaacagcaaaggacttgttccttcttgtttatttcagtgactgttcttgaccctaggaakagcagtagagtctagcttctagctttcttatcagcacaccaagaatcagcattatcattcctcttaagaagtttcaacatgctttaggccgtattccccattccctcacacccctacatccctctctgctcaaaaatctgagatctagttctgtagagcactagtatactcatgagctatcagtaccagttgactaaagcctcctactcaggagtttgaattactgccctgtgaggctcctccttcaatgtcaggtgatatgagatatcactactaaataaacagtgtcccctcttcagaaatctga

SEQ ID NO: 504078 - DNA, 536 bp, Homo sapiens
tgtatcaatgcctgatagacaagaggtggactgtgccagtttttaagctattgtttccagccccaacgatgtcctactacattccactttgggatactggggctgagaatgtgtaagctgcatttctcttttgctagttgaacccctgatagacactacatataggctagaacagcaaaggacttgttccttcttgtttatttcagtgactgttcttgaccctaggaatagcagtagagtctagcttctagctttcttatcagcacaccaagaatcagcattatcattcctcttaagaagtttcaacatgctttaggccgtattccccattccctcacacccctacatccctctctgctcaaaaatctgagatctagttctgtagagcactagtatactcatgagctatcrgtaccagttgactaaagcctcctactcaggagtttgaattactgccctgtgaggctcctccttcaatgtcaggtgatatgagatatcactactaaataaacagtgtcccctcttcagaaatctga

SEQ ID NO: 504079 - DNA, 462 bp, Homo sapiens
caaaacatgaatagtaaggaagctaaatgagaaccaggaaaaatatgtaaaccaacttaaatcagaaaaacagttcaggatttgaaagaragcagatagataattaaaaaaaaaacttctgaaaataaaaaaaaattactgaaggaatattaaaatgcagttgaattcttcaacaatagaccataacagacagaacagtttcatattgaacataacatgaagaccagtgtttcaaattaacctagtgaaaaaaaattgaaaaatgaacaaattctttgagaaatatgagattatgtaaaggaatcaaacctactacttttaaacattcttgagggagaagaaccaaaagtaaaattttggaaaacatatttgtgggaataatttgggaaaatttcctgatcttgctaaagatataagcatgtagccaaaataaatttagagaacatctggaagatactgtcc

SEQ ID NO: 504080 - DNA, 462 bp, Homo sapiens
caaaacatgaatagtaaggaagctaaatgagaaccaggaaaaatatgtaaaccaacttaaatcagaaaaacagttcaggatttgaaagagagcagatagataattaaaaaaaaaacttctgaaaataaaaaaaaattactgaaggaatattaaaatgcagttgaattcttcaacaatagaccataacagacagaacagtttcatattgaacataacatgaagaccagtgtttcaaattaacctagtgaaaaaaaattgaaaaatgaacaaattctttgagaaatatgagattatgtaaaggaatcaaacctactacttttaarcattcttgagggagaagaaccaaaagtaaaattttggaaaacatatttgtgggaataatttgggaaaatttcctgatcttgctaaagatataagcatgtagccaaaataaatttagagaacatctggaagatactgtcc

SEQ ID NO: 504081 - DNA, 606 bp, Homo sapiens
gcaagtgctgggagactgaaggccgatcttgaagggccctttcatcttagtagggcctttagactttggatgttttatcattctaagattaatgaaaatttattcaaggagtatttagttatttcagtagaaatgggcaaaatctttaatttgtggggaacatattagagaagaacaaaagtataggcatgaaaactattgagaaagcaggtttagataactaactgctagtagtaagggtggtggtgggagtgatagtagtagtagtagttgtttattatagaattgtagagatcaacaatgattatgattcrttgaacccagagagagtaggagagtctaagactgatttttgaggtaagatgacttgtgatgtggaggagagagaaggaataatagagaacacttatgtgtttgccttgagcgactggatggctaacagcactatttactgatgtgtggagcgtgggctaaaacaggtttgaggaaaaaaggcatatatacatttcactgtagacatgtagagatggtaaatagctgactagtcatacaagtctggagcttaagggtaagttcagaccattgatagaaacttaggaatcatta

SEQ ID NO: 504082 - DNA, 645 bp, Homo sapiens
agctaaaaaaaaaagtcaaatctgaaacaaagatatatatagactgaaatagaagatgtggatgcagaagaaccaggagaaacacatctctattacaataccctactctaagttttaccagtarcataagggaatggatataatcgttaccaccagaattactccatggctaatggttggctgagggaattgactaggctgatatggtttgttctgctgaaaaagatctcccatcctgcagcaggtagccctagctccttgggattccaaagaacggtaacagagcaagcccctaagcacaaccttttccagcttcttatatcaagttttccaatatttccttggcaaaactaagtcttatggccaactcaaaatttggggaaatggatttcacttttgactgaacaatctgcactatctccttgaaaggatatagatgtagagaaaatagtatttcacaactattttttatatctaccacccagtcctttcatatctatctagcaattattttaataatttttagatatcactatatgtatatgttaattctgctatgactcacacaatgttaattggcagagtgaaaataattttaactgttgtgcagaacaaaacaagtgttttccattccaaatatccaag

SEQ ID NO: 504083 - DNA, 645 bp, Homo sapiens
agctaaaaaaaaaagtcaaatctgaaacaaagatatatatagactgaaatagaagatgtggatgcagaagaaccaggagaaacacatctctattacaataccctactctaagttttaccagtagcataagggaatggatataatcgttamcaccagaattactccatggctaatggttggctgagggaattgactaggctgatatggtttgttctgctgaaaaagatctcccatcctgcagcaggtagccctagctccttgggattccaaagaacggtaacagagcaagcccctaagcacaaccttttccagcttcttatatcaagttttccaatatttccttggcaaaactaagtcttatggccaactcaaaatttggggaaatggatttcacttttgactgaacaatctgcactatctccttgaaaggatatagatgtagagaaaatagtatttcacaactattttttatatctaccacccagtcctttcatatctatctagcaattattttaataatttttagatatcactatatgtatatgttaattctgctatgactcacacaatgttaattggcagagtgaaaataattttaactgttgtgcagaacaaaacaagtgttttccattccaaatatccaag

SEQ ID NO: 504084 - DNA, 617 bp, Homo sapiens
acaagcttttcaacactataagggttccttcttttctagcttctaatagcatttccttactctcctttatgcccctactgacagcccaaaagtcactgttttaagattttgtttcagtagcacctctcttgcaggcgccaaaatatattccagacatctactgccaaccacccacctcaaaaaaaaaatttaatggcataaaacaacatgttcttatgctcccagactccatggattaggaattcagacagagcactgcagggatggcttgcccctgctccatgatgtctgccttggctaaaaagacttcaaggctggctgggcgcagtggctcacgcttgtaatcccagcactttgggaggctgaggcataaggatcacttgagcccaggagttcaagaccaggctgggcaacatagcaagaccctgtctctacaaaaactagtaataataataaaattagcccagtgtgctggaatgcacctgtgctcccagctactcaygaggctgaggcgggaggctcgcttgagcccaagaattccaggcttcagtgagctgagatcttgccactgcactgcagcctggcaacagagtgagacactgtctctcaaaaagaaa

SEQ ID NO: 504085 - DNA, 506 bp, Homo sapiens
ttaaaaataatcatgaagactgggtagtgatacgaaaaactgccatggtattaaataaaaagaatacaaaaggatttgtatactatgatcactaactttgcagacagctatgtctccatgtatacaagggttgaaaggtaatactcagaaaagaaaatggcatcacagggtggaatgatttgagttgcttatacttatatttttttcagaattttctttactgttgtactgtctattacgtataatttttcaagtctttctgaagtaaattgggatttctgagyttttctctaattctcacttggaaaaaaagcagaaacactgcttcttcccatcttgattaacagtgctctacttaaaaaagaaaacgaacatatttccaaatgtccacatctaaagatggagagcaagaaaacagagctggattcattcaggatgttgctgctatctgaaggactgatgtcgaattcaggaacccagtgaggagagaaaggaagagggatcac

SEQ ID NO: 504086 - DNA, 605 bp, Homo sapiens
gtgtttatttctttgtggcttgtctgttgggtttgttctgctgagaaatgcaaggccctatccccttcttctgtgtcttgggcagacggtatcagcagagcagtgataagcgtcccccagtcagcatatagatcggagctcctgtaccttgcttttgtaaagaaattataaaccagaaggggagtctggctgaatcaaaagagcctctaggctgagcgggcccctctctgaggagtaatatgtgttgtatgaacaacagggatagggacatggcagacccagtgtcaaagagcagaatgggaattgggaaggctgatgggagggtgagggagatagayggctctagatagtgaagtggcaaatgtctctgggcatttgtggctaaggcagtaagaggcatcaaggtaagttcctggtacttcatcttcccaagagatagcctgatcccagccccaggtgagacttgccccagcagtctcactcctctttcagaggagtggtggattgggatgaggaggttctaatctgtttctaaagagaatgaatagctccttatctacaagtgtaaattataaagagattttcttttgcaacttcagggaaca

SEQ ID NO: 504087 - DNA, 581 bp, Homo sapiens
gcttctaaggcatctgaatgaaaactaccatgtatattaatgtgggcaaaggaacgatttacctgactttaaagaaatgggttcagggagcacaragaaaggccattcattaggtggagcctgccacagagcccacattatccttggaatcaaaggggttgataaggctgtgcaattggaaaatcagtaggcattaagggagagaaagtagattgttttagaaacttggtgctacttctaccatgcctactatcagtgagttcgactatcatcttttcttccttcttactgttgctttttttctgtcccatagttcttctaatttacatgaaatgttggcacttcataaatattacccacctataaaatgtttttttccacatagcaaaccaatcactgcgagttgatgtcttttctttgttagtgtagcatttcacgtgagtgttcacagccacttcttcaccaaggaagacccaatcatcccctaacctagtttcaaatccaggctgttctaaaaactaaacgatgctagaaaactggtctcagaatagtgaaggtttcttatgttcatcacagagtca

SEQ ID NO: 504088 - DNA, 581 bp, Homo sapiens
gcttctaaggcatctgaatgaaaactaccatgtatattaatgtgggcaaaggaacgatttacctgactttaaagaaatgggttcagggagcacaaagaaaggccattcattaggtggagsctgccacagagcccacattatccttggaatcaaaggggttgataaggctgtgcaattggaaaatcagtaggcattaagggagagaaagtagattgttttagaaacttggtgctacttctaccatgcctactatcagtgagttcgactatcatcttttcttccttcttactgttgctttttttctgtcccatagttcttctaatttacatgaaatgttggcacttcataaatattacccacctataaaatgtttttttccacatagcaaaccaatcactgcgagttgatgtcttttctttgttagtgtagcatttcacgtgagtgttcacagccacttcttcaccaaggaagacccaatcatcccctaacctagtttcaaatccaggctgttctaaaaactaaacgatgctagaaaactggtctcagaatagtgaaggtttcttatgttcatcacagagtca

SEQ ID NO: 504089 - DNA, 505 bp, Homo sapiens
atggggaaaaaaagaagaactactgtgtgttaggtgctgtgtgaggtcacagtgatgtagccgtgagcataacagagttcctsctctcaagaaaccgacaggtctggttttggagaaagacaagtaaacacataggcagttactctatactgagtgataaacaagatgatcttgggttttgctattgcccaagaagatttgagtcaagctctttggggtttaccttttgtcttcaccatttcctaggtggtcaattcttttacatctctgtgttgaatattctcatctctaaaatatgaataatattataactatcccatggtagtgttgagaggattaaatgagataataccatgcttggcacataagtatttcataaatatttgctatgatgatgatagagaagaagataacaaaggaatttgaaatggtaaattggagtgctgtgtgactttcaccaatagttgaacttgtaagacgagacgagatggtcagagaaggtttt

SEQ ID NO: 504090 - DNA, 505 bp, Homo sapiens
atggggaaaaaaagaagaactactgtgtgttaggtgctgtgtgaggtcacagtgatgtagccgtgagcataacagagttcctcctctcaagaaaccgacaggtctggttttggagaaagacaagtaaacacataggcagttactctatactgagtgataaacaagatgatcttgggttttgctattgcccragaagatttgagtcaagctctttggggtttaccttttgtcttcaccatttcctaggtggtcaattcttttacatctctgtgttgaatattctcatctctaaaatatgaataatattataactatcccatggtagtgttgagaggattaaatgagataataccatgcttggcacataagtatttcataaatatttgctatgatgatgatagagaagaagataacaaaggaatttgaaatggtaaattggagtgctgtgtgactttcaccaatagttgaacttgtaagacgagacgagatggtcagagaaggtttt

SEQ ID NO: 504091 - DNA, 505 bp, Homo sapiens
atggggaaaaaaagaagaactactgtgtgttaggtgctgtgtgaggtcacagtgatgtagccgtgagcataacagagttcctcctctcaagaaaccgacaggtctggttttggagaaagacaagtaaacacataggcagttactctatactgagtgataaacaagatgatcttgggttttgctattgcccaagaagatttgagtcaagctctttggggtttaccttttgtcttcaccatttcctaggtggtcaattcttttacatctctgtgttgaatattctcatctctaaaatatgaataatattataactatcccatggtagtgttgagaggattaaatgagataataccaygcttggcacataagtatttcataaatatttgctatgatgatgatagagaagaagataacaaaggaatttgaaatggtaaattggagtgctgtgtgactttcaccaatagttgaacttgtaagacgagacgagatggtcagagaaggtttt

SEQ ID NO: 504092 - DNA, 631 bp, Homo sapiens
gaagagcccagcagtgcaggtttttaatgttgctggtatttagaatactcaaaaaatgaggtattaaaaattggtttagacatggtatggtccagtgggctcaggggagccttagattctgacaacattcctcagggttattacaaactcaaggaaaatcttkccctttttccttttattcagcacagctcagtttttaacctatgttacgttgttcttgttttgttgttgttgtttatttgagatagagtcttgctctgttccccaagctggagtgcagtgccgtgatctcagctcactgcaacctccagctcccgggttcaagcaattctcctgtctcagtctcccaagtagatggggctacaggcgcacgccaccacgcctgtgtaatttttgtaattttaggagagacagggtttcaccgtattggtcagcctggtctcgaactcctgacctcaggtgatccacccaaagtgctgcaattacaggtgtgagccaccgcgcccagcctgttttatgtattttgattccacataacactttgcagtttgtttatgaaaaaagaaagccttttaatctctaaaagaaggttagatctcttcttcattttatagctcaagaacatttctgg

SEQ ID NO: 504093 - DNA, 631 bp, Homo sapiens
gaagagcccagcagtgcaggtttttaatgttgctggtatttagaatactcaaaaaatgaggtattaaaaattggtttagacatggtatggtccagtgggctcaggggagccttagattctgacaacattcctcagggttattacaaactcaaggaaaatctttccctttttccttttattcagcacagctcagtttttaacctatgttacgttgttcttgttttgttgttgttgtttatttgagatagagtcttgctctgttccccaagctggagtgcagtgccgtgatctcagctcactgcaacctccagctcccgggttcaagcaattctcctgtctcagtctcccaagtagatggggctacaggcrcacgccaccacgcctgtgtaatttttgtaattttaggagagacagggtttcaccgtattggtcagcctggtctcgaactcctgacctcaggtgatccacccaaagtgctgcaattacaggtgtgagccaccgcgcccagcctgttttatgtattttgattccacataacactttgcagtttgtttatgaaaaaagaaagccttttaatctctaaaagaaggttagatctcttcttcattttatagctcaagaacatttctgg

SEQ ID NO: 504094 - DNA, 468 bp, Homo sapiens
aagtcccatcggtgctggcggtgacacactcctcgttgttcctcttcaccctaatgcaggacactgatgacttgtgttccttcagggcctcctccagcttctgggtctgacagcctatctgccataccctcacctgaaagccacagagcacaggatcttgatccacacttgggacttctgaagggataggaaaagattccaagagmtttttcccctttgctatgcttgatttgtgtttttttaattccctgtctttgtctcggttgggtggggtgtgaatgctaagttgaagggcaggcatattcatgtataagatgtgatcatcttcaacagagcttcaaaaatgctactaacaatcctgtacctgcttgtacatacaggctgagaaatttaatcagacacctgctatgcaaatcgataatgcaagggccaacgcaaaaccaagtgaaataatgtctattcactttt

SEQ ID NO: 504095 - DNA, 591 bp, Homo sapiens
tttattaagagcctcctatgttaaggctctgtgctggtgaataaagcagacactgttcctacccttgaggaactgtctagtgagggagacagataaataaacataattccatttgaatatgataagtattaagataaagatatgttcagggtatgaaagcagcatagaggaagggcatttaacacaaggacatggttggaagcgaggaagtcagaaaaggttttatttttttgcttagctgaacttcctgagcttcatcaaatcattcaattgtaaaactgagatcataaaaatacctactttgtagggatattgtgagaatttaatgagataacctttgtaaagggtctagcatattacctagcacatagtagaatcttrgtatttgcttatccaagaaaaataatttatttggacttggattttcaaactgctgataacttgtgatgccttaaaaccattactttcttgggatttttttttttttttgagacaaagtctcgctcttgccccccaagctggagtgagatggggcgatcttggctcactgctgcaacctccacctcctgagttcaagcaattctccagcct

SEQ ID NO: 504096 - DNA, 567 bp, Homo sapiens
  misc_feature (1)...(567): n = A,T,C or G
ctgttatctgcagtgataggctaggatttccaatgtgagatttatctattaaaaataaaattacaactgtaatttttgaaggggttttctatatgcattctaggcctgtcctagtccaatttagctagttatatagtattttaggtaagactgcctctccttttctttttgcatgagtgattttgtttaataatttcagtaaactcaatcaaagaagaaaacrtatcctattaattggccataattctcccacacaaatctttgggtataactatcatagatgtagatgtgtatagagcctggtttaatttcttaacctcaatgatattaacattttcgactagaaagttttttgttgcagagggggctgtcctgtgcatggcagggtgcttggcagcatcccctagcctccacctgctagattcttgtagcaccctcaangttgtgacaatcagaaacacctccagatactgccaaatatctctggggtgaaaggtgggtggggaggcataatcaccgcagttaaaaaatcactgatgtagagagtgtatatatatatatatatat

SEQ ID NO: 504097 - DNA, 621 bp, Homo sapiens
agttcttatttgttgttgctgtttttttttttaatttttaattttttttgagatggagtttcgctcttgtcacccaggctggtgtgcggcggcatgatataggctcactgcagcctctgcctcccaggctcaagcgattcgcgtggcctcagcctcctgagtagctggggttataggcacatgccatcatgcgcggctaattttgtatttttagtagagacgggtttcaccatgttggccaggctggtcttgaactcctgacctcaagtgatctgcccacctcggcctcccaaagtgctgggatgacaggtgtgagccaccgcgcccggctgcaagtttggtttttaaaacaaaagagtaccaattccatttcctgccacacccatgaaggttacacacccatgaaggttctgaccatcagcgaaatatttaatgcaagtatctcttccatgtaaaccctgctgcagttagtccttcaagctcctgcatttctgycttctttagtttgcatgtatgggcacggcatttatgagtctgtatcctgagaggcagtgtgaccaattatcaggacagagcagcagtgctgtgtgtcctcctggctgcatcttcacaagctgtggc

SEQ ID NO: 504098 - DNA, 621 bp, Homo sapiens
agttcttatttgttgttgctgtttttttttttaatttttaattttttttgagatggagtttcgctcttgtcacccaggctggtgtgcggcggcatgatataggctcactgcagcctctgcctcccaggctcaagcgattcgcgtggcctcagyctcctgagtagctggggttataggcacatgccatcatgcgcggctaattttgtatttttagtagagacgggtttcaccatgttggccaggctggtcttgaactcctgacctcaagtgatctgcccacctcggcctcccaaagtgctgggatgacaggtgtgagccaccgcgcccggctgcaagtttggtttttaaaacaaaagagtaccaattccatttcctgccacacccatgaaggttacacacccatgaaggttctgaccatcagcgaaatatttaatgcaagtatctcttccatgtaaaccctgctgcagttagtccttcaagctcctgcatttctgtcttctttagtttgcatgtatgggcacggcatttatgagtctgtatcctgagaggcagtgtgaccaattatcaggacagagcagcagtgctgtgtgtcctcctggctgcatcttcacaagctgtggc

SEQ ID NO: 504099 - DNA, 621 bp, Homo sapiens
agttcttatttgttgttgctgtttttttttttaatttttaattttttttgagatggagtttcgctcttgtcacccaggctggtgtgcggcggcatgatataggctcactgcagcctctgcctcccaggctcaagcgattcgcgtggcctcagcctcctgagtagctggggttataggcacatgccatcatgcgcggctaattttgtatttttagtagagacgggtttcaccatgttggccaggctggtcttgaactcctgacctcaagtgatctgccsacctcggcctcccaaagtgctgggatgacaggtgtgagccaccgcgcccggctgcaagtttggtttttaaaacaaaagagtaccaattccatttcctgccacacccatgaaggttacacacccatgaaggttctgaccatcagcgaaatatttaatgcaagtatctcttccatgtaaaccctgctgcagttagtccttcaagctcctgcatttctgtcttctttagtttgcatgtatgggcacggcatttatgagtctgtatcctgagaggcagtgtgaccaattatcaggacagagcagcagtgctgtgtgtcctcctggctgcatcttcacaagctgtggc

SEQ ID NO: 504100 - DNA, 669 bp, Homo sapiens
agagttcataaagatgaaatagactgctagactattaaagtactgcttgacatatatagacggaaatacttttggttgcctgggaagaaatctaactcacgttaccatgacagagatttggcctcttaccaattttcagaactagactagttcagactcctagcctcttcactgagaaagtatcctacagcctgacaaaacatgtatattgtgactctttccctaagcttttccataagggacttccatgtaaccatttactagattgactgtgctctaaaaaaaggaaaacagcctgacattttaggggttatcagatattgacactgaatttatgctaatccttggagaccctaaatgccaatgtggtccgccagtcagaaagggcttatagaaatcaggtgatagatggaaacttggcccaagcccayctaatggtgggtccaaagttaccacagatacattacagtattatgtccctgctcccaggagaggaagtatacttagtttaatgggcagcatccacattggatccctgacccatggagtaacggctattatgttactaatgatcagatgtaagctaatgaaccctccactccttggggatttacagagattgtggagtcctgaaaagataagtaagcaacaacaagaaagggaccccag

SEQ ID NO: 504101 - DNA, 669 bp, Homo sapiens
agagttcataaagatgaaatagactgctagactattaaagtactgcttgacatatatagacggaaatacttttggttgcctgggaagaaatctaactcacgttaccatgacagagatttggcctcttaccaattttcagaactagactagttcagactcctagcctcttcactgagaaagtatcctacagcctgacaaaacatgtatattgtgactctttccctaagcttttccataagggacttccatgtaaccatttactagattgactgtgctctaaaaaaaggaaaacagcctgacattttaggggttatcagatattgacactgaatttatgctaatccttggagaccctaaatgccaatgtggtccgccagtcagaaagggcttatagaaatcaggtgatagatggaaacttggcccaagcccacctaatggtgggtccaaagttaccacagatacattacagtattatgtccctgctcccaggagaggaagtatacttagtttaatgggcagcatccacrttggatccctgacccatggagtaacggctattatgttactaatgatcagatgtaagctaatgaaccctccactccttggggatttacagagattgtggagtcctgaaaagataagtaagcaacaacaagaaagggaccccag

SEQ ID NO: 504102 - DNA, 669 bp, Homo sapiens
agagttcataaagatgaaatagactgctagactattaaagtactgcttgacatatatagacggaaatacttttggttgcctgggaagaaatctaactcacgttaccatgacagagatttggcctcttaccaattttcagaactagactagttcagactcctagcctcttcactgagaaagtatcctacagcctgacaaaacatgtatattgtgactctttccctaagcttttccataagggacttccatgtaaccatttactagattgactgtgctctaaaaaaaggaaaacagcctgacattttaggggttatcagatattgacactgaatttatgctaatccttggagaccctaaatgccaatgtggtccgccagtcagaaagggcttatagaaatcaggtgatagatggaaacttggcccaagcccacctaatggtgggtccaaagttaccacagatacattacagtattatgtccctgctcccaggagaggaagtatacttagtttaatgggcagcatccacattggatccctgacccatggagtaacggctattatgttactaatgatcagatgtaarctaatgaaccctccactccttggggatttacagagattgtggagtcctgaaaagataagtaagcaacaacaagaaagggaccccag

SEQ ID NO: 504103 - DNA, 529 bp, Homo sapiens
ttttgttaatctgatgtaatttaccttctcttgttgccctgctatcaatggcaagtttatattatttttatttgtttaacacgtggagtccttaaaagatttaagagtttaaaatccatgaatactgatggtgttaggtatgagggagaaaagaaaaagatcaacaaattggttggaaagcttggtaaaggtttggtatcttctcatcccaaaagggagtccttctgttaaggtatcagatgcttccccttgcccattgtcctgcccagggagagaaattcaatcagccaggattttacagatctatcctcttcctccaggacagaggagggaaggcccgacacctgacacttggagagcttamgcctcagaataaaaaattgccatgaatttgaatgaagataagagaagaggacagtgagagatgttccaatggtgagggctcgttggcgttggcggctgcccatccctcttatctcacctaatggcaggcgcctgccaatgtttatttggccattgccattcacca

SEQ ID NO: 504104 - DNA, 636 bp, Homo sapiens
tggtagcttatcatgaatctttgaggataagtcttaaattgggcatccttagtttgcagtttttattacattttgaatttctagttgaggacttagttttctaggatgctggttgtgttttttcatgatatcttgattatattttacataatgaaaaaatattactttagtaaattgtttttctaaggggatgggaatgaatgtgggtagctatacctcaaatatcacacatccttgaastcttcattcctaaggctattaactccccattaaggcaaacagagttgtgctttctcaaaaatgaaacaaaattttagtcctttctaggatgcataaatttgattatcctttctatccatgaaaggcaatgatttctgaactttttaatttttgatgcattggactcggtgtaacagggagtgggtgggaaaaacccaatcctcccagatattcacaaaccatcagcaggacttctctggccacaaaagatgtctttttatggagatattttgttgtaatttcagaaggtggttgttagttttcttggctacattacatttagcacatctgggatgtgttcacatgaagacattggctaaaagtagtgtcttgtggcctggaattgactctgatatt

SEQ ID NO: 504105 - DNA, 644 bp, Homo sapiens
gctggcaatttcatcttctccttagttgcacaatcacttctgctggtctgcctgccaaatstgtttcctccagcctgaaccttgctttcctaagcttcttattctgtttccacttagatttccttacctgtgtcttgaggttccactggcatctcaaactcaatttttcagaacagaatattccttctctttcaaatgttttccccttaattttaatttcttttaagaagatcacacccattctcataatcccagcactttgggaggccgaggcgggcagatcacgaggtcaggagatagagactatcctggctaacacagtgaaaccccgtctgtactaaaaatacgaaaaaattagccaggcgtggtggtgggcgcctgtagtcccagctacttgggaggctgaggcaggagaatggcgtgaacccaggaagcggagcttgcagtgagccgagattgtgacactgcactccagcctgggcgacagagcgagactccatctcaaaaaaaaaaaaaagaagatcacacccattttcatcatttaagctccaaatttaagggatcacctactacccgcccccaccccaacttgataatgatttgaaatgtcaaatgacatgaaatcctgcccattctacctttca

SEQ ID NO: 504106 - DNA, 644 bp, Homo sapiens
gctggcaatttcatcttctccttagttgcacaatcacttctgctggtctgcctgccaaatctgtttcctccagcctgaaccttgctttcctaagcttcttattctgtttccacttagatttccttacctgtgtcttgaggttccactggcatctcaaactcaatttttcagaacagaatattccttctctttcaaatgttttccccttaattttaatttcttttaagaagatcacacccattctcataatcccagcactttgggaggccgaggcgggcagatcacgaggtcaggagatagagactatcctggctaacacagtgaaaccccgtctgtactaaaaatacgaaaaaattagccaggcgtggtggtgggcgcctgtagtcccagctactygggaggctgaggcaggagaatggcgtgaacccaggaagcggagcttgcagtgagccgagattgtgacactgcactccagcctgggcgacagagcgagactccatctcaaaaaaaaaaaaaagaagatcacacccattttcatcatttaagctccaaatttaagggatcacctactacccgcccccaccccaacttgataatgatttgaaatgtcaaatgacatgaaatcctgcccattctacctttca

SEQ ID NO: 504107 - DNA, 514 bp, Homo sapiens
tgtcatagaactagtgatcaataatgagccaatattaggcagtactgtttagtctgttgattcttaaagtgtgatccctggatcagcagcatcagcatcacctggttgaacttgttagmgctataaattatgtcccatccagcttgactgaatcagaaactctggaggggagacacagccatctgtagtttaaaaaactctccaggagactctgatgcctgatagaatttgagagtaattggttgagtagtgagaaaatgactgtagaatcagtgaggcctggcttaaatactgtctctgtcacctttaaactctttgacctgaaataacttacttaacatttttaaagcctcaggtttttatatataaaaagggggtagtaggagctgttttatgactgcttaatgtttaaattaaataatatagctaaagcgtctagtataataattgtcccatgatatgtgctcaataaatgataaccataaacaataataataataatgatacccatata

SEQ ID NO: 504108 - DNA, 439 bp, Homo sapiens
aataaatgctgtgtttgctgaagcagtgattgagtaaatgaatgaacactcaccatgtaatagcaattttctccttgattgttggtgcctgtacctgccagacccatccctagacagagtttttcaacctccacactattcacattttgcactgatcattctttgttgctatcctgtgcatgtaggatgtttagcagcatttctagcctctacttgctaaatgctggtagctccccacaaccccaaaccctacacctatcatgacaataaaaaatgtctctagacattgccaaatgttccctgggggacaaaattgcccctattggagaaccactaagcgacaagaataggagccctataatttgaggccagctctgcttaatctgagctgataaggactragcctgaacatatattattaagagtcagaagaatattt

SEQ ID NO: 504109 - DNA, 566 bp, Homo sapiens
tttgaggattatctacaatactggcaatttttataagtactggaaacagtgcctggcacatagtaagctatatacgttatacaaaaattagctattatattttgcttcaccagatgccaactgattactttgatcaacaactataatatccacaatatattggggtcccacctcaaaacattactgctctagcccaaattttggtaagagggcattttgttgtaaaaataagtaaatatgcttaaaatggggraaaacaagcacatgttaatatttcttcatttgtcatgaaaataaaccataataaacttcctgaatttatcatacaaaattccaaggatttatctgaagaaactaaaattgaggaaggtatgtatctttttgccttaatcatttcctaagaagttactaaacctgaggtcattattatttatacaggaagagaatctcttatacttctggaaaatttcaaaacatggccaacatgttttctgatcatcaccacttcctgtggtggggtttaaaaaccatgccaactttcataactgctgagatttacagagtaa

SEQ ID NO: 504110 - DNA, 615 bp, Homo sapiens
tgatttcccatctgtcatggactctgttagttacctaatcagccatcatccttgttcccttttktctttgtttttcttttgagacagagtcttgctctgtcaccaggctggagtgcagtggcacaatctgggctcactacaacctccacctcccgggtttaagcgattctcctgcctcaacctcccgagtagctggtactacaggcgcctgccaccatgcccggctaatttttgtatttttagtagagacgaggttttaccatgttcaccaggatggtctcaatctcttgacctcgtgatctgcccgcctcagcctcccaaagtcctgggattacaggcatgagccactgcgaccagcccgctcccttttttcttgctaacagaacttaagctttgtccaggatgacaatgtgccaagctataagggatgaatcatgactggtctaagctactcatgtcatgtctcttgtattccctttgctagaaacacacactcccagacccctctgcagctacaggtagtcatgtgaccttgctctggccagcagacataagggggaactcagttcagaagaaagatcccacctacttctgactcttccttcctgttaagaa

SEQ ID NO: 504111 - DNA, 615 bp, Homo sapiens
tgatttcccatctgtcatggactctgttagttacctaatcagccatcatccttgttcccttttgtctttktttttcttttgagacagagtcttgctctgtcaccaggctggagtgcagtggcacaatctgggctcactacaacctccacctcccgggtttaagcgattctcctgcctcaacctcccgagtagctggtactacaggcgcctgccaccatgcccggctaatttttgtatttttagtagagacgaggttttaccatgttcaccaggatggtctcaatctcttgacctcgtgatctgcccgcctcagcctcccaaagtcctgggattacaggcatgagccactgcgaccagcccgctcccttttttcttgctaacagaacttaagctttgtccaggatgacaatgtgccaagctataagggatgaatcatgactggtctaagctactcatgtcatgtctcttgtattccctttgctagaaacacacactcccagacccctctgcagctacaggtagtcatgtgaccttgctctggccagcagacataagggggaactcagttcagaagaaagatcccacctacttctgactcttccttcctgttaagaa

SEQ ID NO: 504112 - DNA, 615 bp, Homo sapiens
tgatttcccatctgtcatggactctgttagttacctaatcagccatcatccttgttcccttttgtctttgtttttcttttgagacagagtcttgctctgtcaccaggctggagtgcagtggcacaatctgggctcactacaacctccacctcccgggtttaagcgattctcctgcctcaacctcccgagtagctggtactacaggcgcctgccaccatgcccggctaatttttgtatttttagtagagacgaggttttaccatgttcaccaggatggtctcaatctcttgacctcgtgatctgcccgcctcagcctcccaaagtcctgggattacaggcatgagccactgcgaccagcccgctcccttttttcttgctaacagaacttaagctttgtccaggatgacaatgtgccaagctataagggatgaatcatgactggtctaagctactcatgtcatgtctcttgtattccctttgctrgaaacacacactcccagacccctctgcagctacaggtagtcatgtgaccttgctctggccagcagacataagggggaactcagttcagaagaaagatcccacctacttctgactcttccttcctgttaagaa

SEQ ID NO: 504113 - DNA, 569 bp, Homo sapiens
gctaaactgctaaaagagatttgtgatataatcagtatatttgggttatgtttacactagacaatctggaagggcatactagccagaataccctcttattatttttgctcattttaaagtctttcatrtatatttctgacagtctccccatcatgatcttgatattcccgagatatttttaatcatgcattcacaaaaaaagactggtctctctatcacaattctcttcctgtcagagagtctgggaaaggtcataagtactttagaaaccctgctaaagggacattaattcagagatacatttggttagtattaatgtcatatattttatggctgttacttccatggataattaaattagtactagccatatccgtataggaatgtctttcaggagtattcttactacccaccttgttgacccatcttgcaacatgatttcaaaatacaggaccagaaagtcgacagtgatagaaatgtatcttacaactcttggcactataagtagtaggagaagcaaggtattaaactgtccagagcagatgctaacatctggaaaatgactggtt

SEQ ID NO: 504114 - DNA, 569 bp, Homo sapiens
gctaaactgctaaaagagatttgtgatataatcagtatatttgggttatgtttacactagacaatctggaagggcatactagccagaataccctcttattatttttgctcattttaaagtctttcatgtatatttctgacagtctccccatcatgatcttgatattcccgagatatttttaatcatgcattcacaaaaaaagactggtctcyctatcacaattctcttcctgtcagagagtctgggaaaggtcataagtactttagaaaccctgctaaagggacattaattcagagatacatttggttagtattaatgtcatatattttatggctgttacttccatggataattaaattagtactagccatatccgtataggaatgtctttcaggagtattcttactacccaccttgttgacccatcttgcaacatgatttcaaaatacaggaccagaaagtcgacagtgatagaaatgtatcttacaactcttggcactataagtagtaggagaagcaaggtattaaactgtccagagcagatgctaacatctggaaaatgactggtt

SEQ ID NO: 504115 - DNA, 497 bp, Homo sapiens
gaaagctgtttgcttaaaaggacccgtgtgatacccccaggttacctccctgtttcatagtcaactgtaccatatggcatgacacaagcgcttggctgcgttacatgggaataatgatgagagtgacatcgtttcatatttatggcttccagggattagggtgtgaaatcttgggcgccatttttagagttttgccaatcacaggaaaagattaagaaagtagtgctttgtacctttggccttgtgtatacaagctctgtgcttgcaggttgggagatatcttaagtgacgatgtgtgtctggargaggggtttaatattgaccagcaccactgaatgagaatttagaagaaccaagagctttatgtcagctcctcagcctatcacaataacactttgggataggcatcgatcccatcttcaaactgagaacaccaaagcatagcaagaactgttcaaagatttgtttaatgttgcagggcttcatgccggtagcaa

SEQ ID NO: 504116 - DNA, 623 bp, Homo sapiens
tgaaggaaaaatgacacattacatgaarggaacaaaaatacaaatgataactgatttcccttcaaaaaaaaaatgccagaatgcaatgtgacattttaaaaacgcggaaagaaaataacagtccgtctaaattctatacattccaaagatcttcaaaaatctagatgaaatgaagacatttttacataaataaaaactgagggaattttctgcagttagatcagctctacaagaaatactaatgctcttctgggtaaaggaaagttacagcagatggaagctaatagttgtaggaaggaatgaaaaactctggaaattataaatatgatcaaatataaagttttttattctcttaacttttcaaaaaggaacctaaatgtttaaacgaagtaatgccaccttattaagaggatgataatgttgctggagtaatatacacaaataatacaataataacacaaatgacgggataaatgaaactctgttgttagagcatctttatgttatatgaagagcagattgtgattaagggaaaatattgtaactcctaaagcagcctttgctaatcatagtccatgagataataaaatactacagaaaatatgtagggactattttttcaa

SEQ ID NO: 504117 - DNA, 624 bp, Homo sapiens
gacattctctcacagcagactttctaatctctgctgaagatactgagaggctggcaagtgataaggttggcttagtatcacctattgtctaacagattgccatgactgactgatttccctgagctcaagtggcagtagccccatgacttccagacagtgattctgatgggaaagaaagagctctcttcctttcccaagttagctgctccttctagaatcaaatcccttgggcttttcatgaagagtaggaattctcaacttcagcaccaattaatattctaggctggatcactctgtggtaggggctgtcctgtgcattgtaggatgtatagcggcatccctggcctctactcactgaataccactttcactgtccccctctccccagtaatgacaataaatatatctccaaacaatgtcaaatatsgtctgggagacaaaactggtcccagttgagaaccacggacatagagggcattgttgaactgattgtgccagtgccagaaagtaatattgatagaagatgacctgatattttctatccttgggaaaagcctaaggggatacatacatatatcaagagtttctccttagtatgagccagtcacctagacatgaacctca

SEQ ID NO: 504118 - DNA, 479 bp, Homo sapiens
tcccagctactcgggaagctgaggcaggagaatcacttgaacctgggaggcggaggttgcagtgagccgagattgtgccactgcactccagcctgggcracaagagtgaaactccgtctcaaaaggcagtggggcagggagaagaatgggaaattgttgctggagggacagtgagtgggagattctctgagattctctgtaacatccctttgattgtcttcttatcttttgactgttctcagcagaaaaggcagcaagttaaagccagtagtgatcagccaatcaaacagtggtagcaccaatggcaacaataaaaatgatagcaaccactgtttactaaacaactccttcattccagggttacaccataggtatattacaagtctgtgagggtaagggtagaataatgatggtcagagaggctgagtgacttgctcatggttgctctggtcactgttagatgagtgaacagaaagaag

SEQ ID NO: 504119 - DNA, 631 bp, Homo sapiens
tcaagagcaaatgtttcttaatttgtatttaacacttagataacgaagatgatatcatgaagtacaattagaaatggccatttgaataaggaaaatgactcacagtcctttacatttcagtaacctgtcatcctgatctaaaaaaagaaactttaaaatctttaccaaatagtcagaactttcaatgttatatatttggcctgacaatcttctcatctttttgctcataaaatgtctactcaagattagaagttagatattgtgctgcagttgcctaaggcccagaaaacgctcaaaataggccttgtcacataaaaaattaattggttgctttgttcctacttagattttcattaatttgaggacataatataagtgacagttaactgtatcacctttgcttctccttgttaaaaaagaaatacctatttaaaagtctaattaagaaagtttcctgaaatatttatttttaaggcattaaccttcccttattatattatggaataacacaactttaaacatcagaaaagactggtatgttggttatctattgctacataacaatctactacaaaatttactgacttaaacattttrtttgcttattattcttttgttttagcaatttgtg

SEQ ID NO: 504120 - DNA, 433 bp, Homo sapiens
tttgagtagagacaaggtttcaccatgttggccaggctgatcttgaacgcccaacctcaagtcatccacctgcctcggcctcccaaactgctgggattacaggcatgagccaccacgccyggcctaaaggttcactttcgtttcttttctgtgagtatagtggatacttgctgttttctggccactgagccactgctcacacgtattttagtaacagcatttattgcttaaggtagatcaagctgctataacgaatgggccacagaatcaatagctcaactccaaggagtttgtgtctcattcatgcaatagacaaggcatgaggaggcggaacgttctgctccacgtggtcttgtggggccccaggctaagtgagtctcctccatctttaacatgtgcttccaagatcaccttgggcatccaccactccagt

SEQ ID NO: 504121 - DNA, 433 bp, Homo sapiens
tttgagtagagacaaggtttcaccatgttggccaggctgatcttgaacgcccaacctcaagtcatccacctgcctcggcctcccaaactgctgggattacaggcatgagccaccacgcccggcctaaaggttcactttcgtttcttttctgtgagtatagtggatacttgctgttttctggccactgagccactgctcacacgtattttagtaacagcatttattgcttaaggtagatcaagctgctataaygaatgggccacagaatcaatagctcaactccaaggagtttgtgtctcattcatgcaatagacaaggcatgaggaggcggaacgttctgctccacgtggtcttgtggggccccaggctaagtgagtctcctccatctttaacatgtgcttccaagatcaccttgggcatccaccactccagt

SEQ ID NO: 504122 - DNA, 433 bp, Homo sapiens
tttgagtagagacaaggtttcaccatgttggccaggctgatcttgaacgcccaacctcaagtcatccacctgcctcggcctcccaaactgctgggattacaggcatgagccaccacgcccggcctaaaggttcactttcgtttcttttctgtgagtatagtggatacttgctgttttctggccactgagccactgctcacacgtattttagtaacagcatttattgcttaaggtagatcaagctgctataacgaatgggccacagaatcaatagctcaactccaaggagtttgtgtctcattcatgcaatagacaaggcatgaggaggcggaacgttctgctccacgtgrtcttgtggggccccaggctaagtgagtctcctccatctttaacatgtgcttccaagatcaccttgggcatccaccactccagt

SEQ ID NO: 504123 - DNA, 378 bp, Homo sapiens
cacacaccccgtgacacacccacccgtgacacacccctccaagccagggtgcaagttacatcccatcgccaggmccagcaccatccacacagcagccgcacacgtggggagcgtcgctgtggttatggccgacttgccgtgtaggctaagattgttcccttacacacacagacatcctctctctcacaccctcacgcaatcccacactcgtattcactcccacatttacacacgtacacgctcacaggcatgcatacagtggggcattcatttacacacacacccatgcacacacacacatcctcacacacacccacatgcatcttcacacactgtgaaacacacacccacacccacacactctacgggggtcacaca

SEQ ID NO: 504124 - DNA, 574 bp, Homo sapiens
ctgtgatgttattgtgttcaaagggaaagacagagaatatttttcackgctgtagaggctctgtgcctgccttttaaacttgaaagatcagtgggttttctgtggaacctgaacacagtattggaaaaagtgtttctgtaagaaaaaaactcattttctttaaagagccctactcattagcttacaggatttaactttctttggggggagggacaaaaaacataaaaatagatcactttattgagcatttgctctgcgccaagcagccttccaagtacttcacacaaatggttttatttaatctcgtaccatctctcctagggctgttgtgaggagtagacgaattaataaacacagagaacttaaagcaatcgagcatgtaatacttgttcaataagcatgagctatttgtgagtgacagtccagtgagataggtaccattatcatgcccattttacagatgaagaaacagaggcaggaaagttctggtatcttgctcaaggtgaagcaatgtgtaagtggttgagtcaaactaaaaaccagctcatagagaaggcaagatatagttcagtcc

SEQ ID NO: 504125 - DNA, 574 bp, Homo sapiens
ctgtgatgttattgtgttcaaagggaaagacagagaatatttttcactgctgtagaggctctgtgcctgccttttaaacttgaaagatcagtgggttttctgtggaacctgaacacagtattggaaaaagtgtttctgtaagaaaaaaactcattttctttaaagagccctactcattagcttacaggatttaactttctttggggggagggacaaaaaacataaaaatagatcactttattgagcatttgctctgcgccaagcagccttccaagtacttcacacaaatggttttatttaatctcgtaccatctctcctagggctgttgtgaggagtagacgaattaataaacacagagaacttaaagcaatcgagcatgtaatacttgttcaataagcatgagctatttgtgagtgacagtccagtgagataggtaccattatcatgcccattttacagatgaagaaacagaggcaggaaagttctggtrtcttgctcaaggtgaagcaatgtgtaagtggttgagtcaaactaaaaaccagctcatagagaaggcaagatatagttcagtcc

SEQ ID NO: 504126 - DNA, 465 bp, Homo sapiens
ctgcattttaatactaaatgggagaaagaaatatttaaatttattttttaaaactaaccacaaaaatgcacgctgtatacagaatgtcctatgatgaaaagcacggttttaataacttttaacagttgcaaaaccagcaacttacatgacaatttaataaaaatctctaaatagtctctcaygctggagtaaactccttacattacaatagctttggtggctttcttcaactaaagagatatctaaatttgatatgaacctcaggtttcaacatccatgatttgctagtatataattcattgacacctcaggtaacaatttaaaagacttgacccatttatgcctggtgttccattattggaacactaagcatgtgggagttatttatatcctactgctcaaggtcatcgccaaggtctgattgcaaaaattcacaaaattccaacctcaggcataatgggttaa

SEQ ID NO: 504127 - DNA, 636 bp, Homo sapiens
ataagtagaataggttttatatgcaaacaaaacacttaggtaatttggcaatatgagagaagcaaaatgttcttgaaagtttggagattactgcattgcgttgggatggaaaaatgtcttcctaatctgaraaatctttttatcatcattcaggcattattaaaatttatttccagcattctttaaatttatactatatacctaccatggtgctcagagtcagaaatataaaaaaagaataaaccatggtacctgttctctagaaacacattagtaataaaataaaacagataaatagaggtactattaggttacggaaatagcttaaattaggggctttgtgaaaatctcctggaggagacgtcatttgagatttaatgttgagtataaattatttagattaaaacgtggaagaagagcaatcagagcagaccaattcagatttatctgtagcctgatatataacaattaacagacaacaatcaataattattgaacattgattgaaaatagtagcatgaaagaagagcatcaaaacagaccagcagataaagcaacataagcataagtacttaaacaagattaaactaaaaacagtaaaaacatttttttaaaaattctgttagcatatttaga

SEQ ID NO: 504128 - DNA, 477 bp, Homo sapiens
caatctatagccactatgtggcagtagtaacagatcaccacagcccttgatctccaaacacttttgcttccacctgacttcattgaatgtcacatgcaaatatgcatgctaccacatactgtggattattcatccccatttctccatagcaaaaaggttatctatcatttctcaaatatatgaaacatgcaatcccagaatctcacttaaggtttttcttggtgttgcccctaataccacttactgtatgctatggttttaatgtggcccccaaagttcatgtattgaaaayttgatcctctattcagtggtattgggaattgtgatttaatgggaggtttttgagtcatggaacatcacctttataagtgtcttggtgccattatcatgagagtgaatttcttataaaaggacaaatttggccttctcctgtgtgcactcatgctctctctctctctctctctcacaccctctttt

SEQ ID NO: 504129 - DNA, 666 bp, Homo sapiens
gttaccacaactcaatttcttatgacagcccccgtttaacaactctttcttaacgagaacacttgagtaactagaaattctccttgttccccaaacaggctagataatgagtagcttattaaatataaataaacattcacatgtatttatctatctattagtcaattggttgattgactgaacttagggtgaaagcttgccttcaagtagactaacaccaacatcttgattgaatatctttccgtaagaagggtacactcatttgggtatgggctaatgaccagaggaaaagagccacaggaatgcttatatttaactgaacatttgcttcattttacatatcagaaaatttttactaggagaccaaaaattsacaaaatttaaggaatgaactggtgcaccccaccattcattaattttcccattcagacatctgtaatgagcttctaccacatgctacaccttaggataactgtggagacataacaccaaggtctaatttgatcctgtgagaatgactcagcctaccatgctacactactgtggatattaatttcaattcttcgggggttgctgcttttacttttccttcagtacttacggcatgcctcattagccagtttcaaacaccttatccccaaggtcagactgtctgactttgcccag

SEQ ID NO: 504130 - DNA, 666 bp, Homo sapiens
gttaccacaactcaatttcttatgacagcccccgtttaacaactctttcttaacgagaacacttgagtaactagaaattctccttgttccccaaacaggctagataatgagtagcttattaaatataaataaacattcacatgtatttatctatctattagtcaattggttgattgactgaacttagggtgaaagcttgccttcaagtagactaacaccaacatcttgattgaatatctttccgtaagaagggtacactcatttgggtatgggctaatgaccagaggaaaagagccacaggaatgcttatatttaactgaacatttgcttcattttacatatcagaaaatttttactaggagaccaaaaattcacaaaatttaaggaatgaactggtgcaccccaccattcattaattttcccattcagacatctgtaatgagcttctaccayatgctacaccttaggataactgtggagacataacaccaaggtctaatttgatcctgtgagaatgactcagcctaccatgctacactactgtggatattaatttcaattcttcgggggttgctgcttttacttttccttcagtacttacggcatgcctcattagccagtttcaaacaccttatccccaaggtcagactgtctgactttgcccag

SEQ ID NO: 504131 - DNA, 621 bp, Homo sapiens
agggtgttggaataaagctgtggtcctggcttctgggaagctcccaagcttccaggcccacactgaccaagcagccctttcctctgctgcctggggcctggttgcagcttgttatctgggctctctcagatctgtctccttaacagtgacccttttattcatgtgtatattctccagtagatataactgaggctgaattttgaagttaaaatgtgaagcaaacccatgcgggcttaatctgccagcatcagcacaggacacctgctcatggcaccccaatgactacccccatycggcccctttgagaaactgttcttcctgctttgtagctcacactcttctagttggcgctacaatgacccagttctaccaggcccctgtgctcagcctcacccttccctgtggtgctggatatgataataatttaaaaaaacaatataataaagtgcaacagatagagaaaaaactgcccactctcaatctaactgtgaaggctcctgcctccttcagtgccaagatttctgagctgtccgagatttcacctctgctctgacacagttccttcttgacttgtgccatcctgcagttctgagtggctctggacattatagctccatgccg

SEQ ID NO: 504132 - DNA, 555 bp, Homo sapiens
ctgcagggtgttggaataaagctgtggtcctggcttctgggaagctcccaagcttccaggcccacactgaccaagcagccctttcctctgctgcctggggcctggttgcagcttgttatctgggctctctcagatctgtctccttaacagtgacccttttattcatgtgtatattctccagtagatataactgaggctgaattttgaagttaaaatgtgaagcaaacccatgcgggcttaatctgccagcatcagcacaggacacctgctcatggcaccccaatgactacccccattcggcccctttgagaaactgttcttcctgctttgtagctcacactcttctagttggcgctacaatgacccagttctaccaggcccctgtgctcagcctcacccttccctgtggtgctggatatgataataatttwaaaaaacaatataataaagtgcaacagatagagaaaaaactgcccactctcaatctaactgtgaaggctcctgcctccttcagtgccaagatttctgagctgtccgagatttcacctctgctct

SEQ ID NO: 504133 - DNA, 630 bp, Homo sapiens
tgtgtgtactgaagctccagctacaccagatgacataaggtggccctggcctcactagtgctgctccttccacctacagtgctgcccctgacccatgcctgctgcccactgacaaggcttccccaccacaactttttttcctatctccatgctgcatttgaggctcagtggagtaggcacctgcccttggcagccccgcttccattttcccatcttccaagtcacagttctctctttattttctttgaaaaatcagtccccccmctcttaatcatgtgggagatccaggagtaggccctgactggcttacacctattggcatatcctgtctccccagacacaataattggttcaggaatgagaacatgaccctaggcagaaacataaacttttcctccagttcatgatgctttagggtttggaactattatggtcatatttgcgaccacaaggggagccaccttgagaatggggatatttcagggaagcagagctgagagatgcatcttagaatatcattgagtcctggatcaagctgagcctgaagacaaatgtttcctaaacattcagttatgtaaataaattctactttttatttaaggatactcgaaatggattttctgtagcttc

SEQ ID NO: 504134 - DNA, 658 bp, Homo sapiens
tctggagtttgattccaagggcttttgattttcagggcagtttaatgtataagataggaatttgggggttagaaatgaaccatcagacagacactcctacatttccataactaggaacaaaacatcartatttaaatgtgacaaagcacatttttgaagacatgtgccagagtggaggcacacccaaggtgagttttctagcagaaagagctaaccgcctaaacacttcaattgcaactgggcaagaacttgcagaaacccttctgctactcatatcagcatgaacaaaggactcaggcctgactattccacaaagctgggctaattataaattctgtgcagaagttcctccaggccagcctttggaattaacttgaagtggagaatgagatgatgctccagatagtttggggaactttttggaggaattgcctgcatgaactgctttgagctctccacttcccttcagcaatgaagatgcaggctcccgtggtgagaatgcatgagattttgcgagtctcacaccacaatatgatgagaacagaacacagtgatgaaaacaaatctggcactgaagggctttctcttgcccaatgtcacctgttctaccaggcacttccacagtgatgacaaagtgcactgccctgcaatttccctc

SEQ ID NO: 504135 - DNA, 636 bp, Homo sapiens
gttaaagagtttaatctacaatttattccttctaatttccagctttgacttctttccaccaacctgttgacttatgtgtattgaactgtctcatataatcttctgaagttgcattgttgaaaaacaatcagaaagaccagtcctgaggttcatcatctccaaaagtcatgcaacatatgatgttcacrtgagatgtgaaatatgtaaagagtcatatatttttatatataatatgcaaaatataaatcatgtatatattgaatcaaaggtctgttttgaaggctaagggtcaatagccaatcttccatgacttattttacctaacagcacagtttgcatgtccacacaggtgatggcagtccactgaccagttaaaagttgtttggctatttcagcaaaatgtttatctttgtgtgttgttatattgatttttttgaatctacctacgaatgaggcactaacaacctcaatgcattagagtcctgataaacttatcttgcactattttggcctatgtgatagctaacccattgacaaaagaaatccaaggtgataaaagcctttcttggccacttgttagccgggtcaggctgtaaaatcgtaacacaatgcaggcctcttccatggggcaccaaa

SEQ ID NO: 504136 - DNA, 589 bp, Homo sapiens
aaatcagagtttgaactacaatgtttacttcattatatggttcttgagtaattattaatttttgttgttttccctaaaattatggtcatgggcaatttgaaaagtttttgctctcaaaaaatacattctgctttcttttgttttactcttattttatttccatctttgaagtataagcataatgaaaatttcaacatctatagggtaatttaaatcacagtgcatatagaatgcataggcacagaaataaatttggataaatagtactttctgttattttctcagcaatatcccactgaaattgtgctaaatatcatgaaatcatttaagttggaaaagcacacatggcatctaagagtcctccacaaatcttccacaagaagtgttgctcaagcmagaggcttgagtagaccaagctacccttgcttgctggtttgataaaacactcaagtgcactgtcagggcccactttagactgttctatttttactttgagtttcctttatcaagagtaattctaacttgcagcgcttatgaaaacaatacaatgttttcaacatgtcattacatgaaaaaaattactaataga

SEQ ID NO: 504137 - DNA, 589 bp, Homo sapiens
aaatcagagtttgaactacaatgtttacttcattatatggttcttgagtaattattaatttttgttgttttccctaaaattatggtcatgggcaatttgaaaagtttttgctctcaaaaaatacattctgctttcttttgttttactcttattttatttccatctttgaagtataagcataatgaaaatttcaacatctatagggtaatttaaatcacagtgcatatagaatgcataggcacagaaataaatttggataaatagtactttctgttattttctcagcaatatcccactgaaattgtgctaaatatcatgaaatcatttaagttggaaaagcacacatggcatctaagagtcctccacaaatcttccacaagaagtgttgctcaagccrgaggcttgagtagaccaagctacccttgcttgctggtttgataaaacactcaagtgcactgtcagggcccactttagactgttctatttttactttgagtttcctttatcaagagtaattctaacttgcagcgcttatgaaaacaatacaatgttttcaacatgtcattacatgaaaaaaattactaataga

SEQ ID NO: 504138 - DNA, 644 bp, Homo sapiens
ctgtttaggtgagggcatcttctttacccagtctactatctcaaatgctaatctcttccagatataccctcagaggcacacccagaaataatgtttaactggctatctgggcatctcttagtccagtcaagttgacacattaattgacaatcacaatggatataacccatgtgtattatataataytttaaggatcatataaagaactattaaatgctctttcacttaataaaattttactgagaacctattagatactaagcactgttctgctcttgtgtgacttacaaaatagtatcactgagacaaaagtaaatacgtaaataaatcaataaatgagttttaaattaaggatatagaacaaggtccaagttccagagagggagggttcctgttgagacatgctttagatatcatggttaggaagacctacctccctgactccactgactggctacctgacaccaggtaagctcctctctttcctgtgtttctatttaagtaactataagatgaaataaacttatagaattgttagcacacaatcaggggcaagtagcacacaataaagtattgtctattatgattacagtattaaattttatataattctcaatataaagtttggatatcatcactcccaa

SEQ ID NO: 504139 - DNA, 611 bp, Homo sapiens
tgtctctttttaacaatagaatgttttcccttaactttgttggaatcactaacaagtgctttcaattaccaggamactagattcattgggccacatttgatataatttttttccttttacttgtaatttcccaactcagtgcaataaagtatccattgactttatttgcttcatgcgcaaggcctgcactataactatttaactgttctccggggactcaactagattaaaagagatctagaatggctctattgtcaacaaatgccagaaggttcttttgaaatgatctaacctcagctaacatttgagaggttttttaaaggaaattctattgtcaacacttccaaagattccagtaggacccctttctccctgctgtgccaacccttaggggtccttggaaatagaaagattaacaacaaaatagaataaaaacagcaagggcagcaactatgatgatgactatgttggaactttccaatttaatgaatttctatctaatactctgctaggcaccttataaatatcgagacaacaactctgagataaatattatttccatttaataaaaaatgtctcagcgaatcagagggttaaagttgtactgccag

SEQ ID NO: 504140 - DNA, 598 bp, Homo sapiens
gagttacaagaaaggatttctgcatggaaaatactaaggctgaccaatgtagtaaatacagacaatcaagagaatacaaatgttcaaggtttaccaactgtgggcactgtgtcctagtaaagcatttacttcaggtccacatgtatgagccaaaatataggtgtatatcaccatscctaggtctgtgactataaggccatgagcttcacaccatgctaagagaatcttcaagataatcaagattccaaagagataactcaaggccatgcggggaaacaaagaaaaggtagaaaaaactttgatcccaaggattgatacttatatctattgtcttcaatagcataagatcactgctttgaaatgttaaagtaaactaaatattcctgagaaggactctgtacttccatatttgagtccttttggacaaactaacctaacttagtaggcagacaagattggaaacctatcttaggagtatgcacctgtaacaatagctgagtcttggccaatcccagcagccgtacttcaacgactcatacactgctgagtgttcaaactgtgttcaaataaggcaaatgccaacctgtaaccaatccag

SEQ ID NO: 504141 - DNA, 565 bp, Homo sapiens
agctgacgttgctaaaggaatcactgcagttccagggaaagatagctgctgtagaagaagcgcagattccawataagccatcactgacagagaatatgagttaaccaagaaagaaaattgggaaaaataaatggttttatacatatttggggactttagtctttgtatggcaacaagaaaaaaagacattcaatttattgtgactttaatttctctgatgaaactaaggattgacttactaaggaaattcatattgctcactttaggtttattgtgttctatcattataaagtagatggacctgggttgaaatgctagatccatcacttgttggatctgctgataaattacttaatgcctctgagctgtctctcacctataatatgagatatataatgatactaaccatctcagagtggttagtataagaaaatcaagtgaaataatgcctgaaaaatatcttgcacataataattgctcaataaatattagatattattattgctgttatttttgtctggactttactctggtgcaagcagtaaaacactatgtggtgagctgg

SEQ ID NO: 504142 - DNA, 565 bp, Homo sapiens
agctgacgttgctaaaggaatcactgcagttccagggaaagatagctgctgtagaagaagcgcagattccatataagccatcactgacagagaatatgagttaaccaagaaagaaaattgggaaaaataaatggttttatacatatttggggactttagtctttgtatggcaacaagaaaaaaagacattcaatttattgtgactttaatttctctgatgaaactaaggattgacttactaaggaaattcatattgctcactttaggtttattgtgttctatcattataaagtagatsgacctgggttgaaatgctagatccatcacttgttggatctgctgataaattacttaatgcctctgagctgtctctcacctataatatgagatatataatgatactaaccatctcagagtggttagtataagaaaatcaagtgaaataatgcctgaaaaatatcttgcacataataattgctcaataaatattagatattattattgctgttatttttgtctggactttactctggtgcaagcagtaaaacactatgtggtgagctgg

SEQ ID NO: 504143 - DNA, 563 bp, Homo sapiens
ataaaattctgtcagcattcaaagagaagcagctcctctatttcaattttactttccatagctaaagtcaattcaggagagtaggggtaggcttggcagtaatacaaagaggtattatgttgatgcaaaacctatagaaatgcaaacatttgcactcattacttactcacttactggatactatgaaaatcartccaaaacatcgtgattcatgtgcctgatgctcattctcattaaattggctccacaaaattggcaaccagaagtacgtaggcttacagagcccacgcttggggcaagcagctatatgtggtgactccatgcatgtttataaacttgaaaaatgttgctcttcattggctgatggtaatttacatttcaaagaggataatagtgaggactgccatattttggtgctgaaattcacatttcacagaatacaatttacgtcagaatgttatgtcactacaaaacgcctcaggctcacagctcactgaactaaataactctgtctccccaggtgatgatgatcaagacttaatcgctcatctagtttttctcag

SEQ ID NO: 504144 - DNA, 563 bp, Homo sapiens
ataaaattctgtcagcattcaaagagaagcagctcctctatttcaattttactttccatagctaaagtcaattcaggagagtaggggtaggcttggcagtaatacaaagaggtattatgttgatgcaaaacctatagaaatgcaaacatttgcactcattacttactcacttactggatactatgaaaatcaatccaaaacatcgtgattcatgtgcctgatgctcattctcattaaattggctccacaaaattggcaaccagaagtacgtaggcttacagagcccacgcttggggcaagcagctatatgtggtgactccatgcatgtttataaacttgaaaaatgttgctcttcattggctgatggtaatttacatttcaaagaggataatagtgaggactgccatattttggtgctgaaattcacatttcacagaatacaatttacgtcagaatgttatgtcactacaaaaygcctcaggctcacagctcactgaactaaataactctgtctccccaggtgatgatgatcaagacttaatcgctcatctagtttttctcag

SEQ ID NO: 504145 - DNA, 643 bp, Homo sapiens
caatccatggagagaccaactataaacatgaaagtgcagcaaggagaagcaggggctactgtgaaaggaggaggtggccaaacctagtctgaagatcagaaaaggtttctcacaagaagtgacatattggcagctgaggcttgaagggtgaacaggaattggtcaggcgactgtcttatcatgcccaggtgtccagtccctgcatttcctgtgctccagaggacacacccaatttgamacctcatcctagctctcctttcacaggagatactgcatttcccctggtcatccctcattccaccccccataatgaaacataggtctttgtctcacattgtcttggttcgtttgtgaatatcactcatagtccaatcatctgagatcaacattctgaccctaccatctacagtctttatgaataagttgtcttatttcttttctgagtcatttttctcatcctgaaatatggggtcatttataccttcctacctacttcacaaaaataagaataaatcaaataattgtgtttttgctgctggattataaaaggagattttaaagaagtagaatagttaaaaaaatatatgagttaagccagctgtccccaaaacacttatcatctcctatgatgctctttatatca

SEQ ID NO: 504146 - DNA, 346 bp, Homo sapiens
tgctacttccctgggagagggcagagaggggcagccctgcctcgcgaccatgaatgtgatccgcgatgtggcccagcaagttgcgcaagygcgagacgcgcgcggcggccacaggcacctgagcatcctgaacgccactggaagatggcgtccaacgcccccactgagacattgacgacagtggtgatacgattaccggacagcatgagcgtgtttctgggccaccccttgaatatacaggttgttggtgatctgtgagaggtcagtggccaaggcactggacaggagggccccgggagtgtggtcacccaggcggaggttcggcggccagcgaggagcgaggtgc

SEQ ID NO: 504147 - DNA, 671 bp, Homo sapiens
cttactatctgaacacgctacctgtactaagactgactgtagcttttgtcatcaataacagcaatttagtggccttctctgaggcmgctagatgatgtaagtgtgggacagaggacaggacctccactggcttccatactgatgctgagctctgaggtgatccagtccaaatttaccatctgtttccaagtaacatctcttcagaagcattttcatcatccctggcattattaacagaggaaataacactaagagatttttatttttccacttcttatcttgaaactacaagggaggaaaaggcaaatcatctattggagatagatttgaaaccaagcggagcctgggctaattctgtttttaatagtcagaagattgctgtattcacttcatttgctcttattatccagcaccatgtgccaagctgacagtttccaaatggagggtaaaaatgcgtaagaaacatgtaaaatgtcaacaaaaatcaataaggcacagtttatgcatttgccacaatttcatatatgcagaactttttaaagtaacttagtgagaaagatacagcaattatcaggcctcagaagagaagtattaccaatagaacaataaaattctgtttctataaactcaaatcattgccctttcctctaacaaccgtgcaattaaaaaca

SEQ ID NO: 504148 - DNA, 671 bp, Homo sapiens
cttactatctgaacacgctacctgtactaagactgactgtagcttttgtcatcaataacagcaatttagtggccttctctgaggcagctagatgatgtaagtgtgggacagaggacaggacctccactggcttccatactgatgctgagctctgaggtgatccagtccaaatttaccatctgtttccaagtaacatctcttcagaagcattttcatcatccctggcattattaacagaggaaataacactaagagatttttatttttccacttcttatcttgaaactacaakggaggaaaaggcaaatcatctattggagatagatttgaaaccaagcggagcctgggctaattctgtttttaatagtcagaagattgctgtattcacttcatttgctcttattatccagcaccatgtgccaagctgacagtttccaaatggagggtaaaaatgcgtaagaaacatgtaaaatgtcaacaaaaatcaataaggcacagtttatgcatttgccacaatttcatatatgcagaactttttaaagtaacttagtgagaaagatacagcaattatcaggcctcagaagagaagtattaccaatagaacaataaaattctgtttctataaactcaaatcattgccctttcctctaacaaccgtgcaattaaaaaca

SEQ ID NO: 504149 - DNA, 587 bp, Homo sapiens
ggcccacttgggtcagagacatgaggtccctggccaaggcctcacagccatggaggagaccctcctgggccttggcagagccttctgccccatcccatagcctcctcctaaggagacagggtttacatttaatgcacacgctttctctgttagctgcaaatttctttatctgtttgtttataactctttcgtggctctcatcataccctatgttgacattatttatatgtatttcttgccctcccaaccagataccaagttcctttaggacaaaaattatgtcttactcattttcaartccatgtaaaaacacacacacacacacacacacacacacacacacacacacacacacacacaccaatatatatagtaggtgatgagcaaatctatgtaagacaaacaaacagggtaacagacaagtttgacatttacataaattgctctgaagagtattgtctgtacagagctagccaaggttttagttttccccattatttattagttctttggtatttacaacagcatcaaatattggctgtttcctctcaatcattaactaatccactgtacagatacttactagg

SEQ ID NO: 504150 - DNA, 587 bp, Homo sapiens
ggcccacttgggtcagagacatgaggtccctggccaaggcctcacagccatggaggagaccctcctgggccttggcagagccttctgccccatcccatagcctcctcctaaggagacagggtttacatttaatgcacacgctttctctgttagctgcaaatttctttatctgtttgtttataactctttcgtggctctcatcataccctatgttgacattatttatatgtatttcttgccctcccaaccagataccaagttcctttaggacaaaaattatgtcttactcattttcaagtccatgtaaamacacacacacacacacacacacacacacacacacacacacacacacacacaccaatatatatagtaggtgatgagcaaatctatgtaagacaaacaaacagggtaacagacaagtttgacatttacataaattgctctgaagagtattgtctgtacagagctagccaaggttttagttttccccattatttattagttctttggtatttacaacagcatcaaatattggctgtttcctctcaatcattaactaatccactgtacagatacttactagg

SEQ ID NO: 504151 - DNA, 530 bp, Homo sapiens
tcacatcaaccagagtgacggcagagcattttgccattctgcttctttcagcaagcatcagtgtgtgtgtgasgagggaccttgggggcttcactgcacttcagttgaatccccttgtatccatatggtctgactgtctgtgactgaaacacagtcatgagagcaggctgaggttgctgtcactctgaggaaggagaactgcaggacttatttcctgatccttaaaggatgaagtgaaaaaactggcaggaacaggcagatggtacaaaagggatccctagctgccctcactgctcattagcataaggcagtcccaacagcaccatgacagtttacaaatgccatggcaacgatccaaaagtgattgcccctttccttggcaaggacctggaagttacttcccatttcctagaaagttctgaataacctgtccctcagtttgcattaacctggcctttaatttgcatgtaattgaaagtgggcataagtggatataaatgcagttgccagcagcccacaggtgtggctct

SEQ ID NO: 504152 - DNA, 530 bp, Homo sapiens
tcacatcaaccagagtgacggcagagcattttgccattctgcttctttcagcaagcatcagtgtgtgtgtgaggagggaccttgggggcttcactgcacttcagttgaatccccttgtatccatatggtctgactgtctgtgactgaaacacagtcaygagagcaggctgaggttgctgtcactctgaggaaggagaactgcaggacttatttcctgatccttaaaggatgaagtgaaaaaactggcaggaacaggcagatggtacaaaagggatccctagctgccctcactgctcattagcataaggcagtcccaacagcaccatgacagtttacaaatgccatggcaacgatccaaaagtgattgcccctttccttggcaaggacctggaagttacttcccatttcctagaaagttctgaataacctgtccctcagtttgcattaacctggcctttaatttgcatgtaattgaaagtgggcataagtggatataaatgcagttgccagcagcccacaggtgtggctct

SEQ ID NO: 504153 - DNA, 569 bp, Homo sapiens
gctggtacctcgttgggcacagcaatagaggattaaaagctggatggcatagaggatgaaagagggttaagtatgtttctgctcgtttatgatggaggatgaaatccacacctcctcaaaagccctgcctgtcccgccattygtctttctgcaatggaaaaataacaaaaaaggcggattctgttggaaggtgggtggtttactcagtgtgctcctcttagcagccccagcagtttttgcttctccagagtgggattattttccttttggacaacctggctctgtgggagcacgtggatggaaaacacgatgccgcgagcttccatcggtgtgccagaggctgcagcttaaatcagagccaatggaaagggcaggttacaggaagccatggagactcgggaagtctgctcagtgacatcccaaagtgcagggctgatctgagcgcaacctaacgtttcggggctcaccccagaggttccctctctcagaatcgctcgatggacgaaagctgccaagggtgactgcttttctggagttcacctgtccatcatgaattaatccatgattag

SEQ ID NO: 504154 - DNA, 543 bp, Homo sapiens
aaatgccatgtgaaattagaaaaggcttgtggcttttatcactcgctttagaaaactacatattcctcctgattcctccatcaggtccaaagagaacctcgaagctgttcatgtctgtgcaaggtgaggttccatttgggcctctggaaagaaaagccatttaaaagcagccttccgctcatttatatttttggacttttcttactgaaaattcagaaaatgaaggtcaatccgcaaagcaaaaggagcactggcccaactagaagacttgggggttttgatttgtacatacagagctatgcttcggtataaacagcccaggcctggacaggccggcctctgctgctcagagtgcactgaaaaggctgcctcggtgagtggaataacagtgttaacttagcagaacttagcacactggatacttgcyacgtgccgggtattatgctgagctctttatagacgttaacttatgtaaacctcaaataaccttgtaagacgggcattacaacaagtgttcagatgacaccactgtagccccctctc

SEQ ID NO: 504155 - DNA, 509 bp, Homo sapiens
aaaatctgcctctgaacagcttccacccactgatcctaattttgatctcttgagctgcaaagaatatctttctcacgtcaagacctaagactgtttcttgccttagtcccttgcctctctaggctcaattttactcttatcagctcactctctttcaactcaactttcatgtctggtcacccttctcgggacgctctcaaaactatacacacagactgaccttcccaatgactggactaatgagaaaggctgcaaaatyagtcatccatccagtcgccactctggggaagaagatgttgaatcttcattgcaagtgctgtaaaatgaagtgtaaagatgcagttcctcttttgaggacagaatacccagattctcctccttcagatacagactgaacacacgtttattgatcacccgctgtgcatcagacatcagtgccgccttcttggattgccacgcccatccgcagaggcagtgtgtgttactcccgtttcgtgaataaacactaa

SEQ ID NO: 504156 - DNA, 599 bp, Homo sapiens
tgagggcgcgtcgcttcagcagagacctggcaatttgcagggcggtgaagcaccactcctcccctggataagagctggtgacaaatggagctgaagaaaataaagcaaattccaaaagtggagacaatggggtgagatcaacgtgaaacgtcaaggagccgaggatgccgtctgtagacatggctgggggctgcacacagcgctgcctcggatgtggcaggggtggctcttccctccttttggaagggctggggcatgagcayggccaggtcttttccaggggaagacaagttggtcttgctaccctgtccgttcagggttctagaatattctttcaggaacctgaattgcgtctttctctcctaggcaatctggcttgttttggtgcattgggaagactgtattttcccactggctagtgtgaattaagtcgtatttgctgcctttgacagaatcaccttgaggtgataggaagctgccctcccgtgctcaattcctgctggccgggttcatcgaggctgctgggtcagtttgacacctgctcagccctggtgaggttggctatgtggtcacgttttctgttccctccttcccatccc

SEQ ID NO: 504157 - DNA, 613 bp, Homo sapiens
tgagggcgcgtcgcttcagcagagacctggcaatttgcagggcggtgaagcaccactcctcccctggataagagctggtgacaaatggagctgaagaaaataaagcaaattccaaaagtggagacaatggggtgagatcaacgtgaaacgtcaaggagccgaggatgccgtctgtagacatggctgggggctgcacacagcgctgcctcggatgtggcaggggtggctcttccctccttttggaagggctggggcatgagcacggccaggtcttttccaggggaagacaagttggtcttgctaccctgtccgttcagggttctagaatattctttcaggaacctgaattgcgtctttctctcctaggcaatctggcttgttttggtgcattgggaagactgtattttcccactggctagtgtgaattaagtcgtatttgctgcctttgacagaatcaccttgaggtgataggaagctgccctcccgtgctcaattcctgctggccgggttcatcgaggctgctgggtcagtttgacacctgctcagccctggygaggttggctatgtggtcacgttttctgttccctccttcccatccccgaccacagaatac

SEQ ID NO: 504158 - DNA, 592 bp, Homo sapiens
ttaatataatttcatattgtgagtttgggccttttattccagcctcagagagggtgtctctgtgtgtgtgtgtgtgtgtaccccatgtgtattgggtcttcattctgtcattttacattttaactatccctcttgtgatcctgtcacccattggctttactttgtagcagaagttgtgcttttgtgtcaaatgatcctccctattccaccttggaaggtgagatgatcctgcttttcggacatatgaggaaagggagactcaaagaggttacgtaacgttacccagaatcaaccagccgctagtggttgatgggacttgagccctgcgtgtcccgccggctggccatactgcctctttgaggactccgggtgctgctgygggtcaccttcatctttttagctgccccacccccagtgcccagtgcccagtggggtctggtatataatagctcttcagtacatatttgatgaatgaatgagaagcatccttttcctgtcttcctctgtgctgctagcaaaagcattggctcaggttcccatcactttctgtccatttctctaccttgtccacgaagataccatgagagatttt

SEQ ID NO: 504159 - DNA, 617 bp, Homo sapiens
gtaaaggaaagataaatatttcaggtgatggatatcctaattaccctgatgtgattgtatgaatgtatcaaattattccaggtaccctgaaaatatgtatatctaatgggtaccaaaaacaataaataaataataaaaatctgctttcaccaactgatctaggtttaagcaatggagtaacatgacaccagtataacaccttttgcatttctgaaagcttccttcccctcctctttcccctcccctcctctcctttcctttccttctagatctgacagtagtagctgcagcttatgctttagatttgagatacacagttgggatctatgatggtccctgagaaaggacaatgagtagaagaagcaaggtgcagagaggatctaacaatttttgcatggacatgagatttggagcaaggtctagaagctcatatcagcaaggagtaagtatgcttgtggcttaaagattatggtcytcaagacttgctcctggactggaaatattcccctaattttttgcctaaatgaaatgtgctacaggcctgagtatacctaaatcagcttcatttttctgtcaaatccctccctgtatgcttcttccagtgatatgtcatgcag

SEQ ID NO: 504160 - DNA, 499 bp, Homo sapiens
cactttcgcctttctgtttctgtsttgtcctgagatatctcatgtagaaatgaattgatggccctttatactgcggttggactcttcattcagattttttcaaagcacattataaactctaattcattaacgtcatcataaatggtaatgtcctgtgaaaaagagaggtggtggcaccaattaaaataatcttcttgtagtcacacatcaaatcaatgtcagtgcaaacacttgaaccaccagttaatgcagccccatttctttttatattgacaacagcacagtggttgaagctgaaatagaacctcagttcatacttatagaatatgccatgctgcacttaacacatggatctacagggagaaggaaacagaagtgaacatggactagatgagaatctgatggacgatatgtaccacgtgctttgaaatagccataaggatgtctgcacaagaatatccatgcattcgttcttagaatttcagggccggttgtagct

SEQ ID NO: 504161 - DNA, 634 bp, Homo sapiens
agataagaaaatgaaggactagagactttagttaactttcctagggtcacacaggtaggaagtgacagagctgggatttgatccagggctccctggctccaaagctcttgcttttagccatgatactataatgcattgaataatgggcgatatctacctttccttgatggtcaggaagaaaggtcaaaagaaaggttgttagagctaaaatctgaaagaggagaaaagtttttcagataaagagagtgtgcgtgtgtattttgtatgtgagtattgtgcgtgttctatgtgtgctgtatgccgtgtgtgtgtgttgtgtgtgtgtgtattgtgttgggatagagcagcaacacaacagtgtccctagcggaagaagtaatgtctgtgatggtaagggaaaagagggtgaaagtgagaaaagagtgagagagaggctyggacaacttaaacaactggaaggccagcaggataatggttatggtagaggtggagagaaatatgaagttggaatgggatgggatcagggacacatcatgccaagtcttctatgccacattgggaatggaaagtcatgaaaagattttaagctggagagttacctaatttatcatagattttaaaaagattcctcttg

SEQ ID NO: 504162 - DNA, 566 bp, Homo sapiens
ctggcatatcttgttgtgtttatgagtctgacaggcaaacatatctgaagcatatctcatatgctgatctgtgagggagataagccccttgttttgcttgactggaaacaaaataagcaggtggcagaaaaccctgcattgatttctgcttgggctaaaacacccagaataagatcaagtcccccttgggcacactccagcctctgctatttgatcattgatcatttgacttaagtttgcaaattgttgtagggaagtgtaagtttctttctgctttaacaaagctacttttacttattwtaattttataagctattagcactattttgtgatagaaaaaactaaaaatcaaatggtgtcagagcttaaaaatctcttacttcatttgccgtgtaatctttatgcatttgatttttgcttcaggatccttacctataaagcatacccatttcatttgaccactagatttttacagaataaaaatagttcctttctgaagaggaactatgaaagtgtatacatgggttaggagatggagctgaggactccaaagtaatcagtccctg

SEQ ID NO: 504163 - DNA, 572 bp, Homo sapiens
tttggagataaaggagctacagaaaacagcagatgtcccagagcacacaaaccatgtggccaagagcaaaagggaactcacaaggaggtgtctgtattacgagaactcgtgcccaaattccttttctgtgagaaaacagtaccatataatccttttgtctcagtaaaaaaaaaaaaaaagtggtccaaagcagacagaatggaatatgcattctccctcctttacccctaaaacattctgtcttgatcaatttcatttttttttgtcaggtgcactagatgttataaaagcacttagcttattgcctggtacatagttatttgaaaaactttgaccatggaaaaggctgaagaaagctaagagtattctatataaggtctggaatgtcaagataagaaatttgcattgatctaacaggtaataagaagctccataccatattctttttacctgtatgtaaaaatcaagaggagttaatacragtagtattttattaccaaaatagaagttgcatctggctcagactcagcctctgattcctcaggaggtttttcccacccctttccctattc

SEQ ID NO: 504164 - DNA, 627 bp, Homo sapiens
atgaatgttttaagtgcttattaaatactggttcataactctttgtaagagttaggggagaatcatcaatatctggaacaacaccattcttcatgatattggttttgagagccacgtgggcagagaaataaattctagaaaaaaagaaatggtaatctgacatgcagacttggattataaatatggtcaaaggtgtacttaaaaacaagatattttgcttcttggttagctttactgagaatccagggatcaagtaaaatcattgccattggtactgacggttgagagtcagtgcgatgctaaaccacaggaactccttacttctatgcatgattaaatccagttgtcaggtttgggcagaagagagccctccttttcctcaagtctatagggaggtgctgtgggggagttttctcattttccagaatatacagagcaaggatcatccatcataatcagacaggggtatttcatatcatccatttccagtgagaactgtggtaaaattctgtcctttttcccatttttggctgctgtgattgaaacccgtyttataaacagaaaagggtagtttgagttattttaaaaaataagaatccttcagtctctgttgcccattttctcctc

SEQ ID NO: 504165 - DNA, 573 bp, Homo sapiens
cctggtcaaggttatgtataataaaaatggtaataccattcaaccctgtgatcaagatgaaattattatggcataatacccatatatactttaaattgtaaatgagtacttgcaattaggtaatataatctcaagatgtgcatctatttgtggagtgagaaagtggagaaacaataggaaaacaaacaaatatgtgacttgaaaccatcaagaaattatcatctataatatgagatatgatgtggaattataaccatgtggtttgtgtgtgcatatttaagtgtatgtatatgcatatgtgtatatatatgtaatcacagtgtatgtgtatatttcatatatctgtgtgtgtgtgtgtactgcaacttccacattttctatttcctttataaatttattctacttcacaacatttagcaccaactgacgtaaatatatatgatgaraaaagaagagatccttagtctaggaaaatcagggaaatttccatattgaatattttaatcattaacattgacgatattattttaaagaagtgtgccttcacaacaagtagcattatacttgagactc

SEQ ID NO: 504166 - DNA, 612 bp, Homo sapiens
gggatttgtaagcagcacaaactaattgtgcatcggtagatttgcagagtgtggttttctgttgatggatttctttatgggcaataaaatctccaataagtaccatttacattcagcagaactctttttgaattttagctcattcttagagagatttggagagagagagaccatccctgcacatgcagcaggcacctggcctgtctgggtggccagtccttgttctgtggccactgtgaaccccgccaatgtcctagtttcccgccagcactcactaagcaattttgcttctcattttaygggcagacgtaaccaaagcaaggagacttaggtgactcgggacactcggttttgagtcaattctaaaaaccaggagaccaaactttctctagaattactgccagttggtttccaaattgaggtttccagatgaaaattattatccaaacagaccacacacagcactctgacttgccttctgtgcctggcatgtgcgagggaaatggcgctggagaatattatcctgatgattatcacagttgttgcttttgaaggcaaatatttattttgtgaagattgcaaaatgaagtacaacagaatgttgagctcctc

SEQ ID NO: 504167 - DNA, 612 bp, Homo sapiens
taaggaaaaaaacagtgattttgctccagaagctggagagtctcctagggtctcgatgctcgtcatgaggaggtggatgccagcctgattctcattcccttgtaaaggacttatttttgttgtttcaactttatttaatttctgacttttgctttttatcttgctagggacttttcataggctctttgcacttaatattctgaaaattccatagacgtggtgtgtgtgtgtgtgtgtgkgtgtgtgtgtgtgtgtgtgtgtgtgtggcgaggtgtcctacaaccccacaattctgattttaggaaccaaccctggaacactccctgcccccacatgcaccaagatgagcataaggacagagtaccattggcagcaggtggacaccctgttgcccttcaggacaaaacccaggtctgaaagttctaagctttcactcctctgcgcatttcctcttctgtgtggtctctgttgtcgctttctgggacacctatcagtcacctgtcaggtcgtttaggctgctcctttttctcttattatgagagcgcaacagtttggagaaggcatagaactattaaaattatttttcaaataataatttgaacggccagtttg

SEQ ID NO: 504168 - DNA, 612 bp, Homo sapiens
taaggaaaaaaacagtgattttgctccagaagctggagagtctcctagggtctcgatgctcgtcatgaggaggtggatgccagcctgattctcattcccttgtaaaggacttatttttgttgtttcaactttatttaatttctgacttttgctttttatcttgctagggacttttcataggctctttgcacttaatattctgaaaattccatagacgtggtgtgtgtgtgtgtgtgtgtgtgtgtgtgtgtgtgtgtgtgtgtgwggcgaggtgtcctacaaccccacaattctgattttaggaaccaaccctggaacactccctgcccccacatgcaccaagatgagcataaggacagagtaccattggcagcaggtggacaccctgttgcccttcaggacaaaacccaggtctgaaagttctaagctttcactcctctgcgcatttcctcttctgtgtggtctctgttgtcgctttctgggacacctatcagtcacctgtcaggtcgtttaggctgctcctttttctcttattatgagagcgcaacagtttggagaaggcatagaactattaaaattatttttcaaataataatttgaacggccagtttg

SEQ ID NO: 504169 - DNA, 470 bp, Homo sapiens
cctgtctcaaaaagaataaaataaataaaaataaataaacaaacaaaggataacagatttctcattggaaacaacggaaatgagaagctagtaccmacaatactttaaaaatactttttaaatgtgttaacctataattctatacccagcaaaaatacctcacaaaaaattgacctaaatgacatttatagaacattccacccaacaacagcagaataagcatttttttcaagtgcccatgaccatattctgggccataaaacatgcgtaataaatttcaaaggatataagtcataggttgtatgtcctctgaccacaatagaatttagaaatcaatgacagaattatctatgaaatatccacaagaagcccatttctaaataaatgtggttcaaagaagaaatctaaaaggaaattagaaagtattttgaactgaatcaaagtgaaaataatatatatcaaaagtttga

SEQ ID NO: 504170 - DNA, 603 bp, Homo sapiens
ctgggagcaatctcaacattctggaagcgttttttgtttgcttgctcatgggtgatcrtgaaagctccatgaacagagctgagcttcgaagcttcagatgggacaagccagtcagttaaacagtgtatcaaccccctccttggttattaataagctgggtatttcttgaaaggaattctaattcttacctactccacagagatgccagaaagatcaattagctgatgctcatctgagacagaacaaaaacaaaaatggaaaataaaaagatctataaatgattctttcctcagttattatcattgttattatcaccatcatcaccatcatcattatttctgctgagttactgcttcatcagactactcctatatcttcaatcaggggagaaacagcctgaatgaaacctggaaattaaggaattaggagagacatgcatctaaggatggggtgggagctttccatgcttaagtatcacatcgcccctcaaactttccatttctgccctgggtctattcaacactgagggaggcctaacatgaaagtgggataaaggtccccctcccttccagtccagccttcaatgccctcccttcccccaaa

SEQ ID NO: 504171 - DNA, 664 bp, Homo sapiens
acctttggagtcatgggtaaatatcttgattatggtgatagttacatggatgtacgcatttttcaaaactcatcatactgtacatctaaaatgtgtgcattttattctttgcaaattatatcacagtgaagttgatttttaaaaattctgtcctctttgtttacagagaggcctagagcagctgatttatccctcagaatcttaatttcatargatgacaattccataagtatttacttgcagatttgccatgattatctatctaagtatggtacttaaaactgagtaagtaagcagtaacttattattaataaacctgaagactcaaatagacgaatctctaatggcagggcttcagatgtgatgagaagtttggaaaatactttgaggcaggaactcttgaccagtcctcttcgtaatggtcattttctctaacggaaagtccaattttccctaatggcccagtaaattgagccattaatatccttcctccaagataaccctaggtttggagtttaaatgatatattctcatattttaaaagaactttatttcatttgactcccatagctatctttggaagtgggtagatcgtgaaccatgtgactctagagtacagaaaattaaagagacttgcctaagcccacatacttcaaccaagcct

SEQ ID NO: 504172 - DNA, 664 bp, Homo sapiens
acctttggagtcatgggtaaatatcttgattatggtgatagttacatggatgtacgcatttttcaaaactcatcatactgtacatctaaaatgtgtgcattttattctttgcaaattatatcacagtgaagttgatttttaaaaattctgtcctctttgtttacagagaggcctagagcagctgatttatccctcagaatcttaatttcataagatgacaattccataagtatttacttgcagatttgccatgattatctatctaagtatggtacttaaaactgagtaagtaagcagtaacttattattaataaacctgaagactcaaatagacgaatctctaatgrcagggcttcagatgtgatgagaagtttggaaaatactttgaggcaggaactcttgaccagtcctcttcgtaatggtcattttctctaacggaaagtccaattttccctaatggcccagtaaattgagccattaatatccttcctccaagataaccctaggtttggagtttaaatgatatattctcatattttaaaagaactttatttcatttgactcccatagctatctttggaagtgggtagatcgtgaaccatgtgactctagagtacagaaaattaaagagacttgcctaagcccacatacttcaaccaagcct

SEQ ID NO: 504173 - DNA, 563 bp, Homo sapiens
ttccctgcattgcccccgcagtgtggggttgtttgatggtttgttttcaatttagaattctaataatgaagtcactccttgctgaaaatctttctgtaatggatttctattttgtttttgtttttgccactctgcgtcacctcagcttaaacaaatcacctcatttcactcacctggccacagtggttgtccagggatgggtaattcaagcccagtccagcccaaggctttagcttgaatcacctgagaaaggatttgctgttttttttttttttggagtcttgctctgttgcccaggctggagtgcaatggtgcaatatcggctcactgcaacctttgcctcctgggttcaagtgattctcctgcctcagcctcccaggtagctgggattataggcacatgccatcatgcctggctaatttttgtttttttttttcagtagagacagggtttcaccatgttggccaggcctcggcctcccaaagtgtgggattataggcataagscactgcacctggcccgatttactattcttgaacctcagaggacgtgaggctggagca

SEQ ID NO: 504174 - DNA, 375 bp, Homo sapiens
  misc_feature (1)...(375): n = A,T,C or G
nnnnnnnnnnngtatgcagcagacagagccccttgttgctatcagcgtattgactacaactgtcagttacgtggtgacaggatacaatcatagtcagtttactcttcatataccctgcatggtagtcaacttgccagagtacccctctctcacagagagtatgtaattttgatacttgtttaatttcamacctctctcgtttgacagaatgatttctcacccattttagatagtgccatgaacccctcaattgagtttcttcttcctgctgttatagactgttcctgcctgaaatatttagagaaacagttctccaaaggcagttaattgggattgcatataggcacacatagtcttttttctttctctgacata

SEQ ID NO: 504175 - DNA, 590 bp, Homo sapiens
tccttcccctctggcaggtgcagcaggccatagctcacattggcactgaacaatggcctttgtgtagatctccctgtgatctccagaaaccctgatccagctcttagggaaggggaagcaacaagacttagcaaaatccctgctgcatccatctcatacagataattaataacagcaatccttggaaaatgaggcttaagcaatgaaatccttttctctttttcaatgagagcggtctaataactggggctttgactgttgtttcctgaggaaaccgtgcagtgatgaaattaatgatgtattaaaacaggtacataaaaatgtcacagtgttgaagacagagcaaacaggaaggtmcttcagaaaaaggtccccagttatcagaaaagttatctgaaaatgaaacactaaccaagcaagaaaatactccctgagcatcccgtgaagatgagtctttctcactgttcttttctgcatcccacgtgcataatgtaaatctaactaaaaagcatgcaaaagcaaagagtgtttttgcaagtgattgatggattgtattgccttctatgttatatgtctctaacagacaaatg

SEQ ID NO: 504176 - DNA, 590 bp, Homo sapiens
tccttcccctctggcaggtgcagcaggccatagctcacattggcactgaacaatggcctttgtgtagatctccctgtgatctccagaaaccctgatccagctcttagggaaggggaagcaacaagacttagcaaaatccctgctgcatccatctcatacagataattaataacagcaatccttggaaaatgaggcttaagcaatgaaatccttttctctttttcaatgagagcggtctaataactggggctttgactgttgtttcctgaggaaaccgtgcagtgatgaaattaatgatgtattaaaacaggtacataaaaatgtcacagtgttgaagacagagcaaacaggaaggtacttcagaaaaaggtccccagttatcagaaaagttatctgaaaatgaaacactaaccragcaagaaaatactccctgagcatcccgtgaagatgagtctttctcactgttcttttctgcatcccacgtgcataatgtaaatctaactaaaaagcatgcaaaagcaaagagtgtttttgcaagtgattgatggattgtattgccttctatgttatatgtctctaacagacaaatg

SEQ ID NO: 504177 - DNA, 589 bp, Homo sapiens
attggagatatttggacactcagcagtctccttgcaattgggkttggtacccactatgtgggtcatgcaatcaattcactgggtcatagtcaacatagtggcattctgttttgtttgaggggcttaaatttggtatttacccgtatgttcacttgaaatattactaagataattaatattaacttttaaattttatgtcataaggctattattttttaaactatgtgtcctggtttttttaagtttgaagactagtgctctgaatggaaagtgaggtatctgaagtcaccagaaatagacgaggagagttaatttggttcccccactccttactgttcttgacacctgcaacccaccccagcttgaaggcagcagcccactccacccctgtacctcctgttgggggtgggtttatctttctgtgaaggtgctatgatggttaatattgagtgtcaacttgattggattgaagggtgcaaagtattgtttctgggtgtgtctgtgagggtcttgccaaaggtgattaacatttgagtcagtggacttggagaggcagacccaccctcattctgggtgggcaccatctaat

SEQ ID NO: 504178 - DNA, 523 bp, Homo sapiens
agctgctgtcacctctgtctggtattacctctgtgtcccatgggctgccatgstgccaggtccttctgatccccatcccctgtttgctctctgaactctgctctgttcccactgctgttgtcctaagagtccctctcatggccacaggagagcccaacttccttgtccccctccaagtgcatggtgtgagctgctaaacacagggttctttgcctggaattgcacagcttgagtaatttgcctttcctttctgcatcccaaactccattgcccctttctgccaggagcattgctttaatacgtcatttacacacagatttttctcttgggacagcttttgagcaacacaactaagtcaaactgtaaccctcaccttgtacatgggaatgagaagtgttaaaactgagcactaagaactccaaatcaaaaactaaattagaacctgggtcacagacgagagttccctactagcctggagtcaggtgtgtcttcatctctagatgggcaaccttatgccagcgtg

SEQ ID NO: 504179 - DNA, 523 bp, Homo sapiens
agctgctgtcacctctgtctggtattacctctgtgtcccatgggctgccatggtgccaggtccttctgatccccatcccctgtttgctctctgaactctgctctgttcccactgctgttgtcctaagagtccctctcatggccrcaggagagcccaacttccttgtccccctccaagtgcatggtgtgagctgctaaacacagggttctttgcctggaattgcacagcttgagtaatttgcctttcctttctgcatcccaaactccattgcccctttctgccaggagcattgctttaatacgtcatttacacacagatttttctcttgggacagcttttgagcaacacaactaagtcaaactgtaaccctcaccttgtacatgggaatgagaagtgttaaaactgagcactaagaactccaaatcaaaaactaaattagaacctgggtcacagacgagagttccctactagcctggagtcaggtgtgtcttcatctctagatgggcaaccttatgccagcgtg

SEQ ID NO: 504180 - DNA, 523 bp, Homo sapiens
agctgctgtcacctctgtctggtattacctctgtgtcccatgggctgccatggtgccaggtccttctgatccccatcccctgtttgctctctgaactctgctctgttcccactgctgttgtcctaagagtccctctcatggccacaggagagcccaacttccttgtccccctccaagtgcatggtgtgagctgctaaacacagggttctttgcctggaattgcacrgcttgagtaatttgcctttcctttctgcatcccaaactccattgcccctttctgccaggagcattgctttaatacgtcatttacacacagatttttctcttgggacagcttttgagcaacacaactaagtcaaactgtaaccctcaccttgtacatgggaatgagaagtgttaaaactgagcactaagaactccaaatcaaaaactaaattagaacctgggtcacagacgagagttccctactagcctggagtcaggtgtgtcttcatctctagatgggcaaccttatgccagcgtg

SEQ ID NO: 504181 - DNA, 301 bp, Homo sapiens
aatatccccaagtctgtgctcatattcggaaaagacagctcagcgtaaagcactcaaccaggagtcaagatattgttattttcaactgttgttccaacagttgtattataaagggctagtttatttcatgcctttctaatttgamataaagtgctacatggcattggggctggtacagcctcgctcaattatgggttgaagagtacacagagactgccaggctgagggaaggtgcaagagaatagaagagatgctcacagagaaccacagaccgcacggccccagagtcaggggcagcatc

SEQ ID NO: 504182 - DNA, 507 bp, Homo sapiens
tcttggcggaaatgcgctgcgctcctccctgtactacataagcacgagaattccactacagaagaaaaccccaggcctagtgatggcggttctgggcattttgccagcttctcccagggtgtgttttctgaccccacccacttctgatctgtaatgtcatggtcaatagaaactacttggcccaaacggaaaaggcaaggaggaacacagcgggaaagcctatggcgttccctggtggctaccccggggactgcactcatagatccgcgtgttccgagaagcctctgccatcccgaccccggagccgtgcagaaacccgcggctccaaagaaaaccggctagaacgcacaggaagcccagccagtgttcaggacackgcgagtggaagccgtacgtcccacggactgatctagtttgctgaagaggagccatttacttctaaccccagcagcggacattgccttgctcaaatataaaatatatgaaccaagaccgaaagcaactctt

SEQ ID NO: 504183 - DNA, 621 bp, Homo sapiens
gcacattccctgactggagcaaagacagggcttggcgtcttcccagccctttttattgtgatgtcaggctgagaccagccactgttggagagggaggaatggggaggactaggaaagccatgcaacggggggtgggtggcctcccccctggcaaccaggctctctgtggcgcagctcctttcaggggcactcacagccatcctcctctgcttgttcccttgctatggaccacaaccmaggctgtgaatcctgttagggtagggactgtgtctggccagctcctagcagtgttcaaagtatgcttattgaatgaatgaatgaatgaatattcaaagtatgcttattgaatgaatgaatgagtaaatgaatgaatgaatgatgatctgatttccataacactaaggcatttcccagaggcaacaagtcccttaaccttcagtgagccaaatgcacactggctttatttcacaatatctactcctatggaaacaggagtcccagtgctagatttaaacaaacagctttccacaaagccagacttaactaaccagggccagaaacccctgtgatgcttgacttctctttttcattcccccgtgtccaatttgccactgcagcctt

SEQ ID NO: 504184 - DNA, 554 bp, Homo sapiens
caataacaagacagaacaactggaacaagctgccactcttcctgctttataattttatcatgcatgagatgggggaaaggccatcatttgatgatgacctattaactcaaaacaaaaaatggccttgtttgccatgccagagagtttagattttagccacatgatagggagccattaaaagrttttacaaggagaataacaataccagacttaatattaaataaatgctagcagcagtggaaatgatgagatggaaagaggaaagttgtgatcaggcaagaatttgggggagttatttcaagaatccaaaggaaagtttggttcatacactaataggagaacagattataattccaggtactggaaataataatagcattagtagtagtaatagttagcatttattgaatacctatcatgtgccaggcacttttctaaccctaacattaagtagtattttacttaattctcattagcaccctatgaagtaggcattattatttttcccattttatatgtgaggaaacagataccaagaaacaaacacactcaat

SEQ ID NO: 504185 - DNA, 554 bp, Homo sapiens
caataacaagacagaacaactggaacaagctgccactcttcctgctttataattttatcatgcatgagatgggggaaaggccatcatttgatgatgacctattaactcaaaacaaaaaatggccttgtttgccatgccagagagtttagattttagccacatgatagggagccattaaaaggttttacaaggagaataacaataccagacttaatattaaataaatgctagcagcagtggaaatgatgagatggaaagaggaaagttgtgatcaggcaagaatttgrgggagttatttcaagaatccaaaggaaagtttggttcatacactaataggagaacagattataattccaggtactggaaataataatagcattagtagtagtaatagttagcatttattgaatacctatcatgtgccaggcacttttctaaccctaacattaagtagtattttacttaattctcattagcaccctatgaagtaggcattattatttttcccattttatatgtgaggaaacagataccaagaaacaaacacactcaat

SEQ ID NO: 504186 - DNA, 520 bp, Homo sapiens
actttcaacttccaaagttccctctattccctstagagcagtaagtagttcacaaaactggcaacatattagaattatcttgtgtgcttgtaaaaatacagactcctgagttttatatctgtagacatctctgattcagattatctctgaatctctgattcggtaactttgcaaaaaggacccaaggaatctgtttatctaaatatttccagtgaaaatttggtacatagtcaggtgtgagaacctctgctgtagaaaagaagacattgtgtaaatgttaatacagcttagattcaaattccagctctaccgctagctggtgagacctttggcaaattaccttgttactctgctttgatgtattcatctctaaaacagagctattaatagtaataccttacagggtcattgtgaagattaaataaattaaatgcatgtggtgttcttagaactgttcttggcagagaataacaactgaatacttgttgttggctactgttaggtgtttggcatagacgtt

SEQ ID NO: 504187 - DNA, 520 bp, Homo sapiens
actttcaacttccaaagttccctctattccctctagagcagtaagtagttcacaaaactggcaacatattagaattatcttgtgtgcttgtaaaaatacagactcctgagttttatatctgtagacatctctgattcagattatctctgaatctctgattcggtaactttgcaaaaaggacccaaggaatctgtttatctaaatatttccagtgaaaatttggtacatagtcaggtgtgagaacctctgctgtagaaaagaagacattgtgtaaatgttaatacagcttagattcaaattccagctctaccgctagctggtgagacctttggcaaattaccttgttactctgctttgatgtattcatctstaaaacagagctattaatagtaataccttacagggtcattgtgaagattaaataaattaaatgcatgtggtgttcttagaactgttcttggcagagaataacaactgaatacttgttgttggctactgttaggtgtttggcatagacgtt

SEQ ID NO: 504188 - DNA, 442 bp, Homo sapiens
tcaaatttgctacatactcaatcctgtcatctataaataacacaatttcattttttctttcctgacaccagttttccaattatgcttcttcccagtccctgaccccctagtcaatagttacataattgcgcaygtagtcatgtcttcttccaagcaaagtaaacaaccaggtacactgctggaagttctgtccactgaaagaaattcccttcatcactgtcctttagaaatgtcccagaagggggctgcagtgcttcacttgtccaacttcaagtggtgccttcccaattacgtatatattatatcacatccatttgtcctaaagctgcttatttacatgggatgcttagcaaactacaacctaatttttatgtaaacaaactgcaatataacttgagagtatattctcctaagaagtatctgagtcttagccaattaaagc

SEQ ID NO: 504189 - DNA, 418 bp, Homo sapiens
tgctcacataacatcctctatgttccagataatcctcaaagttcctcccaattactgaggccctgaattctcaaaataagcctgtatgatagatagctattccagttttacagatgagaaaactgaggcccaaagattcatgcagctagtgagtggaagagccagaactcaaacccaatctgtcccaacagcagtgctctcagcttgacaccatggtgacatcaaacagagacacccctagtccaagaatgaaatcttgaggggagaatggattgtcatcaaaacttcatacctgctcattggtrcatcccaggacagggtaacatgtctgctctctaagtgtctgcctgtggaagtcaatcagggcagcccatcacaggtcacctgccaagagtacacagcacactcgctatgagct

SEQ ID NO: 504190 - DNA, 632 bp, Homo sapiens
caccaaggggctccaggaagcacttgtgtatgctcagcgatggtgaacagagttccttctgacttacctgccgtgagatgyccccgaatgagccatgttccagagagagtgagaagctacagggtgcaagtttgcagtttctggagtcagtccactggcctgtcagctccagaactgccacataaatcataaatggtagcgatttgtgctggacatgcatctgcaggagaaaaagaaacaaatgagctgccgttgcttttctactatttaattttggagatgtttccccagtgcaccgttctggagaaaatgtccacataaacaaattattgttttaccagccttcctcatgaatgctttccaggcctcctccaaaagccatagctgtatgaagcagggaacagtttaggatttggaaaggaaggaatactgccaagtaagttgcttaatttgaaactttattggtgattggttgctttctaccatttttttttcctagctgccatcatgcttttttcacctgacaatatgtacagagacaatttgaaaatgtccaaaggtagaaataactgtttaaatatttttctagagaactcgtttattcttgtgccaataatgaatcacttgactgt

SEQ ID NO: 504191 - DNA, 607 bp, Homo sapiens
ttaagcactgtaaatgggtattcccactaatccctcaacctcatcatcartggaatttgtaatctctgtaaactctgaaagttgattggaaaataatgaaaacaaaatgtatttgttctttcctgacatcattgaccatttgaatatcttttattaatttctattgtttatcattttttaaatattatgggtgctgaccgaaagtaaacacatacacacacacacaccccatttgactattgcagttattagcaccttacttctcttctgcatctctaacatattcctaatatctaaataagtgcatggaccttcagctacatctaagacagaaaaattaatattagacttattctctggcaataaacagaaaataaaatgaaattagaggaactttgtaagacaaatgtcagcagatatcagactttaaccagtgtaggtatgtaaggatttgagaggagcagagcacaggtgggacctcacattgatgccagcattccccctgagggcaccttccaaactcttggtgcagaggacagagccccagcagagagcagtggtcttgcagggtgacatccatagggaataaagatggggaatgctaagg

SEQ ID NO: 504192 - DNA, 607 bp, Homo sapiens
ttaagcactgtaaatgggtattcccactaatccctcaacctcatcatcaatggaatttgtaatctctgtaaactctgaaagttgattggaaaataatgaaaacaaaatgtatttgttctttcctgacatcattgaccatttgaatatcttttattaatttctattgtttatcattttttaaatattatgggtgctgaccgaaagtaaacacatacacacacacacaccccatttgactattgcagttattagcaccttacttctcttctgcatctctaacatattcctaatatctaaataagtgcatggaccttcagctacatctaagacagaaaaattaatattagacttattctctggcaataaacagaaaataaaatgaaattagaggaactttgtaagacaaatgtcagcagatatcagactttaaccagtgtaggtaygtaaggatttgagaggagcagagcacaggtgggacctcacattgatgccagcattccccctgagggcaccttccaaactcttggtgcagaggacagagccccagcagagagcagtggtcttgcagggtgacatccatagggaataaagatggggaatgctaagg

SEQ ID NO: 504193 - DNA, 558 bp, Homo sapiens
tataaccccgcttcttgttagggatatttcctggtgatacctaacctcttgacacattttaaaaatcatctccaacacacaaaagtcacttgtgattttatctgccaataataatctgaaagagaaattaagaaaactattctacttataataataatatcaaaatgaataaaatgcttaggaataagcttgaccaaatagacaaaagaattgtagatcaaaaactaaaaaaaagttgaaagaaattagtcagaaataaatggaaaggcatcctgtgtttataaattgaatgacttaatattgtcaactaaattaatttactgttaataaattgaataaaatatgtgaattctacaacccctatcaagttcttaaaggcattttttttttgcagaaatagaaaaattaatcctaaaattcgtatagaggctcaaggaatctgactagcaaaagcaatcttgaaataaaataacgaagttggagaactcakacttcctgattttgaaacttattacaaagctgcagtaatcaaaacagtgtagtgctggcataaaggcg

SEQ ID NO: 504194 - DNA, 672 bp, Homo sapiens
gcaaaaaggtgagtctcgcagtgctttataaccccgcttcttgttagggatatttcctggtgatacctaacctcttgacacattttaaaaatcatctccaacacacaaaagtcacttgtgattttatctgccaataataatctgaaagagaaattaagaaaactattctacttataataataatatcaaaatgaataaaatgcttaggaataagcttgaccaaatagacaaaagaattgtagatcaaaaactaaaaaaaagttgaaagaaattagtcagaaataaatggaaaggcatcctgtgtttataaattgaatgacttaatattgtcaactaaattaatttactgttaataaattgaataaaatatgtgaattctacaacccctatcaagttcttaaaggcattttttttttgcagaaatagaaaaattaatcctaaaattcgtatagaggctcaaggaatctgactagcaaaagcaatcttgaaataaaataacgaagttggagaactcatacttcctgattttgaaacttattacaaagctgcagtaatcaaaacagtgtagtgctggcataaaggcrgacatatagaccaattaaacaaaagaaaaagcccagaagtgaatcctcatatatacatagtcaatgtatatgaggtcacaatggtgtc

SEQ ID NO: 504195 - DNA, 613 bp, Homo sapiens
tatttttccaaacccatagaaagtacaacttcaagagtgaacactaacactaatgtaaactatggaccttgggtgatagttatgatgtgtcaatgtargttcatcaattgtaacaaatgtgccactcttgtagaggataataggatcactacaatcaagtagaatatatttcaagaatgcaagttgagacaataaaaaatccattaatataccatacacatagatccaaacagaaaaaatacataattatctccatacatgtaggaaatataaaacctttaatcaagtatatatatttgacaaaatataataatgatccctgatttaaaacattcaagaaaatattaatggatatttctttcttttttttcagggtcttgctctgtggcccaggctggagtgcagtggtgtaacctcggctcaccaaaacttctgcctcctgggctcaagtgttcctcccacctcagcctcctgaggagctgggactataaatgcacaccaccatgccaggctaatttttgtgtcttttttgtagagacggtgttttgccatgctgcccaggccagtattgaactcctgggctcaagcaatccccggcctatttctttaatgt

SEQ ID NO: 504196 - DNA, 595 bp, Homo sapiens
ctaattattcatatctggttraaaaaatacatttaatcaaggttgataaccaacaatgacagtaaaacctctcatttccctaagtttcaaaaacacatctaacacatataaattgcacaataaaatattttcttaagaatgatgatatttagtgatactcactctaagcccaggaaaccccggaggaccagtgccacctacaagtccctattgtaaaagaaatttgcaatacttattaaatttgattcccaactactaagggtatttctgaagataaacacaaaactttctagctaagaatacatcaaaatgtaccttctactatagctaacttctgaaactcccctaatctatgcatcctcctgagaaggacaaaccaatggtggccatttatgttcttcacaagtgcccttggctaaatgcttttggatgccaggactaccacctagcttaagcagagtcctctctgcctcctatgtatttaaccaaggaagtaaatcctatcaataatcaacactgtacacttaattatgctatccattctatgaaaagacaggtggtcagcacgtagggttagaaaaacattttcagacgg

SEQ ID NO: 504197 - DNA, 569 bp, Homo sapiens
tgctcaaggttagaccattaaaaatgggtgggactgagatgtgaatggaggcagaccgattctagagtccatgtttttcaactatgctatactgaatactttaaatcatcattccaagacatacatgtaaaacaaaaagtcctttaagtacagttttattaaggaaacgaataatacacataaatactacaaatttaaaatgaggtgaaaattaaaagcttcccaaatgcctattgagaattctgcatggtaaaactatgaaggatggtaaaataacaaaccttctcattataaattctattgtaaaataactcaacsctcagctactcttactttacaatactacatttttctctaaagatttaccattcctcaactttaaagctcactttttaagaggctattttataaaaatgtttataagacttactattgtaaacattttcataatattcatttacaaaaactaggaataacaaaaataaaaatctatcattagattcttataatctctttacataggcaagtcagtattaaatattatgtttaacagactgccaaaaattact

SEQ ID NO: 504198 - DNA, 589 bp, Homo sapiens
tcaaaccagcatcatggacttcactaggagctggttagaaatgcaaagtccctggccctgtccagacttataaatcagacactctagggggtgagaggcagtaatctgtgctttaacaggccttccaaatgatttgatgccctaactagttctctctttggggaggggagttgctagattgacttcactgtttttctgatgatggttgcctgcagggagctcctcctcactgcccaacacgtggccctttgaagcttgccaaaagcctgtggaacctgcttatcccctctctgttccagatactactctacccgcccctcccacaatgaggagtggaattgttcattaccaaagtgttcagaagatgtgccaacctgtccagacacagtcccctgcatgacttgagactctttcccttcctctcttcctcctggagtcctctcccttttgggatgattggacccactcccctacctgctyctctaaaatgtatcaagtcatcttgcaaactgtgattccaggcatcttaggagtatccctcagcctcaagcacttactaaatatccacagctttcctcttccacccaat

SEQ ID NO: 504199 - DNA, 611 bp, Homo sapiens
ggaataatcttttaaagtatagatctcatcatgtcactcttttgcttaaatccttcagtgayctccacaacttccatgttaaggcttgtactttttaactttttatacaacgttctttatgaccaaaccctctctgtataattctatagttatacagtcatatccaccatcactcttccaaaagcatcacttcagccgaactatttagagtgccaaaccatgccatacttactcaaatctcacagcttcttacatgccatattttttgtctggatatatatgttcctatgcccttctgcatctagctaatacctacacatcacatgcaacatgtccaggaagctttttctgttcctcccaaatctaattggaatattcttttcctatattcctgaaaaaaaacctatcaagcacttatctttatgtattataacttctgatgtgcttatgtgtctattagactgtaatctttttgagaaagattaattgattttatatacatcataataactataatatggatagcacatataaataactcagtgaatagtggttgaatggatgattaattgaatgaccatttaaaaactgttttggaaataaaaacaaaa

SEQ ID NO: 504200 - DNA, 611 bp, Homo sapiens
ggaataatcttttaaagtatagatctcatcatgtcactcttttgcttaaatccttcagtgatctccacaacttccatgttaaggcttgtactttttaactttttatacaacgttctttatgaccaaaccctctctgtataattctatagttatacagtcatatccaccatcactcttccaaaagcatcacttcagccraactatttagagtgccaaaccatgccatacttactcaaatctcacagcttcttacatgccatattttttgtctggatatatatgttcctatgcccttctgcatctagctaatacctacacatcacatgcaacatgtccaggaagctttttctgttcctcccaaatctaattggaatattcttttcctatattcctgaaaaaaaacctatcaagcacttatctttatgtattataacttctgatgtgcttatgtgtctattagactgtaatctttttgagaaagattaattgattttatatacatcataataactataatatggatagcacatataaataactcagtgaatagtggttgaatggatgattaattgaatgaccatttaaaaactgttttggaaataaaaacaaaa

SEQ ID NO: 504201 - DNA, 584 bp, Homo sapiens
cataatcttcattacacattgtctactatttaataaaaaattaacaagcataccaagaggtggaactaagaaagagataataaaaatagacctataggtgatccagacattgtagtcattacataggcattaaaataactataatgaacctgtttaagacaacagatacagtgattttcaaagaactggaatttgaactgatctttgaagaatactttgaatttcaactaaccaagtactgactttacaaagaacttagctttcagatgcagtccattctagccargggtggatctcagggatgaggatcaaaggaagaaagggtggggctcatgatcacaggtaaagagaagagagtttgagtagaactgggcaggaagagaggacaagcatggcctcccttccacatataaaaaataggaaatcaagagggttttcctgttgattaaatattcctgattgatcaggactagatcaaatgcaggaggaaaaacaattcattgacgtttatctattttaggatttcttcagtaaatctgacccatttctggaaatttttcgtatgaatgatgatgcaactcagc

SEQ ID NO: 504202 - DNA, 584 bp, Homo sapiens
cataatcttcattacacattgtctactatttaataaaaaattaacaagcataccaagaggtggaactaagaaagagataataaaaatagacctataggtgatccagacattgtagtcattacataggcattaaaataactataatgaacctgtttaagacaacagatacagtgattttcaaagaactggaatttgaactgatctttgaagaatactttgaatttcaactaaccaagtactgactttacaaagaacttagctttcagatgcagtccattctagccaagggtggatctcagggatgaggatcaaaggaagaaagggtggggcycatgatcacaggtaaagagaagagagtttgagtagaactgggcaggaagagaggacaagcatggcctcccttccacatataaaaaataggaaatcaagagggttttcctgttgattaaatattcctgattgatcaggactagatcaaatgcaggaggaaaaacaattcattgacgtttatctattttaggatttcttcagtaaatctgacccatttctggaaatttttcgtatgaatgatgatgcaactcagc

SEQ ID NO: 504203 - DNA, 645 bp, Homo sapiens
tggggcatgtaatctgagggaagaagagagccttaactggacagattacattccaattctgtgcaggctatcatgtaaacaagagagtagagaaagtatctctacaccatccggttgtcccttcaggctcccagcaaattttcctgctctacctgtccttaccttatgcttagaagagggtctggtattagtaatttgttcttctgtataaataagataaagaaatgttatacttgcatatgttgtttaccaggtactaccaggtttttatttgctcttggaagccttccctgactatctgcagtgaacactcccagacaacccttggtgcaacctccatttttgccacctccactgcatcactattatttatttgcacgtccatcacctgcactatatcatcagcatcttgagggatgaaactgtcttgcatttttatattctctttgccagctcaattcctagtctattgtagttgataaaaaaaygtgtgtgtgtatatgtgtgcttgtgcatataataaatccttgcaatgacctggcaaatagaacaaaaagtaattcccaccatagagatgaatgaactgggtagccaaaggcaaagtgatatgaggatgattacctagttgtccagtgaaacagagga

SEQ ID NO: 504204 - DNA, 574 bp, Homo sapiens
gactctgggtgttgtggagcatcttgtttggttcctggttgcatgggaaggaaagcaaagcggaagatagttattcccacctctcatctcctcyttctaacatatactacaaagtttctagactggcattcttcactgcagagccaactatattacttttctgctcaaaatccttcaatgattccccctgcctctccaggccagtgcaaagacttcagatgagcatttaaggcccttcacatcatggggccaactttgccagcattgtctccaattcctcccctatgcttccctaggctatagtcttattaaattacttggggtatccccctctatgtctgtgaaaaattcatcagctcccctctcttccctcaatactccttataccttcattcattcattcactcattcactcatttatacctagccctaggttatatttatttgtatacttttcttaccagcaacctagatggtactttggaagactgagatcaggttctatctgtccttatatcttaacatcaagcacaaaaactctgtgatcagtatatgtcctacaaatattttgctg

SEQ ID NO: 504205 - DNA, 627 bp, Homo sapiens
atttttctggaagctggtgctggctgttggctgggccatgtgtcttcaggaagctagcatgagttttgtcacatggtggcaatgttccaagcgagtaagccccagtgtacaagtgctcttcaagctttagcttrtgtcatatttgctgatattccattgacaagtcacattggcaagtcacatggccaagccctaagtcagtgtgggaagggactacaaaaaaaacagggatacagagaaatgtacttcattggaggctcttactgttacaatataccatacctaaggtaaagagacagcctctaatatattctcccaggctcttgtcctaacatcctgtttattctgcacaaccacagctggacagtccttctcaaacaccaattattctatcattctctactctttaattctcaatcagtcaacaattttgtttcgcaggggacatttggcagtgtctgatgacatttttggctgtcttaatttgataaggggtagatgctcctggcctctagtaggtagctgcagggatgctacggaatatcctgtaatgcacaggccagagcctcccctccttcccattacaaagaattatctggccaaaaatgtcaattgtgctgaggttga

SEQ ID NO: 504206 - DNA, 525 bp, Homo sapiens
atgtaagcctcagtttggcttcagaagcagcaaaaggaggtggaaagagcatgaattgttgaaatttagcctcttgtagatgcccaggcttgagtaggctacatagcaactcctaaacctcattttcctcccagttaacaatgaaaattatgaatacttatttagcttgtaccatcaatatggacactcaataaatatgaagctttgctttcctcctcctagctcatctatatttctttattcttgtcaccaaagtgaggtttggaagtgtagaagggatgtaaaatggtcttttgtttaaagcacactggccctggtattgggcaagtgctaaataatgtgacccgtatttcacacttttggatattctataagttatccagcagtttcagcagttaaatgtttttagagaactaataatgttttaayataattgtaggctatattgaagtacacaaagttaaatgaggggtttgaaagttgatacatcctaccaagaatgtaatgacttgggaaatgcagaat

SEQ ID NO: 504207 - DNA, 561 bp, Homo sapiens
ataacaacagtaatacatgtaaaacacctacaacaatgccaggtacatagtaagcacttaataaatgttagccattgcattattactgttggaggctaatcctaatcctaatctaatatgctaatatgctagaatctaatctaatatgctagaatccaatattagaatttcataatttactattgtacctyaaggttctactatataaactcaaggtacctctttggaactcaagattgtgctctctgaacctcatattttaaacttcaatacctgtattgcattcttggaactaaagtttcagtatcaaaatgcaagattctaagaatataattcccagttctattcttataaatcaagattctagtttaggaactctaggttctttctctgaaactgaaattccactgttgaacctctagattttactttcataacaagatcctactattagaactccagtttccagattcagagtctgagattctaatactaaagtccagaaatctactattgcaacttctggttttgttctctgagtctaagcattttaccattaga

SEQ ID NO: 504208 - DNA, 427 bp, Homo sapiens
ctgagtagctgccatcaccagcctggagggtcaggctgcctcacaggcccttcactccattattgggcaaatggaaaggactcattcgggctgtctcctgggggaaaggtcataacgtgtggcgcaggagcttgtgtctctgataggctgcacactccttccatgactgatggtcagcgtggggaatgctccacaggttttttgagtatgagagcccacaartattttagtttatgaagaatgttcatacatgtcatttcattcatgggtgaactcaaactcgaaggacacagaggcagtaaacgccaggtggactccacatcaggggccgaccagggtcccaagcccagtgatctcataaacccccaaaagcgggcctccgcccctgggctctggtagatggcactggtagcatactctccacccc

SEQ ID NO: 504209 - DNA, 602 bp, Homo sapiens
ggctcttggccatgttttcctccagttccctctgctccctgaccagccctagtgcttccccacacaccccggcatgaggcagggtgtcccctcctcttggagtctgagtgactgaattatcttttcaatggcacccctctccctccccsctctcctgctctgttggccttactatacctccagttttctatcaacccactatattttgaaatctgggcccagtgacaacggtcctcactcagaaggttccagtcatactttctaggagaagctcaaagttacacaccttgcatttcacaagtgccagttcattgttttaagcctcaaatttctcaacagagcaggaaaccattgttgttgttgttctttctgtgcctccacaacccgagataaacatcagcctagagtttggacagggagttgtttattattcttggaaaaataaggagagaggaggcaagtcttgcatcagtgtgctcgcccctagagagctgttatcatgacacaaaccccaggaggaggccatcttgtgaacagtgatagcttctagctccttccactgtgcaccggatgggtctcttcagacatggaagtgagacagg

SEQ ID NO: 504210 - DNA, 515 bp, Homo sapiens
ttctttgcgtgtcctggaaagtatgaagaactttccaattagagaatatgcttgcatcacaagtactgctgaaagcagacaagaagagaaggaaggaaaaaaaaaargaatgacgttgtctgcagtaatgaagggaagaaaagaaaatttgttagaaagacttttattttcttctcaaaatatgtaataatcaagctaggcacagtggatcatacgtataatcccagctactggggttggcgaggctgcagtgggacaatcactttaggtcaggagtttaagaccaggctgggcaacacagcaagatcccatctctttaaaaaattttaataattcaaaaaaattaaaaataaccaaaaaaaggtgtgaattattatggctacttccaaaacaaagatcattcaaagagtttcgttaataatgcccaattatacatttataaatgccgaatcattcaacaagatattgtatgctcttcacttcaccattaaaaaataaaaacacaaaaaaactgt

SEQ ID NO: 504211 - DNA, 543 bp, Homo sapiens
cactgtgtctatttaggcttctccgtggcccagtgggaagggtgagatagaatcagggttgaggtgactacctaagaccagggagatgaacatctgtctgagtaaacacagaagagaaggaagtcagaaagggctctgaacctcctgtgtttgggagtctttaatgatgggagcataccacagactacagaaatctggagagaagctagtgttgaaagagaagataacaagtcatcatattaactttatagcagtatgcaacagataaaaattttaaaatcagataaaatttaaaataatcatatatttttattttctttcctgagaactacctactcatagattctggaaattttctattgcattattggaatttttcttgataattttatagcaaattttatacagtataaatattatattctacattygatttttttcaaatgcataatttatctattgactttttatggtaaattttaccatatcgaagttttttgttttggtataatcaataattatcttttattgtttctgggtagt

SEQ ID NO: 504212 - DNA, 655 bp, Homo sapiens
atggggttttcctcaagtcagactgaggaggcaattcggccttgtcggaggctccagaaattccatagttaattaggaaattttgctattttttcctttaactttcttagaaatttaagccttgagattgacattgggatgaacagcctaccttctttaagaagagcttaggaaagcctgcctcttagagaaagaatgctagcttaggtggagcttgtatatgatcctgcgtaattctgagatttctccttccttctcttagaaaacgtcctaataagaagataaggtgaccgaatraggggattacttggcagagatatgagagaactgggttcttgaccccactttgccatgaacttgggtaagttactaagtctgtcagtatcatggttccttgtctgtataactagcaacctttacagagagcttctcttccaatgttgatactttttatttctaaggatatattttttaaacaatttctcttacagttttctcaaaattaaatagtattttttcagtgataaagtgagtatactgagaattgaagagatggaaaatacagttatgtctcccataataaatgggtaaaaatgcccaagcatcaaaaccgtgggctgctctaacctggagagatgtctgatggtgacatgaa

SEQ ID NO: 504213 - DNA, 444 bp, Homo sapiens
tcttgaaacttcattaggactcagaaaaaaaattaatagtaacaggggctaacattaactgaatatttactatgtgccagcactgcagcaaaccctttrtaatgatctcattctccctcctgaccgctctatgaagtaggcattatatattcccttggcttgcacaggatctcacagctagtaagtggtgcaatgggaattgaaacccaggtgagtctgattcctaggcccaggctctacactattacagagttgactccctctgttattaccacctactttgtttcacattctaaagccaagcctgcctgctttagaccatactgagccttacaagtaataggcactcaatattgacaatgaattgatgccaactttgatttaataaagctctcaaaaggtcccttgagataggcctgtgactaaactattccaaattagctt

SEQ ID NO: 504214 - DNA, 458 bp, Homo sapiens
tcttgaaacttcattaggactcagaaaaaaaattaatagtaacaggggctaacattaactgaatatttactatgtgccagcactgcagcaaaccctttgtaatgatctcattctccctcctgaccgctctatraagtaggcattatatattcccttggcttgcacaggatctcacagctagtaagtggtgcaatgggaattgaaacccaggtgagtctgattcctaggcccaggctctacactattacagagttgactccctctgttattaccacctactttgtttcacattctaaagccaagcctgcctgctttagaccatactgagccttacaagtaataggcactcaatattgacaatgaattgatgccaactttgatttaataaagctctcaaaaggtcccttgagataggcctgtgactaaactattccaaattagcttctttacaaagaatc

SEQ ID NO: 504215 - DNA, 649 bp, Homo sapiens
caactctctacatatttatgccttcatttttaagtaatcatacctatcgacgtttatccatttataaaagttgacctaggcaatgtaggttctgacgttacattatccacatgtaagtatttctacattagtcattttcaataactgtgcacagaagaaaaacctacttgaattattcttctgaattcttggatactaggagctgctagactttccctaaaacacttccaccttttactgagcatttataagttccactgtggcctacttcattaataacacacaaatgcatttaaattctgaaattcaagcaaagaaatcagagatgataaataacaataacaacaaacyaggaaatcactagagaaaccaaaagtctgagctccctaaggccttttttattagagctgtaaatcatatcacccaaaggggaacttgggggaagtttgcacacaatcaagtctaacctagcagcagtactggaaataactacagatgcagtgccaacaatgcttggatgattgccaccatgaataacatttgtcaagcatttgtatgacttagctacactacaaagcagctttgctatatagttcacaatgttttggctaattatacttttaaaaataatctccagtgaaacaaaagt

SEQ ID NO: 504216 - DNA, 649 bp, Homo sapiens
caactctctacatatttatgccttcatttttaagtaatcatacctatcgacgtttatccatttataaaagttgacctaggcaatgtaggttctgacgttacattatccacatgtaagtatttctacattagtcattttcaataactgtgcacagaagaaaaacctacttgaattattcttctgaattcttggatactaggagctgctagactttccctaaaacacttccaccttttactgagcatttataagttccactgtggcctacttcattaataacacacaaatgcatttaaattctgaaattcaagcaaagaaatcagagatgataaataacaataacaacaaaccaggaaatcactagagaaaccaaaagtctgagctccctaaggccttttttattagagctgtaaatcatatcacccaaagggraacttgggggaagtttgcacacaatcaagtctaacctagcagcagtactggaaataactacagatgcagtgccaacaatgcttggatgattgccaccatgaataacatttgtcaagcatttgtatgacttagctacactacaaagcagctttgctatatagttcacaatgttttggctaattatacttttaaaaataatctccagtgaaacaaaagt

SEQ ID NO: 504217 - DNA, 492 bp, Homo sapiens
gaccatgcatctaataatgaccacgaaggtaagacaacaaggaccacacagggacagtgaagtgcagccgttacctttcccaagtcctccatggacatccctgamactgctgggccagcctcagcttgttcctctagtaatgagaaacccaatctctctttttttttttttgagacagggtctccctctgtcacccaggatagagtgcagtggcgcgatcttggctcactgcaacctctgcctcctaggttcaagcaattctgcctcagcctcctgaatagctaggattacaggcgcatgccacaacatgggctaatttttgtatttttagtagagacggggtttcaccatgttggccaggctggtctcgaactcccaacctcaggtgatccgcccgccttggcctccgaaagcgctgggattacaggcgtgagccacccgcgcccagctccctcaatacctttaaaaagggctccttgcatggaattagaa

SEQ ID NO: 504218 - DNA, 492 bp, Homo sapiens
gaccatgcatctaataatgaccacgaaggtaagacaacaaggaccacacagggacagtgaagtgcagccgttacctttcccaagtcctccatggacatccctgacactgmtgggccagcctcagcttgttcctctagtaatgagaaacccaatctctctttttttttttttgagacagggtctccctctgtcacccaggatagagtgcagtggcgcgatcttggctcactgcaacctctgcctcctaggttcaagcaattctgcctcagcctcctgaatagctaggattacaggcgcatgccacaacatgggctaatttttgtatttttagtagagacggggtttcaccatgttggccaggctggtctcgaactcccaacctcaggtgatccgcccgccttggcctccgaaagcgctgggattacaggcgtgagccacccgcgcccagctccctcaatacctttaaaaagggctccttgcatggaattagaa

SEQ ID NO: 504219 - DNA, 646 bp, Homo sapiens
ttacttccagtgtactcagaattttaacaaacatacttactgggattttagcccacagaagaggaaattcagtaactgaaggacagcaagatttctaaaagtaaacacgctgacagcaaaaagggaagaaacagaaggaggcaaaaggcagagaagacttggatgatttaatgagtratgaagccacaccctctccaacatcagtagccctgaggggatttgttcttctaaaatgtgagcgagtattataattatgaccaaaacaatgtaaaaacacaaaggttcagccaatcctgtttcaaaatagttacactcaaagaacatttcaaaattaaaggggtaagcttcacatatctgggaaactcatacgaatagaaaaacccacatcctagtgacaggaaacaatgcaatgccagatacagataaaatgctggatactcatatgttgcagccagtttagagttttatatcttttaaaccaaagttcaattttattttattaacttttattttaggtttggggtgcatgtgaagattacacaggtgaatacatgtcacaggggtttgttgtacagagttcgtcacccaggtattaagcccagtattcaatagttatcttttctgctcctctccctcccaccttccc

SEQ ID NO: 504220 - DNA, 646 bp, Homo sapiens
ttacttccagtgtactcagaattttaacaaacatacttactgggattttagcccacagaagaggaaattcagtaactgaaggacagcaagatttctaaaagtaaacacgctgacagcaaaaagggaagaaacagaaggaggcaaaaggcagagaagacttggatgatttaatgagtgatgaagccacaccctctccaacatcagtagccctgaggggatttgttcttctaaaatgtgagcgagtattataattatgaccaaaacaatgtaaaaacacaaaggttcagccaatcctgtttcaaaatagttacactcaaagaacatttcaaaattaaaggggtaagcttcacatatctgggaaactcatacgaatagaaaaacccacatcctagtgacaggaaacaatgcaatgccagatacagataaaatgctggatactcatatgttgcagccagtttagagttttatatcttttaaacmaaagttcaattttattttattaacttttattttaggtttggggtgcatgtgaagattacacaggtgaatacatgtcacaggggtttgttgtacagagttcgtcacccaggtattaagcccagtattcaatagttatcttttctgctcctctccctcccaccttccc

SEQ ID NO: 504221 - DNA, 573 bp, Homo sapiens
attttacaaaagtttgtaggtaaacctatagcccatcaaacctaccactctcaagtatcatgcatttaacttatccaaatggatattttcgatttaaaaaaaagacccttaaagaatgatctcaaataacttaatgtcattaatagtcatcggtctttttataaggttatcaaggcaatttgaactggtgctttggtctttcctattttgcaaaccagctgtacagaaataattcacaggtcttactactgggcttaaagttagaacttttcttctggaaaataatccccttttcagcacatgaacttttgaaaccctcaccaaggatcatcattatgaggttttcatgaattggggtcactggagggcaccctcctgttcctctctcctctgcttttgtgtcttctctcaccattcttcccagcgacaccccacctccrccacccctcaaacccaagggcaagctttgattcagatgtaccggtgctcaagtctccgccccaactttgaccagttgtgtcattatggtcaaatggctgaaattttccaagcctgagtttcctcatttgaaag

SEQ ID NO: 504222 - DNA, 600 bp, Homo sapiens
ctattgcattgtaatactgggcttgttagctttttctctcagtaggaggtaagacgttagccacaattgcctagaccagctcggctgtggagactctaacccagcagcactagagaaattaaagacacacacatagaaatgtaaagtgtggagtgggaaatcagggggctgacagtcttccgatctgagagccatgaacagagttttacccacatatttattgacagcaagccagtgataagcattgtttctatagattatagggtaactaaaacgggaaacaaaggggtgggctgaaacaaagggatgggctctggctagttatctgcatcaggaacatgtccttaaggcacagatctctcatgctattgtttgtggcttaggaatgccttaagcggttttctgccttgggtgggccaggtgttccttgccctcattctggtaaacccacaaccttcagygtgggcatcatggccaccacgaacatgtcacagtgctgcagagattttgtttacagccagtttgggggccagtttatggccagacttgggggcctgttcccaacaaacaaagacacatttgccaaaaaaataaaataaa

SEQ ID NO: 504223 - DNA, 527 bp, Homo sapiens
gaaggtctgcaagcctttaaggaatgaacctacataagcaatcttgaaaggatatcaaatcacaaaggaaaagtatgttaaaaaaaaaaagacaccttcatttctaatgcttatccccttgcctgaaacagtatcctccatgaacagaatcctttgagttcatctttgatcacccttccctttgcatgtgccttttccttttgtgttttagcttcttaaaacatttgtagtaatacttccttggtagttaaaggttgtctagtccaggcactacttttacgtaaagtaactcctgtgaggtatatattatcatcagctttctttcacaaagaaaacagtcaagtaatctgcttcaacagtttgcataaggaagtaaggtgatttgctcaaagttgcacagccaataagtggcagacctacaatgtgaatcaggaggatttagctctagagatcatatatcccacaacaacagcatacagtgtgcaacaggctcacrtatagcttaagggaatcaatgtatagtcagc

SEQ ID NO: 504224 - DNA, 622 bp, Homo sapiens
aactatcttaatcataatgattttagtaatcaacaatgatagataattattcaataygcactagacactgtagtaagcacttttcgtgattgtttcttcttaataacacttcaaaggtaagtattatcatcctcaaacacacatagtagttaaagtatatattttgtcttacactcatttatttgtaccaggcaggggaggcttcagaattggtttgtgatggtgatgggcttcagcataacacctcaaattcaccaattactataattaaatatatacattaaccataaacaatgcatctatcaaacaagtacaaaaatcttaacttgtcaattgtgtcactgaagcccacttctaagttactacataaaaattctcaacctcccatagtgagaagatgtaatcccaagtgttatttctccacatcactaaattcccagattagctagccttttggattcttataaaggcactgcaatccagcctgggtgatggagtgagactccatctcaaaaaaaaaaaaaatttctttcattttattttccttatacgctttacatattctgttagtccaagaaaggaactgcaggtctcagttacttaaagcaaattcctggctgag

SEQ ID NO: 504225 - DNA, 622 bp, Homo sapiens
aactatcttaatcataatgattttagtaatcaacaatgatagataattattcaatacgcactagacactgtagtaagcacttttcgtgattgtttcttcttaataacacttcaaaggtaagtattatcatcctcaaacacacatagtagttaaagtatatattttgtcttacactcatttatttgtaccaggcaggggaggcttcagaattggtttgtgatggtgatgggcttcagcataacacctcaaattcaccaattactataattaaatrtatacattaaccataaacaatgcatctatcaaacaagtacaaaaatcttaacttgtcaattgtgtcactgaagcccacttctaagttactacataaaaattctcaacctcccatagtgagaagatgtaatcccaagtgttatttctccacatcactaaattcccagattagctagccttttggattcttataaaggcactgcaatccagcctgggtgatggagtgagactccatctcaaaaaaaaaaaaaatttctttcattttattttccttatacgctttacatattctgttagtccaagaaaggaactgcaggtctcagttacttaaagcaaattcctggctgag

SEQ ID NO: 504226 - DNA, 622 bp, Homo sapiens
aactatcttaatcataatgattttagtaatcaacaatgatagataattattcaatacgcactagacactgtagtaagcacttttcgtgattgtttcttcttaataacacttcaaaggtaagtattatcatcctcaaacacacatagtagttaaagtatatattttgtcttacactcatttatttgtaccaggcaggggaggcttcagaattggtttgtgatggtgatgggcttcagcataacacctcaaattcaccaattactataattaaatatatacattaaccataaacaatgcatctatcaaacaagtacaaaaatcttaacttgtcaattgtgtcactgaagcccacttctaagttactacataraaattctcaacctcccatagtgagaagatgtaatcccaagtgttatttctccacatcactaaattcccagattagctagccttttggattcttataaaggcactgcaatccagcctgggtgatggagtgagactccatctcaaaaaaaaaaaaaatttctttcattttattttccttatacgctttacatattctgttagtccaagaaaggaactgcaggtctcagttacttaaagcaaattcctggctgag

SEQ ID NO: 504227 - DNA, 496 bp, Homo sapiens
ctggtaccttgactgacttagataatataggtcagctagggagttaaatcccagtgggggctaactggtgatcacaaaaagctgtgttccaaaccctggaaactaggaatgttaccttataaggcaaaagagtgaataatattttatgtggcagaaaatgtataatgaaatacaataaagcagattgagacaagggaattatccrgtggccccaagtatatgcatggatttctttctaagagggatgctaagcaagctttgagacaaacacacagaatagaacacacacagaaaaggaacagacaatgtgactacagagccagagactagggtgcaacaagtcaagaaatgccaactaccagaagctggaagaggtaaagaacagattattcttcagagcctctgtagggagtgccaccttgctgatgtcttgattttggacttctgatcttaagccaccttgtttgtaccaatttgttatggtagccacaggaag

SEQ ID NO: 504228 - DNA, 540 bp, Homo sapiens
tggttcagaggccaaatgcctatttttatgtgactctttcactatctgtatcataagagctgcatgttctttgtagtttaaaacaaaataatggtcttaccagaagtcccacaattaaatcttgttgcaggcagcttttcttgctgcccctccataagaagtgaaacggttctcagacgtggattttaaactgtttgaagaaatgactgaagctgacctctactgggagccatctcagttcccaacctgcagcatgcacagctgcctctctctctccttctgcccacctcggcttgcctccccatccctaagtctccctkgtattaattagtcatttcttgctgccctaacaaagtaccacagactggtggcttaaaccaggggtccccccacccccagggccacaaaccggtaccagtccctgcatggcctgttaggaactgagtcacacaatgagctgcacgcaagtacgctaagcttcatctgtatttgcagccactccccactgcatgaattaccagctgagctctgccacctgtc

SEQ ID NO: 504229 - DNA, 540 bp, Homo sapiens
tggttcagaggccaaatgcctatttttatgtgactctttcactatctgtatcataagagctgcatgttctttgtagtttaaaacaaaataatggtcttaccagaagtcccacaattaaatcttgttgcaggcagcttttcttgctgcccctccataagaagtgaaacggttctcagacgtggattttaaactgtttgaagaaatgactgaagctgacctctactgggagccatctcagttcccaacctgcagcatgcacagctgcctctctctctccttctgcccacctcggcttgcctccccatccctaagtctccctggtattaattagtcatttcttgctgccctaacaaagtaccacagactggtggcttaaaccaggggtcccccmacccccagggccacaaaccggtaccagtccctgcatggcctgttaggaactgagtcacacaatgagctgcacgcaagtacgctaagcttcatctgtatttgcagccactccccactgcatgaattaccagctgagctctgccacctgtc

SEQ ID NO: 504230 - DNA, 568 bp, Homo sapiens
attatactgccataaactacagastgttagtttatcaatgttccaaagttttcacaaatgaagtaacatggccagattcaactttcactaaaaaaataagaatttcattttttttgaagaaccatcgtattaaatcatttccttattgcttttgatgtttcagacagtagaaatagaaatagagaaagtatgattaattctcttatgacacatctaacaggaaaatgtttatggttttcctgtttcctccaggaggaaaagtggtttatttctttgttgacccaaatacttcaattccttgtttaatctatgattattttgaaataaacatcaactccataattctctagggcagaagcacaaagagatagttgactttaattttgttttccttcaatatgtatggagcacacaccactgttaatccatcataagtgaatgtttaggattacttttaaaggataggggaaattttctaccaggttatagttttgaagttgaatctatttgatgtcaatgtgctgaaaagtcttgaaaactctaaaaagaaatcatgtcccttgcagaa

SEQ ID NO: 504231 - DNA, 568 bp, Homo sapiens
attatactgccataaactacagagtgttagtttatcaatgttccaaagttttcacaaatgaagtaacatggccagattcaactttcactaaaaaaataagaatttcattttttttgaagaaccatcgtattaaatcatttccttattgcttttgatgtttcagacagtagaaatagaaatagagaaagtatgattaattctcttatgacacatctaacaggaaaatgtttatggttttcctgtttcctccaggaggaaaagtggtttatttctttgttgacccaaatacttcaattccttgtttaatctatgattattttgaaataaacatcaactccataattctctagggcagaagcacaaagagatagttgactttaattttgttttccttcaatatgtatggagcacacaccactgttaatccatcataagtgaatgtttaggattacttytaaaggataggggaaattttctaccaggttatagttttgaagttgaatctatttgatgtcaatgtgctgaaaagtcttgaaaactctaaaaagaaatcatgtcccttgcagaa

SEQ ID NO: 504232 - DNA, 637 bp, Homo sapiens
ctctagccttacacaaattacctgtacttagaataaaatccaaaatctataatgtcctacaaagcattgcacaatccaattattgcccaactcttcaccttcatctctattttctcctttacttgctgtgatctagacacattaccaatttgtagcatttccaacaagtttgttccttccagagttttctcatgtgttattttgtatgcctagatttctccccttttttttacttcttacttgtggcaaatttgtattacttacaattggctttgcctaaatatggattttatgctgaagatttttctgcccttttagatttgataatttccacaacattataatcttagttctattgttttcctttatagcacaaagtataatggacattaaagtattaggtttgtaataatgattaatggttgctaaagtgccatgaaagrtaatgattgtgccctattcatcgatgtttgtcttcttgacttatactgtatctgatacattatgagaatcaataaatagatgtcgatagaatgaaaataataatagatcatgaatgaatgaatgaataaatgagcaaaacaacaacagacagtaaggaacaaaactgcaatggaaattcaggaagaatgatcat

SEQ ID NO: 504233 - DNA, 637 bp, Homo sapiens
ctctagccttacacaaattacctgtacttagaataaaatccaaaatctataatgtcctacaaagcattgcacaatccaattattgcccaactcttcaccttcatctctattttctcctttacttgctgtgatctagacacattaccaatttgtagcatttccaacaagtttgttccttccagagttttctcatgtgttattttgtatgcctagatttctccccttttttttacttcttacttgtggcaaatttgtattacttacaattggctttgcctaaatatggattttatgctgaagatttttctgcccttttagatttgataatttccacaacattataatcttagttctattgttttcctttatagcacaaagtataatggacattaaagtattaggtttgtaataatgattaatggttgctaaagtgccatgaaagataatgattgtgccctattcaycgatgtttgtcttcttgacttatactgtatctgatacattatgagaatcaataaatagatgtcgatagaatgaaaataataatagatcatgaatgaatgaatgaataaatgagcaaaacaacaacagacagtaaggaacaaaactgcaatggaaattcaggaagaatgatcat

SEQ ID NO: 504234 - DNA, 668 bp, Homo sapiens
tggttgattggttgggtatttctaatttcattataaatatgtagaaatttttctacatagcagtgatggtcatggctgctgaaaatcctttataaaagattaattttactctaacttctagactgatgattacttttattataaatgctatatttaaatgtcagctctttaaatatggtgattaatttgcttccctaactatattgctcataattaaattaacaggcaaaaaaaccaaacagaacctcaatgccttgtgctgaagtaattttaatcttattttcttgagacatcaattaaataatatttccaaaatattattatcctatatattattatttattattgttatcctatattatcttattgttatttttagtcataaaatatcaattatgagaaaatctattcttaaaatatataaatatatatattaagcctcaatgctaagcacttccaactcaaataaaatatataacttcctaactggaatggccttacctctttttctcaaacacagtcatttggatggaaatcagaggagaaaggctaagtgcccagggccctagaatctttgtataagaatgatcatatgccacacatggttcaaatggaagagattacatggctcagttcctttcaagaaygtcaagtattttattccaagt

SEQ ID NO: 504235 - DNA, 585 bp, Homo sapiens
caggacttatttcctacattggccattatcctccttggccacatctaatgtaaaagttaaagaaaattcttatcctgggtgcagcaaagtttttatatgttgtttcctgctggtattggtctgctgaaactagttgtggctccaaatctggctcgtggcttctttggcaatatatttcccctcaaaaatttagttagggctgtgacatatttgcttaactattgatggttacctttgcaatttkgtttttaagttaaaaaaatccattcaggtttgtgattaaactgaaggattaacattacactgagatagatattgtgattgattagactgtgtacctctcttttttgggagaaagtgtaacagcatttctgtaaaatgataattgtgatacattaggcagaagcatgatgatattgctacttatttgatatgaaagtttaaatatgagaggaagggtgaaaatgtataccaagtagtctaaaagataaactctgcaagttatttgtctgttggccatgaactccattactcactcctatttgcaaggggaatgggaagtctgaaaccacaattcccagagtt

SEQ ID NO: 504236 - DNA, 585 bp, Homo sapiens
caggacttatttcctacattggccattatcctccttggccacatctaatgtaaaagttaaagaaaattcttatcctgggtgcagcaaagtttttatatgttgtttcctgctggtattggtctgctgaaactagttgtggctccaaatctggctcgtggcttctttggcaatatatttcccctcaaaaatttagttagggctgtgacatatttgcttaactattgatggttacctttgcaatttggtttttaagttaaaaaaatccattcaggtttgtgattaaactgaaggattaacattacactgagatagatattgtgattgattagactgtgtacctctcttttttgggagaaagtgtaacagcatttctgtaaaatgataattgtgatacattaggcagaagcatgatgatattgctacttatttgatatgaaagtttaaatatgrgaggaagggtgaaaatgtataccaagtagtctaaaagataaactctgcaagttatttgtctgttggccatgaactccattactcactcctatttgcaaggggaatgggaagtctgaaaccacaattcccagagtt

SEQ ID NO: 504237 - DNA, 599 bp, Homo sapiens
ccttgccctttgtgaatctggtgttttgtgtcactgtgagtttctcctgggattgaggtccggctgctcattgtggtggccagctcaacaacaaacccatcatggactctcttctttttctgtttcactgcctgacttctctactggtatctctagtacctcccaaataaacttggatccatgtatcagggtctgctcctggaggaaccagtatcatttaacccagaacagtccccaacttttctttgttttgttttgtttttgagatggagtcttgctctgtcacccaggctggagtgcagtggcgcgatctcggctcactgcaagctccgcctcctgggttcaygccattctcctgcctcagcctcccgagtaactgggactacaggcggccgccaccatgtctggctaattttttgtatttttaacagagatggggtttcaccgtgttagccaggatggtctcgatctcctgtcctcgtgatttgcccgccttggccttccaaagtgctgggattacaggtgtgagccaccgcgccagaccctcaactgtttttttttaaatgccagtgatttacgaaggacatagaggcagcttt

SEQ ID NO: 504238 - DNA, 342 bp, Homo sapiens
cttaggataagacaaactttactggcatgctggaggtcagaggcaagagacaacttctaacaggggctgtaacagaaagcttcttggggaagctggcatatgacacggtgcacgaaggatgaggaagatttcaccaggcagagatggaacagggtagtacaggggtgggcaacaccttaagcaaaggaagggaaataagagagcccaggacacgttcagagagctgaaggacagagccacatgagaggaaggctgtagaraaaataggcgaggttggtttgtagctggaaagagctttgaacatgaggccaaggatactggccggtttccatgcctctggta

SEQ ID NO: 504239 - DNA, 572 bp, Homo sapiens
tggattaccctcagtgaaaaacatttcagtattacatttgtgcacctaatgctggtcattaggggatgaaattgagatttgacattacttttccctgaaggagtttacggtctagttggggaaaggagataaaatgagaataagagacataaatgataatgatgggctgagctccgtggctcacgtatgtaatcccaacactttgggaggccattgtgggtggatcacttgaggccaggaatttgasaccagcctggcaaacatggtaaaaccccatctctactaaaaatactaaaattactgggtgtgctagtgcacacctgtaatcccagctattcaggaggctgaaacatgagaatcacttgaacctagtagacagagattgcagtgagccgagatcacaccactgcactccagcctgggcaacagagtgagaccctgtctcaaaaaataaaataaaaataaattataacaatgaacaccccttatgcattgctcaaactactcacagtttctctagtgtgccctgatctctcctgcatctgtgcatttgcacatggacaccattcccc

SEQ ID NO: 504240 - DNA, 301 bp, Homo sapiens
ctccaggggacctcaggttttcccctcagaggccaactgagagtgggccagctccagtccccaccctcaccccactcagctcctcatgctccaaaatcccaggcaaaaggcatctgtcaccaaaacaagtggcccgccatttcagcagggagcaaaagctgggaacaaatggtgttttgtctaaacaattgtttcgaagagcaattcrttttccaggatggcttttttttttaattatgttggttccctaattaggttgggacacaaaaataatttccaatgtacagataacaaatgcctc

SEQ ID NO: 504241 - DNA, 483 bp, Homo sapiens
gctgtcctcaaactgccaaccctggtgaatcaccacctgccagggatggaggagcctcagaaccagagaccacaatgtgagatcctaagaggagagggtaagccaggcgcagtggctcatgcctgtaatcccagcactttgggaggctgaggcaggcagatcacgaggtcaggaaatcgagaccatcctggctaacacggtgaaacccyacctctactaaaaaaaaaaaaaaaaatacaaaaaattagttgggcatggtggcgggtgcctgtagtcccagctactcgggagggtgaggcaggagaatggcgtgaacccaggaggcggagcttgcagtgagcgagatcgtgccactgcactccagcctgggcgacagagagagactccatctcaaaaaaaaaaaaaagcagcaggtaaaaggtcacacacaaattagagaccagagacaatgcactcttgactctgagtgtaatgtctggccag

SEQ ID NO: 504242 - DNA, 600 bp, Homo sapiens
ctgtccttcctaggattgggtccttagacaatgggctactactttaggttatgtagccctttgtgccaggtacacagttccaatgacctaggatcttgttagtaatcaggactgtgctggctataggttgtgaaatcctggcgttgagcaagagcgagctggtcaagatggtggagctctacctccatctcgctggtgatagagatacaggctcccaggctcctgcagagcaaggattcccccgtaggaaagtcagagagggtgatacaatgctgggctttctgtgttggtgaygtgtagctggggtgaaaggatcaaattgcctaaccctaacctcagaggggggtgacttcacctgagtcctcatgaagccttgcaagagtaggtgccacgggggcatgtgcctcttctgttgccgcattccttgctgctgtctccttttgtccccaactccagggagtatcatgggtctaatcactggcactgtagtgggcaaatacaaatgccatgaacacctgatccctgccccactaaagacaccagtggatgtaaagaagctcttagataaatgcaaatctcccacggaagctgtgtgagttt

SEQ ID NO: 504243 - DNA, 600 bp, Homo sapiens
ctgtccttcctaggattgggtccttagacaatgggctactactttaggttatgtagccctttgtgccaggtacacagttccaatgacctaggatcttgttagtaatcaggactgtgctggctataggttgtgaaatcctggcgttgagcaagagcgagctggtcaagatggtggagctctacctccatctcgctggtgatagagatacaggctcccaggctcctgcagagcaaggattcccccgtaggaaagtcagagagggtgatacaatgctgggctttctgtgttggtgacgtgtagctggggtgaaaggatcaaattgcctaaycctaacctcagaggggggtgacttcacctgagtcctcatgaagccttgcaagagtaggtgccacgggggcatgtgcctcttctgttgccgcattccttgctgctgtctccttttgtccccaactccagggagtatcatgggtctaatcactggcactgtagtgggcaaatacaaatgccatgaacacctgatccctgccccactaaagacaccagtggatgtaaagaagctcttagataaatgcaaatctcccacggaagctgtgtgagttt

SEQ ID NO: 504244 - DNA, 578 bp, Homo sapiens
cataaatggagactgtcactcaccacagaggttacttgatgccactacgaacttatcaggaaaaaattcagaaagagtgagaaaagaaaaaatatatatacagacatacctgggaaacagtgcatatttagttccagaccacaacaataaagtaaatatcttaacaaagaaagtcacacaaattttttggtttcctagtacatataaagttatggttacatgatactgcagcctactaagtgtgcartagcaccatgtctgaaaaacaatgtacataccttaaataaaaaatactttattgctaaaaaacactaataatcatcagagccttcagtgagtggtaatctttttgctggtggaggatcttgcctcagtgttgatggctgctgactgatcagggtggtggttgctgaagattggggtggttgtggccatttcttaaaataagatgaaaattaagtttgccacatcaattgactcttcctttcacaaaatatttttctgtagtgtgtgatgctgtttcatggcattttaaccacagttaaacttttttcaaaattggaatcagtcctctcaaa

SEQ ID NO: 504245 - DNA, 578 bp, Homo sapiens
cataaatggagactgtcactcaccacagaggttacttgatgccactacgaacttatcaggaaaaaattcagaaagagtgagaaaagaaaaaatatatatacagacatacctgggaaacagtgcatatttagttccagaccacaacaataaagtaaatatcttaacaaagaaagtcacacaaattttttggtttcctagtacatataaagttatggttacatgatactgcagcctactaagtgtgcaatagcaccatgtctgaaaaacaatgtacataccttaaataaaaaatactttattgctaaaaaacactaataatcatcagagccttcagtgagtggtmatctttttgctggtggaggatcttgcctcagtgttgatggctgctgactgatcagggtggtggttgctgaagattggggtggttgtggccatttcttaaaataagatgaaaattaagtttgccacatcaattgactcttcctttcacaaaatatttttctgtagtgtgtgatgctgtttcatggcattttaaccacagttaaacttttttcaaaattggaatcagtcctctcaaa

SEQ ID NO: 504246 - DNA, 578 bp, Homo sapiens
cataaatggagactgtcactcaccacagaggttacttgatgccactacgaacttatcaggaaaaaattcagaaagagtgagaaaagaaaaaatatatatacagacatacctgggaaacagtgcatatttagttccagaccacaacaataaagtaaatatcttaacaaagaaagtcacacaaattttttggtttcctagtacatataaagttatggttacatgatactgcagcctactaagtgtgcaatagcaccatgtctgaaaaacaatgtacataccttaaataaaaaatactttattgctaaaaaacactaataatcatcagagccttcagtgagtggtaatctttttgctggtggaggatcttgcctcagtgttgatggctgctgactgatcagggtggtggttgctgaagattggggtggttgtggccatttcttaaaataagatgaaaattaastttgccacatcaattgactcttcctttcacaaaatatttttctgtagtgtgtgatgctgtttcatggcattttaaccacagttaaacttttttcaaaattggaatcagtcctctcaaa

SEQ ID NO: 504247 - DNA, 586 bp, Homo sapiens
cttatgtgagatgtccttaagagattggatgcgcccttcttctctttattcttttcccttttatatggaatgtgggtatagatgtttctaccagtagctgccttaaatcctgaggtatccttggaaatggagactaagcatagccgagaaatgggacagaagcctgggtccccctcatgtggagggttttactaatcattcactgactacttctggacttcttggagataaagagagaacaaaactcttcttgcatttaagccattgataacggatgcaccttcctgccaagtttttaaggccatgtgtagcagttcacatcctggaagactgattcatttattggcctgaagaatgtagggggctggatctgcttatcttgaagctcttctccaaactgtggacatctattgtcctaactggagatgactaataatggatttgacctctgcatgcagtaataagttccccattactggaagtgttcatgcagaaactagatgtgatgttataatgatctatcaatatctgytcctaatagtctctgatgtttgtgaggaaagaggccttgtttgtattgtttaca

SEQ ID NO: 504248 - DNA, 509 bp, Homo sapiens
tgatgaaacgggagttctcttaccccctcacagggtgtgaagcaggggtgtggcttgcttctttggtgcaccactgctcaaacccctctagggagcatgcagagggcaggtcatggggctccgactccatagcagtgtctagggttgagtgtttayagctcccgaagccccagtgggtgtgtgttacagtgcactctttcggttttgccgtctgcaggtggcttgtgttaatcagctcagttagaccctcagttagccttatcgcaaggacagagggctttctgtgtcccggaatcttgccctagtgtactggagaaatcagattacacgtgggcttggaagatgagcacaaggttttattgtgtggtggaggtagctctcagcgaggtggatggggagtcagaagggggatggagtgggaaggtggtcttctggtggagttgggctcccgatcgaattttgcatcatcctgcctcaacggcctgtagtgtctgctggtgtctgttggt

SEQ ID NO: 504249 - DNA, 584 bp, Homo sapiens
acgcgtggcccagccgcgtcgacgccgccgccgccgccgccgccgctgccggggggcctgggctgcctgcgccgctgcaggcggggcccgccgcacctccgcaccacagacccttgctrgccggcgccatggcgcctggggcgctgggctcgctgagcagccgctcggccttctcgccgctgcagcccaacgccagtcacttcggtgccgacgcgggcgcctacccgctgggcgcgccgctcggcctcagccccctgcgcctggcctactccgcggcggcggcgcacagccgcggtctggccttcatggcgccctactccactgccggcttggtgcccacgctcggcttccgcccacccatggactacgcctttagtgatctcatgcgtgaccgctcggccgccgctgctgcggcggtgcacaaggagccgacctacggcggcggcctgtacgggcctatggtcaacggcgctccggagaagcagtagggcgaggggcctggcagccggccggtccccaaacaggaaccccagccctcttcccgcgggccatcgacccctcttcgcccagcgctctctctgcgc

SEQ ID NO: 504250 - DNA, 584 bp, Homo sapiens
acgcgtggcccagccgcgtcgacgccgccgccgccgccgccgccgctgccggggggcctgggctgcctgcgccgctgcaggcggggcccgccgcacctccgcaccacagacccttgctggccggcgccatggcgcctggggcgctgggctcgctgagcagccgctcggccttctcgccgctgcagcccaacgccagtcacttcggtgccgacgcgggcgcctacccgctgggcgcgccgctcggcctcagccccctgcgcctggcctactccgcggcggcggcgcacagccgcggtctggccttcatggcgccctactccactgccggcttggtgcccacgctcggcttccgcccacccatggactacgcctttagygatctcatgcgtgaccgctcggccgccgctgctgcggcggtgcacaaggagccgacctacggcggcggcctgtacgggcctatggtcaacggcgctccggagaagcagtagggcgaggggcctggcagccggccggtccccaaacaggaaccccagccctcttcccgcgggccatcgacccctcttcgcccagcgctctctctgcgc

SEQ ID NO: 504251 - DNA, 585 bp, Homo sapiens
tccccaaaggggataaaaaccagcattatggatcaaccatttgttgctggaactttacattccctgtgtcatctcatccctgtgaggcagggactattatcattccctagataagagagctgaagctcagagaggtaaagtgacttccctaggctcacagtcaaatgtggcagatctgagactgcagcccagttctgtctcactgggaaatgtgtgctttttctgctttatgaggctgccccaaacaygtgccagacgccatcaaataatctcccctccctccatttgactcggctgcctcctgagcttcattcacatcctgaggttatttatgagttcaccattaatcagagatcagttgtccacatatattctgactttgcagcatccatgagggaaaaaaaagacctccaatctattcaaagctctgtgtcaccaaggccacctctaatatacaggtgttcgagcgaattaccatagacatgtgtgtcagggactcagtcagatggcagacaggactcatgtaaacaagagaaataaaactgtctgctgcacattataacagctcataactgggtgcagccg

SEQ ID NO: 504252 - DNA, 633 bp, Homo sapiens
aacaacttctggaattggtacagacaagaggctcagctcagtcctagggagctsagaaatgagctctgctccccacaggggtcagcggcagagcctggcctcttcctctccctagacaaagctttccttttctcatgtccctcctcccaaagcatcccttctacacacacacacacacacacacacacacacacacacacacacacacacgttcttctcatgcctctgcagtcgtttttggatgcttgctctctttgtcatccacttcagcaaaaagtccctgagcttgtactcatgcaggattctgtgcgaggccccagagacccacagatgcctcagatgtaggtctgtgccccagagaatctcccactctggacaaggagatagatatgtacattgagaagggcaatgtggtcaagaagatgtttcaacagaaattcagagggagggatgaattaaatctagggaagaattcatggaaatcattttaacaccagtgaagtcaaggtagggttttgaaggatgcagaagtgttgggtactgctcttccttgatcaggcgtgtgccttcctaagaggatgagcatcagactctgcccaactttcagcttcttcctctatctcagacccctcc

SEQ ID NO: 504253 - DNA, 600 bp, Homo sapiens
gcaagtttatcatccttcctttcaaggtgctttactccaaaggctgaaatcacttggcagtatttcctctacagcctactggtaccatagattccaggcaaatggaaatatctactttaccaaacaggccctgaaatttccctcctccgtgttcttgctcatgttatctttctaccttgaatcccctctgtatcccacatctgcctgttggagaccagtcatctctcgtgaccrctcaaatactacctctttcaagaaaactgcctgcatctttccctcccctgaaccctcaccacacaaggcttgtctctgctttgtccctctactgcacaccaccttgggttcttgttatgagtgtccagtggctccttgagatcagagactgtgcattttccttcttgtattccccacaacccctaatattgggagtggaatagagtgggtgctaaaaatctagttgtcaatgtctctgttttacataggaggaaactgaagcttggccagattaagagctcaacgggctttctctagagctggggaatcaggatcctaagttaagacagagcaatacaaggtgttctctgatgaaagattttacag

SEQ ID NO: 504254 - DNA, 623 bp, Homo sapiens
gtttctcttgcagttactcagtagttattttagcactaaaggacacatagacaatatacaaatcaaaggccatagctatgwaacaataagactttatttataaatggtaggttgaatttggcccgtgagccatattttgctaatccctgctgcatagtatttattcaatatgcatacattcatccaacaaacatttcttgagcacttgttgcgtgccaaaatagatattatttcttagggagataaaaataggcaaaacatttcaagctttaaactgattacattgtggtatggatacaggggaaaaaatgaatagataaagaaaagagtgataaaattaggatacaggcttacactgggactcaaaggagggtagagcttctaagaacctttatatgaggaaatcaaaggatcaaacatgaagggaggaaggaaaatattttcaaactgtgtgccgtgttaataggtaaacttaccttctgtacagtttcactaggcttagaatttcgtggtattcaggcaattcaaccacaaaacaccaacttttatgtgatgtctcatccacacaaggaacccctgagataacatttccagagcttcgcaatgcaatgcatttaaatgta

SEQ ID NO: 504255 - DNA, 623 bp, Homo sapiens
gtttctcttgcagttactcagtagttattttagcactaaaggacacatagacaatatacaaatcaaaggccatagctatgtaacaataagactttatttataaatggtaggttgaatttggcccgtgagccatattttgctaatccctgctgcatagtatttattcaatatgcatacattcatccaacaaacatttcttgagcacttgttgcgtgccaaaatagatattatttcttagggagataaaaataggcaaaacatttcaagctttaaaytgattacattgtggtatggatacaggggaaaaaatgaatagataaagaaaagagtgataaaattaggatacaggcttacactgggactcaaaggagggtagagcttctaagaacctttatatgaggaaatcaaaggatcaaacatgaagggaggaaggaaaatattttcaaactgtgtgccgtgttaataggtaaacttaccttctgtacagtttcactaggcttagaatttcgtggtattcaggcaattcaaccacaaaacaccaacttttatgtgatgtctcatccacacaaggaacccctgagataacatttccagagcttcgcaatgcaatgcatttaaatgta

SEQ ID NO: 504256 - DNA, 623 bp, Homo sapiens
gtttctcttgcagttactcagtagttattttagcactaaaggacacatagacaatatacaaatcaaaggccatagctatgtaacaataagactttatttataaatggtaggttgaatttggcccgtgagccatattttgctaatccctgctgcatagtatttattcaatatgcatacattcatccaacaaacatttcttgagcacttgttgcgtgccaaaatagatattatttcttagggagataaaaataggcaaaacatttcaagctttaaactgattacattgtggtatggatacaggggaaaaaatgaatagataaagaaaagagtgataaaattaggatacaggcttacactgggactcaaaggagggtagagcttctaagaacctttatatgaggaaatcaaaggatcaaacatgaagggaggaaggaaaatattttcaaactgtgtgccgtgttaataggtaaacttaccttctgtacagtttcactaggcttagaatttcgtggtattcaggcaattcaaccacaaaacaccaacttttatgtgatgtctcatccacacaaggaacccctgagatawcatttccagagcttcgcaatgcaatgcatttaaatgta

SEQ ID NO: 504257 - DNA, 581 bp, Homo sapiens
ctggaatccataaactggtagggagaattgaatggacatcttggcaaattgctgaagggtgacagtggactagcatgttggtgggaaactctgaaacgccacattcatagtgattttattatgggaatcctatcggagtgtcatggtgagatctgagaaagatcctttcatgaccctagctggggcagggagagggcagccatcttgaaacccactcagactcttctcactaaaaaagatctagtttccagaggaaagaaattaaacagaagggaattcagaatgttttcccagatggggcaaggtaattcctcggcaccgcacccccctccaccccaccaccccagctcttatctcacttatctctttatgggaaaaacaaagacacaagtgaaatccgcagtggagtgggcttcagagaaacagcctgggaatactgcagccagagaagaaagtagaggcagggggaataaactaaactccaggatgagagtctgagagacttstgaaggccacgccctagagacacagtaccactaaggactgacttaagcaaattataggacagcccctttcccaca

SEQ ID NO: 504258 - DNA, 652 bp, Homo sapiens
gtgggagcggggagggcagagaggaggggtgggcaaggtccgcagggctgcgaaaccccagggtgtgagtgggagagaagcgattggttgagggatttcccctcaacgccttttcggggatgctgggaggggtgtttgctcctagcaggattcaggcacaaaaccagtcttctgagaaagacaatgagctttgtgaarggaaaataaatctcaaggcccgcaagtcaataagctaaagggaaaagtcaagcggggaactgcttagggcctctgcctcccattctagtcaaagtcccccctttgctcactgagatagatgcgtatctgattgcctcctttggaaaggctcatcagaaactcaaaagaaggcaactgttcctctctcacctatctgtgacctggaagccccctccctgcttacagtcttcctgcctttgcttcaagttttccggcctttccagaccgaatcaatgcacttcttacattattgatggatgtctaacactgaattgctacatctccaataattttctgtctgtcgaagagaaaaagaccttagatatcatttgtgctttgtttagaacacagaaggaagggataaggtgtacgccgtgctcgtgaggtttttttgtttatttgttcgtttgtttta

SEQ ID NO: 504259 - DNA, 590 bp, Homo sapiens
gtgcccgatgttcccggcccacagagtcacctttaagttcttcagcatccactggggagagtcacctctgtctccacacttgcccacactcttgagcttgatggctttgaagccaaagtccccatggaggctccatgtgctgaaagtcatgtgagaccctcagggtcagggcttacccaccctttccatccccacaacctcccgcaaatatgacttctggagcaccagctcctactgcccccaggccccatttccaaatcctgggcacccaagacagctcagtgtgtttacataatttacctaagggcacccaaagttcttttctctctarttctcaggaatctcaactcccagcagcataggatttcttccaaggatcaaatctccgcgccacccctgctaaacctccttgcagaactgcttctgggctgtctcctgcccccctccttccaggcctcggcctggccttctccatctgcatgacagaggctcagcaaggaatcccagttgggaagccctcaaagataaaaaagttcttttttaaatttttttagagacagggtcttgctctgtcacccagtctggagtgc

SEQ ID NO: 504260 - DNA, 631 bp, Homo sapiens
ctggcatctccaaatatgtatagtcatataaactacagtttacagttactgaagaaatacacatcagctacctgtaatggtcaacttagtccttttataaacaagaatagacaatcatcatcaaaacacagtaataaaaaacagtttaaattaaaatgtaaagattaacaaacaatataactgatcccaaaataaaaaaaaaaaatcatcgaagaaacagaaggaaatttttgaaaagattgaattagtattttcagagttatttgaaaggacrgtatttctataaagcaagcactggcagctatttttaaaagagcagctaagaacataaaaggtgttttggaaaataagtatataattcaccaaataagaaaaacctaataggagttctgaataatgaaacaaatagctgaagacttcaatcagttacctgcaagataaaaccaaggacattttcaaaacttagcacaataaaaaaggaacaagatagatccaggagatgcgttatctgtctactaagagctctcaatggaggacatagagaaaacatagggaaagaagcagtcaaagaaagagtagtaattcatgctgagaagatggaggcctgagcacacatccccgtctctcccag

SEQ ID NO: 504261 - DNA, 466 bp, Homo sapiens
ctaattgcacctcttagcagccatgtgaccttgggcaagcaattaccttccacgagcctcagtttcctcatctaaaatggggatagaaatgatatcagtctcacagaatgttgtgaagattgaaggcgttgtataaggcatcagtgccatgtctgatataatgaccattattagctgttgttatggttatcattccccgggccctgtccttagtgagcttattgtccactttccctaacactatgatgagtagagtcaaaccaaccaccagcaccagttgccacaggcatgagaagcgaggcctttccaggtcaccacctgccttcagtattccaggctggcctggttccaaggccccaggctgcgttgttccttgaggcccaggccaggccyggctttgtgctgcatacctgcccacctgtatggtgctgcagagccccagcaccccagccttggcaagctccca

SEQ ID NO: 504262 - DNA, 465 bp, Homo sapiens
cattcacttcttttaaacaattcgttgtttgatacattggctttccctctgtctgaataacatttggtaactactactttccttagagctttagcttctaccaaccacgtttcaaacgaatctatttttttttactttgctattgtacttcgcacaaacctctctaactgtgcataaatacagtattgtcacatgaagtgtaattcatgtgcttatatatcaaattccccttgaygttatgggctctgttaagaggttataaatctcattaatttttatatacatagcattaaggaaaaagcttgaaatatagttgttcaacaaatatttgttgactagatatgtagtgtccactcacaattgaagaggatttaacactgataaaataataattaaaataataaacttttccaaagttgattcaattaaaggtcacattcatatcacttcaagtgttatttcatc

SEQ ID NO: 504263 - DNA, 633 bp, Homo sapiens
acaccaatcaaagtacaattagtcaatgagaatgtcagagaaatgattttagactcctttagggttggaagttggagcagccatcggtcagttgtgatagacaagaggcttggaaaattactgaagagtttttaaaagagttggaacacctaagcgaacattcctgatcaaagacagactgagctgctaaaatctgttcaaaggcttttagagcttcagcactgagctaattttaattaccatctttagataagggagaagtaaacagatcgctttggtacatttagaaatgctatgtgagttttgagcattttgagcaaagaggtagaatcttgagtctaaaccttcccccatcacaccaggattgcagaggcccagatagcactctacatcttgagaccaatacttcagtgcagttcctggaataagttcaaaagaataytgaatttggaaagcagtataaaattcattttggaccaaccaaactaatccttctttaatgattaaaaacatagtacatccaaaatcaaaacaaatctcaaaatggcaagagtcaaactatgtaaacaagctaagaggatgttaaatacaagaaaatgaaataataattcagaccttcatgaggtcccatct

SEQ ID NO: 504264 - DNA, 538 bp, Homo sapiens
ctgctatttccagtatggggaacactgtgagagaaggattatggggctgtggagggagaatttggatgtagacacaatcagtgtgagatgtcacaggcacttgcagttcagtatgatgttgggcttaaacatgtgaaatgastatcacaagtggaatggatgagatcacctatgaataagccacagaataaaaaacgtcacaggcctgagccttgatagttgcaagtttcaattgcctataaaaggaggaatcttagtaaccacctttttgaaaaacattaaatgactattataacttgatttgatttaggtggctgattattttaatttttaatggattcttccatgccaacacagtcatttatgttctcaaagcacttttcaaattctattattgcactaggcagatataatcatatctattcacatggttattgtggatcctctcttctagactataaattttctatgtcttattactgtgtatatccaccaaggctggcacataactgaggataataatattaatcactaacat

SEQ ID NO: 504265 - DNA, 606 bp, Homo sapiens
ctgccatttgcacttttctgaattctgattatattgtgcaattatcacatrcatgtgttgattctacatgtccttcgaccaagaagtgctgctgcggtacaaatctaaaactcgatgggaccttataattaatgaattgttgctttaattgagaaaattaaactctgttgaaattatatatctcatttaagcctcttaatgaggaatctgaaattcagggaatttaagcaaacttctcaatatcactcagtaaataagtgactgaaccagcttattcatgcaagtatttttggtatggatacctattttagactccaaatttgactgtgccactcacctccctacctaaatttttcacttgctccctatcacgtaaaagagtaaaccaaaattcataagcatggtgcataagcccttccatgaattttcccctttttatggatactgcttcatttctggctattttataccacaaacttcttgaaaatgcctcaggcaatatatcatttcacagttctattcttttattcatggagtttcctttggcagaaatgccagctccacatttttctttaacctttatagttctctttcttcaagtctctg

SEQ ID NO: 504266 - DNA, 675 bp, Homo sapiens
ctgccatttgcacttttctgaattctgattatattgtgcaattatcacatacatgtgttgattctacatgtccttcgaccaagaagtgctgctgcggtacaaatctaaaactcgatgggaccttataattaatgaattgttgctttaattgagaaaattaaactctgttgaaattatatatctcatttaagcctyttaatgaggaatctgaaattcagggaatttaagcaaacttctcaatatcactcagtaaataagtgactgaaccagcttattcatgcaagtatttttggtatggatacctattttagactccaaatttgactgtgccactcacctccctacctaaatttttcacttgctccctatcacgtaaaagagtaaaccaaaattcataagcatggtgcataagcccttccatgaattttcccctttttatggatactgcttcatttctggctattttataccacaaacttcttgaaaatgcctcaggcaatatatcatttcacagttctattcttttattcatggagtttcctttggcagaaatgccagctccacatttttctttaacctttatagttctctttcttcaagtctctgctcatggctgttcttggtgctttctaagaatatctgggtgatctaagtgctcctcttccgtgctctaca

SEQ ID NO: 504267 - DNA, 501 bp, Homo sapiens
gccaaatgatggcataaattaaacatagagttcaataaaagcaattataaggggcaccaagatgatgtaaggcccaagataacccaagaaaccccagactcaaaagggatcagattccacagacttactccaaaggagtgtcagccggatgcaaatggcaccagagtctagagccacaccccacccaaacattatgggcattttctctcattgcacatggacattcaacacaatagttatcataactgtacataacatctgttcccactgctaggttgtaagtttcataaaggcagacaccaaatctgctttattcactgctacacctggcactcaatatttgctgaataacaatgtrcagaaaaatgaatgaatcacaaatcttcagacactctttcatcgatatttttttctcacaaccatgtgtttgctaagaactgggtggcagagagctggaggatgtggtttctgaggcaggtactctgtactgccagttaaaga

SEQ ID NO: 504268 - DNA, 650 bp, Homo sapiens
tagttcatgatacttaaatataccccaacaatatcagtctaaatggactgggctttcctcgcccttctttacttctccctccttctcacaaatattatcaagtggctattacacgccaggccccatggagccaaattagagatagccttcgccttcaagccaaggaagacagaccacttcataagcacttaagataaaaataaagtgataagggtaagcatcaaacaggtgacagtctactggaaagagtcaaagtctttgcaaatattatttccaatggtagyggaatgctcttacgatcacacatttttaaacttcagaagaggcaagtgagagggcagaaattttcagaggaagttggtgacatattcatgttttgtgtaagtttttaaatgaaatctgctgtgagcattaaaggtttgatgaattttgttttgatgaattttgctttgacttcagaaacagtttggccattcattatttgtgatttattctaaaggacgtaagattattttagttataaaccactttgacagctaacgggaaaacttagtattcaacaaattgagaagtttgctttgcaaggaacagagcaagaatatccagacttctccctctcaggctagcaaatatgtcatttttacttcagt

SEQ ID NO: 504269 - DNA, 475 bp, Homo sapiens
gtgtgaccagaaggtgacgctggagaaataggagatgatgtagggctgtctgccattttcatttgctcacttggaagcttaagaagccatttatattttaagagagggagtggtgtgatcagtgctgtttagcagtcacttggaaggtcattgaggctagatttgttagagaaaggcttgtatctgtcttgggtcaggtatgacccaaagatgtggtctgccgacagccaggcagcactgtggactgacaccctgggctgggctggcttctcttcagcagattttctttcccttttttctcttcaaatttatttatttatattgacagataaaatcgtgcatatttgtcttgtacaacataatttttttgtttgttttagaaacggggtcttactgtgttgcccaagcctttgtgaacacagctcactgcagcctcaactttytgggctcaagcaatcctcttgcctcagcctct

SEQ ID NO: 504270 - DNA, 630 bp, Homo sapiens
ctggaagtctgagctattgctgaacagtacgtcattgcatttagaatttagaccagtgtggtttaatagaattttccacgatgatgaaaatgttctgtctgtgctgtctaaaatcttagtcattaaccacatgtggctactgagcacttgaaatgtagccagtgtggccaaggaacacaattttaaagttaatttatttttaattttaaatataaataaccacacacatggtttctgaattgtacaacagagaattctagataatgtcagtttttctagtaataaatgctctccatcctagcccctttttgaggttgggcttctaaagattagttaggttgtctcccaagtttctcacagtggagaaggggaggaagtgcaggaggaagcaaaaatgaatttataaacactataataaaagtgagcctaattacagcaagagatcaaaataaataataccratagttgcttttagttttgagtgctagccaggtgtaaaacactttaaaatgagatttaatcctcaaagaattcctatgcaattttgtagctgaagaaaccaaggctcagagtggccaaatggtttgttatttgtggcagagaatttagatgcccatctaggtgagcctc

SEQ ID NO: 504271 - DNA, 335 bp, Homo sapiens
aggcattaaccttacttcttctttcatttggtatatttgtgggttctttggaaaatccccacccccaactcatgcaggtgatccctgatgtgggtaaatgcattttgattctagctggctccttcagattccttccccagcccctaggcatcttccagcaccacctgcctctttatgctgaggtccttcatcccactagatggtcctctgacagggtttaggaagacttagaccatctctctgtcgtgtgttccagatctagttcaagaaaacacatctgcattctctaccttgataaactgagaatttacrttgtccccagtgcagcaacctcc

SEQ ID NO: 504272 - DNA, 676 bp, Homo sapiens
tgtgatgaaggcaggaaaagaggtattggaattcgagaagggagaaaaggatatgaaataatcatctagttgaatggcagaaagaacaccctagaagaacaatccaaagatgcttatttcttgtaaagtgataaacttaagcttgaccccacagactctggctgtcagtgtaagttttgaattctgattggaactgtcatgtggtgattaaataatgcctgttgcacagtggcggaaagtctatagatgatgaatttaacctcatggtctttcaaatattaaatagcctataaaacaaaaatattctcaattaaataaaacaaagattgtctccctgataaggataggcctgaaactaaaactgttctaagatgcattaaaaaatattccaaggacttgaggaaaaaacattgcaagttgagatatcaaaagataatgcagcttccaaagtcagaaacataatctaaaccagaataatattcaaatgctgtgtaaaaaggctcattaagaatatttttacagtataattttggaagtgcagaagacattagtatttagagaaacatttataaataaacttttagacagttttttgacctgactttcacactccagtaggatgrcattcaggtggtccacaattccctgaatctgcacagcaaatatcatctgtaga

SEQ ID NO: 504273 - DNA, 600 bp, Homo sapiens
taatcttttgtattaaaaattctaccactgatatttaacaaacaacaatataaactttaataaaattattaagcatgaaaagtaaaagtactggatatttatctcttaatgaggtggaagaggctgtttgttaaaatcggaattcaaacaaggttcacacatggcaatttgttggtatgtctcttaaatctcttagcctttcttagtctttaaatatctcccctacagcttccttctcaatttattaaaaatatcagggcctttttccctgtatttcccagtaaattattagttaaagctagaagcatgatcagactcaggttcacctttctggtgaaatattttaggcaataatgctacctttgcatacctttcttaacctttcaaatttaagtctgtatctgcctttcaatccagtctccacactcccttgcccaaaaatctctggcactggaaaagtgaggcaacacagttaaggccaaggctatcaagcactcagattattccagattgaaagtttggtcatcccatcaggtaasagcctacctggctgagttgctggcagtgggtagagacaacataggaagggtggggagaagg

SEQ ID NO: 504274 - DNA, 592 bp, Homo sapiens
ctgatggtcacggagggaccacacgacgttgatgaaattcctctttaatgggccagctcttcatcagccctgatgttcaggcgcccttgtttaagatgcaggcctccagcaagaccagcatgagtgccacagaactttgtggagactcgctaatataacaggccagcatttgggagagggtagtgattatgtgatttcaatttcataccatctgtccccagatttctttcactaccaggctggcyactggctttggaggacagtcaaaatccagggctctggaatactctgtacggagttcaaaggagcaggcatccctgtgaactctaaggctggttgttgccatggggaagtggaccgagatcgctggcttccagcaagatatgtacttgaaagtcctaatgaaagcgtgttaagccctccaaagctggctatgtgtctgagagcctggccaagagatgtcagatggctccatgggcaagagaggacataagcaactgaggaaaagggaggaagagacatgctgacgttcttctcaacaggaacattctttcttcttgggtgtccatcagcctcatcatttattatcaga

SEQ ID NO: 504275 - DNA, 592 bp, Homo sapiens
ctgatggtcacggagggaccacacgacgttgatgaaattcctctttaatgggccagctcttcatcagccctgatgttcaggcgcccttgtttaagatgcaggcctccagcaagaccagcatgagtgccacagaactttgtggagactcgctaatataacaggccagcatttgggagagggtagtgattatgtgatttcaatttcataccatctgtccccagatttctttcactaccaggctggccactggctttggaggacagtcaaaatccagggctctggaatactctgtacggagttcaaaggagcaggcatccctgtgaactctaaggctggttgttgccatggggaagtggaccgagatcgctggcttccagcaagatatgtacttgaaagtcctaatgaaagcgtgttaagccctccaaagctggctatgtgtctgagagcctggccaagagatgtcagatrgctccatgggcaagagaggacataagcaactgaggaaaagggaggaagagacatgctgacgttcttctcaacaggaacattctttcttcttgggtgtccatcagcctcatcatttattatcaga

SEQ ID NO: 504276 - DNA, 505 bp, Homo sapiens
gggtgataagtgaaacttgtgactggcatctgaagtgggaccagtgttgtgtgcctgacctcttaactaacaggatctgatactaactccaggtagaccatatcagaattgaatggaattgaattgtagaatacccggttggtgtccagagaatgcagaattggttgatatgaggagaaaacttacattttggatgtcagaagtaaaaacaacccaaacgtctactgcaaatacatttttttaaatgttctgttttatgaagataatcaaaatttgtacatgccctttgtagtaaaattcaaaaatagagacaatctcatcttccccaartttgcatgatagataagtcactccattttttggacttccactgcaatttttatagctctctttaataacatttgatggtttctgttgcattttttcacctgtattctgcttgaaactgaagtactcaaggagaaggaactctagaattctatgcattggcatacaccctgtgatt

SEQ ID NO: 504277 - DNA, 505 bp, Homo sapiens
gggtgataagtgaaacttgtgactggcatctgaagtgggaccagtgttgtgtgcctgacctcttaactaacaggatctgatactaactccaggtagaccatatcagaattgaatggaattgaattgtagaatacccggttggtgtccagagaatgcagaattggttgatatgaggagaaaacttacattttggatgtcagaagtaaaaacaacccaaacgtctactgcaaatacatttttttaaatgttctgttttatgaagataatcaaaatttgtacatgccctttgtagtaaaattcaaaaatagagacaatctcatcttccccaagtttgcatgatagataagtcactccattttttggacttccactgcaatttttatagctctcttwaataacatttgatggtttctgttgcattttttcacctgtattctgcttgaaactgaagtactcaaggagaaggaactctagaattctatgcattggcatacaccctgtgatt

SEQ ID NO: 504278 - DNA, 548 bp, Homo sapiens
gttccatccccataactgtcaaatatacttagggaaaacacagctgcagtctgctcatgtgcctgcaattacccgctctccagaatcttaggttccaaagcttgatgcttcaatatcatcgtaggattgttcttaaatcgtatggctttttaagtagttctaagatggcctatccatcagaattaaaaatcaacatcctctttccaggattcgtttttatgtaacaaaaatatacatactttaaaaatattgtctgataacaattttaatacaaaagtataagacaaaatatgttttccactgtcatcaattagcaatgaagatcatttgcaataatataaattakttttctctgattttttttctctatggatgaatattatcacagatagacttgaattcaaatgctcttgcaagtgaaaatggtcaaattaaaatggcttatgcaaaccaggaatatgttagctcttctatatatacggtgaaagaggttatctgtttattgcctggctagggccaggcaatacatggttgaaaagattctgtat

SEQ ID NO: 504279 - DNA, 613 bp, Homo sapiens
tgtgatctcacacatcagggctgagctatggtaaatatataaccagtcagcagcaaggactaaagttsagtctgccatatagtattgtcctttgagaagattaaccagtaacttcatggtgagtctattgaatttgaactctttcatcctgaaagttggtaacagttcctcttgattggaatccatgtatacttcagtcatatatcattctattccacagggcctcagccagcagcaatctgagggctaacaaaatgtttaatacactggcttgtaatcatatgtatcattgccccaaaccaaaaggcccgatttacagcaaaagaagtatggttgtaaatacatggccatgggatcctccagtcctcttctttatctctcacttaccaaccagagctctcagactttcagagtgatcaaatagcattttgataagccttgaatgtgtatttacttcatcatttaggagaagtcagaatttgaggatgtgtcgccacttacttcctaatcagtagttattataaaaccctttatccccaaatggcagaagatatgagtctaagaactgacatttgaaagtgtatgtgaccccaattaccatcactcccagtga

SEQ ID NO: 504280 - DNA, 536 bp, Homo sapiens
tgtgaccacaatccaacaagcctacatgctgaaggtggagaaatggaaagaaaaagagagaccttggtgatgtagatttgacactgttcacctggagtgtctacttgttgcctgagacaaataaatctgtttcagccacttttagcctagtgttctaggaatgctgaatccattcctaactctgacaaatcatgattagcttgaacttgagtgtgaacttgaacaagtgtttaacatcgctcatctttggttttcttatttgtaagtggagacaaacgtcactcatttcacagtgtgcacgtgaggattaaatgtgattccatttgtaaagctctcaccacaacacctggcaagcgatggtagctgccattgttattaacactcatgtttaataggcgagtgacatcaacttaaaagcttgaaagtcatttctcttacctcagtagcacgtcacagcttcaaagtgagttctcatcccctatcttagttcatcttcaactscaaatctctgagagaaggtggttattacttcctat

SEQ ID NO: 504281 - DNA, 525 bp, Homo sapiens
caaaccatatcaggtacccagaagagccagtctatatgattgttgggctacttactagttgtatgacctttaaatctctgttccctcatccatagactggaagtaagacctgttcttggtgggcctatggggcccacttcagtgtctggccccatttgcccaatcagcagctggcctggcatactgggtgtgtgctggcaaacacttggtgagccatgttgactggaaaggttccattctgcaacatgtctctgattcttgataggaacatttggactatccccttttgtcctgggagataagaggacgcacctaataggttgttgtgacaatgaaatgagcaaatgcaggtaaatttcctagagcagttgacagcacagatgtacactgccttgctggtccttcagggtcttagatttcaaccctctcatcccaytgtgacagggatgcttgtagggtcctttgccctaactcactatggctccagatagttgttagctagtttatatctgctattcttcatct

SEQ ID NO: 504282 - DNA, 618 bp, Homo sapiens
gccttttaaacagaaaacatgatwatttatttcaccatgctcataaaatagtatactgtagagttaacaacctttagtgacagaaatagttatcagttcattaatcagatcacactgaagaccaaaagtggtagaagagagcaaagcattgttgattatactatgttgatgctaaaaggaactttcagagactctgttatgaatacttactattttataaatgacacaatcagacgaaacaaagaaataaatatagttgaggttagaggaattaacctcaggactatttagggattgtgtcagttcagttgtttttaaaccctgaccacatattagaatcatctgaaggagctcttgaaacatactaatggtgaactctcattacagaacaatcaaactggaattgtagtgagatggacacagagtattttttgaggttccctacatgctttcagtgtgcagattgagaaatgctctctactgttacaaccaaattagttcacatatttcagtgcttgcatcgtttttgcacttcattttcctttatctcatagtaggaataatgctttcatatgtttggttatttttaaatattaaacttcttttgagaactataaa

SEQ ID NO: 504283 - DNA, 618 bp, Homo sapiens
gccttttaaacagaaaacatgataatttatttcaccatgctcataaaatagtatactgtagagttaacaacctttagtgacagaaatarttatcagttcattaatcagatcacactgaagaccaaaagtggtagaagagagcaaagcattgttgattatactatgttgatgctaaaaggaactttcagagactctgttatgaatacttactattttataaatgacacaatcagacgaaacaaagaaataaatatagttgaggttagaggaattaacctcaggactatttagggattgtgtcagttcagttgtttttaaaccctgaccacatattagaatcatctgaaggagctcttgaaacatactaatggtgaactctcattacagaacaatcaaactggaattgtagtgagatggacacagagtattttttgaggttccctacatgctttcagtgtgcagattgagaaatgctctctactgttacaaccaaattagttcacatatttcagtgcttgcatcgtttttgcacttcattttcctttatctcatagtaggaataatgctttcatatgtttggttatttttaaatattaaacttcttttgagaactataaa

SEQ ID NO: 504284 - DNA, 640 bp, Homo sapiens
tttcagtgcttgcatcgtttttgcacttcattttcctttatctcatagtaggaataatgctttcatatgtttggttatttttaaatattaaacttcttttgagaactataaattgctacagggaacatattcacaatgatgaaatggcaraagtatttttgagggaaaatggaaggagtaatagtaagtcaaattgctcatggataaatcagctttgagcaaatatagtcaactttatgaatggcagtaaaataacaaatatatgttttagaaaatgggtggtgtaatacaaagttaaaattactcatggaaaacttagcagaaagcaattatcttcaaaacagtgtatgcatatttaatcattattccttcctgaattactggacagaacttactgaatatagctaattataacaaaaattaaaattatgtgaccgctacatctgagaatctaaatgacttgggctttccaatggaaaagaaacagtgtgataatgcacagactgaatgaatgtttaagtaaaacacttaaactcattttgaatttcaatatgaagattcagcagtgaaacttctcaagttttcaaaacaaaatagaagttaaaataaatgaaaacatatgtaaatagaattatacatt

SEQ ID NO: 504285 - DNA, 640 bp, Homo sapiens
tttcagtgcttgcatcgtttttgcacttcattttcctttatctcatagtaggaataatgctttcatatgtttggttatttttaaatattaaacttcttttgagaactataaattgctacagggaacatattcacaatgatgaaatggcagaagtatttttgagggaaaatggaaggagtaatagtaagtcaaattgctcatggataaatcagctttgagcaaatatagtcaactttatgaatggcagtaaaataacaaatatatgttttagaaaatgggtggtgtaatacaaagttaaaattactcatggaaaacttagcagaaagcaattatcttcaaaacagtgtatgcatatttaatcattattccttcctgaattactggacagaacttactgaatatagctaattataacaaaaattaaaattrtgtgaccgctacatctgagaatctaaatgacttgggctttccaatggaaaagaaacagtgtgataatgcacagactgaatgaatgtttaagtaaaacacttaaactcattttgaatttcaatatgaagattcagcagtgaaacttctcaagttttcaaaacaaaatagaagttaaaataaatgaaaacatatgtaaatagaattatacatt

SEQ ID NO: 504286 - DNA, 480 bp, Homo sapiens
tagtcatgggtatgataaacatctttaacacacactgccattgggaagattaaatgagatactactgtatgtaaagttcttagcatggtgcttagcatggagtgaggggtccaagcattgccaggyatcctaaataatgatgctatgtttatgcagcttttcacagttaggtatgtttcttcaagctctttaagccatttaatttctagaaggtcaagcaggcaagtgaaattcctaactgtcacatattacaaatcatatagcactccagcaacctgataccatttcgggtcatcccattccaaagaccaaaatctactttggaatgagatgacccaaaaatgtatgatgttagccacaaagttaccctcaatgataccatttaatgtgtgccggcacctgtgctgtgcctttgacatcttttttctctttaaatcctcacggctttccatattgaagatataattatccccattgtac

SEQ ID NO: 504287 - DNA, 480 bp, Homo sapiens
tagtcatgggtatgataaacatctttaacacacactgccattgggaagattaaatgagatactactgtatgtaaagttcttagcatggtgcttagcatggagtgaggggtccaagcattgccaggtatcctaaataatgatgctatgtttatgcagcttttcacagttaggtatgtttcttcaagctctttaagccatttaatttctagaaggtcaagcaggcaagtgaaattcctaactgtcacatattacaaatcatatagcactccagcaacctgataccatttcgggtcatcccattccaaagaccaaaatctactttggaatgagatgacccaaaaatgtatgatgttagccacaaagttaccctcaatgataccatttaatgtgtgcyggcacctgtgctgtgcctttgacatcttttttctctttaaatcctcacggctttccatattgaagatataattatccccattgtac

SEQ ID NO: 504288 - DNA, 612 bp, Homo sapiens
ctgctggtgtgtgtgtgtgtgagagagagatttcccccatcttcaatctgtctggtgtatttatgacattgaggggccctccaagtttgacagtcaccatcactaaagcttcttgagcccctgaggtcataggaagggaaggccaattctacacacacagttattgacggagcggggcagcacggagcacctaaagcactaataccttagtgactagggaggctgctctgcagaggggagaacgggacagatacggtcactgaggctaaattctaatgacctccattattcttctcttttaaaaaatatttaaatatttatttttatttgttaaactctttacctctaagaacaatattctgttctgttattaaaacgttctcatgaataccagctatcttagcatcatgactcaataatggattacgatctatagttggaaaaaaagatctgctttacaagaatttggcatttaagtgaagtcctgcaggtgaggagatgaagagtgtagggcaaacagcactcaaggctgtggggtccgtgtcggtgtgggtctataatgggaaaragcctgttgtgtttcaggacctagagaaaggccagtggggctca

SEQ ID NO: 504289 - DNA, 457 bp, Homo sapiens
ctgtgtgagtacacagcggagttaatgccatcaatgaactggccctgcaatacattaggaggtaggrgtaggtttcacatcccatcccattccactcagctattggcaccctatttccttgagtacctcccgtcttcagatttctttccaggacatggagaaatatgaaaaaagaccaacatttgagaaaaagagatagtcagaggaagaagataattggatgaagaaggaaagatggtgggtcacctttcaaaggttattagattgaaatttgaatttggtacatgaggatggctgtggaattgcttctcagcctttgggctaacatcaagtggataacggctgtggattcaaaagtatatataatactaagcctgtaacataatttccattcatggcctccacactctatatgtgtttatactaattaatgcctttgagtggagccattttcatc

SEQ ID NO: 504290 - DNA, 457 bp, Homo sapiens
ctgtgtgagtacacagcggagttaatgccatcaatgaactggccctgcaatacattaggaggtaggggtaggtttcacatcccatcccattccactcagctattggcaccctatttccttgagtacctcccgtcttcagatttctttccaggacatggagaaatatgaaaaaagaccaacatttgagaaaaagagatagtcagaggaagaagatamttggatgaagaaggaaagatggtgggtcacctttcaaaggttattagattgaaatttgaatttggtacatgaggatggctgtggaattgcttctcagcctttgggctaacatcaagtggataacggctgtggattcaaaagtatatataatactaagcctgtaacataatttccattcatggcctccacactctatatgtgtttatactaattaatgcctttgagtggagccattttcatc

SEQ ID NO: 504291 - DNA, 457 bp, Homo sapiens
ctgtgtgagtacacagcggagttaatgccatcaatgaactggccctgcaatacattaggaggtaggggtaggtttcacatcccatcccattccactcagctattggcaccctatttccttgagtacctcccgtcttcagatttctttccaggacatggagaaatatgaaaaaagaccaacatttgagaaaaagagatagtcagaggaagaagataattggatgaagaaggaaagatggtgggtcayctttcaaaggttattagattgaaatttgaatttggtacatgaggatggctgtggaattgcttctcagcctttgggctaacatcaagtggataacggctgtggattcaaaagtatatataatactaagcctgtaacataatttccattcatggcctccacactctatatgtgtttatactaattaatgcctttgagtggagccattttcatc

SEQ ID NO: 504292 - DNA, 457 bp, Homo sapiens
ctgtgtgagtacacagcggagttaatgccatcaatgaactggccctgcaatacattaggaggtaggggtaggtttcacatcccatcccattccactcagctattggcaccctatttccttgagtacctcccgtcttcagatttctttccaggacatggagaaatatgaaaaaagaccaacatttgagaaaaagagatagtcagaggaagaagataattggatgaagaaggaaagatggtgggtcacctttcaaaggttattagattgaaatttgaatttggtacatgaggatggctgtggaattgcttctcagcctttgggctaacatcaagtggataacggctgtggattcaaaagtatatataatactaagcctgtaacataatttccattcatggcctccacactctatatgtgtttatactrattaatgcctttgagtggagccattttcatc

SEQ ID NO: 504293 - DNA, 432 bp, Homo sapiens
agctttgagacctgactcaggtatagggtcaggggggaggatggcaaaggggtcagaccaattcccagccttcatctcaatgaagagaatgtgagatagcatgattagtcttcattcattcatttattcattcatcctactttgttgagtacctactgtgtgccagccagccgcagcatgaggcactgggatcatgatgatgagcttagatattgtctcctgtttctgggcacttccagtgtcttgggggaggcaattcaatcagcagtgactgtgttattaggtaagcatccttctggtttggagaggtcagggaggacttctctggaggagggggaacgtgagctctgcctatarggggccaagtgaaaggcacactgaagagagaactaaataagcagctcacaggggaaccatgtggccttttggggg

SEQ ID NO: 504294 - DNA, 608 bp, Homo sapiens
gtttactatatgtagacagggttatacgttttaaatgtatcatatctgtgagctacaactgaggctcacagggattaaagcaacaagtccatggtcacactgctagtgtatgcaagtctcagctcatgtctattggacctcattatccattgcccatttacttctagagacatgcctagcagctctagtaggaatcaagcacattgattcagggtaatctgagcattaataaagtcagccctttcaaatacacatgttttgtttgcacaaccaagtacagctagaagagggcagatttgcaccttgacctagaaacccctcttcctccaccactagagaaccaatatgaactatttcctccaaagtacctttgtttttatccttcttagagaacaggtgaatggtctctgatttaagaaatggcccctgccttcaaggtgcttatagttgagaaagatagtatgtacacatgaatwaataaagcatttccatgcaataaagagaaaagataagttgcccaatggtagataaagacaaaatatatagttctgtagaggctactagatttaattggttacacggaactatgagagaaacaccaagacaga

SEQ ID NO: 504295 - DNA, 414 bp, Homo sapiens
tttatttttgtattttttggaggtgggttcttgctacgttgcttaggctggtttcaaacttacggcctcaagggatcctaccttggcctcctaaagtgatgagattacttaaggcataagccactacagatagccaaaattctattttattattattaacttttcatttcctgtgctgaaacaaattgctctccacctgttgttggctactaaataaaatacaggsgtaaccttgcatttagtggctctgatgtatggatatacataaataaatatattttattattatctttaatgtctaaaaaaacactgaatgaatgagattgtcccactttggataagaggcaatgtggtaaaatgtctgctagacctaagcagattaattttctgatcctatattctttggagcatgtt

SEQ ID NO: 504296 - DNA, 616 bp, Homo sapiens
acagcgcaacacaccctgtggccgtctgtgtccagagtgctcttcaggctcgaccctgacccatccttcctcagtgggtggcttccctgcaagaactccaataactccagccagaagctcagggacagaccccagaactccctaggcctgagcccctagctgcagggtggccacagtctctggaccagcagacttagcctctcctcctgggagttctgaggaacccaggcagcccagacacatgtgcttccctgcagtgaaacacaccctctccaccaagggacaaagtgcttcattaaacggggcctgctgtcaggcctctgagcccaagctaagccatcatatcccctgtgacctgcacrtacacatccacatggccggttcctgccttaactgatgacatttcaccacaaaagaagtgaaaatggcctgttcctgccttaactgatgacattgtcttgtgaaattccttctcctggctcatcctggctcaaaagctcccctactgagcaccttgtgacctccagtctgcccgccagagaacaacccccctttgactgtaattttcctttatccacccaaatcctataaaatggccccacccctatctcccttc

SEQ ID NO: 504297 - DNA, 585 bp, Homo sapiens
tctctgtctataaattcaactttcctcccaccactgactttttcccatgagtacttaaatatattcaagtctctcccattgttaaaaaatgggagagtgacttccagcatgacagtatgaggactcccagtactctcaaggaaaactgttgaaaattatagacaacaacaaaacatcwacagtctctgaaaatggtccattggcaaacagcaaatgaagaaatatctttcaagagaagctacgaaaattcagggagacaagtacctgtgggatttgaaccaagtctgctctctcctatccctcccagctcagaaagtcaagagactccacttgggatgtcttcatttttctgctggagaagcaggacaaaagcagatggttatgggccatcgctagcattcagagccgtggaacacaatctctttccaaaggagccaaacctcatttgcacagaatatgaagaagcttaaacctaagggagctctcgggagcattggaatttgtggtgaaatgcaactgggaagagattcaagacacaggtgaacctgtaggttactggcttgcagggaagaactagggaataag

SEQ ID NO: 504298 - DNA, 560 bp, Homo sapiens
caccactgactttttcccatgagtacttaaatatattcaagtctctcccattgttaaaaaatgggagagtgacttccagcatgacagtatgaggactcccagtactctcaaggaaaactgttgaaaattatagacaacaacaaaacatctacagtctctgaaaatggtccattggcaaacagcaaatgaagaaatatctttcaagagaagctacgaaaattcagggagacaagtacctgtgggatttgaaccaagtctgctctctcctatccctcccagctcagaaagtcaagagactccacttgggatgtcttcatttttctgctggagaagcaggacaaaagcagatggttatgggccatcgctagcattcagagcygtggaacacaatctctttccaaaggagccaaacctcatttgcacagaatatgaagaagcttaaacctaagggagctctcgggagcattggaatttgtggtgaaatgcaactgggaagagattcaagacacaggtgaacctgtaggttactggcttgcagggaagaactagggaataagaca

SEQ ID NO: 504299 - DNA, 593 bp, Homo sapiens
ctcaagcgtggcctggcaccatcaacatggtaaggaacaggttccagacagggaggcctcccacatttgatctttcatccatgctggttttgttctggaagtcacaccctgtgaagatgaaagaaggcttctgccatctttcstcttggttccatgggcttctgcccactactgggtgaaagctccaggaagtggagaccatcttggcatgatatgaggatactagacattgggttgttccaataaagatgtcaaacattcccaaccttcaccatgtgcagatacctgtaatgcgaggcaagtaaatgcatggacactgcagagcctgtctgtgtggaccaatgcccaccagcctcagggtggccattccctcttggggacctccccctttcagttctgaagaaagatcctatctccaacacaacccagggagacagaaaacatccaaaatgattctggcacaggctgtgtggaatgggagctcagaatctaagcagactcacagagaaggaaaaggctgttccttacacctgagtcttttacctgagacccagacacacttaacctaagagttggaaacacttccaaacaag

SEQ ID NO: 504300 - DNA, 588 bp, Homo sapiens
tctttctatcaggtaagcaagtgctttcctctaaacccaaccagttggaaacccaaccatttccatcaggtagactggatcgtcgtccagcatggcacatgcagattggtgaatcacaagtcagggaataacgggcttttaccaattgcatttcatccctgggtgctaggaattttgtctgtcttttctgaaatccagggtctcaactgctccctgataaaccaagattcagtctgcagtaggtgcaagggtatgcagtggacaacatctaagaagctgggctagcacctgcccgttgccttctaggctctggatgccaattttttgtatcttcatttattttcctaaagcatgtcattcctgtcagttctgtcttctgaaattctcatcagcctcccactggcctcataacayaggtaagctactcaccctggcagcccccagggctggccctcaccttcatccccagcctcttggccaccggctctcctggacacactggggtatctgtgcccggccaacacccatgctgctcatccagcccagaatgccctctttgcacttttccttaatcctcctaaaaaattt

SEQ ID NO: 504301 - DNA, 637 bp, Homo sapiens
ctgatgctccctggaaagtgccatctcctggcaggtggccaaccatcacaaaaataggatattaaaccaccaaagctaagaatccttgcagagtccatttgaccccaccaccagctccaggagaacaggtgctggtgtccacagctaagacacccatagatggtttacatcacagggctctgtacagacaatacccagtaccagtctggagccaggtagacttgctgggtggctagacccagaagagagacagcagtcgctgcagtttggctggcaggaagccacagttataggaaaagcaggagagtactgcwacaatggaacacgccatgagacaaaagaatctgaacaacagcctgcagccctagaccttccctctgacagagcttacccaaatgagaagaaaccagaaaaccaaccctgctaagatgaccaaacaaggctctttaacaccccccaaaaaatcacactagttcaccagcaatggatccaaaccaagaagaaatctctgatttacctgaaaaataattcaggaggttagttattaagctaatcagggaggcaccagagaaaggcaaagcccaatgtgaggaaatccaaaaaacaataaaagaagggaagggagaaatattcaagg

SEQ ID NO: 504302 - DNA, 555 bp, Homo sapiens
ccaaaaccaagttctgggtgtgagggtttcctggctggtgatgctgttgaacccacactggggaacacatactgccaggctgctgctatgcagaagggaacaggaagagggagaggcctggcccagggctgtggagaaggaggggtccttttcccctgagtgtggccaagcacctgcaagcctcctgggagtgggcctctctgcaggggctttgccttggcttccagccacctccatttggttctccagcacacaggccatgagygtggagctcactcaagactagagagctcaggtttccaagtggacagacattctgcaggatgtgctttgggaaactgaaaaaaagcagccctgatatttccatccacacactcaagtgaaactcagtgatttccttggtgttgatgcagaaccagaggtttgctttcacctgcacttcactcctcccataacctttgggtttgctcctgggaaagcagaaaagacacagtcccatctccaaggagcagatccagaggacgaggagacaagcaaggattcctggcatgtaaa

SEQ ID NO: 504303 - DNA, 555 bp, Homo sapiens
ccaaaaccaagttctgggtgtgagggtttcctggctggtgatgctgttgaacccacactggggaacacatactgccaggctgctgctatgcagaagggaacaggaagagggagaggcctggcccagggctgtggagaaggaggggtccttttcccctgagtgtggccaagcacctgcaagcctcctgggagtgggcctctctgcaggggctttgccttggcttccagccacctccatttggttctccagcacacaggccatgagcgtggagctcactcaagactagagagctcaggtttccaagtggacagacattctgcaggatgtgctttgggaaactgaaaaaaagcagccctgatatttccatccacacactcargtgaaactcagtgatttccttggtgttgatgcagaaccagaggtttgctttcacctgcacttcactcctcccataacctttgggtttgctcctgggaaagcagaaaagacacagtcccatctccaaggagcagatccagaggacgaggagacaagcaaggattcctggcatgtaaa

SEQ ID NO: 504304 - DNA, 555 bp, Homo sapiens
ccaaaaccaagttctgggtgtgagggtttcctggctggtgatgctgttgaacccacactggggaacacatactgccaggctgctgctatgcagaagggaacaggaagagggagaggcctggcccagggctgtggagaaggaggggtccttttcccctgagtgtggccaagcacctgcaagcctcctgggagtgggcctctctgcaggggctttgccttggcttccagccacctccatttggttctccagcacacaggccatgagcgtggagctcactcaagactagagagctcaggtttccaagtggacagacattctgcaggatgtgctttgggaaactgaaaaaaagcagccctgatatttccatccacacactcaagtgaaactcagtgatttccttggtgttgatgcagaaccagaggtttgctttcacctgcacttcactcctcccataacctttgggtttgctcctgggaaagcagaaaagmcacagtcccatctccaaggagcagatccagaggacgaggagacaagcaaggattcctggcatgtaaa

SEQ ID NO: 504305 - DNA, 558 bp, Homo sapiens
gtccctgcatcaccacgggacttgggctgttccaaaggtcctggtgaagatgaaaagggacctctgaagatgctccagggacccgaaggattcactgctctaagctgacactattgtaaagtaaaaatacaaggcactgagaagggctcaagatgaaggcaggactacaggaccagagatgcttccaggactgactgctgggaaacagcaggtacaaaatgagcagcagctacccagcagggtgccatgtgaccttagtgaccccagagtggcgctcagaagccaggacactgccctcacagagccagtggagggggcccacgcagcgcaggtgtgtgaagggtcaayaggcactggcatgctctctggcatccctcggctgggggcctcctccctcaggctacctggatcctgggctcttaccgctctccttgtcccccactcctacctaggttttgctgtcttttttcattcagttctccctctccctgtcataacacccctccacccttcacaagcccagatcccctcaagcccccttcccccgggaaacctttg

SEQ ID NO: 504306 - DNA, 662 bp, Homo sapiens
tgctttgtccctgcatcaccacgggacttgggctgttccaaaggtcctggtgaagatgaaaagggacctctgaagatgctccagggacccgaaggattcactgctctaagctgacactattgtaaagtaaaaatacaaggcactgagaagggctcaagatgaaggcaggactacaggaccagagatgcttccaggactgactgctgggaaacagcaggtacaaaatgagcagcagctacccagcagggtgccatgtgaccttagtgaccccagagtggcgctcagaagccaggacactgccctcacagagccagtggagggggcccacgcagcgcaggtgtgtgaagggtcaacaggcactggcatgctctctggcatccctcggctgggggcctcctccctcaggctacctggatcctgggctcttaccgctctccttgtcccccactcctacctaggttttgctgtcttytttcattcagttctccctctccctgtcataacacccctccacccttcacaagcccagatcccctcaagcccccttcccccgggaaacctttgctcatcattcaaccaaaaaactttttgtaacaccagtttactttattattatctactctcagcaagtttcaagaatttttaaggatacatcgttacaa

SEQ ID NO: 504307 - DNA, 568 bp, Homo sapiens
agttttggcatgtttactttcagatgtgcattacatgtccaagttcttgagaaaataagggagtatgttgkagccaacaatgaaggagggatttcaaacataatgcatgggcgagcaatggtggtgcacgcctgtgatcccagcactttgggagactgaagatcgcttgagtgcaggagttcaaggctgcagtgaattatgattgcactaccgcactccagcctgggcaacagaataagactctgtctctaaaataaaaataaaacataatgccagaactttcatgaatgtgaaccaataatgcatttctcagtaatgtaaaacaatgggaaaaaatgaccaaagacatagatcccaacaacaaagtgatgagactctatctaatagaagcctgtagaatagcaggttatataaagtcagagggtttacacagtttttttttttttcctaatcacttattcagcatacatgtattgagttcctcatgtggaccagggaggtgccttagaaggataataaagaaatgtgaatcacaaaccaactgcttataagcctaaacaaacaagca

SEQ ID NO: 504308 - DNA, 568 bp, Homo sapiens
agttttggcatgtttactttcagatgtgcattacatgtccaagttcttgagaaaataagggagtatgttggagccaacaatgaaggagggatttcaaacataatgcatgggcgagcaatggtggtgcacgcctgtgatcccagcactttgggagactgargatcgcttgagtgcaggagttcaaggctgcagtgaattatgattgcactaccgcactccagcctgggcaacagaataagactctgtctctaaaataaaaataaaacataatgccagaactttcatgaatgtgaaccaataatgcatttctcagtaatgtaaaacaatgggaaaaaatgaccaaagacatagatcccaacaacaaagtgatgagactctatctaatagaagcctgtagaatagcaggttatataaagtcagagggtttacacagtttttttttttttcctaatcacttattcagcatacatgtattgagttcctcatgtggaccagggaggtgccttagaaggataataaagaaatgtgaatcacaaaccaactgcttataagcctaaacaaacaagca

SEQ ID NO: 504309 - DNA, 568 bp, Homo sapiens
agttttggcatgtttactttcagatgtgcattacatgtccaagttcttgagaaaataagggagtatgttggagccaacaatgaaggagggatttcaaacataatgcatgggcgagcaatggtggtgcacgcctgtgatcccagcactttgggagactgaagatcgcttgagtgcaggagttcaaggctgcagtgaattrtgattgcactaccgcactccagcctgggcaacagaataagactctgtctctaaaataaaaataaaacataatgccagaactttcatgaatgtgaaccaataatgcatttctcagtaatgtaaaacaatgggaaaaaatgaccaaagacatagatcccaacaacaaagtgatgagactctatctaatagaagcctgtagaatagcaggttatataaagtcagagggtttacacagtttttttttttttcctaatcacttattcagcatacatgtattgagttcctcatgtggaccagggaggtgccttagaaggataataaagaaatgtgaatcacaaaccaactgcttataagcctaaacaaacaagca

SEQ ID NO: 504310 - DNA, 554 bp, Homo sapiens
agttttggcatgtttactttcagatgtgcattacatgtccaagttcttgagaaaataagggagtatgttggagccaacaatgaaggagggatttcaaacataatgcatgggcgagcaatggtggtgcacgcctgtgatcccagcactttgggagactgaagatcgcttgagtgcaggagttcaaggctgcagtgaattatgattgcactaccgcactccagcctgggcaacagaataagactctgtctctaaaataaaaataaaacataatgccagaactttcatgaatgtgaaccaataatgcatttctcagtaatgtaaaacaatgggaaaaaatgaccaaagayatagatcccaacaacaaagtgatgagactctatctaatagaagcctgtagaatagcaggttatataaagtcagagggtttacacagtttttttttttttcctaatcacttattcagcatacatgtattgagttcctcatgtggaccagggaggtgccttagaaggataataaagaaatgtgaatcacaaaccaactgcttataagcc

SEQ ID NO: 504311 - DNA, 351 bp, Homo sapiens
gaaaggtcgggttacccacaaagggaagcccatcagactaacagtggatctctcagcagaagctctacaagccagaagagagtgggggccaatattcagcattcttaatttcaacccagaatttcatatccagccaaactaagcttcataagtgaaggagaaataaaatccttacagacaagcaactgcaggcctgtttctaactctgaagttggaaatagcttgggatgtggatccataaaaggacagggcagcaactggtgcatttgtatgccaaggcctgagagtgcccagtgcrtgctctctgactttgagtgctgagctactgttggagcaatgtgggcccctcca

SEQ ID NO: 504312 - DNA, 571 bp, Homo sapiens
acgtacattgtattcagtaagtaatttctcagcttccacttcttctcacttgtgcccttccaagtctccggggtccatcatcacactctctacrtccagttgtacaccgtttgtaacaccctcttatgagtgagaacatgtgatatttgtatttctgtaactttcatggttacttttaattttcagtcttcttctactgtctccttctaagaagtatatgctctgccactagatggtgatataaagttaaagcagctttagtgtccctgtaaagacaaaaactctaaaaaagtatatagccaacaaagctagttttaaatgaaatactgcattaatttaatttgcattcatctccccaaatcttaactaatgattaagacaaattcaaattgtatattcattatgtgtttatttgtgacttagaatggatttcctatagaaattatattttggaacattaattagtttgcatgtctataaaaactatatatatattatagttgaattatccatacctgcatactgatacttaagtgtacataatactacaaaagatggctcttcaacatga

SEQ ID NO: 504313 - DNA, 571 bp, Homo sapiens
acgtacattgtattcagtaagtaatttctcagcttccacttcttctcacttgtgcccttccaagtctccggggtccatcatcacactctctacatccagttgtacaccgtttgtaacaccctcttatgagtgagaacatgtgatatttgtatttctgtaactttcatggttacttttaattttcagtcttcttctactgtctccttctaagaagtatatgctctgccactagatggtgatataaagttaaagcagctttagtgtccctgtaaagacaaaaactctaaaaaagtatatagccaacaaagctagttttaaatgaaawactgcattaatttaatttgcattcatctccccaaatcttaactaatgattaagacaaattcaaattgtatattcattatgtgtttatttgtgacttagaatggatttcctatagaaattatattttggaacattaattagtttgcatgtctataaaaactatatatatattatagttgaattatccatacctgcatactgatacttaagtgtacataatactacaaaagatggctcttcaacatga

SEQ ID NO: 504314 - DNA, 571 bp, Homo sapiens
acgtacattgtattcagtaagtaatttctcagcttccacttcttctcacttgtgcccttccaagtctccggggtccatcatcacactctctacatccagttgtacaccgtttgtaacaccctcttatgagtgagaacatgtgatatttgtatttctgtaactttcatggttacttttaattttcagtcttcttctactgtctccttctaagaagtatatgctctgccactagatggtgatataaagttaaagcagctttagtgtccctgtaaagacaaaaactctaaaaaagtatatagccaacaaagctagttttaaatgaaatactgcattaatttaatttgcattcatctccccaaatcttaactaatgattaagacaaattcaaattgtatattcattatgtgtttatttgtgacttagaatggatttcctatagaaattatatttyggaacattaattagtttgcatgtctataaaaactatatatatattatagttgaattatccatacctgcatactgatacttaagtgtacataatactacaaaagatggctcttcaacatga

SEQ ID NO: 504315 - DNA, 638 bp, Homo sapiens
ttcccctttgtattcagactaaaatgttgagtacgatggaggaaatattctgctaaaaaattcccagtgctgaggaatgttctgttattcattgttgtggtattttctccagcacatgctcaattgcttaattactatcagctgagagtgttcttacccacgagtagggaatcactcacagcctctgaacatacaagggttcagggaggatagaataaacacctatgtaactaataactagtatgtattaaaactcatgccatatggaactgtggagaagcggctaatctaatcccctcattctacagaagagaaaaatgagacagtgagtctttggttttgcagccactaaaagatggatgcacatcctgcaacttgtagagatgggtttctctgtraaatcagtgaggttacattaataaaattctatatttttgaggggaaatactggacagtttatttaaaagatgtaagtacaagaataaatggagaaacgagcagctgctgcaacagagtgataaacatggcagatagaagccgataaaacaaccacatgataaacagcattgatgctggatatcaatgaattcgcctcctaaaatgcctaagaaagtagaaagaaatacataagaagaaca

SEQ ID NO: 504316 - DNA, 631 bp, Homo sapiens
ataccttttgtgttataatactgttattaaagttttcaaagtaatcttgaagtagtattagattatgagagagcagacatctgaattatcaagtaggccattggctcatcaaagtattttgtattcagaaataagtaccgcctatatatgttggtgattctaactcctaatgaagaaaaaaaggacaagatttattagagtataaatctttctcagaagaactatcagcaattaattagaaaaaagaatatctaaagatattaattatactacgcagtttcagatgcaataagttacatctgaatatgaaacaagaattaccaagaaattaattggtaaaatggygtacatttaagatggctttaaatgctatgagtttaagtattttctcttatccacagagccctctagtggagtaaagatcatcaaatacacatctctagaaaaaaataaccaagctttagaaattgtcattttaattccaatgaatacaaaatccgagcttgggaggcatttctgggagaagtaaatactccatgtttaatctctttactggtgaaaaatatattttcttagcaaaaacatgctactttgggtaaaagacatgtaaatagattttttttaataagaa

SEQ ID NO: 504317 - DNA, 631 bp, Homo sapiens
ataccttttgtgttataatactgttattaaagttttcaaagtaatcttgaagtagtattagattatgagagagcagacatctgaattatcaagtaggccattggctcatcaaagtattttgtattcagaaataagtaccgcctatatatgttggtgattctaactcctaatgaagaaaaaaaggacaagatttattagagtataaatctttctcagaagaactatcagcaattaattagaaaaaagaatatctaaagatattaattatactacgcagtttcagatgcaataagttacatctgaatatgaaacaagaattaccaagaaattaattggtaaaatggcgtacatttaagatggctttaaatgctatgagtttaagtattttctcttatccacagagccctctagtggagtaaagatcatcaaatacacatctctagaaaaaaataaccaagctttagaaattgtmattttaattccaatgaatacaaaatccgagcttgggaggcatttctgggagaagtaaatactccatgtttaatctctttactggtgaaaaatatattttcttagcaaaaacatgctactttgggtaaaagacatgtaaatagattttttttaataagaa

SEQ ID NO: 504318 - DNA, 606 bp, Homo sapiens
caggcccctccctcggtctcaccaaccagccgtccaatccaccccttcctctaaggaccgtgttgcctagcaacggtatctaggaccagtcaagacccggggagacccacctccaggaggccctgtcgtcaggacaacaggggggtggggcgtggcctggggccgaccaaactcctgagcgcagaagggatccgctagccccgcctctcctgccctgggccccgccccacgttagccaggccgagaggaggccgggctgaagaggtttgtgggcgcagcgcatcctgaataacctgccttcctcgctcccctacgcccctcaccctacgcagtgcaaaggacgtcaggaackgggagtggtgaaagacatccgggtcctatcccgctcatctactccctccccccacttcattcgggaaagggttaaagtggggcgtgcccaggtccctgacgtcaatcgcctggtctctagactcccaggcggggcccgctttagcccggtcctaggggcttccccaattgccagggcaaccgaagccacgtctctatggcaatggggggaggccgccaagagcctccttccggggtccccaacctacttcctcc

SEQ ID NO: 504319 - DNA, 510 bp, Homo sapiens
gtacaaagcaaagtttcccggctttgcctgggcaggaggaatattttggttcaattcaaagcagacttgaagcctcattgcagtattaggctggagataattctgcgggggactctgtaagactggggggatgcaagaaagatgatatcctcaaatctggtggtattgattatgtctgtctgagaatgaatagaatcacaacctattagttgggagttttgttttttgtttctgaatctttgcattgacaaaggaatggttatttggactcttcaattcttaatttctcctaaatactgcctctaagccctgttgaaggcttggtatgaatgggaatgaaacagatctgacaatatgcaaggtggggagaatcaaaaaaagacaagctgcaygcttccacaaagctggtgggagtttctagtactcttagaaaaatataaaattcttacagattcctggtttgttatgctgaggggattgcaggccaggacctggttaatcactagactc

SEQ ID NO: 504320 - DNA, 601 bp, Homo sapiens
atagggagttagaatacatgggaaagtaatttgaaattccacaagtggaggggacaggattcaggaaagcagagctgctggtgtcagggtggctaaggagggattttggagagcaacaatgtctgtggattttaaattttagtggaaacaatatgcactccaaaatatcctttacaatgactyaatcactcttcagtatggaagaccaaggaaaaagtgaacagaagagaaagagaaaaaaaatggaaggaaagaaaaaagggagggagaaatttattaatttaggtgttcattatttacctttgaatatttctatttaaaccctatgctatatatgtttaagttgattttatctataccctaggaatagctaacatttgaagtgcccttgagaagatacacaccccagagggtagcactgaagagaaacttattagtagtcaaccgttcaatggcagccaagacaagtgatcaactctccttacctaaatctctacctagagactttgttggttaacataagaaatattataattttttattggtgaaatggatggtcttcaagacatgtggattggtcaaaagcatcacacaggaacag

SEQ ID NO: 504321 - DNA, 563 bp, Homo sapiens
gagctgtgcacggataatggggtgtagggagaggttgcttctgctwgggagcttggccgctaatagtttcagacctgccataactccttctccttgcatctacagcgataagaattcagatggattaattctgaaacgtgtttaaacttagaggattggatatttcagaggagtccctgggtggctgggtcattacccggaaggtgaatgcaacatttctccaaggtgacatgtttaatgtcattcttccctgctggatcctgaaggcaggacttgtacttggctgtaactgccaatgttcaatgaaatcatacatcttcacccacatgaaggataagctgaaccccttaccataggaattcatggaaagctgccgatcctgaggtgcccatgttcatgtagcccaggtcaccctccacagagaggaacacttgagtaaaacctatacagagatccgcatgcttttctgaagacacccacaaaagcgaaggcactctcaagagcatgggagggtggtgagagtgatagaagcagttactatgtctgacagatctagtttccag

SEQ ID NO: 504322 - DNA, 563 bp, Homo sapiens
gagctgtgcacggataatggggtgtagggagaggttgcttctgctagggagcttggccgctaatagtttcagacctgccataactccttctccttgcatctacagcgataagaattcagatggattaattctgaaacgtgtttaaacttagaggattggatatttcagaggagtycctgggtggctgggtcattacccggaaggtgaatgcaacatttctccaaggtgacatgtttaatgtcattcttccctgctggatcctgaaggcaggacttgtacttggctgtaactgccaatgttcaatgaaatcatacatcttcacccacatgaaggataagctgaaccccttaccataggaattcatggaaagctgccgatcctgaggtgcccatgttcatgtagcccaggtcaccctccacagagaggaacacttgagtaaaacctatacagagatccgcatgcttttctgaagacacccacaaaagcgaaggcactctcaagagcatgggagggtggtgagagtgatagaagcagttactatgtctgacagatctagtttccag

SEQ ID NO: 504323 - DNA, 563 bp, Homo sapiens
gagctgtgcacggataatggggtgtagggagaggttgcttctgctagggagcttggccgctaatagtttcagacctgccataactccttctccttgcatctacagcgataagaattcagatggattaattctgaaacgtgtttaaacttagaggattggatatttcagaggagtccctggktggctgggtcattacccggaaggtgaatgcaacatttctccaaggtgacatgtttaatgtcattcttccctgctggatcctgaaggcaggacttgtacttggctgtaactgccaatgttcaatgaaatcatacatcttcacccacatgaaggataagctgaaccccttaccataggaattcatggaaagctgccgatcctgaggtgcccatgttcatgtagcccaggtcaccctccacagagaggaacacttgagtaaaacctatacagagatccgcatgcttttctgaagacacccacaaaagcgaaggcactctcaagagcatgggagggtggtgagagtgatagaagcagttactatgtctgacagatctagtttccag

SEQ ID NO: 504324 - DNA, 498 bp, Homo sapiens
gctctccaccaacccagcaatcaacatcctcacgactctttccaggcctttcttcccttttccatcccaaaaatgaaaagccctaatggatcttctggaaattttttggctagagagctctgcttcccacttgtcccctgcagaagaaaaaaaaaaaagcaaccccattaacctttggggtcaaattgtcagtaaggaaagctcaggcattagaaatacagtgctagtctcctcctggctgcaatatgtgatatctaatatgtatcacataggccgggcacggtggccacacctgtaatcccagcactttaggaggctgaggcgggaggatcacttgrgatcaggagttcaagatcagcccgggcaaaatggtgaaaccctgtcttactaaaaatacaaaaaaaaattagccaggtgtggtggcaggtgcctgtaatcccagctaatggggaggctgacacaggagaattgcttgaacctgggaggtggaggctgcag

SEQ ID NO: 504325 - DNA, 621 bp, Homo sapiens
tttttgcccttcctacccaaaatatcgaagtaaagttgagggctccagtcaccaccacaaatcacgagcaaacttgaggatggaagccgtctgtagggcagtgcatcagaaagacagaaagaacctgggtccctgatgactctgtagtcagtcaccctaccagttttgaacagcctcgccagatttctcttatgtgagaggaacaaacatcttgctgaagactcgtacttaggtttttgtcccatacagtcgaacagagttctaagtgatatatttctctacttactaggctgtgtgaccctaggaaaggtaactccatctctttgggcttcaatttctggagactgggtaataaacagmggccacttagtgggatggctgtgataaatgagaggacatgtacttagggcagtggttctccaagttggtcccacattagagtcacctgtggagctcttaatctcttgatgcccaggccatacccaaaaactcattaaatcagaaattctggcagtaaaatccaggcatcagtgatttttaaagctccacaggtcattcaaatctgcagccaaatttgagccacacgggtttaggagacctcaggttgtttattgccgaggt

SEQ ID NO: 504326 - DNA, 655 bp, Homo sapiens
acatccactttgctgttaataaaagcaatggcagggcaataaaaagcttggctgacatgaataaagatgaagttgtgaatacttaatgacaaaaagccccagttaagagacacagacctggaataagttagttggaatacatgtgaatttccaccagtgaggggcaggacctgtaagtttcacagtaatgctgagcttcaaatgtgtgagttccataaattcactttcaaataagactttggggtttattttagatctggcatttaaaatgcaggagagatgcaatgctcatggatggcgtacttggtgtttctttatcaggtggtgggtgaacatgggttgacgaggaggccaagttggagatttatagaaattcaacccccttttatataaaggttaattccaaatgtaccattttagaaacctgtttaaaagtgttcatatccagaaagcaaakgagggattttatctaacaggaaggaagagagatacaggtggtaaccatattttgtttagggctcgtacaaatttgtagattggcaaacaggtttgtaagcatcagcttacaaactggtctttgggcaagtcctttccccactatgggactcagttttccaagcaatacactttttattttaaaatggatgtcttccaa

SEQ ID NO: 504327 - DNA, 574 bp, Homo sapiens
catcaaagggaaatagcaggatttctacttctccttcccgtctgggagaatctcctcttactcaatgcccttcccttcccttccctaggctgcaatccccttgactgctagggtgtcttctctacattctagaagaactttagggctggggcctactcggcttggcactagccatcaccctggataaaaatatactgacttaagatcccccaagatcgtatccttactagagcaaagcgttcaatcaatagcagctattgtgatcattcccttgtctaaagaaggtttctcctagactctctggaatacttcctgtttaactcaagactcaccctcatgtaagactttgcctctggggtcctcagttgagtgacaccagtccacacscccaaaccttcagcctctaatgatagagcccggagatctcccccagcccatgtgccacatctgcctcctttctgccgctgaggttcacctgcgcagccccagccccagccccagctctctgctcccctctggtggagccctgccgtactgccctgcctggcccctggctgacttcatgagctggaag

SEQ ID NO: 504328 - DNA, 599 bp, Homo sapiens
gggctctctctgctgcgataggctctactcatgggactttgccgagatgtccatttgggtttgcctgagcccttctcccctggaggttaggacagtcagcccttcctgaaggtgccatggggtagtccacacaagcctgctcaggtctcatggctcctcaatcccttgtccaggctaaccccagctccttccttctccccaactggagtcataagctgctgctgctcaggacaacttctgggatttccctaatcctaccctttagggtcaggaacataccacaattacaaatgccataaactctgggagatgagaaagtgccagtaccagcaccacacccatagaattgccctccagcgcccacggtgctccctgcaaaggccccagacccactggggaccatcagcccgctgcagtctaggcagtgtgctgaatacctgcccaacacaggcaccagcttaatctccttcaccatgcttactgctgtccagccctgatcaatgtctacgcatgccttgcagcagcagaccctgcaggggtctggcmctgcccacccaccgttggggaggcagtggatagctggaccactcctcagcctg

SEQ ID NO: 504329 - DNA, 512 bp, Homo sapiens
actgaaccaagatcacgccactgcactccagcctgggtgacagagtaagactctgtctcaaaaaaaaaaaaagaatgagagggaaggtgaggggaggacagagatgatcacaggcaggtggcaaagcaagcatgsggcaggagacatgcctgggacacctctcatggctgtgtggtctgagagcgttgaagaaaagacgttgtctgctgcatgatttcaatttgtggtgctaggtgagcccctctctcggagctcagttgtcagtgcaaactcccacattcatagatgctttgggtgtgtgcccagagcaagtggctttaggggaaacaggacgagcggggtcatgtgtagactgacagggcatagaacacagaaccctagaggcagagtcatgaggcccagaaaaccatgagcacatgcggtctctgggaacaccagggcttcctgctgagactccgggatcccacagggtatgaaaaaggtttcaagctctgcccgggccagatggtcca

SEQ ID NO: 504330 - DNA, 398 bp, Homo sapiens
ttattacatagttttctataagattgtaccccttttaaacagtgtctattgatatatattctaggtgtctggaagtctttttctacagtcggctcttggttgtctctgggaatatgaatggaaggagcrgagtgaaaataaatctgagggcaatattcataaataatccaagagctacactgtagtcaactctccccagagcctgaccacagtgtttccctctctcctcctcccaacccctgccactgcctgacgagcacagaaatgaccttgctttagagaggagaaggacaataggagaagaggcatgtttatcatcagccctgcagagttgaccgcgtgtatagatgcactgcccttccaggcccagagggagatttccccttcaggaacaaaaa

SEQ ID NO: 504331 - DNA, 625 bp, Homo sapiens
tgttgttgggtcggggacctggggtcagccaggtggtgacctgggatggggtggggacaggcaatgaggtaagctctgctctttatttttttgcagatgcttttctcaaactttcctgatcctgcaggcaagctaaaccagttttggaagracctgcgggagtcgcagcagctccgatgggatgagagctgggtgcagactgtgctccctttggttatggacatacaactcctgggccagaggctaaaaccccgggacccctgctgtccttcccgcagcttcttctcggagtctcagggcaaacccttttgagcagcgcctcccagtggccagaagctgaaatgacggcagtggtgccgcctggtgaatgaattggttctgtgacccgggaagctgtgcttggctctgatttcttttccggaggctcggaaacacttcctctcttcttctgttcttcatgccccatgcccctgctagcgtattactgttctgtgacttccctgtgacctctgcagtactccttatcctgcgtttggtctccaggtgtcacctttctgccgtgttcctaacattttgattcctgtcttgaaaaaagcacctgctgcatcgtaagcccagggatgtg

SEQ ID NO: 504332 - DNA, 444 bp, Homo sapiens
ctgcagcaggcttggctttgtgaggaaccgagtgtgtccacatacttgatacacacgtttttatttgcacaaagaaaatgctatttttggagccagagttttcatgtctgagtgatggcgatttccttaagaaccagaactgytggcagaaagggagcacccacacgcttagatagccgatgtcttattagagggcagtttgtagttcctgatttggaaattaacattctccaaacattccagtccagtgaaagttttatcagctttcccatatgaaacctcttcccttgagagtgacttgattctcacaatcccattggagtcgtgtgtgagtcctacagtgtgaggttcagcattgccatctccaagtgctcttcatagggaaacagtttctggtcatgacgaggttccacttcccatctgatcctggcctggcctggaaac

SEQ ID NO: 504333 - DNA, 717 bp, Homo sapiens
acttacatccagtattttcatggtttctaaccatgttgcgaactcctgtgggtcagggctatttaatacaacatttccactctcttcacatagtgttgtgctcaatcaatgtttgccaatgaaaattacaataaaatgctgcataagggactctaagtaaaactggggatttctctactggcttcctaccttgaaacctgtattccgtcccttcaaagccccttgctgcgttatgctatgcctcgtctgcagggagcaaatattctatgtgctccctacgtctaaagcccgctgctgcatcaaacatgtgcttcataaatgcctttctgttccacgattcacttcaatgagtttttatttaaatatttaatgacrtagtaagtggtgtaagtacctccttagggaatcttggtaaagtacagggatgtaatcaaatggtttgcaaattgtacttatttatttataactctaatttttttgttataaaaaatggtgccatggcactttttattttctttaatcagaaaaataacccctgcacttctgggatggaggccccaggtgagcaccggaggaaggggcctggatgagcagggagtgagggggcctggggcccagggcccagagcaaatgctgcaccagagcctggtcaggacccaggagggcctgagggagtggggtcctcatgagcaagtgctggggtctggaggtcagcag

SEQ ID NO: 504334 - DNA, 717 bp, Homo sapiens
acttacatccagtattttcatggtttctaaccatgttgcgaactcctgtgggtcagggctatttaatacaacatttccactctcttcacatagtgttgtgctcaatcaatgtttgccaatgaaaattacaataaaatgctgcataagggactctaagtaaaactggggatttctctactggcttcctaccttgaaacctgtattccgtcccttcaaagccccttgctgcgttatgctatgcctcgtctgcagggagcaaatattctatgtgctccctacgtctaaagcccgctgctgcatcaaacatgtgcttcataaatgcctttctgttccacgattcacttcaatgagtttttatttaaatatttaatgacatartaagtggtgtaagtacctccttagggaatcttggtaaagtacagggatgtaatcaaatggtttgcaaattgtacttatttatttataactctaatttttttgttataaaaaatggtgccatggcactttttattttctttaatcagaaaaataacccctgcacttctgggatggaggccccaggtgagcaccggaggaaggggcctggatgagcagggagtgagggggcctggggcccagggcccagagcaaatgctgcaccagagcctggtcaggacccaggagggcctgagggagtggggtcctcatgagcaagtgctggggtctggaggtcagcag

SEQ ID NO: 504335 - DNA, 717 bp, Homo sapiens
acttacatccagtattttcatggtttctaaccatgttgcgaactcctgtgggtcagggctatttaatacaacatttccactctcttcacatagtgttgtgctcaatcaatgtttgccaatgaaaattacaataaaatgctgcataagggactctaagtaaaactggggatttctctactggcttcctaccttgaaacctgtattccgtcccttcaaagccccttgctgcgttatgctatgcctcgtctgcagggagcaaatattctatgtgctccctacgtctaaagcccgctgctgcatcaaacatgtgcttcataaatgcctttctgttccacgattcacttcaatgagtttttatttaaatatttaatgacatagtaagtggtgtaagtacctccttagggaatcttggtaaagtacagggatgtaatcaaatggtttgcaaattgtacttatttatttataactctaatttttttgttataaaaaatggtgccatggcactttttattttctttaatcagaaaaataacccctgcacttctgggatggaggccccaggtgagcaccggaggaaggggcctggatgagcagggagtgagggggccyggggcccagggcccagagcaaatgctgcaccagagcctggtcaggacccaggagggcctgagggagtggggtcctcatgagcaagtgctggggtctggaggtcagcag

SEQ ID NO: 504336 - DNA, 606 bp, Homo sapiens
gtgtgactcagtggcccagtgtctgaattcatatctattgtcagaagtgtatttgattgggsaaaatcaggactatattgggacagattacctgagctatttgaggagtaccttactagatcaagttataaaggctgacaagattcaatattatctccctactagtgttttgcatactagttccattagggctgagaaataatagatgagcagaagacagagcagaagcaatagaatctccataggtaagttgggttctctttatagcaacctcaaagggactctggccaaagaaactatcttagtaaagctcaaggaccaatgggaggacacattattgcatcaaggtgaattgataatgtaatctgtaaggtaaaagaatgcaagttcctatatataccacgtggctgttcctgattaatgagtttgggcagtaccacttcatactacacttttgaacattgatgtgcttgggtgttctctgagctgtgacttccccaaatccttgtttgggctgcaaaactttgatcactgtggggcaacaaagcagaaccatacctgcagttccacaccttctacttacaaaataaccaggtgcatctcatc

SEQ ID NO: 504337 - DNA, 633 bp, Homo sapiens
cagtacatttctaaaagtattttatttgatattcttaggttttatagatatacaatcacacaatttaaaatgaacatatttgggtcttctccatttaaatattataaaattcaggtcttttctggtcattatattggctggyactctcagaacatcattaactcatggtggtcaagccagacgttcctaatttgttactgagtttaaggggaaggtatttcatgtttaatatatatagttctaaatatcatacaagaaaacaaaataatataatcatgagataaactctaagccctactattagttttgaaggtcatatattttagcatatttcaagtaattttttttttgctacatttaagtgggagaagtaattttggattactttttttatttacttgttcagagataggaagaaaatggtgaaattgctacttaaagcatgcttctgcttagctttagaaataatgacattctgctgaatggagcaataaaaacagaacctgcgcatgatcttgtatgctacaccagctgactaatccatctcctcagatggtttttcagagtccaaaaatgctacataaatttttttcaacctgtgtgagtggattattttgtggcttcctgaaataa

SEQ ID NO: 504338 - DNA, 633 bp, Homo sapiens
cagtacatttctaaaagtattttatttgatattcttaggttttatagatatacaatcacacaatttaaaatgaacatatttgggtcttctccatttaaatattataaaattcaggtcttttctggtcattatattggctggtactctcagaacatcattaactcatggtggtcaagccagacgttcctaatttgttactgagtttaaggggaaggtatttcatgtttaatatatatagttctaaatatcatacaagaaaacaaaataatataatcatgagataaactctaagccctactattagttttgaaggtcatatattttagcatatttcaagtaattttttttttgctacatttaagtgggagaagtaattttggattactttttttatttacttgttcagagataggaagaaaatggtgaaattgctacttaaagcatgcttctgcttagctttagaaataatgacattctgctgaatggagcaataaaaacagaacctgygcatgatcttgtatgctacaccagctgactaatccatctcctcagatggtttttcagagtccaaaaatgctacataaatttttttcaacctgtgtgagtggattattttgtggcttcctgaaataa

SEQ ID NO: 504339 - DNA, 459 bp, Homo sapiens
agctctgttgcccaggctggagtgccatggtggggtcttggctcaccgcagccttcgcttcctgggttcaagcaattctcctgtctcagcctcccgagtagctgggattgcaggtgtgtgccaccatgcctggctaatttttgtagttttagtagagacagggtttcaccatgttcaccaggctggttygagacctcaagtggcctcaagaggtctggcaggccacagcctcccaaagtgctgaaattataggcatgagccactgcacccagcctccatttcttctccattgttaaaattacacactttaaggtaccactcactgcagacctactgagcctccagtctctaagaagttgtttctagaaatacaatttttaccaaattttcccatgattttaatgtgaaaccaagtataagaccctccttattaaaggaacatgaagaacatgagagatg

SEQ ID NO: 504340 - DNA, 660 bp, Homo sapiens
atagcaacaataaatggagagttccaagccagcttcttggaagaagatactattactaaaaaacttgtttttctatgtagatattctaataagctaaaaacttctctaagccagcactggaataaatacaaagattattcacacatctaaaaatattacagtaacctgaaagataagtgaagacttctccccctaaggaatttcttgggcctgtcctaggagggctatctcctttgcaatatgttacgacaggaaatcgtccatttttgcttgtgtgtgtgtgtgacagttgtagaaaatatatactagcctaatagcrgtagtgtttaaatgtctgaatcccctgttagactataaactcattcaggtctgggagtcctccttagaatagtgtctgacacattggaaatgttcaataaataattgttaaacgaatgaatgaaacaaaaggcaaatgtctagatacctatgttgtgattagaaaaagatttaaacaaatgccaaaggtactttttttcctaccaagaggtcatcatttgcatacataacattcatacacagttccaagtcagctttaaatggctggttcctctgtgtgagccactgctatggtccctggtggtagactcccacaagctgcctcctatatgcagattaaga

SEQ ID NO: 504341 - DNA, 533 bp, Homo sapiens
tgacagtggtggaggtaagtctggagaggtgggcaggaccaggcgatgtggagctttgtaggcaaaatgaaaggtctgacattttatcttaactgtaatgaaaagctattgaatgatttacaacaaagaataagatttacatttttcaaagatcaatgttgttcaatgtatggaggataaattggagtcaagtaagtgaccaatcaagaggctattgctgtaaattagacaagggattatggtgttttgggtgagagaagtggaggtggagaaaatgaaggaattcaaaatgtattttggatgaagcatttycatgactgttgaggaattgggcattttggggttgaaggagatggttcatgcttgagcaattggctggttggaggagctgtttgctgaaatggggaccattgaaggagaagcaaaatttgatgggaagatttaaaaatatgaactcaggatatcctttctttaatatttagaaatataccaggattgtttttctgattcaactttccatattttctaagcag

SEQ ID NO: 504342 - DNA, 533 bp, Homo sapiens
tgacagtggtggaggtaagtctggagaggtgggcaggaccaggcgatgtggagctttgtaggcaaaatgaaaggtctgacattttatcttaactgtaatgaaaagctattgaatgatttacaacaaagaataagatttacatttttcaaagatcaatgttgttcaatgtatggaggataaattggagtcaagtaagtgaccaatcaagaggctattgctgtaaattagacaagggattatggtgttttgggtgagagaagtggaggtggagaaaatgaaggaattcaaaatgtattttggatgaagcattttcatgactgttgaggaattgggcattttggggttgaaggagatggttcatgcttgagcaattggctggttggaggagctgtttgctgaaatggggaccattgaaggagaagcaraatttgatgggaagatttaaaaatatgaactcaggatatcctttctttaatatttagaaatataccaggattgtttttctgattcaactttccatattttctaagcag

SEQ ID NO: 504343 - DNA, 556 bp, Homo sapiens
gctcctcccttcaaagtttcatttcattgcctgtctataagctgtcacaccatggttgccacttgactgttatgtcacccaatcctgttccacctgaacaaatttgtggcaatatgtgctgaatgctccatttctttgctctaaagtataaatgcactgtgcactactgaaataggagtagtttaagttggttgatgtaaacttatttaccatgaataatatagcaagtgctccactgatataaataaaatttaaagtttargattgacattttacttagaaataaaactagaaatttgcttcatccattctttttaaattttttaattttaatttttaatgtttgtggatacatagcaagtgtacgtatttatgggcttcatgagatgttttgatataggcatgcaatgtgaaataagcacatcatgaagaatgggatatccatccccttaagtatttatcctttgagttaaaatgtgaaatcttgtgatgatttgaacacggtggcatagttaattataaagaatatcaaatcctttatttgatatgtctatag

SEQ ID NO: 504344 - DNA, 600 bp, Homo sapiens
ctgcaaggtcactaggcagataaactcaagttgtaaaacatgttttttccttgaaaagtaagaaatgatgtaatgcatgtcttaattgaataactgtctttgtttctcgcttctgtaatatgcttccccctgcacagatctccccctgccccataaaatgcttaaaaggtaaccagactatttgttcgggctcagtctttttggatgttaatctgactgggccagtgcacctaaataataaataataagtatcctcctcaaycccttggtctctttgattccttaattatcccacagcactatgagatggggaaagatgaatagctgtcccgtcattgaagtccttatattttgagtcctttttaaaaattgaaaaaaaaaaatgtagcttgtcagagaccacacaaagccatacaggcttctgtcagagctctggaatttaatttcatggttttcatgtctccagccaggaggactggcttctcccagtccagaccattgtcagtgttttctccagtattaatggacaggtggctttccttttaatccctttttcagagtgacctggtactggaggctgaactggtccacccgcatacc

SEQ ID NO: 504345 - DNA, 425 bp, Homo sapiens
tttcctaatgctcactaaattgttttcagtgggactacagatgctaatctcgcccaacctccttctgttttcttattttgatgatatcaaatatttggctcagrggaagataattgggagttcccacattaattaccaggaagaaacagtcaaaaaaaaaaaaaaaggccaaatagcaacatccgcttggctttctgtttattgtaaaacactgtaatttcccaaggctggtttagataaatacattttgtccaagttcaggggccgctgttttcccttgcttcgtgaaattatcaataggcaggcctttgatcttcctgatccatgcagctttgctggcttttcctggatcaaccactccagtggactccctggcctgatattccttcatcttggcttcctggtgctccttctcctccttcacg

SEQ ID NO: 504346 - DNA, 425 bp, Homo sapiens
tttcctaatgctcactaaattgttttcagtgggactacagatgctaatctcgcccaacctccttctgttttcttattttgatgatatcaaatatttggctcaggggaagataaytgggagttcccacattaattaccaggaagaaacagtcaaaaaaaaaaaaaaaggccaaatagcaacatccgcttggctttctgtttattgtaaaacactgtaatttcccaaggctggtttagataaatacattttgtccaagttcaggggccgctgttttcccttgcttcgtgaaattatcaataggcaggcctttgatcttcctgatccatgcagctttgctggcttttcctggatcaaccactccagtggactccctggcctgatattccttcatcttggcttcctggtgctccttctcctccttcacg

SEQ ID NO: 504347 - DNA, 425 bp, Homo sapiens
tttcctaatgctcactaaattgttttcagtgggactacagatgctaatctcgcccaacctccttctgttttcttattttgatgatatcaaatatttggctcaggggaagataattgggagttcccacattaattaccaggaagaaacagtcaaaaaaaaaaaaaaaggccaaatagcaacatccgcttggctttctgtttattgtaaaacaytgtaatttcccaaggctggtttagataaatacattttgtccaagttcaggggccgctgttttcccttgcttcgtgaaattatcaataggcaggcctttgatcttcctgatccatgcagctttgctggcttttcctggatcaaccactccagtggactccctggcctgatattccttcatcttggcttcctggtgctccttctcctccttcacg

SEQ ID NO: 504348 - DNA, 425 bp, Homo sapiens
tttcctaatgctcactaaattgttttcagtgggactacagatgctaatctcgcccaacctccttctgttttcttattttgatgatatcaaatatttggctcaggggaagataattgggagttcccacattaattaccaggaagaaacagtcaaaaaaaaaaaaaaaggccaaatagcaacatccgcttggctttctgtttattgtaaaacactgtaatttcccaaggctggtttagataaatacattttgtccaagttcaggggccgctgttttcccttgcttcgtgaaattatcaataggcaggcctttgatcttcctgatccatgcagctttgctgrcttttcctggatcaaccactccagtggactccctggcctgatattccttcatcttggcttcctggtgctccttctcctccttcacg

SEQ ID NO: 504349 - DNA, 411 bp, Homo sapiens
tccctctttaaattgcttctttcttgtcttccttaatgaggtccagtaagatggccctgaggctgccccctgttggtgacaggcagcttgcacaagaatggctccccttacagacacctgttaagttctcacctcctgcaatcttcacaccagtcctgaggtagttagtgatgagaaaaccaastcacaggcagttaaacactttaaagccacttagttactgagccaggatcagaaccagcctagctcccgggccctaaccaatggctctgtgttgccttgctttccgcattgggtatggggctctttcctcacttacttgccttggccacctttcctcactatcagaggtataagatctatggttcagtgtggaggctaaagcaactgcatcttggatgctaacccacc

SEQ ID NO: 504350 - DNA, 411 bp, Homo sapiens
tccctctttaaattgcttctttcttgtcttccttaatgaggtccagtaagatggccctgaggctgccccctgttggtgacaggcagcttgcacaagaatggctccccttacagacacctgttaagttctcacctcctgcaatcttcacaccagtcctgaggtagttagtgatgagaaaaccaactcacaggcagttaaacactttaaagccacttagttactgagccaggatcagaaccagcctagctcccgrgccctaaccaatggctctgtgttgccttgctttccgcattgggtatggggctctttcctcacttacttgccttggccacctttcctcactatcagaggtataagatctatggttcagtgtggaggctaaagcaactgcatcttggatgctaacccacc

SEQ ID NO: 504351 - DNA, 411 bp, Homo sapiens
tccctctttaaattgcttctttcttgtcttccttaatgaggtccagtaagatggccctgaggctgccccctgttggtgacaggcagcttgcacaagaatggctccccttacagacacctgttaagttctcacctcctgcaatcttcacaccagtcctgaggtagttagtgatgagaaaaccaactcacaggcagttaaacactttaaagccacttagttactgagccaggatcagaaccagcctagctcccgggccctaaccaatggctctgtgttgcctygctttccgcattgggtatggggctctttcctcacttacttgccttggccacctttcctcactatcagaggtataagatctatggttcagtgtggaggctaaagcaactgcatcttggatgctaacccacc

SEQ ID NO: 504352 - DNA, 590 bp, Homo sapiens
ggtcatcttatgccaggagggtggaaggcaaaaatgagtatacaagacagaggggaaaaggaggctgaattcctgtgataactcatccatccccatgatcagggcattaatccattcttactcccaaggggaaaattaatttattgctgacttttaccacatagaatatttactgtttcttcacgaaaaagaataatgaacagactcaccatacctttgaggctttcccctttaaatctaawttgtcctttaagctgggagccagtactgtaagtaatggtttctgttgcaagcaggcaagttcagggctctgctcttatgagctaatcacctcttaaaggtgccacctctctacactgttggattggggattatcaacacatgaacttttaggggtcacatttaacccataataattactttatttttaattagagtattcctatctaacattgtattatgtgtttattgtgtatttacttgtttgccttctgcatttacatgaaagcttcataaaatcagcaattttattaattttgtttactctgtatcctcaactcccaaagagtatatagccatactaattgcag

SEQ ID NO: 504353 - DNA, 455 bp, Homo sapiens
gggtggttgtttcttttgtgcccagggcctttgcagactcagatccctctacctsggatgctgttccttggggttcctgctaaaatttcatctcttcggagaggctgctccagagagctctgagcgtcacaagtgtgtcttctgccaagcgcctaccccagcctgtgtgactgttcacctgactggccccagcgggacactgagggcagggggtgggtctgtctcgtttcctgctgaatccctcatgcccggaacaggaactgacacctcattggtgcccagcacgcttttgatgaacgcacgaaggtgtctcagcccgctctgaacaagcagctttctgcttatagataacacagatgccagcatgaggctgaagccaagcagagcagtgggaagtggagcgatgggaggtcatgttctgctgctcctcttagggcgacagagggtgccctgca

SEQ ID NO: 504354 - DNA, 588 bp, Homo sapiens
ctccttactccacaaccaagtggacaaatgtttgtgagtatacacaaccaccagaaagttcttttcttaatggttctttggatcccatcctatcctcaaaaacatgctctgatttttgtgattgactcttgagaatttcccaagtcacctacttgtcccagttacagaygaccaagtagagtatcatctacatagatattaaacttcatcactaagaacatactttttaaaaatcaggcttttaaaaaaatcccttctttctccctctctttccaatccttttaaggtattaagcagtatatgcaaataaatgtgtgaggcccaggcacagtccttcccttatggagctcaaagaatcaccctccttattctagatactatttctctaattatgcaacccaaaattccattagctttctggaaagccatctctcactacatattgagcctaccatttaccaaagctccctaatatatattttccctcttccagatggattaactaccctcctccccttctttccttcagtggatttttttttactttttccctccaatttcaaaagtaatatatgcagcatgcagaaa

SEQ ID NO: 504355 - DNA, 588 bp, Homo sapiens
ctccttactccacaaccaagtggacaaatgtttgtgagtatacacaaccaccagaaagttcttttcttaatggttctttggatcccatcctatcctcaaaaacatgctctgatttttgtgattgactcttgagaatttcccaagtcacctacttgtcccagttacagatgaccaagtagagtatcatctacatagatattaaacttcatcactaagaacatactttttaaaaatcaggcttttaaaaaaatcccttctttctccctctctttccaatccttttaaggtattaagcagtatatgcaaataaatgtgtgaggcccaggcacagtcctycccttatggagctcaaagaatcaccctccttattctagatactatttctctaattatgcaacccaaaattccattagctttctggaaagccatctctcactacatattgagcctaccatttaccaaagctccctaatatatattttccctcttccagatggattaactaccctcctccccttctttccttcagtggatttttttttactttttccctccaatttcaaaagtaatatatgcagcatgcagaaa

SEQ ID NO: 504356 - DNA, 573 bp, Homo sapiens
tgtgtggcagcccatgtctgtgtctgatacaggaacctgaagtctgcaggccaggcctttgactaaggaaagatgggcagaaaatgggggaagaaagataaactgaaatccttgcagtgaatgtcctggcggaggtcagacactgaggccgtggcagaatggactcagcatcacccgacttgtcattgagggtctttccattatgtcatggtgcctctttagaagcctggaactttttttcttccaaaataaatctcgagggcttcactagatctgtaggaactagaaagtgtcaatactcaatgagctttagttaaaaagtgatcttcttctggaatgaaatacagcaaaatgcatatagtagttatgaagtttaaggacttagagtaatacaaaaatttcctattctgctatgttttctaaatttcctataatgatygagaatgcatttaaaaatgaaacttaaaacaacactattattaaaaggaaaaagagaagccttgatgttcatctacgctgggtatccttctcaagcaggacagatatgaacttgctggttagctggtcctggct

SEQ ID NO: 504357 - DNA, 627 bp, Homo sapiens
gcacagagcttgcacttaattaaagtcagctcttgtcacttggtcatggcgaatacagccttcaaattggcttggagcagtgtctcagcacgacagatgtctgaagaaatgagcccagtctttcaggcttgacccagagcaagccagggatccccaagtacaagacagaggggctggtcagcagccaggggatgaagatggcaaagctcacccccttggctgggaacaagcaaatcgatggtgaaggaaagcctcaggtcctcaagcgctctaaaagccaataataaaatttaaaaatcaatgaggaagctgacggcaagccgatgacggggccagaggccaggaatgatgtgtctccaagtgaggagcaggcagacagcccaggcggcagggcttccaaccagaaccccagacccagagccccgagcatcctggcgcagacgcctgggatttggcagagatcctgcrtccctggacggcgcctccccacggatgcgggaagcacaagtgggaaatgaggctgtccaaggattaagacccagacccccagtgccgtactgttctattcttcctgtctttggaggagtgcagccaaagcctgggaaatcatattttacaacattgatc

SEQ ID NO: 504358 - DNA, 627 bp, Homo sapiens
ctttaggcctggccctgagaaattactcccagactaaggctgcagaactgaccccctagagagtcaccaccttggtcatagacagcaagcagaragggaggaatcaggaagtccctgctgtagttgctggatccagcggtgaatgttctgagctgtgatcctgggatcaggaagctgcagccactgccacagtgttggttctagagccaggcagcatgagatccagtcatcgcatccacactacagctataagaaggaggaagggcagaaggttgtgctccaccctttaaggacacttgctagaagtcagacagaacgtctggtcacactctgtttgacagaagttagtcacatgcaacatctagctgcatgggaggctgggaaatgtggtctttgttcccaacagctatgcatatacagggccaaaaatctccaggagtatgatgaagggaaaatgggggaatggagtttgggggtcaagagtggtctctgctgcacctccctgaacagagactctaggagactagtaatgaattcaagataaagcagccagtgtggccaaggttctccttcagtgcctgagctcttggccataggagctcacgcctcctctcctttcctgtgaat

SEQ ID NO: 504359 - DNA, 477 bp, Homo sapiens
tttctcaaaatggttgtaaaattcatgaagctataggactgggcaaaaaccatagggtctgaaagaattcagaaacttacatagttcatgtaatgaaaacatcaaagatattccctaaaatggagatgtttcacttagattggcatttctggggagtaaataaatggaggaaacaaaagagtcaggagcagaaggtcactatacaatctctaacacaaagacatgaccagagaaaatggagaataggagaaatgttagtaattaatataaatggttttcatgctgaaagyggtaattttttttacttaaagtaatgtatgagttggaataatatgacctgggaggcttggctaattcacaaattctctgagcctcagttttcttacttgttatatggggatcatagagtttttgtggggctgcttgaccagtgtcttgcatagggtaggctattgagcaccaaatgaataaacattg

SEQ ID NO: 504360 - DNA, 592 bp, Homo sapiens
catgctcaccactatttagagtttctcttgtctcattctccctttgtcccattctctcttcttcctctttagaattgcagaaatcaagttgctaaattttctctgttcagagaaattaatctgcatgcaatagctatattgtgctgcaaaagtgggcctagaaactagaatatggtctacatcacaaaccaagtacttttgaagggctaccttcttgcccttgtaattcactccacatcctaagaagcagagggaacaaggtgattaagtggataacatgcttatctgctgactgtttatgcattatgtttttctcttttgtaaaaaaaggaatacctttgatctttgaaagagaagaagctattaaggaacagtacaccrtgagaagattcaggtgcgttccacaaattgcatatataatttgatgatagcaattcacataaggccgttgattccatactgttgcctttggttcagaaagacttaattctttctgatacaacaaataacaaatctctgtttttaagagatattgagtgaaaatgtgagaattctttattactacccaaagactccttaatatctggcaagt

SEQ ID NO: 504361 - DNA, 594 bp, Homo sapiens
gggcatttgaagacttttgtgcatgaatgcagggtgaagagacttgagataaccctaggaagtgagcactgaggtcctacgtgcaacctgggcttctccctagaagccattctgccctcaaggccctggcactctggtcctgtggtgaacatggcagcctccaagatctctgaaatgcctctgggtcatcttcctattgtcttcgtaaatatcaatatygtgaaaatggccatacggcctgaagtaatttatagattcaatgctgtccccattaaactaacattgacattctccacagacttagaaaaactactttaaatttcatatggaaccaaaaagcaacctgaatagccaagacaatcctaagcaaaaagaacaaagctggaggcatcatgctacctgacttcaaactatactacatggctacagtaaccaaaacagcaagatactggcacaaaaacagacacatagaacaatggaacagaatagagaactcagaaataagaccacacacctacaaccatgtgatcttctataaatctgtcaaaaacaagcaatggggaaaggattccccatttaataaatgatgctgga

SEQ ID NO: 504362 - DNA, 261 bp, Homo sapiens
gcagttaaaggtctttctcaagaaatctcctatgtccccagacaaaataataataataaaggagaccaccacctacaaggtcaaaaatactgctgtaatacaatttaggaaattaggakaaatgttaaggcattctacttttatactggatttattcaaggctggtctctaatctctgtttccttgcaattttgctcatgtcacttcctattactgaaaatgatatgcaagccacatacctcctctttagagtaaattcag

SEQ ID NO: 504363 - DNA, 467 bp, Homo sapiens
tttcccagataccataagcagggtaagacagtttgcaccatgctgcctcaccatcagaatgccagcctagcttgtctgtgttttttctcactcagtcctgcctttcttagttgttcagactatggatttaaccagcctagggagtctccagtcacaaacctctagactgttcctattggtccaaaaaggggctgttggctttgctactcagggcatgtcccttactttgaggaactaggctttcctggtttgactgatggttccatctgtgggcatcctctctcattatcttcccacaygcctgcttgaccttcactgtatttggaagtccttcctcttctattttggttcagggttcagatgtctcttaatttctttcaagatagagttttgttcctgtttcttattctccttctcacttttgggtgatttctcagagaagagggaaatggtcctctttatgccac

SEQ ID NO: 504364 - DNA, 554 bp, Homo sapiens
ctaccaccaagcctggctaatttctggattattattaattttttaataaaaatggggtttcaccatgttggccaggctgatctcgaactcctgacctcaggggatccacccacctcaacctcccaaagtgctgarattacaggggtgagccaccatgcctggcccacagtgcccacattttaagtgctcaacagcctcatggggctgtttgctactggcctggacagcacaggtctaaaaaaagagggaatgtggttctgtccccacactcagctagagtttgcattcactctgattggagtgggttaggctacatgcctgtgactataccacacgaatctttaccgggctccagctctatgtctgtgactttacgccagtgactgtagccagaggtatggattgtgccaatcagctaaagttgggcatgactttggtatgcagaattatgtccccctccgaagatatccatgtcccagtttctagaacccatgaacacatttggctgcatgacagaggacaaggaaagttgcagattgaattaaactttctca

SEQ ID NO: 504365 - DNA, 554 bp, Homo sapiens
ctaccaccaagcctggctaatttctggattattattaattttttaataaaaatggggtttcaccatgttggccaggctgatctcgaactcctgacctcaggggatccacccacctcaacctcccaaagtgctgaaattacaggkgtgagccaccatgcctggcccacagtgcccacattttaagtgctcaacagcctcatggggctgtttgctactggcctggacagcacaggtctaaaaaaagagggaatgtggttctgtccccacactcagctagagtttgcattcactctgattggagtgggttaggctacatgcctgtgactataccacacgaatctttaccgggctccagctctatgtctgtgactttacgccagtgactgtagccagaggtatggattgtgccaatcagctaaagttgggcatgactttggtatgcagaattatgtccccctccgaagatatccatgtcccagtttctagaacccatgaacacatttggctgcatgacagaggacaaggaaagttgcagattgaattaaactttctca

SEQ ID NO: 504366 - DNA, 554 bp, Homo sapiens
ctaccaccaagcctggctaatttctggattattattaattttttaataaaaatggggtttcaccatgttggccaggctgatctcgaactcctgacctcaggggatccacccacctcaacctcccaaagtgctgaaattacaggggtgagccaccatgcctggcccacagtgcccacattttaagtgctcaacagcctcatgkggctgtttgctactggcctggacagcacaggtctaaaaaaagagggaatgtggttctgtccccacactcagctagagtttgcattcactctgattggagtgggttaggctacatgcctgtgactataccacacgaatctttaccgggctccagctctatgtctgtgactttacgccagtgactgtagccagaggtatggattgtgccaatcagctaaagttgggcatgactttggtatgcagaattatgtccccctccgaagatatccatgtcccagtttctagaacccatgaacacatttggctgcatgacagaggacaaggaaagttgcagattgaattaaactttctca

SEQ ID NO: 504367 - DNA, 554 bp, Homo sapiens
ctaccaccaagcctggctaatttctggattattattaattttttaataaaaatggggtttcaccatgttggccaggctgatctcgaactcctgacctcaggggatccacccacctcaacctcccaaagtgctgaaattacaggggtgagccaccatgcctggcccacagtgcccacattttaagtgctcaacagcctcatggggctgtttgctactgkcctggacagcacaggtctaaaaaaagagggaatgtggttctgtccccacactcagctagagtttgcattcactctgattggagtgggttaggctacatgcctgtgactataccacacgaatctttaccgggctccagctctatgtctgtgactttacgccagtgactgtagccagaggtatggattgtgccaatcagctaaagttgggcatgactttggtatgcagaattatgtccccctccgaagatatccatgtcccagtttctagaacccatgaacacatttggctgcatgacagaggacaaggaaagttgcagattgaattaaactttctca

SEQ ID NO: 504368 - DNA, 618 bp, Homo sapiens
acaatttttttttcctattttcgatctgaggttggttggatccatggatgtggaacccatggatataaagagcaaactatatttgctttcttctctgtgcaggggaagtaagtttgactagtgtattggtctgttctcacactgctaatagagacatacctgagactgggtaatttataaaggaaagaggtttaattgactcacagttcagcatgtttggggaggcctcaggaaacctacaaccatggcagaaggggaagcaaacacgtccttcttcacatggtggcagggaagagaatgagtgcccagtgaagggggaagccccttataaaaccattagatctcatgagaactaattcactatcatgagaacaggatgggggaaacggctcccatgattcaattatctccacctggtccctcccacaacatgtgggaattatgggaactacawttcaaaatgagatttgggtggggacacagccaaaccatatcaactacagaaggatgggtgtgaggggcatggagtgaaataaggaaactggtgccatcttgtccccttcctgggaagggatgattcctgatggagagggaagctcaaattccagggctcaaaat

SEQ ID NO: 504369 - DNA, 574 bp, Homo sapiens
taataccaaactatctctcatcattttaaaaggtcacttcaatttctgtacagatgatcttcacttctacttaggcctcaaccaacacaaatgaccatttactggacagaaacatacatcacctctaaaatcatagactccagtatgtcacatatgaccaatcatttctccctaccttactggcactacacttattctttgacatcaccaaatctccacactcacctcctctacatgacaagctttcaatatttgacaccatytgtggcttgctttgagatatctttcttttagttttcatcacctggtatcgtttctaggctgatcatcttagttctctttctctgtctttctcttgtgtttcaatgtttctgttaaaaatttagtatccagaattgacacattattacagatgtgatctgactaggagagaatagtgtaagacattagatctctttatcttagcaaaattcttctgacatagagaccacgattatattaaaatagttacagcaaatatgatttgtgtgatacacacactgaatttaccttcaacttaagggatctgaacagc

SEQ ID NO: 504370 - DNA, 624 bp, Homo sapiens
gaggaccgaaagtggcacagcatggcaagtctgtcatgtatcagaaagaactcaaagccctggcagggtgggcgctccatgttggagaccatcaagaaggtaacttcttaattttcatgtaaaaaggatatggtaaataattatttgacatattttagaaaaagggtttcctctttaatatttctacaaattctaagcacaaaacagtgtaatggggaaattaaatattgaaaaagaaaaaaggtgagagagtcatcaacatataaaaaggggaggcttccttatttatttataagggagttttaagcaagtaaaaaaaattgtggttgagatatacccacttgactatgtcattagcattagagatactgaaattgttttggtgcctgtcgcaaaatacaaaargcttttaaaaaaacacacgccatccactaaaaaaattaacagtagacttaattagcactttttcagttagataatatacatggtaagacactggatgtgatggcctttaatttatctcatgataaggataggattcataagtagataatatgttgcagcatttgtgaactatttggggtaactgattgcattattcctcttcactgtccatgtgttgct

SEQ ID NO: 504371 - DNA, 594 bp, Homo sapiens
tttcaaatagccagtgattaaatattgcacttgtattcagcattttatttgtattctgattctggaatatctaaaatgacatttatcttttggtattaccctgttktatgttttcttaaagcactttttgcaaactgatattatatcagtctttgtaatataaaacccagttgtaatttgagcccataattggaaaatctgccatagttatttactgtcatagttctaacaatgaattcatgtcttggaaggtttatataatagagagaatctagaaaatattgtgaattgacaatataattatacatataactcttctatgtgtatatgtaaatataattaacttactcttttataatttgtctttcccattacaatgttacttcatgagacaagaactatgtttgttttctgttgtattcctaatgaatggcatataatagatgcttgttaagtatttaatgaatgaactaatgaatacatgtgcatactgatgtaagaatccataagattcttctctgcatctgtaagtttagcagccttgtttttcttctatttacatgaaacataattatttgcatttaaattaaccag

SEQ ID NO: 504372 - DNA, 594 bp, Homo sapiens
tttcaaatagccagtgattaaatattgcacttgtattcagcattttatttgtattctgattctggaatatctaaaatgacatttatcttttggtattaccctgttttatgttttyttaaagcactttttgcaaactgatattatatcagtctttgtaatataaaacccagttgtaatttgagcccataattggaaaatctgccatagttatttactgtcatagttctaacaatgaattcatgtcttggaaggtttatataatagagagaatctagaaaatattgtgaattgacaatataattatacatataactcttctatgtgtatatgtaaatataattaacttactcttttataatttgtctttcccattacaatgttacttcatgagacaagaactatgtttgttttctgttgtattcctaatgaatggcatataatagatgcttgttaagtatttaatgaatgaactaatgaatacatgtgcatactgatgtaagaatccataagattcttctctgcatctgtaagtttagcagccttgtttttcttctatttacatgaaacataattatttgcatttaaattaaccag

SEQ ID NO: 504373 - DNA, 517 bp, Homo sapiens
ataccagtctgtcaatattattagcataaaagctcataatgcgttttgagtaaacagttgaaaggatgaaggcataaattaggggccactattctccctttctctaccttgctctccctaataattaaacytaaatgacttagaaatagagacatctaaccctgataaattatccccacacatcaatatttcctaaaatttatttttaagatttgtgtttctgccaataaatttttaaatatagatttgctgtcttttcaaattatattttattgggatatccttaaatgatgttaaattgttcttcatttaatgccttttacattagagacagagatacaggcatcaacagcttgaaattatcattgtttccagtaagatactgttgagatgatgcagcagttggattgatagaaatataaaaaagttccaaaataataatgtgcaatcaaaattattattaaaccatggacttgagccaaatccaaatagagcatttctattcacacaagtgtca

SEQ ID NO: 504374 - DNA, 457 bp, Homo sapiens
tagtaggagtcaaatatttgttgactactgaatacagyactttattatcctcagaccaataaaccacaataaagagaaaccagtttaaattgcaatattattatatttgaataattactcatatctttgaaaattagattttcttcaagattcttaagagatcactaaaagtggttgactgttacataatctgtttcccataatcaggattaaccagataacaaaaatcctcctccctcatttaagccataaaatagaaatcacctacccaataagtgggatgtaaaccacatactcaagagaatacagaataataaaccaagatttatgaaaaccaaagagtacagaaaataaaaaagagataaaggcattatatcctggggaaatttatttaatattaaattcaccatttatctttcttagaaaacattttccaaagcttaagatcatgtttata

SEQ ID NO: 504375 - DNA, 626 bp, Homo sapiens
ctgggactggggatatccagagaaatgtctcccctgctggcaagaggataaaataacccttcatatatcaagatggcatcttagagaacagaaggggaggtgaaatccaagagaccaaagttcatctacatacctggactcatttgaaaaggaatgacttttgatagggaattcagttttgaaaaractgcctttcgaaggggacattttccacgggacaggactaaaataccactattggtgagtcaaagtgttcccagccacccagctaatatgggctttctgaggaagagcagagcctttcgggggaaaaaagaaactttattttccctccacaactgactgtggtgtgagtaacaagccagccctgatacagatggataaaaataaagtcgggaattttcaagtactttcatcttaagtaaacaaccttaaaatagtcatgaaggcttttgaaacttttcagtggtcttctaactcttttataaaaatactctgggaacaagaagctgtgttgtgctatctctctggcattccacaaggagagaataaaagaccctgagaatgcctatggcacaagtgtctccatggaacccagcaggagaaactgacttgggagtgttggt

SEQ ID NO: 504376 - DNA, 317 bp, Homo sapiens
gacgaggagatcagctatcagtctcagaatctgtggaggtcatgtgggagctgatgatccatggtttcattcacagtgggtatgcatcaaaccctaaattggcatgcaaggcaaatgagaggaagttagttttctctgatgccacaatatagtggggaaaactaggacatagatttgcttttcctggtaagagagagaagcagaggaatagcaagacattgttttttttgttttgttttgtttttttttttttccaaaactcatttcaagkgaagatttgtttgaatggcaccagagttcccccaaatggccataaa

SEQ ID NO: 504377 - DNA, 507 bp, Homo sapiens
agaatttgtcgttttggggtcaggaaggaggggaagtaggaaaaggagcaataggttagagcctgatggatttttagatctagaaytgataacgtatgttgtatttattattgtttgagctcacttgttatgttgccatccatcttcctaaaatcttcagtgaattgtgcttcacacagacttcactggtgagtgtggctctatgtgccatgtaaatatgtttctatccagggagaggagtgagtcccatgtctgagttggtgtggactgcaaaggggctcctacccaaaggtgatcgtgagacagtcagcctctggtcatccacatgggttattaggggatgtgggatgctggcccaaggcaattctaaccagattttataggacagcacagacacagtcatcattctggattgcgttgaagtaacacttaagagggcaagtccttatccatctgtcactggttagagctatgcaatggctctattttccacttacattcactttt

SEQ ID NO: 504378 - DNA, 586 bp, Homo sapiens
tgttccattcatggtacaaatgcacctttatttagtgcattttatcagtcctcttcgaataaaggaacatctaggctgtttccagtcatttgctatgccctctgaagaaggaagtttcattttgccctaagcagtgacaacaaggcaggaagggagcgtctctccagtgcaatcccgctgagagatcccattgcttgcttctcttctgatccatgagacaggcttttggaatctcctcagttatttttctcagcctcgctcagaactacatgattggagggatgtacctcagcctttttcttaaaagtcattaacatgttgtgtttaagactctgaagctagactacctgggtccaagagctggttcttcccatttactattcagattttctctgcctcagagtggggataatcacagtgcacccctcacagggtttcacatgacttartgagttattatgtgcactggtgactcttatgatgtcctccatcttttggaggatattcagttaggaggatccaccaaagcaaataaaaggcatcttaatctcaataaattatgccctaaatattccaagtatggtca

SEQ ID NO: 504379 - DNA, 666 bp, Homo sapiens
gcctcaggaaacttacaatcgtggtggaaggtaaaggggaagcaaagtgccttcttcacaaggcggcatgaaggagaggaatgcagggggaattaccaaacacttataaaaccaacacatctcatgagaactcactcactatcacgacagcagcatagtggaaaccatccccatgattcgatcactctacttggcctctcctttgacacaagaagattatggggatcatagggactaaaaatcaagatgagattttgggtgcagactcagccaaactatatcactgaataagcataacaagaactggtcagattttattttgctttgagattttcaaggccagcctacttcatcgcaaaccacaaaatgacacaaataaaatcagaagtgcaaactgaagtcctggaaatgaatcagtactgatttttcttcaagtcaaaacttctcataaaaagatggtccctgtctcctatttaataataactaatcataaaaatttaacaatatgtaatgattccacaattcctatatatatatgttttgaaacctttaaaatgaasattttcacagtcaaatgatgaaaatatttaataaggatgaagtaaaaagaaccttcttcatcaatataggtgtatggaaataatcatatttcaaatctatgagata

SEQ ID NO: 504380 - DNA, 491 bp, Homo sapiens
gtaatagctctttctttgtggagacagagtcttgctctattgtccaggctgtagtgtagtggtgtgatcttggctcwctgcagccttgaccacctgggctcaagtgatccccctgcctcagcgtcctgaaccgctgggactataggcacatgccaatacccccagctaatttttgtgtttttttgtgtggaaatggggttttactgtgttgcccaggctggcctcgaactcctgggcctcagcaatctatctacctcagcctcccaatgtgctaggattacaggcatgagccaccatgcctggcttattaatagatttttaccacaaattctttatactgagaaacatgttccagtgctgcaaattacagtcatgctattgattccttcgaaaggtttaaatctcaaatttacatacatttatatcgacagacaataaagaaacaaaatgaataagctaagtgtacttttattttctatggaaaatgccac

SEQ ID NO: 504381 - DNA, 491 bp, Homo sapiens
gtaatagctctttctttgtggagacagagtcttgctctattgtccaggctgtagtgtagtggtgtgatcttggctctctgcagccttgaccacctgggctcaagtgatccccctgcctcagcgtcctgaaccgctgggactataggcacatgccaatacccccagctaatttttgtgtttttttgtgtggaaatggggttttactrtgttgcccaggctggcctcgaactcctgggcctcagcaatctatctacctcagcctcccaatgtgctaggattacaggcatgagccaccatgcctggcttattaatagatttttaccacaaattctttatactgagaaacatgttccagtgctgcaaattacagtcatgctattgattccttcgaaaggtttaaatctcaaatttacatacatttatatcgacagacaataaagaaacaaaatgaataagctaagtgtacttttattttctatggaaaatgccac

SEQ ID NO: 504382 - DNA, 596 bp, Homo sapiens
gggacggggggactggacaggagaaggggggttttcatggggaggaagaaggcaccaagagggctgaggctcacttcagatgggagcgaagttcccccgctgctgtgacaagcagaagagagagaagaggatgacttttgccagggttgaagggcaaagtcagatgattgagctcagccaggaatggggttttgttaatgtggtaaccaaaaggtagcagggtagggggtttactgtatagcaacagtcaagttggacctaatgcaaggttggaacrcacatctaggtccttcatcataggcaccttcaagccccactctgagcccccagaaggagttaccacaaaatcaaatcattcttggaaagaaaaatcctgttttcaaaaagcatctgcaggctccaccctacctcttggaccctctcgcccctgcctcctctatacaacatcagattaacctcctcattgcagattttcctccagcctctttcagttctgattgctgtcctcccggacacccaaacacacccacacactcccctgcaccccgcagtttgctcttgcctttcccactacaacgcatctcctcatctccatt

SEQ ID NO: 504383 - DNA, 231 bp, Homo sapiens
ctccctcaccactgcagtaacaaccactacaaatggagtgagtccaaacaacacaccttcattctctcacagttctggagggtggaagtccaaagtgaacctcaggggcaaagagtaaacyggctgtgtcccttccttctggagcccacagaggagctctgttctttgcctttgtaggttctggaggctgcccaggttccctgactgctggcacccccttgcggcactccc

SEQ ID NO: 504384 - DNA, 504 bp, Homo sapiens
aagggagctttcaaatgggagatggggaaggcacgagcagacaggatcagtcaaggaactatgtgacaaaaagaagaatagcaaatgagaccagggtaggcaaacaagtataagtggttttcaaagagatgaagctaggtttatacaatatactcaggctttgtaaaaaagcctgtgaactggagttttagaatgcctaaaagtcaacattttcccctygcatttttctccactaagtgaaaaaaagatttcctttctgctctaacgggctcttccattttcctcctacaggatggtttttgtgtgtttttgatactactgtctacctagtgccaaggaggatttctgagtagtcgaggacccaagtactgacatttacttaagaactatccatttactctgtgataacccagaatctagtggtctagtaaaactaacagagtatggatatatacaatgtacttgcaggtgaagtatatctgacaattcatgagaggcagaagg

SEQ ID NO: 504385 - DNA, 601 bp, Homo sapiens
ctggtttatgtctctctattcaacagtaccagtttaatttctagtaattgagtaggggggtgtggcgaggggaattacagttgccaaataggaaatgcagacaagggttttatttaatacaactcataaattacattgccaatatcctaaaggtaataaagaagtcaaaaagcactatttgtgaaaatcagtatatcatatgatggtaagcatagttgctattcaccaaaaacattcagaaaacattggaattcattgtctgaaaaagcttaggctcaagacttgaattactaagaaaagaaagtagtatataattatacaaagatgagtaataaycaaaaactgttctttaacgcatgtttgtttttcctgaaagccatttctaagttagtggtattgtgtaatgggaggtgtctcagaatctaggaaatgggatttttccagtttgagtccaaatccccattctttgtcattcctacctctgtcatgttcactgatccatgcagatccacactgtttccatgacactagccacatcctagtttcagaatcagtctacttctttctctgcaattttccaaagttcagtcttcaaagaata

SEQ ID NO: 504386 - DNA, 590 bp, Homo sapiens
gtttggatctatgtcctcacccaaatcttatgttgaattgaattgtaatctccagtgttggagctggggcctagtgggaggtgatgggattatggaggtggagttctcatgaatggtttagcaatctcctttgggactgtatagagataagagttctcacaagatttggttgtttaaaagtgtgtagcacccctattccctctgtctctcccatctgcttcagccatgtaagatgcctgctcccactttgccttccataatgagtaaattctccctgaggcctccccagtagcagatgctgccatagttcctgtacagcctgaggaattgtgagtcaattaaaccttttttcttataaaytacacagtctcaggtatttctttatagcaatgcaagaatggactaatacaaggtgccagatgtaaagttggaagcaaaccaggatttcctatgtacctgtgaacattttcaactggactgtagggagccagaatgcagatatttaacagagggctcctcttttaagaatccagctattacttccaacttgtgcttcacagattctcatagcttatttgggcaaagattga

SEQ ID NO: 504387 - DNA, 528 bp, Homo sapiens
gtcagcatctccactagtggctgctctgtgtgccccttatctcatggaaagtgccaatttactgagcacgagataaacaggtaactgactgttcccacctgctccttttctcctgcagcatggagcaatcagtcatgtgaccacaccctcctccctctgccccctccagccggcttttccccttgactgaagccttcaacatcatcttgggagagaggcacagacctgtctcctgggtgcatccttagccttggcaaaataaacttctccattgatcgaggcctgggtcgggtacttttttggtttgcagactcacccacatgcttttccagttgggccttgctcttctcttgtttgagtaatttgtttctgttcatgtgaggctgacggtgtcgcaactgttccaactcccatctctcagccagatcccttcattccccaaactgttctagatctggacttaytttggaaatcagagcctggcttgagtggctgaaaatctaagaacttctgggtaaagttaccact

SEQ ID NO: 504388 - DNA, 510 bp, Homo sapiens
taaaacaagctgagaaatttaagcctagcattatttctctcccaattatttacagcattcagtggtgaaagtctttgggtccatagcttgctttgtagaatggcttttaatcctagattcatttaatcagtatgatatatttgggacttttccttttcttggattctgtgtcttgacaaatatagatagttgtgtctccaccaacaccatcaatacatagactcctctcatcatcccacaaatttccctcatgcccctttgtagtcattccacatccccaccctarcccctaaaaggcactgattttttttgtcttattatgattactattgccataatatcacatctacagaatcccacagtgtttagtattttgccatataatatatgacttaaatagacccttcactaaagaacaaatatggatggcaaataaacacatggaaacatgtttcacatcatggatcaccaggacagcgcaaacttaaaccccagtgaactctccctata

SEQ ID NO: 504389 - DNA, 572 bp, Homo sapiens
catcatcacatagagagaactacaaagagctgcaaaaagtaaacagtatccayacattattggtcaaacacaaagtcctaggggtcaaggccggaagaacttcctgaggaaagagaaatcctggctatccaaccagcctctgactcgttcctccctggcactctcctaccccacggcctctcaggcactcactgctcccagcactccagtgtgcttggtgataacaatggtgaacaggactgacaaatcccttttcccttggagcttacattctcagtttcaatatttactgagtgtgttcgatggccaatatagtattttctttcctgagtgactcatggaagaaaggtgacaaggaaagtctagacaaggtctagtgctcagatgcagagggaagagtcagggcctctcaagattcccaccccactgccctgccacccatgccccgccctggccctgccacaccctgctctgcctgccctggctgtatccttacctgggcgctgatggtgctgcaggcactcatggctgcactgctgtcgttgatggcagggatggccactgtgctggca

SEQ ID NO: 504390 - DNA, 591 bp, Homo sapiens
gcatctacagctagagcaggaacatggctgatggagcacaaygcatcaccagtgaccaagacaaagggaagtctgaatggactgtcagtttggggaacacctgtaagatgcctgaaatttgagatttctgtaaccaaaagatctatagtctcaggatctgtattcaggtttttctgcatacagcatgacttctgggaagaatgttagaggtgggctgctcaggaggttgtggctgccttctctgcatctctcagctagacaaaaggcatagaacattggatttcactctctttacttttacgctttctggtgaaagggcaaaaagtagactgcagatgaacccaagagatgactcactatggaatgcttttcctttctatcatctctggagaaaggcattttatcccagcatctctcttactgcagaccattacccgaatacctgcagcccctctacttctaaaggcatccttgcagtgtgttcactgttattactcttgacaacagacgtgagactgagaatgatatttctaaaaataaaatggctccacgattgcactacttgtcccagaatcgcactatctcctgaaa

SEQ ID NO: 504391 - DNA, 591 bp, Homo sapiens
gcatctacagctagagcaggaacatggctgatggagcacaatgcatcaccagtgaccaagacaaagggaagtctgaatggactgtcagtttggggaacacstgtaagatgcctgaaatttgagatttctgtaaccaaaagatctatagtctcaggatctgtattcaggtttttctgcatacagcatgacttctgggaagaatgttagaggtgggctgctcaggaggttgtggctgccttctctgcatctctcagctagacaaaaggcatagaacattggatttcactctctttacttttacgctttctggtgaaagggcaaaaagtagactgcagatgaacccaagagatgactcactatggaatgcttttcctttctatcatctctggagaaaggcattttatcccagcatctctcttactgcagaccattacccgaatacctgcagcccctctacttctaaaggcatccttgcagtgtgttcactgttattactcttgacaacagacgtgagactgagaatgatatttctaaaaataaaatggctccacgattgcactacttgtcccagaatcgcactatctcctgaaa

SEQ ID NO: 504392 - DNA, 594 bp, Homo sapiens
tgaattatcctagaactgtgaagcttgtgtggtatatcataattttgtcacaagaaaattaaaaaggcattagcagtatgcaaaaagttgtatgttttcaatccacgcaataaaaataaatctaaactctttccctatgtatttgttattgcaatrccccatcaatcagtaagaaggaaagcagactgactaatgaaccatagtgttcaaaatggagcctactcttgcaggccctatggggactagtaagtattgctgacccacaaacacattcttcagaaaccatgagggtgctcactttacattccttcatgagttagttcaatatataattaatctagtttttcatttcaatttcatttacatggtattatatggtggtagaacttttggggaactgtataaaataacatttctttccggattcctccagacaagtcttttttttttccagctcagaaatacatatttgggaaaatttcagtttgggtataggctgacagagtaatggtttcatcctttagaactaggaccatattctcctttacatcatttgaatattaattttgctttgtaaaagagtatgcaaattga

SEQ ID NO: 504393 - DNA, 652 bp, Homo sapiens
gacagtactttggcgattccaaggattttaggagttgcatggcagcaaatgggatgaagaccaaatatatatttcacaaaataactggtgccatatactctggggatttccagtgctgtactttttatgctacatggcctaccctctttcacctcctgctctttgtacatggtttcctctgattggaggcctttctttctttcccacttattcatctttcagggctaattataaatcttccctaccactatattggtccttgttcaacatttttggagagattaattaccctcacttctaattcccataatacttttttyccactttttccattcagccagtatcatgattgtgtcattttcctcatgagactggctttatcatctttgcaacctcagctgggagcccagggcctgactcatgattgaagctccaagaaatgtctgcttagtgaacagatggagagggctttgcaaatgggaagagtatgagccaagttatggagtgaggagcaggactcaatttcagaaaagttagtgcctgcagaatttacatctacataaaagtatggggatttgcaaagtttaagacattgcagatagctggacatttgaattcttcagaggctagagatctcaccgatgtgacctgg

SEQ ID NO: 504394 - DNA, 652 bp, Homo sapiens
gacagtactttggcgattccaaggattttaggagttgcatggcagcaaatgggatgaagaccaaatatatatttcacaaaataactggtgccatatactctggggatttccagtgctgtactttttatgctacatggcctaccctctttcacctcctgctctttgtacatggtttcctctgattggaggcctttctttctttcccacttattcatctttcagggctaattataaatcttccctaccactatattggtccttgttcaacatttttggagagattaattaccctcacttctaattcccataatacttttttcccactttttccattcagccagtatcatgattgtgtcattttcctcatgagactggctttatcatctttgcaacctcagctgggagcccagggcctgactcatgattgaagctccaagaaatgtctgcttagtgaacagatggagagggctttgcaaatgggaagagtatgagccaagttatggagtgaggagcaggactcaatttcagaaaagttagtgcctgmagaatttacatctacataaaagtatggggatttgcaaagtttaagacattgcagatagctggacatttgaattcttcagaggctagagatctcaccgatgtgacctgg

SEQ ID NO: 504395 - DNA, 521 bp, Homo sapiens
cgattctgttctagaagcatagataaaatacctttctgtaaaaagcatatcagtacgttaataaagctgtagatatccttctggcagggcagtctctgtgtggaccagggatgtcactgccatttggcaacccttggctcagccctctagagagactgggccctcactattaactcacagaccatcagcccaccccaggccctaggccctcccaaaccccaaaactctgtgccagttttgacagtacaacaacctgctaaaaagtttgggtagttggagtggtcacttacacgcatgcctttcaacccccaaatcttaggattcgcagcaaagggtaagtcactccctccttctctatctcatctcattaagtcaccacactgcacttctcctagattttccactgatgycccttctcgcctccacctgcttttccttgtgcccactggagtctcccttcctttgtaaatgaacttcctacattctctagcctcttcagggaactctcttttctcatattc

SEQ ID NO: 504396 - DNA, 546 bp, Homo sapiens
gaataccaagaactgcccaagtttgaaggacaaaccgaaggtgatcatcatccaggcctgccgtggtggtgagtrctgatgcctttgagaacaccagacaatcaaatactatcctactctgtatgcatccaagaatttttggtttcttttggtttgtcttttaatgtcaaagaacacatactgtcagtattcaagaatgcagcttctgtgaattgaatggctggttggtagatatttaagcttgagattttgatgtttggaaatttttacaatttgtttgatggttagaaaagataaacattgttgaaaagattgtaactgaaatgcatgtgtgtatttgcatgtgaattaatgatagagcaaacacattaataaatatcattgaacagaggctaggaggaaaacatcttctcagccattggtagtagtaacaaatcaaactgtgtctttccagacagccctggtgtggtgtggtttaaagattcagtaggagtttctggaaacctatctttaccaactacagaagagtttgaggatgatgctatt

SEQ ID NO: 504397 - DNA, 529 bp, Homo sapiens
agtaggtatttgtcctgatttcctcctggagtgtgggtctggctttttgtttttgttttttaacatgtattgactacttcctcactttcacacatatacatatattacttaagtctcaaaacactgctgaaaaataggtatttatatctcagttttaccaaggaagaaactgaatcagagaagttaaggaactcacccagagccacacagtgagagrcagaagcaagcctggtacccagattttctgactccaagtgatattctctttcaaatacatcttcactaagcagccccagactcattcttgttctatgtctttcccatgccacactgaagcatggcagataaatcacttgtctgggcataactttgttcatccagaaggcagctgtgctaagagcctacctctggagtctgagcaaattgggtcttattccttaagtagtaatcctcgaaccttagtctcctcagttgtcacaagaggacaaaaacatcaaccaacaggattgctgtaagggttaaaagagat

SEQ ID NO: 504398 - DNA, 629 bp, Homo sapiens
cataaggtgtccagtacacaacttcagaccatttatgaascagatcactgagtattaaatcatcttgaagaaaaatagatgttacttaggactgttggactgcaacagtgtccagagcagcaatcccagaagaagcctggtagacccaggaagtaaacgctaaatcattttatgtatgtgtgaaatgtccaattgaaacagaaatatcgataaaaatgatttccagcaggacagagatagaataaaagagaatttctgcctatcttcaaatgaatcagactcttacttttgctcatagttttgtttcacctaaaattgtaggatgaggcagaggcagtaagctttcaaaaaatgcccatcgtatctctaagtagaaattaggaggcattgtgctctcagatctactctgttgtattgatcttgctctttgtaagtatacacaggcagatgccacaagcacaccacacacacacaaacacacacacacagatttttttttgttgaaatggaggaaagtaaagagaaaaataaaaacaaaaaaactatgtttaggctgttttcctccactaagtaaaagttatatgttgctggttggtttatgtcttgccttagatctttgcttgaacttg

SEQ ID NO: 504399 - DNA, 447 bp, Homo sapiens
gtacacgtcatttttgctaataatgccyaaggactgtgttttgagatcttcagaaggtaaacatttaatgtggggctctacagattagattatataaaaacaggttatatgccttttatttcattcttagaggtatggatacaggttgtgccattttctgtaatacaagatttgtctgaatgcacatatttacatgggcatacatttaggaaaaaagtggttagttgtatattctgaaaaatttttctaaattttatctttttggtttaataattttgcattagtgactaactgaaggtttgtcttcctctgtactgttggaagaaattctttacaaaaagcagttgtgttttgtgcatgccataaagaacaagtaggtataaatgtcaagtcaatattacacaagacaagtaagtataagctatttatgggacactttaaactttc

SEQ ID NO: 504400 - DNA, 636 bp, Homo sapiens
ccaatggcattcaaatggctttaaatttaagtagccatctcatggtattgaatatatcaaaattactcaaatctttgggcatttgtgtgtcttgttgctttcccctggaatgccctatatcttccttaactttgaacccaacccgctcttcaaagttcagatcaaactgcatttcatccttgaagcacccctgactatactggacctcactatcatgctaccctccaaactacacatcaaagcacttaatcataaccatataatttagcatttaataatatactggaataaaatattcattactattttgcatgtaattgtcatatctgtaactaaattttaactcttaaaggatttcaggacttcatgcttcttccataggcttccagagcatacaacaaaattaaatatgtggactgacaaacttgaaacaactaattatcaaatatgtcaaaaataatcaaaaggctgggcacagtgactcacacctgtaatcccagcactttgagaagtcaagcaggaggatcacttcagccaaggagtttgagaccagcctatgcaacatagcragaccccatccctacaaataataaaaaaaattagctgagtgtgggggtgcacacttgtgctcccagc

SEQ ID NO: 504401 - DNA, 476 bp, Homo sapiens
tggcatgctcctggactatttggttgtgatggtcccctatgatctaccgaatgccttagcttagccttatggatcacgatgatatgatcacactaaattttctagcctatacatacctatacctaaatccacctgaacttattgtttcctatcccatactatgtgcttccattcgtctagcccatattccccacacttgtgctagtccccttactagcaggatgctcctttcttcatctcctattccactgacaaaatcccacccaactctcagagaacatsaaaaagtcatttcttaatgtacttcctcttaaagggatatatatcttaaattttttgaacctcctagagtagtatttttaactctattaaggcatttaacattctgcataggaaattccatctcctctcttctgtgtatctcctctgcaataacaaatgtaatttaattagcattttccttctttgagccatgc

SEQ ID NO: 504402 - DNA, 596 bp, Homo sapiens
gtgtccaaggaatggcctgatgaagatagcaaggaaaaactggaaaactgaataccaatttccaaatcttttaaactttattaagctgttgcaaaattcaggaaaaaatatgtaagatatatctttacttttaaatggcaacaggaaattcttgataacttcaaaatcatgaaaactagacgtaagtgctatatgcttgtatgttattcataatttataatttgcaaggccttatcttgtacattatttctttcaattcacaaaataatttggtgagatcagtagaattatcatctctacagaatcagcctctacaaatgaagcttaaagaagataatttcccacagttgtttaggtaggaagtggtgaaacctaaaatcccagtcccctaaaacaaagcccyttcccttgtatcatgtggttcctctcaaagaagaaaagggaaataagagtatcttgtgttacagagggagaaaaagtaacagtgactgcaaaatggacaatgactaaagcattggaatgacgggtttcatctctctttctctactcttctaaagaatctccacatttccccctttgaaaggaaaataaataaa

SEQ ID NO: 504403 - DNA, 621 bp, Homo sapiens
ggttaaatatttaagttagactgttattattgaatattttatataacatctaatataaacttgatcattaaaaaggaccaaggcaataattaaatatatctttaaatatttatgactgccacttttttgtggctgattttataaattgtagcatattttctctcaagtatttttaatgtttagtttatatggcatctcagacaaatatttggtctagttttctattcactttcaaaacttttattgagcacttacttatgaacaacgtattctgctaagggctaaggatacaaatcaaatagaaaagggccttttaygtcaaagaattttgtaggctggagaggaagatgagacagatacataaacaattatagtacaatatgatatactgcactaaacgtctatataaagtgctatgagagaatagaagaagaaattaagaagacatgtaaagggaattatcatcaaagcagtgactttgagtcaggtattagtagaagagtaggagctcaaagaaagagcaagccccataatggcagcatctttatcttgcacactagtctgtctcttgtgcctgtaacaatgccaggaactttagtaactatttttttttgaattttg

SEQ ID NO: 504404 - DNA, 535 bp, Homo sapiens
gcccaggacctgaccagtaagtcaatgctacataatttagcttcgtttttcttttttttttctttctaactttatttttacgttcaggggatgcatatgcaggtttgtcacatgggtaagttacatgtctcggggtttgatgtacaatttcatcaccaaggtaatgagcatagtgcctggtaggtagcttttcagtccttaccttccaccctcaaatagatcccagtgtctattgttcccttctttgtgtccatgtgtactcagtgtttagcccccacttataagtgagaacatgcagtatttggttttctgttcctacattaattcatttaggattatggcctctagctgcatcagtgatgctgcaaaggacatggtatcattcttttttatggctgcatagtattccatggtgtatatgtaccagcagtaccctatttcaagtatcawttccctcactcaacaacaaactctttggtactgcataaataaaacttgaaatcttaatgaattaacaacacaagtttacttttcg

SEQ ID NO: 504405 - DNA, 630 bp, Homo sapiens
tgcaaagaccctaatcccagatatggccactttcatgtgtccttgatggacttgaatccaggagagtcactaaccaaatacagttactatttccttctggggtatttacacagaaagcgatatattacaaatgtaaaatcttagccgtttctttgagaagtgattatacctggcctactgtatgaacatgattctttctaaaaaaaaatttaatcactaattttcctatttaaaattgtgacatgaataattatgttccatattcttgaggggaagccgtaaattccattgtaatatgtttgtgtaataggagcaatagctatattgtgctgcgaagtctggcattaaggcagtctaaaatattgcctgtacatttttttttaatgatctctttgcagagaaacagaacaaagactaaacctaccgcacattaaaatatatattaaggctatggtattcgaaacagtttagtacttaattcaggtagacatggaaaaatcagtggagctaaatagaaggttgccgattaaaataacagcgaagtaccagtgttagccaaatagcaatgcaaaggtcaaaaggtttgcgttttaacatgctgtyggtgaggctatgcgttaaggcagtttc

SEQ ID NO: 504406 - DNA, 577 bp, Homo sapiens
tccttgggactgggcaggaacttgttcaaatgttactgctactctatcctccttcctaaatcaggactctggacgctcctgggaatcactgtctgttgctgctctctgggagtgtgaatgaatcactgggtgagaatgtcagtagcacctgtgtgtgctggtctggggcgagaatcctgggccaaggggcagcggaggggagaaagaagcagatggccacgaggccagcaaggggctgtccgactcrtaccccacagccagcattccctgcctctacccgtacacttgttttggctgcaggaagctgttttaggtggaaatcatttgatgtgtgtaggtgctgtcttcccaaacacaccgtgctcgacaattgccccagctctgcaggatagactttttgtagctcttggtagctacccattttttcagcctctaaatagtggtggtgcctgttttaatcctctcatggatcgtgtaaagtaggtgatcttttccccattcacagatgggaaactgagcttcaggatagtcacatgacttgtccaagttctcatgattaggaaacgttggagctggg

SEQ ID NO: 504407 - DNA, 616 bp, Homo sapiens
cacactcacaagaatgctgagcttggtttagcgttctgctgtcgctggcttgacattcttaatttttgaacaaggggccctgcattttcattttgtactggaccccacaaattatgcagcyggtctcatctggaggtctagaatgatgctatgtcttatttgaccgtctgatatttaaaataacaatagagtcaacgttttaaaatcaggagagttcacacaacagtctggcttattttagaaaattagaacatcttgccactgtgagtctgcattcccacacactgccacatgggctggagctggagtcctctatacaggccacatccgccactgtccccaccactcctggaggctttggactgagtctctttgctcatttatagagcttccagcatggtagctgggatcatgggctttgcagccaggtatgtgttcagcttttctgttaatcatcacagtaacctctctcttagggtagtaaggattaaactagttaatataggcaaagcatctggaatatgttgcactgttattgctactgttctgctttatcctggtgcagaagctcagacccccagtctgagggctgcccctccgggagctggaagctgcg

SEQ ID NO: 504408 - DNA, 452 bp, Homo sapiens
taaaagacagccttataggagaagtaggccaccactagtcagaaaaaattactactttctcagtagattagctgaaaattggagaaatgttaagccacatgacgtttagtgacatggcatatttctgtgcacatctggaagagaaagagcaaaccaccccctgcaaaggtgaatttcacaaagaatatggaaacaatgagagcacaaccctgtcccttccagccactacaacataagatttataaaactgctacttctgttgctggtgagtaatcatgccacattgttctcgtataygaaaattaatgggacagatgctggctgcaaggttcactgaaattcaatataaaaggtgttttttttttctttatggcaatgagaacagaggtgtcctgctacatccaagttctaattctgaattcctcttcagagcaaaataacctttatagttt

SEQ ID NO: 504409 - DNA, 651 bp, Homo sapiens
attgaattcacagcagggaccactggggtttttatatagaacaagaatgggcaacgaatagtgaacaagaatgggaggagaatgaataaaactttaaaagaataaggcttttaaagttataaggctaaaatagttcatttatgatattaataaacctatggagacctcaaattattatcatagatgtttaaacagtatttgatgaaattcaaatccattcttgattaaaaacatataatgaaatatttctatctcaacctaaatgccagcactacrtttcaagggaaaagtctgtttttccaactttgattaggaaccaaaaaaatgccaaaaatttctactctagtttaactagttctggaggaaatagtgaatacaattatatcagagaaagaaagtaaaggcatacaaatttcaaaggaaaaagtgcagttcatcacctgtacatttatatttaggtctttggaaaacataaaataaccaattgctaaaatattttttttctaaagtgaaaaaatttagaagaggcccaagttaatcaatacaagtcaatagctttgatgcatacatgcaaaaggcccattttgaagacataaaaaagaacaatgtaggaataagctaaattatagatggtaaaagttattggaggaa

SEQ ID NO: 504410 - DNA, 668 bp, Homo sapiens
tttattatacctaaatatttttattttttgagtgattataagtgttactgttttcaattttggtgttcacatatatattgctagtatatagaaacacaatttattttgtatgtttatcttgtatcttgcaaccttactgaactcacttattagttctatgcactttttttatagattctttgggcttttctaaacagaaaaacctgtcatctggaagtagggactgttttctttctttctttgcagtcagtctaccatttatttcgttttcttgtcttcttggactggctagaacttccagtactatattgaataaaagcagtgagagcagaaatgcttgccttgtttctgagaatagtgaggaagcattcagtcttttatcatcatgtgtaatgttagctgtasgttttttgtagatactcttcatcaaactgaagttctcctctatgcctgtgtttctgagagtttttatcaggggtaagtattgaattttggcaaatactttttctatatcctgtgtagttttccaaacttggaaactcttctgcactctagctgccttcacatgggcaagtgttttcatatcattctgtgttcctctgtatgctttgccagaaaggagttcaccttaaattttaagacaatgttgtggatagagaaaagaaaaa

SEQ ID NO: 504411 - DNA, 604 bp, Homo sapiens
ggatccccagttcctctctctgtgggcctttccatgtgatttctctacatggggtagtttgggctttctcacaatatgtggctgtgttccaaggtctaacatcatgagagggagaacaaggtagaagttctactcccttttatgacctggactgtagcattatycctgttacgttctattggacgaaagtgagtcactaaaactggtccatacctcccaatggaggagtgtcaacatcacctataacatggccatgtgggttgggatttatcagtgtaactgtctttgaaaaatgtaatctgccacaacataaattaggcatatactttttaattgtaaaaatatgtctgttaaaacccaccaagaagcatgtatttctggatattgcacacaaataattatgccacttgcagactaaagtacttaagaaatatatttttattagtacgtttcttcttcaaatgacttttgtacccatccttttcatagtaacgtctcatcctttgttttctatagtgataatagcctggtaagtatttaacttttgaaactttggcaagcaaagttttcacctaaatatttttacgtattgaatggttatcca

SEQ ID NO: 504412 - DNA, 678 bp, Homo sapiens
gggggagctggcactagcccttgtgcccccaaatatcctggctgcattgttcccctgttcttagttcatttgtgttactataaaggaatacctgaagctgggtaatttataaagaaaagaggtttatttggcttggaggtctgcaggctatacaagaagcgtggcgccacatcatctgcttctgatgagggccttaggaagcttccacccatggcagaaggaaaaaggaacagatattacatggtgaaacaggaaggaagacagagcgggggagatgccaggctctttttaacagccaggttggcagggggtgtgtggggagactcttgtgggaactaatagagtgaaaactcagtcattaccttgaggatagcaccaagccattcatgagggatccacccctatgacccagatacattccaccaggccccacctctaacattggagattaaatttcaacataaggtatggaggggacaaatatccaaactctattatccccataaatggttaaactccgggagagacaactatgcacctctcaatcccaaggtgagttgggattcacgattggttaaaacttcatcagaaccatccacattggaaatcacatctaaaacttgagtaattttatggtttacaaagcatattgacwtccttgatttattcatgttgcca

SEQ ID NO: 504413 - DNA, 527 bp, Homo sapiens
tgcagcttttctcatgagcacaagtaatttagtgtgtagggcaggctggtgatggaaggagaacaattacttgtttaatgtcacctgttgaaactagaaatgaattttggcgagtggatccttggtcattgtatttcctgtaaagtcatgaatattccggagctaggctctggattaaattggtcatgaggatcaatgttaaggccaagtcttccctaagatttcagtttttctcagccgcctttataayagccaacatttgtagagcacttactgtactgcatatcatatacatttttttttttttgtttaacacttttattgaatcctctatgaagtgggtactattactattcccattttatagatgagaacatgaaagctcaaagtggtacagtctcttcctgggaagatgcagaaaatgagcctctaaaacctatgacccaccttgatttccccaagtgggcatatttgaaaatatctttgaaaaagtagctgtatgaagttttgaaaggccctgaacctgt

SEQ ID NO: 504414 - DNA, 404 bp, Homo sapiens
tggtgagctgggtaggagatgtctgagcttcagttgattccctggaacaacggtcttaatccaatcaaagtgttcctgaggcaagctgaatgctgaatctcaaggcttaaacaggcttacraggctatgaggagtaatgaagtcacaaataggccaagatccatttttccctgaggtctgtctttggcctgctcatctttcactcagcaaactctccctgagcaatcgtatgcatgactttagctacaaccttaaggctgatgacatattaatatttactttcaattcagatctctctcttgggattcagaattttatgtatgactacacatctttatctgaaatattctaaaagcaaaataaacttaaagtgattatgtccaaaaatgacattccctcctcag

SEQ ID NO: 504415 - DNA, 574 bp, Homo sapiens
attgtttcagattttgtagtaatggtcataacaattaagaatttcctgactcagaaaactgattctttgcttcattttatttgttagcaattgttgaatttttttatgctgctcataaaactggaggccaagacgagaaagctgacttgtataagttatgaaagtaaaataaacaatactttgctcttcccagaacatcctaaccccacatacaccaaagaaacaagagtgtcactgagtgtgaggttggggctctcatgcctctatygcacatcgtcacactgcactgcagttaaagccagtcttgattaaagttccttgtttgcgtgttctcatcacaagacaccatactccacactaaaaagttgagaagtcagccaaggtgccatttgcctttcatcactgtcttaaatcttggaagtttaaatttcagaagaccaaacagtaccacttgggattataatgcattatgtaaccaagtccattaactaagaaaggaaaagctaaagtgacagttgcctacctgtgccaaatgacctacaggtgctttaatttcactcaatttattttcagg

SEQ ID NO: 504416 - DNA, 566 bp, Homo sapiens
acattttaagcttaaacatttttactaatcctaaatggctcaattttgtgtctggttttcttcataccaccagatacagtttggcaagtgctcaaaggatgaattgataaaattaatacagaaacaactaaagaattctaaaaaatctaataaaatgattatatattataaaatagcaatgctcaaaatctggattgcatgtgctctcttataaaattatatagtgaaagcatatttatttgggtacagaatattcattcatttgaggcaaggtctcacctgtcgcccaggctagagtacagtggtgcgatcatagttcactgtaactttgaacttctgggctcaagtgatcctccagcctcagcctcctgagtacctaggactacaggataatttttaattttttttttggtagagatagaggtcttgctatgttgcccaggctggtcttgaactcctggcctcaagtgatcttctygccttggcctcctaaagcactgggattacaagcgtgagccagactgtatccggccaaaattttcattcattcctttatttattttttg

SEQ ID NO: 504417 - DNA, 520 bp, Homo sapiens
gacacccctgtgagaaagaaatttaccactagagtataccaattgtcttyaaccttatattatctatgaaaatactgttgcacagtgattctttgatcactttcatcagtttttgtacttttaagcgtatatattctgcatattttataagattatacaaagtatttcattttaaatgtttctattgttgattgatttttaagcttaaattccatttgttcatcgctatataaaattaagactgacattgtatattaccttgtatactataaactttgctaagctcaacttttagttaaaggactttttacatattatattggatattgatttataaattgtctatgattgtttttatgctacaaagtcagaaattaataattttacagagtttgtgtggacctcatagcccaatatgctatatagccttttatgtagttttaaaatacttactctacaggtttttaaattttttcctgtgatatttttgttagttttagcattcaggtaatgttgaact

SEQ ID NO: 504418 - DNA, 469 bp, Homo sapiens
gtcttcaaccttatattatctatgaaaatactgttgcacagtgattctttgatcactttcatcagtttttgtacttttaagcgtatatattctgcatattttataagattatacaaagtatttcattttaaatgtttctattgttgattgatttttaagcttaaattccatttgttcatcgctatataaaattaagactgacattgtatattaccttgtatactataaactttgctaagctcaacttttagttaaaggactttttacatattatattggatattgatttataaattgtctatgrttgtttttatgctacaaagtcagaaattaataattttacagagtttgtgtggacctcatagcccaatatgctatatagccttttatgtagttttaaaatacttactctacaggtttttaaattttttcctgtgatatttttgttagttttagcattcaggtaatg

SEQ ID NO: 504419 - DNA, 410 bp, Homo sapiens
tcacaatagataattcttgaatgtttactttttctaggcagaatttcaaaagctttacatccattatccctttcaatactcccaacaaaactatgagatgtatattrtgtagcaaagaatttaactttgccctaagaaaagtcacttttgctgttggctacctggagggatctctgagctcttggaatatcttgcctgataagagcatttttgtttacctgagggttttgattcacaccagaaggtctaacatgatttatgggagcattttgagtcacatggtattagattaacctctggagaggctggagatagaggtcagccacaagagcggttgaacatggagtccccataaaggggacatcttactctggacaccagccttgggtaagcttccctggttggcaata

SEQ ID NO: 504420 - DNA, 410 bp, Homo sapiens
tcacaatagataattcttgaatgtttactttttctaggcagaatttcaaaagctttacatccattatccctttcaatactcccaacaaaactatgagatgtatattatgtagcaaagaatttaactttgccctaagaaaagtcacttttgctgttggctacctggagggatctctgarctcttggaatatcttgcctgataagagcatttttgtttacctgagggttttgattcacaccagaaggtctaacatgatttatgggagcattttgagtcacatggtattagattaacctctggagaggctggagatagaggtcagccacaagagcggttgaacatggagtccccataaaggggacatcttactctggacaccagccttgggtaagcttccctggttggcaata

SEQ ID NO: 504421 - DNA, 522 bp, Homo sapiens
gctgaggcaggagaatcacttggacctgggaggtggaggttgcagtgagccaagatcgcaccattgcactccaggctgggtgacagagggagactcctctagaaaaaaaatggctgatctagagcagggaggacttgaggggtcagaggacagggctgggaattgcgtggggagaaggaagccatctcaggcggtggaggggggcagcggaggggaggggcagggcaagggcagctttctccttgggctgggagaagagagacagaagcccccggccctgtggcctggctgagccccagcgaaggagagacgctggcctataagaagcaagacatacacccrtgatgtgactcccagccagacacaccgccagctccaccttcagacacacccacaaacacaggcacccatgttcttggaaaccacaatcacacgcacagagaagagccttctggctgacgacaacccggactgtgaggatcaggctgagggtgacctcggtggcagcaactctcctgccct

SEQ ID NO: 504422 - DNA, 442 bp, Homo sapiens
tcagggaatggcacgatggttcaggagcactcccaggtccaaaagtgtctcctatctccagactccctggtgcctttgattcccccattaggcctgtttccttaggggtcagcattgccctctttyttcacctggaaattaatcctttttttttttttttttttttttttttttttttggagatggaatcttgctatgtcacccaggctagagtacagtggcacaatctcagctcactgcaacttccgcctcccaaattcaagcaattctcctgcctcagcctcccaagtagctgggattacaggtgcctaccacagcatccagctaatttttgtatttttttttagtagaaatggggtttcaccatgttggccaggctactctcaaactcctgaccttgtgatccacccgcctcagcctcccaaagtgctgggattacagg

SEQ ID NO: 504423 - DNA, 432 bp, Homo sapiens
caggagcactcccaggtccaaaagtgtctcctatctccagactccctggtgcctttgattcccccattaggcctgtttccttaggggtcagcattgccctcttttttcacctggaaattaatcctttttttttttttttttttttttttttttttttggagatggaatcttgctatgtcacccaggctagagtrcagtggcacaatctcagctcactgcaacttccgcctcccaaattcaagcaattctcctgcctcagcctcccaagtagctgggattacaggtgcctaccacagcatccagctaatttttgtatttttttttagtagaaatggggtttcaccatgttggccaggctactctcaaactcctgaccttgtgatccacccgcctcagcctcccaaagtgctgggattacaggcgtgagccacc

SEQ ID NO: 504424 - DNA, 504 bp, Homo sapiens
atgattttccaagtgtggtccctgcactagcaacatcakcatcatctgagaaattgttagaaatgcgaattcttgagtctcaccccaggcctactgagtcagatactctggggtgtagcccagcaatctgtgttttaataagccctcctggagattttcatacatgttcaagagtaagaaccactgctctactaaaacctcaaggtataagtcagacgttaagaactcaaaggctcaccgaggccaagaaggacacatgaatgagggaaaggactggaaataagattatcaggagtgggaggaggaaactgtgttgaattggagagctgcccttgcttaatgggagcagctagtgattattctagacattggttcccatttaggaatgtgaagcaggtccaaatataattttccaaaagatgaaagaaagcatgactgtctcacaaatatacagtgaacgtgtcaaagattaatttaactcataataagaatttagtaagatga

SEQ ID NO: 504425 - DNA, 504 bp, Homo sapiens
atgattttccaagtgtggtccctgcactagcaacatcagcatcatctgagaaattgttagaaatgcgaattcttgagtctcaccccaggcctactgagtcagatactctggggtgtagcccagcaatctgtgttttaataagccctcctggagattttcatacatgttcaagagtaagaaccactgctctactaaaacctcaaggtataagtcagacgttaagaactcaaaggctcacygaggccaagaaggacacatgaatgagggaaaggactggaaataagattatcaggagtgggaggaggaaactgtgttgaattggagagctgcccttgcttaatgggagcagctagtgattattctagacattggttcccatttaggaatgtgaagcaggtccaaatataattttccaaaagatgaaagaaagcatgactgtctcacaaatatacagtgaacgtgtcaaagattaatttaactcataataagaatttagtaagatga

SEQ ID NO: 504426 - DNA, 588 bp, Homo sapiens
tgcattcaacttgtcaaattgttacagtgaaaaatgccttctaatctaccaagaccaagttcaaagcctaccacttactacaacaatgattttccaagtgtggtccctgcactagcaacatcagcatcatctgagaaattgttagaaatgcgaattcttgagtctcaccccaggcctactgagtcagatactctggggtgtagcccagcaatctgtgttttaataagccctcctggagattttcatacatgttcaagagtaagaaccactgctctactaaaacctcaaggtataagtcagacgttaagaactcaaaggctcaccgaggccaagaaggacacatgaatgagggaaaggactggaaataagattatcaggagtgggaggaggaaactgtgttgaattggagagctgcccttgcttaatgggagcagctagtgattattctagacattggttcccatttaggaatgtgaagcaggtccaaatataattttccaaaagmtgaaagaaagcatgactgtctcacaaatatacagtgaacgtgtcaaagattaatttaactcataataagaatttagtaagatg

SEQ ID NO: 504427 - DNA, 588 bp, Homo sapiens
tgcattcaacttgtcaaattgttacagtgaaaaatgccttctaatctaccaagaccaagttcaaagcctaccacttactacaacaatgattttccaagtgtggtccctgcactagcaacatcagcatcatctgagaaattgttagaaatgcgaattcttgagtctcaccccaggcctactgagtcagatactctggggtgtagcccagcaatctgtgttttaataagccctcctggagattttcatacatgttcaagagtaagaaccactgctctactaaaacctcaaggtataagtcagacgttaagaactcaaaggctcaccgaggccaagaaggacacatgaatgagggaaaggactggaaataagattatcaggagtgggaggaggaaactgtgttgaattggagagctgcccttgcttaatgggagcagctagtgattattctagacattggttcccatttaggaatgtgaagcaggtccaaatataattttccaaaagatgaaagaaagcatgactgtctyacaaatatacagtgaacgtgtcaaagattaatttaactcataataagaatttagtaagatg

SEQ ID NO: 504428 - DNA, 574 bp, Homo sapiens
gtaatgctagtaacattatctccacacagcacctcacactttacaaaactcccacagatactttctctcgtctacttcttaccaccactctgagaagtcaacaggaaaaggatcatgctttgtgtggaggataaagatggaagttttactccaggtactagaagcacctcagaggctcaaaggtgagacaaagatcaaaactttgtcgttgtttcttttaggatatgatctggggaaatataatatgaatgggaatactctaccttcaactttagtggggaaaaaaatctaaggcttttttaatagaactgggaattttttaaggggttggggctgtaagttattcctcaccgaagttggagaaaaaaaaagggaaaagataaggaaagggaaagggctttmtttttttaagtaacaaaggctaaaaattttcttagagattattatagaaagcttaagtggagagaaatatgcctggggggaaaagcatgtatcctccaaatggtgcttgcattcattttctagggcggctttaaaaacccactacagacttgggggcttaaaacaactcttc

SEQ ID NO: 504429 - DNA, 519 bp, Homo sapiens
tgtaatgctagtaacattatctccacacagcacctcacactttacaaaactcccacagatactttctctcgtctacttcttaccaccactctgagaagtcaacaggaaaaggatcatgctttgtgtggaggataaagatggaagttttactccaggtactagaagcacctcagaggctcaaaggtgagacaaagatcaaaactttgtcgttgtttcttttaggatatgatctggggaaatataatatgaatgggaatactctaccttcaactttagtggggaaaaaaatctaaggcttttttaatagaactgggaattttttaaggggttggggctgtaagttattcctcaccgaagttggagaaaaaaaaagggaaaagataaggaaagggaaagggctttatttttttaagtaacaaaggctaaaaattttcttagagattattatagaaagcttaastggagagaaatatgcctggggggaaaagcatgtatcctccaaatggtgcttgcattcat

SEQ ID NO: 504430 - DNA, 555 bp, Homo sapiens
gagtctgagattaccatgttccagacaaaatgtaatcaatctagcaaataaaatgactgacatgttaaggttcaaccttctgctatccaaaaccaatgagagccagacctggtaaattccctggggcctctgcattcaagacaaacagacccagttcaaatcgtagctttactacttaaaagctgcataaatatgggcaagttacaatatcacgcttgccataaaattctacttcaagaagctttatcacatcaacacatcccactccctaatgaaaaatccctttcactgatctcctactgcatctgactcagcctgagtgggcttccttattcctcactccatattccacagtcttcattcaccagcgtatgtccaaaagaaatggtgaaagaaaagaaaaggaaaggtaagagaaagaaggaagtagcctcaaggtcattctccctggagtaatagcractgccttcaaaagagagtcacagttaacttttaataaaatatctcaaatgatatgttattcatcctccagaggtaatatccttgtcttattga

SEQ ID NO: 504431 - DNA, 461 bp, Homo sapiens
ccttctctaaatgacgtctgtgaagagatgtttaatatgttgatgtgtgtctgcaaacagcgtatcttttgtttataaattagacatacccagaasttgatttatatccttctgtgttttggttatacatccatgggcttatcaaactgtttcatcaaggataccaaatgtctgagaatttttcctaatttctcaatagtcgacacctccttttcaaaccatatttacgtcagtctttactgtctgtctcaaacactttcacatccattattccattaatctctcacatgaggagcccatggaaataattactattgctgcattacagagagggaaaccaggctccgagaattcgaaacactttcctaagagcactgttcagtcagcaagagattcctgccctgaccccagaacccaagtgctcctaagagaacagcactccacttgaaagatacaagata

SEQ ID NO: 504432 - DNA, 461 bp, Homo sapiens
ccttctctaaatgacgtctgtgaagagatgtttaatatgttgatgtgtgtctgcaaacagcgtatcttttgtttataaattagacatacccagaacttgatttatatccttctgtgttttggttatacatccatgggcttatcaaactgtttcatcaaggataccaaatgtctgagaatttttcctaatttctcaatagtygacacctccttttcaaaccatatttacgtcagtctttactgtctgtctcaaacactttcacatccattattccattaatctctcacatgaggagcccatggaaataattactattgctgcattacagagagggaaaccaggctccgagaattcgaaacactttcctaagagcactgttcagtcagcaagagattcctgccctgaccccagaacccaagtgctcctaagagaacagcactccacttgaaagatacaagata

SEQ ID NO: 504433 - DNA, 461 bp, Homo sapiens
ccttctctaaatgacgtctgtgaagagatgtttaatatgttgatgtgtgtctgcaaacagcgtatcttttgtttataaattagacatacccagaacttgatttatatccttctgtgttttggttatacatccatgggcttatcaaactgtttcatcaaggataccaaatgtctgagaatttttcctaatttctcaatagtcgacacctccttttcaaaccatatttacgtcagtctttactgtctgtctcaaacactttcacatccattattccattaatctctcacatgaggagcccatggaaataattactattgctgcrttacagagagggaaaccaggctccgagaattcgaaacactttcctaagagcactgttcagtcagcaagagattcctgccctgaccccagaacccaagtgctcctaagagaacagcactccacttgaaagatacaagata

SEQ ID NO: 504434 - DNA, 461 bp, Homo sapiens
ccttctctaaatgacgtctgtgaagagatgtttaatatgttgatgtgtgtctgcaaacagcgtatcttttgtttataaattagacatacccagaacttgatttatatccttctgtgttttggttatacatccatgggcttatcaaactgtttcatcaaggataccaaatgtctgagaatttttcctaatttctcaatagtcgacacctccttttcaaaccatatttacgtcagtctttactgtctgtctcaaacactttcacatccattattccattaatctctcacatgaggagcccatggaaataattactattgctgcattacagagagggaaaccaggctccgagaattcgaaacactttcctaagagcactgttcagtcrgcaagagattcctgccctgaccccagaacccaagtgctcctaagagaacagcactccacttgaaagatacaagata

SEQ ID NO: 504435 - DNA, 590 bp, Homo sapiens
gatcccttccagttctggcgtcctataatctttactctcaaaagaagctaaacaccacaaactttgacaagacttcctaaaaatacagctcttagcacagagcctatggtccatttaacagagaaggaaaatgaagctgaatgcagagaggtctaccttctgaaaggcacatttggtaagtggcagaggtgaaatttgaacccaggcaaatgtactttagtgcctgaatgcaatgtcaatgccatattgcctatagatgtttggggcaccatgctaataactgtcaggggccacaaatatgatacaaattttgtcctcctagagcttatggtcataatttaagctgaaaggaartatgagtgaaagcactgaaagaaatgccaggcggcctgcacgtcggtggccagaggagaggtgcagaacatggctattctgggcgtcctgagaagagggccatagaagcttggcatcactgaagtgtcattataaaaccagccaaaagcattgtcagcattccgcaagatttccattgccttatccaaagaaataggagcgagggagagacgctataaaaggaagaataaaggaaa

SEQ ID NO: 504436 - DNA, 630 bp, Homo sapiens
agacactgttggaataccaatctttatataagaatttaaaaagagaaaaacatgcagaatccttaccatatcgatgctaaaaagaagtcaatcctccttaatataccctgctaactttctatgatttatttggtaatagaaactgaccctaagaactctacaattggatcaaaatgtgtgctattcttaatcmagtattcaaagctagtgtgttccttattttaaagattatattttaatagaatttttacatgactttaataatacattctggcaaggaactccaaccatgcatctcccctctttcactcagcccagcttcacttattgtataacaaggtgactaaagttaatgacaatacattatatcttaaaaactataaagagaatgaatgttaagtgctctcatcataaaaatgataactatgtgaggtaatgcatttgttaattggctagatttaaccacttcacaatgtgtctatatatgtgtgtgtgtgtgtaatatatatttcaaaacattatagtataaaatgttatctgctcattaccaaaataataagataataaagtggtatagagaaaacaatccaaaaataaaagcctgacctcccacaatataaaaatggtgga

SEQ ID NO: 504437 - DNA, 604 bp, Homo sapiens
cactttgtacacaatctctgcaaactggatacaaccattttgtggtcagtggtcagttatcaggaaggaatgctttataaagctggtcagctgtcatggtgaacccactaaaagggatgtgagtctggcctcagtgtcaggtggtctgttgaagtcagtggagggatctttcaagtgtttgtttctcacatgctggtttctgtttatcttttagaatagaaagtcagttagccaaagggaggatgggtactgaggtgtgtctaacctcctgtctcctgaaatccaggaaacttacttaaagttttgctgaagtatttgtagctaagagggttccattctgtctcttgggggcatcaggttttatttttattccaccaaagcgatgttttaatagatgtatacattgtgaaatgatcaccacaatccagctaactaatatawacactgcctcatacagttatcttttttgtgtatactaagaacatttaaggtctactctcttaataaatttcaaatatacactgcagtatcattaactatagtcaccatgctgtacactgcatctccagaatttattcatcttgcttaacttgattcattcatt

SEQ ID NO: 504438 - DNA, 648 bp, Homo sapiens
gctgtgcctggtttattcagctttttacttgttgttagggctgagtgacaacttccaagcttcttacatgccagactggaactgaaagttggtgtgttacttttttaaagtataaattctgggccttaccccagacctactgattcagtctcaaggggtagagcccaggatctttatcttaagaaatcctcaccagtgggcacccatgyattatggcttctgaagcataattttataagaatgaaacataactctggaaactcctgtgagaagagtagccttggccccagaaacaaggtagaagggttcctaagctgttcattattgagagagacacccaatcagggatttataatttggtagctcttcatctactctcaaaggtgcacccaataaaatgaaggcccagcaccaatatcccaagaccaggcacaggcaagaggagatggacaccaaggtgctgccctaggttcaaggatgttgttgttttcctcacccaggaggaggacctgcatcagagcagtgggaaacttttctttctagacttccagtttccacacctggcacgattctggctggaccacaagaaagagctaaggagagagagcccaagaatacctgcttatgtgacagctgcagtttagagga

SEQ ID NO: 504439 - DNA, 562 bp, Homo sapiens
atgtattaaaaagaatggttggtcctgattcaaggccagcagtttgctgaagctgttggtttcaagcaggagactaaataattgtcttttcatggtctgttggccatcttataactttggaaatgtaatgtccaattcattagaaataaacatctggaaaaaaaatggacaaatatactgatatagaaaatgatcacaataattattaaatgaaaaaggtcaaattacgcaatagtgtttttggtagtattctatttgtgtatacagtgtgttttgtgtgatttttatgttgccttattttatttcatcttattttgtttttagtaaatgactagagaacaactgraagaatacttaacacactgctggcaggagatgggattgggaaatcccccaattctgaaccatttactgatgatgagcatgtattactttcataataaaatactaaattaaaaaaggaaagagaagaaagttagtcactgaatgtaccagatacttgcctgcccccaacttcctggtttccttgttagggagaaaagatagttagagatagcaaaca

SEQ ID NO: 504440 - DNA, 632 bp, Homo sapiens
atctggaacctggaatgcactggggaaaggcaagaagaggtcagtggcatgaggtgagacaagctgggggcacttcacaagagtgcctatatgtatatcttgtaagtaacaaggaaccgttgaaatattgtaaccagaggaataaaaatgagtgacctagtaaattcatactagagatagtgggaaggacagatggaatgagaggaacctaaaaaggttctgagtgcaggttttggagccccagaacgagaacagtaatgggcagagagatttatgagggaaatttgatgtgaatctggcgaytgatttattattggtagtgaggaagagagaagtgtgaaaggtgactcccgtgattttgtcttgagtgactgtgacaggaagtaggaggaaaagacaggccagagaagaaaggcaaagagcttgccttcccccttgaccagaataccccactcccacctcttctctctgctgatctttaaaccctacgccgcctttaaaaaagcagcctaacttttatcttctcaacaaagccttctttgaactaagtccagcctacatctatctttcccaaagtttaaattgccttggtgttgcatatgttaacttacttatagtttgctatgaattat

SEQ ID NO: 504441 - DNA, 547 bp, Homo sapiens
tgaagactgaaagaagaaaccttgtaaagtcttctagaaaacaatactctgagacaatggacacctggatcatgacactctcccatacacttcagctatactcactcatattaccactgcctacttccacttctttgttcaacctattctttctgcctgtaatgccaaacttcttctatccgctatacatctactatttgaaatcttctttatcattcagtacttgaaagcttcctttgctaaattaattattccgttctttgagttcccatggtgctttgtgcttccctctctgtgtctgtgtttatctggagcacgctttctcactctgttaactctctgtctatttttaaatcttatyattaaacttaagtatcagttctctggtaagtcatccttgaaatctccagactgagttagccacttctccaatactaatcacagttgggtttgttgactgaataaacaaataaatgaataaaaggatggctgaataaatataagaagccagttgaggcttaacaacacaagtttatagaggtctgca

SEQ ID NO: 504442 - DNA, 547 bp, Homo sapiens
tgaagactgaaagaagaaaccttgtaaagtcttctagaaaacaatactctgagacaatggacacctggatcatgacactctcccatacacttcagctatactcactcatattaccactgcctacttccacttctttgttcaacctattctttctgcctgtaatgccaaacttcttctatccgctatacatctactatttgaaatcttctttatcattcagtacttgaaagcttcctttgctaaattaattattccgttctttgagttcccatggtgctttgtgcttccctctctgtgtctgtgtttatctggagcacgctttctcactctgttaactctctgtctatttttaaatcttatcattaaacttaartatcagttctctggtaagtcatccttgaaatctccagactgagttagccacttctccaatactaatcacagttgggtttgttgactgaataaacaaataaatgaataaaaggatggctgaataaatataagaagccagttgaggcttaacaacacaagtttatagaggtctgca

SEQ ID NO: 504443 - DNA, 528 bp, Homo sapiens
ccagactctatgcttacatcatgttttttaatccctataacaactgcatgagataggtctggttatcctcatttttcagataacaaaagtgagacctacatcagtgaaagacttatacaatgttatgcaatgcccaaatggctgagatgagaataaaatgcaggtctgtgtgattccaaagccttaccatggagcctcttggatcactgatggcagattcctggcagcagagctcaacatagataccaaaaataaatgaaagtggcttgctgtgactgctggccagcaatgatgcttgagacagtcccttaggacccagctttaatgaccctgtcctgtgataaccttctctaacatctcacttttcttttcataagacggaggatgaataaatgaaagaaggtcagccaggaggaatgtttctgcttcatctctgctcatatacagtgtagcggccatggaggggtaccactcagatcactcttcaagtgagtcctctgtggcatgcrtgactgacaaatgctccag

SEQ ID NO: 504444 - DNA, 591 bp, Homo sapiens
acacaactgcatggtgctggttacacttcgttcttatgagaasagaaatatgctttttgtttttacattttctgagttgtcttgggagcaaaactgcctccagctacaaatgggcttagttgcccacgtccatcttgcgggtgtcacctgttaaggtgaagagtctggaatagcccagacacattatgtatgggtggccttttgtttaccacagacaaagcccaaatcctggggattacttgaagatatcatataacacacaagatggagttactattattctcctctaagacatatagtgtttcccctgggcagaggaaagaacacatagccaatcacatgaaggcagaacccattaaagatttacgcaagcccgaattacttggctttaaactattttttttcctttttctctctctttttttctttattaggagaggcgtcccttcctgaacagcaaagctgatgtagatagtatcactagtaatccttggcttaagcacagagcttctaaatggcttgaattaggctggaagatggggctgtttgatttcctttcctttttgtttctgtttttaaggctctgtcacc

SEQ ID NO: 504445 - DNA, 522 bp, Homo sapiens
caatctcatgatctaatgtacttgaatattttattttggttgcacagtattgtgaatattgttactgaaacagaagtagttgcagtagtctctttggttggttgatttttaactccattgtctttgcaatctcaagatatctttttttaatgaaataagatgtttgagagaatattagaattttttgtttaaagcaaagtacaagtaatttttacaactgttctcaataacttattcaacaaatatttcttgagaatctcctatgtgaccagcactattttatctgctgtgggccgagtgatgtataatagaaaaaagtaactggctcttggtacctacattctaacgatgtgagacagaaaataaacacatgcacatrtagatatgtgtgtacatgtgcacataaattgatgtagttcagtgtgtgtgtatatatgcatattgtatgtgtgtgtatggggatgttatattgtaaaacccaaacctgcgtctgtgcagtacgatagggctggagaaaaaata

SEQ ID NO: 504446 - DNA, 585 bp, Homo sapiens
tctttgtctgaaaggcttttttgtttgtttgtttgtttgtttttctacgaagtcactgtagttaacagaaataggagcattctgcttatgttcctttcctgacttaatgtttggtattttgtgtctttcaaaaaaattgatctattttgtttaaattgtcaaatttttgtaataaaattgtttgcaatattcctttaatatttgtaaaatctgtccagatgtcacctttctcactcttcatgtattttttaattttcttttagagataaaatatcactctgtcacccagactggagtayagtaatataagcatagctcactgcagcctcaaactcctgggctcatgtgatccttcagcctcagcctcctgagtagccggaaccacagtcatgtgccaccacatctggataatttttttaaaaattttatgtagagatggggttttaccgtgttgcccaggttggtattgaacccctggcctcaagcaatccttctgactccatctcccaaaatgccaggattatggacatgagccactccattgccggcccactttctcaataatattttatcagttgcttggag

SEQ ID NO: 504447 - DNA, 632 bp, Homo sapiens
ttctggttactcattattttccttatttctttacattctctgtattttatggaattccttgaactttcttaaaagagctattttgaagtctttgtaagacaattcatatatgtccatttctttagggtcagtcactggcagattattttgtctgtttggtgatatcatgttttcctgattgttcttgatccttgctgtcatgcaacaatatcatgcaacaatgtctacacatttgaacaggtaggtgcttactatagtcttttcacactgtctttattgctaagcctgttcagagattttggatgggccatctggcatggaccctaagtaccagttgttgcagcattagtgagtcctagtgttgcagttattattttagccaagcaccatgcttggctaaaagaagcatgtgctacagttgtttcagcactagsggtaaactctaagcctggggccacggtgctgcaattgttgcagcactatgggcgacctctaagcctgggaccactgtggctggcatggtgcttggctaaaattctgcggccactaaggctagcacagcactgaggcatgtccaaaacaccatgcccactgaggtcttcccaccactaagggctatccagagcccaagg

SEQ ID NO: 504448 - DNA, 646 bp, Homo sapiens
tgtcaaatttcttgttctggttactcattattttccttatttctttacattctctgtattttatggaattccttgaactttcttaaaagagctattttgaagtctttgtaagacaattcatatatgtccatttctttagggtcagtcactggcagattattttgtctgtttggtgatatcatgttttcctgattgttcttgatccttgctgtcatgcaacaatatcatgcaacaatgtctacacatttgaacaggtaggtgcttactatagtcttttcacactgtctttattgctaagcctgttcagagattttggatgggccatctggcatggaccctaagtaccagttgttgcagcattagtgagtcctagtgttgcagttattattttagccaagcaccatgcttggctaaaagaagcatgtgctacagttgtttcagcactaggggtaaactctaagcctggggccacggtgctgcaattgttgcagcactatgggcgacctctaagcctgggaccactgtggctggcatggtgcttggctaaaattctgcggccactaaggctagcacagcactgaggcatgtccaaaacaccatgcccactgaggtctkcccaccactaagggctatccagagcccaagg

SEQ ID NO: 504449 - DNA, 646 bp, Homo sapiens
tgtcaaatttcttgttctggttactcattattttccttatttctttacattctctgtattttatggaattccttgaactttcttaaaagagctattttgaagtctttgtaagacaattcatatatgtccatttctttagggtcagtcactggcagattattttgtctgtttggtgatatcatgttttcctgattgttcttgatccttgctgtcatgcaacaatatcatgcaacaatgtctacacatttgaacaggtaggtgcttactatagtcttttcacactgtctttattgctaagcctgttcagagattttggatgggccatctggcatggaccctaagtaccagttgttgcagcattagtgagtcctagtgttgcagttattattttagccaagcaccatgcttggctaaaagaagcatgtgctacagttgtttcagcactaggggtaaactctaagcctggggccacggtgctgcaattgttgcagcactatgggcgacctctaagcctgggaccactgtggctggcatggtgcttggctaaaattctgcggccactaaggctagcacagcactgaggcatgtccaaaacaccatgcccactgaggtcttcccrccactaagggctatccagagcccaagg

SEQ ID NO: 504450 - DNA, 505 bp, Homo sapiens
cactcttagagtgctgagcaaagtgagatgcttgtgtttgtgggctggagtaggagttgagtgtgcttccattaaaaaagccagcctggaaagagtgagtgagccctgtggcctggaacacctaataaaaagaaatattgagtgcagtgccagtaattggagggggctctgctaaggtccaggagtagacttggtgaaggagccatctctcttcccattgcatcacagcacatggctacaaatgcaaggaaatccaaaggagctatgtgactaagtaagaacttatctactgcctattactcttaagcaccatttactgwatcacaacccaaagtataacaccaaagatattttactaatatatccccctgtgaaaccaaggggaataattcaactacaaataaaaaccctgtacttagccttgaccctttgaaaagatctagaaacgaagccaactgactatactcaacttataccacaggtaaagggacaccaactctcccag

SEQ ID NO: 504451 - DNA, 439 bp, Homo sapiens
atcacaataattacataaaacctaattgatattagtttaataaaaagtaatgtataaatgtttgttcttttccattgctatagctagattaatattgatccagagcatagaaggaccattcttgcttttccaagttattcaatctggatagttcacaagtgagcaactatacataattaacaacaacctaactattacaactatatagttctgatatgtcagttataatatctgttgatttaattatcaaacctcaatgtaatggttatgagcttttaatatttctttcccatttacccraaagctttaaattacatttctttgatatgacagaaaataggaaatggaaactaagagattagaattaaaacatatttactatcatagctttaatataaccatggttacattgtttaatgcacacgtaaaagtagccagg

SEQ ID NO: 504452 - DNA, 506 bp, Homo sapiens
ttttttttttttaactcctgaggagttggttcccgtgggcttggttggagcaaggggctggatggagtgggaagacaacgactcctggggtgggaatgctgggtctccttagataacacactagagactcaactcgtagggcaagggctgcagtcctgggtaaaacrttgggagaaaggatcccggcgcgcgagagacgcgcaggtgtgataaaggaggccatgaggggaaaccaagacatgtccctgagaaaggaggtccctgggcattaacactggagttagcgccccctcccgttcatttcgcgaaagggcccccttcctccgtctcgcggacaggttagaggggcctctcctcgacccggcctctttgagaaacagcactcattaaagctctttaaccgactgagcattgtggtgaggagcaggtggggattaggaatgaactcgagacttccagtcaaggcttttctggggctcggagctctccgctcaatcctgctgcct

SEQ ID NO: 504453 - DNA, 606 bp, Homo sapiens
aaactacatcaagcaggccaaattcagctcatggcctgtttttgtgcagcttgagggctaagatttttttttttttttacatttttaaagggttgtaaaagaaacaaagaataataagcaacagagattgtatgtggtctgcaaagcctaaactatttacaatctgaccatccacagaaaaaatgtgtacaaaaaagcctaaaagatctaaggttagaaaaattattatgaaggtttaattaagttttttgggtcattttttaacaatttcatgcttaaarttgagataatataaattttctccctgatgttaattgtaaggaaatacttctttcagccatttgtgtaccatccttcagttttgttggttatattatttttctttgtcaaagtttgaaacattcaaattatattttcccacaaattactatagttatttaaataaattatttaaattgatggaatgcctaccaaccgttattcatgaattacatttctatttgagttccttattttatacatttcttgattagcataggattttacttttcataaagctagggtaaaaattatatttcttataactttgtgtgcctaataaagtca

SEQ ID NO: 504454 - DNA, 606 bp, Homo sapiens
aaactacatcaagcaggccaaattcagctcatggcctgtttttgtgcagcttgagggctaagatttttttttttttttacatttttaaagggttgtaaaagaaacaaagaataataagcaacagagattgtatgtggtctgcaaagcctaaactatttacaatctgaccatccacagaaaaaatgtgtacaaaaaagcctaaaagatctaaggttagaaaaattattatgaaggtttaattaagttttttgggtcattttttaacaatttcatgcttaaagttgagataatataaattttctccctgatgttaattgtaaggaaatacttctttcagccatttgtgtaccatccttcagttttgttggttatattatttttctttgtcaaagtttgaaacattcaaattatattttcccacaaattactatagttatttaaataaattatttaaattgatggaatgcctaccaaccgttattcatgaattacatttctatttgagttccttattttatacatttcttgattagcataggattttacttttcataaagctagsgtaaaaattatatttcttataactttgtgtgcctaataaagtca

SEQ ID NO: 504455 - DNA, 550 bp, Homo sapiens
ataatgggaccaatatatagtttgaaatattataacaaaaatattatcaggtaactattgagcaccttctagctactagctcagatatattattartaaaagatacagaacacatgagacgaaaccctctgctttagaaaattacaggctagatggatctcaatgtcatcaaaaagaagagcgtattagactgaattatgtaacgtatattcaaaatgtacgttcagagaacataacatttttgtagaaatggaaaacagaatatcaatattgattaactacagtcggccttcggtgtccttgggttctgcatctgcagattcaaccaaccacagattgacaatattcagaaaaaaaaaatttaaaaatacaatacaataaaaataatataaatttaaaaacaatatagtaggaaagctatttgcatagagtttgcatagcattttgtattataagtaatctagagatgatttaaagtacaggagaagaaattgatgccaatcattctgacactactccacaaaatagagaaagagtgaaccctaattca

SEQ ID NO: 504456 - DNA, 557 bp, Homo sapiens
taatgtggaaatgattacttggtgaaaaaaataaatgtctaattattacaacatcttaacttgctaaattaaaaacaaattaaaacatatttttctatcttctcttttatatatactttcctcctgggaaaggcagacagttggaggtattttacttcatcttcctgatttttttttttttttttggttttaaraaaaggggagtttaataggcaagaggaagggagaagagagaaggaagaagctccctcgtacaaaaacagagggagggggcctccaaagctggaagaggacgtccccaagtgcagcagactccagccaggtatatatgcaaaggctggaggaggccatgtctgatttgcatagggctcaggggattggtttgaccaggcatgtcattcacgtggcctgcggaaaaagctggccttcccaccctagccttttaatatgcaaatgcagggcaccattgatgttctacacacgtggggatatgtgggggcagccatgtcgcgaggaacatgtgaatattgtttttttaaaggaaatagaggttttta

SEQ ID NO: 504457 - DNA, 557 bp, Homo sapiens
taatgtggaaatgattacttggtgaaaaaaataaatgtctaattattacaacatcttaacttgctaaattaaaaacaaattaaaacatatttttctatcttctcttttatatatactttcctcctgggaaaggcagacagttggaggtattttacttcatcttcctgatttttttttttttttttggttttaaaaaraggggagtttaataggcaagaggaagggagaagagagaaggaagaagctccctcgtacaaaaacagagggagggggcctccaaagctggaagaggacgtccccaagtgcagcagactccagccaggtatatatgcaaaggctggaggaggccatgtctgatttgcatagggctcaggggattggtttgaccaggcatgtcattcacgtggcctgcggaaaaagctggccttcccaccctagccttttaatatgcaaatgcagggcaccattgatgttctacacacgtggggatatgtgggggcagccatgtcgcgaggaacatgtgaatattgtttttttaaaggaaatagaggttttta

SEQ ID NO: 504458 - DNA, 557 bp, Homo sapiens
taatgtggaaatgattacttggtgaaaaaaataaatgtctaattattacaacatcttaacttgctaaattaaaaacaaattaaaacatatttttctatcttctcttttatatatactttcctcctgggaaaggcagacagttggaggtattttacttcatcttcctgatttttttttttttttttggttttaaaaaaaggggagtttaataggcaagaggaagggagaagagagaaggaagaagctccctcgtacaaaaacagagggarggggcctccaaagctggaagaggacgtccccaagtgcagcagactccagccaggtatatatgcaaaggctggaggaggccatgtctgatttgcatagggctcaggggattggtttgaccaggcatgtcattcacgtggcctgcggaaaaagctggccttcccaccctagccttttaatatgcaaatgcagggcaccattgatgttctacacacgtggggatatgtgggggcagccatgtcgcgaggaacatgtgaatattgtttttttaaaggaaatagaggttttta

SEQ ID NO: 504459 - DNA, 557 bp, Homo sapiens
taatgtggaaatgattacttggtgaaaaaaataaatgtctaattattacaacatcttaacttgctaaattaaaaacaaattaaaacatatttttctatcttctcttttatatatactttcctcctgggaaaggcagacagttggaggtattttacttcatcttcctgatttttttttttttttttggttttaaaaaaaggggagtttaataggcaagaggaagggagaagagagaaggaagaagctccctcgtacaaaaacagagggagggggcctccaaagctggaagaggacgtccccaagtgcagcagactccagccaggtatatatgcaraggctggaggaggccatgtctgatttgcatagggctcaggggattggtttgaccaggcatgtcattcacgtggcctgcggaaaaagctggccttcccaccctagccttttaatatgcaaatgcagggcaccattgatgttctacacacgtggggatatgtgggggcagccatgtcgcgaggaacatgtgaatattgtttttttaaaggaaatagaggttttta

SEQ ID NO: 504460 - DNA, 646 bp, Homo sapiens
ttttctctattgtttatgctttttgtatcttgtttaataaatcctttcccagcttgaggccataaaggcctcttctctgacatcttttaaaattttaatagttttaccttcatgacattcaagtctactgaagttgattcttacttacaatgtaacaaaggtgtcccaggcaaaatatgttcccctgtggacgacagtgatcccagaatcactcattgcacatctgacatcttcccccagatctgctgcagggctttcatcgattgaggttctgtccctgggctttctattcagttctagtgtctattcctgggtcctcaccacactgtcttcattcctagagcttactaatgtgtctcaatattagtcaaggcaacttacctcagcagttcttcctctgaaatgccttgactgtctctatttctttactttttcatttacattttattataagcttatcagatttcattaaaaagtcatgatttgaattatatgattcttaatcatggctgtcatagtgttttatatgatgcacataaatctgtgcacacttatttgtacccaggattcatatcttatccytaaagcttttcatagcacctgatacatagtaagctccttaaatgaatggatgaatgatcaaagt

SEQ ID NO: 504461 - DNA, 638 bp, Homo sapiens
ttatggaccaagtccttgtgttgccctaaaattcacatgttaaaaccctaccccttaatctgatggtattaggagaaggggtctctgggagggaattagaactagatgaggttgttaggcagagccctcaaatagaattagtgtccttctaaaagtttcaagagagcttgtttctctttccagaagagagagcttgcttctctttgtgtaaggacacaagaataagacagccatctataaaacagaccctcagcagacaccaaatctgctggtgccttgatgttggacttcccagcctccagactgtgagaaataaatgcttgttgtttatatcacctagtttatgatatttcaagattcaaggtaccttgtgtgtrccttttaacagcccaagctaagacaccagttagcactgacatctgctcgtttttccagtatatcccacaacaacaacaaagtgtttttatatgattattgaatgtatttctagagggcttgctctagggtacttaccaaattcagtttcatggcaaagataaaattcacaagtggtattatttactttggaaagatcttttagggcctaatctgctactgagtttctccttgtagtttactttagtctctcatgctataat

SEQ ID NO: 504462 - DNA, 404 bp, Homo sapiens
actagaattaaacccaccaaaataaagggcattgcaraagaaacaaccaaattttagtggatggaaagtagattaacacagacatgcaaacatctgcgtcttaagactgacagtggagaatgccaacaataatgaatgaacagcacgaggaaatgaaatgaaaatgaaggaacgggtggggtggttaaaatatactttaagtgccaagtacttagaagaacagaatgaaagtcttttcaaccctgcttgggaagtggctggaaatgtgctttaacaaaatgggcgagtaaagtagagaaacaggaagacaaacaggaagaaacaggaagacaaaaaatgaaagattcaaacccaaagaagggataagggagctctagcatggtgatgcaggaactccagagtga

SEQ ID NO: 504463 - DNA, 501 bp, Homo sapiens
cacatattgagcactgtataaaatttagctctcaagattcttagtgtcattattgttaataactcagttatttctcacagaattagctaccagttaatactctcataggctatcagacaccacgttttccctgttgtcagactgtcacatcctcaggtcaacatccaatttgcactaaatacactggtcttttgtatgcgctgtctggatggcatggacagtacttgattatttttcatcctacattctgagtagtrcactatagtactagcagtaaacatttatggagagactagtataccaacactaatgtctaatgataaccctttgaggtaggttttgttttcctcatctgattcaaaccggtttagaagcatagattatctcactgatcacaaaaccaaaaagatatagcacaggatatatctgactccaaagcctttctgctcaaactgccttcagtttcagtaatgtacagtgtcattcaggctgacttcccag

SEQ ID NO: 504464 - DNA, 434 bp, Homo sapiens
cttcctgtgggactggctcagaaaggcttgcctttcagagcagatcaggctctcctgctcctgaggtcccaagccgtgcttccccgcctgtttggcatgcagtccgtatgcgtgcctcctcaccctcaccccctgggaggctcttccttcccatccctcagcagtgggatgagagctcctcctcctcctatgcttccaactcctcctccccgagtaggtctcctggcctaagcccctcatcccccttcccctgagtttttgggcctgagatctatctccactcctagccctgaaagccttargtatgctttgatgcctgagttttatgctctgagccctgtccctccagaagagcaggcagaaatagagagcacagctcaccccgcaacaccgcctgagccgtgaccctctataagcatcctctaagacccaca

SEQ ID NO: 504465 - DNA, 398 bp, Homo sapiens
acctggatggaattggagatgagtawtctaagtgaagtaactcaggattggaaaaccaaacattccatgttctcactcacaagtgggagcaaagcttatgcctttatgaggacacaaaggcataagaattatacagtggactttgggaactcaggggaaagggttgaaggggggatgagggataaaagactacacattgagtagagtgtacactgcttgggtgataggtacatcaaaacctcagaaataaccgctaaataaattcaagtaaccaaacaccacttgttccccaaaaacctattgaaataataattttataaagatacagagtggcaaattggatgaaaactcaaggctgaaactatctgctgccaacaagagacctacctactggccaa

SEQ ID NO: 504466 - DNA, 557 bp, Homo sapiens
gggaaccatgtggatgctcaaaaaatgcttgttcaccagtttccagcacccaagggccccatgggaaggacttagctagacggacaccacttcttccagcaggaggtccattgatttttgtttgtttgtttgttttccaaacagagaataagaaaagttttagaagaattggattccaaacaagttcatgaatgaaaaagcagtgaagayacgagctgtaagcagtatcccagggagaaacacaagcaaagacgtagcaacccttctaaaattagcaaggaaataatatgttcaatgttactgagatgttatttctattttagaacgtctttaccataattttcttacagacatattagtgttcaaggaaaattggtgaacaaataagtgggtgaagaataaaaatggaaaaaaatagaatgttaacaaggagagaagagatctagggaacagaatgtgattagtttgatttctaatctctaacaatcactggttaaaaatcaataccacctcatctagagttaggctgcttgtggcacagagaacactgatttaaa

SEQ ID NO: 504467 - DNA, 599 bp, Homo sapiens
atttagctaagtagatttactgttataaagaatttggaagtgaaatctaccaataatagttatgctaataatgtatcttagcctttctctatctatatcttcatatttatctacctctatctatcatatatctgtatctacatctctrttgatatgattatgtccgtggcctttgctttctgccactttactcccctttttcttttaagatctccctttcttacttcgcattttgtcttgttttttcactttttgtttgttttagtgtaagtgtaattggcaataagatgggctacacaggggatgaactacgaaggcttatgatctctttttaaggaagtgttccagttacccatagctgtcgaacaaaccaccccaaaacttggtggcataaagcaaactattttgttgtgctcatggattgtgcaggcaggaatttgggcagggcccaggagggatggcttatatttgcttaaacatgtctatttcctccacttgggaagacttaagttgctgggagtgactggaatggctaactacaggaatcacctacaggccttttcactcacatgtccagaaccttggctggaatgaccaaa

SEQ ID NO: 504468 - DNA, 530 bp, Homo sapiens
atgtatcttagcctttctctatctatatcttcatatttatctacctctatctatcatatatctgtatctacatctctgttgatatgattatgtccgtggcctttgctttctgccactttactcccctttttcttttaagatctccctttcttacttcgcattttgtcttgttttttcactttttgtttgttttagtgtaagtgtaattggcaataagatgggctacacaggggatgaactacgaaggcttatgatctctttttaaggaagtgttccagttacccatagctgtcgaacaaaccaccccaaaacttggtggcataaagcaaactattttgttgtgctcatggattgtgcaggcaggaatttgggcagggcccaggagggatggcttatatttgcttaaacatgtctatttcytccacttgggaagacttaagttgctgggagtgactggaatggctaactacaggaatcacctacaggccttttcactcacatgtccagaaccttggctggaatgaccaaac

SEQ ID NO: 504469 - DNA, 494 bp, Homo sapiens
ttctctatctatatcttcatatttatctacctctatctatcatatatctgtatctacatctctgttgatatgattatgtccgtggcctttgctttctgccactttactcccctttttcttttaagatctccctttcttacttcgcattttgtcttgttttttcactttttgtttgttttagtgtaagtgtaattggcaataagatgggctacacaggggatgaactacgaaggcttatgatctctttttaaggaagtgttccagttacccatagctgtcgaacaaaccaccccaaaacttggtggcataaagcaaactattttgttgtgctcatggattgtgcaggcaggaatttgggcagggcccaggagggatggcttatatttgcttaaacatgtctatttcctccacttgggaagacttaagttgctgggagtgactggaatrgctaactacaggaatcacctacaggccttttcactcacatgtccaga

SEQ ID NO: 504470 - DNA, 530 bp, Homo sapiens
atgtatcttagcctttctctatctatatcttcatatttatctacctctatctatcatatatctgtatctacatctctgttgatatgattatgtccgtggcctttgctttctgccactttactcccctttttcttttaagatctccctttcttacttcgcattttgtcttgttttttcactttttgtttgttttagtgtaagtgtaattggcaataagatgggctacacaggggatgaactacgaaggcttatgatctctttttaaggaagtgttccagttacccatagctgtcgaacaaaccaccccaaaacttggtggcataaagcaaactattttgttgtgctcatggattgtgcaggcaggaatttgggcagggcccaggagggatggcttatatttgcttaaacatgtctatttcctccacttgggaagacttaagttgctgggagtgactggaatggctaactacaggaatcayctacaggccttttcactcacatgtccagaaccttggctggaatgaccaaac

SEQ ID NO: 504471 - DNA, 353 bp, Homo sapiens
tgtgacggttggtacagttgcagtcggtaactaaggcactacagcagggctttgatgtgtgggtgggacttggaatcaaactcctgccgtgagcaggttggggaagggaagaaragaagaaggagcaaaggtacagagcccaggagcctaaaacatccaaaattgagggagacaggatgtagtccgtaataaggtggactagaaaagaaaggatggtctgctagcaagactccattcaggagaggaccactgtagaatgttgatcaaggaagctatgtttaggataactaaatgtcggggcttcacaggtgacatagagggaagatgaaaggttagggacagcaactagaagc

SEQ ID NO: 504472 - DNA, 628 bp, Homo sapiens
ggcaaaaaaaatatgatttgtaggctaaacatacacacattgtggtgtttggtatttttttaagtgggrggaagtgggtattttcctatataagaaaaaaaggattacactgtatgtaattctgtttggtaaactgcttttgcacatacagtgtatcaaaatgacctttgacatgcaataatggcagcacagattttcaattatcttgatgtttcataatatattcaattaatctcctcttgttgaaattactatagttttcaagattctttaaaataagcctcatcatttaatccactgttaagacagtagaagggccaaggctagaacttaggtcagttgactccaagtccagtgatacttacacaacagcttcaaactgcttttaaataccaaatagagaggcttgcatcacagcatggaactctaacctcagagaactgtgtggttactttaattatgtgcctgtctgaaaacagagacttgtggaactgcttgtatctggaagcctaatctctctgtcagcaatctgaaaacataaaatcaatactctgacccattagccaattgacacatctctcttatgggcatatcagatgatttcatacagactgaaataagcgaacag

SEQ ID NO: 504473 - DNA, 628 bp, Homo sapiens
ggcaaaaaaaatatgatttgtaggctaaacatacacacattgtggtgtttggtatttttttaagtggggggaagtgggtattttcctatataagaaaaaaaggattacactgtatgtaattctgtttggtaaactgcttttgcacatacagtgtatcaaaatgacctttgacatgcaataatggcagcacagattttcaattatcttgatgtttcataatatattcaattaatctcctcttgttgaaattactatagttttcaagattctttaaaataagcctcatcatttaatccactgttaagacagtagaagggccaaggctagaacttaggtcagttgactccaagtycagtgatacttacacaacagcttcaaactgcttttaaataccaaatagagaggcttgcatcacagcatggaactctaacctcagagaactgtgtggttactttaattatgtgcctgtctgaaaacagagacttgtggaactgcttgtatctggaagcctaatctctctgtcagcaatctgaaaacataaaatcaatactctgacccattagccaattgacacatctctcttatgggcatatcagatgatttcatacagactgaaataagcgaacag

SEQ ID NO: 504474 - DNA, 352 bp, Homo sapiens
cgcccctcccccagcccagcgccgagaagaacsatgcaagccgcgcgtgactgggcgtaatgcattcacaggttctcccctggacccggcctccaccaccgccccagctccatgggccgcagccttggctcctggtaataggccgctttccttcagaaagcccccggtgtccagatcggtcccgttggtcacctccgtccggaacaccacctccaccgggctgcagttcccggcgagcggcgccccgactgcggggccacccgcctgcgctccgccgacgcccttggaacaatcggctggagccctgaaacccgacgtggaccttctgctccgagaaatgcagctgctcaaa

SEQ ID NO: 504475 - DNA, 608 bp, Homo sapiens
aaacaaaattgtttccttttcttttctcccttaaacttctgtacatgcttctgttttagcgcttatcgcattgtattgttttcctatatctgtcttcccagttaaactgcgagcttcttaaaggcagaagtcaaatatttaattttgtagcttgggcacatgtaggtgctttgattactgaaagatggatatatggacacagtaatgaacaaatgattaaaaaattatttaaaccattgtttgacagggtaagattactttctaatgaaatagaacttggtartatgcccttgaagtctgataccctgacaaaccgcttctgaaaatcagcttacataactaccagggagaataaaaaggcatagtgcaaagcaaatgctgtgtgaaagacaggtttccagtgtagcatatgtgggccactaatgggtgtagattgaactgttctcttgccaagagtcatcaataagaactctttaatgatggcttagttcatagatgtattttggcatgaagatctctgtgtttaactcagtaaacaataggatctagtttcattatggacttttcatacttcttaggaacttgtcattgggaagataattatttta

SEQ ID NO: 504476 - DNA, 589 bp, Homo sapiens
tcttatacatttaatctctctttcttggtttctctgtctttatgtctctcttcatctttctctaggcttcttgccattctcaattaaactccttaaaggtcttgcatttgaaatttgaaataaataaacttttgccagtcacatatttctgaatagctaattgcctatatctccttcatttaataagtaatgtcttaaaactaaatgattttattcatgttctctatctttctcattttctactgaattatcaagtaaatgcaacctgacaatctctctatctttcagaggtagaggataaagttttcctgtggttggatgttgcgatgccctataaatgccatcatattcccccaccaggctattccctgycctgtaagtttctctgaattttacacagaggcaagaataattaaactacaatcaaaatagtcctcagggactactgagatagttccagggagagtgctgtttaatgctaatttagggtcacagctaaggtgcagcatttacttaggccaaatttaggcataactcttgagatgtatagcccactcactggcctcatggaagaaataacttaaagagc

SEQ ID NO: 504477 - DNA, 623 bp, Homo sapiens
aacaaaaacaccaatataaaatatatttatgatttgttctcaaagtcttacctctttgtttgcatctcttcctctcgtgccctcaaaatgtgtgcaaatgtttccataaattgcaagtagctattgggagtggtataataaaatcttccagtttcttcaaagtattttctgttcaagtctttcatgcttttgtggatttggacacatgttggggcaagtttttctttcaagttctgaagaataataatttttaagaattaagagaaagcaatccaaatatacataaaaagagaaagtygaacacttagaattaattaaaatagcttattatttctgagatgtggagatgtagagagagctcccggatgagcaggacaaagaaaatatgagttttgatggttgggatggtggtggggcaacagcagagctaactatgaatggcatgccacactcattcttctaggctttacctgtatgttactctcacttttgctatagtcatccaaagatttgggcatcagtatcaatggccaagggttataatgttttctttatctttaaattttttatttattttttattttgagactggatcttgttcttttgtccaggccaaagtgcag

SEQ ID NO: 504478 - DNA, 623 bp, Homo sapiens
aacaaaaacaccaatataaaatatatttatgatttgttctcaaagtcttacctctttgtttgcatctcttcctctcgtgccctcaaaatgtgtgcaaatgtttccataaattgcaagtagctattgggagtggtataataaaatcttccagtttcttcaaagtattttctgttcaagtctttcatgcttttgtggatttggacacatgttggggcaagtttttctttcaagttctgaagaataataatttttaagaattaagagaaagcaatccaaatatacataaaaagagaaagttgaacacttagaattaattaaaatagcttattatttctgagatgtggagatgtagagagagctcccggatgagcaggacaaagaaaatatgagttttgatggttgggatggtggtggggcaacagcagagctaactatgaatggcatgccacactcattcttctaggctttaccygtatgttactctcacttttgctatagtcatccaaagatttgggcatcagtatcaatggccaagggttataatgttttctttatctttaaattttttatttattttttattttgagactggatcttgttcttttgtccaggccaaagtgcag

SEQ ID NO: 504479 - DNA, 592 bp, Homo sapiens
cctttcctcaggttgcaagccttaggtattaccaagatttttctcttaagactccttttgagtatccttagcagagaaagcttgcatagggaaatttggcagacactgtccgttgcctattcaaatgaatagttaggtttagctaacttgtgtagcaaacaatccccatacctcaggggcttatggaaaggtcactgctagctggtccatgatggcatgtgcttatagtcccagcttctcagtaggctgaggcaggaggattgcttgagcccaggagttcaaatccagcctgggcaacatattgagacccccatctctaaggtagatagattagatacatggatggatggatggatggatrgatagatagatagatagatagatagatagatagatagatagatagatagatagatattactgatattggtgagagccactactcccatctctgagagagggagagagagagagagagagagagagagagagatagtatttgatcttcgagagagcggttttagtggcatagtttgggcagaagctgtgtggttcctatataggattactcatagtatgagtggtgactgac

SEQ ID NO: 504480 - DNA, 622 bp, Homo sapiens
ctaatccctctgtgcctcagtttgctcatttgcaaaacaggattttattatctggattatcatcacccacgatcattgcagttcaagccctaatgcataaagcattcagaacttctagcaaggactcttaggaatcatgtcctttggcttcctcttcttataatgggagaaactgaagctcagagagcgttttgagggcagggaccatgccttatccatctttctatccccaggatccagacacagtctggtgcatactgggtgtccaacagatattttgtaaatgagttgtgtgaccagctcccagtgacatatttgtgatttagcccccttgatgactcagagtgattatccacatcaatcactacactgtgcatcctgccaggatggcttcagaaccaattatgttatatagaatgtggctgttatgcttttctacttatgtttcctgctctcttctccctcactgtcagctgtcagttctccccrtagccactggatccactttaagaaatctctgtcactgttttgaatgggtatccactgtagtctggggcagaataggagtaaaaggactttgaaagatttcaagtttggcgcacatagaaggtacctttattgg

SEQ ID NO: 504481 - DNA, 596 bp, Homo sapiens
tctcctttaaaagggactgaattttagacaagtttgagaaatactgcacagtgcctccaatgataacaacagcctttgttgagcccgtaatcaatggtaaaccctgtgcagcggctcctttcgctcctccagtagctaggcatcccctttttccaaaaaaaggagagcaaagctaagagacaaaatgsctggccggtgccacacaggccaggaggccaagatacaaatgccagtctgataccaaagcccatactcttaattttataaggctctccctgtgggaggcattgttctaggcagtgcagggatgagagtggaatgtggttgtaaaaattaactccaatattcctggtcagttagtttgtaacccacgagaggatataacacatatatacatgtaactaataaagattggactgtgactactgctagaaaccaagtgctaggaagtgcctaggaacagatgaaaaggcaagttttagcttaatggattgggttcgaagagggtaggatcactcatttttaaaccaacgtttgattgagcttctatttggtgcaaggaattgtgctgagcactgtcctgccttcaaagagct

SEQ ID NO: 504482 - DNA, 404 bp, Homo sapiens
tttctcactcttttggactctgacatttcctcctgtgtggacaccatctytcctcaccctgctcaggctccattaccctgtactctccccacccaactcaggctctgataattctgcactggacctgccctctcttcccttgtgaagacaactcactttagtctggccctgacagcctactctgggacacaacaactacctccctttccccagtgcagaggtctaatttggccctatctaatggcttttgaatggaattgttcaggaaggtaagagaagaggaagaagagtaggaaaaggaagagtaagccctttatcaactgactttccaaggcagaagcaggaattcaatgtcccctttcagccagcccttgtaacttaggcacagacatgtgaatcttcca

SEQ ID NO: 504483 - DNA, 584 bp, Homo sapiens
ttttattcacaccaagactttctcaatgaaggaaacaatgcttttatttgcattctggggtaagcgccttatctttttaaaggctagtaataattgagtagcactgatttagaggctgtatcttcaaccacggcagaactcatggtaggctatgtgaagacgtggttgatttcacgtcacaatcaccattctcattaagtcacagaccacccaaagattgaaaagaaatgtaatctcaattcaaaaggactttgaccttgaaaacaaagcagccggaggatttttactggaaatccaagttatccttactctgcactagtcaggatggggtagccatgactttgcagtatgcaagaaaaggacttaaaagtctcagtcaacatcaacccagtaaaatccagcattgtgatgtattcacccaaagagcacatatgaccttaggctgcattaacagaagcattgaatctggaacaaaggaggctacaatcctactctatattagttagaacatrcatgaaatattgtccccaacagtggatataccatttaggagggatgccgaggaactgaaacttgtgcagagg

SEQ ID NO: 504484 - DNA, 645 bp, Homo sapiens
ttatggttctatgccttggtggtttacagtttacagttcacagagtcgtttcccattcattgtctccgtgcgtctcacagctctttggaacaggtggtagagggcattacagatgagaaaatgtcatccagttaagcattcaagtcaggaactacgccaggttatctggtccctagtccacccctctgtggggggatcactgtgagaaaccaccccctcttaatgmgagatggacaagcagggagagaccctcacagatagcccagtaggagctcccagtggctcctggtggctcatccagccttctccaggtattgctcccactttaaggggcaaactgcaagttaattccctaccctttgagaccaaggctctagatagatgtctgcaaacttcaatccatgggccaaatctggcctgccacctgtttacataaagttttattggaacacaatctcacccattcattacatattgtctattgctgtttttctgccataaaagttagagtccagtagttaggacagagtgcatatggctcacaaacctaaaatgcttactatatgtccctttacataaaaagtttgcagacccctgctctagaacatcggtgtggaatatgggtattagctcatgttctctatt

SEQ ID NO: 504485 - DNA, 574 bp, Homo sapiens
aagaactaggaagagcccatgttgcagttcaagtccaagggcagtctgttgcagaactccctcttgcttggggaggtcagtattttttcttctattaagggcttcaactgattagacaaggcccacccactccatggaggacaatctgctttactcaaaatccctcctttttaatctcacccaacaacaccctcacagaaacatccagaataatgtttgaccacatatctggacactgtggctcagccaagttgacacataaaattaaccatcatgagccagttgtgcccccaggacttaacgatatatatgtaatcttcttactygtctcctgaccacgtgtttgcccatggcatggcagttgaggaaagagtgctgacttgagccaaaattcctgggacctatcatatctggctgtgtggcctggggtaacttaacttctctgtgcctcagtttcttcatctgtaaaagggagcaattctatctcatagaattaatgagatataagagtaaatcgggtaaagcacttagaatgttgcctagcatatggtagagtgcctgggcccattttaca

SEQ ID NO: 504486 - DNA, 632 bp, Homo sapiens
agccttcaaggcaccccagcccagacatcagatgtggagtaaaggagccyccaaatgatcccaacccccagccatcatggaacaaagacaagccacctcccattgtaccctgtccaattcctgagccacagaatccatgagcataataaacggttactgtttaatgtcactaagtttggggtggtttgtttcacagcaatttaactggaacaatagtgctaggcataatctgctaaactgatgtcatgacccattagcaggcagtttgacaaacacgggttcagaggtcactaattccatatttgaagcctggcactcaacagtgctgagtttccactactgaatctgtgcatattcatacaagttgaaatttttgcaactagggatggatgggatgggtgtagtggggtaaagcagattacagagtgttttgccccatatatatggtcagcatcaaaaaggcgtgagactcactgggaccaaacctgaagctcaaaggtgggccacattgttctggcccgagtctcaaggtgttcctggcttcctaaggataacctgatgtccttgtgccaaagcagacacttaaagactccagtgccttacaaagactttttggtctaaaggtggcctat

SEQ ID NO: 504487 - DNA, 454 bp, Homo sapiens
atttctatccccattcccagacaacatctcccatacacacattacacaatcactcttattcttgttaaccaagatgaagaccctctacaagaaatagtcctgttacatctagctyaactccacctaagcctgcctctgcacctgctgtctctcatgcccaggagtcacagtctttgccaagtgacactgctggcttttaactcagttccctaattcactgtgtgatatagggaaaagtcacttcctctccttctgagccagtttctccatctgcaaaatagattcaatagtctaaaaatcccttttgacttcatttttatcaaacactttttgtgtccctaataaggtgtgatcataatcataatgtttcatgatgatatcatggaattatacataattatatgtatgtagttatactatattatatattaatatattatataattatatatta

SEQ ID NO: 504488 - DNA, 591 bp, Homo sapiens
ctgtgtaaatattttcatttttatgtgtgctatgacctgaaaagtttaggaaatgaatacatttaggtttacaatatacatttagtatttaggtttacagaatactatatacattaaggtttacagaatacatttagtatttataatactggtttaggaaatgaatatatttccagagtcccctcatttgtgaccatggcaaagcttaagcattatatggcttatccgaatcacggtgcatgatactaatagattctagtaaaactatatacacattctttatctgagagctcaggcctgtaatcaaaattctgttagggttagtttgtttgcaagggacagagaagcattaagggtagcatgaacagtgaaagcttttcacaaggtccaccaagggaggcaggaatcctacaggaaaaaatacatggcctgttcagagacaggatatggaagcccgaagcttgagagaggcctcagccacaagagagtctgggtcttcatcctgacactccactagtaacatgacttggctatattctctctttgcttccctctggttgtcttacattytctcccagttggctttttcgc

SEQ ID NO: 504489 - DNA, 635 bp, Homo sapiens
agagaatgaacagagttcaggagagtcctttattaaaaggtgatcatctggctcaggtggactagcgtccaggaaagtctgagccctggacaaagaaagcagccaccttttaagcagtcagtggcccagagctacatgatgcaggaagcatacttacagaagcgagaacaaaggcagttgttatttcacgtcttacattcttgggaatacatggttctgtaacatatacytatcaatcttatgaccttgcagctgtgctggggaggtaagcaagaacttgctgagcctcaaggaatgtgaaaccagtgagaacagataaggctcactgagcacagaaggaaaaataggcagttagtattcttctctaacttagaatatggtgggggggtgggggatgctacactacactaagccctgaggggaaagttaattttctggctttacatagtgtaaaattcatgaattccttcttcagtgggatatactctcaccgaggagccagttctagactggttcttttaaagctattttgtttccttttaagcaatgtgtactggatttatctcttcaggcctactatctgcctgtctccaccctagaaatgagcgacccaggaggctgacctggataagcag

SEQ ID NO: 504490 - DNA, 653 bp, Homo sapiens
tgtcctctgactctcacccgtgcacgtgccttccttttggtcccatgctgtttttaaaactgctacctggacctctgcccttctggccatgccaatgattggccttcccaccacgaaaggtgcctccaagtatgacaagtgtggcttgcactgacatttccaacaaggaaagccttgagtgacctattacagtaaaaccctggcttggcttcatgaggggtatccaaccctgggtgctggggggtctctgactcatcctggttacaagctttagtgtcactcaagatgcctcccagacccagcccagcaggacccctggcccagatccctcagctcacgatgtagacccaaggccagggtttccccatgtggggctgcataccccctaccttggaatcacctgaattgtgccctcaatgtaccacggaacaaagttagaggttggagagggtgaagctattttctccctatttttttccttttcttttctactttgtaaagaacgtctatgctctcagagaactcagacaatatcaaaatatgtacagaagaaaatgagaatccttcaaataattttatccaaggaaaaccattgccaattatttggtgaataggcttccagctctctctmtctatctatctatctacatggc

SEQ ID NO: 504491 - DNA, 540 bp, Homo sapiens
ctgccagcactcctggatcgaaggtgtccaagacaacatgaagctccataaggtgagtaccacctcctgcaggcaggcctccagaccttctcccctggacaactcctaaaataggagcccatcctcctgtgcaaaggtgggagcggataggtgatccctaatgggatctttctttccccacaataccctgaattctcttaaatgagttatcccggtgcctcctgaatgtctgagctccgcccctgcttcaacattcccatcacttctgagagatgttcttaacatttcattaaatgttgcaaagcttgacagctaggcagtctggattcagttacagccatgatgctacctatccatgaccctatggtggttttaagaatgaaaacatactggctgggcatggtggctcatgcctgtaatcctagcactttgggaggccaaggcaggcagatcacttgagcccaagagctcaagaccagcctgggcaacatggcraaaccccatctctaacaaaaatacaaaaattagttgggtgtggtg

SEQ ID NO: 504492 - DNA, 653 bp, Homo sapiens
caggctggtagagccctccagccatccccaaacacatccctctaagggggacctgcaccaggatgtgggtgggactgaaatgactcaacctccagagagcctgatggtggcagtggtttttgtaagttgatgacagctattaatcaagcaaagagcttcaggaaaagtttgagttagtaaatacactgaagaagagaaacaggcagcattaaaaataaaacaaaaaattgtgaaaataggcrgagaagatctagagttcacagaatgactgctggctgagtcagaatcacagcgctgaattaaacgggcaagacaagaaggaaacaccatgagatcagttataggagatcactctcaacacccatgcctcccatttacacttgaatttaaggagagcaaagctttgagccttctctcctgaagcacataacattggagaacacagaaaactcaaagaaactggaaaaaagccacaaaatctaaaatttgcgtgatacaacttacgcagaaaaggaatatagacagaagacaagtgaaaactgaggctaagtgacagagaaagatgggtttgggatgcatttgtgttgggaaattttctaacatgagttattaagggctagaagtgaggaatacatggaattgaatttccacct

SEQ ID NO: 504493 - DNA, 626 bp, Homo sapiens
aaccactatcctaaggctactgaaacatgccttgacaagacattcactaaatatttgtttcagtgaatgaataaatgaatgaatgaatgaacaaagaaactaataaatatcttttatttatggttgtaggtgttccattgactaaggccagaacaagccctaagaatattaaaaaaaaagaaatagcaatccagataatgttctaagcactttaaatgccttaccttattacaactcacaaaagccctattaggtaagttgattcttctgggtttttagttacaaccaacataaatcactttggctgcttcaagcaaaaagacatattaaggaacacatagttgacatcattgttaggagagctgcagaaatggactttaggcctagcttttaggaattacttcttaaaccattcagcagaaatgaacggccaaaggggctgttgccttgatcactattaagaacctaaagaattaggaagctgccggttcagatgttgctccaaactaacaactggaagcttcccaataaaaaagctgactgttaaatcaggaygctatcactacagcgactagttccagaacgatgctgcctctgccactatccataccagcaaaaaatgaagg

SEQ ID NO: 504494 - DNA, 172 bp, Homo sapiens
tgtgactataggaaagaccstttgcctctcttttcctcaaagtaaaatgaaggagttgaactcagtgatagtctttcagatgtctatccgttcttaaattccttagttccatactttggatttttagaaccggacttcctttgggtggagggggtttgggaaatgctggttt

SEQ ID NO: 504495 - DNA, 492 bp, Homo sapiens
tgagtggctgatggactggatgtggatatgaactcagaaaaagaaagtgtcaaataatttcagaccataaatgtcaatagagcaatttctttccttagagactaaagaagcgggcactgataatcgaaatatagttgatgatgggaaatctcagaaacttactcaagatgacataaaagctttgaaggacaagggcattaaaggagaggtaatattcaaaggatttttagttttgtttttgtctgtttggcatttaggaaactgttgggtttttaaagcagactgtacctaaggtaaaacaaaaaaataacgttatagctttgatagaaataggttgaaatgtacatgttrctcaacatttcaaagattttatgtcttatatacaggaatataagtgaatgacattactaatgtcagtggtagagaatgtaataacagtgcatatcaggatttaactttgttcattttcagtaatgttttcagccagtgtct

SEQ ID NO: 504496 - DNA, 623 bp, Homo sapiens
agatttctcatggctgttagtcagagaatatgcccctgactttttgtgaccctttttttctcttgttatgtcagaatatattactctgtaactctgccctaaaggcatttaaaatgcaaaccattatggttcttatttccccaaggcctcagtatcactgtggatgatgtaattgacaatagcaaaattcccaggtggatgagaaactggccctttcctctctgccaggatgtttttgcagcaagttttcaggatttactggtgggctctgtgtcagttcaggtcttctggaagacatatgctaagatggaagttgaagtgtaagagatttattgagggaaatgccttagaaagayaaggggagagggagcaagattggtggtgcaggttgatgcctgggcaaggagcgggtagagaaaggaggatggtaggaagagcctgcagtgctgctctggagaaagtctccatgaggctgatggcgagcccaagtggaaagatcgccattcaaggagccctgtgttaagcagaaatgctccagctctggtacccatgctcagttactgactggaagcaacccatggcctccctcggtatgaatgctgcagtggatcccaaaggagcgg

SEQ ID NO: 504497 - DNA, 620 bp, Homo sapiens
gccatcatcaaaagagcatagtttagcggttaatactactttacgtattttatttcttttgaatattccttgaccacaagttygttgaagccaacagcccacctttcatatctccattcaggagatatgaaaggctgtgctgttgcttacatttctggaaccatgtggtgactggccggcaaacatttaataaatactggacaagtgatggactgtggccttgaagaaacaggaagatgaacagaagccctacctgaggcagcagcaaagattcgcttttaagtgacagtagttgtgttgcttccctggagttgtctccatttcagttgccgaatccctttgatctctctccctctctctctctcaattttcttgtttacatgttcattgtagaaggttaggaaatgtgaaatgtgaaaaaagcacaaagaagaaaaaggtaaacactcataatccttctacagagggaagctcttactattttgttgtatttttttttcttctttggcttttcctataatacatgtgctttcatgctctctgccccgtgttccccaccctttcttttcatttctttctttgaaacggagccttgctcttttgcccaagctggaatgctg

SEQ ID NO: 504498 - DNA, 620 bp, Homo sapiens
gccatcatcaaaagagcatagtttagcggttaatactactttacgtattttatttcttttgaatattccttgaccacaagtttgttgaagccaacagcccacctttcatatctccattcaggagatatgaaaggctgtgctgttgcttacatttctggaaccatgtggtgactggccggcaaacatttaataaatactggacaagtgatggactgtggccttgaagaaacaggaagatgaacagaagccctacctgaggcagcagcaaagattcgcttttaagtgacagtagttgtgttgcttccctggagttgtctccatttcagttgccgaatccctttgatctctctcyctctctctctctcaattttcttgtttacatgttcattgtagaaggttaggaaatgtgaaatgtgaaaaaagcacaaagaagaaaaaggtaaacactcataatccttctacagagggaagctcttactattttgttgtatttttttttcttctttggcttttcctataatacatgtgctttcatgctctctgccccgtgttccccaccctttcttttcatttctttctttgaaacggagccttgctcttttgcccaagctggaatgctg

SEQ ID NO: 504499 - DNA, 620 bp, Homo sapiens
gccatcatcaaaagagcatagtttagcggttaatactactttacgtattttatttcttttgaatattccttgaccacaagtttgttgaagccaacagcccacctttcatatctccattcaggagatatgaaaggctgtgctgttgcttacatttctggaaccatgtggtgactggccggcaaacatttaataaatactggacaagtgatggactgtggccttgaagaaacaggaagatgaacagaagccctacctgaggcagcagcaaagattcgcttttaagtgacagtagttgtgttgcttccctggagttgtctccatttcagttgccgaatccctttgatctctctccctctctctctctcaattttcttgtttacatgttcattgtagaagrttaggaaatgtgaaatgtgaaaaaagcacaaagaagaaaaaggtaaacactcataatccttctacagagggaagctcttactattttgttgtatttttttttcttctttggcttttcctataatacatgtgctttcatgctctctgccccgtgttccccaccctttcttttcatttctttctttgaaacggagccttgctcttttgcccaagctggaatgctg

SEQ ID NO: 504500 - DNA, 618 bp, Homo sapiens
tgttgaatgctccaagatggccttgtttgcatttctggtagttagggctggtgttgactggggcattacatggaggtagagttcctagagggcatatcccaccacacaagcacttttcaagcctctgcttacatcacatgccccattggccaaagcaagtcacatggccatactcagagtcattatgggaaagcactacacacgggcatgtaacacaaggaggcatgattcattggcagccatttctaaaatgatctcccacaaagggtgagaatatttttctttctttttcttttttttttttttttttgaggcagagttttggtcttgttgcccrggctggagtgcaatggcgtgatctcggctcaccacaacctctgcctcccaggttcaagcgattctcctacctaagcccccccgagtagctgggattacagccttgcactgccactcccagctaattttgtatttttagtagagatgggttttctccatgttgatcaggctggtctcgaacttctgacctcaggtaatttgcccacctcggcctcccaaagtgctgggattacaggtgtgagccactgtgccttgctgagaatatttttcaataatatttct

SEQ ID NO: 504501 - DNA, 178 bp, Homo sapiens
ctgaaagtgcattggctgtgaactgtggcatttccaaatatccaggacayttgctgaatagaaggaaatgagagttagtcaattagtcagcatttattcagttatgccagggctgtggtcagggtctgtgggctgctgatgagttttctggcagggttgaaagaagattaaacctgag

SEQ ID NO: 504502 - DNA, 448 bp, Homo sapiens
tgagaccctcagtctccagaggctgcccctctgcacaggcagttcacaacatggctgtttgctttcatccttgaaccctgcaggaaagtaatctttcrgtctcttttaagggactccccagattaggtcaaaccaatgcaaaataatctgtggttgaataactaaaagccaactaatatggacctttattgaatctccaaaatttcttcacctttgcaatgtaacttaatcacaagagagaaacacatcattttcacaggtctcacccgcacttaattatgggaggggattatatataaggtgtatgccatgggttattttgggaccagcttagaattctgtgcacagactgttttgccatataccaaaagattagcccagagtcatttaaattttttggggggtggatagggggaatatcggtgatggaaagaactcacatgtaata

SEQ ID NO: 504503 - DNA, 626 bp, Homo sapiens
tgcatgtgtaataactcaaaactataaaaaactcaaacactcatcaacagtgaataattaaacaaattgtttacattgcaaaaacattatcagttgaaaggaatgagctactggtagcagcaacaaggtacacaaatctagaaataattatgctgaggaagagaagccagaaaaatataatatatattatattatctcatatatattaaagaatagagaatgcaaactaatctatagtgacagaaaacaaatcagtggcaatctgggaatgagggtaaggggtaagaggaagggattaaaatggggcatgagtaaaattttggaagtgataagtatatttattatcttgactggttatggttttacagatacatacttaacggtgaaaaytggcagattgtacattttaatatgcatagtttatgaaatgtcaattatatctcaataaatattattatataagaataatctagagaaataaaacatttttaaaaaaattatagtaagagttgttctctaaccattgtagttaatcagttttactaaagaataaccacatataaaaccttgttcccttattgacagaaagtttctcccgtacagtttgtacactgtctattcatgtg

SEQ ID NO: 504504 - DNA, 624 bp, Homo sapiens
catgtgtaataactcaaaactataaaaaactcaaacactcatcaacagtgaataattaaacaaattgtttacattgcaaaaacattatcagttgaaaggaatgagctactggtagcagcaacaaggtacacaaatctagaaataattatgctgaggaagagaagccagaaaaatataatatatattatattatctcatatatattaaagaatagagaatgcaaactaatctatagtgacagaaaacaaatcagtggcaatctgggaatgagggtaaggggtaagaggaagggattaaaatggggcatgagtaaaattttggaagtgataagtatatttattatcttgactggttatggttttacagatacatacttaacggtgaaaattggcagattgtacattttaatatgcatagtttatgaaatgtcaattatatctcaataaatattattatataagaataatctagagaaataaaacatttttaaaaaaattatagtaagagttgttctctaaccattgtagttaatcagttttactaaagaataaccacatataaaaccttgttcccttattkacagaaagtttctcccgtacagtttgtacactgtctattcatgtg

SEQ ID NO: 504505 - DNA, 607 bp, Homo sapiens
taaggaggccatggccctagttgtcatttttcatagtggggaaacttgtgagtgtgaggatcatttgattttgttggaggctcatgataattttttagttttggccatcatacttgatatttgattttaagatttttttctctatgattattttgaaatataagttaaaatggataatggatattggattttttttatttttaaatgtgaaaataattacagagataataatataaacagacattaattaattctaagtactatattattcctgaaaccaaccctatgaaatagttactatttttttaccatattatagatgacatgatgtaaaattaaatttgctatattagtagattacggagatagtacattggaggagtcctaatctgaactcagaaaatttgatgacaaaactcatttattacccattagcatgtacttccttatactacaaagagacatamgacagaaataaaaaaccgatacacatgtcagtgtttggttggttccatgtcttggatactgtgaataatgctacaaggaaaatagaagtacagatatctcacatcgcatcgtaatattgtcacaggatccttagggagtt

SEQ ID NO: 504506 - DNA, 497 bp, Homo sapiens
aaaacaaaaacaaaaaaacaaaaaaagcaaaaaacacacaagagtcacatctcaacattttgaaataaaataaaataggcttattgtagtcctgagactttttaatcatgtgtctcaaataatctaatctgttggccatctctaacaagtagcctttctcttaaaaacacaatcccattacacattttaacaaaaagctatggatttgtggcaattcaaacataagtaaggatattaaaaatacttcgcccttaatcagtctcctgggaacattaaaaaccagaggaatttttgagttcacatgatggcctgcctggtagtgacttcacaagtgattcttctataaggaataaaaatgttgtctacatgggaagtttaaattcagttgacaactatggagttcaaaatagaacataccatacaggtctgggctgtagsaactaactcacacgatcccccttcactcctctatgtaacacccaccagagttggtggca

SEQ ID NO: 504507 - DNA, 640 bp, Homo sapiens
tcctttggtaatattcatttgagaayatctcaaaactattttcgatgttgtagatatttaagacataattcattatgataaaatgtcacaaaaaatttataaactcagagaaaaccatgtgcgtaaggctatgagcacgttgatttgaatttctaggtgaacctctttgtaaagagcattcattttccataggctcagaacctatttatacttcttaatgagaacaagttttctaataaaaacaagtttaaaaaaaccttttaacctggagtatgggaagaaagaagattagagatttgttaatgaacctttaaaaaagttcagtaaacaacataggtaattactctgttgggaaatgctgcttaattaaaacacagtcattctaacagcatacacacctgctgctaccaggacttatttttttcctaaaataacttaattcctgaacaagtttctctcttagttcatttctttggagaatcttcatctcagttttctgccttaatcttgtgttgtatctcatagtataaataattatagtagaatactacagagcaaaaaaaggttttgaaaagatcgatgtccctctagcgtttatagccctgtgtttcactttggaagatagaaattattttcttct

SEQ ID NO: 504508 - DNA, 578 bp, Homo sapiens
gccacagaacattgtcagtaaacagaacaaggataacagtaatatccaattaaggatatgctatatcagcatagaaaccaataaattttgtcttagggttgcatttaggacagtgaacaaaattcacttggacacttaaaatgcaggcaagaatacacagaatgagtgacctcattgtgaatagtcagcattatgagagctatcaaaatctatgggaatctatacattatcaawcaaaacttaaatgtctcccatgaaatgtttccacataagcaaaactatcaaaattatcaaatggaaattataaaacatctactgagttagaaaatgtttcaagtttccacagaagatgtaaaagtgggatacaagtttaccacatcatatatgattacatccaattaaaacactgtatccactcaaattcctagtcaaaggagttatatgccttgtcaatgtactgataccctaaagagtaaaatttaatggatgacttggctggatcaggaagaatttcaaaactactaaatttgaaaaaagaattataaagacatttgtaaagaacttagttttattaggtc

SEQ ID NO: 504509 - DNA, 512 bp, Homo sapiens
tccctccaggcaatacttcctaaagaaaggtttcaaaggatgtggtggggaatcggactaggagagaaagaggagggccacattcgggagagctagtctgggcaacagcgcctggaggccctagagggaggcatttgcaggggacagaagaggggccaagccagggcagacagtctggtgatgttggaggcagtgagcacccatggggggccggccggggagtttacytggcttcccgtggatcaggttacagccagtgtgtgaaccacctgaggaagccatgcatgcaagtagggctgggtgaacagtaatcccttaaatttgtttgataagccctagtgttattagaataataacaatagtccccatcctctgttccaccctttatgttttacaaagcactttcacacctgttacctccccgcatctccaccacagtctggccagggagtgggggcaggcagccctgaggctgtaagacttgctttccacatccaaagccctgggtgtta

SEQ ID NO: 504510 - DNA, 473 bp, Homo sapiens
gttttccatctttaaccaacaccttccctggctccagctactgccacttcatcctctcttgcagccaygcttcttgaaaaagtggtctccattcaccatgccccctcctccatcttccgagcccaacaaacacagtctcagcactactcaataggagctggctctgccacaccacaggaccttattgagtgcagtggatgcttgtcagtccttatcttgcctggcttctcaacatctggtcactatcattgtttccctggttccacatgacccctgggtccctcctacctccctcaccactcctcggtccctccagggtctctctcagtctgcctggttccctcgatgtggggtcctctccagctcttcccccacgttctccctaggtgggctcactcatccacatgacttgctcacccatatttctgatctatattttccttttcaaccctagactcgaatttccaactgcc

SEQ ID NO: 504511 - DNA, 626 bp, Homo sapiens
ttttccatctttaaccaacaccttccctggctccagctactgccacttcatcctctcttgcagccatgcttcttgaaaaagtggtctccattcaccatgccccctcctccatcttccgagcccaacaaacacagtctcagcactactcaataggagctggctctgccacaycacaggaccttattgagtgcagtggatgcttgtcagtccttatcttgcctggcttctcaacatctggtcactatcattgtttccctggttccacatgacccctgggtccctcctacctccctcaccactcctcggtccctccagggtctctctcagtctgcctggttccctcgatgtggggtcctctccagctcttcccccacgttctccctaggtgggctcactcatccacatgacttgctcacccatatttctgatctatattttccttttcaaccctagactcgaatttccaactgcctactgggcagacatgactattcagacacaagtaatgttcaacaggttagaggggagctccctgtctcccctgctcggtctcctgcattccctcctgcagaggatgtcatgcatcctccaagtcacccaatcagagacctcagcatcatccttaa

SEQ ID NO: 504512 - DNA, 640 bp, Homo sapiens
ttttccatctttaaccaacaccttccctggctccagctactgccacttcatcctctcttgcagccatgcttcttgaaaaagtggtctccattcaccatgccccctcctccatcttccgagcccaacaaacacagtctcagcactactcaataggagctggctctgccacaccacaggaccttattgagtgcagtggatgcttgtcagtccttatcttgcctggcttctcaacatctggtcactatcattgtttccctggttccacatgacccctgggtccctcctacctccctcaccactcctcggtccctccagggtctctctcagtctgcctggttccctcgatgtggggtcctctccagctcttcccccacgttctccctaggtgggctcactcatccacmtgacttgctcacccatatttctgatctatattttccttttcaaccctagactcgaatttccaactgcctactgggcagacatgactattcagacacaagtaatgttcaacaggttagaggggagctccctgtctcccctgctcggtctcctgcattccctcctgcagaggatgtcatgcatcctccaagtcacccaatcagagacctcagcatcatccttaactctcactctgcta

SEQ ID NO: 504513 - DNA, 601 bp, Homo sapiens
aagtgccagagccaccctaatctaatggacacctaactagattttcttaarcaagtcagacactgtcctttccgaatttgaatagggaaatgcaaagataatctagttaattggaaaaagaaagagaaaggagaatgacgtgtaaaaagaagcacagacgctattgaaaagagatcaatgccagaggctacaacagctatgaccactagagagctggacaccatacagcaaagctgctgttaaagccttacagtcattggcatctggcacatgaattcatctaaatccatctaggttccttccaaaatgtgtagcattttgtacctggtcagatgttagggaaagaaattcatctgcgtgaatattgcaatacaggtctcacctcctccaagtctttcctccaactcttcattgaccacagtttgccctctctccccactctgattttctccattgtgtaaactccaggctgatcttgcttgatgcccccaggatccaaagtcagaagcacttacctcattcctaattcttaactctacttgcctgcttggaatgcagctcccctcctgctcctcccatccaaatcccaggctgctctgac

SEQ ID NO: 504514 - DNA, 601 bp, Homo sapiens
aagtgccagagccaccctaatctaatggacacctaactagattttcttaagcaagtcagacactgtcctttccgaatttgaatagggaaatgcaaagataatctagttaattggaaaaagaaagagaaaggagaatgacgtgtaaaaagaagcacagacgctattgaaaagagatcaatgccagaggctacaacagctatgaccactagagagctggacaccatacagcaaagctgctgttaaagccttacagtcattggcatctggcrcatgaattcatctaaatccatctaggttccttccaaaatgtgtagcattttgtacctggtcagatgttagggaaagaaattcatctgcgtgaatattgcaatacaggtctcacctcctccaagtctttcctccaactcttcattgaccacagtttgccctctctccccactctgattttctccattgtgtaaactccaggctgatcttgcttgatgcccccaggatccaaagtcagaagcacttacctcattcctaattcttaactctacttgcctgcttggaatgcagctcccctcctgctcctcccatccaaatcccaggctgctctgac

SEQ ID NO: 504515 - DNA, 577 bp, Homo sapiens
cctaacacaattatgtaaaggcaagtctaagaaaggagaaggagttgattcccatgtagaagtcaaccatctaggctaactgttcatcccaccccaatgcctcaaacccaggctgcccacctatttatcacacttttgcaggtctgtgaaagtcagcaacaaataccgtatctattccaggagattgtcctagagcctcctcaatttctctgtggacactatgcctgctcttgtctccctggttctgatttccatgtctgctgccagttttaacrttgttcctggccttctcatattagtcacctaagcccctcctcttgggccttgggtctcagcctcatctcatcctaacacttcctactaacctggtgagaagctccctgctctagctatagcccgctaagcctgtatgctggcctagctcccagatgctctcaagtaaaaacaaaaaagtagacattttgtcttgaaccctaagtttccatgctggggggagggataagattatgaccactatccataccccatctcttgagaatttggagctgtgggacgaaaaagaagaaccagagagttg

SEQ ID NO: 504516 - DNA, 466 bp, Homo sapiens
catcccctccctcaaccagagccaaactccaaaggcactgagtctttcaatctttgagcaagaaaattatcttaataagggctctcaatattctatttcttatgtgaagattctctttgttcttcctagagccctctaaagttttgatttctttaaacagagaaagggaagcttttttctctacccattcccaagaaaatgtagaagccaaattctgttttaaatgtgtgacttactacttgatatttgacctcttccttcatcttgtattcaagaaacttstaatttcagtaatgttaaagagtcatgtcctctgacctgaccccaacgggagggtggccctaccatccactgcaaagctgaaacacatctgactagggtttgcagatttcttctgccaggactcacactgggctccagcagcagtcaggctgagaagaaaagagtaagagatgctgagatggaa

SEQ ID NO: 504517 - DNA, 568 bp, Homo sapiens
gtgttacaacagctatagtgtcactaggtgataggaatttttcagttccattgtaatcttatggaaccaccactgtatatgcagcctaccactgactgaaacatcattataaggaacatggaacatggctattatgtttaactatgttaagtatatatatgcagacttaccaagtagtagagctgaataccatccaaattaatgaagcagaaaagataaaaaagcaaacaaacatgcaacaatagaatactagaaactagcaagaaagaattaaaaaaaaagcagaaaatagaaattagatgacagataaaaactaaacacatctattacaacagtaaatgttaatatgaaaagttaacctaatgcataaaaagaattctcagattagatttaatatgaactaaatctagccrtaaatgctctatagaaaaacaatacaacttttactagatcgctttcatttgctttctagatctactctgttacactccactgctttctgaaccaggaggccaaccaataccaatgtattcacacatggccttgcctccagcttccagctgggttt

SEQ ID NO: 504518 - DNA, 653 bp, Homo sapiens
  misc_feature (1)...(653): n = A,T,C or G
nnnnnnnnnnnnnnnnnnntttcatgagctgagcacccatctccataaatcagtgccagggccatctgtgcagactgcctgggctctggctgcaaactcagcaacagtgctatgtcgtcaatgtcgtcaccaacccagcatctctgtctacacaaccccaaactcaggctctgttttctgagcaaataaccagtctcactgattatttctttggattccaacagaatccaccaggtgtttcagtgtcttgtagatggcttccagagctttctaacagctaaggccccgcaggcaggactgctggtatcacgagccctcctgccttcggaactgttactgggctctccaggggaaggtaactgagctcctctgaggactgtgttcttgccaggtgttctgcaccatgcccttggaaggataaaggcagagggtggatggggtgggggtgatgagcacactctgctggggggcatcccagttggaaatccacctcagggatcggacactgagtgcaygtgacccgagtgagctggccccactttacatgagattagctgtgtctgaggtgtggcaagggaaggaaaggagctcggagctaatgagctgagttcctggcagcattaatgcggctgcacacccagcaggcattgcca

SEQ ID NO: 504519 - DNA, 592 bp, Homo sapiens
agctgggctgtaaccatctgagggttctactgggatgaatgtcaagcatgacttacctgcatggctgggagctgcttctggctgtcacctgtgagctcagtttgggctttcaaccagagtgactacccatgrcctttctgtagggcctgggcttcctgcacatggcagctgggttctgggaaggagcatctcaagggcaagcgtttccagaggtccaggcagaagctgcaggacatcttataacttggtctcagaagtcccagagcatcatttttgccttaagcaagtcattgaggccagtctagattcaagggaaggggaatgagaccccatctcttatgtgaagagcatcctgtgtgtacagggaagggaggaactgatggggcacatattacatcatttatataaaccacctgcattttatgtgcataatgtaatttaatgctcacatcaactctgttgggtagaaactgactttgtctcattttatacgtgaggaaaccaagtcttattggagtcaaggggcttgctcaaaatcaaagagccaataattggcaaaactagaattagaacttagtcttctgattctaag

SEQ ID NO: 504520 - DNA, 602 bp, Homo sapiens
cctcaaatatgaacattcttggagcaggatgaggaataatattagaggataaattacagaagaatcagaggtagattgaacacaaaaaaattacactggaaattacactggaaaattacactggaaactcttattttaactgaattgtgtttctaagaatgttcccccactaccctctcctcagccctcttaccttactgccatctccatacaaaatacaccccaagcaattcagagtataaagtccaccttaatggaatggaagtgcctgtgtgtgatttatagtgactgtccaaactgtctcaggggactgaatatattctaaaatagaaayacatttttctaatttctctttagtaattcaggtatctacatgcgtatgcgtgttagtggttcattttgcttaatgagttgttgcttcttagaaaagcaattcctcaggaaatgcaatgacaaattatatcttagagcagtgtaaatcttgtgtggaaagcaagttgactgtgctcaaatggcagttgtcacaggcatctaattttgttaatattttcctacacgctttaatgaatattcaacaactaaggttggaaaacagcatattt

SEQ ID NO: 504521 - DNA, 440 bp, Homo sapiens
ctggaaaaaaatatttctttaattttataaaggatacacacatacatgcacacacatattcacacacagtgattcactaattccagtcacctctggttcaacttcttctgcctaggtttcaaacctatctatggctggcctctccctatctgcccagtcatgtataccattattcccagaccccaaaggtcattcttkttctccacctaaattcagttgttctatccaggaatatcattcccctcttcccttcatctatccaaattcctcccatcttttgaggccaagatgaagtatcaacttttttaaaaatttgaaatatctacctatattcttcctgtcaagcacatccgtgtgaagagaccaccaaacaggctttgtgtgagcaataaagctttttaatcacctgggtgcaggtggactgagtccaaaaagagagt

SEQ ID NO: 504522 - DNA, 441 bp, Homo sapiens
gctggaaaaaaatatttctttaattttataaaggatacacacatacatgcacacacatattcacacacagtgattcactaattccagtcacctctggttcaacttcttctgcctaggtttcaaacctatctatggctggcctctccctatctgcccagtcatgtataccattattcccagaccccaaaggtcattcttgttctccacctwaattcagttgttctatccaggaatatcattcccctcttcccttcatctatccaaattcctcccatcttttgaggccaagatgaagtatcaacttttttaaaaatttgaaatatctacctatattcttcctgtcaagcacatccgtgtgaagagaccaccaaacaggctttgtgtgagcaataaagctttttaatcacctgggtgcaggtggactgagtccaaaaagagagt

SEQ ID NO: 504523 - DNA, 570 bp, Homo sapiens
gtgaaactgatgtcttgcttttcaggggtaccagccttcaagagtccactgggtgtccttagtctgaagagatggataaaaatgctagtggaagacaggaaacatagtttatttttatgatgaaaaaatattcttccatcttgatgacatatttattgtgagagtttgtgcccttctgtgtgatacttgaagcacagagatgacagagaactctggtcaggatacttgttcccagttcatatgcccagtggtggcttcaagggtttttgttttcataaaacaaaaaaatgaagttgatgcaatttattaaccaactaattccatgggatatgattaagattagctgatttgaaatgcatattaaagggtgaaattctgattttttagttgagtgcttcatatctattacctttaaatttaaggaaataaaatatgtctataagtgcagctagccattctagtaagtttctgagatgttratcagttgagtagtacaaaacatgagtgttaggatgacaaaagctggaaaaactataatcaaacttacccctaatagtcactttatttcaa

SEQ ID NO: 504524 - DNA, 570 bp, Homo sapiens
acatttgtggcttgtcttatgcatttctatttattgctgctccaagaagtatgacacactagcaaagtgttttcttttcaacatgttaataaaagtttaatagcctatggtatcactgaacctragaatctcaggcactcaaagcagtcagcaatagccttgggtggtttgggtttctccagtttcaactacggaaatacttaggatgggttttgagttggctgttaaagtgcaaaacatgtcttatgaaactgaatttgagagcttgtggttcttcagagtttcctgtctactgacagagtagttaaacttacttttaaaaaaaatcacagaaccatctatacaatatgagttatagagctgaaaggtgagactgctctctcaccttctctgtcttcccactttactggcttgactcagtgcctgaaatttgtaccctggaaaccccccttactggttctctggcattaaagcaggggctttaggttcctcactctgctgtgcacatcctctcatggcacctgtaggaccaagcagcagaaaggatggggagagaaaaaaagcaatgtg

SEQ ID NO: 504525 - DNA, 677 bp, Homo sapiens
aagctctcgaagcagagagaatgcaaagagggaaggaaatggtgggaacaaagtttaaaaccaagaatgagagaaacagtgaaatactctgtaaattagattgataaaacagagaatattaaagctgaaccatataatattaatgaacctgtagcctaagtctattattttaggaaaaactgagagctaaatgattagaatttacctggttaaaataacacaagaaattagaattagatcccatattacacgctgtgatcacttagtttcctaacccattatctctgcaaacacgagcataggcttacatatatctgtatgttgggaggttgtgcatacctttatatgtttgagtgtcaagaacctattcgagacaataaagataatctgttttgycctatgattcttattatatcattgttttctacagtatctttttaagaaatttaatatatttttcaagcaattcagaaaataacttaactgtcacagaattttttaaatttaagaaacaaaatctttagtaaatacatacttctgaaaatatgaaaatactgccccagtgttaagttacaggttaatgtcagttcctagaccagattattggtttaattctgttgttaaaattacatcttctgggaccggcgcggtggctcaggtctgtaatcccagcactt

SEQ ID NO: 504526 - DNA, 677 bp, Homo sapiens
aagctctcgaagcagagagaatgcaaagagggaaggaaatggtgggaacaaagtttaaaaccaagaatgagagaaacagtgaaatactctgtaaattagattgataaaacagagaatattaaagctgaaccatataatattaatgaacctgtagcctaagtctattattttaggaaaaactgagagctaaatgattagaatttacctggttaaaataacacaagaaattagaattagatcccatattacacgctgtgatcacttagtttcctaacccattatctctgcaaacacgagcataggcttacatatatctgtatgttgggaggttgtgcatacctttatatgtttgagtgtcaagaacctattcgagacaataaagataatctgttttgtcytatgattcttattatatcattgttttctacagtatctttttaagaaatttaatatatttttcaagcaattcagaaaataacttaactgtcacagaattttttaaatttaagaaacaaaatctttagtaaatacatacttctgaaaatatgaaaatactgccccagtgttaagttacaggttaatgtcagttcctagaccagattattggtttaattctgttgttaaaattacatcttctgggaccggcgcggtggctcaggtctgtaatcccagcactt

SEQ ID NO: 504527 - DNA, 677 bp, Homo sapiens
aagctctcgaagcagagagaatgcaaagagggaaggaaatggtgggaacaaagtttaaaaccaagaatgagagaaacagtgaaatactctgtaaattagattgataaaacagagaatattaaagctgaaccatataatattaatgaacctgtagcctaagtctattattttaggaaaaactgagagctaaatgattagaatttacctggttaaaataacacaagaaattagaattagatcccatattacacgctgtgatcacttagtttcctaacccattatctctgcaaacacgagcataggcttacatatatctgtatgttgggaggttgtgcatacctttatatgtttgagtgtcaagaacctattcgagacaataaagataatctgttttgtcctatgattcttattatatcattgttttctacagtatctttttaagaaatttaatatatttttcaagcaattcagaaaataacttawctgtcacagaattttttaaatttaagaaacaaaatctttagtaaatacatacttctgaaaatatgaaaatactgccccagtgttaagttacaggttaatgtcagttcctagaccagattattggtttaattctgttgttaaaattacatcttctgggaccggcgcggtggctcaggtctgtaatcccagcactt

SEQ ID NO: 504528 - DNA, 537 bp, Homo sapiens
atgagatccaatacttaaatataatagtgtccttcaaatgaaggcaaattgtagaagcatattatctaagaataccaartgacataaaataaattacttagttctgcctagcatgttaagtaaatggcacaatgccaattgcctcacctctgatatagtggaatacagtatgccttccattgggtgtgctgattgcacttgctagaaaatttaaaggcactctggagcccatattcccataaattactcctttgaggacactgtggtagagtaaaagcatggaaaatgagaatcttccctccttcttagataagaatgatgaatccagtgggaaaaggtagggaagttagaaagatgtgggaaatgatctcacccctcaaagctctttactgttcctacaaagagctctagggaatacattggtggaagttctaaatcactttcctgttgcaaatctgtggggaaatgccagatgattctgaggactgcaaatgaaaagaaacttttctctctttgttacattccagaaaaagtttg

SEQ ID NO: 504529 - DNA, 506 bp, Homo sapiens
agaaggtaatgagtcattttatgaggacgaggtgagccgtgtttgtgccaggtccgkggaccacagtggcaaatgtggtacagacggcaacctcagaatccgagaattctaattaaggatgagaaaggaacagggcactgacaggctgtcagcagaagagcagagcactccgaccacaaaaccactcggaggttcccactctgtctttgctctttcagagataataaacggatcacatttttaattcctgcaattttagggtaaatttaaccagcaatgggcattcagcccagaagtggcagcataagttaagaattttattcttgatttttacagtccaatgtgtgtacacaaacactctgctccttgccctggtatctatggagtagcaggacttttttttttcactctgttaagaaacacacacacacacacacacacacacaaacacacacacacacattatttaaattgcagaatgaatatatgcaatgcagcattttaga

SEQ ID NO: 504530 - DNA, 412 bp, Homo sapiens
ttcacgtggtgttaagtgctccttctgtaagcactagctagcaagagtatttttgtttagcaaggccatcacaaaattagacaagcaaaccatagcaatgtatttgagcaatgtagtctataaataacacagtggaaggaagcataggagcacattatccatattacaatcttgtgccttaaaaaaaaaaataggttagctctgtaatagaaggcagctccagagaaatagacaaaatgtctttggtgattgttaaaggatgtaagcagcctcctggtaataagatctgctgagtgtaccctgtggattctgtgcgcccctaagcaactcctacaggctgagtagtgaaygcttgtaaagttggcgttgtttacctagcaggaatggaacaaaaaattttcgtggaaggatg

SEQ ID NO: 504531 - DNA, 505 bp, Homo sapiens
ttggccgccacaattcctgccacgggaggaagtggggatgagggagggtgagtgaaatcaactcacagagaaaagagatggccagggaggagccagcaacctggttgtattcaagccctgaggttcagcatttcctgaagctatgctgtgtctcttcctgctgtttagagacattcagctcttacttgcatcttcgagcccatgtctctttcatttcctaaaatggcttaaactgtgttttcaccatttccatctgaggttttcattagtataagtctttttagaccacatcttttacaatcttaagttagatgatgaagaatctaaacaagttgaaagagggggaaraaacattaattgtggaaggaaggatttagtgttttcctctttgtttgtgttctccataatctccatgtgtaagggtcgtgacattttagctcaaattggatgcagaatctatttctagaacaggcacgatgtcaggggccaattaagttgttggcca

SEQ ID NO: 504532 - DNA, 589 bp, Homo sapiens
aaaataattaatgtgattttatatccgaggttaattttttttcttacaagtagaatattccacatggttaattccgcaacatttatcaaatgtatataatgtacaagtcaatatgctaggctcagttaaagaatacaagttcacataacaaaaactctgtggtggacttactaagctctatatattcttttgaaattgctatttatatttagttatatttataaatttattaaatatatttacgttatatttatattaaaacccctttgtagggagacatactgtatatgaaatgtcttyagccatatagtgatatatgacatatcttgaccataactacatatagtctctaatgtgagcattgtttttgctcccaataccaatatcatcattacagtgaggtaatactttgcactcttcatctcaacactcatttttaataaatgacctcaaacatcatgctccaaaagagcaaccttctaatggctttccagtgcactgagtataaaacctactccaatgccccctccccaaatatgtgaggctggctcctcattctctcgcaggttgtagcttaaatgcctcaaat

SEQ ID NO: 504533 - DNA, 634 bp, Homo sapiens
gacagcctggccagctggctaacatcttgtggtggcaaagcctcatgattcacagtaaaccagttgtcgacactcagggctggaggctcgaggagctgagacagcccaccaggagagccgaggaagctctcagcccacgaggggcccttggcttgtcaggggctcgggaccccaggtcctgagtcttgctcctcgttgtgcggtgtcatgctcggctggctgggagaaccagcctccagccatcccacaggctgcgggaaggggaggtacccacacatctgtgtgctaacaggtgtgggcaaggggcgctgcccccatggtgcccctccccccatggtgcccctcccagagccaacgtctgaaaagctcacccccagcacaagctgagggaatcaaaggacccagagcacaccaccggcacccccaaaaggagcagccttcagcatttcccctgccttccagtcgtggagaactcagccccagcccagcatcccctaggcctccatgctgcgcccctccctgcccaggtgaggagggagaagagaacagggcytgcgacaagcaactgtgcaccctccccaagcccccagctctagctggcgcagtccaaggccttgtggccaccctgagagag

SEQ ID NO: 504534 - DNA, 618 bp, Homo sapiens
tgcttaaaaaaatcatttcccttcctcatgattcttgctgtatgataatttcaactgggtaatgaggaactacatctccgaagaatcccattctctccttggacatctgttataaacatatctgactgtaagttctcattcattgattttctttctacctcttgacgctgcagaaaaaaaaaatccaattcttaccttcagagaggttttgcgtatttctcttaktcttgtcttgtaagtatttcttgtttcaactctcttcctgagggttttagatcccttaccatttcaataattctctgaagcacattgaatgaccattaagcctctcaaaggtagtatctactactttacataatagcctgcccattatttcaccaatagggagcagtagtctcacctattataacacacattgtacttttaatacagcctaagatcacactaccttttttggatgttgcataatgttgtcaaggctgctgttagctccaatcctaaaatcttctcttgtatatttcattactctgtagttattgtagtagttttcaaccagagacatttttgtacccccttcccccccggggacatttggtaatgtctgaagacatttttggt

SEQ ID NO: 504535 - DNA, 554 bp, Homo sapiens
tacttatctactatgatagcaatgtttttcctaaggatgaaattgagtttttatacactaactstttgtcatatttttggcaaatatttcccccaattttttgcttataattttgtttatcgagtttttgatacgtacatttaaaatgagtaggcaatcaaatctattattctttttccttctgaaaactctcattatttttatgcctggagagtcttttcccatctagaagtaagataaataataacctacattttcttttaggggcttataattttattttttatatttacttttttcccatatatatggcacaaggcaaggttctaaactgattttaaaaattagttaattaggttttccagtccataactaaataattacattctctcttgattttttgttctttaaattataaataatgttagattctaattagagtcaattactgggctttttgtttcattttctaatttgtatgctttttctaatttcagtacaatactgtctcatgaatgacgactttaatatatttgttttttcctgaaatagtt

SEQ ID NO: 504536 - DNA, 611 bp, Homo sapiens
tttgagtaactactatttgtatgacccagtgctggttgttggtgaaacaggattgaataaaacaaataaaatttcttctttcaatcattccataattccctggggctacagccactttggtattgtatagatacgttcctaccattccacatgcatagctgatatgtttcaggctgccacatcccatagttgtcattgggcctccaagtcacattcttctgtgtaggtcactgtcaccagtgactctactactgtcatactactgtcacactgtcagtaatatgtcaaactggaccccttccttacaccgtatacaaaaatcaacaatatatgtattaaagacttaaatrtaaaacccaaaactataaaaatcccagaaaaaaatttaggcaataccattcaggacataggcatgggcaaaaatttcatgacaaagactccaaaagcagttgcgaaaaaagcaaaaattgacaaatgggacctaattaaactaaagagctctgctcaggtcaacctcaactcaaaatggataaagaaactctcctttttctctgttgttaagctctttaaaaaaaaaaaaaaaaaaaagccccatcgcaaggctacttaga

SEQ ID NO: 504537 - DNA, 601 bp, Homo sapiens
ctggattggttacagctcagcatctgctttagtcagagaaggtttgagcaatcggccaccagtgattggcctaagcgctctgactgatagaaaagtaggttacagtctgtttacacctcattaggttacagttcactgtatggagaaacctttagggtgaacttaaaataggaaaggaggcagctttaggctaaccttaatttaacactggtaattcacttgcctcctaaactgttaatgtaactaccatcacaaactttaacacctccaagaagagaatttttcttccctgttccttgattttttaaaaaagagagaattaaaaagataacatatactttctcatctcatatactgtagcttttctatcttttcatccatatggctgttggggggagaggggtggtgtaggggagagagagagagagagattaaaaaaaaagagaaatactagttacaaggcagaattatctttctgattgcatgaaacccatagatcrttttctctccaacagaaatcttttcagtaacctcaatccacgttttggcttcattttttattatgctttaactggattatggaataaaaccaagtttcgat

SEQ ID NO: 504538 - DNA, 548 bp, Homo sapiens
cctgcatggccattggaacccagagtgccaaatgggatagaaatatgtggagaaaatagtatttatgtaactcttctcagggaggtgctattggtgtttctgataagcaacttgggrttggggggtaaagctcaccaaggtgcatactcaaggtagaataggtgatcactaaactgcctggtaggttgcattaagtgtgggagttttatcttctgagtggggtctccaggcatgactctattatagaactacatgactcggacaaggggttggcaaactttttctgtaaagagccaaatagtaaatattttaggctcatgggacaaattacctttgttgcagctactcaactctgtctttgcagtgcaaaagtaactaaagatgatatgtaaatgaatgaagacagatgtgtttcaataaagctttatttatggacattgacatttgaatttatatcattttcttatgtcaagaagtattattcagcatttgatttagttctcatcattaaaacatgtaaaaatcattcttatctcatgaccataccg

SEQ ID NO: 504539 - DNA, 548 bp, Homo sapiens
cctgcatggccattggaacccagagtgccaaatgggatagaaatatgtggagaaaatagtatttatgtaactcttctcagggaggtgctattggtgtttctgataagcaacttgggattggggggtaargctcaccaaggtgcatactcaaggtagaataggtgatcactaaactgcctggtaggttgcattaagtgtgggagttttatcttctgagtggggtctccaggcatgactctattatagaactacatgactcggacaaggggttggcaaactttttctgtaaagagccaaatagtaaatattttaggctcatgggacaaattacctttgttgcagctactcaactctgtctttgcagtgcaaaagtaactaaagatgatatgtaaatgaatgaagacagatgtgtttcaataaagctttatttatggacattgacatttgaatttatatcattttcttatgtcaagaagtattattcagcatttgatttagttctcatcattaaaacatgtaaaaatcattcttatctcatgaccataccg

SEQ ID NO: 504540 - DNA, 548 bp, Homo sapiens
cctgcatggccattggaacccagagtgccaaatgggatagaaatatgtggagaaaatagtatttatgtaactcttctcagggaggtgctattggtgtttctgataagcaacttgggattggggggtaaagctcaccaaggtgcatactcaaggtagaataggtgatcactaaactgcctggtaggttgcattaagtgtgggagttttatcttctgagtggggtctccaggcatgactctattatagaactacatgactcgracaaggggttggcaaactttttctgtaaagagccaaatagtaaatattttaggctcatgggacaaattacctttgttgcagctactcaactctgtctttgcagtgcaaaagtaactaaagatgatatgtaaatgaatgaagacagatgtgtttcaataaagctttatttatggacattgacatttgaatttatatcattttcttatgtcaagaagtattattcagcatttgatttagttctcatcattaaaacatgtaaaaatcattcttatctcatgaccataccg

SEQ ID NO: 504541 - DNA, 548 bp, Homo sapiens
cctgcatggccattggaacccagagtgccaaatgggatagaaatatgtggagaaaatagtatttatgtaactcttctcagggaggtgctattggtgtttctgataagcaacttgggattggggggtaaagctcaccaaggtgcatactcaaggtagaataggtgatcactaaactgcctggtaggttgcattaagtgtgggagttttatcttctgagtggggtctccaggcatgactctattatagaactacatgactcggacaagggrttggcaaactttttctgtaaagagccaaatagtaaatattttaggctcatgggacaaattacctttgttgcagctactcaactctgtctttgcagtgcaaaagtaactaaagatgatatgtaaatgaatgaagacagatgtgtttcaataaagctttatttatggacattgacatttgaatttatatcattttcttatgtcaagaagtattattcagcatttgatttagttctcatcattaaaacatgtaaaaatcattcttatctcatgaccataccg

SEQ ID NO: 504542 - DNA, 658 bp, Homo sapiens
ctggagacattttttgttgtcacaactgggtttgctactgttatcttagtgggcagggttcagggatgctgttaaccatcctacaatgcacaggacagctccctaaaacaaagaagtatcttgtccaaaatgtcagtagctctgagtttgagaaaccgtgctgtaagtattctataaagcagagataactgtacttaccttgtagagatgttgtgaggtttcaatgagatcatgaaggtaaaaaacaaaactgaacatatcttaaacaagaaatatttaagaaaacaaatttaatatattgaatagaaaaaaaaaggcaaaggacacaatttgggaaaccatttacctttaagaaatgtcagaggaagraatgtgtgtcacatatactgaaaggtagcatagagggagaagagaagaatcgggaaagtggggcatcagtgatcagcacagagccccttagtggagtgccatgagcgtctattgcatgactgcaaccagggaagaaggcgagcaggaccctgaacctcagatagctcaccgaggatgggacctggaaagagaccactggggtgaatggttagcagagtcgtgataactttgagggaaaagttgtaataagggtgaaagaaagatgggaatagaattccaggcagcaata

SEQ ID NO: 504543 - DNA, 574 bp, Homo sapiens
attcatttcagattattgaagttagaatatacaggatttggtgttggattagatacagaggaaggaagaggacaatctagaacaggagtcagcaaatgtttttggaaagggccaggacattaaagagtatctgtaaacgtggacattaaatagctcagtttatagagaaggagactgaccaaaaactaacaattccagaactctgcaatatgctctgaaaagcaaccacaaggtatcagataggattcagaaagaggcatataggtgggggtgagagagaaagtgagtggtctaggacagtgcttttccaaggatctgtgcttaaggaccagttttgtttttattttcagcccatccattgtggacagatgtttttgtaaaacaaaatacaaatgaattgctagaaaaatacaagtgaaaaaaagcatagaaataaatrccactcttttttcctattatattcagcatacataaaatcctatttcaataaaaatattagaacaaacataatgccagataaaaggaaaaaaattgccccaattaatcacattgtcattgaaagcatgtgtacaag

SEQ ID NO: 504544 - DNA, 574 bp, Homo sapiens
attcatttcagattattgaagttagaatatacaggatttggtgttggattagatacagaggaaggaagaggacaatctagaacaggagtcagcaaatgtttttggaaagggccaggacattaaagagtatctgtaaacgtggacattaaatagctcagtttatagagaaggagactgaccaaaaactaacaattccagaactctgcaatatgctctgaaaagcaaccacaaggtatcagataggattcagaaagaggcatataggtgggggtgagagagaaagtgagtggtctaggacagtgcttttccaaggatctgtgcttaaggaccagttttgtttttattttcagcccatccattgtggacagatgtttttgtaaaacaaaatacaaatgaattgctagaaaaatacaagtgaaaaaaagcatagaaataaatgccactcttttttcctattatattcrgcatacataaaatcctatttcaataaaaatattagaacaaacataatgccagataaaaggaaaaaaattgccccaattaatcacattgtcattgaaagcatgtgtacaag

SEQ ID NO: 504545 - DNA, 651 bp, Homo sapiens
acatttaaagctgacaatgggtrgtatattctcattcatcttttacaaatgctgctctgatatttgaatttttaaaacatctcttttgagtacctgtggactttcatttttggcctttaattttattggaacacacacaggcaggaaccacgttgtaggcaagaacacgtaagtgcttagctgtagggaggccaaaattgttctagactgaaatgtgtagtaaaagaacatattactcaagtatatttaatagcttttacattggcctttgtttttcaaatataaggacattacaaaaactgcagatagaatcagatagtaaaaaattatttatagcccagaagtcagaatggcagtcttctatgctaggtctttatgaccttagctaaagtcatttaacatctccagattagttcctttatttaaaaaaaagcaatgtggaggttaaactagatgaggtccactgttttgaagtgtgttggcattttaagattttgagataaaaacatctttaaaatggtgactctctgctgtcatgtttaaaaggaaaattatttatgtggaataagcataaatatgctatgatgtgaaacatgcccaaggtcctaatttttccggtgtttaattattgaaaccaatcacttatcagca

SEQ ID NO: 504546 - DNA, 525 bp, Homo sapiens
tggaacacacacaggcaggaaccacgttgtaggcaagaacacgtaagtgcttagctgtagggaggccaaaattkttctagactgaaatgtgtagtaaaagaacatattactcaagtatatttaatagcttttacattggcctttgtttttcaaatataaggacattacaaaaactgcagatagaatcagatagtaaaaaattatttatagcccagaagtcagaatggcagtcttctatgctaggtctttatgaccttagctaaagtcatttaacatctccagattagttcctttatttaaaaaaaagcaatgtggaggttaaactagatgaggtccactgttttgaagtgtgttggcattttaagattttgagataaaaacatctttaaaatggtgactctctgctgtcatgtttaaaaggaaaattatttatgtggaataagcataaatatgctatgatgtgaaacatgcccaaggtcctaatttttccggtgtttaattattgaaaccaatcacttatcagca

SEQ ID NO: 504547 - DNA, 524 bp, Homo sapiens
tggaacacacacaggcaggaaccacgttgtaggcaagaacacgtaagtgcttagctgtagggaggccaaaattgttctagactgaaatgtgtagtaaaagaacrtattactcaagtatatttaatagcttttacattggcctttgtttttcaaatataaggacattacaaaaactgcagatagaatcagatagtaaaaaattatttatagcccagaagtcagaatggcagtcttctatgctaggtctttatgaccttagctaaagtcatttaacatctccagattagttcctttatttaaaaaaaagcaatgtggaggttaaactagatgaggtccactgttttgaagtgtgttggcattttaagattttgagataaaaacatctttaaaatggtgactctctgctgtcatgtttaaaaggaaaattatttatgtggaataagcataaatatgctatgatgtgaaacatgcccaaggtcctaatttttccggtgtttaattattgaaaccaatcacttatcagc

SEQ ID NO: 504548 - DNA, 651 bp, Homo sapiens
acatttaaagctgacaatgggtagtatattctcattcatcttttacaaatgctgctctgatatttgaatttttaaaacatctcttttgagtacctgtggactttcatttttggcctttaattttattggaacacacacaggcaggaaccacgttgtaggcaagaacacgtaagtgcttagctgtagggaggccaaaattgttctagactgaaatgtgtagtaaaagaacatattactcaagtatatttaatagcttttacattkgcctttgtttttcaaatataaggacattacaaaaactgcagatagaatcagatagtaaaaaattatttatagcccagaagtcagaatggcagtcttctatgctaggtctttatgaccttagctaaagtcatttaacatctccagattagttcctttatttaaaaaaaagcaatgtggaggttaaactagatgaggtccactgttttgaagtgtgttggcattttaagattttgagataaaaacatctttaaaatggtgactctctgctgtcatgtttaaaaggaaaattatttatgtggaataagcataaatatgctatgatgtgaaacatgcccaaggtcctaatttttccggtgtttaattattgaaaccaatcacttatcagca

SEQ ID NO: 504549 - DNA, 525 bp, Homo sapiens
tggaacacacacaggcaggaaccacgttgtaggcaagaacacgtaagtgcttagctgtagggaggccaaaattgttctagactgaaatgtgtagtaaaagaacatattactcaagtatatttaatagcttttacattggcctttgtttttcaaatataaggacattacaaaaactgcagatagaatcagatagtaaaaaattatttatagcccagaagtcagaatggcagtcttctatgctaggtctttatgaccttagctaaagtcatttaacatctccagattagttcctttatttaaaaaaaagcaatgtggargttaaactagatgaggtccactgttttgaagtgtgttggcattttaagattttgagataaaaacatctttaaaatggtgactctctgctgtcatgtttaaaaggaaaattatttatgtggaataagcataaatatgctatgatgtgaaacatgcccaaggtcctaatttttccggtgtttaattattgaaaccaatcacttatcagca

SEQ ID NO: 504550 - DNA, 646 bp, Homo sapiens
taagtgagatagtaagcacagagaaatacatttttgacattaaattctttaaaatgtaaatgaaacatgtagctacctgacaaatcaatacagaactagaagttgtagattcaaggaattacaagttctctctctttttaaaaattctttaacaacttcattgaggtataatttacataccataaaactttcccattttaagggtataattcagtgatttttagaattgtatgaccatcatataacccagctttagaacattcctaccactgcaataagaacccttgtgcccatttagaaatactctccattccaatctccaggattttttttttttttttgagacagggtcttgctctgtcacccaggccggagtgcagtggcatgatcttggctcactgcagcttgagcttagaggctcaagcaatctcccacctcatcctcccaagtagctgggactagaggcatccaccaccatgcccgactaatttttgtattttttgtagagacatggccatgttgcccatggctggtctccaacttgtgagctcaagtgatggkctcacctcagcctcccaaagtgctggcattacaggtgtaaaccaccatacctggcctgtcatctactttctatctctcaagattt

SEQ ID NO: 504551 - DNA, 594 bp, Homo sapiens
gctgaaagacagaaaaaaaaaaaaaagtaggcaaataaaaatccttgttttctgtacaatttcagatttgtgtatgttttatgggaatttagtctcaccaaatgggatcgatttttcattccttttatgaacttctggtgtataaaaatgttaaaatcacctatataattggttgcactggtagttaaatggaacctaatttgtagcatgggcatttaacaatacagataatttattcattagagttagcctttggggggaacttcaacttacaaaaatacgttttagtgagattatagcagagggatctcactttaatatatcctaattctaaaatggtttttcggggtattttttggttatatttgttaggtgatagaaaagcaagactagtaaatgtagtaagtggctatctttggctgtttgtccatttaaattaacttttttgattacccattaggaaaaaattgcttttctaggtgtgtaaagttttgcatatgattatagcctcttacctgtaaaaactgaatcagagcttagaaccatgcctggygcacaatagtcattcaacaattattccttgaataaagagac

SEQ ID NO: 504552 - DNA, 460 bp, Homo sapiens
tcaaaattaaaaacacttgctctgtaatgagaatggaaaagaaaaggcacagattggaagaatttctatataatttacctataattggggtagatgagaaattcttaaaaaataataacaatgcagtttttaaaatgagcaaaatgaaaagccatttcttttagtcatttttaattttggtggtttatgtgtttacaggatacatgacccaataagtgyatagtggtatcttattgtggtataaatgttcactttcctaatgattactgatattgagcatctcctatacctatctgccaaccatacatcttctttgataaaatgactattcaaaacatgcttgttcaaaatattgatgaacactcatttcatcaaagaagatataaggattgcagataagtacaggagaagatgctcaatatgattaatcattaggaaaacaaaaatttataccacaata

SEQ ID NO: 504553 - DNA, 438 bp, Homo sapiens
tgctttgtatggctgttttaataatttacaatagtgtacagcaaacagcctggcatgctcaatattttgtcattattactttttattataactttgaatataamtatagtaaattaaacatttcatttgaaaagtgagttaatacttgcaaagcacttgaaacagtgccttacaagtatgagtgtatgggtgttttagtatctgatatataaatttattatgtaaaagaaatgaaattttaaaattgatattccatgatctgtaaattctgaaaagcttaaactatttttaattgacaattccatatttctaaaataaactcaactggaaaaaaatgttgagtttttaaactcaacagttgagactattaaatctattagtaattttgaacagcacattactggtaaatgggataatgagtaagtgaatgaataaaaa

SEQ ID NO: 504554 - DNA, 539 bp, Homo sapiens
tcccagcactttaggtgagaggattgcttcaggcctggagtcgagactagcctgagtcacatagcaagaccccatctctacaaaaaattaaaaaattagtcacacatggtagcatgcacctgtagtcccagctacttgagaggctgttggggagggatcacttgagcctaggagtttgaggctgctgtgagctrtgtatgatcatgccactgtactccagcctgggcaacagagcaagaccctgtctcaaaaaaaaaaaaaaagaaaagaaaagaaaaagaagctataggacataggggagctagtcatatgtctgtcctactgagactctagatggcacaaggcaatggcacttgtgttagaaccagaatgcagctatggctgacttggaaccgtctgtcagaggaaaaaaggcatgcaaatagttactcatttgaccaaagcagaagaaaaccaaaatgtccaatgcctccaggaagaaaggcaaagatagagatactaatcatttctctacacatctgccatgccatgggtgaaga

SEQ ID NO: 504555 - DNA, 524 bp, Homo sapiens
aatataagctgaattgctgctaagtagttcatttagcatcttttaaaattcataagatgtcactcatctgaacgttacttatctttgcaaactcaggtatcaaacacagccaagaacttgaaagtaaacagaagaagccaatgtggatgttccggaatgtattccccaaactcagagcatgggtgctcattctttaaacatcattctggcaagttgacctatcagatatcccaatggcagaaaggaatttaggaatgaaatacggtcccaatggctgataagcacataaaaaggtgtgcaacgtcattagtcattaaggaaattaaagccacgatgagacagccaccacacacccaccagaatggttaaaatgaaaaagaagactcatcacactcattgttggtaaagatgcagactgctcgtgcatcactgatggggatgtaaaatggtacagccactttggaaaaygagttggaaatatcttagaattaaacatataacccagcaactccaaatccacagct

SEQ ID NO: 504556 - DNA, 562 bp, Homo sapiens
cattacaaccacccagagataatcactattagcatctggggattatattttaatggactttttgtctttctttctttattattattttttgaaacggagtctcgctctgtcgcccaggctggagtgcaatggtgcgatcttggctcactgcaacctccacctcccgggtttaagcgattctcctgcttcagccttctaagtagctgagattacaggtgcctgccaccacacctagctaatttttgtatttttagtagagacagggtttcaccatgttgcccaggctggtcttgaactcctgatctcaggtgatccaccagccttggcctcccaaagtcctgagattacaggcggtctttatccatttatatattatatgtaagcatatatcttcccttaattttttttttttttggaaacagttctgtttgctttatttttctttktttggagacagggtcttgctctgtctcccaggctggagtgcagtggcacaaccatagctcacggcagcctcaacctcctgagctttaagaggtcctcctgcttcagcctcctgagc

SEQ ID NO: 504557 - DNA, 427 bp, Homo sapiens
aaagtttgtacatgtccagtacagacacagtcatcctaggcctaactacattttcgatccacagcgggttgtacccatggatgtagaacgcatggataatggaggtctgactacatttattctagaagcccatttcctgtccgaaaattggggataaagaatagcaagcgaggtgtgatggcacatgcctgcagtcccaagaattcaggaggctgaggcaagagaatccctggaacccargcattcaaggctgtagtgtgctataatcatacctacggatagccacagtactccagcctgggcaacatagcgagattctgtgtctcaaaaaaaaaaaaaaaaaagagagagagaggatagcaattgctgcatagggctggatggagaactgactagatagtaagtgtaaagccctcgactgaattcc

SEQ ID NO: 504558 - DNA, 556 bp, Homo sapiens
tacggttgggacatattcggctcaggctcccccctggctggctggccagtaatccaatctcagtcattgaatactagaatcacaggtttacattattccagaaaaccatgaagggaccaagtcccttagtccatggtgattctaaacattgcagtttgtttcttctccttcatgctgccatcaagaactggtcctccagccatcagaggcctcaaacttgtccacagagagacacatgtggtctttaggccacagtgtttccagttattaagggcacaggcccagaccaccatattgaggctcactcatttttktacataagttatttaacttgtctgtggcctcttctctgtaaaattattatgatatagcagtaccagaatctaccacagaggactgttgtgagcattaaatgtgttaatactcatgaaacacccaaaatgcagatttggcacctgtgcaataaagaatcactctcatcctcaccattattattgacaagaatctgtagcagggcctggaacacaagtagagtcacaaatcctcatgccgtgtt

SEQ ID NO: 504559 - DNA, 296 bp, Homo sapiens
ggaagaaatttgtctaaggtttagctgtactcatagaagggcaatatttactttccaaattgagaaaacatggccttcacttgggaattrttttgcattcatgttacttctgagttggttaataaactaaagaacactaacatggacatagagctattggatcagacttacacaaatatagaatgagcatttgactaagtggtgttctgtgaaaataggacctgctttaaaagcttagaagaaaagagcaaactaaacccagagtaatcagacaaatggagatcataaatttcaga

SEQ ID NO: 504560 - DNA, 363 bp, Homo sapiens
ctaggggtttcaacttcttgaatttcacctccaaaaactagggaagaagtaaawgggatttccagctttcacatttgaagatcgtgccatcccacaatgagcatggaaatcaggattttcaaattcctcctgcatggagtgaagtgtgtgatgacacggaagtccttcaggataatgctgtccagagagatgctcttagggctataagatgctgtatggggcgtgctacgagggccaccagagctcctctgcaatgtgggggctggtcattgtgccgtggggtcccaggcctcatccactcactgagcagctcagtcttgttggcagcaagtctgtaggttgcctggggcttggctgattttg

SEQ ID NO: 504561 - DNA, 363 bp, Homo sapiens
ctaggggtttcaacttcttgaatttcacctccaaaaactagggaagaagtaaatgggatttccagctttcacatttgaagatcgtgccatcccacaatgagcatggaaatcaggattttcaaattcctcctgcatggagtgaagtrtgtgatgacacggaagtccttcaggataatgctgtccagagagatgctcttagggctataagatgctgtatggggcgtgctacgagggccaccagagctcctctgcaatgtgggggctggtcattgtgccgtggggtcccaggcctcatccactcactgagcagctcagtcttgttggcagcaagtctgtaggttgcctggggcttggctgattttg

SEQ ID NO: 504562 - DNA, 484 bp, Homo sapiens
agctggaaccagcagcctcaccaggcctttctcctttaataatgacaaacatggtgtgcagtctgggccacttaatcctgttctgcagatggggactctgagacataaagaggtaaagatcatgcaggtgacaaagctagctgaagattagtattatgagatatgagaatagtaactgaagggttgatttgtaaatgtgaaaaattggaaatcagccttgatttccaacaatagggtattgaygtgtaatacaaccacacagtagggtattgtatagcgactaagaatgatacagcagtatttgttgacctgggaacatttttcacaatatgctttaaaaaaagatagataagtgcttattaataatataggtacagggactcaagtcaaagtggggatatattctaaactctggcgaccaatttcctaaaccatgtagtttttgctatagaaaacatctagctgtgggtctacttgtaatact

SEQ ID NO: 504563 - DNA, 484 bp, Homo sapiens
agctggaaccagcagcctcaccaggcctttctcctttaataatgacaaacatggtgtgcagtctgggccacttaatcctgttctgcagatggggactctgagacataaagaggtaaagatcatgcaggtgacaaagctagctgaagattagtattatgagatatgagaatagtaactgaagggttgatttgtaaatgtgaaaaattggaaatcagccttgatttccaacaatagggtattgatgtgtaatacaaccacacagtagggtattgtatagcgactaagaatgatacagcagtatttgttgacmtgggaacatttttcacaatatgctttaaaaaaagatagataagtgcttattaataatataggtacagggactcaagtcaaagtggggatatattctaaactctggcgaccaatttcctaaaccatgtagtttttgctatagaaaacatctagctgtgggtctacttgtaatact

SEQ ID NO: 504564 - DNA, 595 bp, Homo sapiens
ctgtttttccttctctctctcatacacacaaacacacacacacacacacacacacacacacacacaggctgtttctgattcatttctcggttcttagagtccrtcatagaggtgcttaggcgcttcttgtgaaatgaatatgtttttaattttattttttgaataatcacttaattaaaaaatcatcttgagatcatattggaagaaaaaaaatcagagtatctttccctgagaattcttcctctcacccttgtccaattcactccaccccatcacctccattgacaactgtctttgttagtttgtttgtccttccagtgattcttatgtaaatgtgaacagatatttgtattcctccctcccttcttacacagagtatccaatgttcttttattcttccccattataacctagagattttaaaattaataaatttaaaatactgatccatttgctttttcacaataaagcatgtataggtacaatcccatgcatgttacaataatttatttttcttccaaagaaaaatgtatccatggccttttcctgagaggaagttttcaggggagaaactatcctggtgattgtagaattc

SEQ ID NO: 504565 - DNA, 595 bp, Homo sapiens
ctgtttttccttctctctctcatacacacaaacacacacacacacacacacacacacacacacacaggctgtttctgattcatttctcggttcttagagtccatcatagaggtgcttaggcgcttcttgtgaaatgaatatgtttttaattttattttttgaataatcacttaattaaaaaatcatcttgagatcatattggaagaaaaaaaatcagagtatctttccctgagaattcttcctctcacccttgtccaattcactccaccccatcacctccattgacaactgtctttgttagtttgtttgtccttccagtgattcttatgtaaatgtgaacagatatttgtattcctccctcccttcttacacagagtatccaatgttcttttattmttccccattataacctagagattttaaaattaataaatttaaaatactgatccatttgctttttcacaataaagcatgtataggtacaatcccatgcatgttacaataatttatttttcttccaaagaaaaatgtatccatggccttttcctgagaggaagttttcaggggagaaactatcctggtgattgtagaattc

SEQ ID NO: 504566 - DNA, 590 bp, Homo sapiens
ttttatgtcagtcttcccccatcagaaaacaagctccaggaaagcagggatttgaaagagactggcacagatgcttccacttttgagaatgcaagtgaatatgatagagaagcaactaatataaacagagttgggaaaaactttctgcagaaacctgagctagatttaaaggaatgaacctcagagcatcaatcaaacagacrgaatgtaacaacaacagcactggtctgtcaccagggcataacgtttgtaatgggcattccattgaccaccattttcactggtctcctcttcccaaatatattaaatcagaaataaaaatgtatcaagccttattatctcataagatccagtcagagaataaggcagtcttgttttctttagcttaactgttgtacctcttctagaaacacgaattcatttaaacctgaagtacaattaacctttgaacaacaggagtttgcacttcatgggtccacttatactctggttttcttccatttccgccacatctgagacagcaagaccaaactcttttcttcctcctcctcttcaggctactcgatgaagaactttatgatgatccactt

SEQ ID NO: 504567 - DNA, 497 bp, Homo sapiens
tttggggttgggatccaagcaggagctggtgcctgggtttgaggctagggctgggggataagtgtatactggtgaccgatwctaggattaaggttttgccagggcttaaggctggactttggagctggccaaggggtggggtttgtggctagggctggggtttgtggctggggctgggttttgtggcagggatccaagcaggagctggtgcccctgactgatgctaaggctggacatggagctggtgatggtgctagcactggctgaggttgggtgcaaggcctgtatttggggatggtgcaggttttgggggccgagttggattgaggctagggttggagctggattggtgtcttgggttgacttaggttgtggaagatgctgaggtttaggattgagtttgggaaagtactaaaccagggcaggtattgggctagctagggagggtctggccttgggcctataggtgtagcctaggggtttgcctagaaggagaa

SEQ ID NO: 504568 - DNA, 432 bp, Homo sapiens
atctgctccatcacagcagccccggtagggaaacccctgggtgggcactcagacctctactgcttcacagcaggggagcacagcggacccctaagccagagccagggctcatcagcccaagcagaaactgtgtgacaggaaccctcttggctgtgatcctggccctacaatgacatcgcaggccaagccaaggcaagccatccccacccccacctggagaagaaagggtaagtgggcccctggcctggaggctgcgaatcctcttttggatgtagcagcagctgtggcctggatgatcactcgggccactcagctgactcgrgcggtggacacctgttctccacattagccctggggctgccaggtctggggcctccacttgccaatgtgtctgctgtcagtgttgccccacaaaacaaggggaatgaccca

SEQ ID NO: 504569 - DNA, 569 bp, Homo sapiens
gcagaacaacatgctttatcacagtgaattaatgtttttaatttgaattttattggtcttatagcttagttattacatgtttttaatgtatatgtttggttttggtttaatgattttaggaggagtttatagctagttttagtcagtactggagatccacaggaatgtttttctcttttaaagggatctgygtatcattcaaatttgggaggcactggtacaggggttaagagcacagagtttaacatcagacctgggttcaaaacccaagctctcacacttaaaaaccgtgtaaacttgaatgtgttatttaattgaattgtgtttcattttcctgatctgctaagattgatataataaaagcaataatcattatcataattataattacaatgacttacatcattggaataaataaaataatagctccctagtataaagatctctggcatatagtaggtgcttaataaaagtgagtcattatcatcatcaacattttttaaactttggtctgagagacccaagagttggcacagccagataaggaggtaagagatgcaggaggagca

SEQ ID NO: 504570 - DNA, 652 bp, Homo sapiens
accatgtgtttttttctcagaactgtgcaacccatggattggaagattccatttgtgagctagaaccagaaataccatttgacccagcaacctcattactgggtatatacccaaaggattataaatcattctaatataaagacacatgcacacgtatgtttattgcagcactactcacaatagcaaagacatggaaccaacccaaatgcccatcaattatagacrggataaagaaaatgtagtccacatacatcatggagtactatgccgccccaaaaaggattgagatcacgtcctttgcaaagacatagatgaaatcggaagacattatcctcagcaaactaatacaggaaccaaaaaccaaacaccacatgttctcactcatatgttggagctgaacactgagaacacatggacacagacagcggaacaacatacaccagggcctgtcacaggggtgcaagggataggagagcatcgggaaaatagctaatgcatgtggggtttaatacctctgtgatgggttgattgctgcagcaaaccaccatgccacacatttacctatgtaaaaaacccacacactctgcacatggatcccagaacttgcagtaaaatttttttaaaaagaaaagaatatatgttataccataac

SEQ ID NO: 504571 - DNA, 652 bp, Homo sapiens
accatgtgtttttttctcagaactgtgcaacccatggattggaagattccatttgtgagctagaaccagaaataccatttgacccagcaacctcattactgggtatatacccaaaggattataaatcattctaatataaagacacatgcacacgtatgtttattgcagcactactcacaatagcaaagacatggaaccaacccaaatgcccatcaattatagacgggataaagaaaatgtagtccacatacatcatggagtactatgccgccccaaaaaggattgagatcacgtcctttgcaaagacatagatgaaatcggaagacattatcctcagcaaactaayacaggaaccaaaaaccaaacaccacatgttctcactcatatgttggagctgaacactgagaacacatggacacagacagcggaacaacatacaccagggcctgtcacaggggtgcaagggataggagagcatcgggaaaatagctaatgcatgtggggtttaatacctctgtgatgggttgattgctgcagcaaaccaccatgccacacatttacctatgtaaaaaacccacacactctgcacatggatcccagaacttgcagtaaaatttttttaaaaagaaaagaatatatgttataccataac

SEQ ID NO: 504572 - DNA, 652 bp, Homo sapiens
accatgtgtttttttctcagaactgtgcaacccatggattggaagattccatttgtgagctagaaccagaaataccatttgacccagcaacctcattactgggtatatacccaaaggattataaatcattctaatataaagacacatgcacacgtatgtttattgcagcactactcacaatagcaaagacatggaaccaacccaaatgcccatcaattatagacgggataaagaaaatgtagtccacatacatcatggagtactatgccgccccaaaaaggattgagatcacgtcctttgcaaagacatagatgaaatcggaagacattatcctcagcaaactaatacaggaaccaaaaaccaaacaccacatgttctcactcatatgttggagctgaacactgagaacacatggacacagacagcggaacaacatacaccagggcctgtcacaggggtgcaagggataggagagcatcgggaaaatagctaatgcatgtggggtttaatacctctgtgatgggttgattgctgcagcaaaccaccatgccacacatttacctatgtaaaaaacccacacactctgcacatggatcccagaacttgcagtaaaatttttttaaaaagaaaagaayatatgttataccataac

SEQ ID NO: 504573 - DNA, 363 bp, Homo sapiens
aataaaattttacaaaattttccagaattttctgtctgtcaaatctgaacaatagcagtcatatgtttttttttccccaaaataatggccatttttttattcaacaagcttaccattattacatctatccttttattttcattttccataaataggatttttatcaatttaatgatgagaaaaacatatgtttcctgggtctcattattctatccatagtagattagagctataagctacctacaatgattgaataattattaatattatcaaaaatatactaattgtattagatcagttaccaggtggtaaacaayctgggcaggcaattccttttaatgatatcttcaacacatagagtgc

SEQ ID NO: 504574 - DNA, 630 bp, Homo sapiens
ttccagcaatgatgcaatgccaccacaattattagaccagtcttttggctacagttccagatattgatttactgtggatatctgtcctgttatcaatctgtctcttctggtgcctacagaacaattttcaaagacactmcttttacgctttgttatgctttcagatacatacatacatatacatacccatacatatatgcatgcactgaaatgtatacatatgtgtatattatatgtagatacccacactttcagaatctaaacttacatttaaaatgtaatagaaaaggccaaaaactgttacattagcacaaattacaccaagtaatttgaaacacattcactcatcacgctattaaagttgggcaattaactcttctgtgtttttgcctgaaaacgtaatatgttatattatgaggtctttggaagtcctcctgtattcactgcactgtttaataaacaaaattgagtttgaagtggtttcctattaattttgatccttaagttaaatggtatttgtaaacagaaactcttgataaaaagattgtattagatttaaaattattaaaaatttccaatttaaatgattactttctatctgagtagtttatttttttataaactgaatat

SEQ ID NO: 504575 - DNA, 578 bp, Homo sapiens
cagacatgttctagcattctgcagtgggtaagaagacaggctctgaaatcatgatgatgaggattcaaactattttctagctgagtcactttgggtaatctgcctatcagatcttagccytcagtatttcctctttctgaaattcactcactcagtcatcaccatggttctctacctcacttgatgtagtttgctactaaaatactagcatattataactgtcaacctgatcacatgtttaaagtagcaacaccaaattttatattattacccatcattccttactctatttccttactctatctaaatttacctgttaattttagataaccaagaaaatgtatttattttaactacttatctcctctggtagattataaactccatgaccttggggcttatccatgtcttcgttcaccaaacaaaatagtaaacatagcagagcagacattcaatagctatatactttttaaagaatatctgacctgttattatcaaataatcagtgagagagtttaagtcggagtgagattatcgtatatccaaaagctatttttgaataaatgaatacatgagta

SEQ ID NO: 504576 - DNA, 605 bp, Homo sapiens
tgttataatgtgggttatatattgtgacctgggagtgttttctttagaggtgaatgatctgcgtgcaagccaccattccacccatacatttagcagcgtgggaggtctgatgaagtcagagaaaaaattatttgcactatggcaccagtcaagatacattgcagacaccaaaagattcgatttcatcaaaataattagcagagtagctttcactatctcaccttgccaacttattaaatgggtgacgacttacagtaggtactatattgattactcaagactcaattattttgaccatcaagcacataacacaacaaaaatctaatttaaataatcttyttctctttctctctcaaatttctagtatctgcttctgagacatgagagcgtgttttctaggaaagaggatagaaactgcatgtatgtatgtttgtatgcatatacacacttacataaatttacatatatgcgtaaaatcttctacctttttttttctttttcagtcctgaattttctaggatggaaaaagcaagaacttataataggtatgtgctgaaaaacctgttcaattaataaccagtcacaagtcactcttactatattgg

SEQ ID NO: 504577 - DNA, 574 bp, Homo sapiens
aagaatgtctgctctattgctgataaagctagatgaagagccccagtctgcacctaagatttctcacacagccctacttaacatttcccaaccaaattgcagcctctccctttgccaagacaaagtccagtcccagaaaacttccagagacagagaaaccttgcttcttggaaagtgagaatggaaggggttgaactgaacgtgtccatttctccatcccaaactcaccaatcagagaagcaggacgagcagaaaggacgtcatcttcccaacacacaaagaggtggcggcaaaatgtcccgctgtagggtcaagatgggaactccaggagcgagacttaccaccaggaggtggccatcttgctcagtgctcctcagaaagcaggtggctgagctacaaatcctgattggccttcagagatctggcaatgaaacagccagccaatcaggctctcccctcagtgccacggccaagcccctgtgaggtcgccctgagagcaccatgagtccactgtctagcctgacagtggttatcakatgtgatggacttggggagggttcctatttgcagtaaa

SEQ ID NO: 504578 - DNA, 661 bp, Homo sapiens
cttcaaaggcatcatacagggcagtgtggtggatactgtaaacccccattcatccrcaaacactattgaggaccaactatatatccaccactaaagaggtgcatttgaataaagcccaacccttgtgctccgatttatagactatagacgagtgagggaggtaggctatacttgtgttgtaggaattacaatgcaatgtgataactgcagaacaacagacttgtgaggttcccccctttgctgacccctcccactgaaatgtgagaacagatgtggtggcaatgccagagcacccccagagaagccggtcacaggcctccagcagcagttcatcatcactcagccacgatggaaatataagccaagcactagagcccctcatcctcccacactcccacagagctctttggggtgtttttctttctttcttataaaaactatagaattttcatttgtctctgggaaggaaagcctttctctggggcccctcgttcttcccctcattctctttctagtctcgtttttcttttttctcatgtctgttggtgtctctgatgtccttctcctccacggttctgacaccaccatcctctcatcatgctgccccccacccctaaatgacaccatgtaaactgccaagtcctgactacacaaaagtatt

SEQ ID NO: 504579 - DNA, 532 bp, Homo sapiens
ctgtaatgtgtattttttaaatgattccatgagggaccaggtccagtgcagttctagtgttttcaagttatacaaacaccccttctaaagatattcaaatactgaccattactcagtcagcaaggaagggccattcagaggtttgataaaaatttcttctaaacaaaaccacaaccagaaatgttatctaggtaatctccaaaccaaatcaaattaaattaatgttagtgctcaataattgttaaacttagaaaacaagatatatgcctttataaatccttacattagatatggtctattcctatacttcaatgtgtawatgtaaaaactcagatataaagaagtaaattatttttacatatttaatggtcaatgtcttgacatagtcataaatcagagtctttatggaagtctttttacttttagcaaaatttttaaataaaacttctctacttctctcctatagctatttttcctgttagcctttcatttttctagaaagctaaacattctgattcttctttctaggatt

SEQ ID NO: 504580 - DNA, 566 bp, Homo sapiens
ctgttaagtctttcgagctcacttttcacataattttatgtcttgaaccccatgcttctacatacctttatatttaaacaggagattttaaataagcaaagctagtgcaataattttgaagataaatctttataacttgatttatttctattctgtcatttcacgttaccatttggtgttctcatttatgtgaaaaatttaaaatactgaactgmaatatgaatagtaagataaaatatttttgtttggtaaagtgtctaaggattgacagataaaatgcagaatgcccagttaaatttgaattcagatacacaatgattttcgtttgtaagtatgtttcatgcaattttggaacatcttatactatatagtttaagtttaatttatagtttaatttctgacaaactatagtttatcagaaattaaaattcaactaggtatactgtatatttactaaatcttcagcattattaagatttcagttcataaatgacatagtttattgaattttaaaatctttgaagttgaaataattgggaaattctcaaatagtaaagaaaataaaa

SEQ ID NO: 504581 - DNA, 392 bp, Homo sapiens
ccatgtgaatcaagttctcttatgttttaccactatataagtggaatattcatgtatcatatatcgccaaaaagtatggttaacagttatctttgatggaaccattattcaggacaaacattaatttctagatatataatataaatatcaagctgacattgaacagttttagtccaacacatagagacctttatgttgacaagttgagaagagggaagtttgtactaagaaggtatagtgttatggcacaagtttatcattactgttaaaaaatcaaatgcctttcttaaggattcrgcattcagacaattacaagtcacaaaattcagaaactcgtttttgtgggtcttcatgaatgaaaaggaatactttattaaaacctgagcaggggc

SEQ ID NO: 504582 - DNA, 635 bp, Homo sapiens
tgccttggagttttttcctggccccttacccaatcttattggtgctcacaacatcttgggtttttaaaaaactctattgtgtctcayattcatgtgtgtgattcttcagagatgctcctccttattagcttctaagctccacgagggtgaggcctgggcctgattttctcattgctgtgcaccctacagcacctatcttagggccaggcacagggtaggtgccagctaaacatttgtaaatgaatacatgaatgaataaatacaagaatggatgaggaggcactggtgcctgccctagcttggacaacagtgctgagtgtcagttgctccatgggggctcatcttagctgctctggtggcaaggtttcttgcagcatcattgtcttagtcagctagggaggccataaaaaaataccactgactgggtgactaaaaaataagcgaaatttagttctcacagttctggaggttggaaatccaagaccagggtgccaagatggtcaggatctgctgagggccctctttctagtgaaggaaatcaaaatattttaccccaaaatataattttttgacatattttgaaatgactgctcagagggcctgcaaactcaagtagccttgcaaagctgtcttct

SEQ ID NO: 504583 - DNA, 635 bp, Homo sapiens
tgccttggagttttttcctggccccttacccaatcttattggtgctcacaacatcttgggtttttaaaaaactctattgtgtctcatattcatgtgtgtgattcttcagagatgctcctccttattagcttctaagctccacgagggtgaggcctgggcctgattttctcattgctgtgcaccctacagcacctakcttagggccaggcacagggtaggtgccagctaaacatttgtaaatgaatacatgaatgaataaatacaagaatggatgaggaggcactggtgcctgccctagcttggacaacagtgctgagtgtcagttgctccatgggggctcatcttagctgctctggtggcaaggtttcttgcagcatcattgtcttagtcagctagggaggccataaaaaaataccactgactgggtgactaaaaaataagcgaaatttagttctcacagttctggaggttggaaatccaagaccagggtgccaagatggtcaggatctgctgagggccctctttctagtgaaggaaatcaaaatattttaccccaaaatataattttttgacatattttgaaatgactgctcagagggcctgcaaactcaagtagccttgcaaagctgtcttct

SEQ ID NO: 504584 - DNA, 502 bp, Homo sapiens
caaaatgaacaaataaccattcactagctgtggacaggacaaaaacaccaaggggcctcacctgagtccttcctttccaacattctgccttttccttgtcaaagcaggaatttaagaaaggacctaagaattcattcatacctccgtgttgtaggaccaatgtgaattgcctggaaactagcctcaggagtgatatcatagtcaagtcccagttcattrtgggtcaaggaatctggctccagcctcagtttcttaggaaagaagccagtgggagttacacagcctctgatataacttgaaaaactgcccaccttggcagatggttatccatccatggggctcagtgacctgtgatcagattgaaccaaatgagggctgtggcaatggtgcctttgggaggcttggtgaggcagagttggaggtcagagaagctaagttgccctgaacctttcctgaggaatgtgtcttctgtttctttagagagttgcactctcaccaatga

SEQ ID NO: 504585 - DNA, 588 bp, Homo sapiens
gaaagccagtaatgatcatgaccttagctgagatccagacaacagaagaggaccagtgctgacggctcctcacatgggtttgcttgggctttgagggatgactgaraatgtcttcaattttttttttttttttgagacagagtcttgctcttgtcgcccatgctggagtgcaatggcgtgatctcggctcactgcaacctccgcctccaggtttaagcgattctcctgccttagcctcccaagtagctaggactgcaggcacgcgccaccatgcccagctaatttttttatttttagtagagatggggtttcaccacgtcaggctggtcttgaactcttgacctcaggtgatccacccacctccgcctcccaaagtgctgggattaccggtgtgagccactggctgagaatgtcttcaatttaatggagaaaatctgaaaacagtgcccaatgatagtgtggaaggatgtgataatattttaatatggactttatacacacatttgcttttatctgagtaattagggctagcgaaaggtttaatgagtactgagcacgtagtaacagtgcacgagctgaatagtcggg

SEQ ID NO: 504586 - DNA, 588 bp, Homo sapiens
gaaagccagtaatgatcatgaccttagctgagatccagacaacagaagaggaccagtgctgacggctcctcacatgggtttgcttgggctttgagggatgactgagaatgtcttcaattttttttttttttttgagacagagtcttgctcttgtcgcccatgctggagtgcaatggcgtgatctcggctcactgcaacctccgcctccaggtttaagcgattctcctgccttagcctcccaagtagctaggactgcaggcacgcgccaccatgcccagctaatttttttatttttagtagagatggggtttcaccacgtcaggctggtcttgaactcttgacctcaggtgatccacccacctcsgcctcccaaagtgctgggattaccggtgtgagccactggctgagaatgtcttcaatttaatggagaaaatctgaaaacagtgcccaatgatagtgtggaaggatgtgataatattttaatatggactttatacacacatttgcttttatctgagtaattagggctagcgaaaggtttaatgagtactgagcacgtagtaacagtgcacgagctgaatagtcggg

SEQ ID NO: 504587 - DNA, 588 bp, Homo sapiens
gaaagccagtaatgatcatgaccttagctgagatccagacaacagaagaggaccagtgctgacggctcctcacatgggtttgcttgggctttgagggatgactgagaatgtcttcaattttttttttttttttgagacagagtcttgctcttgtcgcccatgctggagtgcaatggcgtgatctcggctcactgcaacctccgcctccaggtttaagcgattctcctgccttagcctcccaagtagctaggactgcaggcacgcgccaccatgcccagctaatttttttatttttagtagagatggggtttcaccacgtcaggctggtcttgaactcttgacctcaggtgatccacccacctccgcctcccaaagtgctgggattaccggtgtgagccactggctgagaatgtcttcaatttaatggagaaaatctgaaaacagtgyccaatgatagtgtggaaggatgtgataatattttaatatggactttatacacacatttgcttttatctgagtaattagggctagcgaaaggtttaatgagtactgagcacgtagtaacagtgcacgagctgaatagtcggg

SEQ ID NO: 504588 - DNA, 604 bp, Homo sapiens
caacctacagatgactgtttttgtctgaagctttttaaaaagcagattcttcagaagctattctagataaacatatgccacccttatatataaccaggattttggaagagggctatgcattttaccttctgatgagaaatgtcattcttccaccaatcaccagtgcccgtcagcctccccatcccaaaccaagtctattctggtccctgaaattctattcactccttggagttaaaacttacaggatctttgggaagctgaatatataccagctataattcttgctgctgtgggctttagcgatcaggtcagttgtccatgactgttgatgagaaggaccctgctagaaggaggaagagagggtccagagggaccccaggaccaggcagtgccagggagccgaagagggaggggtacggaaggagcagtcttaggacycggcctcacacctgcatagcagcaccttggccccgtgggaaagcagagaaaatgtgaacattctccactgtgcctaattcatttggaaggcacctcccttgaaaatcacagctcgtgaacttctgtcatatctgcaatgccctttccctcaattttacacaagtta

SEQ ID NO: 504589 - DNA, 604 bp, Homo sapiens
caacctacagatgactgtttttgtctgaagctttttaaaaagcagattcttcagaagctattctagataaacatatgccacccttatatataaccaggattttggaagagggctatgcattttaccttctgatgagaaatgtcattcttccaccaatcaccagtgcccgtcagcctccccatcccaaaccaagtctattctggtccctgaaattctattcactccttggagttaaaacttacaggatctttgggaagctgaatatataccagctataattcttgctgctgtgggctttagcgatcaggtcagttgtccatgactgttgatgagaaggaccctgctagaaggaggaagagagggtccagagggaccccaggaccaggcagtgccagggagccgaagagggaggggtacggaaggagcagtcttaggacccrgcctcacacctgcatagcagcaccttggccccgtgggaaagcagagaaaatgtgaacattctccactgtgcctaattcatttggaaggcacctcccttgaaaatcacagctcgtgaacttctgtcatatctgcaatgccctttccctcaattttacacaagtta

SEQ ID NO: 504590 - DNA, 604 bp, Homo sapiens
caacctacagatgactgtttttgtctgaagctttttaaaaagcagattcttcagaagctattctagataaacatatgccacccttatatataaccaggattttggaagagggctatgcattttaccttctgatgagaaatgtcattcttccaccaatcaccagtgcccgtcagcctccccatcccaaaccaagtctattctggtccctgaaattctattcactccttggagttaaaacttacaggatctttgggaagctgaatatataccagctataattcttgctgctgtgggctttagcgatcaggtcagttgtccatgactgttgatgagaaggaccctgctagaaggaggaagagagggtccagagggaccccaggaccaggcagtgccagggagccgaagagggaggggtacggaaggagcagtcttaggacccggcctcacacctgcatagcagcaccttggccccgtgggaaagcagagaaaatgtgaacattctccactgtgcctaattcatttggaaggcacctsccttgaaaatcacagctcgtgaacttctgtcatatctgcaatgccctttccctcaattttacacaagtta

SEQ ID NO: 504591 - DNA, 444 bp, Homo sapiens
tctttttataacaaaagtcaaatgctgtcacttctttgctcatcagcttccaagtggcctacgttgtatcagtctgtggcctgttaggaaccgggctgtgcagcagaggtgagcgacaggtggctgagcatgactgcmtgagctctgcctcctgttggatctgtggcagcattacagtctgtctattgtgaactgtgcgtgcgagggatccagattgtgtgctccttaggagaatctaaagcctgatgatctgagctggaacagtttcatctcaaaatgatccatccccatccatgaaaaaattgcctgccatgaaatgggtgctttgtcccagaaaggttgggcaccgctggcctgcaggacctccaagacctcttgagcatcaagagctggctgagctgagagcagagttcacaagtgtcaaagtggccggcagagacagcc

SEQ ID NO: 504592 - DNA, 500 bp, Homo sapiens
tcatctccccacttctcctcctgttccttgtgctctcaacatggcacccagagtcatctttttataacaaaagtcaaatgctgtcacttctttgctcatcagcttccaagtggcctacgttgtatcagtctgtggcctgttaggaaccgggctgtgcagcagaggtgagcgacaggtggctgagcatgactgcctgagctctgcctcctgttggatctgtggcagcattacagtctgtctattgtgaactgtgcgtgcgagggatccagattgtgtgctccttaggagaatctaaagcctgatgatctgagctggaacagtttcatctcaaaatgatccatccccatccatgaaaaaattgcctgccatgaaatgggtgctttgtcccaraaaggttgggcaccgctggcctgcaggacctccaagacctcttgagcatcaagagctggctgagctgagagcagagttcacaagtgtcaaagtggccggcagagacagcc

SEQ ID NO: 504593 - DNA, 500 bp, Homo sapiens
tcatctccccacttctcctcctgttccttgtgctctcaacatggcacccagagtcatctttttataacaaaagtcaaatgctgtcacttctttgctcatcagcttccaagtggcctacgttgtatcagtctgtggcctgttaggaaccgggctgtgcagcagaggtgagcgacaggtggctgagcatgactgcctgagctctgcctcctgttggatctgtggcagcattacagtctgtctattgtgaactgtgcgtgcgagggatccagattgtgtgctccttaggagaatctaaagcctgatgatctgagctggaacagtttcatctcaaaatgatccatccccatccatgaaaaaattgcctgccatgaaatgggtgctttgtcccagaaaggttgggcacygctggcctgcaggacctccaagacctcttgagcatcaagagctggctgagctgagagcagagttcacaagtgtcaaagtggccggcagagacagcc

SEQ ID NO: 504594 - DNA, 444 bp, Homo sapiens
tctttttataacaaaagtcaaatgctgtcacttctttgctcatcagcttccaagtggcctacgttgtatcagtctgtggcctgttaggaaccgggctgtgcagcagaggtgagcgacaggtggctgagcatgactgcctgagctctgcctcctgttggatctgtggcagcattacagtctgtctattgtgaactgtgcgtgcgagggatccagattgtgtgctccttaggagaatctaaagcctgatgatctgagctggaacagtttcatctcaaaatgatccatccccatccatgaaaaaattgcctgccatgaaatgggtgctttgtcccagaaaggttgggcaccgctggcctgcaggacctccaagacctcttgagcrtcaagagctggctgagctgagagcagagttcacaagtgtcaaagtggccggcagagacagcc

SEQ ID NO: 504595 - DNA, 539 bp, Homo sapiens
ccccatgcagcctgccaggagggccttccccatcctctatgatcaggcttcaccacccagtctcaggccaggtccttcacaaactcccaggggatccctgggagamagcaaatggaggcctcacactaggtgtctgaatgtgaatttacaaaccaagttaactttgataatcagcaaaacctctccactcctcctaccttgacagatatacctcagaactaaaaatgccatggaaaaagtgactagaatacatgtaaaaataagtatgtatacataaaataaatgtacaaagctatggttttacgtgaccaaatgtctggaaaatattaaagatgatgacatttcataattattctgacctcttggtgtgctgttgatggactggagatgtttggatgagttatagagacattcataaattattttgtatttattccatgtttttggcccacatttcagaaacattattgttataacaatttttacataacttgtgttctgttggcagttgtaatctaagcattaaaattaaaatgtaa

SEQ ID NO: 504596 - DNA, 599 bp, Homo sapiens
caaatctgtaaaagcagggagttggatgagctcaatgattttcaaaatgtgagccctggtgctggatggggccactgggaccaggagaggatgggggtggcaccttctgcttctcccttgcttggccagaggctgctctccttgtagctgatttacatagtgggaggcacttaagagttattttgaggagagtgttctgctgatgaagacatatttgagaaccacaggcctggatgaccaccagggtcctgtgattctgcaacctgattggctggacctcagcggcccagtccctcacctacagggctggtcttatctgaagcggatcagggagcactcagtctaggaggctggacacggctctcactctgcccgtggctctgaggctttcaggccctctcctcccttggagcccctgtctccttcctcttctcctcctttcccactragctcctgcttcaatttgatgtcagtgttcctccccattatgctggcagcgctggccttgaactaggtacaagttcccagctaatgaggaaaagcaggccttgtgggtgtcgctggtgttgctcacatctcacagcttaactatgatgccc

SEQ ID NO: 504597 - DNA, 599 bp, Homo sapiens
caaatctgtaaaagcagggagttggatgagctcaatgattttcaaaatgtgagccctggtgctggatggggccactgggaccaggagaggatgggggtggcaccttctgcttctcccttgcttggccagaggctgctctccttgtagctgatttacatagtgggaggcacttaagagttattttgaggagagtgttctgctgatgaagacatatttgagaaccacaggcctggatgaccaccagggtcctgtgattctgcaacctgattggctggacctcagcggcccagtccctcacctacagggctggtcttatctgaagcggatcagggagcactcagtctaggaggctggacacggctctcactctgcccgtggctctgaggctttcaggccctctcctcccttggagcccctgtctccttcctcttctcctcctttcccactaagctcctgcttcaatttgatgtcagtgttccyccccattatgctggcagcgctggccttgaactaggtacaagttcccagctaatgaggaaaagcaggccttgtgggtgtcgctggtgttgctcacatctcacagcttaactatgatgccc

SEQ ID NO: 504598 - DNA, 617 bp, Homo sapiens
cctcactgcatgtagccctctgcaactagtcataggtaccaagtrgatgtcatgcaataaaaccggcatccttcactcagcccagctttccctatagctcacctctcagcccactcattggcttttcattctatgagtaaagcgaagtgcacatccgctgtcttgctgtaagactcccaggtatgggaaccctggaagtgaatcacagggtgttgtctgattccagtttatagagtgagtttgaaagtgttcccttctctacaattttctggaacagtttgtgcagacccagcattatttcctccttaaatgtttggtgtaatttaaaagtgaagctgtctgtgtctgtagttttcttcacggggaggtttttgactaaaaatttaatgtatttaaaagacataaggcttttcaggttttctatttgtttttgagtgagttttggaaatttgtgtctttcaaagaatttctttatttcatctaagttttcaaatttattggcataaagttgttgaaaacattccataattatcctcttaatatctgtagatgctgtagtgatgtcacctctctcattcctgatattaggaatttgtgtcttttttttcttatcaggc

SEQ ID NO: 504599 - DNA, 438 bp, Homo sapiens
tgactcccggtgagtgtaaaatgcccattgcagacgtggtctgtccttctggagtcaaccacatggaggccattgggaacgcaataaagaaggtcccttgcagggggagggaaatgttgtctctgtatcccctggggtggggacgttgtcgatgactgaagtcagagagctctagaatggcagaggatgacagtcgcatacaagaaagcggggcggagaggagggaaggggcggcccacctgtggtcaccacgcgcagccccsgcctccccgtgggagaggatcaggatcaggatcgggcgagtccagggcgagtgcgaggaggagaaggcccagcccttctgcgccctgcggggagggagagggaaggccctgcctaggacagggcgcgggcgctgagggatttgggggtgcagcagcttggcagccccctcccccc

SEQ ID NO: 504600 - DNA, 654 bp, Homo sapiens
aaatctcttgctaagccagttaatctcaagaaatgccctcactataaactttcccaaagcagtgtattctggtgatcaatacttagtgtttaaaattttgcttgtatatcaaataagagctggtatgtttggaaacaagggttatggatcatgtgactaccaccttgccctcttttagaatatgccactaaccacattgtaagccctcatttggggatccagttaggctaaggagcacctctttaattgtgtaaggcagttagttcccaagcattcttcctccatatatacattaaccccatcaccaattctgactaattttattagattggaaaattcccagctaggctaacatttcaacactaagacataaaaacaaaatctaatatcacaattyagcatgcccttcaagaacacataaatcaatagcctttggagatgctgaaatggcagacacctggttccaacgtcctgaatctaaccaaaaggaatatccacttgtagattagctggagctacccaaccagtcactgggcaccccattcctataggctactaagagaacaccatggtatgttcaacaaatactttccccaataatcaaagtagtaattgttttaaaggttttttttttttgtttttagtccaaaagta

SEQ ID NO: 504601 - DNA, 552 bp, Homo sapiens
acattttgctgcaaaaatgagattgtaaatgtgtatgtgtgcatttatcaaatatcatggctgtccagtaatttgtagttggagcagagttagacttcaagaaagagagtgagggtcttttatagcttttagttaaaagaccattctgaaaaggtttcaagatggcttatcagaagtgtctaatatttgccttctccaatgagaactaaaatagtgagcagataatcccacttaaaatagatcatccaagagagaatattggaattcaatagaaaagtgacagggaacacytaaagcaaggaaggagagggaaggtaggcagtctgctcagtcaggattggctaagagttatgagtgacttcctggtgtgagaaaagggcaaatgagagacccccagcagtccatattcccatcatggacttctgcagtcctaaccataggagagccctagatccttgcaaaacctgaaactaccatagagagctgcctgtataccatgtgactgcactggttcaggaaggaagcttgctctgggtcccacattccccacag

SEQ ID NO: 504602 - DNA, 574 bp, Homo sapiens
ttttctcttctcaacagcatgaaaacaacggggatgtgtaaagaagtttaccctacccactttgttccttgagggccattgataattctctgtccattcggttttccattactaccaggaaggactttcccttctacatttggtctgccattataacctacacagtaccaaaaataaaaataacagagcctggtaaattcaacatgccmgggaagttggcttcataccaaactattagtagtgacacatcatttcaaatagaagctctaaacagaattttaaaccaatagctcaaatatattagataatgatagtctcaaattatgacttctccacaacagatatgaatgtcaattaagaatacagtaaagtcacagctttctgacaatactgtgggaatgagagtgtgtggcataagtaaatttgccatagaaaacttaagatcttagtagctgtagctttattttagccatgtggaagttggaggaaggaaggattggaaggatagagaaaattatgtctaaaatgtactagatgctgtcccacttttctggggatgttaaactaaacacag

SEQ ID NO: 504603 - DNA, 552 bp, Homo sapiens
aattttgaagtttagtcgggtagtccacaatatgcattgttcaagtctttacagtaaatcatatgttaacaccaaagtaaaatttcattgtaaaagcaagactaagaaaataaaagtttagcaacagttataaagttccaaataattttaatgtaacttttaagtttgaaggggagcgtaactatttactgatggaacattccaaactgcatcgccccagggctgagaggcagcgccattacctattgtagttttcttccgtctgtctctcactgtctagattttgatttcagatttgtcaytttctcttccagagcagtacacttttttgacagtagagggcactttgaatttagagaaagctcgagaaatctcttcctgaatcttcattcagagagcttttgtttgactataaagaaataaaatacaattttagtctacattttaaatgatgcatatttttaaactatgtgatgcaaaagtttgtttcttttatatgaatcagtttttcattttgttattttataaaaatactgtaatatgaatttcatg

SEQ ID NO: 504604 - DNA, 508 bp, Homo sapiens
cgcatcacctacctccaggttcaaactgtctttatattttgctccttgtgttttaaagctgcaaataagagttagtgactcactcctgctttgcaaatgattttggtgtcataaatagtacctctttcaaatttgtggccacttaggttctccagcctttatccaatttggatcatctcttaaagcgtgagaaggccggtgtgtcacctaaaaccaggaagttaaaaaacaaaaccaaaccatacaacacttcttttttattgcaaaaataatgcaggttcattttagaaaaattggagagtacagttgtattgtgcctcactttatcrtgctttgcagatattatgtttttcttacaaattgagggtttgtggcaactttgcatcgagcaagtctctgccatttttccaacagcatgcacttacttcgtgtctctgtgatatatgttgggtattttcacaatatttcaaacttttccattattattatgttattgtaagctgtgatc

SEQ ID NO: 504605 - DNA, 646 bp, Homo sapiens
gccttcctgagttatttctaaaccaagagtcaaattctaccaccccaaggcgggagaatcgcttgaacctgggaggcagaggttgcagtgagtcgagatcgcgccactgcactccagcctgggtgacagagtgagacttcatctaaaaaaaaatgtgttcccccacccgcagggccatacatcttaaggcagagagaagtgatgtcaccatgctgagggcctcaatagaagggaatctccaacttgtcaccattctgcctgtaaatagtgtcttcccaaaggctgaaatcgcattacattcttgccctaaaaagatgaacacagctattgaattagaagctctagcatgtgcaagagacctacactttgaraggctgaagcatcaaccagcctcttccaatctttcatgagtattttgaagacacttagagatattttctcctcatccatctggaatgacaagcagaggcattatgcgtatcaaacatgaacacctacataatccggactgctcattggaaagagttctcatttccaaatgttcctcagatgatcataagagaatatagacttaattgcaacctgttattagccaccaaatgtttcaactgaatgggttctcttgccaatgtttccccctttcaga

SEQ ID NO: 504606 - DNA, 550 bp, Homo sapiens
tcagaatcacctggaggacctgttacaacacagatttgttggcctcatccccagattttctgattcagttaagtctcagatgggacccaaaatctgtctctctaccaagatcacaggtgatgatgatgatgctggtctgagaccgcactttgaaagcatcactctagaaaagggatgaggctccatgtgagcagaactccttggctaacagagtccttaccccatggggtgagctagaggaggagggcyggagggtgcctataaatcagggtttctcaccctaaatgctattgacaagttataccagttaattaattgctatgtagagtgattcctgtgcactgcaggatgttttgtaacatccctggcttctacccactagcaagtaagaccccatcaaccctggatttacaatttaaaaaataatgtctacagacattccaaatgtcccctaggacaggggtccccagccccagggcccctgttaggaaccaggccacacagcaggaggtgagtgcggggcaagccagcaaagcttcatctgtgttta

SEQ ID NO: 504607 - DNA, 550 bp, Homo sapiens
tcagaatcacctggaggacctgttacaacacagatttgttggcctcatccccagattttctgattcagttaagtctcagatgggacccaaaatctgtctctctaccaagatcacaggtgatgatgatgatgctggtctgagaccgcactttgaaagcatcactctagaaaagggatgaggctccatgtgagcagaactccttggctaacagagtccttaccccatggggtgagctagaggaggagggccggagggtgcctmtaaatcagggtttctcaccctaaatgctattgacaagttataccagttaattaattgctatgtagagtgattcctgtgcactgcaggatgttttgtaacatccctggcttctacccactagcaagtaagaccccatcaaccctggatttacaatttaaaaaataatgtctacagacattccaaatgtcccctaggacaggggtccccagccccagggcccctgttaggaaccaggccacacagcaggaggtgagtgcggggcaagccagcaaagcttcatctgtgttta

SEQ ID NO: 504608 - DNA, 205 bp, Homo sapiens
  misc_feature (1)...(205): n = A,T,C or G
nnnnnnnnnnnnnnnnnnnnnnnnnnnatagaatattatttggcttaaaaanaatgagttagagctgcatcagttgacctggagagatgtccatgatatattgctmcatgagaaaagcaactaacaaatggaattatagagtgttattccaaattgtaaaagtaaacaatgacggcttgtgaaaaagataggtgtttatgattgt

SEQ ID NO: 504609 - DNA, 504 bp, Homo sapiens
tcatctataagctcatatgacttatttcaccaattttggagtgcttttgtccctgctgcaagttccccaaaggatggtgtggtaaaggttgtgatgcctggttttgttttttgtttgtttgtttgtgttttgtatgtttggctctaaaactttagagacaaatgtcttctsttcatctgtaacttggcatttagggagaggtttgatgtggtcagaaggaaggcctttgtactgggctgattctgtcctggtgtgctgtgtttgaatactcagggtattcaaagcttctagttgcaaataagtgtagagaccaagttcactctgtttaggctggacctttccagcctgagagataagcttgtctttgcctctagccatgattcttttaagagatgttatcgtttctgtttgcctaaacttttctagttagtatgaagatcactggtgatccacgacttaatcatgatgtgcttctaaatgccttcttcaagatctgtttaattt

SEQ ID NO: 504610 - DNA, 504 bp, Homo sapiens
tcatctataagctcatatgacttatttcaccaattttggagtgcttttgtccctgctgcaagttccccaaaggatggtgtggtaaaggttgtgatgcctggttttgttttttgtttgtttgtttgtgttttgtatgtttggctctaaaactttagagacaaatgtcttctgttcatctgtaacttggcatttagggagaggtttgatgtggtcagaaggaaggcctttgtactgggctgattctgtcctggtgtgctgtgtttgaatactcagggtattcaaagcttctagttgcaaataagtgtagagaccaagttcactctgtttaggctggacctttccagcctgagagatawgcttgtctttgcctctagccatgattcttttaagagatgttatcgtttctgtttgcctaaacttttctagttagtatgaagatcactggtgatccacgacttaatcatgatgtgcttctaaatgccttcttcaagatctgtttaattt

SEQ ID NO: 504611 - DNA, 552 bp, Homo sapiens
ctcctgggttatcagcagctagtgttcagtacatacggtggagacagctaatcatgctaaaaatgcttatggcaatcttctgccttatgcttgttggctgacctgttatctttgtgcttcttcatgccttagctgaccagttgtgacaaaaccccctgccaacttgcttagctggagtcctgtcagggcctccactgcccttcccgccccaattccactcttgcctgagggttacaagtttttaatcaaagccttaatgccaggattcttaagaaggggcagggagcttatcagaatcacctggggagattttcctaattatagccccccacacacctcatcttttccttacagagggagtgttcygtaaccctcaggtacattgaggagggaaaaaagaagttgaaacccattggcttcaagcaatgagagtagtgaggttaatcttcttttgattcagatggaaaatatctcaaaagagggaaatgaaaccttgtctcctaaggatgaaactataataaaaccttaattaatttggaccccattaattca

SEQ ID NO: 504612 - DNA, 613 bp, Homo sapiens
aatatccctctgcagattctacaagaacaccgtttccaagcttttcaatcaaaagaatggtttaactctgtgagatgaatgcacacgtcacaaagtagtttctcagaaagcttctgtctagtttttatgtgaagatatttcctttttcaccatagacctcaaagcactcacaaatatcactttgcagattgcacaagaactgagtttccagactgattaaaggaatgaaacgtttaactctgtgagatgaatgcagacatcacaaagcagtttctcagaaaccttctttatagtttttatgtgaaggtatttcctttttcaccatggcctcaaagcactcacaaatatccctttgcagattctacaacaacagaatttccaaactgctcataattaatttttagcaccaacatgagcatttagacacactgcttgtggtgcagcacacatgtattatccacactgaaattaggaattcaactgaagttcatgtggagccgaaaatgtgaatatttgggggaccttggagatgatctatctcrctttattttttagaaaagaaaacagattcagggaaagggcacgcattgcttaaggtgattcagcagctttg

SEQ ID NO: 504613 - DNA, 576 bp, Homo sapiens
aaaaaaaattacatatgtgactcatgtctgtgtctctcataatatttctattagatagtgctaatatatgctattttatattcttttttcagtcaacattagcgccggcactttgtgcataccacaaataattcttcaagattactattttaatagctattcaacttaaatcatttagggatactatagattgtagcatctagaaactttgtgtgtgtgtatgtatgtgtgtacgcgtgtgtgtctgtgtatgagacacttagtttttctttgttgttgttgttgttgytattgttgagacaaaaagttgattctcttgcttcaactgattctcatgcttcagcctccctagtagctgggattgcaggtatgcacctacaccccccagataatttttgttttgctttttttttaaaaaaaaaaaaaaaagcagagatgaggtttcaccatgttgaccaggctggtctcaaactcctggcctcaaatgatctgcccatctcagcctgccaaagttctgggattacaggcatgagccaccgtgccggccaatacttagtttttcttgctgtaaaaatt

SEQ ID NO: 504614 - DNA, 540 bp, Homo sapiens
gctcaccacaggatattactgcacacttcattagattatacttctaacctgaaacaataactgttaaattccaaactacatcttaktcttggagatcgttcctcagaggtaccttaaccttgggacgggtagctgaatgggaatcgatttgtcatcttctaaaacttgctagagctaagagttcacaaattgacactcacacaacatattctgaattcgacagtggtttaaacttagctacagacttgtacagttctgtgcctggccaaaattgctgcagccctttaaaatattactttggaatcacatgcacaaatacgatactgctctcactgtggaaggttgtttacattaaaattgtggctgccttgtgaccctgtggccaaatttgtcatcggctaactttggccaaaattcatatttacctgcaccattttgaggtcacgaagtttaacctgaccagtgagaatatgaccacaaattctcaacccgttcgattctgtttcaccttcatctttctgctgctttgttcgtacaggc

SEQ ID NO: 504615 - DNA, 540 bp, Homo sapiens
gctcaccacaggatattactgcacacttcattagattatacttctaacctgaaacaataactgttaaattccaaactacatcttagtcttggagatcgttcctcagaggtaccttaaccttgggacgggtagctgaatgggaatcgatttgtcatcttctaaaacttgctagagctaagagttcacaaattgacactcacacaacatattctgaattcgacagtggtttaaacttagctacagacttgtacagttctgtgcctggccaaaattgctgcagccctttaaaatattactttggaatcacatgcacaaatacgatactgctctcactgtggaaggttgtttacattaaaattgtggctgccttgtgaccytgtggccaaatttgtcatcggctaactttggccaaaattcatatttacctgcaccattttgaggtcacgaagtttaacctgaccagtgagaatatgaccacaaattctcaacccgttcgattctgtttcaccttcatctttctgctgctttgttcgtacaggc

SEQ ID NO: 504616 - DNA, 506 bp, Homo sapiens
agctgggaacaatctagtagaggagccagaattgatgaagtaggggaaagaaagcagggaattaactgcaggagcagtgtttttgagcagagaggttgggcttttgtacrtaagggaaagtgttgcctttggggagaaatgtggctggttcccctatggtgacaagaaggaagacacagcatatagacacacctgctgaaaggtaagtggttgtggagatgggagtttgtggaagttctcttgttattgctttaattgtctctgaaggaaacagcaaagtcatcaaagaatgatgagcagaaggagatgttagcattttgagaagggaggaggtgtcaggaagcatgtgggagactgaaccgatgtgttaataatgccaagcagcacggctgaacaccagaaggtgggtcagaggataggaaaatgatgtgatcaaagcatttctgcagtgtgtgtgttgggagactaccagcagaatgaagttgccagcactggaagttgtttta

SEQ ID NO: 504617 - DNA, 489 bp, Homo sapiens
gtatatctgcctccttctcctttcccttgtgcttcttctcccacccacaataaggccacatttctttgcctaaatcacaaatcttttttgttgttgttttgttttttgagacagagtctcaatctgttgcccaagctagagtacagtggcatgatctcagctcactgcaacctctgcctcccaggttcaagtgattctcctgcctcagcctcccaagtagctgggactacaggcatgtgccaccacrcgtggctagtttttgtatttttagtagagacaaggtttcaccatgttcaggctggtctcgaactcctgacctcaagtgatccacccacctcagccttccaaagtgctgggattacaggcatgaggcaacgcgcctggcctgtactttcatttctctatgtttttgtttagattattcttccatccttcccttttccagcaaatgaaacagcttttcccaggagctccatctatatggttatt

SEQ ID NO: 504618 - DNA, 542 bp, Homo sapiens
cctctgcctgcagtcaggagtagcagggtaggaacttgagctcagaaggtagggtagtgctctggaagaccaccaacacttaggagcaagaaaaagctaaaaacataagctgctgattcaagacatcttgatggagatgagtgctcccagacgatgaggaagatgacattgaagcagcaatgccagaaaacaaattgccattagacagtctggcagaagggtttccattagttaagactgccttgacttcttttatgacatggacccttctatgatacaggcactgaaactcaagcgaatggtggaagaaggattgggaccatataggaacacttttcagagaaataaagaagcaaaaaagtcagaccgaaattctgatgtatttctgcaagttgcactgagtgtgcctgcctgtcctgcctccccttccacctcttccacctttgccacccctgagacagcaagaccaaccctcctcttcctcctcctcggcctaatcaatgtgaagatgacarggatgaagaactttatgatgatttact

SEQ ID NO: 504619 - DNA, 562 bp, Homo sapiens
ctgggtctgctcctgcagtggtccttgctctggacctggcataaaggagggctccaggagggtttgcagttgaatatgtgagagaaagctctctggctcttttttttttttttttttttttgaaacggagtctcactctgtcaccaggctagagtgcaatggtgtgatctcggctcactgcaacctccacctcccgggttcaagtgattcttctgcctcakcctcccaagtagcttgaaactacaggggcatgccaccatacccagctaattttttgtatttttagtagagacgaggtttcatcatgttggacaggctggtcttgaactcctgacctcaggtgatccatgcacctgagcctcccaaagtgctgggattacaggcatgagccactgcacccggccgagaaagctctcttattgtctttgcccctagctacagataaggcaaccacggggcaagaaacttactgcatattgaagagaaaatcccagcttcctatccaggcttcaggcagggcccatgctatggcctggggccccctttgacctcatctgctcca

SEQ ID NO: 504620 - DNA, 562 bp, Homo sapiens
ctgggtctgctcctgcagtggtccttgctctggacctggcataaaggagggctccaggagggtttgcagttgaatatgtgagagaaagctctctggctcttttttttttttttttttttttgaaacggagtctcactctgtcaccaggctagagtgcaatggtgtgatctcggctcactgcaacctccacctcccgggttcaagtgattcttctgcctcatcctcccaagtagcttgaaactacaggggcatgccaccatacccagctaattttttgtatttttagtagagacgaggtttcatcatgttggacaggctggtcttgaactcctgacctcaggtgatccatgcacctgagcctcccaaagtgctgggattacaggcatgagccactgcacccggccgagaaagctctcttattgtctttgcccctagctacagataaggcaaccacggggcaagaaacttactgcrtattgaagagaaaatcccagcttcctatccaggcttcaggcagggcccatgctatggcctggggccccctttgacctcatctgctcca

SEQ ID NO: 504621 - DNA, 624 bp, Homo sapiens
tgttgggaaagtggtttttcacttgcctttgatgcttgtatttttttctgacttgtttctggatgtctctttctacccctttccctatatatttatttacgcttactgtgtcaggtccttaagaaaactggtactgtctttcccattaagatgtattaaaagcattgatgctacctaatccaatcctcacctttgaaaagccaaggagctggtatgtggatattatgcatggaagttcagggcaatggagatttaaggtttaacgrgcagattagatgattggattccttttctgtacttggtcaaagagtcttatttaaatgtgatgtaagtcactagtctttaccattggtgtagttgttaagtatactttcaggtcttccttgttctgttttaatgctgatttaccatttactaactctgtgactctgggcaagatggataatctttttgtgtggcagttttcttagctgggtttgataatgatacctacctcccaggaaggtcgtgaggaatctcttcttccacgagtgagaatgcctagtgcagtgcctggcactcagtgggcactcagcaacgacaagtgcaatcacacagcagtggccatggttggtgttccacagg

SEQ ID NO: 504622 - DNA, 583 bp, Homo sapiens
ttttttaaaggttgaatcctttatataaattttgggtcgatgtgtagttattttccccttgctcataaaacctttgatttgcaattatttcctattgaaaacacagaatatttcatttcaatcatacctgaattgtcatttgctctcataaaccatgtattcctaacaacagagttaagattatcttagcaaagaaaagtccctcttgtctgtttctcagtatcctcccctggggctttctgccctgcccaactactgacctatgtaattccaatggcatctatcatctctatctaggcactaggcactcacacctcacaaacacaaacatccacatatggaaagtgaggagcttggagcagagatttcctacartgaacatttttataaaacaagaaccaggcaacttgccacattcatgttccttcaacttatagtaatgggtaactggatggggcaatttgaactagaatttaaagtaaaaaggaaacacaaacagcctccatttgtttatatattacaattttgaaaatgtttactgaatacccaaatgctatctactttgtgaggtatcacaaatgct

SEQ ID NO: 504623 - DNA, 488 bp, Homo sapiens
gagatattctttaaaaaataatttatctttcttcaaaatcttcaaattgtaaaagtaggtgaggmgtaggacataatttattctactgtgttggttaataaccttgaaagtttacttaaaaggcagtctctttcctgattatacaaaacatttaatgggaggaaaaaagcgctcttgaagtattgccatacacagacttttaaacttacaaaaaaaaaaaaaatactgcagcacgtttacactctgccataaagtactataatgaataattaaaacaactagaattgtcaaaataaataactatggattgcggtgtagtgctctaaatttttttaatgcttttttgcatgttgatttacatagcatagtaataagtcaaggatttcccagtcattaaagtgaattaacaagaaagtattttaatgggtagttttgtcttatttcagaatttgactagttatttaattctatacccttctcttgcattt

SEQ ID NO: 504624 - DNA, 488 bp, Homo sapiens
gagatattctttaaaaaataatttatctttcttcaaaatcttcaaattgtaaaagtaggtgaggagtaggacataatttattctactgtgtyggttaataaccttgaaagtttacttaaaaggcagtctctttcctgattatacaaaacatttaatgggaggaaaaaagcgctcttgaagtattgccatacacagacttttaaacttacaaaaaaaaaaaaaatactgcagcacgtttacactctgccataaagtactataatgaataattaaaacaactagaattgtcaaaataaataactatggattgcggtgtagtgctctaaatttttttaatgcttttttgcatgttgatttacatagcatagtaataagtcaaggatttcccagtcattaaagtgaattaacaagaaagtattttaatgggtagttttgtcttatttcagaatttgactagttatttaattctatacccttctcttgcattt

SEQ ID NO: 504625 - DNA, 659 bp, Homo sapiens
tcaaggatttcccagtcattaaagtgaattaacaagaaagtattttaatgggtagttttgtcttatttcagaatttgactagttatttaattctatacccttctcttgcatttactctaaaaaaaactgtrtttgtataaataatgtatttaaaaataaacaaatcagaactccatggtctgaaaaacagaatttagcaactaatttgtcacgtatatgtgaagctttccctagtacctcacttccaagcattgaagaaatgaacatttcacgcagaacatgtatctttactgttcaataattcaaaagcgctaacaacaatatgcatttaagggtctttatatttcattcgaaatacaagctcttaaaacaacaacatcagtatttctgtgtctatatccaaatatattaaatgatgtctaagtgaattttcccagaagattgtcactatttcccatattaagtcattggtatgaaaaattccagttcactttcatctctccctgtatctcttttgcaatattccgaagtggcctacttggtaacctcaactttgagctgatgaatgaaactggcagttttcacgagttgtcttctagtcctggagcaaaggactgagtataggaggaagactgctgaatgacatctgggagactgct

SEQ ID NO: 504626 - DNA, 623 bp, Homo sapiens
tttctgataaaactgtaaagaaaacaacctgagccctcttcagttgacccccacttcccgactgagttcagcctcaaagtcaaagccaataattcctcacctcctgcccctatgaagcgggcagaagcctgtgtcatctgaagcaaagggcagtagctgctagaggcaggaggagccctcccctctgcctgccatgtgacctcaggaaaatccaaagatctccatgatcaaatctcaagtgaaaaaaaaggattctgatagtacctaattcacggcgattcccttccatacaagattcctgacattgcttcagttccctagctgggctttttgctctactagtaacactgacatgactgaatttcatgttaattttaataattttgagtcctggattttaaatcttacagtatatttacatagarcataataataacctctgatataatcaaaacaaaactttctgacctatgttcaacattttaagctgttactgaaatcttttctaatttaaaattaaatttaaaatatctgtatttttaattcaaacctattttcaagcacaaagtataaaaacaatccctaaacttaaaagaatctatctaaaacatttcaaaacacaa

SEQ ID NO: 504627 - DNA, 237 bp, Homo sapiens
agctggcattggtacaatactttatctaaatgagagaccttttcaggagtctaccactcttttcatktactcacttatatatatatatacacatatatacacatttttgctatgaaatgttatcacacatatggatttgtgcaatcattattacaatcaggatacaaaactggaatggatgtggtagctcacacgtgcaatccctgcattttgggaggccaaggcaggaggactgct

SEQ ID NO: 504628 - DNA, 528 bp, Homo sapiens
gctaaattttttcttttctgcttttcaacctaaagtctaagttacagttttggtaatacataggaacttattctttaggtgaaattcctttatgtcactttgattacactgaataatctatctttagaattcagtgtattattacaacaggatcagttgtttaatattatagtcatttatatttgtccagttattctttcaaaaatatattttgagcacttgctttatgcaaggaaccaaggaagttgctctgagggagacagatgtaaaaatgtagttttgaaattaaggaatttacaatgagaaaagagaagtaacaatgaacacaaataattataagaaggtagttctttaaaaagtcataataagcattaagtattaaggagaattcragagaggaatggatcacttccagcttgtagatcataaggaagattgctctactgcatggccaactcctgattagagattatgcacattaagctcttgaaagagacttgctgacattgtcaccttctttgcttaagt

SEQ ID NO: 504629 - DNA, 638 bp, Homo sapiens
ttttgatattgtgcagttaaaagttcagtagattttcaaaactagttattaattgacctcggttctgcacatttttgttgctttgcaagagtacccttaaggctcaaataaagttaaaagtaaggtaaatggtgtgttagactaaaactgtattttttgtctgtcaacacttaaatagaaaaacaaactagcttaagaacatgactgcaatttaggatcttaaaaccatatataccgtagtatttttaaagcctgcaaccaaaaagtagaatcattgtgttttatagcactttgaaattctgtctgatgttactgtatgtctgtgctgtcctgatatggcttttggattgcgtttgtggtacaagattgatttcttgtatttgtatattacttggctgcacagatggtatccgcttcaaatctactaaataaaactagaacaatgattttgccagttggttttgactgcttttatttattttggayggctgtagtctttgtgaagatggcagactaaacctggaagtgacagctaagaacagaatgggtgggctacaggtctgctaattgatctcagcagaactcatgctacttctccctgggtacaagacgttttcttcaattgaatgttcacaggc

SEQ ID NO: 504630 - DNA, 633 bp, Homo sapiens
gtctccatctcagggtcacagatactttctggtgctaatttatatgtgctctcactggggtgaagcatytccatactgatgagccacagcccaagtagcaggtagactgtgattagaaaaaaatcattcctcatggggaatgccatctgatctacatagcaaccgaggaacacactttatcaggcaggtagctggatccatttgtaatgtttagcctatgtcccaacatttccattgtgcctgtcacccctaatcctctggactagtgcaactcaataatgatacaataaaaactcaattgacaaagataacagaagtttttaaccttccctggccaaagatcccccactgtttctggaaaacttccactccctccctttgaaataataacaggaagacccatgcagtggttagatgaaggggcttatgaacctgcacttcttaaaggtaacattctccattattgctaagttctcacaaaacttcttaccaagagctccaaaattaataaaatattcctttcataatgagctgctgagggatgaaaatataaaaaattatgcctataaactggagaaaacatcaaatactggaaacaatatcaaataaaatattccctccaagtccactgga

SEQ ID NO: 504631 - DNA, 633 bp, Homo sapiens
gtctccatctcagggtcacagatactttctggtgctaatttatatgtgctctcactggggtgaagcatttccatactgatgagccacagcccaagtagcaggtagactgtgattagaaaaaaatcattcctcatggggaatgccatctgatctacatagcaaccgaggaacacactttatcaggcaggtagctggatccatttgtaatgtttagcctatgtcccaacattyccattgtgcctgtcacccctaatcctctggactagtgcaactcaataatgatacaataaaaactcaattgacaaagataacagaagtttttaaccttccctggccaaagatcccccactgtttctggaaaacttccactccctccctttgaaataataacaggaagacccatgcagtggttagatgaaggggcttatgaacctgcacttcttaaaggtaacattctccattattgctaagttctcacaaaacttcttaccaagagctccaaaattaataaaatattcctttcataatgagctgctgagggatgaaaatataaaaaattatgcctataaactggagaaaacatcaaatactggaaacaatatcaaataaaatattccctccaagtccactgga

SEQ ID NO: 504632 - DNA, 633 bp, Homo sapiens
gtctccatctcagggtcacagatactttctggtgctaatttatatgtgctctcactggggtgaagcatttccatactgatgagccacagcccaagtagcaggtagactgtgattagaaaaaaatcattcctcatggggaatgccatctgatctacatagcaaccgaggaacacactttatcaggcaggtagctggatccatttgtaatgtttagcctatgtcccaacatttccattgtgcctgtcacccctaatcctctggactagtgcaactcaataatgatacaataaaaactcaattgacaaagataacagaagtttttaaccttccctggccaaagatcccccactgtttctggaaaacttccactccctccctttgaaataataacaggaagacccatgcagtggttagatgaaggggcttatgaacctgcacttcttaaaggtaacattctccattattgctaagttctcacaaaacttcttaccaagagctccaaaattaataaaatattcctttcataatgagctgctgagggatgaaaatataaaaaattatgcctataaactggagamaacatcaaatactggaaacaatatcaaataaaatattccctccaagtccactgga

SEQ ID NO: 504633 - DNA, 631 bp, Homo sapiens
ggtatttcatggtaaatgattaaattaactaacacagttatatcctgaactttgccattaggaatgacaattttgttcgatatgcattgaggattgtgggtaatctaaactggtatgagctttttctctttgaaactcaaacagaattaaggaacagcattctctgcaaacagaatatggagtttgagaacagccacaaaaaattctcttgtagtaagctgaactgccctaggagtactcaggaattagacaactcaggaattagagaattagagaactggagaaatgagggggcgtgsatagtagggagagaaaaattgattaattgatttactatatttttcaaatagaagtatctgggaaaataagacaaaacaagcagagttgtttctttttcacagtgaagccccagaggggtgaaagctttgttctccctgggtagcaagctctttttccacatttccgactgcatattccatatttatgatgatttttggtctctctgttcctggcttgctaggtggcaagggcagttagagaaaaaaggcagatttatgaaacacagaaaaatttctgactgaaatcaggcttggatttgtgaatcactgttttttccccctgtggtcactcc

SEQ ID NO: 504634 - DNA, 631 bp, Homo sapiens
ggtatttcatggtaaatgattaaattaactaacacagttatatcctgaactttgccattaggaatgacaattttgttcgatatgcattgaggattgtgggtaatctaaactggtatgagctttttctctttgaaactcaaacagaattaaggaacagcattctctgcaaacagaatatggagtttgagaacagccacaaaaaattctcttgtagtaagctgaactgccctaggagtactcaggaattagacaactcaggaattagagaattagagaactggagaaatgagggggcgtggatagtagggagagaaaaattgattaattgatttactatatttttcaaatagaagtatctgggaaaataagacaaaacaagcagagttgtttctttttcacagtgaagccccagaggggtgaaagctttgttctccctgggtagcaagctctttttccacatttccgactgcatattccatatttwtgatgatttttggtctctctgttcctggcttgctaggtggcaagggcagttagagaaaaaaggcagatttatgaaacacagaaaaatttctgactgaaatcaggcttggatttgtgaatcactgttttttccccctgtggtcactcc

SEQ ID NO: 504635 - DNA, 459 bp, Homo sapiens
aatggcttataaggttgtactcatgctagaggatgtggtggtgtatcctctgaactagtaactaagtataagcttgtctggtgtctccyatataaaaaatacaacaatctttgatatttgttatgaatgttgaagtgactccttttgtcattacatctaatgatccactccaaatacttgtctcttgtctctgagattctaggtttttgcagaattagtacccaaagggagagtcttagcagtattccattttacaatccatccttcgttagaggatgagagacttctatctagccttttaggttgcctgagacctttaaacaaacagtcaaaaatttaaaatttaaaatgcggctacactgttgcatggggtagtaaatcttgaccttaaaactggtatttgtaagaaaaacagaaagaattcagggatcccctttgatggctcctaattctatacag

SEQ ID NO: 504636 - DNA, 459 bp, Homo sapiens
aatggcttataaggttgtactcatgctagaggatgtggtggtgtatcctctgaactagtaactaagtataagcttgtctggtgtctcccatataaaaaatacaacaatctttgatatttgttatgaatgttgaagtgactccttttgtcattacatctaatgatccactccaaatacttgtctcttgtctctgagattctaggtttttgcagaattagtacccaaagggagagtcttagcagtattccattttacaatccatccttcgttagaggatgagagacttctatctagccttttaggttgcctgagacctttaaacaaacagtcaaaaatttaaaatttaaaatgcggctacactgtkgcatggggtagtaaatcttgaccttaaaactggtatttgtaagaaaaacagaaagaattcagggatcccctttgatggctcctaattctatacag

SEQ ID NO: 504637 - DNA, 510 bp, Homo sapiens
ctttttttttgttgttgtttttttgttgttgttgttttggtttctttttttgagatgaagtgacgctctgtcgccaggctggagtgcagtggcgtgatcttggctcactgcaacctccgcctcccaggttcaagtgagtctcctgcctcagcctcccaagtagctgggactataggcaccygccaccacacccagctaatttttgtactttcagtagagacagggtttcaccatgttggccagaatggtcacaatctcttggcctcacgatctacctgcctcggcctcccaaagtgctgggattagaggcgtgagccaccatgcccagccaaagcattcattttctcatttatctttacttgtgatgtgctacaatcatagatattaacatgtttccaatttagcaagactaggaaactgaagcccgtagattttagtcacaaagctaagtagtatacacctcggaaaggaattaattcccagatacaaggatgtatcctgcaccaccac

SEQ ID NO: 504638 - DNA, 510 bp, Homo sapiens
ctttttttttgttgttgtttttttgttgttgttgttttggtttctttttttgagatgaagtgacgctctgtcgccaggctggagtgcagtggcgtgatcttggctcactgcaacctccgcctcccaggttcaagtgagtctcctgcctcagcctcccaagtagctgggactataggcacctgccaccacacccagctaatttttgtactttcagtagagacagggtttcaccatgttggccagaatggtcacaatctcttggcctcacgatctacctgcctcggcctcccaaagtgctgggattagaggcgtgagccaccatgcccagccaaagcattcattttctcatttatctttacttgtgatgtgctacartcatagatattaacatgtttccaatttagcaagactaggaaactgaagcccgtagattttagtcacaaagctaagtagtatacacctcggaaaggaattaattcccagatacaaggatgtatcctgcaccaccac

SEQ ID NO: 504639 - DNA, 607 bp, Homo sapiens
gcctgaacctaactggcacagagcaaggagtctattgaggcgcttcatccaagtcagcttcccagtgcagaaagcaaggtgcaggagggcagagaggagatctaaagaggcaaatgaaaggggtacagcacacttaaattaagatttttgccaaaagttgaaaatatctttaataataagtcgttcttcctatagttttgagaaatactgatatgagcaaaagatggatgagacttcagtttttatttatttatttatttacttaaagacagagtctcgctctattgcccaggctggggtgcagtggcatgattttggctaactgcaacctctgcctcctaggttcaagtgattcttgtgcctcagcttcctgaatagctgggactagaggtgcacgctgccatgaccagctagctaatttcggtatttttggtagagatgggarttttgccttgttggccaggctggtctcgaattcctggcctcaagtgatccacccatcttggcctcccaaaatgctgggatttatacgtgtgagacacagtgcctggccgagacttcagttcagttttatattggtattttggaaaactccctattacatact

SEQ ID NO: 504640 - DNA, 478 bp, Homo sapiens
tgcaataccagtaaacccagccaaaggcattctagtgagcaacacaggaagactcctatacacttcaattttccagcaatccataaaattgaaacataaaaataggattctatttcccttgttcattctatatcttaccagtacttatatttgcatatgtgtagaaactcaaggtttacaaagcatatccacggtctttattgtatttsatgctccacaaaatgttgcaagggactcagacaaagtcctgtttgtactatgttacaggtgagaatgctgacatgtagaggggcaagtacttacctgatcacgttgtcttagtatgatgaagcctcacttaaacccatgatctcatgtcttctcttaaactgatgcactgaaatacagtcaggtaaaataaagagttaggggcacattttaaaatacatttaaggtgcatcaaagatttaaaccaatcacttgtaacatctctatttgt

SEQ ID NO: 504641 - DNA, 478 bp, Homo sapiens
tgcaataccagtaaacccagccaaaggcattctagtgagcaacacaggaagactcctatacacttcaattttccagcaatccataaaattgaaacataaaaataggattctatttcccttgttcattctatatcttaccagtacttatatttgcatatgtgtagaaactcaaggtttacaaagcatatccacggtctttattgtatttcatgctccacaaaatgttgcaagggactcagacaaagtcytgtttgtactatgttacaggtgagaatgctgacatgtagaggggcaagtacttacctgatcacgttgtcttagtatgatgaagcctcacttaaacccatgatctcatgtcttctcttaaactgatgcactgaaatacagtcaggtaaaataaagagttaggggcacattttaaaatacatttaaggtgcatcaaagatttaaaccaatcacttgtaacatctctatttgt

SEQ ID NO: 504642 - DNA, 478 bp, Homo sapiens
tgcaataccagtaaacccagccaaaggcattctagtgagcaacacaggaagactcctatacacttcaattttccagcaatccataaaattgaaacataaaaataggattctatttcccttgttcattctatatcttaccagtacttatatttgcatatgtgtagaaactcaaggtttacaaagcatatccacggtctttattgtatttcatgctccacaaaatgttgcaagggactcagacaaagtcctgtttgtactatgttacaggtgagaatgctgacatgtagaggggcaagtacttacctgatcacgttgtcttagtatgatgaagcctcacttaaacccatgatctcatgtctwctcttaaactgatgcactgaaatacagtcaggtaaaataaagagttaggggcacattttaaaatacatttaaggtgcatcaaagatttaaaccaatcacttgtaacatctctatttgt

SEQ ID NO: 504643 - DNA, 478 bp, Homo sapiens
tgcaataccagtaaacccagccaaaggcattctagtgagcaacacaggaagactcctatacacttcaattttccagcaatccataaaattgaaacataaaaataggattctatttcccttgttcattctatatcttaccagtacttatatttgcatatgtgtagaaactcaaggtttacaaagcatatccacggtctttattgtatttcatgctccacaaaatgttgcaagggactcagacaaagtcctgtttgtactatgttacaggtgagaatgctgacatgtagaggggcaagtacttacctgatcacgttgtcttagtatgatgaagcctcacttaaacccatgatctcatgtcttcycttaaactgatgcactgaaatacagtcaggtaaaataaagagttaggggcacattttaaaatacatttaaggtgcatcaaagatttaaaccaatcacttgtaacatctctatttgt

SEQ ID NO: 504644 - DNA, 622 bp, Homo sapiens
aagggccttaagccctctgggggtccacmttgttggttactcactaatcaaagatgtgcccggcccctagttttctcctccctgactcaagttcatgtcattcaactctctgcctggttcacggactcatggtattctgccctactcctgctgcttggctatccaccagttaccaaaagctgaagttgatgcaaccacgtgaaatttctacaagaccctcccctctttgggctcccatcacattgtcactactgccagatgtcatcagcgtgagagaatcagtggtggtccacaggagcatcttgttgtccctccctaaatgataccagcaccactttcctcccaaaatcaatgctcccaaccacaataccccccttggcttcacttgtgttcccagcaagccatcaaaactagcaccaaggctctctctaggaggctataaatatgtatgttttccttttttctgtctttaaatggtgagttaacacaaacagacctacgtacaccagaccccaaggtatcaatctggatcccttcacaggatcctttgacattttccattcacagaaccaagaaaaaaaaagcaaactctgaagcccagcccttccctcctctattccgc

SEQ ID NO: 504645 - DNA, 540 bp, Homo sapiens
tgcccggcccctagttttctcctccctgactcaagttcatgtcattcaactctctgcctggttcacggactcatggtattctgccctactcctgctgcttggctatccaccagttaccaaaagctgaagttgatgcaaccacgtgaaatttctacaagaccctcccctctttgggctcccatcacattgtcactactgccagatgtcatcagcgtgagagaatcagtggtggtccacaggagcatcttgttgtccctccctaaatgataccagcaccactttcctcccaaaatcaatgctcccaaccacaataccccccttgrcttcacttgtgttcccagcaagccatcaaaactagcaccaaggctctctctaggaggctataaatatgtatgttttccttttttctgtctttaaatggtgagttaacacaaacagacctacgtacaccagaccccaaggtatcaatctggatcccttcacaggatcctttgacattttccattcacagaaccaagaaaaaaaaagcaaactctgaag

SEQ ID NO: 504646 - DNA, 570 bp, Homo sapiens
gcctaacaggcccaggacaggtagctgaccacagccccsggggcttggggccccctgcaagaaaccaaatactacatgaggcgaacttttaagagttctggaacattttgaatttccgttgcctataatggttttaccaccaacccacacatatacatcttgttgccacatagtgggtttccgcagccatacgcaatgttgtaaagggaccagtcccttcacggacacttaggggccacaggtattacagatcagtatgtgtggttctgtagggaggcaacaccgagcacaatcctcatcttacccactcctccagtggggtccgggcagcaccccctcataaaaattattgctgtttccacaggaagaggaaatcacattctcagaaagtggacaaaatgcattatgatttgcagtggttttcgttttcttttttttctttctttttttttttttttttccccgagacagactctcgctccgtctcccaggctggagtgcagtggcgccatctcggctcactgcaacgcgattctcctgcctcagcctcccaagtagctgggattacac

SEQ ID NO: 504647 - DNA, 570 bp, Homo sapiens
gcctaacaggcccaggacaggtagctgaccacagcccccggggcttgggkccccctgcaagaaaccaaatactacatgaggcgaacttttaagagttctggaacattttgaatttccgttgcctataatggttttaccaccaacccacacatatacatcttgttgccacatagtgggtttccgcagccatacgcaatgttgtaaagggaccagtcccttcacggacacttaggggccacaggtattacagatcagtatgtgtggttctgtagggaggcaacaccgagcacaatcctcatcttacccactcctccagtggggtccgggcagcaccccctcataaaaattattgctgtttccacaggaagaggaaatcacattctcagaaagtggacaaaatgcattatgatttgcagtggttttcgttttcttttttttctttctttttttttttttttttccccgagacagactctcgctccgtctcccaggctggagtgcagtggcgccatctcggctcactgcaacgcgattctcctgcctcagcctcccaagtagctgggattacac

SEQ ID NO: 504648 - DNA, 570 bp, Homo sapiens
gcctaacaggcccaggacaggtagctgaccacagcccccggggcttggggccccctgcaagaaaccaaatactacatgaggcgaacttttaagagttctggaacattttgaatttccgttgcctataatggttttaccaccaacccacacatatacatcttgttgccacatagtgggtttccgcagccatacgcaatgttgtaaagggaccagtcccttcacggacacttaggggccacaggtattacagatcagtatgtgtggttctgtagggaggcaacaccgagcacaatcctcatcttacccactcctccagtggggtccgggcagcaccccctcataaaaattattgctgtttccacaggaagaggaaatcacattctcagaaagtggacaaaatgcattatgatttgcagtggttttcgttttcttttttttctttctttttttttttttttttcccygagacagactctcgctccgtctcccaggctggagtgcagtggcgccatctcggctcactgcaacgcgattctcctgcctcagcctcccaagtagctgggattacac

SEQ ID NO: 504649 - DNA, 591 bp, Homo sapiens
ggctgaagtcataagccatagtgttctactgttaaataacaccaatataattactactggcacagctttaaaaaaacaggaytttgttcaaattcttaacacaaagataagtcacatagcaaatccataatcaatgcctgttgaaaaaaatattgaatgattttcagttcaaggaaaatgttttcactgcttggctttcctctcatctcttgcccatctctgcttttctttttttatttaaaaaacaataaaacatttcatttgaaatataaaacatgcagcaaagcacaggatgtaatataacagacctctgttttccaccaccaagattaaacagactttaatgttttttaaatatatgcttgatatctccctcttttatagacataagtgtcatatagctatagcctcacttcatcatccttttcccctcagttctcctcaaaggtgaaaacttatctgcagttttttaaaatcatttttgtacatatgtttgtacttttcactacattagtatgtgttccatacactatcatttcatttcacacttttcatacgtggtattatgctttatatatccgtttgcaactt

SEQ ID NO: 504650 - DNA, 591 bp, Homo sapiens
ggtcaatgacgtgagggcattccaagcggagaatgccattggtcagtggttctcaaccaacagcagccttgctcccccaggtgatacctatttggcaaggtctgaatacatttwtcatggttacaacagagaagaatagacttgctactggtgcctattgagtaaaggccacggatgctgctaagtgtcctacaatgcacagaacagtcccaagacaaaaaatttatctttcccaaacatcagtagtttcaaggctgagaaatccttccataggaaaggcacagaggtgtgaaggcacaggttagcttaggcatcagcaggtgtctgatgcagcttattaaggctattagaggcccatttcccttttccgtcatttccagagcataagcccctcaaattcactgacatcctgtattggtatgtatgctcccagagcctagtctatggtaagtgcaaagtaaatgaataaaacaggtttcccaagagtcagtagtggtaagagtgctgctgagagcacaggtgtcctaagttcccgtggcagccagaacaaattaccataacttagtggctgaaaacaacaggaacttattc

SEQ ID NO: 504651 - DNA, 631 bp, Homo sapiens
gggtaaataagttgatttaagtaattcattcacgtattcactcaacaagtatttattgtcttaggtcatttattcattcttccagaattttaggcaacaagaatttgtcgagtgcttagtttatgccagaggctggatgatccagaggtgaacagtacagacactgtgtttcctaagaaatattacattcaaatgggagacaaaaagaatgaacagataaataaaacagcaggtagtgaaacacaaagtgatttttgagctaaaaccataataaaatgaaagagttatttaagaaaaagacctgatatatggcacttttactcagactgtcagattacacagatttttttcttaatcttggtgacacaatacttcctatccrgttatcacttgggcatttcactttatttctctatactatgttccacagtctcttgtgtcctatgtttctatgaaacaatacttatttttagccaagataatattttgcatcaatattttatttcattcaatgaatactacatactgagtttctaccttttgctagctattgttacatgatagaatgcaatggtgagcatgggagataacgtgaacaaagggataaacaattaacaaaaataacagaata

SEQ ID NO: 504652 - DNA, 578 bp, Homo sapiens
gagagcagaatcggtagatatcacttctaagccagatcataaaacccacctgggagagtgattatccatgctttttcttctccttcatcagtgaccttggaggtcaggtactgaagacatccaccgggcaagatgaaaggagcctgaatccctgagtcaccaaagaggaaagctccaagggttactacccaacccacatcagactgtgacgtgagcgaaaagtaacctttgttgtgttaagctaccaagatgtcagagtatatttattaatgtggcagagcccagcctagcctgactacagcagattgacacaactctgtgtgtgtttctccaatgtggactgggatcaccggcattagaaacacccaagaagcctgttagacctgcatagtcttggctccacttcagaggacctggaagcatagatgctkggagggcccaggaatttacaattttagcaagtagcctagtcattcttattctccctgaagtttcaaaaccacttgctgctcagccaccctcatagaagccaatttatcactttataatgagaaatagaattgtcaagcagagcagaa

SEQ ID NO: 504653 - DNA, 497 bp, Homo sapiens
tgcaagatgatggaacattcctctrttacattgttagtaggttgtggaactgagtttcttgccatggttggacaccagagcctaacagatgcagtctcagtcttggtctcatgatgcaggtttatttggctttggtgattgtccttaaaaatataggagcctggccaatatggtgaaaccctgtctccactaaaaatacaaaaattagctgggcatggtggtgggcgtctgtaatcccagctacttgggaggttgagacaggagaatcgcttgaaccagggaggtggaggttgcagtgagctgagatcgcaccactgcactccagcctgggtgacagagcaagactctttcaaaaaaaaaaagggggaacaacacatctcccagaacctaccctgtgagaggctctgtgctaaactctgaaccaggcatgttacatttcttcattttagctttgctttgtttttcaatcattcctgataatatgtattggggaaagt

SEQ ID NO: 504654 - DNA, 644 bp, Homo sapiens
gccctttcctcctctccctggcgccctcaggtgggatcttagctcctcactcctagataggaaggcacaaagggcgcaggagggacacgtcgcccccggggaaatggagaacaagaagatgctccraggaacctgggacattgtcagaagaaaacgatggaaaagcaaccacactgaggccactgggtttgtgtcttgtgagacaggagggggcctttgagggaagaatgatcttcggcacgggaaagggccctcaggtccgtgccagtctcagctcatttccatccacaggtccctttgcctgagggggcaatttctggggttccctcctgtggtaaaaggtgccagagaataagggggacacacaggtcagcctcaggggcaggatgtggttcccaggagcatgagaaccccacccagggctctggggctccttcctgtgtcctccagtggctgctgcaggagctcccaggacagggctgtgaggctgcggcctcaggaccctccagacagggcggcatccatgcaggccccagggcaggggcagccttgagtgagaggagccaatgatgggggggtccaattccccgtggggaagagcgagttagacccaggcgggacagtgggcacccttcagtatggat

SEQ ID NO: 504655 - DNA, 644 bp, Homo sapiens
gccctttcctcctctccctggcgccctcaggtgggatcttagctcctcactcctagataggaaggcacaaagggcgcaggagggacacgtcgcccccggggaaatggagaacaagaagatgctccgaggaacctgggacattgtcagaagaaaacgatggaaaagcaaccacactgaggccactgggtttgtgtcttgtgagacargagggggcctttgagggaagaatgatcttcggcacgggaaagggccctcaggtccgtgccagtctcagctcatttccatccacaggtccctttgcctgagggggcaatttctggggttccctcctgtggtaaaaggtgccagagaataagggggacacacaggtcagcctcaggggcaggatgtggttcccaggagcatgagaaccccacccagggctctggggctccttcctgtgtcctccagtggctgctgcaggagctcccaggacagggctgtgaggctgcggcctcaggaccctccagacagggcggcatccatgcaggccccagggcaggggcagccttgagtgagaggagccaatgatgggggggtccaattccccgtggggaagagcgagttagacccaggcgggacagtgggcacccttcagtatggat

SEQ ID NO: 504656 - DNA, 329 bp, Homo sapiens
tggcacccacctgacctggcctstgcacacaggtcctggcaggccccagcacctggtaggtgtctccagcctcctggatccaggttcacactggtgctgccaccctccccactcgggcctttgtccagaccctcaacctcccactcctctgcctggctccagccgacagggttgcctgcgtgttccttgaccttcccgggttatggtggctcgctttttaggggtcctcatgacccatttcacacttccctctcgtcttcctcagtctttctgttggcgagtcaatgtctgctcccatctagggtggccgccccttgagagcaggtgca

SEQ ID NO: 504657 - DNA, 501 bp, Homo sapiens
acatggcagagaaggaacctagagctgcccagggggtcctagtattgagtcccactaactgcaccaacccagagtagctctgggtgtcttacaacaccctcctctctaggtccccagccacctgctccgctactttatctgrctgtgtaagatgagcacggggtaagaaagccccagggaggtgcatgggtgacagtggacgctttaaagcaaaaggatggcttccatcacgggcaacgtcagggaccactctgggtgccctggcttctcctccatgccttggactctactgatagactctggggtcatcctgctgctgttgctggagtctgggaagcagcccccaacccccacttccacccgcacacccctactcagtacttcatcagctcagtgtccactcgggtccatttggtggtgatgtggaaatagacaatgccggctttagaacaagcctgtgtactgttggggttgggaccaaagaggcacatggacacagtg

SEQ ID NO: 504658 - DNA, 511 bp, Homo sapiens
gggttataaatgggaagctattgtctttcagaactttaaagatctcattccrtacttttcttgaaagtctgcttcctgttgcctctttgaagttcacatatgtttttctgttagtgatagtatgactttctctttttctttgcttttagcagtttttctatgatgcacctgtctttttttctttgtatttatcctgctggaaatttctagagctttttaaagctgtggttcttcttgcatatatcgcccttttttctctccatgattcattccagatccatattttaggccaatgcttctctgttctgtgtgtctcatttgaggttaaacactcttattgaattcttaatttcagttattttattcatttctagaatgtccactttttaatgaattacaactgtcatctagtttcttaagcatgttaatcacagttatttaaagagtccatatccgatcatttaaacatttggattatacatggggttcattctatcatctggtttttttt

SEQ ID NO: 504659 - DNA, 508 bp, Homo sapiens
ttacctttttattccagcttttagaatactaatcacaaatagatcccatgttatcaaatgtggttctataagagagtatgggaatacagttgttgagaccacattaaggaaaaaaatgctcagacatttaagaatgtaaaagacwtgcagaaataaaaggaatgataagaaaatttaattaccggaaatatatggtaaaaggaagatggcacacgattcagagaaatgcagccacagccatgtcctttataaaaaatgtttgcttttataaaaaatgtttgctgctctctccctctctatactatactattttaggtaagaaatgttaatattcttaaaacttcattttaaaccttcaagtcctttctacttcaagataactccccagatctgtcttctctagggtgagagtgcatgctttaccagggcatagtggaactttcttattaaatccaattagtgagttgttatgcatcaaccccaaacaagcaagactttcctgaaagta

SEQ ID NO: 504660 - DNA, 526 bp, Homo sapiens
cttttactgctggtttatcgtctgcatgttttaatcggtgcctatttggattaaaacttcttccttcactgaggaaaaagycttcatcttcatcatgttcttgatctctgctgcctttattcccagggagaaaatttagagggtcaatgtctcctttactggaagccacagaatttgggtcactgcttttggaggaaatggtgctgctaccactggcaccaaataactgttccatcaaattagcttttttctcttttcttgtaattaaatctacaccatctttactaagtttttccatactgtttctttggaaatccaaaaaactacttttttgactaaatggatttgacctctctgatgtttttgcaaacgaaggcacgtagctaccaaatgcgaactcattaggggaggctggacttctaacatttcctgaattctgaccttctccttttggagttgagaaactgatgtcttgcaaatgatgcccattaaataatctctctgaggattcagagaacctgtatgt

SEQ ID NO: 504661 - DNA, 638 bp, Homo sapiens
tgtcatatgaatgcatatctgttgttcaaggaatgtatgcttcatgtaccggtgagcatgcattcagaggcttccaaagtgtttccattttaatgggtagtgggggatgctaaaggattattttaattgttatttttccaaatggaaatgtaaaagagtccactgccacgtgaatrcaacactgtagaccttcctgaatgcctttcagaaccccctccatttggcagtgtctgagctcccctcctgtcctgatagtccatgatgctcaccagcaccccctgggaaaatgaccccttattttctcttaggaggagaaagatgtgtaggtcccaaggcccatgttctagggaagtgtgatgcagatttgaaccaattacacatagaggggaacatatgataatttgagggatcacatcaaattatccggattgacaccaaaatgaagaagtggtgagagcctgtcagataagaaaaattttaaggactggtaatgtccagtgttgatgagagtgtggggaaatggatactctttagttggttttgcttttaagatagtttagcagaatctgtcaatgttttaaatgcatgtatcttttgacccagcagtttctataggattctctcttacagataaaccc

SEQ ID NO: 504662 - DNA, 547 bp, Homo sapiens
aatagttggagaaagtaagcaagcacatgcaaatcaraacatggttaagacaggttaaatagcagaccataggtgaccaaatgcagtggggtagggaatgtcctatccactgtgcctaaacactggcttctggtcttttattttttgtctttccttcaaccatccccccagcccacacaaagtcccttgcataacagggccagcagtcaaggctagggaacaatttcctagtaaatcagggactctgtgaagccttggcaacatctcaattctcatcttgaatttataactctcagggctctcactgctggccaccaaccccagcacaccaccaacatcttcagtttattgactgacaggctgattatcgctgtgcgaggcggccagcgctggtagtttgcagaaagatggcatacaggcaggaaaaagctgagagcaacttggcaaaatgcaacatgcattcttcctgcaggaagaagggaaagcgttagaacacctctctaatgactttcccagagcagattctttggttcccacttctgagcct

SEQ ID NO: 504663 - DNA, 495 bp, Homo sapiens
taaatagtagagccagtgcacgaactcacacattgcattcccagagcccttgctcctaagtgctgtactacactgcatcgttactgaggcagaaacacaaagtcagtcccaattcagcttgaaagtagctaatggtaatgagatatagtttacctctaatttgtgggaaacttggccagatggggcttagttccatctactttgctgtgcctttctaagtcatgtcaacgatgtgttttagtctgtttgtctcccttgatttctttatgctgctcacctcaagtcggaggcaatttgaccttttatgttttaatactgctaaatggtcaagrgcttgagggaaagggagagaaagcaacaggattaacacaatattatgtgtcataaatggattgtatcctggatctagctagacattaaaaaattaggtcagataggaacggggaaaaaagggagatcctcttttaagcaacatgattagaaactaattgccat

SEQ ID NO: 504664 - DNA, 495 bp, Homo sapiens
taaatagtagagccagtgcacgaactcacacattgcattcccagagcccttgctcctaagtgctgtactacactgcatcgttactgaggcagaaacacaaagtcagtcccaattcagcttgaaagtagctaatggtaatgagatatagtttacctctaatttgtgggaaacttggccagatggggcttagttccatctactttgctgtgcctttctaagtcatgtcaacgatgtgttttagtctgtttgtctcccttgatttctttatgctgctcacctcaagtcggaggcaatttgaccttttatgttttaatactgctaaatggtcaagggcttgagggaaagrgagagaaagcaacaggattaacacaatattatgtgtcataaatggattgtatcctggatctagctagacattaaaaaattaggtcagataggaacggggaaaaaagggagatcctcttttaagcaacatgattagaaactaattgccat

SEQ ID NO: 504665 - DNA, 565 bp, Homo sapiens
agtatgaatctcttctttttttcctctccccaactagaatcagaagccctttcaggtcaggactttcttgttcacttgttcaacctatattcctaccacctggcactgggctctatctagaggaattggaaaatgcatttaataataagggtggaaatatttctgagggcacattttctaagtgaggaaacgaataagacttttttttctctcactctttggaaagactatgatcataaggctaaaatatgcattacctaatctactatgtctatctcttagcaatgttttttaacagaaarccaccatatatctctgtaattatgttgttagagtatgtagaaaagacccaaattatattatttcttttaaatcttagagatattattacatattaatcattttttctttatggtctccaagacattttttagaggtgtctacataatgttaagtgagaagttttatacaggggtagcaaacacaatgcatcacaccatctttaagagtgaagttacatgaggttttttccaaaagtaaagaccaccatttgtttgcttgctca

SEQ ID NO: 504666 - DNA, 492 bp, Homo sapiens
aaaagatctctgatgagacttgctttttagttctcatacccttgtgtaatcacgttgagtatgagatggacttagtgactttcttctaataaatatggtagacataatggactgtcattgtcaagattaggctataaaataattgtggtttccatcttaagttggtttgctcactctctctcgctcgctctctctcgtcatttgccctctggaaagaaaattgcccgtggagaggcccacatgctgaggaaccaaagcctgccaataactaggtaagtaagcatggaagtagattgccccccttcagtttgagatgagaccactgtcccaaccaacaacttgaatgcagcctcatgaaagaccttgtgccagaagtactcagctaaacttctcccgtgttcctgatccacataaagtgaaagacactaaatgtttgttattttaagttgcygagtttggagttaatctgtactgtatcaataaataactaat

SEQ ID NO: 504667 - DNA, 492 bp, Homo sapiens
aaaagatctctgatgagacttgctttttagttctcatacccttgtgtaatcacgttgagtatgagatggacttagtgactttcttctaataaatatggtagacataatggactgtcattgtcaagattaggctataaaataattgtggtttccatcttaagttggtttgctcactctctctcgctcgctctctctcgtcatttgccctctggaaagaaaattgcccgtggagaggcccacatgctgaggaaccaaagcctgccaataactaggtaagtaagcatggaagtagattgccccccttcagtttgagatgagaccactgtcccaaccaacaacttgaatgcagcctcatgaaagaccttgtgccagaagtactcagctaaacttctcccgtgttcctgatccacataaagtgaaagacactaaatgtttgttattttaagttgctgagtttggrgttaatctgtactgtatcaataaataactaat

SEQ ID NO: 504668 - DNA, 606 bp, Homo sapiens
gtctgccctgtttggaagcctctgtaactacatgaatgtccttgcacccacaggtgtttgattataagagcggttytcaaaaattcttggtccaggacctctttacacttttaaaaattgagaattctaaaagcttttgcttgtgtgtattatatctgtcattatttctcatattctatatttcaacagagaacttttaagtacttaattcttttttaaaataacaatgacaaattcatgcaatgcagatagcatatttttatttttaaaaaacttcatattttccaaaacaaaaaaaattactaagaatggcattaagattttccaaatctctttaatatatggcttaataagaaaggaactagattctccatctcctactgcacttacttcattaaaatattatgtatcatgcagcctctggaaattttcattgaacagttgtaagcgagagaaagtaaaaaaaaaaaaccaaaaaaggcaaataacaccatagaattattatgaaaatacttttgactctgtgaatcctctaaaagggtctcagacatttgttagacatttgtcaagcgaaagtgataaaacatttttccctaaagttggtaa

SEQ ID NO: 504669 - DNA, 582 bp, Homo sapiens
ctgatacatggttaataattgtcctttacaaatatccagagacttaaagtataatcaaaataaaataaccagaatccatgttggtctgtgtttctctcaaaaactttttaaatctcaccaaatgtggtctggggactttcagaatcagaatccgctagcagcttattggaaatgcagaatctcagggcccagaactactgatacagtactcacattttaacaagatgctcagatgacttgtgtccctcagttgacacactagagcaccagtcacacacagggggacatgagggaatcagtggagctcatcagcgcaaaagcagctttcctggggattaagttgtaagcctgagctttgtagcatcacctaagtaagctatttaggatactcacagttattggtaatactaattctttaagtcccctatcatcctcaattgtatggatttaacttatagatgtttaaatcttgggtagttagttatacataacatatataaaaataatatcctggaaatgaccaataagtcaaracaactttttgcatttcaggcccaggtattttaaaactgcccaagattt

SEQ ID NO: 504670 - DNA, 629 bp, Homo sapiens
aatagggttacatctataattttgaatcctttagtgattataagctcaaaactttggagaattgtaccctgctatgtggaaatatttttacagttttgttctgtattttaaactgttaaggttaagccaataaattccagaatttgaaactctaccatgtgaaaattagatattccaaaagaaagatagtaagttccattgctggaaatggagtgaatggggatatatctaccatgatagagacttccgtgtgttatagaatatttattctatagtgcttaatttcctccayccctaagtccaaatcatttggaaacatgacattagaaattggtgagtaaacaatgatataaaaatgtagagaatttatagtttaggtaggctattattgtgataatagcttaattattgcttaattcactttttactaaaaaaatcttaagtttgtaacctataaatgctttttacataatccttggatgcttcacttttgcaacagtaacatgtcactatttatgctcataaaaaagttttaaaatattaatatttttattatttttgtggaatgttttctttcacataattgcaaattaaattgttaataattcatttctcagttttataataca

SEQ ID NO: 504671 - DNA, 612 bp, Homo sapiens
tataattttgaatcctttagtgattataagctcaaaactttggagaattgtaccctgctatgtggaaatatttttacagttttgttctgtattttaaactgttaaggttaagccaataaattccagaatttgaaactctaccatgtgaaaattagatattccaaaagaaagatagtaagttccattgctggaaatggagtgaatggggatatatctaccatgatagagacttccgtgtgttatagaatatttattctatagtgcttaatttcctccatccctaagtccaaatcatttggaaacatgacattagaaattggtgagtaaacaatgatataaaaatgtagagaatttatagtttaggtaggctattattgtgataatagcttaattattgcttaattcactttttactaaaaaaatcttaagtttgtaacctataaatgctttttacataatccttggatgcttcacttttgcaacagtaacatgtcactatttatgctcatamaaaagttttaaaatattaatatttttattatttttgtggaatgttttctttcacataattgcaaattaaattgttaataattcatttctcagttttataat

SEQ ID NO: 504672 - DNA, 656 bp, Homo sapiens
ctgccacctccttgatctcgtacttctcaggctctagaactctgagaaatagattttgtgatgtataagccacccagtttatgctgttttgttatagaagcctgaatggactgagacacatattgattcaccctggagcaacaggatccctctatagaaagccccaactcctatgaggtagacctgtccagacagctactctttctggacactgtaacaaatcacaacccttcaatcataggcttggtgaagtctccctcctgttgcaggcctgaagccctgtactactccctgctggctcacctaaactctgactacatctacaacaataatcccattatttagttatctttaatttgccaagtttcaatgggctctctatttcctgccgggactctatctgatgaaaacataatagtaaggatttggtttaattataacaygcatattacatgcaaaatgcctcatgtcattactcacaattagaaaacttaatgcattctcaatgacactatgggaaacagtgctacatttgccatcctctctcttgatctctttaccagtgaccaacagtggacagaccaggagattgtatttgtagccttcaaatagcacaaacttgaatattttctagtaaatttcctgattcttctctt

SEQ ID NO: 504673 - DNA, 482 bp, Homo sapiens
cgccccctgctgaccacagctccccgttatgcatgctgtttgtacatgtcattgcagctcttcccatttagaggtggacttgctttctctatcccctgaatcaaagctggccttgtgayttgatttggacaatagaatgcagggcagtcatggtgtggcattctgagcctagttctccagaaagctggcatgctgccactctcttggaatgctgcccttttgccttggactggccagctgtaggattagagactacaatgagcagagctgatgcatctcagctaaggtcatcttagaccagccagttcccactgactcatctccaacatcagccaaacatgacctagatctgcagagccttccaaagatcagtctcatgagaaagaataaaatgataatagttttaaaactctaagataccggtgtttggttacaaaaaataattaaaaatttgaaatgaactgctgactgtcatggtatta

SEQ ID NO: 504674 - DNA, 482 bp, Homo sapiens
cgccccctgctgaccacagctccccgttatgcatgctgtttgtacatgtcattgcagctcttcccatttagaggtggacttgctttctctatcccctgaatcaaagctggccttgtgacttgatttggacaatagaatgcagggcagtcatggtgtggcattctgagcctagttctccagaaagctggcatgctgccactctcttggaatgctgcccttttgccttggactggccagctgtaggattagagactacaatgagcagagctgatgcatctcagctaaggtcatcttagaccagccagttcccactgactcatctccaacatcagccaaayatgacctagatctgcagagccttccaaagatcagtctcatgagaaagaataaaatgataatagttttaaaactctaagataccggtgtttggttacaaaaaataattaaaaatttgaaatgaactgctgactgtcatggtatta

SEQ ID NO: 504675 - DNA, 442 bp, Homo sapiens
aaatggtgcttattcatagacatgaaaagcatccatccccacataccataatttacatattaaaatctagaaagcactagattatatgttgccatgttgaaggagcttctttcaattttcttcatttttaaacatatttccccatttattgaatttagcattatagaaaataattttcaaacttgttagcatcaaatccttggtgattattttstgaaaatcataaagtacatggagtctgtatgaaatctcattgagagattaaaaaaatattgaaatgcttaggcgctgttttaccaccttttctttctcttcttacttttattactcatcttcaatataaaaccccttgggcttttaaaaactctttgatgtatatattcatccttgaacccaccccagcagccaataatctccacttctctttatattgcattcactt

SEQ ID NO: 504676 - DNA, 442 bp, Homo sapiens
aaatggtgcttattcatagacatgaaaagcatccatccccacataccataatttacatattaaaatctagaaagcactagattatatgttgccatgttgaaggagcttctttcaattttcttcatttttaaacatatttccccatttattgaatttagcattatagaaaataattttcaaacttgttagcatcaaatccttggtgattattttgtgaaaatcataaagtacatggagtctgtatgaaatctcattgagagattaaaaaaatatygaaatgcttaggcgctgttttaccaccttttctttctcttcttacttttattactcatcttcaatataaaaccccttgggcttttaaaaactctttgatgtatatattcatccttgaacccaccccagcagccaataatctccacttctctttatattgcattcactt

SEQ ID NO: 504677 - DNA, 442 bp, Homo sapiens
aaatggtgcttattcatagacatgaaaagcatccatccccacataccataatttacatattaaaatctagaaagcactagattatatgttgccatgttgaaggagcttctttcaattttcttcatttttaaacatatttccccatttattgaatttagcattatagaaaataattttcaaacttgttagcatcaaatccttggtgattattttgtgaaaatcataaagtacatggagtctgtatgaaatctcattgagagattaaaaaaatattgaaatgcttaggygctgttttaccaccttttctttctcttcttacttttattactcatcttcaatataaaaccccttgggcttttaaaaactctttgatgtatatattcatccttgaacccaccccagcagccaataatctccacttctctttatattgcattcactt

SEQ ID NO: 504678 - DNA, 517 bp, Homo sapiens
tggacctctgggatcctagctacaagagatcccattacccccataggcattcgtattgacaaggggaactgcctggagagtgggcagaggcagctcaaacctgtacaaagtcctgaaggttttaygcatagggctgctacagccaaatgcgatcgtaggtgcccatctttcaaggctatcttgctctgaatgactctagtccctgctgagctgggctgggagagacaagggatgcctttcctgcaagactgatctgatttgcatgcccccttgtctgcctgcccctcccaaagtctgtgactggctgctcccacaagagtgggcacacagcacaactttcactgccccacccgagtgttttgccagtggcctgagagcaatttgacccctctagcacagtgagtgctcaaccccaagggatgagacgacacagccacaggcctgtgctcaacccctcactcatcaagcacactgcccagggatattgaactgaaatctgtggcctgagcttgaggca

SEQ ID NO: 504679 - DNA, 606 bp, Homo sapiens
gctcaaggtcacacagcatttcagtggtagaacatgactcgtggttcttagatagcattacccagcctccactgaggctaatggctgtaggcgctatgccaacatgactagatctaaggcaacscaagcaatattttaagggactgaacgcagattccctctcttccccttcgccaccccttcctccacgcgcgactccagtgatcaatgaataattgtggaaacagttcctttgtgcagaacacttcgttaaaagaggtgcagagatacaagtctgcggtaggattccttatcctgagatctgagagcacctcgatgcttccccaacctgctaggtgagggtggaaagggcattcctgaggcagccggtgcccctcctctgccccccaactcccacgtggtttctccagccaagttctcacggagtggcccctccctcagcggctccactgttgccatagcaattgggtgggtggacagcccgtcctatctagaggccacccagccctcgcgtggggagttaccataacaaccccctagtaatagagggggttgggtatcgcccccttcccccgcaaatggaaaggtgggtggcttgattggcaa

SEQ ID NO: 504680 - DNA, 272 bp, Homo sapiens
ccttggtgctagttttgatggcttgctgggaacacaagtgaagtcaaggggggtattgtggttgggagcattgattttgggaggaragtggtgctggtatcatttagggagggacaacaagatgctcctgtggaccaccactgattctctcacgctgatgacatctggcagtagtgacaatgtgatgggagcccaaagaggggagggtcttgtagaaatttcacgtggttgcatcaacttcagcttttggtaactggtggatagccaagcag

SEQ ID NO: 504681 - DNA, 272 bp, Homo sapiens
ccttggtgctagttttgatggcttgctgggaacacaagtgaagtcaaggggggtattgtggttgggagcattgattttgggaggaaagtggtgctggtatcatttagggagggacaacaagatgctcctgtggaccaccactgattctctcacgctgatgacatctggcagtagtgacaatgtgatgggagcccaaagaggggagggtcttgtagaaatttcaygtggttgcatcaacttcagcttttggtaactggtggatagccaagcag

SEQ ID NO: 504682 - DNA, 481 bp, Homo sapiens
tgactgcctacgggagcaactggaacaccggctgacctctactgctcgtggaaggggtaggagaggcccagaccttcctgtttctggctctatttagggacttttaggcagagcttcacagatattctttacttcactygctccttatgaacagtccagcaagggaggtgggcaagtactgtcatccctactttctgaatatatctgagtttagagagtaactctctttaaggcagaactacgtctggtgcccagagtcacctgacttctcaccccatacttaatctgcttatatactgctgatgtctgtgcctttgttgtgtgattgataagtggtggaaccaggtctgtaagggtcctcccacctctaccctcgcctctttaccaaggtggcctttctccttacactctccttccaagctgctgtcacgtggaggccagtctttccatatgttgttgtcctgcctataccacagcagca

SEQ ID NO: 504683 - DNA, 481 bp, Homo sapiens
tgactgcctacgggagcaactggaacaccggctgacctctactgctcgtggaaggggtaggagaggcccagaccttcctgtttctggctctatttagggacttttaggcagagcttcacagatattctttacttcacttgctccttatgaacagtccagcaagggaggtgggcaagtactgtcatccctactttctgaatatatctgagtttagagagtaactctctttaaggcagaactacgtctgrtgcccagagtcacctgacttctcaccccatacttaatctgcttatatactgctgatgtctgtgcctttgttgtgtgattgataagtggtggaaccaggtctgtaagggtcctcccacctctaccctcgcctctttaccaaggtggcctttctccttacactctccttccaagctgctgtcacgtggaggccagtctttccatatgttgttgtcctgcctataccacagcagca

SEQ ID NO: 504684 - DNA, 481 bp, Homo sapiens
tgactgcctacgggagcaactggaacaccggctgacctctactgctcgtggaaggggtaggagaggcccagaccttcctgtttctggctctatttagggacttttaggcagagcttcacagatattctttacttcacttgctccttatgaacagtccagcaagggaggtgggcaagtactgtcatccctactttctgaatatatctgagtttagagagtaactctctttaaggcagaactacgtctggtgcccagagtcacctgacttctcaccccatacttaatctgcttatatactgctgatgtctgtgcctttgttgtgtgattgataagtggtggaaccaggtctgtaagggtcctcccacctctaccctcgcctctttaccaaggtggcctttctccttacactctccttccaagctgctgtcaygtggaggccagtctttccatatgttgttgtcctgcctataccacagcagca

SEQ ID NO: 504685 - DNA, 438 bp, Homo sapiens
tgtcctctacaaacaagtccatgtccctaccatcaatgacaacaacaaaaagatgaggagatactttgggttcaaaataactaaagaaatatagctacattatctttttagtttttttgaacccaaaatgtcttttctcctttttattgtgtgattcgtggtgacatggactgtctgaaggagacaggttattgtcctgctcagtattctrcattctgcagttgtctatctggtgattacctcctatgaaactcaagctaagcatttttagcaagaacatggcattgttcgtattctgcactggcagagtcccaagtgacatgctgtctcctgccagcagctcctgactcctgttctctacaggatggaagctgagaggagtagggctaaagcctctcaatgctgtttgtccatctggctttggtcttcctaagtatt

SEQ ID NO: 504686 - DNA, 538 bp, Homo sapiens
tcgtctaaggtgcccaactcacattctcacatgctaccaaaagacctcctccttctctttcatttttgagagtgaggactatgaaatctctttcttcctcatcccctacccttctctagctcagtgctgaccttctaccttggagtatcctatactttagcctacaggactaaggttactatggagatgaaatatggacttatcttcatctgccaatcaaatgctctataggtgcatgtgtgtaacttaagccgcagggaagtttcagactggatgtgtgccagctcagtgccatccccaggccacacacagaaatggtgacayctccatcacagatgggttgcatgagactcagatgatagtggggtccttggcagaaaagaatgtcacagaggagggttctgacaagtgcttggaaatacttgggtgaatgttaccagactccttctctctcagcttacagcctggatgcctgtcaccaaatccctttgagcagtgacctgagccacctggtggcagaggtacgagctctgagagg

SEQ ID NO: 504687 - DNA, 538 bp, Homo sapiens
tcgtctaaggtgcccaactcacattctcacatgctaccaaaagacctcctccttctctttcatttttgagagtgaggactatgaaatctctttcttcctcatcccctacccttctctagctcagtgctgaccttctaccttggagtatcctatactttagcctacaggactaaggttactatggagatgaaatatggacttatcttcatctgccaatcaaatgctctataggtgcatgtgtgtaacttaagccgcagggaagtttcagactggatgtgtgccagctcagtgccatccccaggccacacacagaaatggtgacacctccatcacagatgggttgcatgagactcagatgatagtggggtccttggcagaaaagaatgtcacagaggagggttctgacaagtgcttggaaatacttgggtsaatgttaccagactccttctctctcagcttacagcctggatgcctgtcaccaaatccctttgagcagtgacctgagccacctggtggcagaggtacgagctctgagagg

SEQ ID NO: 504688 - DNA, 624 bp, Homo sapiens
tttagaaaattgttgaacaagggacatcatcatttaaagtgatacraagaaaactcagctaagcatatgggctagattagagagaaaaataaaggacccatctctgccctggaaaaactactggtagcatctttcagaaagctctctgtgtttgagtacgcaccttgatccataggctcacatttgatcccaactggcggctgcttcttggcattaactttggattcccaaccagtaaatcttagcaagatctgagtttctccaggtatgatattattttgtttgaccatccttatcttcaagggctaccaagaagaaacaaatcatttatttacctccccagaggaaaaggttttaccaatgagacactttcttaccatgaccccagggcccccatgccctgttcacttgagtgccctgtgtggcctgagagaagctcatactggtcacaggattctttatatgattaacctccttcctgaatcccaactttatggtggtggtgatgacaggtatcccatgctcatgtccctgaagtcatcagcctgtctccagttagaaaaaattacatgtatatagagaggcctctttggaagtagcaaaagctttctcaccttcatacat

SEQ ID NO: 504689 - DNA, 624 bp, Homo sapiens
tttagaaaattgttgaacaagggacatcatcatttaaagtgatacaaagaaaactcagctaagcatatgggctagattagagagaaaaataaaggacccatctctgccctggaaaaactactggtagcatctttcasaaagctctctgtgtttgagtacgcaccttgatccataggctcacatttgatcccaactggcggctgcttcttggcattaactttggattcccaaccagtaaatcttagcaagatctgagtttctccaggtatgatattattttgtttgaccatccttatcttcaagggctaccaagaagaaacaaatcatttatttacctccccagaggaaaaggttttaccaatgagacactttcttaccatgaccccagggcccccatgccctgttcacttgagtgccctgtgtggcctgagagaagctcatactggtcacaggattctttatatgattaacctccttcctgaatcccaactttatggtggtggtgatgacaggtatcccatgctcatgtccctgaagtcatcagcctgtctccagttagaaaaaattacatgtatatagagaggcctctttggaagtagcaaaagctttctcaccttcatacat

SEQ ID NO: 504690 - DNA, 624 bp, Homo sapiens
tttagaaaattgttgaacaagggacatcatcatttaaagtgatacaaagaaaactcagctaagcatatgggctagattagagagaaaaataaaggacccatctctgccctggaaaaactactggtagcatctttcagaaagctctctgtgtttgagtacgcaccttgatccataggctcacatttgatcccaactggcggctgcttcttggcattaactttggattcccaaccagtaaatcttascaagatctgagtttctccaggtatgatattattttgtttgaccatccttatcttcaagggctaccaagaagaaacaaatcatttatttacctccccagaggaaaaggttttaccaatgagacactttcttaccatgaccccagggcccccatgccctgttcacttgagtgccctgtgtggcctgagagaagctcatactggtcacaggattctttatatgattaacctccttcctgaatcccaactttatggtggtggtgatgacaggtatcccatgctcatgtccctgaagtcatcagcctgtctccagttagaaaaaattacatgtatatagagaggcctctttggaagtagcaaaagctttctcaccttcatacat

SEQ ID NO: 504691 - DNA, 632 bp, Homo sapiens
gcaggtgggggcctcagcccctgggtctgacatcgtccatttgtcattctcactggacttccctcctygcactggctcccactcccccaggacctggtggacggccacgtgagaaggatacaaacaggccatgcccctttctttctccccctctcaatgcctgcagtggtgggttccatggggtagtgacctgagatttactcgttatggggtctctagcccagagcagggcatggtgcctaatagtcaccccatgaatgctcagtgaaagaaggcatccaccacaaggtcctggggaaccaagaattccactgtggcccataaattctaagtcctacaggattctggaatgggagatgggaacggccttcaaaagtggcctctcttttaacccattatactggcaactgagccatgtttccccatcctggacacatctagagggcactgcctaaaaccacacacatctccccacccaggacagtgcagggccttagcctgggggatgcgggtggacagggagggggtgagccatgaaagctgaagagaagaaagcaggtgaaaggggacggcagggtggaaacaagagacggaaatgggggcagagaatggggggtaagaggggaagagca

SEQ ID NO: 504692 - DNA, 632 bp, Homo sapiens
gcaggtgggggcctcagcccctgggtctgacatcgtccatttgtcattctcactggacttccctccttgcactggctcccactcccccaggacctggtggacggccacgtgagaaggatacaaacaggccatgcccctttctttctccccctctcaatgcctgcagtggtgggttccatggggtagtgacctgagatttactcrttatggggtctctagcccagagcagggcatggtgcctaatagtcaccccatgaatgctcagtgaaagaaggcatccaccacaaggtcctggggaaccaagaattccactgtggcccataaattctaagtcctacaggattctggaatgggagatgggaacggccttcaaaagtggcctctcttttaacccattatactggcaactgagccatgtttccccatcctggacacatctagagggcactgcctaaaaccacacacatctccccacccaggacagtgcagggccttagcctgggggatgcgggtggacagggagggggtgagccatgaaagctgaagagaagaaagcaggtgaaaggggacggcagggtggaaacaagagacggaaatgggggcagagaatggggggtaagaggggaagagca

SEQ ID NO: 504693 - DNA, 606 bp, Homo sapiens
ctgttagcaaagacaagacttaggcacccaacaagaccttttattttcayatgactgagcctctgacttcaatatgcgttccgtgtttttcccagaagttcttttgtgttatgtacagttactctgctgaacagattgtatttgtttttttctttgttttttttttgtttttttgttttgttttgttttgttttactgtgagacagtgatgccaatgcttgtgtatttaggatgggggtcgcagactctgtacttccaggagaagcccccggaaggtcttagctggctcctgagggggcacatttgctgtgctcattgcactttacctggtgtcatgaagcataaagagcacaaacgtggacaccaagagtctacattaaagtcccactcctttatgtttgtaaatatgggatattgggaagttgctgcacctttttttgctcattttcttcactgaacagcagaaatagaaaaatttcttcttaatagggcttaagggagactcaaatacaacactgtatatgatgttcttttgcaaattgtaaagcaaagtacaaagtttcaaatatattcattatacgtatatatctagctttttattccatt

SEQ ID NO: 504694 - DNA, 271 bp, Homo sapiens
ctgacttacctgaacaggaagaactagttgagtaatttcttttagtagcatggtagtggaaaattttagaatcatataaacttaggttgaaaattctgctcctttactctccygccctgtgacttcaggtaagcttgttgatctttccaacttcagtttcttcttctgtaaaatagagatagtaggacctgccttatatattaaatatacatataaaccatagagatgcctctgaaattagcataagctcctttggaaattgaaaatggca

SEQ ID NO: 504695 - DNA, 678 bp, Homo sapiens
ctcctgctccctggaaactctccaggaagtgagctgtggccatcatggggtttacttcatccgttcccctcagagggattgctgccttgcactgcctgatgtccatagtctgaaaacccttcayaacacattttcccagtttttaagtgtttcaggtaggaggataaatccagttcctgttactccatctcaggcagaagtagaagtatcattttttaaaaaatttatatttttatttcaaatttcgtatttgatattatttctttcataaagccttctgaggttccaacagtaccctgcatttcttctatgttgttgtacaatataatgaatgtctgattccttaggctacaaaccttggtttagcactatatccagcacccaacatagtggctgagtacgtcttgattgagaaaacaaataaatagtataatataaatggttttatttgttatctattgcaaaaagaaattatcacaaacctagtagcttaaaataacacatacttattatcatagtgttcacatgtccaggagcccaggcatagcttagtggtatcttctgtaaggctgcaatcaaggtgttggccagggatgagttctcatctggagactcaaccagggaagaatctgcttctaagttttctgtagtagttgctgacagaatttgtttccttgc

SEQ ID NO: 504696 - DNA, 587 bp, Homo sapiens
tgcttgatggtcacctgaccttcctggtgtgggrccgggagcctgattacctacctactataagagtgcttcctccaaactgcaagcttctgataaccaaacctcttccctttggtcactgagaggtaaggctgttggctacttcttgcaattattattattaatcgattatctaactcagcattctctatctcccttcattttctaacatcattttagctaatttactatatatagaattttctgttttaaaaataactgctttggtttctattttccttacctggactgtggctagcttcataatagaaggatttcaaatctgtagtacaatagtaacattaagggaggagaccacccctcatattgtcttatgcccagtttctgcctccaaagaaagaataaaaactgaaaggcagaaatgaaatccataggcagacagcccggtgctgcgccctgggcctggttaaagatcgacctctgacctaacggttatgttatctatagattccagatactgtatggaaaagcactgtgaaaattcctgtcctattgtgttccattctgattaccagtgcatgcagccc

SEQ ID NO: 504697 - DNA, 511 bp, Homo sapiens
ttaaaaaactggagcatatagaattgttctcaggtcacatagctagtcaccaacaaagtcaaaaattacactcaagctttcttaaagtttctcatagatggcatatcttatgtctcagtatctgaacgaatgaatagtttatgtcatatcttgacactggaaaaaaatttgttgattcaacaattctttctgtttttagaggttactgaggttactcaatttcttgcccagtcattagagagatactgttcaagtttcccaacagatacttcaagtctttgatctctagccaatgacttaacccttctcagtcagaatttcatcatatgaaaaatacacttaacagtaacttccttgcaaaatttttaaaagasaaaatgaaattatgcaaattcaattcagctaatacttgacaggtattttccatatgcagacacttaatgcaaagtgcctccctacaacacaatgcccagcacatagttaccactcaaaaatcaacacatttcggctc

SEQ ID NO: 504698 - DNA, 578 bp, Homo sapiens
gaatttctccaataactatcttgtatatctaatcccatcttggcgtatgctttcttgaatatccaaagcaactcaatacttttttaaaaaattataaacctaatcagttaagaaaataaaattttgagtaccaagtgtgagtccaaactgataacttgagtccaaactcatagctctgacactgatttaatggcaaacctcctctccaccatctcattcctggtattgagagaagccttcattggcatgacacctaaagctggattttcctctttttctccttattgtgctatttctcttctctgtccctctgtaatcttattactcagtccagagaatgtggagagggaatgaagagaataggtaaggagaaataatgtatcattgggaactagcttctctctccctgggattgatggttgcttaaagctgactctgttatggattcttttgggggcacgttcaaaagttcccggctagtcccctctcttgtacartttctttgacctgggcaaatctgatttttcacagctcttaggaattctgcatcaccctactttctctatactggtatttct

SEQ ID NO: 504699 - DNA, 453 bp, Homo sapiens
ccacaaaaaccttttcaaacaactactattaattttacctaaaaatcaagaacaaagttatattttattcttttaccagttctatccaacattttcctgagtttctagcaagttcagtaagaccagaaaaagaaataagattctatacaaattgaaaatgtaaaaagaaggaaactctttatgtrgaataatattttaaaatatttttaaaagctaatagaagtaacaactttataaaatcacaaaatgcaagacccatttcaaaactctatcatatttctacagactagtaataaacagtgggtaattaaaattataaaatagaaaactcgtgtatgcaatagtatccaaaacaattattatttaagtataaatctaacaaaatacaagttctataccctagaaaacacaaaccaccgatgaacggaatccaagaatacctaactaaatgga

SEQ ID NO: 504700 - DNA, 531 bp, Homo sapiens
gcttttgtgttcttaatggagaaaaccaccatgtacttatttttaaaatatcaaatttgggtcttcattttttctggaaaaacaaaagcaaaaagaattaatatatacatctatatcatataaacaacatgtttgttttcacatagacatagttatacaactaattacaatacttagtacaaaaaaaagagaggttgatagaaacaaacaggtaaacaacagaaaaccctacacattttactaatttaatttcgtcaaaaaagcattttatgaaaaagcattttgccatatgataattaattacaaatacactgtcatcttccctgtaaggtatttccctctacttggagagagcttgtaaaaagacctgaagaattgggaatggaagatttgttttgtttsatttgcagatctctttagtcattatataaatttctatacagtgagtaggaatcaatacttttctttaaaacatctaaagtaaaaaatttaaataaatccataaatgatatagatggggccttactcaaa

SEQ ID NO: 504701 - DNA, 653 bp, Homo sapiens
catcctaaattttaacattcaagaattttacatactacataaccctgtcccaatttttcagtcctaattttatcattataaaccacaatataattatgaattgtcaaggaaaaaaataacaattacattacctataatgtaatgtaaagttaattggaaagctttttgtacattgttttgtacaattgtttttgtacattggtttttgtacattttatacattacattgtaatgtatacattttgtacattttatacattacattgtaatgtaaagttatactggaaagatgtcaaaatcatttaatgtgaataaacaaaaaaattaataaaatagattacaaaattattttgaaacataaagaagataaatataatgtacttgcttatttgcatacagtaaacataatttatttattatctaaattcaaatataatgtgagtcatatttaacttccaagaaactcttgtgcattttcacaatgcaggaaaaatttcagagaaaaatacccatcagttcacgagcttatggctaatcaatctatttaagatggaagcaaattccttggctcttactagtcataaattgccataagagatcaaatatgaacgcatgaatataacccwtgctgaggtaaaaagtaacaaattaaa

SEQ ID NO: 504702 - DNA, 612 bp, Homo sapiens
aactataatgtaaactatgcactaaaggggattatgatgtgtcagtgtcaattttaagcaatgtacaactctagtggaagatgttgatcaaagtggagggtataaatgtgtgggggcaaggggcatttggaaaatctctgtgccttctcaattttgctgtgaacctgaaactgctctaggaaaagtaartatctcaaaaaaattctaggaatttggcctactctgagaacccttccttaaaacctcctatgttaaatgtattgcccttttacatgcttcaatatgcacatttttgaaaatctctgaaacttaaagagacatttctgtaaatgtttgctggagagggcatgccatatatatctaggcttcattggcagtgataaaaagaatgcttcaaaactgagtcatcaacattcaggaaggcagatactctgtaatacatgtactggtttgcaatcaatgactgctctcctataagtacctctgtagtatgcaccaggaagagcagttggaggactgttagtttttatttgtttcagagtttttacagaggctcttgaccagtcctgaatagagtgctgtgaatccaaacacacagaatgtttactttgc

SEQ ID NO: 504703 - DNA, 612 bp, Homo sapiens
aactataatgtaaactatgcactaaaggggattatgatgtgtcagtgtcaattttaagcaatgtacaactctagtggaagatgttgatcaaagtggagggtataaatgtgtgggggcaaggggcatttggaaaatctctgtgccttctcaattttgctgtgaacctgaaactgctctaggaaaagtaagtatctcaaaaaaattctaggaatttggcctactctgagaamccttccttaaaacctcctatgttaaatgtattgcccttttacatgcttcaatatgcacatttttgaaaatctctgaaacttaaagagacatttctgtaaatgtttgctggagagggcatgccatatatatctaggcttcattggcagtgataaaaagaatgcttcaaaactgagtcatcaacattcaggaaggcagatactctgtaatacatgtactggtttgcaatcaatgactgctctcctataagtacctctgtagtatgcaccaggaagagcagttggaggactgttagtttttatttgtttcagagtttttacagaggctcttgaccagtcctgaatagagtgctgtgaatccaaacacacagaatgtttactttgc

SEQ ID NO: 504704 - DNA, 460 bp, Homo sapiens
ttcagaggtgttacactgcccttcagggacaattttgaatatttttggaggtatttgtgtcttttgatagagatgtttttaagaatttacatatagcaatgcatattttaaaaatatacttttcttcraacttactttgagtttcagttatacactgtattgatgttatcatttttaaagtataacacatgcaatacaatttaataaattaagtgtacacttcgataagttttataaacttatagtcatggaacctctaaaaaaaccatgaatgaacttagccatcacctcaaaaagttcactcatggcctgggcccagtaactcacgccagtaatcccagcactttgggacgccaaggctagaggattgtttgagcccaggattcaagaccagccttagcaacatagcaagcctccatctttgcaaaaaataaaaataattagccagtcacattgttgc

SEQ ID NO: 504705 - DNA, 602 bp, Homo sapiens
tgttttactaaggcagcttccatggagtccaattgcagtgagaggagcaatgggagatgagagtggaaacactgataaccctgttaagaatgatctgtgaagcagcggcaagacttagagtaatagccagaggaagatcagagggaagaaagatattaggatggaaggcttaatgagcaagtggggaagacaaataagagaagcaaaaaatgaagatatacagagaggttcagagatacctgatagaacaagggcctgggcaggtaagaggaagtagagagccttatatacaaggaaacatagagaaagatgcaggctgtggtacgaatgcatcccccaaagttcaygtattggaaacttaatccccagtgccacagtgttgagagctgagactttaaagagatgaataggtcacaagggttctgcccttatgaatgtattaatgctgttatcgttggagtgggttatcacgagagtgggttcctgataaaaggatgagtttgtcctttcctacctcctcatagcaagaggccatcaccagatgcaagcccctcgatgttgggcattccagcctcctgtaagaaataaatttctcttcttta

SEQ ID NO: 504706 - DNA, 548 bp, Homo sapiens
tgagtagttacattcaaaagcccagatttcagggctattgttcctgagatggacttcaagtgcctattttggaagtctagaaatgaacatagatttttagcttctgcgtgcatcccagctataaagatactaaacttctctgaggcaataggcactgctggctaaaaagagaaagatcatgagcaaagatgaaaaaaggggcagtaattaaagtaataatatatttcaaaatgctacacaaataataatgaaggagaacaaacatttaaaatttcctttaaaagtgccaggtgtcaggccatgaaatatatataaacttcatctttgcaaccacctattatatgcatagttttattttactggtgagtaaacgaaggtttgtagagttttgttactgctcaaacaatacagygtgataaggggtaggctatgatttgagctgacgttttgcttccaaggacacggtctttccactcgttgttcctggtaccccaccccctgctctctaaaatttaattctctgaaagaaaagcatctgactggaaaac

SEQ ID NO: 504707 - DNA, 541 bp, Homo sapiens
caaaagcccagatttcagggctattgttcctgagatggacttcaagtgcctattttggaagtctagaaatgaacatagatttttagcttctgcgtgcatcccagctataaagatactaaacttctctgaggcaataggcactgctggctaaaaagagaaagatcatgagcaaagatgaaaaaaggggcagtaattaaagtaataatatatttcaaaatgctacacaaataataatgaaggagaacaaacatttaaaatttcctttaaaagtgccaggtgtcaggccatgaaatatatataaacttcatctttgcaaccacctattatatgcatagttttattttactggtgagtaaacgaaggtttgtagagttttgttactgctcaaacaatacagtgtgataaggggtaggctatgatttgagctgaygttttgcttccaaggacacggtctttccactcgttgttcctggtaccccaccccctgctctctaaaatttaattctctgaaagaaaagcatctgactggaaaacagcattt

SEQ ID NO: 504708 - DNA, 673 bp, Homo sapiens
cctactcacaaatttttatttcgtatgcttgccagcatcttcaaactttccctttgacatccttgctattacaaagccaggagcttcagtaagttctgaacccctgaaaatctatatttttgcttttcagtcaaatatcagaatatttaaaaatctacatgagattttaggctcctgaaaagtatataggttttctttttttccttacaagttgtcaatttccaaatttcattttccatcttttacgctccttcctgagtaaagtttaaarctgagtcatggggtaatgatttctgccagtgttcaccactacccattttaggcataattcaattggatcctgtgcatcagttgatgagtacaaatgatgttacagacagtgtagtaagggagaatgataacggactaagcactagtccggtttaaccagggaaataatttatctaggtcactcatgatgttcacgactcatttaaacatagataaaattacatgctcaattatttctgtcctagaaaatctgcaagttaagagaatttctatataaaagtagaaggaaattaataactaacaaaaagtataggctgatatgagaaacaaggtataattgtggtagtcatgaggacatactactcaatctggtcttcaagagaagctgctagaaagaaagtgc

SEQ ID NO: 504709 - DNA, 470 bp, Homo sapiens
aattccccctctttgagagtttcaatgtccattaacataccaaaggcccttaaaagtcctataaatcctctagcaaacaaaggttgtttattatttgctgttgtttaacccagaacttctaaaatgtatttggcattgaaacacttatttttcaagaagcactactaacatcctggtttcatgtggtgagtgaatctgaccttcaaaaaccccactcgcacttcacctccatgaaagaaggtttggcgagagttctcaaccttggctgtgcactagagccatctgggaagcttctacaacacccaatacttagactgcccccaaaccaattaaatgagcaaatctggggytgggtcccaggcatcagtactacgtaaagttccctgagttccagggtaagacaaaggctgagaaccactggattagaggaaaacgctttggtggtaactttcattgccattgcctgccaa

SEQ ID NO: 504710 - DNA, 605 bp, Homo sapiens
catagattctcacagataatagctacttaaagacattgacatcatccacttatccatgttagtaaaactattcatttcaaagcttataaatatttcagaaaacatgccggaattccatctctccatccctgcttagatcatccttaggtaatggtccctttaaggtctccaygacctctgtgcaaagaaagttatctgggggtggtgaatactgtcctgcaagctcaaaggtacacaatcttcattcaaatctcttgtggctttggcttcatgtccttggataaagtgacttaaccccctgaactttcatatccttatttatgtgaccaagtataacataaaataggaaatgttatttacctgctaaattgtagaaagacacacctggactggggacagtgagtacacactgaacactagtgttttccccacataggtaatagcacccaacagataatatttgccccacaagttatatgcagattggaaaaagtggaatcatgttccaagcatcacagaagtactgactgtagctagtctggcatgtgagcatttgttgtcattttccttgcccttcaatatttgtcctgttttaccctttagtt

SEQ ID NO: 504711 - DNA, 554 bp, Homo sapiens
catagactgggtggctgaaacaacagacagtttttggtgaaggcctcttgctggctggcaaattggttctttttcactgtgtccccacatgttggaaaaagaactctgatctcctcctgttcttaaaaggatactaattccctcatgggagacatgtcctcatgacctcatattaacttaattacatcccaacagccccatcttcaaataccatcacattatttcttaaggctttaacatacaaatttgaggagacaaaaagggttagtctataacaataatatatatcacaaatataccacccragttaatagcaaaagctaactctctcattgtgatttatgcttttacacagctaggaaaagaagcaagtgttttattcttaatttaactaaaatactggtaatatgactaaaattcatttgataactgatattttgaaatctgaaaagtgttcttcattcctctgatagtataaggctatgtaatacatatgcctaaggcagagcctgaactcagctttcactagataattgtggcttctgccacatggc

SEQ ID NO: 504712 - DNA, 515 bp, Homo sapiens
ctgtggcctggcccccgcggggttaacactcacgctcccctccattcccagtggctgctcaccctccagcccctcctctgcctctcccagacccacccctacctggcttctgctcttagggaccccgcgtcccactccctactgaggcccaggagggcagcccccggccccacccttctcacgggggctgcatgctcagttcctaaccacagggattagggagagcagcctccccsactccagggcctgaggaggggcatccccagtcctccaggactctgaaggcccaacccccagaacccacgccctcagggatcacagagtccagcctctggacaacctcccgctccccccgcctccatctctacctcctcatgagcctccgtttccacttccatctgcatagggctaaagtccccaacactcatctcctgccctgtcagggactcaggagactgagctcccagcctgccttcctcagacggaagcgctatcccctacctcctcccgtaaag

SEQ ID NO: 504713 - DNA, 484 bp, Homo sapiens
tggcctggcccccgcggggttaacactcacgctcccctccattcccagtggctgctcaccctccagcccctcctctgcctctcccagacccacccctacctggcttctgctcttagggaccccgcgtcccactccctactgaggcccaggagggcagcccccggccccacccttctcacgggggctgcatgctcagttcctaaccacagggattagggagagcagcctccccgactccagggcctgaggaggggcatccccagtcctccaggactctgaaggcccaacccccagaacccacgccctcagggatcacagagtccagcctctggacaaccycccgctccccccgcctccatctctacctcctcatgagcctccgtttccacttccatctgcatagggctaaagtccccaacactcatctcctgccctgtcagggactcaggagactgagctcccagcctgccttcctcagacggaa

SEQ ID NO: 504714 - DNA, 635 bp, Homo sapiens
cacgcctgagggtggtcgccgggggctgggcacgcccccagtcctgcgccgccgggggctgcggcggtgctgcccaccccagagagccctcggcctggggctccggcgaagcaagtgccttcccggcgccggtcgccaggggggcgcgggagcagccagatgcgccgcagcgctgggaaggcggcgaaggacaggggctttgggagtgaggggcgctcggcaggcagcctcagccctggccctgcgcgggagaagggacagcagagaccgcccgtggggccccggggtgtagggagctgtccgttcagcccttgcgcccgcctcgcccgcggcagagggcggcacagccggagccttggaaagaccggcagcgccggcagccgcgggctttctcggccactgcctcccggacgcacgggaagccgccccccgcgccgccgccgccgcactgccgccgtcgcagaggggtgaggaaatcaactcaccgagctctggtcgccgacaagaggagccccggacgccggctctcgccctgcccgaggctgcaaagttgtggrctcggcccggctggctcgcagcctgcgcttcgcttcgggaactgggcaagtagcggggatgtggggaggagggagcgg

SEQ ID NO: 504715 - DNA, 638 bp, Homo sapiens
ccagcttttcagggataattttggagcagggacggaaaatctgaccctgctggtaaaattagcagcaaaccatgtaccctggcctgtggtttaagggggtcacgtgagaccaagagctataggcaccactgcctgctccacttgccctctctgtccccatactccccaggcagtttcaccatcacccccaaacttgatctccaggcaccctggctctgccctctctccaacctctccaagccccaaaaaatcatccctctactcagcaaaggcaaccttcagttccccacctcctccccttggtgccctgcctgctcagctccagtcctgtcttccccccctccccaccccacagtcccaagctgctagatcagggtagtgctgagaacttttggggcctggggtgggagtggyggggaggggagagaaagggaaaggggaagggcatcttctcccctagcagagctggctccacggagtggagtcctgtgctaggaggcctgtctgggtagcccactcacacttcccatgcttccctcccctgtggttccattcagccatctatctgagacagagagaagggcagagcgtgggaggatagtttggggttaaggttatcatggctcacctcctggaaa

SEQ ID NO: 504716 - DNA, 548 bp, Homo sapiens
tggggctttctggtgctaatgccactctcctctgaactccccagcccaactctgagactctgaggcaatygatgaaggggtgagacaagggagggaaagggtgtcaggcaacctctcagcagtttggagggctggtagagagatgcacccagcactgcaaatagcccaaacagtatatttgtacagaaaaggggtgtccttaactcaagatactttactgccatctactggaaaattattataataattatccaaatatacatgtgtgaaaatgaggtccctggaattgtaaagtgtagaacctgaacaactgtacaaggcagccctagatgcaacttctcttgcctgaaagaatgaaaaaagagaggacccttgccaccagggtggctcaaatcctgccctcttctttcccacctgggagtacctggtttacacagagggtctgtggtagtctagctcctgtagtttcaccatctagggccctgtagaatctattcatccttccatccactctatgaacatgccctgagtgtgtcctctggttcagg

SEQ ID NO: 504717 - DNA, 556 bp, Homo sapiens
cataaaatgatattcgtatctagcagttgcaattattttgttttttggtttgctggtttacatttttgagtctctcatttgcttttgcagactaaggtggagaacacatcttcttcattttgtatcatttatgtctggcataattcctggctcataatatgcaatgttttgaaagaatgaccagcaagtcacatctatataaaactaaagaaattagttagtgttttattcactggaaacagaagttaaacaagaaatgttgattgaatttttcctttgcaactaactattgaataccatgaagacactgcattaaacagtagaggagattactgggctcagtaaaatattttaccttaacttcagtaaaatatttattttgcagtactatggaggatagactagaagcaggaaaaagattggcacaagaaatgagtgaggaaatcatgatgataatgtaattgccaaaagatactgaaaaactgaacttsggcaaagacagttagagtgaaggaaaatgcgaaaccttttagagtcagaaaaacaagatttggtg

SEQ ID NO: 504718 - DNA, 642 bp, Homo sapiens
aagaatgacctgatatatatggttcactccattatgggttccaccaatttttttctgttatgtgggttagcaacatgcttatgtattttttttctgcattttaacaaacttttttcattaattcaattaaaagcattgaattggtatatwgtctaaagtttaaggcatttttaatctccttttttgcaataaattcagttttatacctggaacattaaatgatgtgttattaatataggattcatagagtgtgaacagccttctgaacatggaaacaaggaaggtgatgtgtatttagtatttgaaattaaaatgaaaattgctaagttaggcaacagtaagaggaagagttattttaataagtcctggataattttatcaaataatttgactcaacagtgatttcaatcctgacttgaagtattttacttatttacttattgtgtataagggaaatattctaaatatattatttgtcattctccattcctggttagaattgttctttaaagcttattgcgaactgactacttggtgacacaaacatgattttggtataaattacatatgaattttagatataaataagaatttgtataaaagagtttttaaaacagtcacatgaacttctgaaagtctggt

SEQ ID NO: 504719 - DNA, 643 bp, Homo sapiens
ttagaacaatcattttcttaattctaacattaattttaacttgcttcaaataaagtttaatgttaataaagtaaaatcataccacataacatccttatttagaataaatttttctagaacttgaatataggttttctacatttaaaaaatggcaaactctgcttcaatatgaacacttaccaataaatcacctaattkcaaagaggaaataaggaagaatataaatatatatgacatgatataaaataagtatgaaaattggaagaaaagaaaaatgggatagaaaacgaagatgaaataaaacatgaaatgggataagattaatgaactatgtatatgccattcagtcctatgcacttgagaaatgtggcttcaaatttggcttcaaatttcttctaccaaatcctattttctctttgaccgaattcaatattttaaactgatgttttatgaaccctctgaagattataaagttattctagagattcacgtcattaaaaagattaatatttatttttaaatcaataaataagatgattaataaaatatttctttaaaatagaagaattttagaacatatcatgattataatatgatcatctttaagactcagtcattaagctaaacaatgctagccatactg

SEQ ID NO: 504720 - DNA, 625 bp, Homo sapiens
tgtaatataattaaaatatatttgctttgtctctgattcctggcaaagagatcctaaaacccttggaatttcctgagtgagaacagtatgttttgcatgttaatgagatgactctttgaaataagggctagataacttcaggatgggggctggagtcatcagttcaagaatgtgaaaaaccaacccagagattagagggttagaaattgttttctttttgttttgttttgttctcttctcgctctctcttttttttatatacatatatttttattttttagtcaaatggagtctctctctgttttccaggcaggagtgcaatgctgcaatcatagctcactgtagcttcaaacttctcagctcaagtgatcctcttacctcagccccctaagtagctgagactacaggggcacactcagctaatttctgtattcttctttttctttctttctttyttttttttttttttttgagatgaggtttcactatgttgtcagactggacttgaactcctagtaaccacaagtgatacttccacctcagcttcctgagtctctaggattataggcatgagccagggcaccaagctcaagggttagattatacctacttgaaactatgaaac

SEQ ID NO: 504721 - DNA, 640 bp, Homo sapiens
tgaatcaattatttatacatttatttcataaaatataatgtatttattttctttttaaacagtttttatttttaattattatggatacataatggttgtacatatttatggggcacacgaaatattttgattagatacccactgakaattttatttgaatttttaaccccattacttacatatataagatcttccaataatgtggtttcattcaacattgtttacttataacattgataagaaacaacttgattcctgatggctaaggttactatctgtgtggagtttgcatgttttctttatgtctgtgtaagttttctctggattttccagtttcctcatacatcaaaaagatgtgctttttaggcaaattaatttgtttaaattttccccctctgagtgtgtgagtgggtgtgtgagtgtgcccggaaatggaatggccagcgttggttcctgcctttttcccagagcagtcatgataggctccagcaatttgccaccctaaactggaataatcatatgaaaaaaagaatagaatggacgaatacaatttatttccaaataagtatttttaaggcatacaatatgtgatggttaatatgagtgtcaacttgattggattgaaggatgcaaagtattg

SEQ ID NO: 504722 - DNA, 640 bp, Homo sapiens
tgaatcaattatttatacatttatttcataaaatataatgtatttattttctttttaaacagtttttatttttaattattatggatacataatggttgtacatatttatggggcacacgaaatattttgattagatacccactgagaattttatttgaatttttaaccccattacttacatatataagatcttccaataatgtggtttcattcaacattgtttamttataacattgataagaaacaacttgattcctgatggctaaggttactatctgtgtggagtttgcatgttttctttatgtctgtgtaagttttctctggattttccagtttcctcatacatcaaaaagatgtgctttttaggcaaattaatttgtttaaattttccccctctgagtgtgtgagtgggtgtgtgagtgtgcccggaaatggaatggccagcgttggttcctgcctttttcccagagcagtcatgataggctccagcaatttgccaccctaaactggaataatcatatgaaaaaaagaatagaatggacgaatacaatttatttccaaataagtatttttaaggcatacaatatgtgatggttaatatgagtgtcaacttgattggattgaaggatgcaaagtattg

SEQ ID NO: 504723 - DNA, 606 bp, Homo sapiens
gcattcagactttttggttagatcgttttcactcagcagtgatcatgtcttttccatgtgtacctgtacaattttttcttcatgtctcaaagtaaaggctttagaataaaaaaatgaataaaataaataaatatgaayattattcaattacacaggatatgttttagtttcatgaagagattaatgtagcccctataagtaatgagaattcataccaccgttcactggatttgaatatatagttattttatgttttggcaaacataaaatatgagaaagatcagaatagaagatgaatgtatattaataaggatagtattttatgagtacataggatctgttatatatccctatccattatgtaactcaatctatcatttatatccgggtctgcaaacaacatcctctaggccaaatctggcttgctgcctgttttcataaataaagctttactgaaacaccgccatgctcttttgtttacacattatccatgattgcttacctattacagtggcaaagttgagcagttatgacaaatccacaagccatttaaaatacatatagctggtcaggaatggtggctcatgcctgtaatctcaacacttc

SEQ ID NO: 504724 - DNA, 523 bp, Homo sapiens
cttcaagggcccggtgaatctcctctgtttacatgtgtgtgtgctgtgtgtacggggttggaggtgggtaagatgaacagagagagtgggagagagagaaatcttccctaagcatctttatctgcaaatacttattcttctaaaccctttgtcaccttcactgcttagtaagcttcacagtacataaaatttcaagctggctctgtgtgtgtgtgtgtgtgtgagtgtgtatgtgtgtgtataataattcactttctacatatattttgttattactactagattcaacttttaacttttcttacgttcttaggttgttcaaacagcagttagcacaatgagttttttttttttatcctaggtgcttggtaaatatgactcatttgagtaatttttargaatggtaatttttctatctgactgtcgcaaccccctactctcattttttccatttatgaaaagagatatttaagtaagtgttttgtcgatcccaccacactggtaacagaggaccccgtaacat

SEQ ID NO: 504725 - DNA, 526 bp, Homo sapiens
cgcacagctttaaatatgatatacaatattctgaatattatatgcagtgatacttaaatatgagaaaaacatcaattctccttataaattattaaaccacatagaatttagtaaacttttcagatggttggcacaaatattttactttatcatacagattatataaatattttaaaatattatctattttaagattctggaatkgaaaagagacattgactattgccttaagatgaagataattatctaattatgactttaatattcatgttcataaaaccaattaccttcaatgtatcaaccaagtatctgatggttattataggtaatggatctaatgattgctcttctgataatggcaatatcatagtatttttaattatcatttaacataataattaccacaatattgtgggctgaacaattgataaatacataaattttttcattaatttatatttacatttttatgctatttatcattctgaaatacttttattcagtcttgagattatgttagtaaaga

SEQ ID NO: 504726 - DNA, 526 bp, Homo sapiens
cgcacagctttaaatatgatatacaatattctgaatattatatgcagtgatacttaaatatgagaaaaacatcaattctccttataaattattaaaccacatagaatttagtaaacttttcagatggttggcacaaatattttactttatcatacagattatataaatattttaaaatattatctattttaagattctggaatggaaaagagacattgactattgccttaagatgaagataattatctaattatgactttaatattcatgttcataaaaccaattaccttcartgtatcaaccaagtatctgatggttattataggtaatggatctaatgattgctcttctgataatggcaatatcatagtatttttaattatcatttaacataataattaccacaatattgtgggctgaacaattgataaatacataaattttttcattaatttatatttacatttttatgctatttatcattctgaaatacttttattcagtcttgagattatgttagtaaaga

SEQ ID NO: 504727 - DNA, 603 bp, Homo sapiens
cttagacatttctccaaagaaaggccagtaagcatatgaaaagatgctcaacacctttagccatcaggaaaacacaaatcaataccacaatgaaacagcacttcacacctaataggattggctataaccaaaaagwtagataagttactcaactttggatatgatttttcttcatctgtgacacaggtattaaaaaagtacctcccttatgaggtcattgtaaggattagctaacagtgtagatataagtgccagcacagggtcgttcttattcttccataaatgattgctaaagtaatggtaactgatagaccaacaaagactgtctccagacagtcccaggcaatggaactttgcaaaaatacaaaggaagaatatgcttgtggcattgggcactcttaacacagtgcaataatgggtcactataaagctttcctcaagtctcttcttgaaaccaaataataataattataatacaacctgctaatagcatataaaccacatatctcagaaaaacaaaggaaaccaagcagtgaagcacactaaaaataggataagaacaaaaaaaaattaaatgggataattcttctaaagtagttaaaa

SEQ ID NO: 504728 - DNA, 603 bp, Homo sapiens
cttagacatttctccaaagaaaggccagtaagcatatgaaaagatgctcaacacctttagccatcaggaaaacacaaatcaataccacaatgaaacagcacttcacacctaataggattggctataaccaaaaagatagataagttactcaactttggatatgatttttcttcatctgtgacacaggtattaaaaaagtacctcccttatgaggtcattgtaaggattagctaacagtgtagatataagtgccagcacagggtcgttcttattcttccataaatgattgctaaagtaatggtaactgatagaccaacaaagactgtctccagacagtcccaggcaatggaactttgcaaaaatacaaaggaagaatatgcttgtggcattgggcactcttaacacagtgcaataatgggtcactataaagctttcctcaagtctcttcttgaaaccaaataataataattataatacaacctgctaatagcatataaaccacatatctcagaaaaacaaaggaaaccaagcagtgaagcacactaaaaataggataagaacaaaaaaaaattwaatgggataattcttctaaagtagttaaaa

SEQ ID NO: 504729 - DNA, 628 bp, Homo sapiens
atttcctgctcactgggtgaggtggaggggggcgaggaggaggaagyatgcagagagaagacttctgtgcctgtgagttacattagttcagattgtctaatcattgttctatatatgtaatttagttaatactgttgtgtgtaaaggataaacaactcctaaggctcaaagtatgttaaaagtagaggcagtaaaataatccgtttttaaacatccttttttttaggaaggcctgtcttctgggagtggtatttgttaacctacttctaagagctagatgcagtaatgtacttagtcactgaaatgatagaagagggaaaaggggtgaagggtaaggctctttactagtgtctccatatccagaggacaggttttagattttaaccataggtctctatgtgcatttttggtaactcatctgtttactgtgaacaaagttcaatctttattttgcaacatctaagctttatagatgtcctgaggtgacaatgtatgataaaaagcagagatagtgagttagccaatttgtaaatatcttggtataattgatggaaaagacgcatcttgaacacggaactgttaaaccacctaggtagggtgtatcaggactcattcaataggttggcag

SEQ ID NO: 504730 - DNA, 692 bp, Homo sapiens
tgtaaaatgttgtaaaagtaaatagtgactaaaattggcagagcgaagtaagtcaaatttacagtaagtagtttctttcctgaaagaaattgctgaagttgtccccaagtaataagaaaaacagacratgacactgtaaacatagtttccaaacacccccactgccagtcctcactgatacggctcacccaagcctggtcaattgtctccttgtgtcatgatgatgctatggtggcaggccctgcccactcatttggccacactctactccatgctattcttggcatggataggactagaggctgtcttgacagagacattaattcccaaaagccagagaacataatgccttcaatcccagggacaggctattgtcctttaacaaggggactctacttagtcctagaatgttctgcccaaaacatagaaatagaagcaatatttctattacatagaaaggaatcattagtctaaaaaaaattggtaatgagagaatttataaaatgttatggaaattctctgggtcatttgcccacccctttcttgtcttggatgctccggcttgtaggaagtcccctgtgtgctccataaatgctgttttgttcccttccttccttcttccagagacccccttactcactcaaaagcaccatagcacagtaaaatttgaaaggttggtagagatcttctaa

SEQ ID NO: 504731 - DNA, 614 bp, Homo sapiens
ttttatttgcacttttaccccattttttaaaatctcctaggtaataggtaataagattcttattagctttagacattataaaaaacctcccatctggaaatttatccaatgcaccttcattttaacaaaaaatattactattaaagaagaaatagatacaaaatatttgctcgatcttagtaggttttaaggtattttctaccacaaagccacagaaataagcttctacagagtttaaaattttattcatctttcagaattcagtctacctggaatctatacagcgtagtatacatttccagcttgatctccaaattttgtctcatttttaacaccaactaccagcaagctgcttgttctctatcgtcttgtggtgccatttctgtcatatatttaatttccagatctgcttctgtatcagtgcaaaatattttagttattatactatagtaagtgattatatgtctccaattttaatctttattttcaaaacagcactgaccatttggtattatttactttccaaatcaatttttaaattgttttattgaayatttcaaaatactctgccaaaaatattttaaatgccttacattcagacattaatttaaaag

SEQ ID NO: 504732 - DNA, 648 bp, Homo sapiens
gattttgaaggaatgaacacttaacattcctttacgtttagataaaagttttgaaaccttattcaccctgtgacatactggtcttgcccaggtcctgggggagcgcagagctgtggaatgttttcccattgcccttctctatcctctggtcaattctatcatgcaggcacattcttgggcatattctccaaattctccatgcagggagccctccagatyttcacactcaatctccttacactttgatattccccagggccctgcttcttggtgctgtccaagctctacttgctgtgtgatatggtggaaagatttgagatgggagctgcctggcatgatcaggggcacttagagagcaatgaaaaagggcgcataatgacaagcagtgaacaagtcatcatagcatcaatgttctaagagggtcctgactgatacctaagctttccaaatgctaccactctagaatctcttgttaagtacatgagaagggtgtgtttatgtatctacaggggtaatacccaccccctccacagccattctctaccccttccacatcaagcagtcattggcttatctgtttgaataagcacacacacatgactagatattaaagggtaatttttataaatcaaatcagaaaaccttgag

SEQ ID NO: 504733 - DNA, 622 bp, Homo sapiens
cagaggaactcataaatagctgtaccctctattccactccccagccacgatggattccaagtttccagaatattattggccaaatgagtaaataaatcagccatcaaagcacaatggaaatgggagatgatggcggtggttgaggaggcaaagaccatctccatgttctcccctctgtattctagatggaagaagatattaataagcagtgtatccagggatgaagattctgaaaaggattaatcttccagattaaataaaaattagctcctttaagcataaaaacattttgttttggttcctttgatttgaaaacattttaaccgtattatatacttctaaaacacaatttaataaaagaaaaattatatttctctctgcttcagaacaataatatagtaatttcatgatactttttttccaggatgctttataattatgatgtaactcttcacatattatctcatttaatcctcaccacaactttataatataaattatatatatttgtatatatgtatacccccaccccaccccccacacacatrcatacttctcacttaaacaggtgaagaaaaactgagggttaaaaaaataagaagcaatgttctttaagggcaca

SEQ ID NO: 504734 - DNA, 392 bp, Homo sapiens
  misc_feature (1)...(392): n = A,T,C or G
nnnnnnnnnnnnnnnnnnnnnnnntcctctctttaacaaatggaacctgggttaagccattaagcctcatgctcataaaaaagctttctcactgtctagcatgggcagggaggcaggctgtggcatattggtgagatcccaaataaatatttcatctccagcctctacagaggtagagaaatggacctttcacagatgagcgggccayggagcttcctcttggcagcgccacctatttaaaggagaagggggacttgttattccactcgggtcatcaatcttgaagcctgaaccactccaaacctaggtcccctagagtcagaatttgacaaatggcaaaataaactcagcatgtgcagatgaatgaggggtgcccccagctattaaaaagc

SEQ ID NO: 504735 - DNA, 498 bp, Homo sapiens
tttgcccagaaactctgccatcatcagataagcaaaagtgatccgatgaggctgcatgcatcaaggaaggtgacctccatatcttgcaagcccccaaaccagagttgggggctaagcagactggattgagagttaataatcagtcgtgtcataatgtggacttagtcaatggagagtaggaccatcatgtgattcccccaggaatggtcaggctattgggagcacagcaggcaagaagasaggccctagcaacatcaggtaatagaaaacacacatgcacataatcatatacataccacatgcatgtatgtacatgtgaactcatatagacttacaaacacacaagaaccacatgcttacaaaacacacacacataaacctgcacaaatgtgtctgtcagcacacacacacacgtacacacacacacgtacacacacacatgtacacacacacacactcgactctccacaaaaagccaatttgcagttcaaagcccta

SEQ ID NO: 504736 - DNA, 654 bp, Homo sapiens
ggatacaaacatctgctcttgcagagtttacaaaaccatccccatcccacaaagagctacagaggaaaaggtactatgctggacaactttgcctgtctcacaaagatgatacagtacaacagtcatggatgaagagaggagtgacttgagggcamccaacttagggaagggccttgacgaatacaagagtccaagactaacagaaaggaggcagcagatggggagaagaatgggcacgagggcctcatggcaaggacaagcactgagactacagcctgatctgatgggatgggctgggaggctggagacgagccacaggcatggggctgagggcagcttaccgagggggcttgagtccctccagaagcagtagttctcaagccctgatctgcagaaggatatgtttttgacctaagctggattattaatttttttcccaattcaaagagagaaataataagctaaagataggtttcttgcaattgatatgttcttctctcatgtacgtttctaaacccttagtaccccttactcatctagatgagagtctactataagagggtgtccaattcagcacaaaacacacattttttattcagagcagcatgttccggggctgtgatttctgggtgctgtggcccctcatcattttgc

SEQ ID NO: 504737 - DNA, 636 bp, Homo sapiens
tgagaggcagaggcggcagcgcctgagcaaagaaagttcctccccccatgctcttggtgcctcagcccaggatgggtgtgaaccagcctgctccaaacaagtcaggttttcctctggtttattaaaaaggagagttcctgccatggcatttccagtaaataacacggctagctttggtttcagagccaataaatcctctctgaacaacattaatgtctgctggagatggaataagagttcttcamtttgttctctacggacaaagcaagcacagccaccggccaagtgctacaagctcctgctgggaaaagccacagttctccttctcctggcccaaaccctgccatctcgaactgtgagccgagattccagctcttctttaaaatacaaatccctccaagggcctctttggcccacttttttctcactggggcaattctaggcaagtgtgcagagggtgcacagtaaggagtgtagcctgaagaaggtcagccacccaggtgccactccattgatttcacacagagagactggacctttcagaggccaaaggaacatcagggctgccaatctgtggaatagcagcaattatgaggcacttgagaaggaacctccgccttttaaaaatgcagaccc

SEQ ID NO: 504738 - DNA, 613 bp, Homo sapiens
agtcattgcgttgagtgctttccttgctgagtttatctgaacttcgcaactgccagagtgtaagatattatcagcccccttttacagatgagaaaaacaaggcttaggaggagtaagtaacttgttcagtctctgacacagcaagtaagtgacagagcttgcatttgaaggcagggctacaccatgtcacctcctaaaaccatcaccatcactacccgtgaaagccaccaactatgtgtcctttcctctgctccagtcactaactgtatgcttcccatatgttatctcatttaatgctccaataacccttaaatgctaatayctgtggataatttttagttacaaagtatgctccctatgtactggctgtcacttaatcatgatactaaccctggaaagtagttgggaaaataagacccagagaggttaagtcacttgccccaggtcactcacaaggatttctgccctccaaatctcaagttcattctgctgtgtcagattccaactgccttgctccattgctgttcctgtccagatccaaagctcagctccatttcaggtggacaacatcaaggcctaagaaatgaagccgtggcacagccacagttaagta

SEQ ID NO: 504739 - DNA, 613 bp, Homo sapiens
agtcattgcgttgagtgctttccttgctgagtttatctgaacttcgcaactgccagagtgtaagatattatcagcccccttttacagatgagaaaaacaaggcttaggaggagtaagtaacttgttcagtctctgacacagcaagtaagtgacagagcttgcatttgaaggcagggctacaccatgtcacctcctaaaaccatcaccatcactacccgtgaaagccaccaactatgtgtcctttcctctgctccagtcactaactgtatgcttcccatatgttatctcatttaatgctccaataacccttaaatgctaatacctgtggataatttttagttacaaagtatgctccctatgtactggctgtcacttaatcatgatactaaccctggaaartagttgggaaaataagacccagagaggttaagtcacttgccccaggtcactcacaaggatttctgccctccaaatctcaagttcattctgctgtgtcagattccaactgccttgctccattgctgttcctgtccagatccaaagctcagctccatttcaggtggacaacatcaaggcctaagaaatgaagccgtggcacagccacagttaagta

SEQ ID NO: 504740 - DNA, 377 bp, Homo sapiens
ttctctctatttcttaagaaactgttcaatatgaactaaagagaaaggggcatttggtaaagcctgagaattgatagattgtgaaagrgagatcaagggaaaaatcacatttggggaggaactacatttattacttaagggtgaactgggaggcgagacaaccaaaaaatctcaagaccagtgaatgggaaggtgacaggtacagaggtgacctggcagacaggataaggggagctcttgttcttgacagaggaaatggtacagaaaaattcacagatgtgaagacatatgggatgtactctgggacttgggcttcatttggctgaagcaaaaagcatttgcaggggaaaatgggagtaaggataaagaaatgaggt

SEQ ID NO: 504741 - DNA, 377 bp, Homo sapiens
ttctctctatttcttaagaaactgttcaatatgaactaaagagaaaggggcatttggtaaagcctgagaattgatagattgtgaaagagagatcaagggaaaaatcrcatttggggaggaactacatttattacttaagggtgaactgggaggcgagacaaccaaaaaatctcaagaccagtgaatgggaaggtgacaggtacagaggtgacctggcagacaggataaggggagctcttgttcttgacagaggaaatggtacagaaaaattcacagatgtgaagacatatgggatgtactctgggacttgggcttcatttggctgaagcaaaaagcatttgcaggggaaaatgggagtaaggataaagaaatgaggt

SEQ ID NO: 504742 - DNA, 502 bp, Homo sapiens
tctctctatttcttaagaaactgttcaatatgaactaaagagaaaggggcatttggtaaagcctgagaattgatagattgtgaaagagagatcaagggaaaaatcacatttggggaggaactacatttattacttaagggtgaactgggaggcgagacaaccaaaaaatctcaagaccagkgaatgggaaggtgacaggtacagaggtgacctggcagacaggataaggggagctcttgttcttgacagaggaaatggtacagaaaaattcacagatgtgaagacatatgggatgtactctgggacttgggcttcatttggctgaagcaaaaagcatttgcaggggaaaatgggagtaaggataaagaaatgaggtgtcattccaatgggaaagactgtgatctccacaagagcagggaatttatctattgggttcacctccatctctctgttgcttactagtagatgtacaataactatgtgatgaaatatttttaaaaat

SEQ ID NO: 504743 - DNA, 502 bp, Homo sapiens
tctctctatttcttaagaaactgttcaatatgaactaaagagaaaggggcatttggtaaagcctgagaattgatagattgtgaaagagagatcaagggaaaaatcacatttggggaggaactacatttattacttaagggtgaactgggaggcgagacaaccaaaaaatctcaagaccagtgaawgggaaggtgacaggtacagaggtgacctggcagacaggataaggggagctcttgttcttgacagaggaaatggtacagaaaaattcacagatgtgaagacatatgggatgtactctgggacttgggcttcatttggctgaagcaaaaagcatttgcaggggaaaatgggagtaaggataaagaaatgaggtgtcattccaatgggaaagactgtgatctccacaagagcagggaatttatctattgggttcacctccatctctctgttgcttactagtagatgtacaataactatgtgatgaaatatttttaaaaat

SEQ ID NO: 504744 - DNA, 507 bp, Homo sapiens
gcaggtagttttgtgatacacaagacttgtcactggggtctggagtggggacagtcttgtagaactaaatccttaagttgtggggtctgtgcttaacctgtgtaatgtcagattggactgaattggactagactgaattgaactgaattgaaggacacaattcagtagtgtcagagaacggtgctgaagaattggtactgaaatgtratcacaaattccacctttcaccacccacccatgccaccaaagacacagaatacatcacaaccaggcctatctgacttcagttctgctcaatacagcttttttgaggatagcagccacagtccctgctctcaagaagctcacggtgtacggtaagagatgacaacagataaattcaatataaagtcataatgggtatgatacaagattgcaatgtattactgtacagacagagtgatagagatacattcctaaaaagcaaagctaattgatagttaattcaagtgtgtctagctgtaaatc

SEQ ID NO: 504745 - DNA, 507 bp, Homo sapiens
gcaggtagttttgtgatacacaagacttgtcactggggtctggagtggggacagtcttgtagaactaaatccttaagttgtggggtctgtgcttaacctgtgtaatgtcagattggactgaattggactagactgaattgaactgaattgaaggacacaattcagtagtgtcagagaacggtgctgaagaattggtactgaaatgtgatcacaaattccacctttcaccacccacccatgccaccaaagacacagmatacatcacaaccaggcctatctgacttcagttctgctcaatacagcttttttgaggatagcagccacagtccctgctctcaagaagctcacggtgtacggtaagagatgacaacagataaattcaatataaagtcataatgggtatgatacaagattgcaatgtattactgtacagacagagtgatagagatacattcctaaaaagcaaagctaattgatagttaattcaagtgtgtctagctgtaaatc

SEQ ID NO: 504746 - DNA, 134 bp, Homo sapiens
ccctacattcatgataactgacagctttcagtttatgaatcagctcccagtgccctacctccccactcacctccaagtatatagtttctctttmctttctcagtttgcagaggaagccgtaccactcacctggc

SEQ ID NO: 504747 - DNA, 546 bp, Homo sapiens
tcatcaaaactgaagaacaagaaatgaattaatgctgttaccagcacgttttctctctcttttatttatttatttatttatttatttatttatttatttatttatttatttgagacggagtctcatttggtcacccaggctggagggcaatgaagccatcttggctcaccgtaacctctgcctcccaggttcaagcgattctcctgcctcagcctcccgagtagctgggattacaggtgcgtgccaccawgcccgattaatttttgtatttttagtagagacggggtttcactgtgttggccaggctggtctcgaattcctgacttcaagtgttctgcctgcctcagcctccgaaagtgcagggattacaggcgtgagccactacgcccagcccttctctctcattttaatatacatgtgccttggcccagacaaatgtatagagaataataattgtttatcactgtttcacaattataaacaattgcaaaatattgttctgggacaaattagctatatacttttcaagagccccttgggtataaa

SEQ ID NO: 504748 - DNA, 546 bp, Homo sapiens
tcatcaaaactgaagaacaagaaatgaattaatgctgttaccagcacgttttctctctcttttatttatttatttatttatttatttatttatttatttatttatttatttgagacggagtctcatttggtcacccaggctggagggcaatgaagccatcttggctcaccgtaacctctgcctcccaggttcaagcgattctcctgcctcagcctcccgagtagctgggattacaggtgcgtgccaccatgcccgaytaatttttgtatttttagtagagacggggtttcactgtgttggccaggctggtctcgaattcctgacttcaagtgttctgcctgcctcagcctccgaaagtgcagggattacaggcgtgagccactacgcccagcccttctctctcattttaatatacatgtgccttggcccagacaaatgtatagagaataataattgtttatcactgtttcacaattataaacaattgcaaaatattgttctgggacaaattagctatatacttttcaagagccccttgggtataaa

SEQ ID NO: 504749 - DNA, 546 bp, Homo sapiens
tcatcaaaactgaagaacaagaaatgaattaatgctgttaccagcacgttttctctctcttttatttatttatttatttatttatttatttatttatttatttatttatttgagacggagtctcatttggtcacccaggctggagggcaatgaagccatcttggctcaccgtaacctctgcctcccaggttcaagcgattctcctgcctcagcctcccgagtagctgggattacaggtgcgtgccaccatgcccgattaatttttgtatttttagtagagacggggtttcactgtgttggccaggctggtctcgaattcctgacttcaagtgttctgcctgcctcagcctccgaaagtgcagggattacaggcgtgagccacyacgcccagcccttctctctcattttaatatacatgtgccttggcccagacaaatgtatagagaataataattgtttatcactgtttcacaattataaacaattgcaaaatattgttctgggacaaattagctatatacttttcaagagccccttgggtataaa

SEQ ID NO: 504750 - DNA, 526 bp, Homo sapiens
gaaaatgagtttccaagttctaccttcaataggatgtgtgagcataatatactcttgcctgatttgggcttccctatctctctgaatcatgctggtgctactgctgacrtagcactcttattccttcatccatccatcatgtattcatcaaacgtttatggaatctagtagaagtcaggcaatgatccactgggctaacacagcaatataaggttcaacatgatttcctgtcctctttctgttgctttcaccctccttaatacaagggagtctgttcaatactaaagaggacattttctgccttcacttaacatatatttgaggaaccaaattactttaacaataaagatacataactttcatggaatacttcagatatacaaggctgagcatttaaatacactctcttatttattttaagaatatgctggccttttcccatcatattcccattttacagtgaggaaagctaagctggaaaacagttaagtagcttgtgcaagctctcattactgagatgttgcag

SEQ ID NO: 504751 - DNA, 606 bp, Homo sapiens
attctacacggtgacgacatttccatttctccccacctattctgaagccttcctctctcatacatggtttatgctccaatcccaccaaatcacacctggatcatgtactccacaaaccctgtgctcctgggtgtgctttcagtgcctggcaccacacagcaacacacacacagagatacacactcactcctgtgcccataaaagtcccatagacgctttttcatgatscatttcaaacactgcctagtcaaggatggcttctccccaactcaaccagttatgctctcacccactgaactccaggagtgtagcgatccaacaaatataactgagcacatggaccccgcaggcatccatggcacagagatggacaaacagggatcacaacattcgtaaactcactgactctcatcctgagattgtcctggcattgcaacccaccccaggatcctgccatcctgatcttcttgagaccaccaacctcttgctcacccctgggtctttgatcatcctcctcccctgctccaaacatgcttccccctctctgtgccaggcgaactccctgagatggcatttcttcagggaagtcttctgcaattctgcaca

SEQ ID NO: 504752 - DNA, 621 bp, Homo sapiens
tttcaatcaaagttgctgaaaccttggtcttagagatccttctttcccccagggaaggtagcaacctagttatctacttaaattattctgaccttccaaggccaagtcgtgttagccctccctaatccaaaaataattagtggataacagaccctggcttgctgagacagagagttatttgtaggaaatttctcgtctggagcaaatggttttgcaggaatcactaaccctaatagattatcccaagcccttaccacctgctttcctgagccccctgtcatctctgacagtaaaagggcaggcaggtcacaatgtcaagcctagagatacaaagttgccagcacattgttactggtgatggttaggcctatggaccaaccatctggagagaggacaggatggatggtcacaggccttccaaggaggtaaacaggagcatccattaaaaagacaggcaggcttgccccaaactcgggtacatggccagctytgagaagccaacatttgttggcagacaattgcaaagggaaggggaaaaaaaaaaaaaaaacacaacagaaaacaaccataagggtctgtcacggcccaagagctcctgcagaatacctgagagtgtacagc

SEQ ID NO: 504753 - DNA, 621 bp, Homo sapiens
tttcaatcaaagttgctgaaaccttggtcttagagatccttctttcccccagggaaggtagcaacctagttatctacttaaattattctgaccttccaaggccaagtcgtgttagccctccctaatccaaaaataattagtggataacagaccctggcttgctgagacagagagttatttgtaggaaatttctcgtctggagcaaatggttttgcaggaatcactaaccctaatagattatcccaagcccttaccacctgctttcctgagccccctgtcatctctgacagtaaaagggcaggcaggtcacaatgtcaagcctagagatacaaagttgccagcacattgttactggtgatggttaggcctatggaccaaccatctggagagaggacaggatggatggtcacaggccttccaaggaggtaaacaggagcatccattaaaaagacaggcaggcttgccccaaactcgggtacatggccagctttgagaagccaacatttgttggcagacaattgcaaagggaaggggaaaaaaaaaaaaaaaacacaacagaaaacaaccataagggtctgtcayggcccaagagctcctgcagaatacctgagagtgtacagc

SEQ ID NO: 504754 - DNA, 461 bp, Homo sapiens
agctgggctctctgtcttttccatgggtatcccacgctccccccatgctgctgtgctatgagagcggagagtgggaaaacaattaaatataagagttggttytaaaccaaagccattccaactccccacagggtttattaaatcatttataattccaagaagctgaagtaaatatttaatatttgattcctaatccataaatatttacatgtagggatttctccatgttcaacaagcccaccagaggttttacacttttagcaagtgtgactaatgaaaccttacaattccctaccccaaagcaaggagcatctggccactccctcaagaattctgatgcagggaacaggcggtgtgcacccggagtgcagccacgatcactgagaactgttcaaggattcagctttgacaatcactctggggaagagaaagaaatagcgacagaaacagaaaacaaaaaa

SEQ ID NO: 504755 - DNA, 272 bp, Homo sapiens
ggaaaattattgcaataatttacttatttttaaatatcttagcatctcttattaaagagatggaggttgaatcccacctcaacagctaactaattacacgacttttatctctctaagtcttcatttgtttgtctgcaaaatgagaatgctggatttatgwtctttaaggctccttccccatctatgattccaagttcatttatagctgttggacaattaattcacttggcatctcctttcccctatcattaaaaagtgtttactacagtatc

SEQ ID NO: 504756 - DNA, 272 bp, Homo sapiens
ggaaaattattgcaataatttacttatttttaaatatcttagcatctcttattaaagagatggaggttgaatcccacctcaacagctaactaattacacgacttttatctctctaagtcttcatttgtttgtctgcaaaatgagaatgctggatttatgatctttaaggctccttccccatctatgattccaagttcatttatagctgttggacaattaattcacttggcatytcctttcccctatcattaaaaagtgtttactacagtatc

SEQ ID NO: 504757 - DNA, 574 bp, Homo sapiens
atttcaacagccacacattagagcaagaaaaaaagattagtgtgattctagtttgtaaaaaaaaaaaaaaaaaaaaattttactgaaacttgattaaccttaaacacaaagtgcctttctttttcagtgtaaatgtctaaccgggggaggggcgtggagcagggaaatccgggaggggacctaaaataatcagagaagtcctgttttattcctttctgtctcccagttaatgagcagtatcaggatgccttgaaccaacttttccttttacgtttcttatccttaaaataatgggctgaccrtaagcctgcagaatcttaaattatgttgcccgcccacatcatagagatctgtcttttctgatgtacagtttgtcataagcagagtcacttgtgtctgttgagaaaaataaagatagtgccattgggaggacaccatcattttggttagtatgtggcaggaacattgaggcttagcttgttgggtgacatctctagttatctcaaggctgaaaagcctgaatttagacccatgcattcaaaaatcgtaagttgcctaaataagggcagcagtg

SEQ ID NO: 504758 - DNA, 552 bp, Homo sapiens
tgggactacaggtgtaaaccaccatacctggctaatttttatattttgttttttgcggaggtggcggcttcgccatgttactcragctggtctcaagctcctgtgctcaggcactcatcccaaggcctcggcctcccaaagtgccaggattacaggtgtgagccacggcacccagttcattgtggtcaatattctaaacctaagatattgagtttgggaatttatttctccaaaatctaagggatatatacaaatgaaatatgataactgattaagaaaccttacaaataaatattggccatgattctgtcaccattaccatttaaaatccactcaaattcgcatcaccccagctcaagagttacccaaatagtagagtaattgaaaaccacattctgtgcctgtccttatataaattgcggtttgccccaggctatttccaaggctgtaaatagttcttaaagatgaaacactgacagaagtgcgcattcaagaggcaggataatcaagaaggcttgaaaatgcgtctatttgattcctctctcttttttt

SEQ ID NO: 504759 - DNA, 552 bp, Homo sapiens
tgggactacaggtgtaaaccaccatacctggctaatttttatattttgttttttgcggaggtggcggcttcgccatgttactcgagctggtctcaagctcctgkgctcaggcactcatcccaaggcctcggcctcccaaagtgccaggattacaggtgtgagccacggcacccagttcattgtggtcaatattctaaacctaagatattgagtttgggaatttatttctccaaaatctaagggatatatacaaatgaaatatgataactgattaagaaaccttacaaataaatattggccatgattctgtcaccattaccatttaaaatccactcaaattcgcatcaccccagctcaagagttacccaaatagtagagtaattgaaaaccacattctgtgcctgtccttatataaattgcggtttgccccaggctatttccaaggctgtaaatagttcttaaagatgaaacactgacagaagtgcgcattcaagaggcaggataatcaagaaggcttgaaaatgcgtctatttgattcctctctcttttttt

SEQ ID NO: 504760 - DNA, 264 bp, Homo sapiens
agctgtgggaacccagtaaacaccaatgaccaraaactgctgaagccccgagtgtttgaggggaggtggtaaaatggagacagcactgccttgggatcttggacatgctccgcacactgttccctcccaggccctgctggtcactcagtggccttagaaacattgtctcaggttcccaggccatgaatctctctcgccaggccatttgtaacatgaatggttagatgttaatgtttacatacagaaaacacaaattaataaaat

SEQ ID NO: 504761 - DNA, 653 bp, Homo sapiens
gctgagagggggcctaaactacaggacacagtcccaagacccttaagccctggcagcgtccccaggtgggcagcaggtggaagtggaaagaagcctgtggagctagctgccagcggggagaaggggttggacatggggctgaggggcctctgggaacccctgtgccaaggggctgctggcactgggcagcaggaccccaaagcccatgaagagtrtgcccagagtaagtggctcagacctggggcatggctcgagggtgtcgggctgtagctgctggtcccagagagtgcagcccagggcaggcatcaggacatgggtcggaggagaaagagtgttctaggaagagtccagtccccgagtcctggtggtggctggctgtagcctagtgcacgctgtctggcttgtgtggctgtgctgcctgagtatacataccctagcaacattctccttgctcagcacgggacatcagctctccacctgaccccttcctccagggaggggatggggaggcctcctagggttagcagcaggagttggtcctcaggaatcaggagcccttgaaaggaggaagcgtggttcccatacaactgagggtcgccctgggccccatccttcctgagtcagcttgaagcattccagcatcctttcaataa

SEQ ID NO: 504762 - DNA, 623 bp, Homo sapiens
tccctatataatttgctagagaaaaagctatctgtatgtcaatgaggagaagatgggttcaggtttggagcttctcaaatggtcatatgagggtttctggtgtgtgaaggtgatgaagtctcaggggaaacccagtggctctttcgggaacgtccattttcattccatatttgtatggggagtggcagtgggtatttgtatgtcatagatgatgcaggggatggcgaacggcacgggcatttttaagatggaatatgagagttcaaggccatgtcttgccagtgactgctttaggagacccggggaaaggtgtgagaatccctgactgagatgggaaggccagagttttcacacgagcttggactgcaaacgcttgggtttcctgggctgggggaaggaggctggggaaggcctgggcgctggcccagacaagtgcagggaggtcccaggttcccaggactgggcatccagtatcctcgagggacaccatgagacagaaagataaggaggcaggcagataagaaagaggacaaagtggrgaaagaggaagagggaggggggaaaaagaagtttctcagcaagccagccagactggtctaattccttttgggcaagcaaagact

SEQ ID NO: 504763 - DNA, 565 bp, Homo sapiens
ttccatccttcctctgctccwcagggagacaggtgcaccctggccagcctatcccatcacatgtcatcctctaaccgtctgccacgtgtttgtttattttgcagcacacttcactacctgacattatgtacacttttgtttacagtctgtcttccccactgaaataagggtgggacttggtttgtggtgctgtaggtgctcccagagcctagaatcgtggtgggcaccttgtaggcatgcatacatatttcaatgaataaatgaaagaacaaacacagaagaggcacagtgagaggaaaagcagattttcagggaaaggtagttcactttcagcgctcttgattcttagatacccgtggggcacacaggtgagagaggccaataaacagccacatgtctggagtttaggagagaggccagagttaaggagatagatttggaggtaatttcaggtgctgggagaggaggaggagagagtagaagggaccaaggcggatgaggcccggggtagagagccaaggacaagaggcagaaactcagcttagaaggcctgagtagcgtcaca

SEQ ID NO: 504764 - DNA, 607 bp, Homo sapiens
agaaaaaaacaggagaggataaagcacctggaggagattaatggacacaagtgctttctctttgttttcatttttaataagacaaacgcattatgtaaaatttaaaatgtgagaactgaacatagatgtatgaaaagcagcctacaagaagctctggtagtttttgatgctgctgttggcactgttgcttcgaactactgactggcactttggtttctgtaatggtttaaatgcaagcctctacagtaacgtaaggtagaggagaaacaatgataaaattactgcttctatcttggggacataatattttaacactgaaattaaaacaaacagaagtctttaacccttttctctttagagaagaatcaggtgtaagaatgctctgtatgtagacggagttagtaactgaaggtscgaaaagtcaacatcagaatcactattcctccaaacccttaattctgcttcgtttctattcccatcaactgcgatctctcctaactagatttagtaaataaaaatacaggacacatagttaaatttaattttcagagaaaataatatattttttatagtagagaatatcccatgctatatttgggagacgtta

SEQ ID NO: 504765 - DNA, 646 bp, Homo sapiens
ctatgtttatttaacactttcttatactgacagagtccaaataggttatgatataaaaacagtatgaagtcatcacagtgaaccagatcctaccattacacgagccaaggatttgaaaggcaaagattcagattatgtcaagggggaaaaaagtgtttctagaggtcaagttggacagggatctgaaaagtgtgagttcagttggtcataagcattatttagatrtgagaataaaaaagaaagcataatataggtcttacttaatctaactattcatcaaaggattgaaaacagaaaatcatttagtttgccttttattgttacagacattattcgacctttcgaaacatatttcctttgcaataaatcatcacttatttaacattcataaccctatttttaatcaactaaatggaaacttaagataaaataattttccatgtaaaacagaagatatgccagttttatgaaagtccaggttattattttaggtaggctggaaaatgattattttgtttctctctcttctcttctttaccattttgcctttcctccactgtcttcattatttttccacaggttatcttgactgtatagacattttgtgtgttttcatattccataatatctggaaaccacaaaaaag

SEQ ID NO: 504766 - DNA, 588 bp, Homo sapiens
tgttttcagaagcagattgttccttgcctttttttttttcatccaggaggctaaaaagcagaggactaaaattcgggactgtgacagatgtgatgttgcctaagacaatggcaggagcaggataaacttgtatataaactaagagatgccatccactcacataggattaattttttacgatcttgaaaagtgatgctactgggaaacttgaacctgagtgaagcaatgaaagaaaagggagttacaaattagtagccaatgataaaaaaaaatgacatttatgtctaccgtatgttttcctttcaagagtcaggtttggtatttatgtttcttcagttgtaagacatcgctattaaaataatggcttagtctctgcatatgtgtgtaaatgcactaaaacaccatatccactcaacagagaagatcaaagaraggcagaacagccaagcattctgcttcttttttaagttaacctattgccaactttcataaaaatgtatgtttttcttcactttaaccagtaacttatagatctggaaaatactttgaaagtagtctcaagcatctggtgttttcatttaatgttcc

SEQ ID NO: 504767 - DNA, 626 bp, Homo sapiens
ctaactttttgtgtacttcctgtggctattaagtaatttaattattcctgaaaagtttgatattaaagacctttgatattgaagaattgaaagcatagtgaaacctgtctttgtgtgccctttctttttgtgcatttaatatggagcagtagactcgctccacttcatgctgatggaggtggaagggggagacggaggtggaagcctgccactgaatttgaattatgtagggaacatagccgtgttgtactgtcttgtcaatatctccttccagctggtgctgacataattaggcacatcaagcacagaagaagacattttaaattcaaagcactgttccaagtcctgtgagtagctatgaaaggtgcctgaagtaatcaataacacatggtaaggtgtgcagttccagtaggttatccacccacctcaggtctattataagacaygaagaagcagaaaagccaagatttctaacttcttaaagagtggccttgtttgaatagtttgacttattagagtgtgttttctttaaaaatatatatacttagaattgaatctttcatcgccagcataaagtgtatatatgtaaactttctgagaccaggaacatcacctcctttgctctc

SEQ ID NO: 504768 - DNA, 395 bp, Homo sapiens
tactaaaatcaacctctgcatttacacacaatttcctgaaatcgtataaatcaccctgtagtaccttttttccatatccctcctgaaagaccactgaggaattaactacagggttttgaaagttgaaggcatgtttcagctctgcaggatttgtacaaaccatcagatgctacccaggcttggaagacagacatttattatatgtttgtcgtctggcctcttttaggtcttgctgtatagctctctatttttaaataatagaaaatcattataggtaatgattataggagktcttgatttaattgaccaatttgggaattaagcctaaagggtttttaattgttattttgtaagcttttagagtttccagttacccctgtcaatttctaaggaat

SEQ ID NO: 504769 - DNA, 581 bp, Homo sapiens
ttttttttaaaatctcaaattcaggtttgtctgataaatagcattgctygaaacttctactttctatttggttcttttgctgtacctctcttaaacatacaaatatctcaaagagaaatattagcttaaaatcagttcaatgaagtaatgtctaaattttcagggaaaccttattgtcaagaagaaagttaaaatcagaatttggctcccaagccaacacagagaaaactcatgtcctagactctcaccaccaggagccatctatgccagcacacctggaccaaacagcccttccctttcctccaatttgctcaggatcccacacatttaaataactcacaccttaaaattgatgcttgcattgtcactcctgttattggcaaattttataaatattgcaatgtctctgttaaaaaaattatttatgataacaagtgaaatagggtgctaattaaaaagagagagagaaaatgaaaatccttaattcttattgctaaaccacagaccaaaacagcaggaaatgtgtagactgaaacttaaagactaaagaaagaaaagatataagagtcaagcagtgttcc

SEQ ID NO: 504770 - DNA, 581 bp, Homo sapiens
ttttttttaaaatctcaaattcaggtttgtctgataaatagcattgcttgaaacttcyactttctatttggttcttttgctgtacctctcttaaacatacaaatatctcaaagagaaatattagcttaaaatcagttcaatgaagtaatgtctaaattttcagggaaaccttattgtcaagaagaaagttaaaatcagaatttggctcccaagccaacacagagaaaactcatgtcctagactctcaccaccaggagccatctatgccagcacacctggaccaaacagcccttccctttcctccaatttgctcaggatcccacacatttaaataactcacaccttaaaattgatgcttgcattgtcactcctgttattggcaaattttataaatattgcaatgtctctgttaaaaaaattatttatgataacaagtgaaatagggtgctaattaaaaagagagagagaaaatgaaaatccttaattcttattgctaaaccacagaccaaaacagcaggaaatgtgtagactgaaacttaaagactaaagaaagaaaagatataagagtcaagcagtgttcc

SEQ ID NO: 504771 - DNA, 584 bp, Homo sapiens
tctggttagctactctcaaaccacgccttaacttaaacacgctctttcccaacggggaaccggccttcctgagctcctgccrgcccctgggcttacgccttgacccactcccccgctggctctgaccttccggaccaggaggtaccgaggcggatggctggattcaccttgcactcccgcctctctggctggattgttgctggggccccaaatgtgttgtatacattgagccgctccctacccaactccacatctggatcccaatggagtatttccttgtgccctttcttgctctcattactactctcaatctagctctattcatctgcatctttcatgcacagtctccatcaacaaggtgctagtctgtacttggccacacaatcctcattactgcactgaatcccagtattttcaagaaagtttacttttacatcaatcagaccccgatttaaaagcctctaatctttcccgcatcagcttcataaactctgaatttcctgcttttatcaccactcccctgggaacttctctgcaaatattcatccattgtttctctctctagcatgctgctatttggctaa

SEQ ID NO: 504772 - DNA, 501 bp, Homo sapiens
ctctggttagctactctcaaaccacgccttaacttaaacacgctctttcccaacggggaaccggccttcctgagctcctgccggcccctgggcttacgccttgacccactcccccgctggctctgaccttccggaccaggaggtaccgaggcrgatggctggattcaccttgcactcccgcctctctggctggattgttgctggggccccaaatgtgttgtatacattgagccgctccctacccaactccacatctggatcccaatggagtatttccttgtgccctttcttgctctcattactactctcaatctagctctattcatctgcatctttcatgcacagtctccatcaacaaggtgctagtctgtacttggccacacaatcctcattactgcactgaatcccagtattttcaagaaagtttacttttacatcaatcagaccccgatttaaaagcctctaatctttcccgcatcagcttcataaactctgaatttc

SEQ ID NO: 504773 - DNA, 500 bp, Homo sapiens
tctggttagctactctcaaaccacgccttaacttaaacacgctctttcccaacggggaaccggccttcctgagctcctgccggcccctgggcttacgccttgacccactcccccgctggctctgaccttccggaccaggaggtaccgaggcggatggctggattcaccttgcactcccgcctctctggctggattgttgctggggccccaaatgtgttgtatacattgagcygctccctacccaactccacatctggatcccaatggagtatttccttgtgccctttcttgctctcattactactctcaatctagctctattcatctgcatctttcatgcacagtctccatcaacaaggtgctagtctgtacttggccacacaatcctcattactgcactgaatcccagtattttcaagaaagtttacttttacatcaatcagaccccgatttaaaagcctctaatctttcccgcatcagcttcataaactctgaatttc

SEQ ID NO: 504774 - DNA, 582 bp, Homo sapiens
gtgaaggactatcatacagcaaattgtttggcttcttctgatagacgtttctcattccaaacccatttacaggccgcacgaccagctactattatgtgacccttattctcaaaactcccatctgttacaacatagcaatcatggccagagtactaaaatctagctaatgacaaacaccctttcatggtctaacactctgttaggtgaactgtcatcatagaaggaaactcaaggctcatgaaattatttaaatcatccaatatataatcaaaactctcagagacagaacggtccacaaagattatttcacccatcagactggaggaaaaaatgttaaaatgtatactaccaagtgttgacaattaagtaataggtatcaaaatttttaaactacatagcatttgactcagtgatttcacctctagaactctattgtaaataaattccagcccatgtttacacagatacatgcatgaccatgttttcttgcagtaaagtatataaatgcaaaaaactggaaccaagttaactgtccttagctaaayatggaatcttatgcagccataaaaaaagagaaacatt

SEQ ID NO: 504775 - DNA, 654 bp, Homo sapiens
aagcattatatacatcataaaggtactctattttattgactcctctataatttttaaaatattaaacttccttctaattcaatgttttacattccatttctcagataccacctagagagaagctacagcctctaggcatggttatgcggcttaattcagcaatagcggttgtgtagaacctagagcagaagaaattggcytgaacttttaaaatgttattctacaatctaaagcccatctgcaaatttaggaggatgaatcagattagagatttttttttttttttgagagagagtcttgctctgttgcccaggccagagtgcagtggcgtgctcttgactcactgcaaccaccgcctccagggttcaagcaattctcctgcctcagcctgccaggtagctgggattacaggcatgcattaccacgcccagctaatttttgtatttttagtagagagtggggtttcaccatgttggccaggctggccttgaactcctgacctcaaatgatctgcctgcctcagcctcccaaagtgctgagattacagattgagccatcgcacctagccaagattagagattttcaaactgcatctatagaagggttctaggaagctatctcaggagccaccacatgggataaggtagggactag

SEQ ID NO: 504776 - DNA, 445 bp, Homo sapiens
aatgtaatgtcattgatgtaaaagatcaatgcgatgttctacagtatgtccagatggtccagacctcttcaggctgtattgtgattgatagatgctgaaagttaacatagccctggggcaaaactgtgattgtagactgttgtttgttccatgtgaatgcatactgtttctgatccacttttctcctagggctagaagagaaccaattcaccaaatcaatgtccacataaaatgtacctggggctgtgttaatctgctctagcaaagataccaaaacyggtgtggtggcggcaatagggctactacttctgtgggtttgtgatagtctactgtcatcttccaggttccgtctggttcctggagggacaatactagtgagataaagaggaataatgatccttgaaggttagaaccttgaagtttgcctcattgtgtgctgtcaagg

SEQ ID NO: 504777 - DNA, 576 bp, Homo sapiens
gctgacagcccgccttgttggggctatccaggttttacctgcaagctgagaaaggcattttcattccaaaacctgtaacagaaggttaacattgccccaccatggtttacttgacttcctactgaatgaatgaatgaatgtgagaactgccacacacttggagttcatctctttagctgaaacttgcttctgtgtatgtgcctacgtctgcacatgtgggcctggggctgggcaagccctgacctctggctgtcttggcctgaattccagcgggacattcttgggcagctccatatcaattacaagccatcaataatgcatcccttcagagcagccaggaagccattagctggcctgcaggcctcgatgagtggccttggagaaagtgggctgggtgtgcccatgggaggttcagatcagcagggcaggaggggctcccccagcagagcttgggagggttgccttatgggccttcagtcgcctctgagaccttgctgccagagggttggcttgcaccctgtcatcctgcacawaaaggctgccctataatgagctagcctcgctttctcactctgt

SEQ ID NO: 504778 - DNA, 576 bp, Homo sapiens
gctgacagcccgccttgttggggctatccaggttttacctgcaagctgagaaaggcattttcattccaaaacctgtaacagaaggttaacattgccccaccatggtttacttgacttcctactgaatgaatgaatgaatgtgagaactgccacacacttggagttcatctctttagctgaaacttgcttctgtgtatgtgcctacgtctgcacatgtgggcctggggctgggcaagccctgacctctggctgtcttggcctgaattccagcgggacattcttgggcagctccatatcaattacaagccatcaataatgcatcccttcagagcagccaggaagccattagctggcctgcaggcctcgatgagtggccttggagaaagtgggctgggtgtgcccatgggaggttcagatcagcagggcaggaggggctcccccagcagagcttgggagggttgccttatgggccttcagtcgcctctgagaccttgctgccagagggttggcttgcaccctgtcatcctgcacaaaaagkctgccctataatgagctagcctcgctttctcactctgt

SEQ ID NO: 504779 - DNA, 675 bp, Homo sapiens
gaggctgaggtgccatagcacccctgggtgtgagaagcagcaggccttgggtacattmctgctggatgttcttgcacttgaaaaaaacctcagggaagcctagtggtttttacttatgggaaaaattgaattttaaaataacgctgaggccttgggtgtctcgtttctccatagccccctttccagttccgggttccacatgcagttcttgagtttgaatttcgcagcccccaaaaccttgtatgctccattgtaaggctagaatattatgttgggccatgtgagtaatgcatttgaattttttgttttccacaatttagtctccctaaggcctcatccctcttctctcctccctcaaagcctcatccaatatgctggtttcaaagaccaccgtctccagcccagacctctctcccagtcctccacaactttggggagaaacctcccccaccctgcaccctctgtaggtcagccccgtggtacatctcacctagagcaaagagctctgagcatcctctgatcctgtgatgcatgctaagcaggctctgatcatcccaccccgcagcccccacccctgccagtccatctgaaactgagtcattcctcagaccatggaacccaagttccctgccctggcacaccaagtttcctgagttaggatgggctaggttaggc

SEQ ID NO: 504780 - DNA, 675 bp, Homo sapiens
gaggctgaggtgccatagcacccctgggtgtgagaagcagcaggccttgggtacattcytgctggatgttcttgcacttgaaaaaaacctcagggaagcctagtggtttttacttatgggaaaaattgaattttaaaataacgctgaggccttgggtgtctcgtttctccatagccccctttccagttccgggttccacatgcagttcttgagtttgaatttcgcagcccccaaaaccttgtatgctccattgtaaggctagaatattatgttgggccatgtgagtaatgcatttgaattttttgttttccacaatttagtctccctaaggcctcatccctcttctctcctccctcaaagcctcatccaatatgctggtttcaaagaccaccgtctccagcccagacctctctcccagtcctccacaactttggggagaaacctcccccaccctgcaccctctgtaggtcagccccgtggtacatctcacctagagcaaagagctctgagcatcctctgatcctgtgatgcatgctaagcaggctctgatcatcccaccccgcagcccccacccctgccagtccatctgaaactgagtcattcctcagaccatggaacccaagttccctgccctggcacaccaagtttcctgagttaggatgggctaggttaggc

SEQ ID NO: 504781 - DNA, 654 bp, Homo sapiens
tcactttccagcataattatgaattgtttgaaagtgttctgaactgacagcagcccctatgttgagtgacaaggcaggttctgtaaaacagcaactacattatattggttatttgtctcctcactgtgctaaaaatttcaggtgattaaatccttaaaatgtattttagaattgggtgattaaatcttgtcagatcattttaaacctttagaggcataataccataaaaacattttaatatctttgattctattctatcaaaaacaaattatttttccaatataaatatccccagcttacgatgagccctatctgtcgatatcacaatatgacagcattcagacacttgttaactgcaaaggcaccgaatctgctatttgtcactaagcaacattcagaaacaatttccccttttctattatcatgcaaaatgcgttcaggacaaaaaatgcacacagagaaaattactcctctggcgagatattttgacacaaaaaatctttcctyatcaaagatgaaaagcaccttgtcactcacttctaattaccgcctcatttctgtcaatgtagagagatgccaactccctgtggcgacgtcacagaagcatttaccaagatgcagagttgaatttggcctgtgagcagtattcactga

SEQ ID NO: 504782 - DNA, 592 bp, Homo sapiens
gttatcttagatacacaatatccccaatgaattctcattgaatcgaaaaccatcctcttctttccatagaacattcttttagaacttagtagggtaaaagatgccctgatgttgaatgaggactgttgatcattagttaggtaagccacagaaatacctcatggcctgtaacatatcaggtcctaatgtgagttggatagacactaggggctagttcacaggtagaaaaaacaaaacaaaaaaaatgactatacatattagaagttatgaatttcaatagtaacagaagttasatagatacactctagatgttaggaaacaggttgtaaagcaaagattgtagaataaacatatagtgaatctcaagaatatgcaaacattcaagaatcaggtaaaattaatagcaaatgtttatatgatgttcataattattccagccattgttccatatgttctacagatatttagtcatttaagccttacaataatcttatgaatttgataattctgatgtcccagttttacagataaggaaacaggtccccagagatcaaatatcctgccaaagatgccattgaaagccagtgaaaca

SEQ ID NO: 504783 - DNA, 614 bp, Homo sapiens
gctgtgaaaattaaatgtgtcagccaactaaaattttcatcagaccatttataaaatgtttttttttctttayctcaaaacatatacatctgttgctggaggtgaaaattaataaaattttgttttttaaatttaattaagtagagtattattacacatatttagagaaccggagcctgttccatcacttaaaaactttaagagaagatttcaaaacatttaacccattaaaagtggtattttagctttatgccaaatggcttggtatgatgtatttctagatttaaaatgcaaaggtaagaaaagtatgatcattgcttatttataattagattatttaagtttcatctaccttcaaaatttgttcccaagaaaaattatctagtttcctgcatttacagtgtttacaagggttttaaagccctgctctatattacctagaatgacatgaattaagtaaaaccagtcaaagggtttctttttttcagaactgtattaaatgacttttatgctgcatatagaactagtaaatggatagcagtaaaatttaaattaaattatctttcataataaataacattttcttataaaatagtaaaaaaaaaagtgtgaag

SEQ ID NO: 504784 - DNA, 614 bp, Homo sapiens
gctgtgaaaattaaatgtgtcagccaactaaaattttcatcagaccatttataaaatgtttttttttctttacctcaaaacatatacatctgttgctggaggtgaaaattaataaaattttgttttttaaatttaattaagtagagtattattacacatatttagagaaccggagcctgttccatcacttaaaaactttaagagaagatttcaaaacatttaacccattaaaagtggtattttagctttatgccaaatggcttggtatgatgtatttctagatttaaaatgcaaaggtaagaaaagtatgatcattgcttatttataattagattatttaagtttcatctaccttcaaaatttgttcccaagaaaaattatctagtttcctgcatttacagtgtttacaagggttttaaagccctgctctatattacctagaatgacatgaatwaagtaaaaccagtcaaagggtttctttttttcagaactgtattaaatgacttttatgctgcatatagaactagtaaatggatagcagtaaaatttaaattaaattatctttcataataaataacattttcttataaaatagtaaaaaaaaaagtgtgaag

SEQ ID NO: 504785 - DNA, 567 bp, Homo sapiens
gtaaatacatgtataagttggtgtgaaacattgtaatctgaggctgcatgaatttcttggacagcrtttatctctatctgccagttatggtggtgggacggggtggttcaagttggatatcgatggattattttcattatcagcctatccataggaaatatgttggtgcattaatattttccaagttgaagttcctaaggagatgtaagaaaactgaatttgcccaaagcaagaggaagaaaaataaggaatatattttagtgtgataatgtaacagatcatataggctttctagtacataaatttttgctagtgtgacacaaggcatccacaggttgaaaacatgcaaacactttcattaatatgaatgtatgcaaaatatctcctatatgatacttgctcagcaaatgttaacatttatttaatatttccgttgtggaaataactcatggaaacagaggaaatatttattttctggagtaagttttgagtataagaaaatttccatccacctctgctcacaaacaagaaatggaactcttagtctgaaggctcagtcacctgaac

SEQ ID NO: 504786 - DNA, 567 bp, Homo sapiens
gtaaatacatgtataagttggtgtgaaacattgtaatctgaggctgcatgaatttcttggacagcatttatctctatctgccagttatggtggtgggacggggtggttcaagttggatatcgatggattattttcattatcagcctatccataggaaatatgttggtgcattaatattttccaagttgaagttcctaaggagatgtaagaaaactgaatttgcccaaagcaagaggaagaaaaataaggaatatattttagtgtgataatgtaacagatcatataggctttctagtacataaatttttgctagtgtgacacaaggcatccacaggttgaaaacatgcaaacactttcattaatatgaatgtatgcaaaatatctcctatatgatacttgctcagcaaatgttaacatttatttaatatttcygttgtggaaataactcatggaaacagaggaaatatttattttctggagtaagttttgagtataagaaaatttccatccacctctgctcacaaacaagaaatggaactcttagtctgaaggctcagtcacctgaac

SEQ ID NO: 504787 - DNA, 498 bp, Homo sapiens
ccccaggtcttcatagcaatcttgttttgtttttgatctccaaaaaggggtcagcytaggatttatgagatactccctcacacaacctgagaagaaattaagaaacaacttttacttcagaactgaaaactgtctggaaaaccagagaagtgctgaatgtcactgtaaagaaacgaaaaacaggaggcgacgtgtgctgggcagatgggacatggctttctgtgtttccgtaggtaattgcaacagcattaagaaaatgtgagaaagatattagcatggcacaaatgcctgttcatctccgcttttaaatgtctctgagttgaattaaaccacagtggtaatgtagagtttttcaaagtatacataaatgatattttagttttgctagctatgaatttaaatatttgattactttttgatatgccatttctaaattacctctaaaattaagaccaaaataataaatacacataatactaatgtttcagaaatgagctc

SEQ ID NO: 504788 - DNA, 498 bp, Homo sapiens
tagtcccagctactcaggaggctgaggtgggaggatcgcttgaggttgccatgagctatgatcatgccactgccctccagcctgggtgatagagtgagatcctgtctctctctgtctctcttttttgtttaaaagaagttggcctggcacggtggctcatgcctgtaatcccagcactttgggaggccgaggcgagaggatcacctgaggttgggagttcgagaccagcctgaccaacatggagaaaccctgtctctactaaaaatacaaaattagcagggcatggtggcgcatgcctgtaatcccagctactcgggaggctgaggcaggtgaatcgcttgaacccaggaggcagaggttkcagtgagccgagattgtgccattgcgctccagcctgggcaacaagagtgaaactctgtcacaaaaaaaaaaaaaaaaaaaagaagaagttatattttgctataatgtcaattgccccctctatccattaggatttaa

SEQ ID NO: 504789 - DNA, 593 bp, Homo sapiens
tcaccttgtaactgctttgaaatttaataaaatgaacaaaagcagtgcattttctgttctcttccrtgaagtctggtaattttagtaatccactgccctatgagatacaaggcaactctgtttcctctgtagtctgttttttcttcctttctttcaaaataacctgccatctttccaaaataaacatgaggaggaaatacatgagtgggtatgtaatcacccagatatttggagcagcatgcctctaaaaaattgtaaaaatagagtagtcatcagaaatttcttctggttttacagaacttgttaatgttattttcttgtctctataagaatttttaaaagaaacatttacattagtgtaaaaagtttgcccaagtgaaaattaaatagctatccacccaaaacttattttcccgtataaggataatcttagatttttagaaactcggagtgaacgtcatgaaaataattattttacagatttttttttagcattttagatttataatatcgtattatatttcaatctaatatttatgaggcctcattctgtgatgatcttattacagtgttaattacgtaattacattaca

SEQ ID NO: 504790 - DNA, 593 bp, Homo sapiens
tcaccttgtaactgctttgaaatttaataaaatgaacaaaagcagtgcattttctgttctcttccgtgaagtctggtaattttagtaatccactgccctatgagatacaaggcaactctgtttcctctgtagtctgttttttcttcctttctttcaaaataacctgccatctttccaaaataaacatgaggaggaaatacatgagtgggtatgtaatcacccagatatttggagcagcatgcctctaaaaaattgtaaaaatagagtagtcatcagaaatttcttctggttttacagaacttgttaatgttmttttcttgtctctataagaatttttaaaagaaacatttacattagtgtaaaaagtttgcccaagtgaaaattaaatagctatccacccaaaacttattttcccgtataaggataatcttagatttttagaaactcggagtgaacgtcatgaaaataattattttacagatttttttttagcattttagatttataatatcgtattatatttcaatctaatatttatgaggcctcattctgtgatgatcttattacagtgttaattacgtaattacattaca

SEQ ID NO: 504791 - DNA, 593 bp, Homo sapiens
tcaccttgtaactgctttgaaatttaataaaatgaacaaaagcagtgcattttctgttctcttccgtgaagtctggtaattttagtaatccactgccctatgagatacaaggcaactctgtttcctctgtagtctgttttttcttcctttctttcaaaataacctgccatctttccaaaataaacatgaggaggaaatacatgagtgggtatgtaatcacccagatatttggagcagcatgcctctaaaaaattgtaaaaatagagtagtcatcagaaatttcttctggttttacagaacttgttaatgttattttcttgtctctataagaatttttaaaagaaacatttacattagtgtaaaaagtttgcccaagtgaaaattaaatagctatccacccaaaacttattttcccgtataaggataatcttagatttttagaaactcggagtgaacrtcatgaaaataattattttacagatttttttttagcattttagatttataatatcgtattatatttcaatctaatatttatgaggcctcattctgtgatgatcttattacagtgttaattacgtaattacattaca

SEQ ID NO: 504792 - DNA, 484 bp, Homo sapiens
ggcaatacatggtatttacttcatgtaagaatcgtctactttcaagcgcttcctgtggctgaagtttgtctgctcatttttgcatmctcactttgcatgaatatccatggcaaccaaaagcatgcctaccttgttagcttttccggtgaggtaagaattattatagtaggcagggcaacatgaaagcatctgaagattttttcccaaactacccaaattacacaacaaccatcatgctcatctctagggccagaaagcgagatgcaggataaaactcagtgattatagatggaatccaacactgagaaggcgtgaatgttattcctgttgcacccctctccacttcccattttaaatgctggcccatttaaaatgctgatgaccctgagaacgactgtagattaacaaaagcttattccacctgatggctggaattgagagttccgttctgtatatgcacatggtcagaatataatagagcaga

SEQ ID NO: 504793 - DNA, 484 bp, Homo sapiens
ggcaatacatggtatttacttcatgtaagaatcgtctactttcaagcgcttcctgtggctgaagtttgtctgctcatttttgcatactcactttgcatgaatatccatggcaaccaaaagcatgcctaccttgttagcttttccggtgaggtaagaattattatagtaggcagggcaacatgaaagcatctgaagattttttcccaaactacccaaattacacaacaaccatcatgctcatctctagggccagaaagcgagatgcaggataaaactcagtgattatagatggaatccaacactgagaaggcgtgaatgttattcctgttgcacccctctccacttcccattttaaatgctggcccatttaaaatgctgatgaccctgagaacgactgtagattaacaaaagcttattscacctgatggctggaattgagagttccgttctgtatatgcacatggtcagaatataatagagcaga

SEQ ID NO: 504794 - DNA, 545 bp, Homo sapiens
taatatctgttatcattgacaaggtctactagacaacaaatgttagatacattattgtatatataatgcagaaataacacattacatatctttaaaaatgatatagcttagttttcattagtgtttaatacaaacgtccattttayagtcaattgctctttaagtatctcttttacatttttctcttccttcttttcaagagcaattttaagagagaatcagaataggcagagagttaaaagaaaggttaatgaaaatggggagactctgctaatgtatttccttgggcaaattgcagaacactggcacaatcagtcggattgtttgcagcctccaggttgctgcctgtaggtaactggggatgagccattctctgtgctgagtgcctttcttgcagtgtgatgtgtcaggctgttccagctccaatgttggctttcctgtggggcgctcatcactgtcactcatactacaaagatgttaccaagtcagaaaggggaaaaagcccccaaaaacaacaacaacaaaaaacaacaaaaagctccacg

SEQ ID NO: 504795 - DNA, 545 bp, Homo sapiens
taatatctgttatcattgacaaggtctactagacaacaaatgttagatacattattgtatatataatgcagaaataacacattacatatctttaaaaatgatatagcttagttttcattagtgtttaatacaaacgtccattttacagtcaaytgctctttaagtatctcttttacatttttctcttccttcttttcaagagcaattttaagagagaatcagaataggcagagagttaaaagaaaggttaatgaaaatggggagactctgctaatgtatttccttgggcaaattgcagaacactggcacaatcagtcggattgtttgcagcctccaggttgctgcctgtaggtaactggggatgagccattctctgtgctgagtgcctttcttgcagtgtgatgtgtcaggctgttccagctccaatgttggctttcctgtggggcgctcatcactgtcactcatactacaaagatgttaccaagtcagaaaggggaaaaagcccccaaaaacaacaacaacaaaaaacaacaaaaagctccacg

SEQ ID NO: 504796 - DNA, 689 bp, Homo sapiens
gctgtaatatctgttatcattgacaaggtctactagacaacaaatgttagatacattattgtatatataatgcagaaataacacattacatatctttaaaaatgatatagcttagttttcattagtgtttaatacaaacgtccattttacagtcaattgctctttaagtatctcttttacatttttctcttccttsttttcaagagcaattttaagagagaatcagaataggcagagagttaaaagaaaggttaatgaaaatggggagactctgctaatgtatttccttgggcaaattgcagaacactggcacaatcagtcggattgtttgcagcctccaggttgctgcctgtaggtaactggggatgagccattctctgtgctgagtgcctttcttgcagtgtgatgtgtcaggctgttccagctccaatgttggctttcctgtggggcgctcatcactgtcactcatactacaaagatgttaccaagtcagaaaggggaaaaagcccccaaaaacaacaacaacaaaaaacaacaaaaagctccacgatgcatgtttctagaatgtattttgtttacacataggtattagaagtttaaaatgaataacaagagacctactgtccgaaaacattgttacatacattatttttatttaatcataaaaccaaatgtaacttttcttgcta

SEQ ID NO: 504797 - DNA, 426 bp, Homo sapiens
ggtggcacgtgcctgtaatcacaggtactcgggaggctgaggcacgagaattgcttaaacctgagaggcagaggttgtagtsagcctagatcgcaccactgcactccagcctgggtgacagagtgagactccatttcaaaaaaaaagcattaaaaaatttttaaaaaattatcttgagtgattctctccatcatattacaagtacatcgtttccacctggtattaattcgagattttgtctttctatgcactccccactacaataaaagtaacttacagataattagctctactaagtaagacattaatacataatggctatctggtgacattaaaaatattattttcaggaaaagaagtcattcaaaccaagttacattgtgaagacagtccccaaaataatatttaaactcttgacttgtgtag

SEQ ID NO: 504798 - DNA, 426 bp, Homo sapiens
ggtggcacgtgcctgtaatcacaggtactcgggaggctgaggcacgagaattgcttaaacctgagaggcagaggttgtagtcagcctagatcgcaccactgcactccagcctgggtgacagagtgagactccatttcaaaaaaaaagcattaaaaaatttttaaaaaattatcttgagtgattctctccatcatattacaagtacatcgtttccacmtggtattaattcgagattttgtctttctatgcactccccactacaataaaagtaacttacagataattagctctactaagtaagacattaatacataatggctatctggtgacattaaaaatattattttcaggaaaagaagtcattcaaaccaagttacattgtgaagacagtccccaaaataatatttaaactcttgacttgtgtag

SEQ ID NO: 504799 - DNA, 426 bp, Homo sapiens
ggtggcacgtgcctgtaatcacaggtactcgggaggctgaggcacgagaattgcttaaacctgagaggcagaggttgtagtcagcctagatcgcaccactgcactccagcctgggtgacagagtgagactccatttcaaaaaaaaagcattaaaaaatttttaaaaaattatcttgagtgattctctccatcatattacaagtacatcgtttccacctggtattaattcgagattttgtctttctatgcactccccactacaataaaagtaacttacasataattagctctactaagtaagacattaatacataatggctatctggtgacattaaaaatattattttcaggaaaagaagtcattcaaaccaagttacattgtgaagacagtccccaaaataatatttaaactcttgacttgtgtag

SEQ ID NO: 504800 - DNA, 501 bp, Homo sapiens
tggctgcctctttttcgtttagaaatctgggcaagtgtctttttaaaagtgttgaaaaggtgagcgataaagccacctacatctggaaagaaccttgggctctagggcagattttggttttagatagaaatcatgaagatgtgttaacactgtaaatcatcagcgagcaagggtgaagagaggacaaaaaaagaaaaattcaagaagcaagaagtcagagacaggagagaatacrattggattcattatggttcacggcataagcagaaagcagctttcactggtaggtttttcagctctaaattgcgtactgcaaagggtcaagtttttatctgttatgtctacagggcatatataaaaagaaatttaagaaaatctcacactccctggtattttgaatggatacttattgctacctcaattttccaaccagatattaaacaactgtaaaaccggacagttttctagatgttcttcttctgatttctgtaatacaaaatt

SEQ ID NO: 504801 - DNA, 603 bp, Homo sapiens
atacttatttttctttatttactacttacatgtatgcccaaacctcagtgatatcgtttggatctgtatccccacccaaatctcatgttgagatgtgatacccagtgttggagatgaggtccggtgggaggtatctggactatgggagcagattcctcaagaatggcttgggccatccccttggtgatgagtgagcttttgctccaagttctcatgagatgtggtcaattaaaaaagtgtgtggcaccaccctgcttacacacacacacacacacacacacagacacacacactctttctctcttgttcctgctctggccatgtgaggtgtctgctccccttttgctttctgccatgactggaagctccctgaggtctccccaaaagccaagcagatgccagcaccatgcttcctgtacagcatgcagaactgtgagccaattaaacctcttttcttcataaattatgcagtctcatatatttctttakagcaatgcaagaacagtccaatatagtcagcatttgactacatttaagacttcacaatgagtagtatcccaacaaatatacaacaggaacagaggttcctgttatgaaatccac

SEQ ID NO: 504802 - DNA, 512 bp, Homo sapiens
ataactatttcttcataatttttgtttcttattctccaatatgcaactacatataatagcaaaatgaaaatatatttcccgaaactaaactaccgaactatcctccccaaattatttgcctgataagaataaaccagaaaatcttcctcaaatagttgacaagattactgcctcccaggtgagtccctgtgggaacctctttcagagagaagccagggaactcggtgacacaaggtgctgaatggcagragcatcatgctgcacggtgggtgcaaacgcagttttgagactaattttaccccgcccctcaaagcttcctgtcacgtgtgtttgttgcgaggtgtctacagtttttcatggttagttgtctttcagtgatttaaaaatacatcctggtttctggtaacgagagccttgccagccttcttttgggttttgggttttgtaattcaaacatgtttcagtgttgttgtatcccattctcatttgtgtaagcctggcagtatgaatta

SEQ ID NO: 504803 - DNA, 684 bp, Homo sapiens
tctctcagaaagcttcattatgtatgcccagcaccctacattggattcacttttccccatgttcatttttataactaaatgcaagaccccccgacatatacagccgcctttgtgttactgtgccgtaagttcttagtgcattatcttacacatactgcagattcaataactatttcttcataatttttgtttcttattctccaatatgcaactacatataatagcaaaatgaaaatatatttcccgaaactaaactaccgaactatcctccccaaattatttgcctgataagaataaaccagaaaatcttcctcaaatagttgacaagattactgcctcccaggtgagtccctgtgggaacctctttcagagagaagccagggaactcggtgacacaaggtgctgaatggcagaagcatcatgctgcacggtgggtgcaaacgcagttttgagactaattttaccccgcccctcaaagcttcctgtcacrtgtgtttgttgcgaggtgtctacagtttttcatggttagttgtctttcagtgatttaaaaatacatcctggtttctggtaacgagagccttgccagccttcttttgggttttgggttttgtaattcaaacatgtttcagtgttgttgtatcccattctcatttgtgtaagcctggcagtatgaattaaatccac

SEQ ID NO: 504804 - DNA, 564 bp, Homo sapiens
gtcatcccacccgtcctagaaatggctgattgaaagatgttttctctagaaaaaaaaactaacaaaaaaacaaaatttactcttaaactgagaggcaagcattaagagccaacccacagcaggactgggagattccaatgtcctcgtttcttctcatccagagtataatcatcaaaatgcaagtaggattcatttttgttttctgtctcagggtttttgtggttggcttgaataaatgctattgagcatggcaaatgaatgcagcgccccccccccccaaaatttccatgtataatggtcatcactgttaattagacacaattaagatccttctataaggagcactgaagaatttgaacagcagtcgtgcaggaggttaggtacataaacctcccttcatagactctcaagagtccatgtatccaatcatcatgtttttcaaactatttttcctagctcttmattttctcacataggtataacacttgagtaaattatagaaatgaaaactttggtcaagggtaaataaaggcttatttgtattttatatttcaattttcttct

SEQ ID NO: 504805 - DNA, 564 bp, Homo sapiens
gtcatcccacccgtcctagaaatggctgattgaaagatgttttctctagaaaaaaaaactaacaaaaaaacaaaatttactcttaaactgagaggcaagcattaagagccaacccacagcaggactgggagattccaatgtcctcgtttcttctcatccagagtataatcatcaaaatgcaagtaggattcatttttgttttctgtctcagggtttttgtggttggcttgaataaatgctattgagcatggcaaatgaatgcagcgccccccccccccaaaatttccatgtataatggtcatcactgttaattagacacaattaagatccttctataaggagcactgaagaatttgaacagcagtcgtgcaggaggttaggtacataaacctcccttcatagactctcaagagtccatgtatccaatcatcatgtttttcaaactatttttcctagctcttcattttctcacatakgtataacacttgagtaaattatagaaatgaaaactttggtcaagggtaaataaaggcttatttgtattttatatttcaattttcttct

SEQ ID NO: 504806 - DNA, 542 bp, Homo sapiens
aaataatgcaaaaaactaaagagtctccaaatatgaaaataggacaacagacctattgaacattccaacacatgattgaccagccaattccaagtgctgcgaaacagccatctattttggtgtatttgctttaaaagtaaatgagaaagcattgaataaatagacatcccatatagcaccgatgatttaaatttggtacttattatctatagccataccaccctgaacgtgcccaatctcatctgaatttgatatttattgtaaaacaataatgatttatgacatatatatccatgctaaaagaaatgcaatggtacggtttctcatttatttatttatttwttttttgaatgcttaaactataaggcagggttctccaatcttttggcttccctgggcaacattggaaaaagaactgtcttgggtcacacagaaaatacactaacactaacgataactgatgagctttaaaaaaatcaccagaaaaccttacaatattttaagaaagtttatgaatttgtgtttggccacatgcaaagcct

SEQ ID NO: 504807 - DNA, 608 bp, Homo sapiens
tggtgcatgcctgtagtcccagatacttggggggcttaggcaggaggataacttcagcccaggaggtcaaggctgcagtgagccctgatcatgtcattgcactacagcccgggtgacagagcaagatcctgtctcaaaaaaaaaaaaaaaaraaaaaaagaaaaaagaaaaaaaaagtgcaactgaatttcaactttacttacattttctccatcccttccactcacccattatgtttctatgcctctctttaactgtgaggctaacttctctattcatggattttatccagccagataccaggcttaaacagtattctctgatccttaagtctatattcctgagtggatgaaactgttaattatccaccattgtccccgtctttcttctagtaatagaagctcccaagttttaggtagacacatggttacccagacagaaactacatttcccagactccctttcagctaagtgtgacatgtaataatctctggtcaatgtgattgagcagatgtgccatatacaatgtccatgtcacatcttttaaaaaaggaaactgcttgccttccatttacttcctctctacatttccactggctagaaaatgg

SEQ ID NO: 504808 - DNA, 531 bp, Homo sapiens
aacactattgtctttgagtttgcagagaatggagaaggagactcctttcttttttcttttccytttttttttttttttttttttgagatggagtcttgctgtggcacccaggctggagtgcagtggcgtgatcttggtttactgtaacctccgcctcctgggttcaagtgatcctcctgcctcagcctcctgagtagctgggattacaagcacgtgccaccatgcctgggtaaatttttctgtgtttttattagagacggggtttgccatgttggccaggctggtcttgaactcctgacctcaggtgatctgcctgccttggcctcccaaagtgctgggattataggcgtgagccaccgcgcatggccgagggaggcttttttctctgacaccaacgggtctagtgtagatggcagcttgcaggaggctgaggccaaatctgaagatggaacctcttcacgggcggaatgcatgctctggctcaaaccaacgattgtctactgagggcttactggggctatgagaaatcct

SEQ ID NO: 504809 - DNA, 561 bp, Homo sapiens
ctggaactggtattctcagcctgtggactcaagagagcactgggccaggagggtttcagtgtttccaagtcaatgccraaggcacgtacaccggtggatgggaaagacattgatttttcttgagataatacctcaagtgtatttgttcagtgtctttcagaaacaaagccttgtctgatttatttttattgtttttttgtttgttccgagaagacaaagcttgtctgactaaagcaaacctcagtgttttactgttcagtagctcctgggagtcaggttgttcacatccctctgttaagtgcattgatgcttcaacagatacttagtgagcacctactgtgtgtcattgtgggctatagatagctttgggagagtcaaaagacccggtggtttctgagatggcagcctggctcctggagcctgcagttccccatggaggggcctcttagttctaatcccagtcctgcacaaagaaaccaatcccagacaaaagtattttaagagcacttggacaaaatgctcagcaaaacaggtttgttgtctggccttgatgtctcactt

SEQ ID NO: 504810 - DNA, 531 bp, Homo sapiens
acaatgtgcccaacacacagtaggtgtgcaatgagtgttagagtctttcagatctccctgaaatggatccgtcttgcagattatcacagccacccgcaacaccctatgacacacatacagaatgacttgatgtccttgataaatgttgcttttattaattaactctgtgtgagggaaaactgaagcaaagggatggagggtgtaggagtaaaacctccagagctgtgaaaaattcctgagttattatccaaataatctggtggcttggcaaaaagaaaaggagaaaaaaatcccttaccaagcacatattctgctggttttcaaacgcgagtgtgtatttcaatggcaatttaatccatgtgtttcttaktcttctgtacttaaactatcaaagtattgtttgaaaataataatttgatgtccaataaacagtctttccttttgagtttcccatgcaaccacctgtgtgattgttccctgaaaggtgagtagcccagttgagtctcaaggtgcctacctacccatacctga

SEQ ID NO: 504811 - DNA, 591 bp, Homo sapiens
tccaccgtactagactaaacacgaacaatccatgtgcttttccctggtctagcccgagagccgtttcttgtttgggggcttacagtgttacttgggatgtttaaacaactcttaaaaaattaaactgacctcttatgtagaattctgtaaagaatatggaatgttaaaaatctccagatggttgagattaaggaaaaaacatacgctttcctaaaatatgcagccattcgtcttctttcggtagcaccaactcttgcccaaatggagaggtagaggcaggggtttcagtctcatagttgtaratgctttgagatccaagatggaaagattttataggccgtgaagacaccactgctgcctatcctcatggtggccagcatgatagtccaggcttatactcaatgtgtcttgctggtttagcgtggacatggtattgctggtgccttgtgtttccgttggagagatgagctggcatatgaagaatatgcagacagctggagaggaatgagcaatccacaggcccaggttttttcgtagaaaagagagcaggcacactggtaatcataacaatagggaatagttccatgagta

SEQ ID NO: 504812 - DNA, 265 bp, Homo sapiens
gctcaactcatcgggcttccttccactcagacattagctaatgagtattaatactgagtgcctgaaatgatattttggcaagtttgcctgacctaagagtcatagagatcacagtggctgataagtcaatctccattccaccaccttctgttttatggcagaatgtgccataaaacaaccctayggccatcccatttggctcagtcatgaagatgctggattctatgatccacagacccacatcaagtatctctaccccagtcct

SEQ ID NO: 504813 - DNA, 568 bp, Homo sapiens
ctgaggactagcttgttaaggatgacctaagctgtcacagctcaagtgtcctccatgtgtcagtcacaacccatcagcaggttaacttgggaatgtttagggcatattctcaaagtgatcacagagaagcaagarcagaaacacacaagcactttttcaaattgtttctagtttgctaactttttttttcttgctggtttctcttttattaatggtggcaaaatatacataacataaacgtacagttcggtagtattaaatacattcacattgttgaacaatcatcaccactatccatcttgagaacttttttcaacttgcaatcctgaaactctatacctattacatgaaacactaactcctcattctctccctcaccccaggccctggcaaccagtattctactttttgtctctataaatttcacaactctaagtacctcatatgaatggaatcatacagtatttgcctttttgggactggcttatttcacctagcataacatcctcaagggttattcatgttgtagcatatgtcagagcttccttcctttttaaggctgaataat

SEQ ID NO: 504814 - DNA, 587 bp, Homo sapiens
gaacagccaaatggaatagatgcccaagacaaggtattgagggcagtggtgcatggagcttccatgccctcttcgggtataccactttcccagaacctgcatgtgttcacaaacctggatgctgtcttaaccccatcatttagtgttttcatggaggcctcattatataggcagttgagtaaatcattgacccttggtgactgagtcaatctctagcccctctatcctccctggaggttgagagtttgggctgaaagttccgatcctctaatcacttggttrgttcctctggcaaaccagcccccatccttcaagactcaccttattagcataaactcaggtatggttgaaaggggcttaccataaataacaaaagatgttcctctcatccctaacactcaggaaattccaaggcatttagaagctctatgccagaaaccagggacaaagatcaactatatattttaattatatcacaatatcatatgaaatgtaataatttcaatggaaacaaagaggcttgaaccccagtaagaagatatatagacaaagcaccaaacccctagttttcctagtgactaatccag

SEQ ID NO: 504815 - DNA, 635 bp, Homo sapiens
tacagaaatatttatagatatgtgcatatacatgggttagtatacacatatgtatttccttgcttcttagctgaaagggcttagaagcaatgatgacacatcagtaacaatgagcacaattatccagaccttggtttctaataacattctctgataaaaaagacctgagttcctcagagaaataattttttctaggactggagtagagattataaaagatgagcctgaagcatctgttaataccagaatgtaaaaactccccacccataattatgagggtatgtcaaaggaacacagtagtcaactaaaagagctcccaatggccaaagagggaaaatttgaagaacaaaacaaattgagtaatattggattataatccaaagtatacaataaatatccatgtgtccataatgttgtgaataaatgttaaataaataaataagaaaatagacaaatctcccatgcagaagggttctaaataattcatggaratactcaaccatcaaagaggtagagcataactcccctctccttgggtgtgggttgggcatagtgactttcctacagagtaaagtatgaaaagaggtgaaagagtaaactttccagtggagaaagctgacaaatgctacctcagc

SEQ ID NO: 504816 - DNA, 645 bp, Homo sapiens
taaatccctatttttagtgggttagggggacagatttgagacttatctcccatctcctggctgataccacccatcttaaagccttcttccctggcaatatttgtcrtctcaatgactggctttcttcacagcaagcaactggaccttgaccaaacccctgttgtttggcaacaatactagtttcttaatgtctttatataaagatgaagttgaaaagataaaattgaatatagattttaatattgtattctctccaaataaacaaacaaatactctaagaagtattagtgagctgctaatggagctcactaataaataaacaaatactctaagaagtattagtgagctgctataaatgaaaaaaacaagatttaagcaagttactcaatcattctcaagttcagtttttttctatttaaaatgggtgtaaccaagtttaggatgagtgggaaaacatgtaaaaccctcaaaatatgctccttctaacattccacttatttctgctgaagcaggacattttcctgtcccattcatgggactcactgcagtgttgcctcatttacccagcccgcagctttcaactccttgtgggagagagcatgtgagagaaagaggcaggaactggagtccacgagtgctggaacc

SEQ ID NO: 504817 - DNA, 649 bp, Homo sapiens
cactcaacggagtttaatactttctttttgaaataagctctttccttgagtcctattacccacatacacttgatttaaccataatctttctggctattcctttcccttcctctgcaaaagcattaagtattaaagttcctgaggacttcattccatacatttttctttctcaagtattattttgctagtaattttatctatttccataggggctattaccaatccatctgccaaattatatgccaactcagtttacatttacattacattctttttttaactccagattcaaatatcaacctgcttacacagtcatttaaaattaagtgttcatggcctttgttactggctagataataaaccaaagaaaaggaacacatctttctaatggaattatcctcaccaaacacaatttggaaataatgtcagacatatggttggcaaataataattgacctaattaaaagaatgagtaaatgctaataaataattgatacattttccaacattgaagaagtgcttttttcactctttagctttaagaaacacttgttcaacattaattgtgataactaaaaatmtattaaaggactattttctgaactgctgaatctagaagatagacagggaatattaagcagatgtctca

SEQ ID NO: 504818 - DNA, 530 bp, Homo sapiens
atctggaaaagtaccctaaggtggcccagaactccagacactggccatttaaattttattataaaaatttcatagaaatagagaatactcataaatgataattgttgcccttaagaaagtaaccaaacatctctgaggcctttccctgacasacatcctgcaggtctttactaagattaaattagaaaaagccactaatcccttgtttagttatcttactttgttttctttggacatttaaatctggaaaaatagagtagatagaaaacttttcttttgtatccctataacatgaaaaagttaaaataaatttcactataattctaaattttctaatccaggaagaataatcaaagagacagaacatccttttctttgctgaagatcatttataaattttggccacctctctttggtctattccagtttctctggatgtatgattctggttattactgaaaccttccaacagccaatgaagtgagtttggaaataaatgtcccccctcaggtgattccagatgattgcag

SEQ ID NO: 504819 - DNA, 451 bp, Homo sapiens
ggtggaaggtccagacgggccagggtaagggtgtggctggcckggtggttgatgtggtagaagacgcatgtgtggtcccaaccacttggaaagtgtgactgctggagagggggcatcctgtccaggttccccagtatggagaaaagaggacacagaccagtgagtccccatctgtcctctgtcctccctacatatatgtactcccttgccttttcctggcaaggggtttcctggggcatgccctggaatgcccactgccagtccatggataagagcggcccctgagagaaggagggagatgataaaggaccccctgagcatccaggaccttagaggagcctgaacaaggttcttccctatgcacatgttttgagcctgggatgggttccatgctgagccagaggctagggacacagacatggtccctgcccacacgggagtgagtaggctt

SEQ ID NO: 504820 - DNA, 503 bp, Homo sapiens
ttctgtctgagtgcaggaaggtgttccagggtcgaaattacacttctcgtacctggagacgctgtttgtgggagcactgggctcrtgcctggcacacaataggtctgcaataaaccatggttaaatcctgagctccggagtcttcccaggccgatgcctctgcagtggcccgtcgcagaggtccagataaaaccagagggatccggggaggagagggtcccaggatacacgcccagctttgcccttagacaggtcacagtttcctcacgcccctgctcagacccccgcgggggcccaaatctcagttcctaccccagattgggagcagcctagtcgccgcacctgccacgtcgccctctgctggccgagggctgcccagcggccgcctcccatccccacacagggaccgcggggcctttcccggcagggtggggcagccttccccgcacccgggggccaacgtctgtgtgctcactgacttgctgttctgcagggactgtccc

SEQ ID NO: 504821 - DNA, 503 bp, Homo sapiens
ttctgtctgagtgcaggaaggtgttccagggtcgaaattacacttctcgtacctggagacgctgtttgtgggagcactgggctcgtgcctggcacacaataggtctgcaataaaccatggttaaatcctgagctccggagtcttcccaggccgatgcctctgcagtggcccgtcgcagaggtccagataaaaccagagggatccggggagragagggtcccaggatacacgcccagctttgcccttagacaggtcacagtttcctcacgcccctgctcagacccccgcgggggcccaaatctcagttcctaccccagattgggagcagcctagtcgccgcacctgccacgtcgccctctgctggccgagggctgcccagcggccgcctcccatccccacacagggaccgcggggcctttcccggcagggtggggcagccttccccgcacccgggggccaacgtctgtgtgctcactgacttgctgttctgcagggactgtccc

SEQ ID NO: 504822 - DNA, 518 bp, Homo sapiens
ctggcggctgctaacctggctccccagacgcccggtctgccccaggctcagattgcccagcctcccctcccccacccttgggctttggcaggattctccatcaggtttttgcaaagtgctggggtcttaaaatagcataaaggcccacgcgcgcgcgcgcrcacacacacacacacacatgcatgcacacacacaaacatacacatttagactatagtgtcaattcccgtaccatagaatgaggatcaaaaaaggagggagagtagagggtggagcaaggacttcacggcatcttctagagctgagcacagtgagaggccaggcaggaaacaggggtggcactcggtgtgaagaaggggaatggggaggagaaaacaagatagagcctgtttttgggtgtgtgtgacaacgtgacagggctaatagtcatgtctggagtgtgtgtttatgtgtagctgggatcatgaaagcaaaggctgtgttggtgtgaccagtttggcaagaggaagctggatttc

SEQ ID NO: 504823 - DNA, 435 bp, Homo sapiens
ctgaggttcacccagagccttgcacagtactggacacagtgcgtaggtgctcaacacaggtttgttaatagtaaatgaagtctcacggctcacgtctgtaatcccarcactttgggaggctgagatgggcagatcacttgaggttaggagtttgagaccagcttggccaacatggcaaaaccccgtctctactaaaaatacaaaaaaaaaaaaaaaattagctgggcgtggtggcatgcacctgtagtcccagctactcaggaggctgaggcatgagaattgcttgaacccaggaggtggtggttgcagtgagcaaagatcatgccactgcactgcagcctgggtgacagaagagacaatctcaaaaaaaaaaaaaaagagtcaatgcagcttgtttgtcacatcttcacatccatccctgattaatcacaacac

SEQ ID NO: 504824 - DNA, 624 bp, Homo sapiens
acccagcctgtgacctgggctgtggcrcagcaaacagccagcaagcactgggtgcttttcctgtgctgggccagcactttgcaggcatcgactcaattgaaccctcacaaccaccacacattggtaagaaaaccaccctgacagtcctgggaaaatgcacagtcttagtgctctgaaggaaacaaaaaaggacacatcagtcatcaaagaaaacagagagatccatctggagtgccttgaattggcaaatggtttaattttcctgtatagggacgctggccttgctggggcaccatggagcggggccccgtgctggtgggttgttcactgggaccacccttctggaatgtgggaaggcggcatggcaggacccaccgaatgccttcaaaagccagtggtccatgcccctgtctccttccttagagtcttccagaaaagactggtcagaggtgcagcacagatgaacctacaaagcttttcatcaaagcatcacttacaatggtgaaaaggcagaagaatcactgaattccaccaaggtggagcagccgaggaaatcgtgggtagaacactagggagtcacaagaaacaacatatttgaggggacatttatagcagaggaaaatg

SEQ ID NO: 504825 - DNA, 624 bp, Homo sapiens
acccagcctgtgacctgggctgtggcgcagcaaacagccagcaagcactgggtgcttttcctgtgctgggccagcactttgcaggcatcgactcaattgaaccctcacaaccaccacacattggtaagaaaaccaccctgacagtcctgggaaaatgcacagtcttagtgctctgaaggaaacaaaaaaggacacatcagtcatcaaagaaaacagagagatccatctggagtgccttgaattggcaaatggtttaattttcctgtatagggacgctggccttgctggggcaccatggagcggggccccgtgctggtgggttgttcactgggaccacccttctggaatgtgggaaggcggcatggcaggacccaccgaatgccttcaaaagccagtggtccatgcccctgtctccttccttagagtcttccagaaaagactggtcagaggtgcagcacagatraacctacaaagcttttcatcaaagcatcacttacaatggtgaaaaggcagaagaatcactgaattccaccaaggtggagcagccgaggaaatcgtgggtagaacactagggagtcacaagaaacaacatatttgaggggacatttatagcagaggaaaatg

SEQ ID NO: 504826 - DNA, 598 bp, Homo sapiens
ctgtgggtgagttggggggcactgtggggagcgagcactggacacagagctccaaggccaagagcctgccctgcccatacttggctgtggccttgaccaagtcctaggcaggggttaaggtatttgtaccatgaaggtacagaagagtatctttagtatgttaccatttgtgtagagagagggaacacacataagtgtgcrtgtgcgtgtgtgtgtgtgtgtgtgtgtgtacgtattatggtaacatacataaaaacatatttgtaaggattcataaaaaactcaggagacaggaacagtgtgtgtggggtagatatttcccttctctaccttctgagttttggactatgccaatgtatcgttctttcaaaaagtcaacaaaggattaatttcctccttcttatctgtgcccctacccccagggaaagaatgggcttagagaatcagatacacctgggtgttgaaatcccagctctgtcaaagtgatcttaggcaaccatttaacttttaataccccatgttttgcatctatacaatagaggtaataatggtaaccgtctcctatggaggttgtgaggattaaatgggattgttagca

SEQ ID NO: 504827 - DNA, 598 bp, Homo sapiens
ctgtgggtgagttggggggcactgtggggagcgagcactggacacagagctccaaggccaagagcctgccctgcccatacttggctgtggccttgaccaagtcctaggcaggggttaaggtatttgtaccatgaaggtacagaagagtatctttagtatgttaccatttgtgtagagagagggaacacacataagtgtgcatgtgcgtgtgtgtgtgtgtgtgtgtgtgtacgtattatggtaacatacataaaaacatatttgtaaggattcataaaaaactcaggagacaggaacagtgtgtgtggggtagatatttcccttctctaccttctgagttttggactatgccaatgtatcrttctttcaaaaagtcaacaaaggattaatttcctccttcttatctgtgcccctacccccagggaaagaatgggcttagagaatcagatacacctgggtgttgaaatcccagctctgtcaaagtgatcttaggcaaccatttaacttttaataccccatgttttgcatctatacaatagaggtaataatggtaaccgtctcctatggaggttgtgaggattaaatgggattgttagca

SEQ ID NO: 504828 - DNA, 625 bp, Homo sapiens
  misc_feature (1)...(625): n = A,T,C or G
accccttcagagtttcctcacaacaatttccatcctgtacatccatgagaaaatgtcctcctgcatcttatttgactcagcagcactctacaatactgaacattctgatctttgttttgcttttcttggcttctgccatccatccacactctgtgtttttcactgtgtttcatgggctgatctttctgagaatccttggttacttctcatcatacaatttccaaatcttggtaaaacctgggacttgatcctgagacctccttttccccacattcttcttaggtaatttcatgctttttaaaattaggtcatatctctaacaacatattttatggattccacatggccctagatatatggcaaactgcattctgtgaactggagtactcttttctgtaaataaagttttattggaatacacccgtacttgtccatttacacaytgtcacactgctttgactacaacacagagttgagtagttctgacagaggctaaattaaaatatttactatctgaccctgtaagaagaaaattcccaacccctagtatagaataaaatttttttagcaggatatgaaaggcttttcatgannnnnnnnnnnnnnnnnnnnnnnnnnnnnnnnn

SEQ ID NO: 504829 - DNA, 593 bp, Homo sapiens
caacaggctaaaacctatgtcyttcaaaatacataaaccttcttacaaatcgctaagacacttataaaaggagcaagaggaagggaaatcacgaatacctgaagtcggggaagattcagcgttgccacggccacgcactctttctcctggggcgggggccagtccgcggagccatccatcccctcactcacctgccgaagcaggagatccagctgctcaaaagtcactgagcaaatatccaccccaaaagggacatggaggccaatggaccactcagaacacgatgaccaagcaatgctctaagaggaaacgcaacaatcggaaatgaatctccaaatgcagctcttggtctgtcgcacaggagtcaccagcttgtgtgatggagctgccttatattattacctatcatccctctaactgcccagtggaaaagcattcatgggtgtctagctcacacactatcagcttccaattctcccacccatttcactagccccatctcacttggccatacctaaaagagtaaaaacattttaaaaaatcttttcactctcaaaatgattaatgcacattaatggatggcagggaggctc

SEQ ID NO: 504830 - DNA, 593 bp, Homo sapiens
caacaggctaaaacctatgtccttcaaaatacataaaccttcttacaaatcgctaagacacttataaaaggagcaagaggaagggaaatcacgaatacctgaagtcggggaagattcagcgttgccacggccacgcactctttctcctggggcgggggccagtccgyggagccatccatcccctcactcacctgccgaagcaggagatccagctgctcaaaagtcactgagcaaatatccaccccaaaagggacatggaggccaatggaccactcagaacacgatgaccaagcaatgctctaagaggaaacgcaacaatcggaaatgaatctccaaatgcagctcttggtctgtcgcacaggagtcaccagcttgtgtgatggagctgccttatattattacctatcatccctctaactgcccagtggaaaagcattcatgggtgtctagctcacacactatcagcttccaattctcccacccatttcactagccccatctcacttggccatacctaaaagagtaaaaacattttaaaaaatcttttcactctcaaaatgattaatgcacattaatggatggcagggaggctc

SEQ ID NO: 504831 - DNA, 370 bp, Homo sapiens
gaaatttgtgctgtgacaagaggaaccagaaatggggtggcaatgcttaggggactgggtcataagatcaaaggccagtctygcagtaatgacagttactggatggaccgtgacatcactacattccactcttcctggtgagggggagggaccacatcagcatgatgtccgagtcaccgctccatgataggggagggaaaaacagagctgggacccaggtccttggagacgccagtgcacacagcctagggaggtccaccttgaggcagcaggagggaagggaagagtcagcagcagggagccccaggattcaccagcctaaagtcacccagggatgactggtgagggtggggtctggggctgtgggacc

SEQ ID NO: 504832 - DNA, 515 bp, Homo sapiens
tgctgataggcggccacctgctgctgataggtggccacgtactgctgcaggtgacccaggtaatggtctggctgctgctgcagactctgagcctcttggctcttcagctccacctgcaggaagaccctgggtgtgagggcacatggtggctggtttgcagattctgggcccattaatagggtagcgagggcactgtggggctctgtcgcctgcccaggcccctggccccttacttcaggcctaagtgactgccttgctttcctagaaccccatgcctccttccccagcctcaaatctcatgtcctcttcccaccatttcaactgtaggccacagaatggtagaaaagtagtgggagccaaccaccatctgctaaatgtgctacaggcctaatgcttcccatgtattatctcatttaatcctcagcacctctgtaaggaaaatgctaacttccttttgaagttaaagaaacagagacytagagatgcgaagtacttgaatggtgaccagtggaact

SEQ ID NO: 504833 - DNA, 517 bp, Homo sapiens
ccagggatgactggtgagggtggggtctggggctgtgggacccaggtccttggagatgtgagcccaaaaagccctgggaggtcaagcttggggtggcaggagatgagggcccagtaaaggagcggggagccccaggattcacctgcccaaagtcaccctggggtgattggtgagggcagagactgggctgcttgctgaaggggtggggctgactgrcaaaactttggtgggggtagcccagaggcactggtgtgggggccccagtccggtgaacctcgggagtggtatggactctggcagcagtcttgtcgttggagaggatctatggctgggttgggggtccgtgacctggtgtgtttttacctttctcttggctgctgccaatttactttgtcgagtttcttctgccatcgcagggtggggagggaggcgggcttggggccacatcagcaaaatcccaccaagcactgatcaacacctccagtcacctaccaggtagctgtgcgactgagccaga

SEQ ID NO: 504834 - DNA, 517 bp, Homo sapiens
ccagggatgactggtgagggtggggtctggggctgtgggacccaggtccttggagatgtgagcccaaaaagccctgggaggtcaagcttggggtggcaggagatgagggcccagtaaaggagcggggagccccaggattcacctgcccaaagtcaccctggggtgattggtgagggcagagactgggctgcttgctgaaggggtggggctgactggcaaaactttggtgggggtagcccagaggcactggtgtgggggycccagtccggtgaacctcgggagtggtatggactctggcagcagtcttgtcgttggagaggatctatggctgggttgggggtccgtgacctggtgtgtttttacctttctcttggctgctgccaatttactttgtcgagtttcttctgccatcgcagggtggggagggaggcgggcttggggccacatcagcaaaatcccaccaagcactgatcaacacctccagtcacctaccaggtagctgtgcgactgagccaga

SEQ ID NO: 504835 - DNA, 281 bp, Homo sapiens
ggttaatacaagtgataataactccaggatacacatgtctaacactgattatttcactcagctccaggctaatggattcacatttctttaagacaataacagacactgaaaaaagtaaaatattcaraaatagctcttgattcttaccaaccaccttaatctatttctttcctattctgttctatattagtatgtatcatccatatacacctcttgtttaagcctaaaacataagtatttgctttgatttttgcctttttctcaaccaccataggtaatcc

SEQ ID NO: 504836 - DNA, 381 bp, Homo sapiens
tgaaattaaattgaaactcattgatgtggtgtacaaagccctacacattctagtccttgcctacttctccaacttgatcatcctcactagttcacgttgcaccatcctttctggccatttctgtgccttraatattcaatccctctccccctgaagggtttttgcatttgctgtgctctgactggaaatgctttctgactggaaatggtttctttcccccaacactcatcatttggcttggtatttccatcgaaatatcggagagatttcctataactaacctagcaatgataagccccactcccatatctatcactacagttactgtctaagtttgaattccctgtaaaaagagactgagactgagacaatgatttgcat

SEQ ID NO: 504837 - DNA, 381 bp, Homo sapiens
tgaaattaaattgaaactcattgatgtggtgtacaaagccctacacattctagtccttgcctacttctccaacttgatcatcctcactagttcacgttgcaccatcctttctggccatttctgtgccttaaatattcaatccctctcccyctgaagggtttttgcatttgctgtgctctgactggaaatgctttctgactggaaatggtttctttcccccaacactcatcatttggcttggtatttccatcgaaatatcggagagatttcctataactaacctagcaatgataagccccactcccatatctatcactacagttactgtctaagtttgaattccctgtaaaaagagactgagactgagacaatgatttgcat

SEQ ID NO: 504838 - DNA, 533 bp, Homo sapiens
ctgatgcatacttacttgtgtatatgagatgattacttttgtacagaagtaagtaccacatgctatttgaggaacttggcaaaattatccttttgaaatatatctcactgattgatttcctacagaatgtttatgatttatttacattatttaagtcacagtacctttttaaagagaactcytttagaatgaaggtacccttgtactaatagtagtagtgtcagtaatagttgaacaaagtttgttattttttttttctggacagtagggatccattatttctgatgaagtcataccctagaatcaaaggatcatcatttaatataatagaggtcatgggatacttttcatgccttgccaggggacaacttacaaaagggggccaaagtgtattaatttaatccagtatctaatatgtgcatagaatgagtggaattaaacatttttcatacataatctcatttaaacatctcagtagtcccacgggcagataatagtattccaaataacaagttaggaaaagaagtcccaaa

SEQ ID NO: 504839 - DNA, 532 bp, Homo sapiens
tggtttgctaagtctcatcaaatccaatctgctggagaaagaaaagacagaaaataattcatgtcatacattgtacaccaacatcagatattcctttgtcattaagtcttttcactctgtagttacctttctaaaaacacaaaattgttagtgttctatgatattgctgctggtatttcactttagctataattcttccatgaaatgggcaatgctcccagaatccactaacccgtttattttggacaatcaactagaaatttgaaatatctttctgcactacatcatgaaggttaaaaactgtaacagatatattttactacatgaatataattggaaacttttaaaaagtttatsattaattctaatgaatatgtggcaaaagttggtaactaagcaaacattacactaaatcttcatgtttcttcatagagtgctttcttcaaattaatcaaaatcataaatatatgagacctaaagaaatccaactataattaattttaacactggaacagctaatagcaaaaaaata

SEQ ID NO: 504840 - DNA, 578 bp, Homo sapiens
acttagtgcggttttcttctctgtttttgccttcctggtgtcctctcctttaccatatggtgtgatcaccctctaggggtcaaatgcctcttcgcatccacacgaacattcagactcacttcaagccaaggaaaatctctaatgctgtagatgtttacctcttcagccctctcacagagggcaaagaggaagcctgtgggagggccacagagcaacacagtggctgctggaaatattttcctgactcaaaagaaggcaacttaacgagtgcaggagtaacccaagcgctcgcctactttcccrgacccactcctgctgtccagagtcactttcaaatacacctggggaaatgggctttgtcatagtctcaccctgctctctgcttctacatctgataacctccttcctattgctcttactccttccttcattcctcacaaagttcaatacaagagaataggatgtaaggtttttggggtagctgagaggaactatagcaccagacaggaaataattccaagttcacttctgggcattactaaagaaagaacccaggggccatctgacaccatagtgga

SEQ ID NO: 504841 - DNA, 550 bp, Homo sapiens
acttagtgcggttttcttctctgtttttgccttcctggtgtcctctcctttaccatatggtgtgatcaccctctaggggtcaaatgcctcttcgcatccacacgaacattcagactcacttcaagccaaggaaaatctctaatgctgtagatgtttacctcttcagccctctcacagagggcaaagaggaagcctgtgggagggccacagagcaacacagtggctgctggaaatattttcctgactcaaaagaaggcaacttaacgagtgcaggagtaacccaagcgctcgcctactttcccggacccactcctgctgtccagagtcactttcaaatacacctggggaaatgggctttgtcatagtctcaccctgctctctgcttctacatctgataacctccttcctattgctcttactccttccttcatycctcacaaagttcaatacaagagaataggatgtaaggtttttggggtagctgagaggaactatagcaccagacaggaaataattccaagttcacttctgggcattactaaagaaagaa

SEQ ID NO: 504842 - DNA, 650 bp, Homo sapiens
ttcaaagcagggtcactaccttcatcaaagacactgctctgacagtgaggccagatccccaccatcaccatagtgggccatctcctctcctaacctcccctctcatatttcacaggctgggagcaagaccaattttggggaaaatgctgtattatgaagtgatataaggtgctaaaatgtttagaaaagtttttggtcacacattatacatgttctccacctaattcaagtttggtaaactttgccataacactcttggccatgtataagaattaaaaaaaaaaaaagtcagtaaygattaaactcaaaccagaactggactcactggtttgccttgccaggtcccttcattgaggaagatgcctgtaacaaactgtagagccaggatagcaaagtcctaggattcagcactcgggcttagtaccaggacccaatccgaattctgcaaacagcgtcatgatattccctgggatgaataaggaccccagggctctgcctctgtcaattgaactgaaaagaaagttctagggaagaatgagctgtcatgaatctaagcagccattggctcttggcacttgtgctggaaacagaagttggctctaagtcaaagctataaaaggggttgtgtgtggaatacgtgtagctaagca

SEQ ID NO: 504843 - DNA, 604 bp, Homo sapiens
gattcagaagcagttgatctgagtctctggatttttatactccctgaaccagtctcctcagaccacctcagagctcagtgagcagaccagcagggcagcgtccactcactgaggcctgagatctagctccatgtggcccttcctgcaagcattagcctgagagcacccttcttcagaggtctgacatccagcttctctgggccctcctgccagctcctagttgctgaaaattctaccacttccctgggcccccatgtcctaagagtgggagctgcttcctgcagttactacctttatgtcatcttggtgtttccttttccacttctcagtccctccatcctggtttaaccagttctctacattaaataatttctggtaaaataacgaatttctgattgatgcaccgatatctggtgaaatctggtttctgattgatrcactgatatcttgtcccagtttgaggaatttgaaacagaactacaagtgtccttctccctcagattcgcaacttagtggggaaataatagaaaagcacaaatatgtataatacagacagaaatttattggcaccataaaaaacatacaaagaaagaacttgagaact

SEQ ID NO: 504844 - DNA, 544 bp, Homo sapiens
gttgccatctagtggccactcaacgtacacatcttcagaggactctagagcctggcttgggacatgtaagccaccaatgtgacctcagaaagcagtcacatcttcaactcaagtcttcccacatgtttctgtgtaccatgtataaaaaaatgtgtagaagtcacagtgacagtgccacgcttctaaggaacaccatttcccaacacaaaaaaatgcacacaatgtaagataatttctttttgagtgtgctgctctaacagatttgtaaggacagaaatcaacacagtaatcatcgaagtttataaaatcagaggtagctttcccctattacccaggaaaaggccccygccccctcacttagtatgtggccagcccatcatcagtttattgcagttaaataacaaatggcaccggttttttttttttttttttttttttttttaagtttaagcaccacaattagcttaattcatcagaccaaaacaggagctgtgtcttctctggcaggggaatgatctcaggagtgcaaggatagatgttccct

SEQ ID NO: 504845 - DNA, 544 bp, Homo sapiens
gttgccatctagtggccactcaacgtacacatcttcagaggactctagagcctggcttgggacatgtaagccaccaatgtgacctcagaaagcagtcacatcttcaactcaagtcttcccacatgtttctgtgtaccatgtataaaaaaatgtgtagaagtcacagtgacagtgccacgcttctaaggaacaccatttcccaacacaaaaaaatgcacacaatgtaagataatttctttttgagtgtgctgctctaacagatttgtaaggacagaaatcaacacagtaatcatcgaagtttataaaatcagaggtagctttcccctattacccaggaaaaggcccccgccccytcacttagtatgtggccagcccatcatcagtttattgcagttaaataacaaatggcaccggttttttttttttttttttttttttttttaagtttaagcaccacaattagcttaattcatcagaccaaaacaggagctgtgtcttctctggcaggggaatgatctcaggagtgcaaggatagatgttccct

SEQ ID NO: 504846 - DNA, 687 bp, Homo sapiens
ttgaatattcacgaattgtgtggctagaatggagtaggcaaggataatggaatgggatgacttaggtcagatcacgtagagccttgtgaggactagaattttttttcttttatgctgcaatagcaaatacaacatctcagtgattcaagtaaaaggttgtaatgcatcctttgtgggttggaatgggtctctgctccacatcgttgacattctcatccctagtctatctgaaacccatggraaagagggcatgtgtttctagaaggaaggaaacaaggcaaatctaaagagtggctcccaaccacagtgcagccttggctttaacaatttttgttttcttttcccatatcacgtggtacaattgacttttcaggaggctgagccatgtgacccatggcttgaaacacccttaagcattccctgatgaatcccagttagagaggcagatccctatacctcagtcgtgttcttgttctgttccagagacatttagatgagtgccaaggttagatggtaacctttaattttgtccaattttgttttgcttttttggcaataacatggtcactattttgccctttccttctgccgcctttacaggtttatttcatcattttcatcgtcacttgaaaagcatttgttaagagcataatactgtttaaaacttttatatctgagagaattgtt

SEQ ID NO: 504847 - DNA, 687 bp, Homo sapiens
ttgaatattcacgaattgtgtggctagaatggagtaggcaaggataatggaatgggatgacttaggtcagatcacgtagagccttgtgaggactagaattttttttcttttatgctgcaatagcaaatacaacatctcagtgattcaagtaaaaggttgtaatgcatcctttgtgggttggaatgggtctctgctccacatcgttgacattctcatccctagtctatctgaaacccatggaaaagagggcatgtgtttctagaaggaaggaaacaaggcaaatctaaagagtggctcccaaccacagtgcagccttggctttaacaatttttgttttcttttcccatatcacgtggtacaattgacttttcaggaggctgagccatgtgacccatggcttgaaacacccttaagcattccctgrtgaatcccagttagagaggcagatccctatacctcagtcgtgttcttgttctgttccagagacatttagatgagtgccaaggttagatggtaacctttaattttgtccaattttgttttgcttttttggcaataacatggtcactattttgccctttccttctgccgcctttacaggtttatttcatcattttcatcgtcacttgaaaagcatttgttaagagcataatactgtttaaaacttttatatctgagagaattgtt

SEQ ID NO: 504848 - DNA, 558 bp, Homo sapiens
tgcagtcaacattatgaacatcagttgctggtatatgagtcgcagtgccattcttgcattactataaagaaatacctgagactgggtaatttataaaagaaaagaggtttaattgactcacggttctgcaggctttacaggaagtatggtgctggcatctgcttggcttctagagagtcttacaatcgtggaggaaggtgaatggagagcaggcacaccacatggcgaaagcaggagcgagagagagaaagggtgagaggaggtgccacacacttttaaatgactgaaccccataagaactcactcactgtctcaaagacagcactaagccatgagggatccgcccccatgatccaaacacctctcaccaggccccacctctggcactgagaattacagttcaacataagacttaggtggggacatatccaaactatatcaccatcataggctaaaagatgtaccaggccacctgcctcaattacagaggaagctctgaccttgggatcattgatgyaaggcgagaattgaacctaggaaaagttagagactatttta

SEQ ID NO: 504849 - DNA, 569 bp, Homo sapiens
ggccccactgacatctcccccagaggcctcacgttacaagccaagagaacccaaggccagagaggggaagtcattcatccaaggttactyggcaggtcagacagggctgggatttgaacccacatctgcctggttcctaggtcccatttctgcattaatatggagggggcttcattcaaagctgagccccctggatgggtgtggtggttcacacctgtaatcccagcactttgggaggccgtggtgggcggatcacctgaggtcaggagttcgagaccagcctggccaacatggtgaaaccctgcctgtactaaaaatgcaaaattagccaggtgtggtggtgggcgcctataattccagctacttgggaacttgggaggctaaggcaggagaatcgattgaacccgggaagtggaggttgcagtgagtcaagatcgcaccattgcactccagcctgggcaacaagaatgaaactctgtgtcaaaaaaaaaaaaaaaaaaaaaaaagctgagcctcctagattcaggcagtgatgtttccagaagatgaaatatcaggacaaccaggca

SEQ ID NO: 504850 - DNA, 569 bp, Homo sapiens
ggccccactgacatctcccccagaggcctcacgttacaagccaagagaacccaaggccagagaggggaagtcattcatccaaggttacttggcaggtcagacagggctgggatttgaacccacatctgcctggttcctaggtcccatttctgcattaatatggagggggcttcattcaaagctgagccccctggatgggtgtggtggttcacacctgtaatcccagcactttgggaggccgtggtgggcggatcacctgaggtcaggagttcragaccagcctggccaacatggtgaaaccctgcctgtactaaaaatgcaaaattagccaggtgtggtggtgggcgcctataattccagctacttgggaacttgggaggctaaggcaggagaatcgattgaacccgggaagtggaggttgcagtgagtcaagatcgcaccattgcactccagcctgggcaacaagaatgaaactctgtgtcaaaaaaaaaaaaaaaaaaaaaaaagctgagcctcctagattcaggcagtgatgtttccagaagatgaaatatcaggacaaccaggca

SEQ ID NO: 504851 - DNA, 568 bp, Homo sapiens
ggtttcacaagagttggaaattatttgtamgcacgcttcatgagtttagcactttgcaagccattttcagtaaatcaacatggtgtttaactttttctgtcttacagttgacaaacactgacagtgaagctccatgagtgtaaactgtttataaattgataagcttgtattgaataggaccagataaccaatcagatttgaagcaattttcagatgattctgaataaaacttggagttaataatgtttattttgggaatagaagtatacttgatttttgtttattttttggtcacctattgtgtatgaaaattgatattttagggacaattattacataaagtatttgtaaattttttaacatttttatttcctattacctttgcttctactttgtttattcttgtgggttttgtgcatttttattctttaatatattattagttgattaaagatataagtggctataaacaattctattccacatagtaaacatatttttctatagttcattggattctatagaagaagtagggatagatagatagattctatagagaataatcctt

SEQ ID NO: 504852 - DNA, 593 bp, Homo sapiens
tgttgaaagactgaatgcttttcccagaacaagacaagattctctccgtttaacacatttgttcaacattctactggaaatratagccagtacaattaggcaaagaaaggaaaaaaatgagaaataaaatcgggacagattagaaaggaaaaggtaaattgtctttacttgtggacaatataatcttgtatacagaaaaaatacacgcatttacatacatgctcacacacatactcaaaaactatgaactccagcagtctcagtcaaaaatcaaatataaattttaaatgaagctaagaaaattcccatttaaagcagcactaaaataaaatatttagaaattcaaccgtaattgtacaagtattgtattttgaaaactacaaatagtgctcaaagaaaatggtgcaacagcaaatataaataaactgtaaaacttccatataaaagtataaaaagacttggcattcttaggacagcaataattcctaaattaatatataaattacaatgtgatccttgttccagctgttgctgacatattctgcagaagttggcaaacttgtgctaaaatcacacaaaaatccaaaggaccc

SEQ ID NO: 504853 - DNA, 608 bp, Homo sapiens
gaggagaaaattttttgaggtgctggatacgtttatggcacaaattgtagtgatggttttatgggtgtgtacttatctccaaactcactaagttgtgtacattaaatatgtacaactttttgtttgtcaattacacttcagtaaagtgttttaaaaacatacacaggactccacatacacacacaaggtcaatgaatatataaaatggaacaaattaatgataaaaaaagcacaaatactcaaaaatgtatttttgcttatcagatatataatatccggtgaggacaggagggcaaagatctctcgtgtgcattataggtattttataaacatgggagcaatattctagtgacacaactttccctccaacggaaggtcatcagagatcaggagatttggcaatgcccagatgtcttaggaacgtgggctatcaacacagtgtgaatatgtgtactagagggcaacctccgcagatgacaaattgagatagtatttagttggagtgaattatsaattgaagggaagaaaaaacagtatattttcctcaccgatgcattccaatgttcatggatgagacccctataacataagacagattaacaaaagaa

SEQ ID NO: 504854 - DNA, 567 bp, Homo sapiens
aattaccgatgcttacatgctattcgggtgtagtaccagaaatttagagcactcattcagtactatattagataagaagaatacaaaaaaattgaaaggtgacacttttgytcaaagcgattacactaaattataagatagcaaacatgcaaaagagactttgaacttgctcaggaagtgttttggaaaaaacacattaataaaacattcctgatagtaaaatttttgaagaaaaacatattttggctggaaggactttttatatccactgaaaatattttattactgtgatcctaattataaactgtatatgttgggtatgaaagttattaattatagttatttggtagttcaattcaaaattttagagctttatagctggaagaaatcttagcaatcttttgaaaaccatgtatattcacatcagtattactaaacagaaagcctcaagtagggcaaatctattcaagagctttcttccctccccctctctttataacaatccaactgtgttaaatcatgcaaagagaaaacgaacaaataattcactccaagtctggaaatcaa

SEQ ID NO: 504855 - DNA, 567 bp, Homo sapiens
aattaccgatgcttacatgctattcgggtgtagtaccagaaatttagagcactcattcagtactatattagataagaagaatacaaaaaaattgaaaggtgacacttttgttcaaagcrattacactaaattataagatagcaaacatgcaaaagagactttgaacttgctcaggaagtgttttggaaaaaacacattaataaaacattcctgatagtaaaatttttgaagaaaaacatattttggctggaaggactttttatatccactgaaaatattttattactgtgatcctaattataaactgtatatgttgggtatgaaagttattaattatagttatttggtagttcaattcaaaattttagagctttatagctggaagaaatcttagcaatcttttgaaaaccatgtatattcacatcagtattactaaacagaaagcctcaagtagggcaaatctattcaagagctttcttccctccccctctctttataacaatccaactgtgttaaatcatgcaaagagaaaacgaacaaataattcactccaagtctggaaatcaa

SEQ ID NO: 504856 - DNA, 624 bp, Homo sapiens
ggtgtaggataattggttagtgttggttaccaaatcttttggtagagagaagtatattataccagagtacagagataagtagtttttttttaatatatttaagaagttaaacttatagagacaaaaagtagaatggtggttgccagggtctgggagaagaggtgaatggagaattgctgtttaatagaagcagagttttagttttacaagataaaaggagttatggaaataatgcttgtgatggtcgtgtaacattatggatgtatttaatactatgaagtgtacatttaaaaatggtgaagatggtatattttactatgtgtattttrtcacaataaaaatgtggaaaaataaataaataacaacaaaaacatagtcaacattttacactgaaacagacatcagcttgttttttcaaaaaatttgagatttggtgaaaaatacttattttggtaaagacccaagatcatatataaaaattcttttgttacaaattaaatttatattttctgttgggtaattaaggaatataaactaaaagtcttataacttataaacactttataatagtaattctactgcttggtacaaatcctagggaaataattagaaacaagatatatg

SEQ ID NO: 504857 - DNA, 668 bp, Homo sapiens
ctggtgtaggataattggttagtgttggttaccaaatcttttggtagagagaagtatattataccagagtacagagataagtagtttttttttaatatatttaagaagttaaacttatagagacaaaaagtagaatggtggttgccagggtctgggagaagaggtgaatggagaattgctgtttaatagaagcagagttttagttttacaagataaaaggagttatggaaataatgcttgtgatggtcgtgtaacattatggatgtatttaatactatgaagtgtacatttaaaaatggtgaagatggtatattttactatgtgtattttgtcacaataaaaatgtggaaaaataaataaataacaacaaaaacatagtcaacattttacactgaaayagacatcagcttgttttttcaaaaaatttgagatttggtgaaaaatacttattttggtaaagacccaagatcatatataaaaattcttttgttacaaattaaatttatattttctgttgggtaattaaggaatataaactaaaagtcttataacttataaacactttataatagtaattctactgcttggtacaaatcctagggaaataattagaaacaagatatatggtgcttgcttactgatatatcatttaaaatcgctttatttca

SEQ ID NO: 504858 - DNA, 475 bp, Homo sapiens
tggaggccagtcctgctaccaaatgtctaccttattattagacactaataattaacttggaaagagtaaaaggacccataggtttttgttttttwaaaaaaaacttttccagagtctgctattctccaccagtaatataactatctcatcaagcaagaaagtacagaatgcctactgtatgctaagtattacgccacatagtaaaagaacacatatttatgcaacttttttaggtcacaagagtaccatttagtaaagtgatctgaagaaaacaataagcaaatacatgatttccttgagcactgaattactttgagtccagactcaaagattaaatatatgacacagtccaagtgatttttagtactgtacagttaaagaatttcactatacaccagtcagaaatacttctttttattatctagtgatgatttccctaatgcttcatgaagaattagtctttaataaatagata

SEQ ID NO: 504859 - DNA, 642 bp, Homo sapiens
agacattatacaaaaattgctttgtctacacctgaaaaagtcatgctgaaattttttgcttccactgttcaatcttatgtaaaattaacactccactatatatttttttgtattttatagttacaaatgtatatgtacatctgtgagtttatgatagtttcaatgtagtggaggccagtcctgctaccaaatgtctaccttattattagacactaataattaacttggaaagagtaaaaggacccataggtttttgttttttaaaaaaaaacttttccagagtctgytattctccaccagtaatataactatctcatcaagcaagaaagtacagaatgcctactgtatgctaagtattacgccacatagtaaaagaacacatatttatgcaacttttttaggtcacaagagtaccatttagtaaagtgatctgaagaaaacaataagcaaatacatgatttccttgagcactgaattactttgagtccagactcaaagattaaatatatgacacagtccaagtgatttttagtactgtacagttaaagaatttcactatacaccagtcagaaatacttctttttattatctagtgatgatttccctaatgcttcatgaagaattagtctttaataaatagat

SEQ ID NO: 504860 - DNA, 642 bp, Homo sapiens
agacattatacaaaaattgctttgtctacacctgaaaaagtcatgctgaaattttttgcttccactgttcaatcttatgtaaaattaacactccactatatatttttttgtattttatagttacaaatgtatatgtacatctgtgagtttatgatagtttcaatgtagtggaggccagtcctgctaccaaatgtctaccttattattagacactaataattaacttggaaagagtaaaaggacccataggtttttgttttttaaaaaaaaacttttccagagtctgctattctccaccagtaatataactatctcatcaagcaagaaagtacagaatgcctactgtatgctaagtattacgccacatagtaaaagaacacatatttatgcaacttttttaggtcacaagagtaccatttagtaaagtgatctgaagaaaacaataagcaaatacatgattkccttgagcactgaattactttgagtccagactcaaagattaaatatatgacacagtccaagtgatttttagtactgtacagttaaagaatttcactatacaccagtcagaaatacttctttttattatctagtgatgatttccctaatgcttcatgaagaattagtctttaataaatagat

SEQ ID NO: 504861 - DNA, 551 bp, Homo sapiens
aattagcactttctctgtgcagcatcctttctccccttgtatgcagtgccgagctcttgataacatacagtaaatagttaatacttagatcagaatctgagtgtcttagaaatggaatgagtagaagtaatcttgtttcactcccctcaatttacagatgtggatggtgtggctcagaaatattgagatatgaccaaactgcagggctattggtggcagaaataatcagctctaaatccaggtctacagggcttgcatctatttcgtactctatctctatggctctagaaatgccaatatctatctctctctctctgtwgtttttaaggttagatcgtagcatatcaatttcaaagagcacagtagttaaaaacatagcatctagtacaggctgtggattatgggcgtacctattaattctaataattttactttccagaaaagatcctttgctttgggcagctacctctccaacagtggcttctgtttggcctatgtgcttctgatctgatatgtaggcagtagttccctcagactggagaagcagttgt

SEQ ID NO: 504862 - DNA, 491 bp, Homo sapiens
tgtgcagtatctattttggtcccctctgggaacctgaggcttgacaaggtcaggaaaggccacaccatggcctgttcctgaaacaggaaccacaaatgaaaatccttgtagagagtccaggcagataacataagtgaagaaagggaggaatgagaagcagtagggaatggtggggtctgtggtgaattggagtgcatgccycattgaaagacggaggtagctgcctatcttgtatccaccaactgtctccacgtgggaacatgggcccaatgctgtcagagcttctaataaattaagagaagctaaaagccagatgctatgtcagtctcccagtttttaaatgatcgcaactgggagtcttgcaactctgtctcccaggctgtaaggcagtggcacaatcctagctcactgcagcctcgaacccctaggctccaaagatcctcctgcctcagactaccgattagctcaaactacaggcatctgtcaccatg

SEQ ID NO: 504863 - DNA, 491 bp, Homo sapiens
tgtgcagtatctattttggtcccctctgggaacctgaggcttgacaaggtcaggaaaggccacaccatggcctgttcctgaaacaggaaccacaaatgaaaatccttgtagagagtccaggcagataacataagtgaagaaagggaggaatgagaagcagtagggaatggtggggtctgtggtgaattggagtgcatgccccattgaaagacggrggtagctgcctatcttgtatccaccaactgtctccacgtgggaacatgggcccaatgctgtcagagcttctaataaattaagagaagctaaaagccagatgctatgtcagtctcccagtttttaaatgatcgcaactgggagtcttgcaactctgtctcccaggctgtaaggcagtggcacaatcctagctcactgcagcctcgaacccctaggctccaaagatcctcctgcctcagactaccgattagctcaaactacaggcatctgtcaccatg

SEQ ID NO: 504864 - DNA, 512 bp, Homo sapiens
tacaatgtgcagtatctattttggtcccctctgggaacctgaggcttgacaaggtcaggaaaggccacaccatggcctgttcctgaaacaggaaccacaaatgaaaatccttgtagagagtccaggcagataacataagtgaagaaagggaggaatgagaagcagtagggaatggtggggtctgtggtgaattggagtgcatgccccattgaaagacggaggtagctgcctatcttgtatccaccaactgtctccacgtgggaacatgggcccaatgctgtcagagcttctaataaattaagagaagctaaaagccagatgctatgtcagtctcccagtttttaaatgatcgcaactgggagtcttgcaactctgtctcccaggctgtaaggcagtggcacaatcctagctcactgcagcctcgaacccctaggctccaaagatcctcctgcctcagactaccgattagctcraactacaggcatctgtcaccatgcgtggctagttttcac

SEQ ID NO: 504865 - DNA, 465 bp, Homo sapiens
ttgcccaggctggcctcccaaagtgctaggattacaggtgtgagccactgcacacggcctactttgtaataataacaaacaatacagccgctactttttggtagtttcaaaccatgatcccagaattttttgattcatcaaaaggtagaacctatgtcatctaccgttgaatccagactgtgcgattgcttgaccaatagaatatagaagaaacgtyatgcgacatccaaggctacatcataaaatgtgacagagcttccactgggttctccttgtcttagagcccagccaccatacgatgaggaagcccaagtagctgaagagaagagaggcccaaacaaaggaaccaagtcccctggaccacagcctagctgagctcccagccaaccagaaagcgccaacttagcaaccgctagaggagccatctcagaaatgaattctgcagccccctggtgagctccagct

SEQ ID NO: 504866 - DNA, 465 bp, Homo sapiens
ttgcccaggctggcctcccaaagtgctaggattacaggtgtgagccactgcacacggcctactttgtaataataacaaacaatacagccgctactttttggtagtttcaaaccatgatcccagaattttttgattcatcaaaaggtagaacctatgtcatctaccgttgaatccagactgtgcgattgcttgaccaatagaatatagaagaaacgtcatgcgacatccaaggctacatcataaaatgtgacagagcttccactgggttctccttgtcttagagcccagccaccatacgatgaggaagcccaagtagctgaagagargagaggcccaaacaaaggaaccaagtcccctggaccacagcctagctgagctcccagccaaccagaaagcgccaacttagcaaccgctagaggagccatctcagaaatgaattctgcagccccctggtgagctccagct

SEQ ID NO: 504867 - DNA, 585 bp, Homo sapiens
gatgccacgtggagcaggaacgaactgtcccctcaacatcctgcccaaattgtggatgtgtgagcaaaataaatgactgtcatgttttaagctactacatgttgggtggtttgttgcacagccatagacaactggatgacaaacacatatctgacgctttatccgtcattgccatgctaagctgcagatatttttgtaatctacacgtttagaccttttccagcttttagagctcacacttcccttcagtacacctgcaagctccctgaattcattttcatgtaatcctccacttttttccttcagccggttcatgttaggtttctctcatagcccctaaacacagtgctcaaataccaataacctggatcccatcttgcrgctctgcaggaagctgtttttgcacaaggttcttccacatttctgggaacccaggagatgtctacttcagctacaatctctcctgctcgtcccctgtcccctcgggagggtctggctcagaacagatttcactgtgggaaccaagccaacctgttagccactcctaccccaggacggttgaaacacagtcttgcagtaacaaga

SEQ ID NO: 504868 - DNA, 618 bp, Homo sapiens
gtggagcaggaacgaactgtcccctcaacatcctgcccaaattgtggatgtgtgagcaaaataaatgactgtcatgttttaagctactacatgttgggtggtttgttgcacagccatagacaactggatgacaaacacatatctgacgctttatccgtcattgccatgctaagctgcagatatttttgtaatctacacgtttagaccttttccagcttttagagctcacacttcccttcagtacacctgcaagctccctgaattcattttcatgtaatcctccacttttttccttcagccggttcatgttaggtttctctcatagcccctaaacacagtgctcaaataccaataacctggatcccatcttgcagctctgcaggaagctgtttttgcacaaggttcttccacatttctgggaacccaggagatgtctacttcagctacaatctctcctgctcgtcccctgtcccctcgggagggtctggctcagaacagatttcactgtgggamccaagccaacctgttagccactcctaccccaggacggttgaaacacagtcttgcagtaacaagacttacttttgaaggatggaattacaatatggaaaaaataca

SEQ ID NO: 504869 - DNA, 643 bp, Homo sapiens
taagaatggaatagtggaaaagtggaaggaaacaaggcccaccattccacaatggagccactgaatcaattaaccacatggccccctgcagagaaacaataacttccattagcatctacaccacttccagttgggttctcagtgatttgaagccaaacacaacctacctggcaacccyacaacttcacccctcaccactgtttggacactaccaaacttaggccatgatgattaaggccaggcatgagctccaccctccctgccaccctatgaggaataaagcagatatggggaaggtgaaagggcatgatttagggatccataaagccccagattggagccttagttctacaactcaataatggtgggctagagctctatgcaccccatacgctaggatggggactcatacctgcatggttgactagtgcagtcatgtctgtgcatctgagcagttattttcttctctggaccattattaaccattagagctagcatttgtccccaggtcccgggcactgtgcaagtcttcacctacattatcctactacctcataagatagtttggatgtgtgtcccctccaaacctcatgttgaaatgtgatccccaatgttggaggcggggcttggcgagaggtatttg

SEQ ID NO: 504870 - DNA, 643 bp, Homo sapiens
taagaatggaatagtggaaaagtggaaggaaacaaggcccaccattccacaatggagccactgaatcaattaaccacatggccccctgcagagaaacaataacttccattagcatctacaccacttccagttgggttctcagtgatttgaagccaaacacaacctacctggcaaccccacaacttcacccctcaccactgtttggacactaccaaacttaggccatgatgattaaggccaggcatgagctccaccctccctgccaccctatgaggaataaagcagatatggggaaggtgaaagggcatgatttagggatccataaagccccagattggagccttagttctacaactcaataatggtgggctagagctctatgcaccccatackctaggatggggactcatacctgcatggttgactagtgcagtcatgtctgtgcatctgagcagttattttcttctctggaccattattaaccattagagctagcatttgtccccaggtcccgggcactgtgcaagtcttcacctacattatcctactacctcataagatagtttggatgtgtgtcccctccaaacctcatgttgaaatgtgatccccaatgttggaggcggggcttggcgagaggtatttg

SEQ ID NO: 504871 - DNA, 599 bp, Homo sapiens
tgcttttgcacacgttatgtcatctgctccttagcactctatgaagcaggcagaacaggtcatggtatccccatttcatagataaggaaactgagacccagaaacataggatacaacagagaggaaatgatcaggtgggtgagaagctatgtttgtctggccccaaagcctgggttccccaaagccctctgcaggctgatatgagcctaaccccagcccggctcctggctctcagccatctcatcctcccagcccagctatggggagcaagatacctcctaccatgtcccttgcagccttcctccctcgcctgcaggggcttcctgcctggaaagcctgttcctttgcccttcttctccagaggattcacgtacctcagcacatgttygacgacaaagtcacagcactgcagggacacctcccctggagaggaacacgatggtagagtggaaggggcacagctttgccattagaatgcctgagttcaaatcccagctcaatcaccaactggttgggtatccttaagctcttccaaggagtgggggataatccaatccatccccacaggatcctggtggggattaaatgagatgctgtat

SEQ ID NO: 504872 - DNA, 468 bp, Homo sapiens
tcacacggcaggacagtgcttgttctgcaaagttaagtgtgtttctttttgtggaccatgagaacatctccaactgccctttttgacttggccaccagggaactcagcgccatgttctcaaatccagtttagtaactggccttctggcctgtatatctttattctaccttccatcctgctctgttctgcttttacctcttattctagattatctttctttagtcctaattttaaatttatatctataatcttgttatatatatttcttggcatctactgtaagtgggtagtgaacgaataaacaaaatgtgatgaattttagaggactaagargggcctaagtcacaccaagattcatgctggataatttgtcatcgacccagactgtggttctgcactcgccagtaaccagtttttttttttttttttttttgctttttgccaaccatacattttgctttcatggta

SEQ ID NO: 504873 - DNA, 660 bp, Homo sapiens
tccatgtgtcttttaattgtctaccattgactagtcttgtgacccttaactgtctgccactgactagctgtgtaacccctaactaactgtacctaccactgactagctttgtgacccttaactagctgtacctaccactgactagctttgtgacctttaactaaatatacctgcctctgactagatgtgtggcccttaactaactgtatctaccactaaactatccatgtgtcttaaactatccrtgtgtcttttaactgtctaccattgactagctgtgtgacccttaactgtgtctaccactaactagctgtgtaacccttaactaactgtatctaccactaactagctgtgtaacccttaaatctatcactaactgtgtgacccttaactgtgtccaccactgactacctatgtgacccttaactaacagtatctaccactgactagctgcacaacccttaactatgtcaaccactgactagctgtgtgactcttaactgtttctacaactaactgactgtgggacccttaattgtgtccaccaccgagtcggtatgtaacttgtttctaccactaactagctgtgtgaccatgatgcgagttacagaagttctcagggtctcagtttcctcccctgcagcatgcattggttaatag

SEQ ID NO: 504874 - DNA, 537 bp, Homo sapiens
tccatctaactgtaggttagggccttttaatattcctctgacagagattctttatgtaggaagggatgttaagaagaaagatgttctctaacaagaaaacatttagacaaagaggatatgacctccctcactcaatctcgcctgctttcttggcatacatgggaagagaggatgaactagaaaggaaatattatttgctgayctcctttctttgtctgaggcacattgcacaggatgtctcatttgatattcacatgcccatgcgaggtgaacaatccacaccatgctttacagaaggggaaactgaggtcaagaaacatgctcatgggccgggcgcggtggctcacgcttgtaatcccagcactttgggaggctgaggtgggcggatcatgaggttcagcattcgagaccagcctggccaacatggtgaaaccctgtctctactaaaaatacaaacattaggccaggtgtggtggcatgcgcctgtaatcccagttactcgggaagctgagacaggagaatcgcttgaacccggaa

SEQ ID NO: 504875 - DNA, 467 bp, Homo sapiens
actttgaggcagtgagtcctgtttctagtccctggggctctggttcttttctcttcctgtcttagtctgtttttgctgctgtaacaaaatacccaagactagataacttataaaggacagaaacttatttctcaccgttctggaggctgaggagtccagggtcaaggcacaggcacattttgtgtctggtaaggggctctgttccttgcttctaaggtggtaccttgtgtcctctggagggcatgaatgctgtatcctcatatgtggaagttggaagggcaaaagggcctaagttagttccctctacccctttataaggcatgaattcattccttaagggccaagccctcctgactgaatcacttcctaaaaggccycacctcttaataccactgcaatgaggattaagtttcaacatgaattttggaggagacacgttcaaaccttagcattccctttccgtaaat

SEQ ID NO: 504876 - DNA, 268 bp, Homo sapiens
ctggataaaccagtatattcgtttcttgattaatttagccagagttagatttctgggcatgcaaccaaaagctcttactaacagttaytgtggtgggatagggatgaggggaagggagattgggattgagagagagattgccctgggcctaagagctttctctccttattacatcccagtgcctgagatttaagttgctagaaggaagatgagtttatggtggaaatttgtaaccgaccattaactagaatggcgcagctaagcccct

SEQ ID NO: 504877 - DNA, 539 bp, Homo sapiens
  misc_feature (1)...(539): n = A,T,C or G
agctgcctctggggctgtagtagggtgaccagccatcctctttggtttatctaggaccgaagtggttccaggtatagggaacgctcagtgtcaaatccagtaaagtgctaaagccaacacaagtttgtcacccaaggttgtagtgagaactaaaggtgaatgaggtgacatggataaaatctagcacatcaatataagttagtgtcattactrttgctattgctattgctttttgtttgtttgtttagagatagagtttcactcctgtcacccaggctggagtacaatggagcgctctcggctcactgcaacctccgcctcctggattcaagtgtttctccatactcagtctcctgagtagctggcattacaggcacccaccaccacgcctggcaatttttgtatttttagtaaaaacggggttttgccatgttggccangctggcctttgactcctgacctcaagtgatccacccacctcggcctcccaaagtgctgagaattacagcgtgagccaccatacccggctgctattgtta

SEQ ID NO: 504878 - DNA, 492 bp, Homo sapiens
ggcagttcttctgctcacacagtatcatctgaggtcactcagtagtattcagagggcttcggggctgctctgaagggtctagtgcagttttagtgatgtgccaggcaccttggtgggtgtattagtccattttcatgctcttaataaagacatacctgagactgggtcatttttacaggaaagaggtttaatggactcagagttccacatggctggggagcctcgcaatcatggtggaaggcaaggaggagcaagtcacgtcttacatggatggcagcaggcaaaaagagagcttgtgcagggaaactccctgttataaaaccatcagatctcatgagacttactatcatgagaatagcatgagaaagacccacccccatgattcaattacctcccaccrggtccctctcacaacatgtgagaattcaagatgagatttggatggggacacagccaaatcatatcagtgggacaggatggaagctgggctca

SEQ ID NO: 504879 - DNA, 492 bp, Homo sapiens
ggcagttcttctgctcacacagtatcatctgaggtcactcagtagtattcagagggcttcggggctgctctgaagggtctagtgcagttttagtgatgtgccaggcaccttggtgggtgtattagtccattttcatgctcttaataaagacatacctgagactgggtcatttttacaggaaagaggtttaatggactcagagttccacatggctggggagcctcgcaatcatggtggaaggcaaggaggagcaagtcacgtcttacatggatggcagcaggcaaaaagagagcttgtgcagggaaactccctgttataaaaccatcagatctcatgagacttactatcatgagaatagcatgagaaagacccacccccatgattcaattacctcccaccgggtccctctcacaacatgtgagaattcaagatgagatttggatggggacacagccaaaycatatcagtgggacaggatggaagctgggctca

SEQ ID NO: 504880 - DNA, 504 bp, Homo sapiens
gcatgtgtgaagtgcccagcactgtgtctagcatatgctaggtacttggcatgtgtttctttctttccctcccttgttcaaggccacatagtccatgactggcagagctagaagccttctcatttacccacaatcaaagaacttctacaaaatagaaacagccccctgccccctcctgcccccgcccacctgctaccttaataggttrtttcccagttattcaatgcaagagacttagcccagctaaagttattcaaaatcgaccttgagatcaggaacaaattggctacagcagtcagcgattggcaaatgcaatctaaatgccccaggcggcattagagccttccacgttgacaggaagagtcaatgtgcatcttggaaaaatctgagaaaaaaaaattaaaggtcaccgcgtttgtaggcagaatgggttttcttgagaccattacaaacagactgcctaaattgcaaagattccaggcttgacagctcccggaggactcc

SEQ ID NO: 504881 - DNA, 504 bp, Homo sapiens
gcatgtgtgaagtgcccagcactgtgtctagcatatgctaggtacttggcatgtgtttctttctttccctcccttgttcaaggccacatagtccatgactggcagagctagaagccttctcatttacccacaatcaaagaacttctacaaaatagaaacagccccctgccccctcctgcccccgcccacctgctaccttaataggttgtttcccagttattcaatgcaagagacttagcccagctaaagttattcaaaatcgaccttgagatcaggaacaaattggctacagcagtcagcgattggcaaatgcaatctaaatgccccaggcggcattagagccttccacgttgacaggaagagtcaatgtgcatcttggaaaaatctgagaaaaaaaaattaaaggtcaccgcrtttgtaggcagaatgggttttcttgagaccattacaaacagactgcctaaattgcaaagattccaggcttgacagctcccggaggactcc

SEQ ID NO: 504882 - DNA, 633 bp, Homo sapiens
ctggcatgtgtgaagtgcccagcactgtgtctagcatatgctaggtacttggcatgtgtttctttctttccctcccttgttcaaggccacatagtccatgactggcagagctagaagccttctcatttacccacaatcaaagaacttctacaaaatagaaacagccccctgccccctcctgcccccgcccacctgctaccttaataggttgtttcccagttattcaatgcaagagacttagcccagctaaagttattcaaaatcgaccttgagatcaggaacaaattggctacagcagtcagcgattggcaaatgcaatctaaatgccccaggcggcattagagccttccacgttgacaggaagagtcaatgtgcatcttggaaaaatctgagaaaaaaaaattaaaggtcaccgcgtttgtaggcagaatgggttttcttgagaccattacaaacagactgcctaaattgcaaagattccaggcttgacagctcccggaggactccagatggaaagaacaccacccccatctcttatacatccaggctgctgtctgtggatgtccgaaggttttcccaccacccatgctattrttgaaattccacaatcaacctgcaatgccccagtgaacc

SEQ ID NO: 504883 - DNA, 568 bp, Homo sapiens
tgcaaccttgggcgagacacttaaccccaggagcttcccctcccgtggttgtgatgattaaatgagataaccagataaccccttagatggcaaacactcagcacagtgcctgatgctcatcattgtggcttttattacggactcattttataaacgaggacatcaaggcccagacagcttaagccatttgctcaaggtcagaaggtcactctaaccttgccatcaaaccttgggattttctttttcctccatcacaccatccccaactgatctactcctcaagtgaatttcagaaatcctccaaagatgaattttgatctacctagagctgtgctgacttaactggagcatagcacatattttcaaaacaggaggaaacttgaccacagctttgagccatgtggatgataaagtcatcgtaggtgaacttgagactgggattcggcccttgtgtcaattgtgattagcacagagtgaagcagcrtcattctctcgggggtaatacctgagattcgttgcctcataccaaaaacattaaggacacagacacacacaaagagtgagttta

SEQ ID NO: 504884 - DNA, 452 bp, Homo sapiens
gcaggactggtgcgccaggccgggccagcgggtcctcctgggctgcgtacccctctaggcccccgccgctgctccgtcgcgcccccgagcggcgaggagcgacttcttgggggtcaggaacggtggaggagccgggaggcgctgctgggatgacacctctctccctgccaactctagwagggcttggggggctttaaagaggcgagaccgcacccatgtgttccagaggtaggagaggctgcagctcgtagtgtgtattctacgccctccccaaatccagagatctgagcacgctccagggaggtcttttaggtgaagatgtggggctggacatggggactccgaagacaccacagggcaaagctctccctccaggccagcttcagttttggggaagggagcactgcccctcccaagctttgagggtgtgtgtgtgtgtgtgtgtgtgtgtg

SEQ ID NO: 504885 - DNA, 709 bp, Homo sapiens
tatacagacagacaagccaagcgtctcagtgcagaccgctcatagtcttaagatcaagcaagtttttcccaatagcaaagtcgtgcactttgaagatttctcttttgatgacctgatcacaaacttctctgaactgtctttcctcaaaatgcaatgaatttaagaaatttgcagtgaataaataagaaccaaagtttttttgttgatcttatgaatgttttccaaaatgtgttaccactggtggcacacaagataattctcaaaggcccatggcataaaaacagaaaagaataattatgtcttcttcttgattggtattgggggaaaaaatgtaagtagcacacaaacccatggtttcacagatacttctgcttgggttgaaacaaaagttgatcctgtaaactttaaaacattttaagatactcaaagaatttagttaataagcacagtggtccttgcttttggcaaaaatctgagtactagagtgcctgcttttggggagatggytttataagagggcctgggatggacgtgtcacactttttggaaacatgactcatcctgaaatatctgagagcttccagaccaagcccttcttttgcaaagaggcccctatgttcagcttcagaccgagacctgcaacttagcttccaggggagtcccttcatctttaatgagggtcatgattccactctgatgacctttgcca

SEQ ID NO: 504886 - DNA, 605 bp, Homo sapiens
ctgagaagtgaaaatatggggctgcttgttcaaatacgaagaactttaaagccgggcgcagtggctcccacctgcaatctcaatgcttttgggagccaaggtgggaggatcacatgagcccaggagttcaaaaccagcatargcaacagaccccccgccccataaaagaatgaatgaatggatggatgaatgaacggatacatacattttaggagcgttcttctccatgactacgaaatatttatttcttgtaagaatgttctactttatgccggacacagtgagtggctcacacctgcaattccagcagtttggcaggccgaggcaggaggatcgcttgaggccaggagttctagaccagtgtaggcaacacagcgagactctgtctctacaagaaatacatataaaataatttaaaatggcactagcagatcattctcccaagcatgggggccttggatgcatggaaatgtgtgcgactacccaggctgcagggctgcaaagctggccccattaaagaagcagagggagattgtccagtgataaattgtccatttatcagttgcttagtgtaaaaaccatacattattatcttgatgagaaat

SEQ ID NO: 504887 - DNA, 605 bp, Homo sapiens
ctgagaagtgaaaatatggggctgcttgttcaaatacgaagaactttaaagccgggcgcagtggctcccacctgcaatctcaatgcttttgggagccaaggtgggaggatcacatgagcccaggagttcaaaaccagcataagcaacagaccccccgccccataaaagaatgaatgaatggatggatgaatgaacggatacatacattttaggagcgttcttctccatgactacgaaatatttatttcttgtaagaatgttctactttatgccggacacagtgagtggctcacacctgcaattccagcagtttggsaggccgaggcaggaggatcgcttgaggccaggagttctagaccagtgtaggcaacacagcgagactctgtctctacaagaaatacatataaaataatttaaaatggcactagcagatcattctcccaagcatgggggccttggatgcatggaaatgtgtgcgactacccaggctgcagggctgcaaagctggccccattaaagaagcagagggagattgtccagtgataaattgtccatttatcagttgcttagtgtaaaaaccatacattattatcttgatgagaaat

SEQ ID NO: 504888 - DNA, 441 bp, Homo sapiens
ccccattatccccccacggaatggatcaaggctcaygggctcatacagggtccactccttgagacccaggacacactaacaatgagccaggagctgtatggctgcagaactcagtctgagaggtcctggctgtgattctgtgcatcaccaattagaaggacccaatgaaccagcttggagattcttctaattctttcaaaaaagacaaattcccctttgtttaggcctgcgtcattcttagctgccaccatatgctgctgcctccaaaatgatgcattcccttttttttttttttttaatagatgcatttctgaccctggggggaaaaagggctcatgtaccacgctgaatgccctgttactttaacatcagcaggaatgcccaaatgccaacttcaccagggccattaactccagggtgataatagcttcatatgttgtc

SEQ ID NO: 504889 - DNA, 576 bp, Homo sapiens
ggatgacacaaatgcatatggacatgtractaaaactttctagaaaataataattaaaaagaaaaaaggttttaacccattctttcccaaaggatggaattaaaatgttataaggcatgattttggacagtgcattgatagggcattaagcaacattgaaccacatggtgaaaaagttcccattccaatcctactgagttcaccaaggaaaagacccagtttggtgctagtcagtctccaatacttgctaatttctttttgacaaaaagagaaaacagatctttggttaaaatgtatttgtagctagaatttaatagcatcattctgagtttattgtatttatttttaacgttctttctttttataaggaagaaacaccacgtatagcagtgatataaagtattttaaaaccaagttattgaagctttaaaagtgaacaatttagggaaaatgttatgtaagtaaaaggacaggtggtcctcagtgtcagtagaaatcctcagggtggttgtcaaatgctgatgtctgggaagtactgctttaagctctgggaatggtttcagatggacatttcag

SEQ ID NO: 504890 - DNA, 576 bp, Homo sapiens
ggatgacacaaatgcatatggacatgtaactaaaactttctagaaaataataattaaaaagaaaaaaggttttaacccattctttcccaaaggatggaattaaaatgttataaggcatgattttggacagtgcattgatagggcattaagcaacattgaaccacatggtgaaaaagttcccattccaatcctactgagttcaycaaggaaaagacccagtttggtgctagtcagtctccaatacttgctaatttctttttgacaaaaagagaaaacagatctttggttaaaatgtatttgtagctagaatttaatagcatcattctgagtttattgtatttatttttaacgttctttctttttataaggaagaaacaccacgtatagcagtgatataaagtattttaaaaccaagttattgaagctttaaaagtgaacaatttagggaaaatgttatgtaagtaaaaggacaggtggtcctcagtgtcagtagaaatcctcagggtggttgtcaaatgctgatgtctgggaagtactgctttaagctctgggaatggtttcagatggacatttcag

SEQ ID NO: 504891 - DNA, 574 bp, Homo sapiens
agctcagcccaaattccccatctatagaatcatgaacaaaatcagtgttttctattttaagccattacattctggggtggtttgttacccagcaagagctaactgatacagtggagatactgctgtattagatttagagttcctcaagtacagaaactatgactcactgaccttccccagtgcccaaggttgctcagcaaatacttgttaaatgtttgctagtttgtgcagctttcacagagcagctaataactgccatcctgccaatgactgctgcctgaccctgtcaattaaagagctcactgctggctgctgtcatccaaggagctcctataattatgctacccagtaaaaccacactgcagcccagagagggttaatgatatacctacaggcacacagcatgtcagcatgagagtgaggttgatgtggattacgttgctcggggtgaggcaggtgtcaamtgcagggtgttccccagcctcacacccattagtttaggaatattctttccttcacagagcaccttgtcttggtgactttcaagtaatccccaggcccatcagtcactctt

SEQ ID NO: 504892 - DNA, 608 bp, Homo sapiens
tggaaataaaccaccagggcagcctccaggagggaaggaaatgcaaacaggcagctcggggcatgtggacaagtaggagacatttcaggcactgtcccagcaacgcttatgtcgacatttccccaaatctgccattcctgtttagcttactcactttttaaacttatatttttataaaaggcaaccttatatcgcaaatgagatggaaagtcagcatcacctgccataaatagaaggtgctggaaaaaataaacacaatgaaaacaaaacattgttattaaattccagctccaagctcttgctgctcaaaagctccaagtccaagactgggtttctatttctttgctaaaacaggatgtcactcatgtttgggaagttttaaagtcatattcgcacaaaactgagatttcctctttgaagaggtgaaagagaatttaaaagggagtgatttgaaaaggattctatgttacttaatgctatgtgtctggtccaacgaaagcatctcagatagttcacttaatgcgtcaacttgtctgggtcacartgtttctgtgaaggtgctttgggatgagattcacatttgaatcagtggactctgagtcaagcag

SEQ ID NO: 504893 - DNA, 483 bp, Homo sapiens
tcaatccgcagcttgaaatcatttcccactgggctaattctacttatctaccccttatctccttacgaaaaaaaaaaaaatgtcccatgagccagggacactcacctaccacttgcttgcaaattgggacccatgagtagcaagcagagagatatttgggatasttaagtagtaggattggaggtcttctttcaggctactgggttctgtataaatctaatctggtacagctatgggcaggagttatttcttgcagcaagatagaggccaaacttgggtaggttgattgtaacccaagacacagaagaaattattagcagttgaactaagaggtttaccatatggtaaaggtttggaacatgccactcaggcaacccaaaactctgttttcacctatttgttaaattttcattcatcagggaactatcgaccaatatgccagacagtgtaccaggcactatcatgaatagcaagaccagacag

SEQ ID NO: 504894 - DNA, 587 bp, Homo sapiens
ctggagcatagagggcggagtcgcctgtcctttagcaggtgctctggttactgggtcaactcacacatggggcagggaggcggagcctgcargtcccaccttgccattgagtggaggcaactgttttttgtgtgtgaatattcttgttttgttttgttttgttttgttttgttttgttttgttttgagacagagtcactgtgtcacccaggctggagtgcagtggtgcaatctcggctcactgcaaactctgcctcctggtttcaagggattctcctgcctcagcctccgagtagctgggattacaggcgcctgccaccatatctggctaatttttgtgtttttagtagagatggggtttcaccatcttggccaggctggtctcgaactcctgacctctggtgatttgcccgcctcagcctcccaaagtgccaggattacaggtgtgagccaccatgcctggcctggaggcaactcttgaggttgggatgtctgcagttcagactgaaggctcctaatcctgcttggaactcccagcaacctgcctcacgttcatcccataggaaaacctacaggataagccagcag

SEQ ID NO: 504895 - DNA, 587 bp, Homo sapiens
ctggagcatagagggcggagtcgcctgtcctttagcaggtgctctggttactgggtcaactcacacatggggcagggaggcggagcctgcaagtcccaccttgccattgagtggaggcaactgttttttgtgtgtgaatattcttgttttgttttgttttgttttgttttgttttgttttgttttgagacagagtcactgtgtcacccaggctggagtgcagtggtgcaatctcggctcactgcaaactctgcctcctggtttcaagggattctcctgcctcagcctccgagtagctgggattacaggcgcctgccaccatatctggctaatttttgtgtttttagtagagatggggtttcaccaycttggccaggctggtctcgaactcctgacctctggtgatttgcccgcctcagcctcccaaagtgccaggattacaggtgtgagccaccatgcctggcctggaggcaactcttgaggttgggatgtctgcagttcagactgaaggctcctaatcctgcttggaactcccagcaacctgcctcacgttcatcccataggaaaacctacaggataagccagcag

SEQ ID NO: 504896 - DNA, 587 bp, Homo sapiens
ctggagcatagagggcggagtcgcctgtcctttagcaggtgctctggttactgggtcaactcacacatggggcagggaggcggagcctgcaagtcccaccttgccattgagtggaggcaactgttttttgtgtgtgaatattcttgttttgttttgttttgttttgttttgttttgttttgttttgagacagagtcactgtgtcacccaggctggagtgcagtggtgcaatctcggctcactgcaaactctgcctcctggtttcaagggattctcctgcctcagcctccgagtagctgggattacaggcgcctgccaccatatctggctaatttttgtgtttttagtagagatggggtttcaccatsttggccaggctggtctcgaactcctgacctctggtgatttgcccgcctcagcctcccaaagtgccaggattacaggtgtgagccaccatgcctggcctggaggcaactcttgaggttgggatgtctgcagttcagactgaaggctcctaatcctgcttggaactcccagcaacctgcctcacgttcatcccataggaaaacctacaggataagccagcag

SEQ ID NO: 504897 - DNA, 587 bp, Homo sapiens
ctggagcatagagggcggagtcgcctgtcctttagcaggtgctctggttactgggtcaactcacacatggggcagggaggcggagcctgcaagtcccaccttgccattgagtggaggcaactgttttttgtgtgtgaatattcttgttttgttttgttttgttttgttttgttttgttttgttttgagacagagtcactgtgtcacccaggctggagtgcagtggtgcaatctcggctcactgcaaactctgcctcctggtttcaagggattctcctgcctcagcctccgagtagctgggattacaggcgcctgccaccatatctggctaatttttgtgtttttagtagagatggggtttcaccatcttggccaggctggtctcgaactcctgacctctggtgatttgcccgcctcagcctcccaaagtgccaggattacaggtgtgagccaccatgcctggcctggaggcaactcttgaggttgggatgtctgcagttcagactgaaggctcctaatcctgcttggaactcccagcaacctgcctsacgttcatcccataggaaaacctacaggataagccagcag

SEQ ID NO: 504898 - DNA, 606 bp, Homo sapiens
tgagtgtctaagagaaaccattacttagaagcttgcagaaagtactgacccaaggaaaaaggattccacctcaaaattcttaccctatttaatggaagtcatttttaagttcaatcttttttattatgttagaaatctccatttcctaataccagaaacgtgtgtgtgtgtgtgtgtgtgtgtgtgtgtgtatgtgtgtgtgtgtgttcctttaatagccagggtttgctttgtctttcctcaaattcaagttcacctgctgtaacttagctttccaacccaacatctttttcatcaggagctgacaaggcaaaaaasccccttcctctcagaacaatggcatgccaccatgcttttgtagtaacaaacactgaaaagtactcaacttctcctttcctttctcctcaaggaaataaccatcgactgactaataccgccccactccaaaggcacacacatcatgtcatgcatttgagctaaagaccgtaattcaactgaaagattaggagggaatattggaaaaggatggattagacatggaatctacaacctatcaagaagggaaaagtgagatcatactctctttttgaaccaaaatacaaaaac

SEQ ID NO: 504899 - DNA, 606 bp, Homo sapiens
tgagtgtctaagagaaaccattacttagaagcttgcagaaagtactgacccaaggaaaaaggattccacctcaaaattcttaccctatttaatggaagtcatttttaagttcaatcttttttattatgttagaaatctccatttcctaataccagaaacgtgtgtgtgtgtgtgtgtgtgtgtgtgtgtgtatgtgtgtgtgtgtgttcctttaatagccagggtttgctttgtctttcctcaaattcaagttcacctgctgtaacttagctttccaacccaacatctttttcatcaggagctgacaaggcaaaaaagccccttcctctcagaacaatggcatgccaccatgcttttgtagtaacaaacactgaaaagtactcaacttctcctttcctttctcctcaaggaaataaccatcgactgactaataccgccccactccaaaggcacacacatcatgtcaygcatttgagctaaagaccgtaattcaactgaaagattaggagggaatattggaaaaggatggattagacatggaatctacaacctatcaagaagggaaaagtgagatcatactctctttttgaaccaaaatacaaaaac

SEQ ID NO: 504900 - DNA, 606 bp, Homo sapiens
tgagtgtctaagagaaaccattacttagaagcttgcagaaagtactgacccaaggaaaaaggattccacctcaaaattcttaccctatttaatggaagtcatttttaagttcaatcttttttattatgttagaaatctccatttcctaataccagaaacgtgtgtgtgtgtgtgtgtgtgtgtgtgtgtgtatgtgtgtgtgtgtgttcctttaatagccagggtttgctttgtctttcctcaaattcaagttcacctgctgtaacttagctttccaacccaacatctttttcatcaggagctgacaaggcaaaaaagccccttcctctcagaacaatggcatgccaccatgcttttgtagtaacaaacactgaaaagtactcaacttctcctttcctttctcctcaaggaaataaccatcgactgactaataccgccccactccaaaggcacacacatcatgtcatgcatttgagctaaagaccrtaattcaactgaaagattaggagggaatattggaaaaggatggattagacatggaatctacaacctatcaagaagggaaaagtgagatcatactctctttttgaaccaaaatacaaaaac

SEQ ID NO: 504901 - DNA, 619 bp, Homo sapiens
agaagtcttgccaaaataagtggttcaaaacaaacasttgagtgaatgatatatagggtaccagagataccacatatgggagtaaagaggaagatattagagcttgtaggaaattgcctggaggcatcaaaaaggttcctgtgttgacgtgtgcgtgagcctcagttgaaacctgattgtcccaggccaggggaaagctctctgatgagcttatacatgctagattcaaaaacataaaacgaacaaaaaaagaggtgtcaaatctaagccagttacttcctttctgatggccctgagaaaaagaaaagggcatgggaggtggagtgcggcgtgcatactttggatgctatcaaacctctgccctccatgtttgcaactgaaccaggcattaaagacactgacactgtcagcactaagatctgcctcatggaaaaagtattttaaacggtagttgcagtaaaaagacctagagtggggaagatagaagtagtatctggtgagctcctggtgggtctcaggcattttctctttggattattttatttcagcgtcacattaatccaagagatggtcttatcttcgcgggtgtggatgttcaggcttggaaacgcaacgccat

SEQ ID NO: 504902 - DNA, 631 bp, Homo sapiens
gctctcctgtctgaagaagtcttgccaaaataagtggttcaaaacaaacacttgagtgaatgatatatagggtaccagagataccacatatgggagtaaagaggaagatattagagcttgtaggaaattgcctggaggcatcaaaaaggttcctgtgttgacgtgtgcgtgagcctcagttgaaacctgattgtcccaggccaggggaaagctctctgatgagcttatacatgctagattcaaaaacataaaacgamcaaaaaaagaggtgtcaaatctaagccagttacttcctttctgatggccctgagaaaaagaaaagggcatgggaggtggagtgcggcgtgcatactttggatgctatcaaacctctgccctccatgtttgcaactgaaccaggcattaaagacactgacactgtcagcactaagatctgcctcatggaaaaagtattttaaacggtagttgcagtaaaaagacctagagtggggaagatagaagtagtatctggtgagctcctggtgggtctcaggcattttctctttggattattttatttcagcgtcacattaatccaagagatggtcttatcttcgcgggtgtggatgttcaggcttggaaacgcaacgcc

SEQ ID NO: 504903 - DNA, 596 bp, Homo sapiens
gagaaattgtgcaagcctattattaaatttcaaaagttctgaaaaagttgaatttccaaaattttttccagtggtctcattgctattgaaaagcagcattttggatgtctttctctgccattcctgctgacatcaccattcttttttttttcattcaataatccatcttagaaaacgttgtacatattctttccctgccccatctatcacttttatttattttagtgggtgaatgtattacaatataattgcttttcaatccacacttactccccaggcacctaaccattgttgaagcctttgtactagacattgtgaggctgtgtccaacacagctaccctctaggagcttctggacacatggagaagacaaagaacacacaggagaattaacytgccaaggcagcatgctgagagtacttttggagtttggacaatgttaaatggactcaccttgattatgagttccaggtctgtcaagacacacttctttaatggttgaaaagacagggtggcatgtacactctgtcctacatccacagtgctgtcgatgggtgaaaattccaagtactgcagcaaggttttggagccacaca

SEQ ID NO: 504904 - DNA, 479 bp, Homo sapiens
taactgagtgagactctgtctcaaaaataaacctcaaaatggcaaacgcatccttttaaaaaatagatggaggataaacaacaacaacaacaacaaaaaaccaccccacaaaaccacacactgggccataaaaacaagtctaaacacattctagagaactgaaataatatagaatatgttctcagatcacaaagtaatttaaaaaataactagaaaaatccacatsttcagaaattaagaaactcttctaataaccattagttaaaaaagaagtattaatcacaaaaattagaacctttttgaactgaataaaaaacactacaatcacaatttgtataactgctaaagcagtacttagatatttataattttaaatgtctagcttggaaaatcaagaagactagaagtcaaagcactaagccttcatcttagaaattaaataagcccccagtatcccaaaggaagcagaaggaaggaaa

SEQ ID NO: 504905 - DNA, 583 bp, Homo sapiens
ttgaatgcatgactgggctgagcataagcagcctgaatttggctccttctgtgtacctaagtatggccgcaggttacttcccccatcaatgttgagaaaatattcctgctgcaaaatgagcacagtcttaccctctggtctctctcataggcatttagtgggatatggaaagtgacctggaaatcctaaaaaagtatcctgagctcctcggaaaaggtgaactggatatgagcagatgctcagctccaggaccaagctgaggtggcctaggtgtgggaggggtctcagtggtatgactgcaggaggtcaaggaggccccagcagctcacttaggtctctgccaccctaggycacagctcacaggatttttctgtaaggtgattgtactccttcaagttttcctgggagcaagtacctcatcagggactttcattgtcagatgtcattgggttagcttttctctcactgctgtgtaccaggtccaccaactccaccaccaccaccaccactaccacctaatgtttatcgtgcttattgtgtgccaggcactgttgtaagcactttatttgaattaactcattta

SEQ ID NO: 504906 - DNA, 583 bp, Homo sapiens
ttgaatgcatgactgggctgagcataagcagcctgaatttggctccttctgtgtacctaagtatggccgcaggttacttcccccatcaatgttgagaaaatattcctgctgcaaaatgagcacagtcttaccctctggtctctctcataggcatttagtgggatatggaaagtgacctggaaatcctaaaaaagtatcctgagctcctcggaaaaggtgaactggatatgagcagatgctcagctccaggaccaagctgaggtggcctaggtgtgggaggggtctcagtggtatgactgcaggaggtcaaggaggccccagcagctcacttaggtctctgccaccctaggccacagctcacaggatttttctgtaaggtgattgtactycttcaagttttcctgggagcaagtacctcatcagggactttcattgtcagatgtcattgggttagcttttctctcactgctgtgtaccaggtccaccaactccaccaccaccaccaccactaccacctaatgtttatcgtgcttattgtgtgccaggcactgttgtaagcactttatttgaattaactcattta

SEQ ID NO: 504907 - DNA, 650 bp, Homo sapiens
tgattaaccagttccccatattgaatgttgtaattgctcccgagtttctattacagcatacagtgctgcagtgaacattcaagcagttcatcttgtccacatcattaattatttttcctaagaaaattttagaagtaacattgtcaggtcagagtctgcacatatatttctttctctttttaaataatttaatgtctgggatttttttctctaatattttaatatttttaaattacggaaagaatacaattcaaacaattcagagatgtatacgttccaaatgaggtgtcttccctctccttcttaatcccctctctgaggtcagcaatttaayagtttggggataatccttaattatatggattataaacaaaagagtctcttattgccttcaaaagttgtatgttctaacttcaccataaacaaaaggggaaaaataacttatattgatcagtctgattttgacataggctgttaagctgttcttcatgaagattctgtgaaagctgtaaggttccataaaaatgtcaggcttgttattactgtagttcacactctaataggcttttcacctgcagatgagaagtgactgagcctccactagaacagagctggtggctctttccaggtcagtgcctttttggtgttaa

SEQ ID NO: 504908 - DNA, 650 bp, Homo sapiens
tgattaaccagttccccatattgaatgttgtaattgctcccgagtttctattacagcatacagtgctgcagtgaacattcaagcagttcatcttgtccacatcattaattatttttcctaagaaaattttagaagtaacattgtcaggtcagagtctgcacatatatttctttctctttttaaataatttaatgtctgggatttttttctctaatattttaatatttttaaattacggaaagaatacaattcaaacaattcagagatgtatacgttccaaatgaggtgtcttccctctccttcttaatcccctctctgaggtcagcaatttaacagtttggggataatccttaatkatatggattataaacaaaagagtctcttattgccttcaaaagttgtatgttctaacttcaccataaacaaaaggggaaaaataacttatattgatcagtctgattttgacataggctgttaagctgttcttcatgaagattctgtgaaagctgtaaggttccataaaaatgtcaggcttgttattactgtagttcacactctaataggcttttcacctgcagatgagaagtgactgagcctccactagaacagagctggtggctctttccaggtcagtgcctttttggtgttaa

SEQ ID NO: 504909 - DNA, 650 bp, Homo sapiens
tgattaaccagttccccatattgaatgttgtaattgctcccgagtttctattacagcatacagtgctgcagtgaacattcaagcagttcatcttgtccacatcattaattatttttcctaagaaaattttagaagtaacattgtcaggtcagagtctgcacatatatttctttctctttttaaataatttaatgtctgggatttttttctctaatattttaatatttttaaattacggaaagaatacaattcaaacaattcagagatgtatacgttccaaatgaggtgtcttccctctccttcttaatcccctctctgaggtcagcaatttaacagtttggggataatccttaattatatggattataaacaaaagagtctcttattgccttcaaaagttgtatgttctaacttcaccataaacaaaaggggaaaaataacttatattgatcagtctgattttgacataggctgttaagctgttcttcatgaagattctgtgaaagctgtaaggttccataaaaatgtcaggcttgttattactgtagytcacactctaataggcttttcacctgcagatgagaagtgactgagcctccactagaacagagctggtggctctttccaggtcagtgcctttttggtgttaa

SEQ ID NO: 504910 - DNA, 650 bp, Homo sapiens
tgattaaccagttccccatattgaatgttgtaattgctcccgagtttctattacagcatacagtgctgcagtgaacattcaagcagttcatcttgtccacatcattaattatttttcctaagaaaattttagaagtaacattgtcaggtcagagtctgcacatatatttctttctctttttaaataatttaatgtctgggatttttttctctaatattttaatatttttaaattacggaaagaatacaattcaaacaattcagagatgtatacgttccaaatgaggtgtcttccctctccttcttaatcccctctctgaggtcagcaatttaacagtttggggataatccttaattatatggattataaacaaaagagtctcttattgccttcaaaagttgtatgttctaacttcaccataaacaaaaggggaaaaataacttatattgatcagtctgattttgacataggctgttaagctgttcttcatgaagattctgtgaaagctgtaaggttccataaaaatgtcaggcttgttattactgtagttcacactctaataggcttttcacctgcagatgagaagtgactgagcctccactagaacagrgctggtggctctttccaggtcagtgcctttttggtgttaa

SEQ ID NO: 504911 - DNA, 540 bp, Homo sapiens
  misc_feature (1)...(540): n = A,T,C or G
gctctgtgaactgcaaattactatacaaataagattttttttttcccaatgtaggtgattctgctcctttgggtttatggtaaagttagcacatgtaattttggaggtaataaaggattctcgttaaaaaatcctttctttatcaagggctcatcccttgactggtttatggttaggaaaatattccttgagaatatttagcatgtgatggaagtttcttttcaatgaggattcacactgcaggtatggttataattgtgaatgccaacagtcatcatagtaataayaatgataacatcaacagcttttcgtttgagtatttactatgtgccaagtattgagataagcattttatataaatgttctcattaaattctcatgactaccctataaaacacacagcgccaatacgcactntacggaccgggaaaccgaccccacacaatttagttaattttcccaaaagcacacaactattaacgtatattcactaccctatgcagttcttcaaataagtcattagtatttgccatgaccaca

SEQ ID NO: 504912 - DNA, 486 bp, Homo sapiens
aaataacttcattcaatccattaatgcattcactcacatagcacccatttattgggcactattgggtctactgctgttccatgcactagttttacacatggggaatatttgatcaatgcctttacggggacttcttggytagtggtggaggcattgtgaagaaaataattacgtgtatgactgttacacagatgaaagcaagtaaaaacaaggtgggtacatttctaagatgaggttacagagaagcaggaaagagaagatgcatcctcataagtgacacagtcccacaagtcagcgaggaacctttatggccaagcacacaagagcccctgggcagatgatgggataactcaggggtggtgggccagaaagggcacaattctgagagcacaggacagctctgcgattggagtttggcctgaggactatggaggggctcgtcttctgcttgtgtgaatgcccaccccctgcttttagggcaccagt

SEQ ID NO: 504913 - DNA, 569 bp, Homo sapiens
ctcatcttctccttttaagccaaactagtggtctctgattagcttctatttcctggacaatgagacaggtccaagggcaggaaaaataacttcattcaatccattaatgcattcactcacatagcacccatttattgggcactattgggtctactgctgttccatgcactagttttacacatggggaatatttgatcaatgcctttacggggacttcttggttagtggtggaggcattgtgaagaaaataattacgtgtatgactgttacacagatgaaagcaagtaaaaacaaggtgggtacatttctargatgaggttacagagaagcaggaaagagaagatgcatcctcataagtgacacagtcccacaagtcagcgaggaacctttatggccaagcacacaagagcccctgggcagatgatgggataactcaggggtggtgggccagaaagggcacaattctgagagcacaggacagctctgcgattggagtttggcctgaggactatggaggggctcgtcttctgcttgtgtgaatgcccaccccctgcttttagggcaccagt

SEQ ID NO: 504914 - DNA, 631 bp, Homo sapiens
ttgggtagcaggattatagaattttagtcttctttatacatttctgaattattttacaatgacatattgcttttaaagtcagaaaaacagtaacrctctttctaatttttaattttttttccataagaattctacagttaaagacaagaaaataagatcagcaggattgaggagggtatcacttaagcctgtttctgctcatggtttgcagacacagctacattgcttaccaggtcctggagctgggtgtttgctttgtgttctcaactagggccacaatattaattgcagatttaaatacaacaaaattaacttgacgttcccagaagaggaggaatatcatcacaagaaagtttttatgttaagatttgcactgctactacattaaaggtacatcactttcaactgatttgaacaaggtgttcccataagtgtgccaatgttttagatacccagagtaaaggctgagaaacactggtaaggccccaaagtaagccagtggagctgtgctactcaaagtgctggtctctgatgacacgtggagcttacagggcttctttcatcaacaaagtcttgctacaaagtttagctgcagagaaggaatgatgtggccacggtacctgttcagttg

SEQ ID NO: 504915 - DNA, 631 bp, Homo sapiens
ttgggtagcaggattatagaattttagtcttctttatacatttctgaattattttacaatgacatattgcttttaaagtcagaaaaacagtaacactctttctaatttttaattttttttccataagaattctacagttaaagacaagaaaataagatcagcaggattgaggagggtatcacttaagcctgtttctgctcatggtttgcagacacagctacattgcttaccaggtcctggagctgggtgtttgctttgtgttytcaactagggccacaatattaattgcagatttaaatacaacaaaattaacttgacgttcccagaagaggaggaatatcatcacaagaaagtttttatgttaagatttgcactgctactacattaaaggtacatcactttcaactgatttgaacaaggtgttcccataagtgtgccaatgttttagatacccagagtaaaggctgagaaacactggtaaggccccaaagtaagccagtggagctgtgctactcaaagtgctggtctctgatgacacgtggagcttacagggcttctttcatcaacaaagtcttgctacaaagtttagctgcagagaaggaatgatgtggccacggtacctgttcagttg

SEQ ID NO: 504916 - DNA, 631 bp, Homo sapiens
ttgggtagcaggattatagaattttagtcttctttatacatttctgaattattttacaatgacatattgcttttaaagtcagaaaaacagtaacactctttctaatttttaattttttttccataagaattctacagttaaagacaagaaaataagatcagcaggattgaggagggtatcacttaagcctgtttctgctcatggtttgcagacacagctacattgcttaccaggtcctggagctgggtgtttgctttgtgttctcaactagggccacaatattaattgcagatttaaatacaacaaaattaacttgacgttcccagaagaggaggaatatcatcacaagaaagtttttatgttaagatttgcactgctactacattaaaggtacatcactttcaactgatttgaacaaggtgttcccataagtgtgccaatgttttagatacccagagtaaaggctgagaaacactggtaaggccccraagtaagccagtggagctgtgctactcaaagtgctggtctctgatgacacgtggagcttacagggcttctttcatcaacaaagtcttgctacaaagtttagctgcagagaaggaatgatgtggccacggtacctgttcagttg

SEQ ID NO: 504917 - DNA, 631 bp, Homo sapiens
ttgggtagcaggattatagaattttagtcttctttatacatttctgaattattttacaatgacatattgcttttaaagtcagaaaaacagtaacactctttctaatttttaattttttttccataagaattctacagttaaagacaagaaaataagatcagcaggattgaggagggtatcacttaagcctgtttctgctcatggtttgcagacacagctacattgcttaccaggtcctggagctgggtgtttgctttgtgttctcaactagggccacaatattaattgcagatttaaatacaacaaaattaacttgacgttcccagaagaggaggaatatcatcacaagaaagtttttatgttaagatttgcactgctactacattaaaggtacatcactttcaactgatttgaacaaggtgttcccataagtgtgccaatgttttagatacccagagtaaaggctgagaaacactggtaaggccccaaagtaagccagtggagctgtgctactcaaartgctggtctctgatgacacgtggagcttacagggcttctttcatcaacaaagtcttgctacaaagtttagctgcagagaaggaatgatgtggccacggtacctgttcagttg

SEQ ID NO: 504918 - DNA, 549 bp, Homo sapiens
tgagtgactgctaccgaggagtggtgtttgatggccctcgacactctctttgctcagaatgctgcagccgccctcctctgcctgctgaaggccattggcagccgggagcatatatacattctccccctggcccagaattacccagccatggaggcccagagaaagccaaaaagagcaagaagcaaggcctcctacctttccattgggcttaagtgaaactttgacatttgctattccgttggcgcctcacctctgccctgtaaggtggccaggagttgtatttctgctttgctaggagggaactgggacgcgagtggcyggctgggaagttctatgatgaacgctttgctgacagcaggtgcattcctgcttccctcccatcacactgtacccctccatcctttctgcaattacagccattacgggtcccatcctgactcaggcaactgatttccttgttggttttgtttaagccaactgtgcatttctcataaaactcacggtgctaatacattttccaaaacatttacaccttagcctgctgcacac

SEQ ID NO: 504919 - DNA, 549 bp, Homo sapiens
tgagtgactgctaccgaggagtggtgtttgatggccctcgacactctctttgctcagaatgctgcagccgccctcctctgcctgctgaaggccattggcagccgggagcatatatacattctccccctggcccagaattacccagccatggaggcccagagaaagccaaaaagagcaagaagcaaggcctcctacctttccattgggcttaagtgaaactttgacatttgctattccgttggcgcctcacctctgccctgtaaggtggccaggagttgtatttctgctttgctaggagggaactgggacgcgagtggccggctgggaagttctatgatgaacgctttgctgacagcaggtgcattcctgcttccctcccatcacactgtacccctccatcctttctgcaattacagccattwcgggtcccatcctgactcaggcaactgatttccttgttggttttgtttaagccaactgtgcatttctcataaaactcacggtgctaatacattttccaaaacatttacaccttagcctgctgcacac

SEQ ID NO: 504920 - DNA, 549 bp, Homo sapiens
tgagtgactgctaccgaggagtggtgtttgatggccctcgacactctctttgctcagaatgctgcagccgccctcctctgcctgctgaaggccattggcagccgggagcatatatacattctccccctggcccagaattacccagccatggaggcccagagaaagccaaaaagagcaagaagcaaggcctcctacctttccattgggcttaagtgaaactttgacatttgctattccgttggcgcctcacctctgccctgtaaggtggccaggagttgtatttctgctttgctaggagggaactgggacgcgagtggccggctgggaagttctatgatgaacgctttgctgacagcaggtgcattcctgcttccctcccatcacactgtacccctccatcctttctgcaattacagccattaygggtcccatcctgactcaggcaactgatttccttgttggttttgtttaagccaactgtgcatttctcataaaactcacggtgctaatacattttccaaaacatttacaccttagcctgctgcacac

SEQ ID NO: 504921 - DNA, 557 bp, Homo sapiens
atcctcacaattaccctgtgaatcttgtccccattttacactaaaggagaatgtagctcagagatagcaaaagtcttgtgccaaatcacattgccaattagtaggagaaccgggtgcatgtaattctaaaccctttgcttttcctatccttatgccaatggcctgagaaaaattttaataactgaaaggtttgattgaaagataggtacacacacacacaagtaatgttagcttaagttcccaatgtagtcagaagcagccccagcaaatcttggccccccagggcaggggttgaaggacagaggctggtggcgctgtcyacgggagtcagagccccacctcccaggagcttcggctccagccacacgactgcccttcctcactccggcttaccgctcccttctaacactatctagtcaaatcataatgcttttccaattaaggaaatacttacaaacactgggctgtcgaagtccttgaacagaactcaaagtcagcttctttatagtctcatcctgagaaaaatctggagcagtgaccaggcatccctcagcagt

SEQ ID NO: 504922 - DNA, 557 bp, Homo sapiens
cctgtgaatcttgtccccattttacactaaaggagaatgtagctcagagatagcaaaagtcttgtgccaaatcacattgccaattagtaggagaaccgggtgcatgtaattctaaaccctttgcttttcctatccttatgccaatggcctgagaaaaattttaataactgaaaggtttgattgaaagataggtacacacacacacaagtaatgttagcttaagttcccaatgtagtcagaagcagccccagcaaatcttggccccccagggcaggggttgaaggacagaggctggtggcgctgtctacgggagtcagagccccacctcccaggagcttcggctccagccacacgactgcccttcctcactccggcttaccgctcccttctaacactatctastcaaatcataatgcttttccaattaaggaaatacttacaaacactgggctgtcgaagtccttgaacagaactcaaagtcagcttctttatagtctcatcctgagaaaaatctggagcagtgaccaggcatccctcagcagtcatccagcctccag

SEQ ID NO: 504923 - DNA, 512 bp, Homo sapiens
atccttgtgacctagtcacctccctaaggcccttcttaataccatccccttggggaattcagtttcaacataggaatttcgagggggcacaaacatttacaccatagcaaccacaaacttggttacttaacacaacatagaaatgtattgtcttacacttccggggtcagaagtcctaacatctttccctgccacttattaagggataatcacagataagaatgataactcctccctcatagggctgttgtggagattaaataagcaatcatgtaaagtgccttccccagtgcctggcatgttcatacatgttaacaaacatgagattttaatgtaatagtagtatgacagtatgctaccttaggacatttcaaatgcagatgatttaggggagaagagcccacaatttaaccaggagaaatttcattccaaagataatggggaaaatgagaagtggtaattattttcaagtggatcattatggagaaatraactttctggaaaacgaggca

SEQ ID NO: 504924 - DNA, 608 bp, Homo sapiens
cgaagtcatgcaagggggtgtgagggatgggaaacattctgtcttgtcttcctcttttgtacagtccttgctggttgccacactccagtgagcatttttctcccaatggtaagatccaagatctggggtgtgctatggagggaaggaggcaactggcccactatgcttcaaggctccagggatcctatcgtcaaagcatgaggcattctctttgcacctcatctgccctcctgctgggttacagattttgcatgctcagtaactgaacattgttctctgtggacatgttgcccaccgggagtggcctggccatgagcgggactcagtgctcctgggtcctgtgccacagcccatcccatcatgattctcagataacactattcatctgggaatccaggaccagcctcctgggagtgtgaagctgcacctcctcccttaggtatatgccctggaaaaatacaactgaagacactagagsaagttctaggaccctgaaggaagcatcccagccatgtctgccagaaatctttggaaaaacttgcaagaaagaaggtagaagtgttacagatgaaggtcttttatttatgtatttgtttttttgagacaga

SEQ ID NO: 504925 - DNA, 592 bp, Homo sapiens
ccccatggtcccggcatgacatgagccagacaactgccagacataagtgaggccactgtggcccatccaccccagcaaccctacagttaacagcaggtacttgattgagcctagccaatcctggcccaggtgagtggaaccacccaggtgacccacagacttatgataagtgactgctgttttagggaatgacgttttgtggtggtttgatactcagcagaagtgaacagatacataatcccaagctccaagcatttcaagtctcagggctaaggccaagttcaccagtaaggaaacctccagatcttactccacacaggccacacacaccaggtgaaaggacctctgtgtctctgtggtgacagaacccagacctccctctgtgagacccagcactccacctctcccagggcccactgtcacactggctaatattcctaccaggaatctcccctgccccctcactgaagctgagatggtgaaaggggcttctgcagaggtggcagtggcagyagcagtggcagccgtggctgtgggccctcccccaatactcacctgttgtctggcagtggatcaccaggatgttggccat

SEQ ID NO: 504926 - DNA, 620 bp, Homo sapiens
tgcgcacacagctgctcacatctggggcattggtggttcagtggtagaattctcgcctgccacgcgggaggcccgggttcgattcccggccaatgcagcagcagacctttagtttaatcgtgagagactgaatttgagatttcacactgcctaaagaatttataaatccactctgagaactgagaatgacttgtttctagttggatttcaaatgcctttgatgaaaacacttattttcctaaattctgcaaagatctagaacctggtctccttgttcttgaagaatccaggatgtgggatgcacctaggcccgctaaagcagctgtgcctccccaygcctgcccaggaagccaggacatgtttccgcttggcacaagttacagcgacactaggagtgggagtggggacatcctcgaggcttcagcaaggggtccaaaggaaagccaacctgcacggcagcgaaggccaccctggagccacctcctctcctgtctccttgtttcaggtcacaaacattccccgagcaactggacaggagactcctcctgtgcgatgaccagtggatgagagctattccctgcccccaaggagctctctgccagcgtgggaagaggaggaaa

SEQ ID NO: 504927 - DNA, 605 bp, Homo sapiens
ggtgcactgggacagaatatctgactcagctctgtcacygctcctcattatagaagacaccactgggagtctttttttttcaagttcatttcatactgtcttctctggtggtgggaaggagctgggacaaagaagagtcactctgtctccagatgcccggatcccgtgttgagcagggaatattgggtttatgtaaacatcacgtggcagcatcaaacttctgttcaggcagcctctcctcaccttttcccctcctgtgttcagagtggtatttcctcagcggaagatggacatgaagacaaatgaggtcatctttaagaagtatgttatgagcacggagacgtactactttgggccactactttgtggaaaatcaagagataagtaagtgttccattattttaaagcagatttcagactgctgggttgggctcatgaacagtgcaagtaggattcctgtgtacatagatgtagcttttactaatgctgcctctcttagccccaaccacaaatcaggagaactgggttcttgtgtcccaactccctgctggacacccagaggaatgagggtgccatgttcccatatgggaaagcctaggagaggt

SEQ ID NO: 504928 - DNA, 565 bp, Homo sapiens
gctcagttagaaagtaaagttagtgtctgataaggtcaggaatcacacggtgtcacttacttcttctatcccaatggaaagcatctcattctgttcacaggtctgtagggattcctgatcctccacctggctctggcttgagtatattctttctatttcagtagagctaatttttatttcctagaaattaaagatgtgaggaaaagctggcaagcattcaaaatggatcatcaattgacagaaaaataaagtatgttgtatatgattataaaaatagtacattttttcccaggragataattgagcaagtgactataatgtacatacgaggatgtttactgcagcattatttataacagcaaaactttggaagccaactcagtgcccatcaatagggggtcactttaaatgaagtgtgtgtggtacacctatccatgaaggataatgcatgtatatttatggatagggatgatgtgcacaacatattattgagtgaaaagcagttctattcatgtaaaattacatatgcctcatgtgtctgaaggtgtgtgtgtgtaaattcctt

SEQ ID NO: 504929 - DNA, 428 bp, Homo sapiens
ctaccaaagcatgggacagggaatagggggagacaggagacatcagtttttgcaaatcagtgttcagtgggctctcagtttctaaggccaaactccaaatcctagaccaggcagatctagtagggaccaccctacaccctcccttgaacttgccttcttcaaatctcagctaaartttcacttgctcttaaaaagttttctgactaccagtctaggcccaacttctttcctctgagtgtccatagccccctgggcttcccctttcacacttatttttaccatccctgttagatgtggactcgctgaggactggtatccaatatggtgtctaatccagtgcctggcctggaataagtagtcggcatggtcatgaatgaatgagccactggggatcctgctcccagttcaccagaaagcagggctaagac

SEQ ID NO: 504930 - DNA, 369 bp, Homo sapiens
gctctcagtttctaaggccaaactccaaatcctagaccaggcagatctagtagggaccaccctacaccctcccttgaacttgccttcttcaaatctcagctaaaatttcacttgctcttaaaaagttttctgactaccagtctaggcccaacttctttcctctgagtgtccatagccccctgggcttcccctttcacacttatttttaccatccctgttagatgtggactcgctgaggactggtatccaatatggtgtctaatccagtgcctggcctggaataagtagtcggcatggtcatgaakgaatgagccactggggatcctgctcccagttcaccagaaagcagggctaagactcagctgaggc

SEQ ID NO: 504931 - DNA, 369 bp, Homo sapiens
gctctcagtttctaaggccaaactccaaatcctagaccaggcagatctagtagggaccaccctacaccctcccttgaacttgccttcttcaaatctcagctaaaatttcacttgctcttaaaaagttttctgactaccagtctaggcccaacttctttcctctgagtgtccatagccccctgggcttcccctttcacacttatttttaccatccctgttagatgtggactcgctgaggactggtatccaatatggtgtctaatccagtgcctggcctggaataagtagtcggcatggtcatgaatgaatgagccactggggatcctgctcccagytcaccagaaagcagggctaagactcagctgaggc

SEQ ID NO: 504932 - DNA, 332 bp, Homo sapiens
tattttactgtattgtgtcacaaacagtgactttaccccaaacatccaatcttcccatcctaatttctttaataatttatcctttctgcagtggcgcatgtccccttaacttgtgtgtgttgattcttatattcttacacactatgcgaatcaccttagcttcaaaacacatttttatgttttaaaaaagattagatatctttttaagagtgctagttttgcttattttcttactgtggatgtgctgcagrgtaacttgacaagttccctaaaccctccaatggggactgcaaaggttgttaggtgagaatcaatcattatccgtttcctct

SEQ ID NO: 504933 - DNA, 628 bp, Homo sapiens
ttaattgtctgcctttgcaactgggctgtaaactccattaggatggttagcaggtggatatggcacacagcctagcacatagcaggcaatcaataaatctctgtttaatatgaagaggccagctcttaaygttctaatatctagagtacagagtttttccatctattttcagattccatgttaatttttctttttgcgttaaatgttccttccttccaaggtgaaagaaagttgggataggagcaagtcaaatgcagcaaagaaaataataaagcaaaggttctgggactggggatgagaatgggaatgaagagagaagtgaaaaataacctgagagagaaaacatttattcctccagcattttcccatcctgctctcatatataatgaatgagcaatttccagagcaaatggtttgaaaatttaacagctacttcctgcctcagaataagcatgttgcctctagactaatagccattatcacaacagtaaaggttacagcccacctgagggcccagcctgtggaccactgggcctgtgaggcccagcaagtaactaaatatcttcatgtaatcctgtgcttctcatcctgtgtgtcaaggagctaaaggcatttcctgacaaatacg

SEQ ID NO: 504934 - DNA, 511 bp, Homo sapiens
acactggaagatttgagggatgtgaaagtgatactcagagggcttgctacaaacgatgaagcacttgrtacaagtgctagaatgctagatacccagaatttatttgatatctagcacttggtacaatgcttggcatgctaaatacccagtacttatgttaattcggtaataaaaattactcttatgcaattttataataagttttctcccttaatctaaatagataagttttttcccctcagcagtgttttgttttacatgacatgtaatggaaataaactcagatgcttgttttgtttttatgttttccagaaattctacagccaaaccctggtgtttcagattgcccagagtgctcaaaagcttaccctcctggcacgtgggcaaggtctagagccacgcctggaatttagtccttcagtcctggatctggggccactgctactttgtgcacctggagacgaggccgaggtgatagtgaagaatccctgcaacttccccattgagtttt

SEQ ID NO: 504935 - DNA, 511 bp, Homo sapiens
acactggaagatttgagggatgtgaaagtgatactcagagggcttgctacaaacgatgaagcacttggtacaagtgctagaatgctagatacccagaatttatttgatatctagcacttggtacaatgcttggcatgctaaatacccagtacttatgttaattcggtaataaaaattactcttatgcaattttataataagttttctcccttaatctaaatagataagttttttcccctcagcrgtgttttgttttacatgacatgtaatggaaataaactcagatgcttgttttgtttttatgttttccagaaattctacagccaaaccctggtgtttcagattgcccagagtgctcaaaagcttaccctcctggcacgtgggcaaggtctagagccacgcctggaatttagtccttcagtcctggatctggggccactgctactttgtgcacctggagacgaggccgaggtgatagtgaagaatccctgcaacttccccattgagtttt

SEQ ID NO: 504936 - DNA, 511 bp, Homo sapiens
acactggaagatttgagggatgtgaaagtgatactcagagggcttgctacaaacgatgaagcacttggtacaagtgctagaatgctagatacccagaatttatttgatatctagcacttggtacaatgcttggcatgctaaatacccagtacttatgttaattcggtaataaaaattactcttatgcaattttataataagttttctcccttaatctaaatagataagttttttcccctcagcagtgttttgttttacatgacatgtaatggaaataaaytcagatgcttgttttgtttttatgttttccagaaattctacagccaaaccctggtgtttcagattgcccagagtgctcaaaagcttaccctcctggcacgtgggcaaggtctagagccacgcctggaatttagtccttcagtcctggatctggggccactgctactttgtgcacctggagacgaggccgaggtgatagtgaagaatccctgcaacttccccattgagtttt

SEQ ID NO: 504937 - DNA, 313 bp, Homo sapiens
atattttaacatatgataatcactcatgatcttttttatacagcatgcttcaactaatgtaatatatgtatattccaaaatcatgtagcatataaagaaagtttgggggaaattaagtaattgctccactagtttgccttattttagaaaggcttctgatggggggcggggggggaaatgtggctattcatatagccagcccctctgtttgccctttttataggcaatgactaagtrccaattactacaaggctacaattgttgcaacttttgcattaaagcccttaaaacagtaaaagcagtgaagtgccct

SEQ ID NO: 504938 - DNA, 573 bp, Homo sapiens
gctgtcctggctctgccccaggtctgggcaacctgccagctcagcctgtagttctgcagctccagaacttatactcactacagcccatctgtttgatgggctcatcagtgttcagaaattgttcttatttatcagtgttatcaggttacatgtctagaggataatattattcaaaagcaatatttacttggcttttcaatggaaaagagtctttcaaaatactttttctaatacctttataataatttcttaccaaatatcacttaatattttcattttccataataaactacatgcagttataaaagggtagagaaaaatagtctgtacaggtgttactgacatctaaagccaagaggatcttagaaatatttctctgtcagaaggtgataccgatatccagtgaaattaggtaactagtatagttttaaaactcagaatgctcttttacccctattcaggtttttactaaattctataaaacacaagagagggagccatggaatgacaaataggccctatsatgaggcaccaaactgctgaatcacataggcagtagagagctaattcatt

SEQ ID NO: 504939 - DNA, 615 bp, Homo sapiens
ctactctttgaaatattaaacccactatcaccttttattatgagaaagaggagaatgtaataaatgttttctgttctttgatgcttgagcctcaaatcaatgaacccagggattagtacatagcttttaaaaataaagatatattatttgatttgtttctggtaattggagcttgttttccttgtaacctcatttacctcctataaataattaatgtaactgcattgcraaagcagcctaggtttcatgttaatcagcacggaaatcatgtcagcttgacttactcacttaataaggcttcctgggtaagcagctttattgaaaacacacattggaacttattggtcaactagctgcccaggccaactcagaaaatcccacttttaatatggatgatagagcttgtgtgctgagctgcacttctaactcaggcagatatccagagggagggtaaagaacctaattaactttctgttaaagtaacacagctcttccagaggcaggtgcactctaaggccaaaaaggatggagtgggcttgggaaacctaatgctccccatgtaattataataacatttgtgtagcattttaaagtttacagagcacttttgtatcc

SEQ ID NO: 504940 - DNA, 533 bp, Homo sapiens
cagtgaactaggtttgttggtcactatcccacacaccaactgtaatgaggtaacagtgggattcatgccctagcagaggcatactcagggtccagaaagggtcatagaaggtggagatgctggaattgaaaaaggctctcttgtggagtagagatctgaatgatttgatcaacatttgaaggactcaaatgctgtggtagtgagagttttgcagagggaggtaacagcagcgcttccgagttgctctcggggacacaggctaatagcatacaagacgtccatctgagaagagatatgcataggagtgcaaatagtccagagaaaagatcagactgtttcctctggttatacttgcacccagccatgctgctcatacagtccctaacaacccctgagaaggggagttggagcttgagggaggggacaggaaacctatggaaagagagaggggggtggtgataacaagccyggctgttgagtattccagcacctgccagggatgccctggggatgccaggcctgccctgctgggg

SEQ ID NO: 504941 - DNA, 658 bp, Homo sapiens
aagtttttggatgagacgaggatgggatgagacttactcagatgaaacgtaaattcaacgaatagttactyggtccttattatgggccaggcactgggagttcagagatggatggggcaggctcttttcagaagaggagacagacagacaggcaaattcctccagtcagtttatgaagtactaaaggagagaaagctgtgaaatttacagacttgatcactttacatttttgaacaggcaagggagtgtttcatttccctgagcagaagggaacagtaccaaggaaaacaaagtgaataaatgacctgggggacattttaacagggccccgtgggatgtatttgagttggctgggcctagagaaatgggtaaaaatttcagtacttattttgacttgattcaactatggtcaaatgaccaaaagtcaggttggcatatctggtgtgtgtaaggctgaccatttccctaccgtttctggaggcagacattcttcatggatcccggtatgacttcagaatccttctcaacacaacactctgggaaaattactctaagtcatgcataaggggcacgttcaattaatcttatttctatcctttcccaaagccctaaattctgtcattttgagcaaatagtttttctcttaatggggatgtat

SEQ ID NO: 504942 - DNA, 658 bp, Homo sapiens
aagtttttggatgagacgaggatgggatgagacttactcagatgaaacgtaaattcaacgaatagttactcggtccttattatgggccaggcactgggagttcagagatggatggggcaggctcttktcagaagaggagacagacagacaggcaaattcctccagtcagtttatgaagtactaaaggagagaaagctgtgaaatttacagacttgatcactttacatttttgaacaggcaagggagtgtttcatttccctgagcagaagggaacagtaccaaggaaaacaaagtgaataaatgacctgggggacattttaacagggccccgtgggatgtatttgagttggctgggcctagagaaatgggtaaaaatttcagtacttattttgacttgattcaactatggtcaaatgaccaaaagtcaggttggcatatctggtgtgtgtaaggctgaccatttccctaccgtttctggaggcagacattcttcatggatcccggtatgacttcagaatccttctcaacacaacactctgggaaaattactctaagtcatgcataaggggcacgttcaattaatcttatttctatcctttcccaaagccctaaattctgtcattttgagcaaatagtttttctcttaatggggatgtat

SEQ ID NO: 504943 - DNA, 658 bp, Homo sapiens
aagtttttggatgagacgaggatgggatgagacttactcagatgaaacgtaaattcaacgaatagttactcggtccttattatgggccaggcactgggagttcagagatggatggggcaggctctttycagaagaggagacagacagacaggcaaattcctccagtcagtttatgaagtactaaaggagagaaagctgtgaaatttacagacttgatcactttacatttttgaacaggcaagggagtgtttcatttccctgagcagaagggaacagtaccaaggaaaacaaagtgaataaatgacctgggggacattttaacagggccccgtgggatgtatttgagttggctgggcctagagaaatgggtaaaaatttcagtacttattttgacttgattcaactatggtcaaatgaccaaaagtcaggttggcatatctggtgtgtgtaaggctgaccatttccctaccgtttctggaggcagacattcttcatggatcccggtatgacttcagaatccttctcaacacaacactctgggaaaattactctaagtcatgcataaggggcacgttcaattaatcttatttctatcctttcccaaagccctaaattctgtcattttgagcaaatagtttttctcttaatggggatgtat

SEQ ID NO: 504944 - DNA, 604 bp, Homo sapiens
agatcaaatgagtaaatctaacttaagaaaaaaaagtggtcctggcagtgtagtaattatcccaactcactggcatgaatacaaagagagaatataaagtgaaaaggagatgccttctcaaaggtcacgtcctggcgacactctgagcasccagtcttactgtgagctctctagctctgcgattctaactccctgcattctttgccctatttctttctgtatcatttcacttctaacatatcaacgtagatattgttatgcgcaaggtctccattcctctactagaatgaaatgccttgaaggcaggaatttttgcctgttttgctcactaatatatccagaacgtagaagtctgcctgggacgtaggaggtactctgctgaatgaatgaagtctgcctgggacgtaggaggtactctgctgaatgaatgaatgagtgttaaacacagtttgagcaggtctcagaggagcatgtgccgagtgcagcagagcccctgagctgcaggtgagtgaaggagacagacctgcgtaggcgggcaggccagggaaggctcccggggaggctgggctgtggctgagctttgaggactgggctagatgacagg

SEQ ID NO: 504945 - DNA, 604 bp, Homo sapiens
agatcaaatgagtaaatctaacttaagaaaaaaaagtggtcctggcagtgtagtaattatcccaactcactggcatgaatacaaagagagaatataaagtgaaaaggagatgccttctcaaaggtcacgtcctggcgacactctgagcagccagtcttactgtgagctctctagctctgcgattctaactccctgcattctttgccctatttctttctgtatcatttcacttctaacatatcaacgtagatattgttatgcgcaaggtctccattcctctactagaatgaaatgccttgaaggcaggaatttttgcctgttttgctcactaatatatccagaacrtagaagtctgcctgggacgtaggaggtactctgctgaatgaatgaagtctgcctgggacgtaggaggtactctgctgaatgaatgaatgagtgttaaacacagtttgagcaggtctcagaggagcatgtgccgagtgcagcagagcccctgagctgcaggtgagtgaaggagacagacctgcgtaggcgggcaggccagggaaggctcccggggaggctgggctgtggctgagctttgaggactgggctagatgacagg

SEQ ID NO: 504946 - DNA, 546 bp, Homo sapiens
ttatcccaactcactggcatgaatacaaagagagaatataaagtgaaaaggagatgccttctcaaaggtcacgtcctggcgacactctgagcagccagtcttactgtgagctctctagctctgcgattctaactccctgcattctttgccctatttctttctgtatcatttcacttctaacatatcaacgtagatattgttatgcgcaaggtctccattcctctactagaatgaaatgccttgaaggcaggaatttttgcctgttttgctcactaatatatccagaacgtagaagtctgcctgggacgtaggaggtactctgctgaatgaatgaagtctgcctgggacgtaggaggtactctgctgaatgaatgaatgagtgttaaacacagtttgagcaggtctcagaggagcatgtgccgagtgcagcagagcccctgagctgcaggtgagtgaaggagacagacctgcgtaggcrggcaggccagggaaggctcccggggaggctgggctgtggctgagctttgaggactgggctagatgaca

SEQ ID NO: 504947 - DNA, 607 bp, Homo sapiens
tggagtctcttcctatgtggcctgcatagatgggtcaccaggatgcctccagggttccatacctctataagtgctcccactggtttattatccctataatgcccctcctccacagcccaaagtgcaccattctttttaggttctacaaccttgtctctgaccctgttctcagatttggccccaatcctggtcatgcatagagcttcagctaagatcagaaaatgaagtccagtcacctccaggccagtaaaacagaaacacaggcagttttgtagatgccggggctctaccagcttaaggtggtcagttcccagcaaggctctttcagtccatctgcattttagaattttccagtccacaaggtacctggtgactctctgggcaaaaccaattgacaaggggacagttacttggcatacagagctgctgttcccaccatgtaaccctgatgcatttcaacagtcgtctttactcgrcgcagcacttggtcctgatatgcacgcagattgagaaaataaagaataacggctccccaggaaacagttccacaatatacacaaatgaaaaaggatttacacagtagaccctaaatagtttctaaggagcc

SEQ ID NO: 504948 - DNA, 672 bp, Homo sapiens
tgctgttcccaccatgtaaccctgatgcatttcaacagtcgtctttactcgacgcagcacttggtcctgatatgcacgcagattgagaaaataaagaataasggctccccaggaaacagttccacaatatacacaaatgaaaaaggatttacacagtagaccctaaatagtttctaaggagccattatggaaacaggtaaattaaatttaatttaactgtattttcttcgtttaaacaaatatatctggtgcttggaaaacagcaggttataaaaatgcttaatgtttctgtgaatattaagcatatgcaaaaaagacttctttgtgacactttttctgaagcccaatttctcaccatggcaagagggatgatgcccacaaaggttgtctggctgatgaagatctcagagacgaccagctcactcgtggagtcctcagtcagggactccccagccaggtaatttgccgggccctggtaaggccacgtctggtgcaagatttaacagaaggagccatttgttctggaaaacaaacatattaatgttccatttaaaatctgagactcagcagaacgtcaggaatgtaataaattgctacattcttctttgtcaaccaaaagaatgactgtcaagttcagtaagtcacatggcagtgttgtggagcctaatacac

SEQ ID NO: 504949 - DNA, 630 bp, Homo sapiens
tttgttacttgggcatagaaagctggggttttccttttgattcagttctaggaagtcagcataaattggccttaggttccctgcctccaaatcctattctcctgcttcactgagatataattaaaatttggattattaaatgaccttcctgcawaaatgtttgtatttccccataatccctacagttgccctgttaggtgtcttaggctcgtttcactgctctgttgctcagaacagtatctcctaggcagatggggttgagacagaaacctatcccaggatttttaattccagatccaatttctttctcccactaaacaacactgctttgctacggtataccaaaaccacctctctcttccatacaaatgacacaaatgaactctgtcagggaaacaattctagttttgttttttgctgattgtgaaagtgactaatgtttttgttaaatgtggaaaattacaaagaataaaattttaaaatatctattttcccactgccttgagataatcacaattaacttttgacgaatttatttctagtttcttctctgcatctatctttttctcaagaagatgaaagcatatttactatggttaccattcttagcatgctgcctttttaaagtat

SEQ ID NO: 504950 - DNA, 545 bp, Homo sapiens
tggtgcctgcatgggcaatgaatgctgcttcaagacagcacaaaagtggaggccacggtacctagccagcattagggctgaaggatttcagcgaagtgagaggtttctgtgggctgagcagagcttcaagagaggaagcaggtttagaactcatgcaaacatacacacgcacacacacacgggagcactcaaccaatatttgtgccaccaccttgtcctgcatcctgccacagctctgtttaacccccaccccacgccatgcacagagtaggctttgctttccattaggaagacactcgagtcacctgattcccacctgtctgtcaagcgcagttcctgctgctcccatcacactcacctagacatgcacacctgtgggcctttgcatcctgctcacctggacatgtacacctgtgggcctttacatcaagcttatctgaatgtgcacacctgtggggcatttacatcatgctcacctggatgwgcgcacctgtgggcctttgtattatgcatgcttggatgcacagagaggaaaacacaagttc

SEQ ID NO: 504951 - DNA, 586 bp, Homo sapiens
ctttctcattgtttcctctcatagcagagagaggtcatctgtctcatgtctcttctaagggcacaaatctcattcttgagagccccatcctcatggmctaatcacctcctgcctaatcacctcatggcctaatcacctaaaaaccctcgcctgcacgtaccatcccactgggtgtaagggcttcaacatatgaattttgtggacacaatcagtccagatgctttttagggcagcagtccacatgccctaaagttaaagagctaaaatatgatgagcagtgtatgtgcctgtctcaaacagttgctgatccactaggtgttgatatgaaccctattttatacataagaaagttgacatacagagaaggtgacatcacccaacttcatccaacaaacgagtggcatagctggggtttgagccagtggtctggcgccagagcctgccttccacatcacacctcatcataccccactgtgtggtcagcagcattcagcgagagcctgcctgtggtcagtattgcagtttcctctaaaagagcagatagagcactgttgtcattctttcccagcctcctcagacaagaagg

SEQ ID NO: 504952 - DNA, 586 bp, Homo sapiens
ctttctcattgtttcctctcatagcagagagaggtcatctgtctcatgtctcttctaagggcacaaatctcattcttgagagccccatcctcatggcctaatcacctcctgcctaatcacctcatggcctaatcacctaaaaaccctcgcctgcacgtaccatcccactgggtgtaagggcttcaacatatgaattttgtggacacaatcagtccagatgctttttagggcakcagtccacatgccctaaagttaaagagctaaaatatgatgagcagtgtatgtgcctgtctcaaacagttgctgatccactaggtgttgatatgaaccctattttatacataagaaagttgacatacagagaaggtgacatcacccaacttcatccaacaaacgagtggcatagctggggtttgagccagtggtctggcgccagagcctgccttccacatcacacctcatcataccccactgtgtggtcagcagcattcagcgagagcctgcctgtggtcagtattgcagtttcctctaaaagagcagatagagcactgttgtcattctttcccagcctcctcagacaagaagg

SEQ ID NO: 504953 - DNA, 586 bp, Homo sapiens
ctttctcattgtttcctctcatagcagagagaggtcatctgtctcatgtctcttctaagggcacaaatctcattcttgagagccccatcctcatggcctaatcacctcctgcctaatcacctcatggcctaatcacctaaaaaccctcgcctgcacgtaccatcccactgggtgtaagggcttcaacatatgaattttgtggacacaatcagtccagatgctttttagggcagcagtccacatgccctaaagttaaagagctaaaatatgatgagcrgtgtatgtgcctgtctcaaacagttgctgatccactaggtgttgatatgaaccctattttatacataagaaagttgacatacagagaaggtgacatcacccaacttcatccaacaaacgagtggcatagctggggtttgagccagtggtctggcgccagagcctgccttccacatcacacctcatcataccccactgtgtggtcagcagcattcagcgagagcctgcctgtggtcagtattgcagtttcctctaaaagagcagatagagcactgttgtcattctttcccagcctcctcagacaagaagg

SEQ ID NO: 504954 - DNA, 586 bp, Homo sapiens
ctttctcattgtttcctctcatagcagagagaggtcatctgtctcatgtctcttctaagggcacaaatctcattcttgagagccccatcctcatggcctaatcacctcctgcctaatcacctcatggcctaatcacctaaaaaccctcgcctgcacgtaccatcccactgggtgtaagggcttcaacatatgaattttgtggacacaatcagtccagatgctttttagggcagcagtccacatgccctaaagttaaagagctaaaatatgatgagcagtgtatgtgcctgtctcaaacagttgctgatccactaggtgttgatatgaaccctattttatacataagaaagttgacatacagagaaggtgacatcacccaacttcatccaacaaacgagtggcatagctggggtttgagccagtggtctggcgccagagcctgccttccacatcacacctcatcataccccactgtgtggtcagcagcattcrgcgagagcctgcctgtggtcagtattgcagtttcctctaaaagagcagatagagcactgttgtcattctttcccagcctcctcagacaagaagg

SEQ ID NO: 504955 - DNA, 594 bp, Homo sapiens
ggaccagctgcgggaacctgcccaagtccagcaatgaatggaataacaagtaaggcagagccacttctrtgtaaagtgggggggttttttttttttttttttttttttgaattggttctctcaatccagaggaaagacttcttgtacttttggggagtagacatacttggtaataagtccatttctatggaagtttgttcatagctattaatttcatctgctcacgatctattcttgataagcctttccaatttagaaaagtgcttcatgatactctcaacttaataattaccactgcctttgaggaatttttatcagagtttcagccatgagatatgcattaggcatttttgctggggtgaagaagcgcaggtgtgagtgtgtgtgtgtgaatgtgtgtgtgctagaaggggtcaggtgtgaagtggccacactgcttggctgtttctccctcaagctagagcacacagccttcttccaaaagggctttcttcccataagccctgtttcccacgtgtgcataaaaggacactcacttagggattttagtcaccccttttcccacccactatgctcagaccaagagtctcctcc

SEQ ID NO: 504956 - DNA, 404 bp, Homo sapiens
gcgggaacctgcccaagtccagcaatgaatggaataacaagtaaggcagagccacttctatgtaaagtgggggggttttttttttttttttttttttttgaattggttctctcaatccagaggaaagacttcttgtacttttggggagyagacatacttggtaataagtccatttctatggaagtttgttcatagctattaatttcatctgctcacgatctattcttgataagcctttccaatttagaaaagtgcttcatgatactctcaacttaataattaccactgcctttgaggaatttttatcagagtttcagccatgagatatgcattaggcatttttgctggggtgaagaagcgcaggtgtgagtgtgtgtgtgtgaatgtgtgtgtgctagaagggg

SEQ ID NO: 504957 - DNA, 594 bp, Homo sapiens
ggaccagctgcgggaacctgcccaagtccagcaatgaatggaataacaagtaaggcagagccacttctatgtaaagtgggggggttttttttttttttttttttttttgaattggttctctcaatccagaggaaagacttcttgtacttttggggagtagacatacttggtaataagtccatttctatggaagtttrttcatagctattaatttcatctgctcacgatctattcttgataagcctttccaatttagaaaagtgcttcatgatactctcaacttaataattaccactgcctttgaggaatttttatcagagtttcagccatgagatatgcattaggcatttttgctggggtgaagaagcgcaggtgtgagtgtgtgtgtgtgaatgtgtgtgtgctagaaggggtcaggtgtgaagtggccacactgcttggctgtttctccctcaagctagagcacacagccttcttccaaaagggctttcttcccataagccctgtttcccacgtgtgcataaaaggacactcacttagggattttagtcaccccttttcccacccactatgctcagaccaagagtctcctcc

SEQ ID NO: 504958 - DNA, 503 bp, Homo sapiens
ccctaatgaatcgtcaattactttctataaaaggcttctgataatcatatgacttcagaaaaacaactttctagagtcatacagaaggaataccaataaactcctacctgttctggcatggctccatgttcaattccagtcttcaataatctgtagcaattwccaaagagatcccattttgtgagatcatgtgcactgaaataaacaaaaatgcatctgtttttttttagaatggaaggaaatttaaatttgagctcagttcaggtgagtggaagaataaaataatttcatttcggctgggccccctgggtcacgcctgtaatccccgccctttggaaggccccggctggcaaatcccttgaggtcaggagttcgagaccagcctggccaacatggtgaaaccctgtttttttttaaaattccccccaaaaaattagctgggcatggtggggcatgactgtagtcccagctactcgggaggcttaggcaggagaatcacttga

SEQ ID NO: 504959 - DNA, 503 bp, Homo sapiens
ccctaatgaatcgtcaattactttctataaaaggcttctgataatcatatgacttcagaaaaacaactttctagagtcatacagaaggaataccaataaactcctacctgttctggcatggctccatgttcaattccagtcttcaataatctgtagcaatttccaaagagatcccattttgtgagatcatgtgcactgaaataaacaaaaatgcatctgtttttttttagaatggaaggaaatttaaatttgagctcagttcaggtgagtggaagaataaaataatttcatttcggctgggccccctgggtcacgcctgtaatccccgccctytggaaggccccggctggcaaatcccttgaggtcaggagttcgagaccagcctggccaacatggtgaaaccctgtttttttttaaaattccccccaaaaaattagctgggcatggtggggcatgactgtagtcccagctactcgggaggcttaggcaggagaatcacttga

SEQ ID NO: 504960 - DNA, 503 bp, Homo sapiens
ccctaatgaatcgtcaattactttctataaaaggcttctgataatcatatgacttcagaaaaacaactttctagagtcatacagaaggaataccaataaactcctacctgttctggcatggctccatgttcaattccagtcttcaataatctgtagcaatttccaaagagatcccattttgtgagatcatgtgcactgaaataaacaaaaatgcatctgtttttttttagaatggaaggaaatttaaatttgagctcagttcaggtgagtggaagaataaaataatttcatttcggctgggccccctgggtcacgcctgtaatccccgccctttggaaggccscggctggcaaatcccttgaggtcaggagttcgagaccagcctggccaacatggtgaaaccctgtttttttttaaaattccccccaaaaaattagctgggcatggtggggcatgactgtagtcccagctactcgggaggcttaggcaggagaatcacttga

SEQ ID NO: 504961 - DNA, 540 bp, Homo sapiens
ctgcagtgagcaggcacctttgtgcatgggcacctgctaggtgcggcggtgagagtgtatgtgcatagtaggtgtttgatgtctgttgaatgggagcatgcaaggctcagggtagggcctcagrtgcttagacaagctacatgtggcctccccgacaccccagggctcttcttgtcctccctcacagtagtcttcctagcactctcagaaggaccagcctctctcagctcatggggacccactgcccaggatgctgctggtgagtgttggttcctgggggatacttgacctttctgttgcaaacgcttacacccacgcttgtgcaagtacactcagatcccctgctctcggccgaacctgggggttgtgtgaggatgcaggcagcagtgagtgcagaggaagccaaggagggacttatggacctcagggagcccctgatgggcccatcattggccctgatgactgaggtcgggtcgatgttgctagcaccttggataggtccagccctaagctgggctgggtctgagcagagtggagatg

SEQ ID NO: 504962 - DNA, 627 bp, Homo sapiens
ctgctgcagtgagcaggcacctttgtgcatgggcacctgctaggtgcggcggtgagagtgtatgtgcatagtaggtgtttgatgtctgttgaatgggagcatgcaaggctcagggtagggcctcagatgcttagacaagctacatgtggcctccccgacaccccagggctcttcttgtcctccctcacagtagtcttcctagcactctcagaaggaccagcctctctcagctcatggggacccactgcccaggatgctgctggtgagtgttggttcctgggggatacttgacctttctgttgcaaacgcttacacccacgcttgtgcaagtacactcagatcccctgctctcggccgaacctgggggttgtgtgaggatgcaggcagcagtgagtgcagaggaagccaaggagggacttatggacctcagggagcccctgatgggcccatcattggccctgatgactgaggtcgggtcgatgttgctagcaccttggataggtccagccctaagctgggctgggtctgagcagagtggagatgagtgagaagcctttctactccacgttttcccacagcatttccratagagcgtgttgagggggtcccagaaagtgcagctctcag

SEQ ID NO: 504963 - DNA, 600 bp, Homo sapiens
cagggggcataaacatgctgccttctcccatggatactgtgagggtcagaygtaggacagccacaaatcatggcctgctcaggcctgcgtcccaatgcaattattaacagcaccttcttcagttgcagaattttgtcagttaaagcaatgaattatacagtttccctggtgaaatgagatcacgtatattaagcacttggtacatcgtaagtgcacaattttatgtctaaaatgatcatacgactcagagatggaagatggtgactttctcttctataatttcacataatttctgactccaagctccatttctggttgaagcagaaaactcagcctagtcattttcagataaatttggttattttagaattatattcaaatccagagttctatcttcttccttcttccatgggtagagtctagactgggggagtggtggcttatgcaggtcacagcattggaccgggagggaatatttggtgtttacttgacttcccttggcttccttcctccacctctctgattacttcctcccctgctgatggcatcggggtcctgctgtggtccacagctcctcctctgctgtggaacccccaaacc

SEQ ID NO: 504964 - DNA, 600 bp, Homo sapiens
cagggggcataaacatgctgccttctcccatggatactgtgagggtcagatgtaggacagccacaaatcatggcctgctcaggcctgcgtcccaatgcaattattaacagcaccttcttcagttgcagaattttgtcagttaaagcaatgaattatacagtttccctggtgaaatgagatcacrtatattaagcacttggtacatcgtaagtgcacaattttatgtctaaaatgatcatacgactcagagatggaagatggtgactttctcttctataatttcacataatttctgactccaagctccatttctggttgaagcagaaaactcagcctagtcattttcagataaatttggttattttagaattatattcaaatccagagttctatcttcttccttcttccatgggtagagtctagactgggggagtggtggcttatgcaggtcacagcattggaccgggagggaatatttggtgtttacttgacttcccttggcttccttcctccacctctctgattacttcctcccctgctgatggcatcggggtcctgctgtggtccacagctcctcctctgctgtggaacccccaaacc

SEQ ID NO: 504965 - DNA, 644 bp, Homo sapiens
tactcacagaaaaagagagaaaaatatatatgacaggagataaaatactacatttaaacttagctaaggtaacagcatttatgaatcatgaaaagttatgcagaaactgaggtcatcattgaaaattcattcaacaaacatttgctgagcacctactacatgctgggcattggaagccttcccaacacctggaagaatctcctccccatttccacagcttccttttcgcatcacacatagaaacaagaagccacagagtgggaaaagcccaggtagattcagcacatttatttataccccaaagaatacgcattgaatttttagttgaaaagctcaagtagattttgatagagaagggatagcaagtaatgatttccttctttcaaacacacacacattttgtaagttcctgaaacttggatccattcaatagtcaacatctagcattaatagagtgataaaagaaaaacttcagcagaattaaatttgaaagagtttaattgagcaatgaatgattttgaattgggcagcctcctgagccagagkagactcagagactccagcgcagccacgtggtggaaaaagatttatggacagaaaaaggaaagtgatgcacagagaacagaagtgagggacagaaacag

SEQ ID NO: 504966 - DNA, 657 bp, Homo sapiens
tcccagctggccacttccaggcacatccaggcctcagtttccctgcctgtttaaggggggcatgtattctctggaatccctgccagcagcatgattctgcatgaagttcyacttccaagttccggttatcaaccccagaaactcatcataaaagagggagaagtggctcatgcctgtaattccagcaggctgggaaattgaggcaggcggatcacttgaggacaggagtctgagacctgcttgggcaacacaggaagactctgtctctactaaaaatttaaaagccaggcctggtggcacatgcccgtggtcccagctactcaggaggcccaggtgggaggattgcttgagcccaggagttcggaggtacagtgagctatgattgcaccacggtactccaccactactctgggtgatagagcaagaccctttctcaaaaaataaaaataaaaaattggctgggtgccgtggctcacgcctgtaatgccaccaatagacagatcacctgaggtcaggagttcgagaccagcctggccaacatggtgaaaccctgtctctactaaaaatacaaaaattagctgggcgtggtggtgagtggctgtaatcccagctacttgggaggctgaggcaagagaatcgcttgaacccaggagagag

SEQ ID NO: 504967 - DNA, 657 bp, Homo sapiens
tcccagctggccacttccaggcacatccaggcctcagtttccctgcctgtttaaggggggcatgtattctctggaatccctgccagcagcatgattctgcatgaagttctacttccaagttccggttatcaaccccagaaactcatcataaaagagggagaagtggctcaygcctgtaattccagcaggctgggaaattgaggcaggcggatcacttgaggacaggagtctgagacctgcttgggcaacacaggaagactctgtctctactaaaaatttaaaagccaggcctggtggcacatgcccgtggtcccagctactcaggaggcccaggtgggaggattgcttgagcccaggagttcggaggtacagtgagctatgattgcaccacggtactccaccactactctgggtgatagagcaagaccctttctcaaaaaataaaaataaaaaattggctgggtgccgtggctcacgcctgtaatgccaccaatagacagatcacctgaggtcaggagttcgagaccagcctggccaacatggtgaaaccctgtctctactaaaaatacaaaaattagctgggcgtggtggtgagtggctgtaatcccagctacttgggaggctgaggcaagagaatcgcttgaacccaggagagag

SEQ ID NO: 504968 - DNA, 657 bp, Homo sapiens
tcccagctggccacttccaggcacatccaggcctcagtttccctgcctgtttaaggggggcatgtattctctggaatccctgccagcagcatgattctgcatgaagttctacttccaagttccggttatcaaccccagaaactcatcataaaagagggagaagtggctcatgcctgtaattccagcaggctgggaaattgaggcaggcggatcacttgaggacaggagtctgagacctgcttgggcaacayaggaagactctgtctctactaaaaatttaaaagccaggcctggtggcacatgcccgtggtcccagctactcaggaggcccaggtgggaggattgcttgagcccaggagttcggaggtacagtgagctatgattgcaccacggtactccaccactactctgggtgatagagcaagaccctttctcaaaaaataaaaataaaaaattggctgggtgccgtggctcacgcctgtaatgccaccaatagacagatcacctgaggtcaggagttcgagaccagcctggccaacatggtgaaaccctgtctctactaaaaatacaaaaattagctgggcgtggtggtgagtggctgtaatcccagctacttgggaggctgaggcaagagaatcgcttgaacccaggagagag

SEQ ID NO: 504969 - DNA, 432 bp, Homo sapiens
tgacttttaggtgatcagagtagaataaaatggtttatgtgcatcakatttttttttattggttactaatcaagtatctttgtgtttttcaaaagtattttagccttaattatactttttaggagaaaattatacttttaggagaggaagtttattgaacttgccatagtctccaaatttaccagggaattaacaaaagtggcccaaggtgctctctattaaaataatttaatacaaatagaatttttaaaagatataatttccatttgttgacagtggtgaaaacaggaagtttgtgtctgttgattctggggtttcactttgagtaccatggctaagtaacagatgagagccaaaattaatcatcaataaaaaaaatgactaaaaatataaagcatgcctcttcaacagtttttcataagatataaatat

SEQ ID NO: 504970 - DNA, 665 bp, Homo sapiens
cccggggggcatgtgttacagggtgctcttttagtttaaccatcataggcagcttgtgttagctcaattagacctctgacttattgcaaggacagaggctttctgtatcccaggggttcttgccttggtgtcccggaagaattggatcatgtgtcggcttggagaatgagttcaaggttttattcagtgggagtagctctcagcaggtagggtagccagaaggcagatagttttcccttggagtcgggccccttggtggcctgtgctctcctctgactgccccagccaaactttgggtcattctgctggtcggtggcctgccagcatgctggtgcctgtcagtgcattcctctcgacatccagccacccatgtgctcctcccracatccagccacctgtgtgtctgcctgcttgcttgggtctcgggtttttataggcacaggatgggggcgtggcggggaaattcaacatttgggcagaaaaacaaaaatgcctatcctcacctaggtctgtgggcacaggcccagggttggagccctagccagggatcatgccctcctctacccagcacttccctgccccgcttccatatcatttaaagggaccacgcccttctcttctcagcatttcgcttctctatcagtagggaaaccaagagacaggga

SEQ ID NO: 504971 - DNA, 448 bp, Homo sapiens
acttgaatacaggaggtggagcttgcagtgagctgagatcgtgccactgcactctagcctggatgacagtgagactctgtctcaaaaaaaaaaaaaaaaaaaaaaaaggaacaattgactgttttatcaaacattttccatgcatatgtatttttcaacaaaaccataccttgaatactattctgtactgatgcaatgatggtctcataagattataacaccatatgtatttttactgtactttttctatgtttagatagatacttcccgctgttccagttgcctacaatattcagtgcaggaacatgccataaaggtttgtagcctaggaggaataggccatgccatacagcctgggtgtgtagtagagtacaccatctaggttggtgtaaggayactctatgatgttcatgcaatggcaaaatcacctaatgacatgtttctcata

SEQ ID NO: 504972 - DNA, 409 bp, Homo sapiens
gaaaatgaagttagtgataatttggggatttttgtttttgttgtttatttgggtttttttccctgcaaatgagcaatttggttgattcttggraggaagagaccacctaagaccaaatagaagcatgtactttctccttttggaagtgtgcacctgaatttgctttttctcagatgacctgaaccacgggaaaaaacagacaagcttggtattggcataggcttggacatctgggccagtggctgatcaagcctttctcctatgaacttaagttcagttcctagttgttgggcaagccagaagagcaggcagagctttgggttcggggacattcatggggctcgtggcccactgcacaggtatgaacattgctcctataggaagactgaattaacaggaaagggcccca

SEQ ID NO: 504973 - DNA, 663 bp, Homo sapiens
gcaggctgagcccatggccttggcttttggagatctgtgttcaagttctgtctccatggttaactttgccttgagcaagccacatctccataaacctgattgtcctcattctgaaaatgaagttagtgataatttggggatttttgtttttgttgtttatttgggtttttttccctgcaaatgagcaatttggttgattcttgggaggaagagaccacctaagaccaaatagaagcatgtactttctccttttggaagtgtgcacctgaatttgctttttctcagatgacctgaaccacgggaaaaaacagacaagcttggtattggcataggcttggacatctgggccagtggctgatcaagcctttctcctatgaacttaagttcagttcctagttgttgggcaagccagaagagcaggcagagcttkgggttcggggacattcatggggctcgtggcccactgcacaggtatgaacattgctcctataggaagactgaattaacaggaaagggccccatttattcccacatgtccaggccgagtcagcatcagataaggagcagtattgcattgggaggaggagcatgggtgctaggctctgactgactgacatctacccctactctgatgcttactgggctgagccaagcctcagtttt

SEQ ID NO: 504974 - DNA, 601 bp, Homo sapiens
ccatcgacagactcctgcctatgtggcagacgtcaagcaggcactttacccaccaagcctcatttaactcccagaaaaactcctttgcaaatgaaagtgttttcactaccattttgctcctaaaaagagtgggacttagggatgctaaagatttgctcagggttatacaacaagtgatgtctgtctgccaccaaagtccatgtgtcaaaccactgcaatattcctggaaatattcacttttaaawgctctggctaactatctaatcgctatttttttaaaagaacattttattatgttaaccaaacctctactctgcaattaactctaattacacaagcaattaaattgggagtaagattattttgcagtttgaagctatttatgctgacattagattttcctctaattaattctatttctttgttctaattgttatttaattaacagactttctaattctacctacatgttttttaagtaccagtttatccctgtgctcacacatctgggcccaccacatctgctttgatggaatttcccagaggagagaaagagaaagaagaattggtcaatttctgttgagctagttggaagcaaagc

SEQ ID NO: 504975 - DNA, 601 bp, Homo sapiens
ccatcgacagactcctgcctatgtggcagacgtcaagcaggcactttacccaccaagcctcatttaactcccagaaaaactcctttgcaaatgaaagtgttttcactaccattttgctcctaaaaagagtgggacttagggatgctaaagatttgctcagggttatacaacaagtgatgtctgtctgccaccaaagtccatgtgtcaaaccactgcaatattcctggaaatattcacttttaaatgctctggctaactatctaatcgctatttttttaaaagaacattttattatgttaaccaaacctctactctgcaattaactctaattacacaagcaattaaattgggagtaagattattttgcagtttgaagctatttatgctgacwttagattttcctctaattaattctatttctttgttctaattgttatttaattaacagactttctaattctacctacatgttttttaagtaccagtttatccctgtgctcacacatctgggcccaccacatctgctttgatggaatttcccagaggagagaaagagaaagaagaattggtcaatttctgttgagctagttggaagcaaagc

SEQ ID NO: 504976 - DNA, 601 bp, Homo sapiens
ccatcgacagactcctgcctatgtggcagacgtcaagcaggcactttacccaccaagcctcatttaactcccagaaaaactcctttgcaaatgaaagtgttttcactaccattttgctcctaaaaagagtgggacttagggatgctaaagatttgctcagggttatacaacaagtgatgtctgtctgccaccaaagtccatgtgtcaaaccactgcaatattcctggaaatattcacttttaaatgctctggctaactatctaatcgctatttttttaaaagaacattttattatgttaaccaaacctctactctgcaattaactctaattacacaagcaattaaattgggagtaagattattttgcagtttgaagctatttatgctgacattagattttcctctaattaattctatttctttgttctaattgttatttaattaacagactttctaattctacctacatgttttttaagtaccagtttatccctgtgctcacacatctgrgcccaccacatctgctttgatggaatttcccagaggagagaaagagaaagaagaattggtcaatttctgttgagctagttggaagcaaagc

SEQ ID NO: 504977 - DNA, 619 bp, Homo sapiens
ctcaccattaagatggatggtttcaaagctgtgtgcctctgctggaaattaaaaacccatggaataactgattatgattaattttaagtacttagccatgtgaagccaaatgagagtgtctttaaaacaaasctattgatctggctttgtttggaattgagaagataaactaatcagatcctatgggctctttgcaatgataaggaatgagaactttttttttttctttcagtcacaggtttttaaagcttcaacttggagacacctggtgcatctggataccgttttttcgttttttttttgttttttttttttttatctgagtagaggagagctgtccaaatctgtcctgggcaagggcttgatgggggtgagggtgtataggggcaaagttaggaaagtggaagggatggcagttatgagagcccctcctatgtagtacatacactgtctgtttttaaaagttggggagatagactcagagagatgaagacacttgacccaagccccacccaggtgtgtctggctgtaaagccctctcttctccctcagactgccttcctggtgaggtaagacaacaccgttcctagcacagagaatgaccgtgagggctgtcagg

SEQ ID NO: 504978 - DNA, 619 bp, Homo sapiens
ctcaccattaagatggatggtttcaaagctgtgtgcctctgctggaaattaaaaacccatggaataactgattatgattaattttaagtacttagccatgtgaagccaaatgagagtgtctttaaaacaaacctattgatctggctttgtttggaattgagaagataaactaatcagatcctatgggctctttgcaatgataaggaatgagaactttttttttttctttcagtcacaggtttttaaagcttcaacttggagacacctggtgcatctggataccgttttttcgttttttttttkttttttttttttttatctgagtagaggagagctgtccaaatctgtcctgggcaagggcttgatgggggtgagggtgtataggggcaaagttaggaaagtggaagggatggcagttatgagagcccctcctatgtagtacatacactgtctgtttttaaaagttggggagatagactcagagagatgaagacacttgacccaagccccacccaggtgtgtctggctgtaaagccctctcttctccctcagactgccttcctggtgaggtaagacaacaccgttcctagcacagagaatgaccgtgagggctgtcagg

SEQ ID NO: 504979 - DNA, 619 bp, Homo sapiens
ctcaccattaagatggatggtttcaaagctgtgtgcctctgctggaaattaaaaacccatggaataactgattatgattaattttaagtacttagccatgtgaagccaaatgagagtgtctttaaaacaaacctattgatctggctttgtttggaattgagaagataaactaatcagatcctatgggctctttgcaatgataaggaatgagaactttttttttttctttcagtcacaggtttttaaagcttcaacttggagacacctggtgcatctggataccgttttttcgttttttttttgttttttttttttttatctgagtagaggagagctgtccaaatctgtcctgggcaagggcttgatgggggtgagggtgtatrggggcaaagttaggaaagtggaagggatggcagttatgagagcccctcctatgtagtacatacactgtctgtttttaaaagttggggagatagactcagagagatgaagacacttgacccaagccccacccaggtgtgtctggctgtaaagccctctcttctccctcagactgccttcctggtgaggtaagacaacaccgttcctagcacagagaatgaccgtgagggctgtcagg

SEQ ID NO: 504980 - DNA, 531 bp, Homo sapiens
gccgtgagagcatcatttaatggggccrtaggagatgtaactacaagacaccaacactgtccttagagaacaaaacaagaccatttctgaagcagagctaaagctgagaatcttggctttgtggtctatttatttttcatgtagctggaaaccatgtttaaggctaacactgggtcaaaggaatctctcgagatatttaaggcatgacacaaaagcataagaatgatacgttggactttggggactcgggggaaagggcggcaggtggcaagggataaaagactacacactgggtacagggtacactgctcaggtgatgagcgcaccaaaatttcagaaatcaccgctaaagaacttgttcatgtaaccaaatgccacctgttccccaaaaacctatggaaataaaaaataaggtatgggcagcaaaaggcagattaaagggaatggggccagggacatcctgctaaagaaaaattttggaaaactccttgtgtttcaattcctgtgaaatgtattaaaagtcaagtacag

SEQ ID NO: 504981 - DNA, 531 bp, Homo sapiens
gccgtgagagcatcatttaatggggccgtaggagatgtaactacaagacaccaacactgtccttagagaacaaaacaagaccatttctgaagcagagctaaagctgagaatcttggctttgtggtctatttatttttcatgtagctggaaaccatgtttaaggctaacactgggtcaaaggaatctctcgagatatttaaggcatgacacaaaagcataagaatgatacgttggactttggggactcgggggaaagggyggcaggtggcaagggataaaagactacacactgggtacagggtacactgctcaggtgatgagcgcaccaaaatttcagaaatcaccgctaaagaacttgttcatgtaaccaaatgccacctgttccccaaaaacctatggaaataaaaaataaggtatgggcagcaaaaggcagattaaagggaatggggccagggacatcctgctaaagaaaaattttggaaaactccttgtgtttcaattcctgtgaaatgtattaaaagtcaagtacag

SEQ ID NO: 504982 - DNA, 531 bp, Homo sapiens
gccgtgagagcatcatttaatggggccgtaggagatgtaactacaagacaccaacactgtccttagagaacaaaacaagaccatttctgaagcagagctaaagctgagaatcttggctttgtggtctatttatttttcatgtagctggaaaccatgtttaaggctaacactgggtcaaaggaatctctcgagatatttaaggcatgacacaaaagcataagaatgatacgttggactttggggactcgggggaaagggcggcaggtggcaagggataaaagactacacactgggtacagggtacactgctcaggtgatgagcgcaccaaaatttcagaaatcaccgctaaagaacttgttcatgtaaccaaatgycacctgttccccaaaaacctatggaaataaaaaataaggtatgggcagcaaaaggcagattaaagggaatggggccagggacatcctgctaaagaaaaattttggaaaactccttgtgtttcaattcctgtgaaatgtattaaaagtcaagtacag

SEQ ID NO: 504983 - DNA, 480 bp, Homo sapiens
agggtggtctgatggtgggtgctggagtgacttaggagtctgggtttgtagaatcttgaacctttcaagtcctgaggcctttgcgtagttagagatattgtaagaggggaaaagagaacctgtaaaacaaaatctgagaaaccctagcaactattaagaacaactgtgggatttattcactttcttaacaatcaaaaacatagtcagcaattaactgtccagctctggttatacatcactacaatatgttctttttggttaatggatccatttaaaattagtgtcatgagatctgactgatatatcactttatatacgcaaaatgttcttttggggttcaaccatcagaaagctggttgaccctgagttagtcactgcccctctctgggcctccattttctcataccctgacgttctggcaggctaattaacatagttgtttttggytcatgtgaacagtcttgagttcttggaatgcat

SEQ ID NO: 504984 - DNA, 495 bp, Homo sapiens
tgtcttttcaatgggggtgcttttaggaaaaagtaaaacgcagagttattatctgtcacatccagtctgtgtcacctgccccccttctttcttctggagcttcctggaaacacagagctttacatctatggtttttctttccctccaaggccaaggcaggtctggaaccccatgtttctcaaagccaaggcctttggagctcagcagtcatgctttctttgcaatgacataaaataaaagcaaatagagtgctacgtgtcagtctcatgctagctccaaacatctctactttttaggaataatctttcgcttagcattgtttttttttttaaaaaaggtatcttagagtcaatccaagaacctggctccttctccctgtttcttttttaaaatgttcagcttcccctcccccacataggaaaagcagccaggatcctgcagatctacaggtaggacgayagtggcagagctagagttagaactaagctctactgc

SEQ ID NO: 504985 - DNA, 585 bp, Homo sapiens
gtgacattagctaagcaaatggtgaatcattcagtcagagttctatatgctttgtgacaatgtaaaactaatctcttctatcaggacggaaaacatgcacacaacacaggaagaattcccacagttctagggtaagagaaatgagtctgtctgacgcagaacggtggttcagaaccatggttggtggcaccatgacctgactctacatctaccctcactcgccaaggcaccccttggttaatagcagaaggaggaatttgaatgtcggaaccatctgcctagtcatagcatggtaggtttgacaagcagcgtagagtgctgcactttgggcgtgaggtagggagaaaatgggagagatgcacagacttcttactcacagagttcggatcttcggcatgtggttgaagctggtgaccaggatgcgactgatgttgttgttgttgagggtactgtggagatagasaagggagatggtcagccaggcagcagcaggggaggcaccaagatgcttgtagtaggtcgggggagggatggttgtgactgcaagaccatgagtcaacagtcatggcccagccagtggagcag

SEQ ID NO: 504986 - DNA, 585 bp, Homo sapiens
gtgacattagctaagcaaatggtgaatcattcagtcagagttctatatgctttgtgacaatgtaaaactaatctcttctatcaggacggaaaacatgcacacaacacaggaagaattcccacagttctagggtaagagaaatgagtctgtctgacgcagaacggtggttcagaaccatggttggtggcaccatgacctgactctacatctaccctcactcgccaaggcaccccttggttaatagcagaaggaggaatttgaatgtcggaaccatctgcctagtcatagcatggtaggtttgacaagcagcgtagagtgctgcactttgggcgtgaggtagggagaaaatgggagagatgcacagacttcttactcacagagttcggatcttcggcatgtggttgaagctggtgaccaggatgcgactgatgttgttgttgttgagggtactgtggagatagacaagggagatggtcagccaggcagcagcaggggaggcaccaagatgcttgtagtaggtcgggggagggatggttgtgacygcaagaccatgagtcaacagtcatggcccagccagtggagcag

SEQ ID NO: 504987 - DNA, 569 bp, Homo sapiens
accactcatacactgggacctggaactacttaaattgcctcagtttctttatgtgtcaaatggcgtttgacacataaagcactaatactaatagtacttacataataaggttgttgtaaggattaattgagttggtacaagtaatgtcctggcacgcatctggcacatagtgagtgcttcctataataaacagtagctgggtttgttgttgttttactattatttttcctccagaaaggcgagagttgcatcagccttggaagaggcaggactgagatgtttgggaacaagaccactttcacagggggcagccttttgagaaatgtcatgtctacttgatagggctttaaatatggagtagtgggaatctgcacatttggattcaaatcctggcttttccaatggctgatgatggaacccttataggctcaaatcactcacttctctgagcctcccmaaaaattgagaataacagtttttattccatagggtagttttgagaattggtaagatgatcataaatgtagaagggcctggtactcataactgttttcttcatttatttattt

SEQ ID NO: 504988 - DNA, 121 bp, Homo sapiens
gaagatctcccatagcaggatcccaaaagaccacctggaggyagggccagggctcagtgtggctcagcgccctcccgacgaccggggctaggacgggggaccccacagacatgacccacca

SEQ ID NO: 504989 - DNA, 533 bp, Homo sapiens
aaaccacaattctgtctgatggagacacaggcttggagaggagaggaggggatagatcaggcatcatgaaatgtttctggagcactcactctgagcttcacggtctgggcttgttcactggaggtcagagagtatatgtccttagtcttgttggaagtgactgtccaactggatgagaccagatttagaagccattagttactaccaggactcagggaaaatggctgcctgtaggggtgggaagactaccaggaggaggagtcttctaaacwggatgaatggagtctgcccaggggaaaaggcagagtgactggcatgagcataggctggacaggatgtggcttgtcctggcactgggcagttgggggaagtgagagcaggagggcagggattagtggccaccataccaagcttcagaaggaggtttaagaagaagaaaacttaaaggtggatgcttgagtccttcgggctggggctgggcgtacaggctcaggttagcgacaggacctggtatttggggcaggaaggagact

SEQ ID NO: 504990 - DNA, 608 bp, Homo sapiens
tgtttttttgaagcaaatatatttaaggaaaatagtaaactagatcctaaagtttaaaatacctttccttgttgtatcctctgctttctttttccttgtctattaagtttaagacaaatttacaatgaaaataaagtggacctctgatggtaccctgaagtctgaattttttattattattatcttttctttttcattaggtctgactcctgtgtaactatgcctggcagggaaggagatactacccaagcaggcactgttattatttggagctataatatatcccttttayaggttgttttgcatttctttcctggagataatagcagtataattttgaaatattctttagtagaagcttctactattatacatcatagaaaaaatttgacttgcactggtcactgtaatatatttgtcgttacatatattcagcaactgtttatagcaagtttggcttagttgactgatacatttccttaattatttagataagaataatcataagcattaaatatggaaggaaagttggtttgaggctacccagaggactgtgagattttgttgcatttcggtctgacatgtccttacatgcttcagtatagaag

SEQ ID NO: 504991 - DNA, 455 bp, Homo sapiens
ttgttaataaaacacacccttactgcaggacgtattagagactatgttaggatccaaattcactatgaaatcactaaaaacatttcttgcagagtagttcctattgttctcatttgaaagataagaaaactgaggcttagttcaaatgacttygtctgcaatatcctgcaattaatctcattccttttgtttaatatttatttgatttatacctaaagaggataattctaaattctgttccttctgtcttctatactaccacttgtattactgttaatttttcaaatacagactcccaaaataaagcatataagtagaatgatttgtctgccttttcaattgcagtacagaatataattagtctacagtataacttttatatatatatatattttattatactttgagttctagggtacatgtgcacaatgtgcaggtttgttacatatgtatac

SEQ ID NO: 504992 - DNA, 566 bp, Homo sapiens
tgcggctcactgggggaccccaatgtaccacactataacaaagtttttatcaatgtcatcttgatccagtttcgaggacctggctggaagacaatcagtttcccctcttaaacaactggttatgtccataccccaaccacttcccttaacaggctttaggacaatgtgcacctgctctgatcttccccggtccaggtaccagacaaccaggcacagccactctgtcccaaagcccactgaaaattgctcacactagccaattctgagcctacttaccatgcctcacgggttcctttctgagggtaaaggtacttgyccacagatcccctctctttgcctgctttgtgaccgactctggtgcttcccccagcagcgctgcatggtgagatgtgttcctcctagggaattgtgagtaagaaacctgtaaaactctctctggtttttctcctttgatctttggcctcttcacaccttacccaaggtaatatggttaaaacacacacgttgtctatgttctctgaatgtgtgcattagatagggtaatgataactgctgtcaccaatcaa

SEQ ID NO: 504993 - DNA, 519 bp, Homo sapiens
ctgcttcggggccacaacagcagtggtgagtcaycctaacagaggccgcgccctctaccagggagccatcctgggggagggatgccgcagtgggtgggagctggtggtggggaccctccctcccgcagacagaagggcaggtctctgcaagggggccgtccagtggggacacctgaggcatcactgtgacaagtgactcttgcaaggccattcctgggccaccatttcaactgaggcatcagactgaccttaatcctgcctttgaggcatggaagtctctgggaatatttgtggttgtcatgactggtagggcaggatgctctggcatggagtgggtggaggccagggacgctgctccgcaccctgcagtgcccaggacggtcccagccagaggatgacctggccccaaacatccacagtgcagagcgggacaggccctgtgctaagagattgatttcgctttcattgtgagcctggcacagggctcactccgcccttcaaatccacaacctcattgaa

SEQ ID NO: 504994 - DNA, 485 bp, Homo sapiens
cgtgttgtccaggctggtctcacacccctgacctcaggtgattcaccggcctcagcctcctgaagtgctgggattacaggcacccgccaccacacctggctgatttttatatttttagtagagacagggtttcaccgtgtggtccaggctggtctcacactcctgacctcaggtgattcacccgccttggcctcctgaagtgctgggattacaggcgtctgagccaccgcgcctggcctcggctgtttatttgctgaatgactttgggcmagtcgcttctgtttctgagcctcagtttccccatgtgtaaaagggggatttattcctagcatcttcctccggaacacactggattaaaccagccaatgcatataaatggcctgaaccaaagtcaccactcactccataggcaccaccattaccccagcgggactcttctggaagattctgatctgctgtacagcacccccagcgggtccctgccc

SEQ ID NO: 504995 - DNA, 428 bp, Homo sapiens
gagaaaaaaaaaaaagaaaggatcaggtgtggtggctcacacctgtaatcccagcactttgggaggccaaggtgggtggaacacaaggtcaggagttcaagacyagccaggccaatatggtgaaaccccgtctctactaaaaatacaaaaattagctgggcgtggtggtgggtgcctgtaatccagctactcgggaggctaaggcaggagaattgcttgaaaccaggaggcggaggttgcagtgagcccaggttgccccactgcactccatcctgggcgacagagtgagactgtctccaaagaaaataaagaaaaaaaaaaagaaatagggggccaggtgagccccatcccgaagctttagaatcagcacttgctattgaacaaagtccagaggtcactcttgtgcctgctaaggactgaaagacaca

SEQ ID NO: 504996 - DNA, 490 bp, Homo sapiens
ggttctgaacctcagctaccttagttctgaaccataaacacttgcttccagagaaaaaacaactgctgtctaaaaggatgggctgggtattatttgattattgctgagcctgtgacattttcaaacaattctcaggtaacttatgtctgatgtaaaacaaaatcctatggaatcaggtttgtttcagtaataccactggttatttgaaacagatgttggcaraaatgtgcttcttttgagtttcttattgttgagaaagacaaatattttgaatatcattctactgcccttgtgaaacacaacagaattccaaacccatttttgccactagcaacttaccttcagggactccttcttatcaacagacatctttacgcaagttacctgccttctcaaatcccaaggatttcatgtaaacatgagaagggtgtgctgtaccaggcacatagcaggagctcaataaatgcctgctgtgtgaatgaatggtgct

SEQ ID NO: 504997 - DNA, 520 bp, Homo sapiens
tgcagattccaggccctactgccagagattctaattatgtctgatgggggccaggtgtgatggatgaatttaaaatttttcaaaatctgtaagaatwacaccaagatgtttaaatggtcctttttacttacttttgtatgtgtatctgtggaaggccaaatcatactttcagacatgtctgcttcaggggctaaaataattcaatcagaccttagtttcttgccatatcttggcttggttttcctctgcgttagtattcatcttagacaggatttcccgtaagtggccataaatatcttcaggtttaccttcttctagctttgttcaggggaaaaaagattcttttttgctgtaatcccaaagacccacagttgagtctcactgttctgatttgcccatccttgaaccgattagtataaccaggagcagctgatactctttttgaccaggtctgggtcaaatgtccaccacgcagagccaggggtggaaccggcaccaccagaaaccatcaactaaaagt

SEQ ID NO: 504998 - DNA, 520 bp, Homo sapiens
tgcagattccaggccctactgccagagattctaattatgtctgatgggggccaggtgtgatggatgaatttaaaatttttcaaaatctgtaagaataacaccaagatgtttaaatggtcctttttacttacttttgtatgtgtatctgtggaaggccaaatcatactttcagacatgtctgcttcaggggctaaaataattcaatcagaccttagtttcttgccatatcttggcttggttttcctctgcgttagyattcatcttagacaggatttcccgtaagtggccataaatatcttcaggtttaccttcttctagctttgttcaggggaaaaaagattcttttttgctgtaatcccaaagacccacagttgagtctcactgttctgatttgcccatccttgaaccgattagtataaccaggagcagctgatactctttttgaccaggtctgggtcaaatgtccaccacgcagagccaggggtggaaccggcaccaccagaaaccatcaactaaaagt

SEQ ID NO: 504999 - DNA, 453 bp, Homo sapiens
cccaaagctggtgactagagagcttggatgcctctaggcctgattcaaacaccgttctctttctactgtaccacactgcagcagcttcttgagggatcccacagtcatggctaacggcccaaagccagttgatagagagcttctaacatgcaggataatgagtaaaactctcartgttctttttctaatgaaaggggttgtgtgtacttattaccatttgactaatgccccctgaagattttctggtattgaattctaattgtaaattacaacagccatataatgattaaaaaagaaagccaccaaattcttggaatagttctagtctctaatgaacatggataactaacataggggtagatgttttgtttggaattgggcatgtattccatgagagtaaaatgtagacagcctgtttccttattaaaaggagagatgggggagacgtgaaga

SEQ ID NO: 505000 - DNA, 593 bp, Homo sapiens
ctttaatggaaaaaattatatcctaagaacttttccaatcgaaatgccaatcttcatgattgaccataaatttgtgactgaagttacctttgctatccttgtatccgagattgtcaacataagtactttcttggcaacaccattgttttattttcagtggcacctttctgtcctggggatatgcctttctattcctgtttccgttccctgggtggactgggctggcaaccctagaagtacaagggaagggcacacctactcgtcacctttaagcctcggtcacatgccaagcagccagctctatgcttttctatctcctttggcaccccagtgtcaaagatgctgcccacattgagtacttactctgtgccaagtatttagctgctctatatgaaatggccaagtggccactaagggtggtatgttccatcaacaatttcccttcctcaccttccccccaccccaaaatmcacctcaaataaacctagctgctcagcaaaaacagcttgcttagtatccagatgcagcttcaaaacaaatctcttatattccagatagcaataccacctttatagaaattaggagatattgtt

SEQ ID NO: 505001 - DNA, 593 bp, Homo sapiens
ctttaatggaaaaaattatatcctaagaacttttccaatcgaaatgccaatcttcatgattgaccataaatttgtgactgaagttacctttgctatccttgtatccgagattgtcaacataagtactttcttggcaacaccattgttttattttcagtggcacctttctgtcctggggatatgcctttctattcctgtttccgttccctgggtggactgggctggcaaccctagaagtacaagggaagggcacacctactcgtcacctttaagcctcggtcacatgccaagcagccagctctatgcttttctatctcctttggcaccccagtgtcaaagatgctgcccacattgagtacttactctgtgccaagtatttagctgctctatatgaaatggccaagtggccactaagggtggtatgttccatcaacaatttcccttcctcaccttccccccaccccaaaatccacctcaaataaacctagctgctcagcaaaaacagyttgcttagtatccagatgcagcttcaaaacaaatctcttatattccagatagcaataccacctttatagaaattaggagatattgtt

SEQ ID NO: 505002 - DNA, 654 bp, Homo sapiens
  misc_feature (1)...(654): n = A,T,C or G
tatgtggtttacttgtgatgcaactcctgcatttgttgccaatggcaatggttgttttcttcattaggtttcatantgttggtcaggttatgtcatgagaattgtattgagaaaaattatgagtttgttgagtgccagctctctgcagtgagaatggttggggggtgagggtggggggaactggcagtgtttcttctggtaggtgaacagaaatgcagactcgtgggcactctacacaagcctttccacatcaactggcctcccctctccccatccccggcatctattttctagcctttaaaaattgcatacatgtgtctggaaagttccatcgatcagctctttctgcagcactccacatttctgtggcttcagaaaaccttgaattgtaatctccctcttctctcaggatgcatcactgagaaaaacttaaatcaactatwattttcaacagattctaaacagggatttagaaagataaggtggttactgaattgaattaaaataaattcaggctgtagtccaattgcttccagctcttcccctccctctgtgggctaacaagtgtttccaaagccatagggcattaagaatcctgaaacagctaattaacagggctgctctacatcacatgaagcatgtgggttccaggca

SEQ ID NO: 505003 - DNA, 599 bp, Homo sapiens
tggtaccatattggggaggagagccctcaggatccctgctgcctgcatgactgaacagcagatgaaacacactgaacgttccactgaacgttgagtcagtggaagatggagcttgcaaggctgtcttggagagtatcartgctcccagcttagcattaaaatgcagcctggtggtcactggagttctcagctctgatgtctgaatgccacaggcctggggaaaaccccaggcctgtggctgctggagggaatgcaattagggcctctgagagagagaagaccaatatttaattggctcatcccaagttatctaccaacagttgggcttctctccttcaactcctgcctggttgatattactcagtttttggggttttttgtttgtttgttttttgttttttgtttttcaggttttttgctgtcatttttgttgtacttcatttttttccttaccattcaattttgcttttggaggaaagctctcaagaaagacactttcaggaccatccagattatctaatttcaatgactgactgaacttcaaatatgtaatttaggctttcccaagctgctcgatgatatgatgcagtgttgcttta

SEQ ID NO: 505004 - DNA, 589 bp, Homo sapiens
gctagtaatcataaagataaatttaatttccactggccacataataatttgtctcattatcttatagtcacagcttgtacacatataataatgtcaccaaatgtcacttaaaataatatttttctttttaaatgttaaaatgattcttttcagttagtctaacaaaagcttttttaaactcacattcacattttcaaatataaagtgagtttcagtagtaccwgtgtttcattgctaaacttttgaattctgcttttttccttaatgataaaactagcatcacaatgattacttctcatctatattcataaatgtacctaatggctacactggccaaatagctaacataatttcaatttctagaaaacaacatttctagaccacatcctccccaaaatattttttaaatgatttcttatattttttgctcacatttcactaattgtataaaaaatataaaatttatttatttatttttttacctcaggaaacatatggtgtaaatgcttaaggaaatgtgagtcatgtctttgatgaggcaactactaaaaaatcagttccttctgctacaatataaatagcatgataa

SEQ ID NO: 505005 - DNA, 517 bp, Homo sapiens
ctataaccgtaacaaaagctttataatcgcagattggaaatataaatgaaaatcaattctttcacatatgttctcaaaattatactgatcacttgtaagacatatctaaaacacttctttctattatgccttctttcagttaaacattacttgaagaatgaaaaatgtactattttacctccaaataattacacaagtacatctatgcaaaaacagtgttacaccaaaagatgagctacactgaattgctggtccatgacatggattacaggaaaatatcatcctaattatcctaacaaaaggattaccataccatacagtggctccttcagagaaatatgagtgtatacatgaagtatattaatactacctaattgtcaaaattcacgactaaagaagctgacaaaaatcttattttcaattagcacacagtacaaaacctttatttccacaatatgcctcagagcacttattcatttgttgtaacacttwagaatcttttctcttttaaacctat

SEQ ID NO: 505006 - DNA, 633 bp, Homo sapiens
tgcaaagatcctagttctaaacaaggtcacatttggaggttctgtttgggcatgaatgtaggggttgggggacacaattcaacccatcatgctcctttacattgtcaaaccaaataaagaatgcaggcaaaagcagggcaaatgctaccctggccccctggggactgcttctggtgtttctgtttgcctggctcatgaagtggctttgcatcacagcagttacacctcactggttgttgtcccttcacagcctggaagagaggcagcctcctcacacacagctcaaactctttgccttcctgctgcctctcatcacctgttttcatgargctgtttttgagatgtgcacactacccagcctactaacaaatacttcaaattacctttcagcctgtgcctccttcaggctgagtgatttgtgagtttctcatctgctgagtattgctgttttcaatgatttttctctagtccaatctgcattctaataagctgatttctagatgtggcttaggaatgaactgttgtgtccattttaaaattgctcctggtattgttaacgccacttttccttatgtgacagttttcccattttagccaatttgaactaagctttccaagtaaaaattggaaaat

SEQ ID NO: 505007 - DNA, 633 bp, Homo sapiens
tgcaaagatcctagttctaaacaaggtcacatttggaggttctgtttgggcatgaatgtaggggttgggggacacaattcaacccatcatgctcctttacattgtcaaaccaaataaagaatgcaggcaaaagcagggcaaatgctaccctggccccctggggactgcttctggtgtttctgtttgcctggctcatgaagtggctttgcatcacagcagttacacctcactggttgttgtcccttcacagcctggaagagaggcagcctcctcacacacagctcaaactctttgccttcctgctgcctctcatcacctgttttcatgaggctgtttttgagatgtgcacactacccagcctactaacaaatacttcaaattacctttcagcctgtgcctccttcargctgagtgatttgtgagtttctcatctgctgagtattgctgttttcaatgatttttctctagtccaatctgcattctaataagctgatttctagatgtggcttaggaatgaactgttgtgtccattttaaaattgctcctggtattgttaacgccacttttccttatgtgacagttttcccattttagccaatttgaactaagctttccaagtaaaaattggaaaat

SEQ ID NO: 505008 - DNA, 489 bp, Homo sapiens
tatttaaataaaggcaagattacatttaagctattttattcatttttcttaaaacctgctatttttcactgtgttataaatgtaggcaggcagaaacctgcaaacatgaactctgaggcaagagaatgtgacagaagtctttgttagattcttgaagaagattggcccgtmttcctctagtgtctatccaccagacaagtagttatgatggctttatagatattaatttctgcagggaagttactcaccctgattgaaaagcctaatgtgattgaactctaaataaccatggccagacgccaagtgaaatttcccctttcccccctccttctcgcccattttcacaatcctagacaagggctgtttcaaatctactccccacccactcatccctctgctagttagagcaaatgcctttgctttccctcccttgagttgttttccctagcttgtgtttcctaccaagttatgtttgtggccagtattcaa

SEQ ID NO: 505009 - DNA, 585 bp, Homo sapiens
tgatctgacatagaagaggagttcacaatcaagaagaaagggcatttaagcttgtttgaaggcaaagacatgaaacagcactgtatatgctgagatggacatgaaacagcgttgtacatgctgagataacaagcagtttcgtatgactggaacatatgatttagggcagtgagtagtaggagacaagtctgaaaaggctgtaggagattgaatcatgggttttaatgaagagagtaacatgatcagattttcctttcaggaggaaaactggcagcaatgtggtggggatgggagaactgattaagaccaaagtagagataaggaataataggaggatattgcagtcatcygggcaagagtgaggaatgtctagaagagaatagtggcagcaaaggcaaaaggacagagataaaatttgaaaggtatttaaggtaaggagtttatgagaccttggttctgatgggatgcagatggtggtgaggctggtaaggtggttatagtgagaagtgagagaatgacatctaagttagagaggcatagccatataacaaggtttggaaatatagggggtggaggatttgggag

SEQ ID NO: 505010 - DNA, 448 bp, Homo sapiens
taattattccagatgataaaacattgccttcaaatacatgtcaggattgagtagtataatctgctgatatctaaggaatgtaactckgcaatcagtttggtctttgggctttgaaggggattgatttagatgggcaagtgttccagtgctgaatcagaatccaattttaatgacaatttcagcatctctgggaaaaaatagagccaaggtatgatacaaatattcagccgaacaaatccacagtataagaagtagcatgtaaacatctcctaggaacaaaattttccttctcaatcaagcaattttacatacaaaagttgtcacctaatttgtaaagtgccacaactagagtaggaggaactaaatctgaaaaagaaagtactcgttggcattcagatggacagagtaagaaaacacttgaatgacctctaaaaggtttgattagaaa

SEQ ID NO: 505011 - DNA, 667 bp, Homo sapiens
tgaagcacaaatgttgcgtcatttctgatataatgaggaccttgggaagttgcaagtagaaatgttgcgtcatttctgatatgatggggattttgggaatttgcaattctactgatttatcagaggccagctaaagtgctcaccatgaatctgaaagtcaaggatgcacatccaacatccaaagctctttattttagtcccagaggctttctagactgaccactgacagctctcaagagacagaagggaaataacagcttctgttctaagaatttgtctacttttttgccagcaaaaaatcttagggagattcttgttatttaccarcgtgttcagttcaaattaaagttttcttctctcaatgacacttagtgtgacttctttgaacagttgctgtgcttttatttttcttgcttgtactttccaaacgtccaatttagccactaaacattcagggcattaggccattctttagatctctcattgtatgaaaaggctttcatacaatatttcacatgccaaagaggtatatcacgtcctacatatcataatttggttactcattagttttggagttgtttaggggttgtctctggttcataaaacctatttatgtgtagatactcattaaaaaacactttccttatacatatttatattaatcaaa

SEQ ID NO: 505012 - DNA, 497 bp, Homo sapiens
ctgactcctacagtccttcccgcttcctttcgtttctctgttttcttgccgagtctggcaggacttctggctgcaaacaacagaaattcctgtagctagtttaagcagaaagggatgtgttaacggttgttggttaggtggttcacagaagttctgggaagaaccaagaatcaggcttggatgtgatggagccaggaaaagagccaaaccataccatgagtctgttctagcagaaaaatcatgctgcctccgctggctgctgagtccccaggagctgaggggatgaatgccaggactgmgcttctcttctgccatgctcctcagaaggcctggatcacaatgggtgacccttgccgcctctgtcactcacactgcatccaggttatactgggatgcttctgattggtagaaataagctcacacgcctgcaactctggctgcaatggggtatggttgtttcacattttctgctaaatggggattgagtgaatcagtct

SEQ ID NO: 505013 - DNA, 504 bp, Homo sapiens
gctgggactacaggcacagaagcgtgtaccaygactatgcagctaacctaataaagttttttttttttgatacaggctcatattgctaaggctgaactcctggcctctagccatccttctgcctcagcattccagggcagggcagcagggattataggtgctagttactgaacctggcttcatctcctcttaataatctctctatagatagatagatgacagatagatagatagatagaaattatcaatgtgatagataattgcatagataatttctatagataagtgtatagatagataatttatatctgtctatagatataaatatatataaatatgtctacatctatagatatagatataatttatatctatcatctatctaaacacacacatatgtatgtgtgtgtgtgtatgaatgtgtgtgtgtatatatctatatctatatctatatatatgcatatattgccctcctcgttcaaattactgagtggtttctgtctc

SEQ ID NO: 505014 - DNA, 504 bp, Homo sapiens
gctgggactacaggcacagaagcgtgtaccacgactatgcagctaacctaataaagttttttttttttgatacaggctcatattgctaaggctgaactcctggcctctagccatccttctgcytcagcattccagggcagggcagcagggattataggtgctagttactgaacctggcttcatctcctcttaataatctctctatagatagatagatgacagatagatagatagatagaaattatcaatgtgatagataattgcatagataatttctatagataagtgtatagatagataatttatatctgtctatagatataaatatatataaatatgtctacatctatagatatagatataatttatatctatcatctatctaaacacacacatatgtatgtgtgtgtgtgtatgaatgtgtgtgtgtatatatctatatctatatctatatatatgcatatattgccctcctcgttcaaattactgagtggtttctgtctc

SEQ ID NO: 505015 - DNA, 504 bp, Homo sapiens
gctgggactacaggcacagaagcgtgtaccacgactatgcagctaacctaataaagttttttttttttgatacaggctcatattgctaaggctgaactcctggcctctagccatccttctgcctcagcattccagggcagggcagcagggattataggtgctagttactgaacctggcttcatctcctcttaataatctctctatagatagatagatgacagatagatagatagatagaaattatcaatgtgatagataattgyatagataatttctatagataagtgtatagatagataatttatatctgtctatagatataaatatatataaatatgtctacatctatagatatagatataatttatatctatcatctatctaaacacacacatatgtatgtgtgtgtgtgtatgaatgtgtgtgtgtatatatctatatctatatctatatatatgcatatattgccctcctcgttcaaattactgagtggtttctgtctc

SEQ ID NO: 505016 - DNA, 504 bp, Homo sapiens
gctgggactacaggcacagaagcgtgtaccacgactatgcagctaacctaataaagttttttttttttgatacaggctcatattgctaaggctgaactcctggcctctagccatccttctgcctcagcattccagggcagggcagcagggattataggtgctagttactgaacctggcttcatctcctcttaataatctctctatagatagatagatgacagatagatagatagatagaaattatcaatgtgatagataattgcatagataatttctatagataagtgtatagatagataatttatatctgtctatagatataaatatatataaatatgtctacatctatagakatagatataatttatatctatcatctatctaaacacacacatatgtatgtgtgtgtgtgtatgaatgtgtgtgtgtatatatctatatctatatctatatatatgcatatattgccctcctcgttcaaattactgagtggtttctgtctc

SEQ ID NO: 505017 - DNA, 566 bp, Homo sapiens
tcagttccatgccacataagcttctcattaaaatggacaagcctagaaggcaagagagagtgctagtaagaygggagtcacagactttgtagcctaatcttggaagtgatatcccatcactttgcctatattttctttgttagaaggaagtcactaggtctagcccatagttagaggtgattacacaagggtgtgaataccaggaagcaggcatttgggggagccttgtcagaagctgcctaccacatcatgctccccaggctaaatgggacagtccccgttaacaaacactgctttaatgttgttatcagccgtacttccggccgacacatgtggccctggtgtaattatcaggggcacttctttcacgcaagaattgtccagactgagacaataaattacgtcatcttccctcttaatgctttccaatataatatagaatttactaatttgttttggtatcttatccaaatccttctctaaatagcagatccctaagcaggatttagggatccctaaatagagatttttatatgttttgttcgccgctgtatccccagtgccca

SEQ ID NO: 505018 - DNA, 566 bp, Homo sapiens
tcagttccatgccacataagcttctcattaaaatggacaagcctagaaggcaagagagagtgctagtaagacgggagtcacagactttgtagcctaatcttggaagtgatatcccatcacttygcctatattttctttgttagaaggaagtcactaggtctagcccatagttagaggtgattacacaagggtgtgaataccaggaagcaggcatttgggggagccttgtcagaagctgcctaccacatcatgctccccaggctaaatgggacagtccccgttaacaaacactgctttaatgttgttatcagccgtacttccggccgacacatgtggccctggtgtaattatcaggggcacttctttcacgcaagaattgtccagactgagacaataaattacgtcatcttccctcttaatgctttccaatataatatagaatttactaatttgttttggtatcttatccaaatccttctctaaatagcagatccctaagcaggatttagggatccctaaatagagatttttatatgttttgttcgccgctgtatccccagtgccca

SEQ ID NO: 505019 - DNA, 554 bp, Homo sapiens
aaatttaacgagaattacttccttagaggcctcatctttaaatatagccacactgggaattacagcctcaacatatgaattttgaagagatacaaacattcagttcataatagagggaaaaacgcaattcatttacaagtgaattcaatagagatagttgaaaatatcaaattcaagatattagtggagaaaacacagctttctaagcaagaaatccagttggtataaagtctttatttcactgggaaaatttttaccatttgaatcacagwaatcctaacacattcttttagaaagggcaaagcggtgggataagaagtaaaacatttcccctccaaaataaatgtggaaggaaatataataagctgtgtatatgtgtgtttaccctttttaaaaacccaaagtcttccaatcaatgatggagaatgtttctagtttgatgtattggctatctactgctagataacaaattaccccaaacttgggtgacttacaacaacagcactattatctcatggtttttgagggccaggaattggcactgcttggcgcca

SEQ ID NO: 505020 - DNA, 623 bp, Homo sapiens
cttttaggagctacataagtgcttagctgactctgtttcatatttgtatatttacaattataccatagcttctttttatctaggataagtgagaaagactgtatcaggctactaatgaagagtattaacatatattatamattgtagttaaaagcaaaggctttcaagtatttggattcaaatcttgctcaaaaggtgcaatcatgggcaagttcaagggcaacttacctgatctctacaggattcagattcttcagcctttacgacaagtaaaaattaagggcatggctaatagggtaagtgtgaggagcaaatgaggcaacaggtgaaaataattaataaatgatatgaggtaataagtgaaaataattaataaatgatctgtaatatgtgtttctctttgtgatagtagtagtaggttaatattagcattatttaaattcatttaaatcttttgatgttaacattataataattttaaaatatagtactaatctttattttatgattaaagaaaattaagtccagggacttgagtcaccccttacttgtcaagtaggaaaagcaaaccccaaagaaagaagtctatttttctattgcatgtgatttaatataagaataag

SEQ ID NO: 505021 - DNA, 511 bp, Homo sapiens
gtgtcaaagttaaagttacatcytaaattattgtccagctcttcatcaataagtttatttagcttcttcaggcataatcattctatatagaatcagaaataagataaaattattaattattacaatacctatcgccaaattagttttgcaatatgctgaaatcattaagaatcgcatagctttagtacctatgtcatacacaaaatttaataggccagtaaacatgttatttgatgtatatattagcaaacaaagagtttgatttaaattaaactaacagtgcaatttaaaaattactaagacatgaactgagcactgaaagataaagacataaaatatttctgtatcttatttctaaacatagagcataatttaaaaatattttcttgattaaaaccagtgtatggaaatagacttaatataaatcctttcattaatatatcacgtatattatttcatattctattaattagcttttagtacataacggttattggacccaaatattttg

SEQ ID NO: 505022 - DNA, 614 bp, Homo sapiens
aacaagtttcttcattgaattgcctttgcaccttttttataaatcactctatttgtgtgggtatttcagactctctattctgttttattgatatatgcatatctatactttcaccaatactatactgtcttaattactatcttaaatagttatcttgattactgtctaaattacttaattactaaattttcaaattgagtaacttttaactttgttctttttataattgtttggtccattacagtttcttttttgctttgaataaattttgaattcacctttttgggatactgaattgcattagatctataaatcaaataatgggtaattaacatcataacaatatcaagtcttccaatgcatgaatatagtatatctcttgagttatttagatcatctttgattctaccatcaaggctttacagcttgtaacaaatgtgtattkcacatattctgttagatttaggcaaaactattttattttggggggactattgcattttgaaaattccaataactagtgagcagtgctagcatattacgattaacttctatatgtagatgttttataccacaacatttctaaactcataaattctagaaaagtttgacat

SEQ ID NO: 505023 - DNA, 497 bp, Homo sapiens
attccctctttatcaccagtcgcttttgttttatttgtttagtgtcgttttgaattttgttgtgaatatcaatcagtaattgtcaaagatttattattttattcctatagatggagttttgttttcttcaatattatatacaggcaagagttgaaattgttcttcttttggaaattagtgtgatgtgtgaacagttctcccattaagaagaggaaagaaagagaattccacactgaccctactttagagtcggcagctctgagatctgcccactggaggggagggctgtgagctctgctggtgccctrccctgttcccctgggtcccctttcccagctcttgctcccatccccatttctgcacccttggcatgctaacagctccacttgagaccctcagtagcttgtccttagacaaataagctttctttttcctggggagtgcagataagtacttggcagtttttttaatcttcccttcactcttcaggtgtcact

SEQ ID NO: 505024 - DNA, 605 bp, Homo sapiens
gtgcgtataaccagagtgaatggcgtttcattatcccacagcccacatctgagtgctgggtcctccacatagttcctgtcaatcaaaccagttggcattggatgaaggcaattccaaaaatagtgtcctttactcattttgtattttcattcctactgagaaaattctgattttcgtcatttagtttattgccctaaattcaagaacattcattcctcagtaagtacatgctgagtttttagactgatgtttctatataagtgattctttgcaaaaatggactgtgatgttttgactttttatttagcatattttaaaatctattttagatagttaatatatttctgggaatgtggaatatattttctttgtgaataattccaatgcgataggccatttgttgctcctgggttttaaatgttgatgtttagggctgaagctgcacacttagtcatgtggggccccctgaccstgtttgccatgtggctcatgggcaccctcaggatcaatgatttacatgaagaactctaagaatgtgtaaaacctgttgtattagtgattatggttgatctcagtcaaagggtacagtagtaccctttacactc

SEQ ID NO: 505025 - DNA, 649 bp, Homo sapiens
cccaaagccatcgcccatcaaagggcaggtcccacacttcccagcaattagatccaggtggaggtgagcctctggtggggtggtgcggaagggcagagccaggtaaccagagtagtcagggcatgcctacctcgcccctaccccagagcctctcacctgcaaactgggtacaagcagttggtgtaaggtcaggaatgttcgtcaaaggcaacatgaaagttatagtgtatcaagttcaagacctggacttcacagatttatggcttacattagattactacacaatgtctttatgaatttgcccctgcttttaatttagtaagagaccttcaaagcaggagttcaaaaccagggcaattttacttcccctcctcaggaacatttggcaatacctggggacaattctggttaccacagtgaggggatactacgggtatctgtcaatagaggccagtgatgctgataaatttcctataatgtgctaccctcactgacaagaagggattatccggtgcaaattgtcaatagtgccaaggttgaaaaactctgctttacactgaaaaaaagagagatgsaatttaggtagcattatgttctgtaagtagaaaagaaattggtaagaccagaatctcttaccactgaaatgttt

SEQ ID NO: 505026 - DNA, 643 bp, Homo sapiens
tgtagtcttagatgattgaraaaacagtgactgaaagtgaccaattaggattttaaacttgggttttattcccatatcacagtatgaatgattatttttcatggatcctatattttcctttcaaaacatatcattatattacattatatttatgtgtgtgttgcgtgcattgctttgttaaattttgacaggaagaatatctgacatgttttgtaactctgagttggctctttctcgcattcactcactgtgcccccagcccctctcctagtctaagaagctctttctgcccttctctaatgtggccatgtgcatattacatgttgtcatcataactgcccttcttgcctgttttctggcctcctgtcactcttcccttgaccccgtgctgtcttgtgggccactggcattgctcagcctgccacctgctcctcctgcggctggagaaggcgtaacacggacagtgtcaaggtacaacaaactgtaacctctcagaaaatgaaggcatgctggatgagtgaaggagatgtttctgtgctaggctccatgtgtgtcctacaggtccatgtgtgtgacatggctccgtgcatgtgtgtctcatggctctatgcatatccatgtctccctctatgtgccatctaag

SEQ ID NO: 505027 - DNA, 643 bp, Homo sapiens
tgtagtcttagatgattgagaaaacagtgactgaaagtgaccaattaggattttaaacttgggttttattcccatatcacagtatgaatgattatttttcatggatcctatattttcctttcaaaacatatcattatattacattatatttatgtgtgtgttgcrtgcattgctttgttaaattttgacaggaagaatatctgacatgttttgtaactctgagttggctctttctcgcattcactcactgtgcccccagcccctctcctagtctaagaagctctttctgcccttctctaatgtggccatgtgcatattacatgttgtcatcataactgcccttcttgcctgttttctggcctcctgtcactcttcccttgaccccgtgctgtcttgtgggccactggcattgctcagcctgccacctgctcctcctgcggctggagaaggcgtaacacggacagtgtcaaggtacaacaaactgtaacctctcagaaaatgaaggcatgctggatgagtgaaggagatgtttctgtgctaggctccatgtgtgtcctacaggtccatgtgtgtgacatggctccgtgcatgtgtgtctcatggctctatgcatatccatgtctccctctatgtgccatctaag

SEQ ID NO: 505028 - DNA, 643 bp, Homo sapiens
tgtagtcttagatgattgagaaaacagtgactgaaagtgaccaattaggattttaaacttgggttttattcccatatcacagtatgaatgattatttttcatggatcctatattttcctttcaaaacatatcattatattacattatatttatgtgtgtgttgcgtgcattgctttgttaaattttgacaggaagaatatctgacatgttttgtaactctgagttggctctttctcgyattcactcactgtgcccccagcccctctcctagtctaagaagctctttctgcccttctctaatgtggccatgtgcatattacatgttgtcatcataactgcccttcttgcctgttttctggcctcctgtcactcttcccttgaccccgtgctgtcttgtgggccactggcattgctcagcctgccacctgctcctcctgcggctggagaaggcgtaacacggacagtgtcaaggtacaacaaactgtaacctctcagaaaatgaaggcatgctggatgagtgaaggagatgtttctgtgctaggctccatgtgtgtcctacaggtccatgtgtgtgacatggctccgtgcatgtgtgtctcatggctctatgcatatccatgtctccctctatgtgccatctaag

SEQ ID NO: 505029 - DNA, 529 bp, Homo sapiens
  misc_feature (1)...(529): n = A,T,C or G
atggacactgtgaagggaggctgctttctctctgactcactgtcaggcaaaactcacaacacattcctgaccactgaagtgccagtggataatgcagttcccagcacagtcctgatcactcactcactsactcacaaccaactcaacttattcacttccagcttagttgtcaatggtttcagcatctttggcctttcttgacnnnnnnnnnnnnnnnnnnnnnnnnnnnnnnnnnnnnnnnnnnnnnnnnnnnnnnnnnnnnnnnnnnnnnnnnnnnnnnnnnnnnnnnnnnnnnnnnnnnncttagataagcaagagctgatttcacacaagttcttacttcttctctctctgacagagctgttagcactctcagggtcaatgccttcttctgaaggaaatacttcctgctgcaccggtaactcatgtttcattataacatagggaagatgcatgatagtctccatatgcagatactgtgtcattagtcaaatgaatcattccagcaggntgcctgggnaaaggctgg

SEQ ID NO: 505030 - DNA, 632 bp, Homo sapiens
gtccccacacagccttattccctctgtgtgttcatgtcttcccccrttgtatgaagaccctagccgttggatttagggctgacccttatccagaaggacctcatcctaacttgatgacatccgtaaagactccatttctaaatagggtcatattctgaggttttgattaagcataaatttgggggcaagggacacaattcaacccaatgcagtaacaaatcatagtgctgaagaagaaggcaattgggaaggtgtgaccctgacatggttcttggctagcatgacacggattgaacagttgatttaatttgcatttgcaaaataacactttaaaagctaaatacacaacatttacaatgtttccagtgttttaaattacaaaggtaatgctgccctattatggagatcaataaataaataaaacaaaggagaattatgggcaaagagcattctcttacatgatggtttctgccttgcaggtcagccaacctactgtgctgctcctgtacagtgggttcaatccaaatgtgctgacatgggagggtgatttcgatatgctgaatgtggacgttggagactggcggcagcctgtgtagggaaacacactgattttctactgagaaacgcattta

SEQ ID NO: 505031 - DNA, 214 bp, Homo sapiens
tttttttgttatgaaggacaaaacatcagaaagctttatttcagctagttgtttcctttttctcaaatacayggaaatacctattataaaaacttttagctgagatgctttaatggaatctcagggtaaaggaaaggaaaggggtttctctgtgccagcaacttaatgtttcctgtttcagctgtgctgccagagattgtaattcaggaaccaa

SEQ ID NO: 505032 - DNA, 214 bp, Homo sapiens
tttttttgttatgaaggacaaaacatcagaaagctttatttcagctagttgtttcctttttctcaaatacatrgaaatacctattataaaaacttttagctgagatgctttaatggaatctcagggtaaaggaaaggaaaggggtttctctgtgccagcaacttaatgtttcctgtttcagctgtgctgccagagattgtaattcaggaaccaa

SEQ ID NO: 505033 - DNA, 500 bp, Homo sapiens
cctggtggaatacctctatttgttcataaccaactcagtatgatctaactggagaatattcagaattataggcataagyagttaagtctttatgatataaaaatattcactaagaaaggttagtataaaaattttcatctagggcacatagcagtggtattattcttcagcaaatatttttccatatatgagatgattgtgcttagaatctcactgggttgtgcttggaaagatctggaaaaaccctatgaagctcatactcctttgtggcttttttccctgtgaagtattagtaaaacagctcctaaaatttgaaatttccttcccttttttctacttcttgcacctccctgctaaagccctgggtccaacctgctctccttgtcaccattttaataagtcagtgaataagtaaacgaatatgttaattaatccacacaaactacagtagatcaggatcctgtaactttattgaagatatttgggaaatgttgtctttc

SEQ ID NO: 505034 - DNA, 500 bp, Homo sapiens
cctggtggaatacctctatttgttcataaccaactcagtatgatctaactggagaatattcagaattataggcataagtagttaagtctttatgatataaaaatattcactaagaaaggttagtataaaaattttcatctagggcacatagcagtggtattattcttcagcaaatatttttccatatatgagatgattgtgcttagaatctcactgggttgtgcttggaaagatctggaaaaaccctatgaagctcatactcctttgtggcttttttccctgtgaagtattagtaaaacagctcctaaaatttgaaatttccttcccttttttctacttcttgcacctccctgctaaagccctgggtccaacctgctctccttgtcaccattttaataagtcagtgaataagtaaacgaatatrttaattaatccacacaaactacagtagatcaggatcctgtaactttattgaagatatttgggaaatgttgtctttc

SEQ ID NO: 505035 - DNA, 530 bp, Homo sapiens
aggccggaagcttttccagattaataccagacccttaatctcataccacctccacctccttcctacccagcgctgctgcccagctttactttataaatatgtgtattgttcgggctgaactgaaccaaactgtaatctccccaggtctaaggcttaggctcaattatagaatcatatggtatccaagttcaaaggcatttttaaggtttagcccaatcactgtattttgttagattaaagtaaatcaaaactaaaactcagaaaaggaaaattatttgtcatagtatcgtgaaaagtagtagcctttggagtcagaaaaataaaacccagagctagttcctggctcagcaaattgctgtttggacttgaacaggtcattgaaactctytgtgccttactctgttttaatctgcaaaatggggctcagtaattattgtagggtttctgacatttttagtaatgaatgtaaaatgctcggcaaatttgagttgttcgataaatagtgacagttcttgagagttccaaggtca

SEQ ID NO: 505036 - DNA, 343 bp, Homo sapiens
ctgtgaccaattattactttagmgcgacagttaacaaccacctgaccattatctgatggctgcctgacattcctggtgtgtggggaacgctctcctgccctgcttttgtctaactacctactgtaacaggactatcagtcccattcaaattgagaccaagaaatagttgcagtttctctccaggtagctagatctgtgtcatgtaaacttcaaagtcctgtcactgagttggaccagcagaagaagctgagagagagagacagagagagagaagggggagggagaggaagaggggaaaggtagaagagggagatggagggaaggggagagaattatgcatcaa

SEQ ID NO: 505037 - DNA, 611 bp, Homo sapiens
tatcaaataatttttagacttaaggtacctagtataccttaagtaagtattattaagtattgtagtaacattagaaatatttattttgatatgttaagtagctggtcagaattcattcatgaagtggaaatggcatatgccaaaacaggcgacaggctgtagttctggaagactatagtgtactcatgaaaaatttgccatcctgtttctgggaaaaatgataaaacttctggaaaaactagtagcttttaataaggaatagtctgagcctcagagttaaagcagagcaggtgcccaaagggtcacataatgccatccaaaatatgccactttggcgtaagaattcttttgagctgaaggcaactgataagaaacagatagaagaaaagctctgtgccctcacccatttgcctaaaagcaggacataaatttacacaggatacaaatttactcctccttttaatgagaaaggacaaaagttgatcatcatagaaagctttcaacttttatcagcctggagacaccaccagatgaatctrtttcacaaactttacttactagcttttacgtaccttcagtttgccatttatttgccttctcactagatattc

SEQ ID NO: 505038 - DNA, 663 bp, Homo sapiens
aattttccaattccaaggaataaaattaaatgtaataaaggtgtgaacaaaggagtagctaagcactgtgagtgcagcacccctcagggtttatcctacttttcaagccctcacaataaacctgtccattctgcttagcaagcaggctgatctctttcccgagctggtaagaaagtgttaccttgctgtttatctgtagtaacatataactcttttgcaactggagatagctcattcatttctattacagcttaccttgccactaaaatatgcacagaaatgactttctttatgcagtgatgttttcttggggaaggttatttgacaataggattgtttcctcactgagttgcattataatttcatcaatgagttcaatgatctttttctaatggcaataatttgatttttaaatttttaaattttaaaatgttctagtattaaactgcttatttagggtggatcatatgtgtgtatgcaatttttccaattattacgaagtacccaaaaaaatgtaaaatgtggtctctgttcctccaatagcctgaaatctaattatggaagcaagacatacagactttaaacaatkgacaaagtaggaaaacagtgattgagtgcagacaataccctcaaaggaagggatgggagtaatctggaagaaat

SEQ ID NO: 505039 - DNA, 603 bp, Homo sapiens
gctggacttgactgacagagaatatttaagtaggtgaaagggaatgaggarggcatttcgggcagtaggccagcctgggaacatatctggaaccactactgggcctggcttagaggtgggaggattgtttggcaaatagaaacactgggcatgtacacatgtagtgatttacccatatgttagttttctattgctgctataactaattaccacaaatttaatggcttaaaacaacacaaagcacaacaacatggcacatgtatacatatgtaacaaactgcacgttgtgcacatgtaccctaaaacttgaagtataataaaaacaaataattaattaattaaaaaataaaaaataaaaaacaacacaaaggtattctcttacagttgtgtaggttagaagtctaacacgagtctcactggactacagtcaaggtgttgatagggctgtgttcctttctgaagactctagggcacaatttatttccttgccttttccatttatttgcttgtggcctctttcttcatcttcaaagctagcaacgttgcatctctctgacctttctttcagagtcacatctcctctctctacaacctggagagctt

SEQ ID NO: 505040 - DNA, 645 bp, Homo sapiens
gctggacttgactgacagagaatatttaagtaggtgaaagggaatgaggagggcatttcgggcagtaggccagcctgggaacatatctggaaccactactgggcctggcttagaggtgggaggattgtttggcaaatagaaacactgggcatgtacacatgtagtgatttacccatatgttagttttctattgctgctataactaattaccacaaatttaatggcttaaaacaacacaaagcacaacaacatggcacatgtatacatatgtaacaaactgcacgttgtgcacatgtaccctaaaacttgaagtataataaaaacaaataattaattaattaaaaaataaaaaataaaaaacaacacaaaggtattctcttacagttgtgtaggttagaagtctaacacgagtctcactggactacagtcaaggtgttgatagggctgtgttcctttctgaagactctagggcacaatttatttccttgccttttccatttatttgcttgtggcctctttcttcatcttcaaagctagcaacgttgcatctctctgacctttctttcagagtcacatctcctckctctacaacctggagagcttctctgtttttaaggactcatgtgattacatgaggcttaccag

SEQ ID NO: 505041 - DNA, 608 bp, Homo sapiens
gaagaaagaaactatggaaggagatgaaaacaagaaaggggaaaaaaaggcatcaatatccttagagaaggaagagaatatcctattcttgaaacaaaaaaactctaagtcactaaacgtgctgtcttattcactgggattcacactgtgaaagccttcagccaccatataaagggcctcactgccctgasgctgccaggctctgaggtagcccatgtggaaaaaccacatggagaggccttgggactatatgtaaagagaaggatgcccgggccaggtgcggtggctcatgcctgtaatcagagcactttgggaagccgaggctggtggatcacttgaggccaggagttcgagaccagcctggccaacatggtgaaaccctctctctactaaaaatacaaaaattagccggttgtggtggcgggcgcctgtagtcccagctactcaggaggctgaggcatgagaatcgcttgaacctgagaggcaaaggttgcagtgagccaagattgcaccactgcactccagcctgggcaacagagtaagattctgtctcaaaaaaaaaaaaaaaaaaaaagagagagagagagagagaaagagatgcctggtca

SEQ ID NO: 505042 - DNA, 608 bp, Homo sapiens
gaagaaagaaactatggaaggagatgaaaacaagaaaggggaaaaaaaggcatcaatatccttagagaaggaagagaatatcctattcttgaaacaaaaaaactctaagtcactaaacgtgctgtcttattcactgggattcacactgtgaaagccttcagccaccatataaagggcctcactgccctgacgctgccaggctctgaggtagcccatgtggaaaaaccacatggagaggccttgggactatatgtaaagagaaggatgcccgggccaggtgcggtggctcatgcctgtaatcagagcactttgggaagccgaggctggtggatcacttgaggccaggagttcgagaccagcctggccaacatggtgaaaccctctctctactaaaaatacaaaaattagccggttgtggtggcgggcgcctgtagtcccagctactcaggaggctgaggcatgagaatygcttgaacctgagaggcaaaggttgcagtgagccaagattgcaccactgcactccagcctgggcaacagagtaagattctgtctcaaaaaaaaaaaaaaaaaaaaagagagagagagagagagaaagagatgcctggtca

SEQ ID NO: 505043 - DNA, 608 bp, Homo sapiens
gaagaaagaaactatggaaggagatgaaaacaagaaaggggaaaaaaaggcatcaatatccttagagaaggaagagaatatcctattcttgaaacaaaaaaactctaagtcactaaacgtgctgtcttattcactgggattcacactgtgaaagccttcagccaccatataaagggcctcactgccctgacgctgccaggctctgaggtagcccatgtggaaaaaccacatggagaggccttgggactatatgtaaagagaaggatgcccgggccaggtgcggtggctcatgcctgtaatcagagcactttgggaagccgaggctggtggatcacttgaggccaggagttcgagaccagcctggccaacatggtgaaaccctctctctactaaaaatacaaaaattagccggttgtggtggcgggcgcctgtagtcccagctactcaggaggctgaggcatgagaatcgcttgaacctgagaggcaaaggttgcagtgagccaagattgcaccactgcactccagcctgggcaacagagtaagattctgtctcaaaaaaaaaaaaaaaaaaaragagagagagagagagagaaagagatgcctggtca

SEQ ID NO: 505044 - DNA, 656 bp, Homo sapiens
atggtgccaacattctgaatgtatttattcatgtttgtatttgtggatggaaaattttttccatgctacaaagtttggttaaaaacaagttgttacaaatcaataaataattgctataactattacctattgtaacaataataaatagaaaataaacagatgcaactactttgctatacacaagactttatcctgttataaaactaatataagtgctgccacttttctttctttgagtattttcccttgagatacgatttttktattgcacgttgctttgtgcttgtcttaccagtttcaggtttgtagcacatcaaagaattacaaacatttccatttagaactatgatcctaccaatcaggggttattttctgccatgtgttcatttacagattacaaacataaaagaagcaaagtacaaaaattaatgcgtgtgtgtatgtgtgtgtgtgtgtgcgcgcgtgcgctcaaggctgggaatactgactggtatgaaaggcttttaactagttgtgcatcaaaatcatacacaatggccattaaaaactcacttagctatcagcatgtaaatcactgggttggttattcaaagaccagacaaacagaattccccgatactgtttccatttgggttttccagctcgtacggctccag

SEQ ID NO: 505045 - DNA, 656 bp, Homo sapiens
atggtgccaacattctgaatgtatttattcatgtttgtatttgtggatggaaaattttttccatgctacaaagtttggttaaaaacaagttgttacaaatcaataaataattgctataactattacctattgtaacaataataaatagaaaataaacagatgcaactactttgctatacacaagactttatcctgttataaaactaatataagtgctgccacttttctttctttgagtattttcccttgagatacgatttttgtattgcacgttgctttgtgcttgtcttaccagtttcaggtttgtagcacatcraagaattacaaacatttccatttagaactatgatcctaccaatcaggggttattttctgccatgtgttcatttacagattacaaacataaaagaagcaaagtacaaaaattaatgcgtgtgtgtatgtgtgtgtgtgtgtgcgcgcgtgcgctcaaggctgggaatactgactggtatgaaaggcttttaactagttgtgcatcaaaatcatacacaatggccattaaaaactcacttagctatcagcatgtaaatcactgggttggttattcaaagaccagacaaacagaattccccgatactgtttccatttgggttttccagctcgtacggctccag

SEQ ID NO: 505046 - DNA, 221 bp, Homo sapiens
tctttggcttgatgactcaccttccagacagtccccgacagctcagtgaggcactgctcgctgctgactctatgcactggacccacttatggcacagtyttttgtcagggctgaggtcactcacccagggcttcactggatggccctcccacacagctcctctgagcatcatttctgtcctttgaaatcagaatggaggcaaccatggcccaccttgccat

SEQ ID NO: 505047 - DNA, 638 bp, Homo sapiens
tggggactgtcaagtacagcaatgttcaaccctgttttagttctcagacacgtttcattgctctacataatcctgtgaaccatattacaaattgtttgaatcatgtctttttacaatgaaaattattcaatgtgattaaataaaaataytccagattttaaaagattacctaattgacctatataatatataaggacattaaaaatgactttccacagataattagataggcagatgcattaatgtgctttaaaccaatgaagataaatacatcatttattgacaagttcatttcaaagaacatttgaatatttggttttggtatcaggtataaaagtacaggtttaaattcagtcatttcattgcattgatattgagaaaaaatgctaccctaatttaattatagacagtttcctcctgcctgctgcacagagaaaactcattcacaccacagagacttagggtttccccttgggcttgattatctgcaccatgtacagggtacagaagatgggaaaacttaactgaatctaagaaaagagtttcacataagcctggaacctcaaagggtgacactctcagtgttgagtgaaacaagaaataaatgtagacattcaaaagaggacagtgtgggaact

SEQ ID NO: 505048 - DNA, 493 bp, Homo sapiens
tgctggcattccttggattgtggttgcatcactccaatctctgcctccaccatcacatctctttctctgactcttctgccttccttttaaagggtacttgtaattgcatttagagctcactcagataatccagaataacctcctcattttaagatccttaactttctcacatctgccaagtttcttttcccatataaggtaatatttataggttctagggatgaggaagcagatatctttgggggccattatcctgcctaccacattattctgccttgcttagggaggagtccagaactggtgggctctgggctggcctcgtggtggtgaggggtcaccatgatcatgagccaagtctgcaccccatggaggagggactgcctagggccagcagggtcagaagggccatccytcaacctggtgcaaggagggaaaatgccatgattttaagaatagtaaagtcatttcaaagccttaatcttagagagtcatt

SEQ ID NO: 505049 - DNA, 447 bp, Homo sapiens
tgtttatcgagggctttgtgtcatggattgtgttaggcttgtaaaacattgcttttaaaatgataaaagcaatgtgagatttttgtactaatttaattttaattatttattttcttaaagtttggatcttgctctgctacccaggctggagtacattgatgttatcatagctcactgccacctcaaactcctgggctcaagytatcctccttccttagcctcctgagttgctgggactataggtgcgagtcaccatgtccgcctctttttttttttttttttaacagatggagttcttcatgtgttgtttagcctggtctcaaacgattctcccacctcgggctttcagaatgttgagattacaggcataagcctctgtgcctggacttaattttaaataaaacagaatgttcaactcaataaccttgccatcctgcctgtgacgct

SEQ ID NO: 505050 - DNA, 607 bp, Homo sapiens
agctgctgtttatcgagggctttgtgtcatggattgtgttaggcttgtaaaacattgcttttaaaatgataaaagcaatgtgagatttttgtactaatttaattttaattatttattttcttaaagtttggatcttgctctgctacccaggctggagtacattgatgttatcatagctcactgccacctcaaactcctgggctcaagttatcctccttccttagcctcctgagttgctgggactataggtgcgagtcaccatgtccgcctctttttttttttttttttaacagatggagttcttcatgtgttgtttagcctggtctcaaacgattctcccacctcgggctttcagaatgttgagattacaggcatamgcctctgtgcctggacttaattttaaataaaacagaatgttcaactcaataaccttgccatcctgcctgtgacgctcatcctgctacatcattgccatggctcagaataaacacatttgaccagctcgatcctggccagggatcagccaccattaagtggccttgggaccctcttcatctttggagggggggtggtctgccctaggaacagcactaggagtgaggggtgg

SEQ ID NO: 505051 - DNA, 606 bp, Homo sapiens
ttctttctgtaaaagtttctgacataagtaatccatgtacaacgtagaaaactagggaatacatgtgagttaaaatgaagaaagtaaaagcacaactttccagtatgtaaatacattgttacaacattaaaaacaggtagtgctctgtattccgcttttctaactcagcagtacccagtgaacatcctttcacatcaaaaacagagaccaaggaccagcccgatggctcacacttgcaattccagggttttgggaggccaaggtgggaggatcacttgaggccaggagttcgagaccagcctaggcaacatatcgagattccgtctctacagagaaataaaaaaaaaattagctgggcatggtggcatgcatgtgtagtcgcagctactcaggaggctgaggcaggaggatcacttgagcccacgaaggcaaggctgcagtgagttatgatggcaccactgcactctagcctgagtgacacagccagaccttgtctcaaaaaaataaaaaataaaaawaaacggagaccaacactattatcaatgatggcctgagtcccatcacaggaggctccaaataaccaatatcctgttgctggatagccag

SEQ ID NO: 505052 - DNA, 539 bp, Homo sapiens
gatgttctgatgttctgataagcatggaggttctaagggaaggggctggcctgggatgggctggggcctgggagagcttcaagaagcctggtaccctgggtctttgttggacatgtgatcactttctccaagactctagtctgagcagtgaagttgcagccatgggttgaacttcatctttttgtwaattttttattttagacagagcctcactctgtcgcccaggctggagtgcagtggtgcaatctttgctcactgcaacctctgccacccgggttcaagcgattttcctgcctcagcctcccaagtagctgggattacaggcacctgccactgcgcctggctaatttttcaccatcttggtcaggctggtcttgaactcctgacctcgtgatccacccgccttggcctcccaaagtgctgggattataggcgtgagccaccacgcctggcctgaactacttctttacttcatctctgtttttcttcttctagcatcttttcattgttgtcttaacagctatgccatcggagtactg

SEQ ID NO: 505053 - DNA, 602 bp, Homo sapiens
ctggattttcatatctgctctgcatttgagctgatatgaatgaaatcagttcatctgagtaatcgcacacctttcagactctgggaaatgccacagtaggttcaaaagagcatgagagtacagaaggcaaatgacatcttagtagtattatgtaagtaattttgaccctacagactcctgaaaggtgttcagggacccagacaggtgcttggatcacacttkgagaactgttggtttagagataccagatatatcatggggataagccaaattagataagaaagaagacaaagatagcacttttcagttgatctttcagcagtgatgtctctacttggaaactgataagaagtatgaatcaaagccaacaacaacaaacactgaagtggtattcggaacccaaggtagcccaattgatttgctctggaaactaaaaatatgtaagttggccatttacttttagactgtgtaaggagagtgaggagtaaatataaacattgttttaattaattaaacagaaactaaacaaaaggcagaatttattgccaccactctacaccatatgtagaaagaagctgcagttctaaaataggcaaaatttc

SEQ ID NO: 505054 - DNA, 602 bp, Homo sapiens
ctggattttcatatctgctctgcatttgagctgatatgaatgaaatcagttcatctgagtaatcgcacacctttcagactctgggaaatgccacagtaggttcaaaagagcatgagagtacagaaggcaaatgacatcttagtagtattatgtaagtaattttgaccctacagactcctgaaaggtgttcagggacccagacaggtgcttggatcacacttggagaactgttggtttagagataccagatatatcatggggataagccaaattagataagaaagaagacaaagatagcacttttcagttgatctttcagcagtgatgtctctacttggaaactgataagaagtatgaatcaaagccaacaacaacaaacactgaagtggtattcggaacccaaggtagcccaattgatttgctctggaaactaaaaatatgtaagttggccatttacttttagactgtgtaaggagagtgaggagtaaatataaacattgttttaattaattaaacagaaactaaacaaaaggcrgaatttattgccaccactctacaccatatgtagaaagaagctgcagttctaaaataggcaaaatttc

SEQ ID NO: 505055 - DNA, 641 bp, Homo sapiens
accttgtagttgtgtcatgcaaagtccttgctattttgaccaagaggacaagttctttggaggcagaaccaatgtgtgttgctacttgaatttacttctasggttaaagaaaagatgctgcacatgatagttgctcagttaatggaagtagattattatgacattgatgattattttgaatttgtttccgtcagtgaaagaatcacttcaagtatgtgcataggttgttaaggttatttggtctctgaaaatttatcaatcaataccctttcatgaccatgttatttttatttcttatcttgagaatgtaaatagttaatatgtttgggaaagatttcactgtgatatttgcttttatcaaggaaaataattgcatttaaatcaagcactgtttaaaagtgatataactatagatcactaatgtttacactagccagaaagaaatatctttgattttgcccaactatgtatgcaatctaaactgtttttatactaaataaaatagaagtattaacttttttatcactgtgcacatgaatatagctccttatttatgcttcattaatgttaagattgataaaacacacttaagggcctctgaagaaatctgtgccccaatgtttgcgtagaccacttggaat

SEQ ID NO: 505056 - DNA, 576 bp, Homo sapiens
gaaaccaaccctgctggcaacttgatcttgaactttttttttttttkttgttggagacaaggtcttgctctgtcacccaggctggagtgcagtggcacaatcacggctcactgcaacctcgacttccttgacaaacaatcttcctgcctcagcctcctgagtagctgggactacatgtgcacaccaccacacccagctaatttttgtggttttttgtagagacggggtttcaccttgttgtccaggctgttctcaaactcctgagctcaagtgatctgcccaccttggcctcctaagtgctggggttacagggatgagataccatgcctggccaatcttggacttcaacgctccagaacagtgagaaaacaaatctctattgtttaacccactcagtctatggtattttgttaggatagcctgagccgacgaatagtaagcgcagacacagaaaaccacgcccaacttcaccctgctacatgcacagcagcacagaggcaaataccaaggaatgtccttacaaagtgaggtctcgtgactgatgttctcaaagaggatgttcaaggtctgcagcag

SEQ ID NO: 505057 - DNA, 624 bp, Homo sapiens
aatgatgaaatgatgaaatgaaagaatgaaatgaaatgatgaaatgagatgaaatgaaatgaaataatgagatgaaatgatgaaatgaaatgatgaaatgatgaaattaaaggatgaaatgaaatgrcatgatgaaatgaaatgatgaaatgatgatgaaatgaaatgaaatgatgaaatagatgaaccaaaaatacttattgatttttttcttggcatccttctaagagtattttagtgagtttaatttctaaaaataaattgctattcaatggctatacagatggcctttgcaccacaagggtttgaactgtgcaggtccacttagcaaaaccaagaattctacatccttctccacaccctgcccatgaaaaggatgaggatgaagacctgtttgatcatctacttccatttaataacgagtaagtatattttccttatgattttctttttcttttctctggcatgtttgttaagaatacagtatataagacatataacatattaaatatgtgttaattggctgcttgtgttatttgcaaggcttagtataggctattagtagttattttggggggagtcaaagttatagtggattttctactgtgcagggggccagcaccc

SEQ ID NO: 505058 - DNA, 624 bp, Homo sapiens
aatgatgaaatgatgaaatgaaagaatgaaatgaaatgatgaaatgagatgaaatgaaatgaaataatgagatgaaatgatgaaatgaaatgatgaaatgatgaaattaaaggatgaaatgaaatgacatgatgaaatgaaatgatgaaatgatgatgaaatgaaatgaaatgatgaaatagatgaaccaaaaatacttattgatttttttcttggcatccttctaagagtattttagtgagtttaatttctaaaaataaattgctattcaawggctatacagatggcctttgcaccacaagggtttgaactgtgcaggtccacttagcaaaaccaagaattctacatccttctccacaccctgcccatgaaaaggatgaggatgaagacctgtttgatcatctacttccatttaataacgagtaagtatattttccttatgattttctttttcttttctctggcatgtttgttaagaatacagtatataagacatataacatattaaatatgtgttaattggctgcttgtgttatttgcaaggcttagtataggctattagtagttattttggggggagtcaaagttatagtggattttctactgtgcagggggccagcaccc

SEQ ID NO: 505059 - DNA, 462 bp, Homo sapiens
gccatgatgccccatttggcatgtgttttaataatacaaagcagggcggggcacagtggctcacaactgtatgtcctcatttgcatgagctaagtttttcatagcaatcaaaagcaaagctagtkcaggtatttgcaattttccttaatgtcatcaagcccaggatttgagagccattttcattggccctagatgacctgttcatatgtgtcttcattgtgcccagctcagagcttcaaagctgtcttcatccaggcctgcaaaggtgttcacagtggtcctcatctaagccagccaagttgttctcttctcatccacatgagagccagcccagatgtccatagccgtcctcaacgaggccagccagttaattcacactcatgcttattggggccatccaccttcatagaggccatcccaggtatttacagccatcctcactaaagccagcccatgtgtcca

SEQ ID NO: 505060 - DNA, 516 bp, Homo sapiens
tgtggatggttatttatggggatgtttttggcctaggctgcaagaagatgggtaagtggcacagggatggcagctcaaggtgccctggcttctctgcatgtctgtcactgggtggagaaggccgggcctgccaccaggttccatcctagctttttctctgtrtcctcagttggggtacctacctgtctctgcctcagtttcctcctctgtgagacagggatcctaataggccctacctctgacagtggttttgatgaagtacatgatgtgggtgaagcacctggagcaggcccactctcgaagaacgcacaacagactctccaggttaatgttgagaaggagctggggtggggcaaaagtgggcaggccatttcagctccaggtacctgggctgacagattggattaaattagcatgtgccttgctgagtgcacaggggtcagttgcccaggcaagaggcaccagggtcaaagctggtaatgccttggcctcatcatcccaggctagggccagtgc

SEQ ID NO: 505061 - DNA, 516 bp, Homo sapiens
tgtggatggttatttatggggatgtttttggcctaggctgcaagaagatgggtaagtggcacagggatggcagctcaaggtgccctggcttctctgcatgtctgtcactgggtggagaaggccgggcctgccaccaggttccatcctagctttttctctgtatcctcagttggggtacctacctgtctctgcctcagtttcctcctctgtgagacagggatcctaayaggccctacctctgacagtggttttgatgaagtacatgatgtgggtgaagcacctggagcaggcccactctcgaagaacgcacaacagactctccaggttaatgttgagaaggagctggggtggggcaaaagtgggcaggccatttcagctccaggtacctgggctgacagattggattaaattagcatgtgccttgctgagtgcacaggggtcagttgcccaggcaagaggcaccagggtcaaagctggtaatgccttggcctcatcatcccaggctagggccagtgc

SEQ ID NO: 505062 - DNA, 562 bp, Homo sapiens
ggtgtggaagtgtgggtggtggtcgtgtaagttctccagccaaggccaagttcctctgcagacctgtgcatgatggcatatccagatgattccaaccccctgctgtggattcaatcccattccataagacttctctgcagtctccagacatcaacaaggaccaataagctaacttttctgtgtctttcctgaattcttgtccctgtaaagcaaattgaaatgtttgtcttctactagcatttgrgggtattagttttttttatttaaaaataatcacagtaaagatatcaggaataacacacttgtaggatattcacaaggtacagaagagtggacactgaaatctggacttgtcttttcctcttctgcagcctgccagcttctgcctctggaagtaacaactgttaagtttctgcacatctttccagatttattaattgaacaatcatatagcactgacagcatggcaaagccttataaaagggctttggctaccagtgtaaaagactcaattattttccttcactgtgatcacttaggtggcaccaggaaggaaagcctt

SEQ ID NO: 505063 - DNA, 683 bp, Homo sapiens
gtgtccccttaagaggtgccttcaacagaagttattttggaaattcagtcattcagttcattcatgatatgatttctagattcttcagtgtctcatatttcagacaattataaaattgcaatgctatattctttatatcgtgtacatatgtaaatgtgttaagtcaattactagtgctacaactacaggagtaaaggtgtatttccattccaggtttgggtttacttttaatagtaaataacatctcagtgcaaattgtagatattttgctgattgttaaaacattaactaagaaggatctttttctgagacagtgttgccagatttgtaaagcaatggacatcacttcaaaatgtttggaagtaacctaaaaatggaggaagtggtactgaaaatttccatatacccaccttcctcagtgtttttttgtgaacccatcttacatgagtgtgataacgcttgtaacaatgaccgagccaatagtgatacattcttatgaacagaagtccaaggttagcatcagtgactgagccaatagtgacacattcttwtgaacagaagtctagggttagcatcaaggttcactctgtgttgtccagtctttgggttttgacaaactgacaatgtcctttgtcaccctgatggaataatttcacatcctaaacatgacctgagctgcacct

SEQ ID NO: 505064 - DNA, 433 bp, Homo sapiens
cagaagtccaaggttagcatcagtgactgagccaatagtgacacattcttttgaacagaagtctagggttagcatcaaggttcactctgtgttgtccagtctttgggttttgacaaactgacaatgtcctttgtcaccctgatggaataatttcacatcctaaacatgacctgagctgcayctactaattcctctccttttctgatgattcctgacaactgtggatgattttactgcctctataggtttccttttccagaattttatggagttggaatcataaagtatgtagctacttatgactaacttattttacttagcaatatacatgtgagatcttttgtattgttttgaagcttaacagcttaataactcttatcagtgaacaatagcccattggtttcatcaaacagtattagttggctcactcacc

SEQ ID NO: 505065 - DNA, 498 bp, Homo sapiens
gtgagcagtgccttcataaagtcccctgagttcacagagcccagggagaatcatagtggacaaagcagtcatgttgatgtttgtgtctctgtacatgggctcatgggcactacctctggatccatccaggaggaaatagactggtcaggtagggaccaacaccccagggttgaycagtgagagagcgttcttggagattgggttacacttgttttggagcctaggatgggatcaatgaagtgactaaatatgaaaggaaacaggtatagaagtctgacttgggtttttttttttttttttttttttttgtatcttaatgacaaagttgtaagagttgtgttcttatgggctttgtgtgagttgtgtttgtcaccatcatttcttgctctggtgtttaaagattacattttgcagaggaccagatcatttctgcctttgccacagcaagcaccagagccctgggttttgatgaggtagcatttttttgtgaatagagat

SEQ ID NO: 505066 - DNA, 547 bp, Homo sapiens
tgggctttgtgtgagttgtgtttgtcaccatcatttcttgctctggtgtttaaagattacattttgcagaggaccagatcatttctgcctttgccacagcaagcaccagagccctgggttttgatgaggtagcatttttttgtgaatagagatcacaagatgagtatgcaggtgtaaagttgagtgtggggtgggacagagccccttccaggtgctrcgtaatcctgaaggtaaagtccttcatacatgtgccaggagatgaaaggagcccactgtctttctctacactctcaggacctgcaacagcaccttcctgtcctgtcctcaccatctgctcctgctctaagggtgctccctgggttggatgacatagggaatcattcctctggaattcatacgtgtgccccagcatcctggagtcctgagggccgaacacatgattgagcacatttttggcctccactcctcacccagtcccatccaatcccaaatccttgggctttgaatgaaacctaaattggttttcgttggagaggcccgagtccag

SEQ ID NO: 505067 - DNA, 596 bp, Homo sapiens
tgagtttttgtaattttaatagacttctttcatgctttcattttcttaatgacttttacstcatttttaaaacaaatccatagtacggtaagttacatcaagatggactgtatttatgttttgtagtggtttatattctgtatgtattttacatatataagtgttaatggcctggtgcagtggctactgcctgtaatctcagcagtttggaagaccaaggcaggaggattgctcgatcccagaagtttaagactagcctgggctacatagtgggaactcatccctacaaaaaaaaaattttttttaattaactgggcatggtggaatccatctgtagccccagctactagggaggctgaggcagggggattgcttgagtctgggaggttgaggctgcagtaagccatgactgcaccactgcactccagcctgggtgacagggcgagactctgtcttttagaaaaaaagtttattaatattaatatcagttagaaatctagttgttcattgcagaactaaaccagtttatagcagaaataagcacttggagggaaatgttacattttcactccaggccttgagtccttagccaccag

SEQ ID NO: 505068 - DNA, 596 bp, Homo sapiens
tgagtttttgtaattttaatagacttctttcatgctttcattttcttaatgacttttacctcatttttaaaacaaatccatagtacggtaagttacatcaagatggactgtatttatgttttgtagtggtttatattctgtatgtattttacatatayaagtgttaatggcctggtgcagtggctactgcctgtaatctcagcagtttggaagaccaaggcaggaggattgctcgatcccagaagtttaagactagcctgggctacatagtgggaactcatccctacaaaaaaaaaattttttttaattaactgggcatggtggaatccatctgtagccccagctactagggaggctgaggcagggggattgcttgagtctgggaggttgaggctgcagtaagccatgactgcaccactgcactccagcctgggtgacagggcgagactctgtcttttagaaaaaaagtttattaatattaatatcagttagaaatctagttgttcattgcagaactaaaccagtttatagcagaaataagcacttggagggaaatgttacattttcactccaggccttgagtccttagccaccag

SEQ ID NO: 505069 - DNA, 643 bp, Homo sapiens
tgtcctgagagcacgtctctacatctatacctgcattctggaatcagggaggaagccaaaacggatgacaagacactaggtcagccgcstccaaccctttgactacaaggacttttccacctatctgtggtggtgggtatcatgaaaattatgcacaaacctttttttttttttaagctcatcagctatcgttagcattagtgtattttatatgtggcccaggagcattcttcttccaatgtgaccctgagaagccaaaagacacctgtgcactagatcaaaaggctactccttctggaagcaattgtaaagaatttctgacattatcttcacatgacaaccaatgggtagtgggacagaatgcaaaaatcttcaagtatttttcttgttggttttttttttttgagtcagggtcttgctctgtggcccaggctggagtacactggtgagatcacagctcagtgcaggctcaagtgctcctcccacctcagccacagtagtagctgggactacagatgtgcacaaccacccctggctaatattttattttttgtagagacagggtctcactatattgtccaggttagtctcaaactccttgactcaagggatccaggacaggataacaggtgtgagccaccac

SEQ ID NO: 505070 - DNA, 505 bp, Homo sapiens
acgtctctacatctatacctgcattctggaatcagggaggaagccaaaacggatgacaagacactaggtcagccgcgtccaaccctttgactacaaggacttttccacctatctgtggtggtgggtrtcatgaaaattatgcacaaacctttttttttttttaagctcatcagctatcgttagcattagtgtattttatatgtggcccaggagcattcttcttccaatgtgaccctgagaagccaaaagacacctgtgcactagatcaaaaggctactccttctggaagcaattgtaaagaatttctgacattatcttcacatgacaaccaatgggtagtgggacagaatgcaaaaatcttcaagtatttttcttgttggttttttttttttgagtcagggtcttgctctgtggcccaggctggagtacactggtgagatcacagctcagtgcaggctcaagtgctcctcccacctcagccacagtagtagctgggactacagat

SEQ ID NO: 505071 - DNA, 505 bp, Homo sapiens
acgtctctacatctatacctgcattctggaatcagggaggaagccaaaacggatgacaagacactaggtcagccgcgtccaaccctttgactacaaggacttttccacctatctgtggtggtgggtaycatgaaaattatgcacaaacctttttttttttttaagctcatcagctatcgttagcattagtgtattttatatgtggcccaggagcattcttcttccaatgtgaccctgagaagccaaaagacacctgtgcactagatcaaaaggctactccttctggaagcaattgtaaagaatttctgacattatcttcacatgacaaccaatgggtagtgggacagaatgcaaaaatcttcaagtatttttcttgttggttttttttttttgagtcagggtcttgctctgtggcccaggctggagtacactggtgagatcacagctcagtgcaggctcaagtgctcctcccacctcagccacagtagtagctgggactacagat

SEQ ID NO: 505072 - DNA, 643 bp, Homo sapiens
tgtcctgagagcacgtctctacatctatacctgcattctggaatcagggaggaagccaaaacggatgacaagacactaggtcagccgcgtccaaccctttgactacaaggacttttccacctatctgtggtggtgggtatcatgaaaattatgcacaaacctttttttttttttaarctcatcagctatcgttagcattagtgtattttatatgtggcccaggagcattcttcttccaatgtgaccctgagaagccaaaagacacctgtgcactagatcaaaaggctactccttctggaagcaattgtaaagaatttctgacattatcttcacatgacaaccaatgggtagtgggacagaatgcaaaaatcttcaagtatttttcttgttggttttttttttttgagtcagggtcttgctctgtggcccaggctggagtacactggtgagatcacagctcagtgcaggctcaagtgctcctcccacctcagccacagtagtagctgggactacagatgtgcacaaccacccctggctaatattttattttttgtagagacagggtctcactatattgtccaggttagtctcaaactccttgactcaagggatccaggacaggataacaggtgtgagccaccac

SEQ ID NO: 505073 - DNA, 643 bp, Homo sapiens
tgtcctgagagcacgtctctacatctatacctgcattctggaatcagggaggaagccaaaacggatgacaagacactaggtcagccgcgtccaaccctttgactacaaggacttttccacctatctgtggtggtgggtatcatgaaaattatgcacaaacctttttttttttttaagctcatcagctatcgttagcattagtgtattttatatgtggcccaggagcattcttcttccaatgtgaccctgagaagccaaaagacacctgtgcactagatcaaaaggctactccttctggaagcaattgtaaagaatttctracattatcttcacatgacaaccaatgggtagtgggacagaatgcaaaaatcttcaagtatttttcttgttggttttttttttttgagtcagggtcttgctctgtggcccaggctggagtacactggtgagatcacagctcagtgcaggctcaagtgctcctcccacctcagccacagtagtagctgggactacagatgtgcacaaccacccctggctaatattttattttttgtagagacagggtctcactatattgtccaggttagtctcaaactccttgactcaagggatccaggacaggataacaggtgtgagccaccac

SEQ ID NO: 505074 - DNA, 643 bp, Homo sapiens
tgtcctgagagcacgtctctacatctatacctgcattctggaatcagggaggaagccaaaacggatgacaagacactaggtcagccgcgtccaaccctttgactacaaggacttttccacctatctgtggtggtgggtatcatgaaaattatgcacaaacctttttttttttttaagctcatcagctatcgttagcattagtgtattttatatgtggcccaggagcattcttcttccaatgtgaccctgagaagccaaaagacacctgtgcactagatcaaaaggctactccttctggaagcaattgtaaagaatttctgacattatcttcacatgacaaccaatgggtagtgggacagaatgcaamaatcttcaagtatttttcttgttggttttttttttttgagtcagggtcttgctctgtggcccaggctggagtacactggtgagatcacagctcagtgcaggctcaagtgctcctcccacctcagccacagtagtagctgggactacagatgtgcacaaccacccctggctaatattttattttttgtagagacagggtctcactatattgtccaggttagtctcaaactccttgactcaagggatccaggacaggataacaggtgtgagccaccac

SEQ ID NO: 505075 - DNA, 625 bp, Homo sapiens
atcatctcacccagtgatgctgtttcaagaggcggatcatcakggagcctgtgcaccctggggaatggggccgtatgaaagatatccatgccctctgctccattcttctgtggacctaaaactgctctttaaaagaaagtctctcttttttttttttgtgagacagggtcttactctgttgcccaagctgcagtgcagtggcaccaatcttggttcactgcaacctctgcttcccaagttcaagcaattctcctgcctcatcctcccaagtatctgggactacaggcgtgcaccaccaagcccagctaatttttttgtatttttagtaaagatgggttttcaccatgttggccaggctggtcttcaactcctgaccacaaatgatccccccgccttggcctcccaaagcgctggggttacagacgtgagccactatgctcagcttaagaaaagtctatttttaaaagaacactgacttgagagaatgaaggaatgaaatagttggcttggtggattcaacagactcgggacaaggtaaaatgggtaagggaatatggcactgttgttgcagtgtgaacggccgtgaacagcacatacaatggctgacgtggtgtgggcatcccca

SEQ ID NO: 505076 - DNA, 625 bp, Homo sapiens
atcatctcacccagtgatgctgtttcaagaggcggatcatcatggagcctgtgcaccctggggaatggggccgtatgaaagatatccatgccctctgctccattcttctgtggacctaaaactgctctttaaaaraaagtctctcttttttttttttgtgagacagggtcttactctgttgcccaagctgcagtgcagtggcaccaatcttggttcactgcaacctctgcttcccaagttcaagcaattctcctgcctcatcctcccaagtatctgggactacaggcgtgcaccaccaagcccagctaatttttttgtatttttagtaaagatgggttttcaccatgttggccaggctggtcttcaactcctgaccacaaatgatccccccgccttggcctcccaaagcgctggggttacagacgtgagccactatgctcagcttaagaaaagtctatttttaaaagaacactgacttgagagaatgaaggaatgaaatagttggcttggtggattcaacagactcgggacaaggtaaaatgggtaagggaatatggcactgttgttgcagtgtgaacggccgtgaacagcacatacaatggctgacgtggtgtgggcatcccca

SEQ ID NO: 505077 - DNA, 625 bp, Homo sapiens
atcatctcacccagtgatgctgtttcaagaggcggatcatcatggagcctgtgcaccctggggaatggggccgtatgaaagatatccatgccctctgctccattcttctgtggacctaaaactgctctttaaaagaaagtctctcttttttttttttgtgagacagggtcttactctgttgcccaagctgcagtgcagtggcaccaatcttggttcactgcaacctctgcttcccaagttcaagcaattctcctgcctcakcctcccaagtatctgggactacaggcgtgcaccaccaagcccagctaatttttttgtatttttagtaaagatgggttttcaccatgttggccaggctggtcttcaactcctgaccacaaatgatccccccgccttggcctcccaaagcgctggggttacagacgtgagccactatgctcagcttaagaaaagtctatttttaaaagaacactgacttgagagaatgaaggaatgaaatagttggcttggtggattcaacagactcgggacaaggtaaaatgggtaagggaatatggcactgttgttgcagtgtgaacggccgtgaacagcacatacaatggctgacgtggtgtgggcatcccca

SEQ ID NO: 505078 - DNA, 625 bp, Homo sapiens
atcatctcacccagtgatgctgtttcaagaggcggatcatcatggagcctgtgcaccctggggaatggggccgtatgaaagatatccatgccctctgctccattcttctgtggacctaaaactgctctttaaaagaaagtctctcttttttttttttgtgagacagggtcttactctgttgcccaagctgcagtgcagtggcaccaatcttggttcactgcaacctctgcttcccaagttcaagcaattctcctgcctcatcctcccaagtatctgggactacaggcgtgcaccaccaagyccagctaatttttttgtatttttagtaaagatgggttttcaccatgttggccaggctggtcttcaactcctgaccacaaatgatccccccgccttggcctcccaaagcgctggggttacagacgtgagccactatgctcagcttaagaaaagtctatttttaaaagaacactgacttgagagaatgaaggaatgaaatagttggcttggtggattcaacagactcgggacaaggtaaaatgggtaagggaatatggcactgttgttgcagtgtgaacggccgtgaacagcacatacaatggctgacgtggtgtgggcatcccca

SEQ ID NO: 505079 - DNA, 531 bp, Homo sapiens
ccatcccggggaaatgggatgaagatcgaggtgtgtgtccttcccccagggaaatgggatgaagatcgaggtgtgtgttcatcctggggaaatgggatgaagatcgaggtrtgcgtccttcctggggaaatgggatgaagatcgaggtgtgcgtccttcctggggaaatgggatgaagatcgaggtgtgtgtccatcctggggaaatgggatgaagatcgaggtgtgtgtccttcctggggaaatgggaaggagatccaggtgtgtgtccttcccccagggaaatgggatagagatctaggtgtgtggccttcccctggggaaatgggatgaagatcgaggtgtgtccttccactggcctcttatgcacagttatgttatttccaggcagtctctgtgttcactcaggtttgagtgtaaaatccccacaactttctgtgtttatctcctgtttggtttccttctttaacttatctttcttatttttgtgtctctttgcttccacatctgtgaagagtttagaggcacctgt

SEQ ID NO: 505080 - DNA, 531 bp, Homo sapiens
ccatcccggggaaatgggatgaagatcgaggtgtgtgtccttcccccagggaaatgggatgaagatcgaggtgtgtgttcatcctggggaaatgggatgaagatcgaggtatgcrtccttcctggggaaatgggatgaagatcgaggtgtgcgtccttcctggggaaatgggatgaagatcgaggtgtgtgtccatcctggggaaatgggatgaagatcgaggtgtgtgtccttcctggggaaatgggaaggagatccaggtgtgtgtccttcccccagggaaatgggatagagatctaggtgtgtggccttcccctggggaaatgggatgaagatcgaggtgtgtccttccactggcctcttatgcacagttatgttatttccaggcagtctctgtgttcactcaggtttgagtgtaaaatccccacaactttctgtgtttatctcctgtttggtttccttctttaacttatctttcttatttttgtgtctctttgcttccacatctgtgaagagtttagaggcacctgt

SEQ ID NO: 505081 - DNA, 626 bp, Homo sapiens
tttgccaggctgattttccaactttctctgtatcatgctgcaccaactttcattctcatgtctttcctggctgttttcyctgagttcaaatctcctcaagcatctttgccgagtcctcctctgttcatgaaggctacttcagatcccagggttgtgtgacgggtgctgagacgggtgaatccacagtgacccagggttgtgtgatgggtgctgagacgggtgaatccacagtgacctctccaatggctgattgcttgtgtcagagcgtcgcctgccacacaacggacattttgccattaggcactgccttgaaattgtgaatttattttttatttttatatgcactctcttgactccctgagcacattgcatttctcacctgtcaatcacagtgtctggtgcagtgcatgtggtggttcaagctcacctctggaatcagggtcatgttccgggcccatcacttccaagctgtgtgaaattgagcaaatcatgtgaccttctaaattgggtgtcctcatctgcaaagtagtgatcatggaagcatttcccatttgcgatcactgtaaaggcgccatggggtaatccatccgaggcacacagggcatgtgtgacgcagtgagcatgtc

SEQ ID NO: 505082 - DNA, 626 bp, Homo sapiens
tttgccaggctgattttccaactttctctgtatcatgctgcaccaactttcattctcatgtctttcctggctgttttctctgagttcaaatctcctcaagcatctttgccgagtcctcctctgttcatgaaggctacttcagatcccagggttgtgtgacgggtgctgagacgggtgaatccacagtgacccagggttgtgtgatgggtgctgagacgggtgaatccacagtgacctctccaatggctgattgcttgtgtcagagcgtcgcctgccacacaacggacattttgccattaggcactgccttgaaattgtgaatttattttttatttttatatgcactctcttgactccctgagcacattgcatttctcacctgtcaatcacagtgtctggtgcagtgcatgtggtggttcaagctcacctctggaatcagggtcatrttccgggcccatcacttccaagctgtgtgaaattgagcaaatcatgtgaccttctaaattgggtgtcctcatctgcaaagtagtgatcatggaagcatttcccatttgcgatcactgtaaaggcgccatggggtaatccatccgaggcacacagggcatgtgtgacgcagtgagcatgtc

SEQ ID NO: 505083 - DNA, 345 bp, Homo sapiens
aactgcagctgtattttcagtcgcacggattctctcctstttcattgataaaaatgagaaatgcagcactcttggcaccacaaaaccttcttcaaccttgataccgttgtgtgggtgaagtcgtctctatttatttatgctttgccgtgttccacaggatgcatgagaaagcacagactttaaatcattgccttcaacaccctcattttatagccaggaaacagacaaatgcaggagcaaaaatggataagggttggatgacttagtggcaaagtcagatatagccaagggaatctgattttaagtttgctatttattccacttttccaggctgccttaattata

SEQ ID NO: 505084 - DNA, 530 bp, Homo sapiens
tctggaagacggacgcttcccgtcccctgatgttgggtttggccatgagacttacattggccaatggactgtgatatgtgtatccacatatgtgtatgcaatgtgatatgtgtatgcacatatgtatgcaggacrtgtatatgcacatgtgtacatgtatgaaaggagacatgtgtacacataagtatgtatgaaatatgtgtgtgtgcaaatgcatgtatgaatgtatgaactgtgatgagttcgtgtacatacacaggtatgaaatgtgatgtgtgtgtgtaatatgcatgtatgaaatgtgacgtgtctatgtgcacacacaggtatgactaaaatgttggtatgtataaaatgtaacacatgtatcagatgtgatgtgtgtacaagtgtttgtatgaagtgtggtgcctgccatgggaaggcagcaactctgagagccactgcctctgctgcaccttgtttgatttctgtcggctatgagatcaagaaagggcgtgctctcgcctcaataatggttacaatgtaaa

SEQ ID NO: 505085 - DNA, 594 bp, Homo sapiens
ccaatagtgagaaaagaccattatcttcaatcctgagtgttttcaaaggtccccaatcactagacggttaaccaagaggaacacctcaggaaagcaattttggggatactttaaagaatttcctctatgagtgggaaagaagcctttatcagcttgaaagccttgtttttattgtacttccccrgtgagcaacagtgtggtttgtctgggaataaaggagttctcaggacacaggtcttttggttttaaaactggtgatgtcccagacaaatgtgcctagtgggtcaccccatctaccaatgtcttccacacctctatacggggagacatttaggttttagcatctgttacagatattttcatttttccatctgccattagcattctttctataaaactgacagcataggagactctggcttgttataaagaaaacaaacaaacaaaaactcaaattagctcgaacgaatgaaaaaacaaaggccatgtagtggtcactggaactgagcatgggagcgggagaggccaggctcttggggccgccgtctgctgcaccaatgctgtgctcatgtttctgcctctgcttccccctat

SEQ ID NO: 505086 - DNA, 475 bp, Homo sapiens
gtgcagcaaaagtgaggtaagtctcaaagtggaaagagggggtgccacgtaaagtcactgaactcattctagggtcctagagtggccggtgctggggtcctccctgcccggccttggggcagaagtcagtgccctggcttggtaagctagccccacgtggytccgcccatcacatggctgcagaggcgccagctcatgaagcgggcctgctgggggtcaagcctgaccccacgaactgtctcagactaaggcagggcacactcagcaaggcgcctggcagcaggcaacctttagccaccggaacagcctgatggttaccaaacagtgacctgctgccctcaccggtgatgtacttccagtacagaacatcgagaaactgcgtcctggagggagacttgacaccgagggcaggcgggaggacacaagggcgtccagctttgcggggggacgcacccggtggtgccgagggcagcgc

SEQ ID NO: 505087 - DNA, 641 bp, Homo sapiens
ctggaaactttaatattcagcaaagtagaaaacctacttgttgatattacatttgcttatacgtgtttttaatgagaaagaagaaaatctaacaaaaagataagaaaagatgaggtacatgttgttgttaccataattattgcattttgatctattctcggcctgcttccttactgtggaggcctcaaacacacaagcatgggttgtcacttatgtcatccctgtgacccagtgtccttggagaatgggcatatgagaggtgcaaacttaataaagaatccattcattagatgtacttcattcataaaaataatcccaccattacagattagttaagacagtaacatcaggaccatgcctgtaactcgttatagttggccttaggattcaaccagccgaggatccaaaatattctaaaacagagctgggcgtggtggyatgtgcctgtaatcccagctacttgggaggctgaggtgactaggagttcaagactagcctgggcaacatagtgagaccctgtctctaaaaaaataaataaataaataatgtaaaaaatttattggaaaaataaaaacaacaaaaataatacaaataaaaagcaatacagtacaactatttacacagaatttacattgcattag

SEQ ID NO: 505088 - DNA, 470 bp, Homo sapiens
ctgctgtggttgggagggatagggagggagtaaggggatgcagggtaggaggcggtgattatttttatgttaagggaccccaggcctcagaccagaaatgtctaatatagtgwcaggagtgatcttttagccagcaagtgttaactgatctgacccttggccttcccccccaccccccagcctatcacacagacaggaggtaaggaaaccatagaggggagaagaaaacagggagacagagatcgaattccagaaaaggaagggctgccagtggtaggcagagtcacccctagagtggcctgggctcccactttatagacatgtgcaatacttgaagatagctctttttacatctaaaccagcggttagtcagtgtcccattggtgtcagtcgcactgatggtgctcagggccattgctctgcagccacctttgcagtcccatacgtggtaacgagtcctgttcctgcag

SEQ ID NO: 505089 - DNA, 603 bp, Homo sapiens
gctgctgctgaccatggcttttgaccgctatgtagccatctgcaagcctctacactacaagagaattctcacgcctcaagtgatgctgggaatgagtatggccgtcaccatcagagctgtcacattcatgactccactgagttggatgatgaatcatctacctttctgtggctccaatgtggttgtccactcctactgtaagcacatagctttggccaggttagcatgtgctgaccccgtgcccagcagtctctacagtctgattggttcctctcttatggtgggctctgatgtggccttcattgctgcctcctatatcttaattctcagggcagtatttgatctctcctcaaagactgctcagttgamagcattaagcacatgtggctcccatgtgggggttatggctttgtactatctacctgggatggcatccatctatgcggcctggttggggcaggatatagtgcccttgcacacccaagtgctgctagctgacctgtacgtgatcatcccagccactttaaatcccatcatctatggcatgaggaccaaacaattgctggagggaatatggagttatctgatgcacttcctctttga

SEQ ID NO: 505090 - DNA, 546 bp, Homo sapiens
cctggaggggaatgagctagtgaggcacagaccctggtgctggccaagggttgagcctgcctcaattagaggagcatctttgtcaggggattccctgggggtaactgagaagtaggtccctaggaaggacttcagttctgtctgtggacaattgggacaaaagggttaagggaaaatcaatgttgttctttggctattaagacaaatcttggaaggttcctagaaacggaggattgttagctgataaattcattcgaacttagaatgaaggaaggaatgaaatggcctcatttgtaatgtactctttttggttrgtttgattgttttttacatttataagcctgtttgggtactctgattacttgttagaagactcgtaaggttaaacaatccacattattacagattgtctgatttttacgaccagacaagaagattgaagctctaagtgcctgaaaacccttttctacagagtagttgtttacacttcccttctgagaaccatatgaaaacaaggaccttatttgtctgttcaccactgtaccc

SEQ ID NO: 505091 - DNA, 552 bp, Homo sapiens
acgagaacccagttcttaagcttcaagtttctaggcagatgtgaccaagtgagtgttttaagaaaatctgtgacttgcttgtcacacataccaatgcacattcttatcccctccattttcctgtgaggcagatattattacctatcccgtttccatggtaataataatgartatttgttgagtttatactatgtattaatactatcctgggcattgtctgtggatcactgcacataattttcacaaaagcactgagcgtagacagcattatcatccctagcaaacagatgaaagccagcccacaaagagtgaattgagttgatgagtaagataactatctgttctttttattggactatgtttccttataggaaacctgtgaatatctcttggggtagaaagtccacaatatgtgggaacaggtttgatttttgaagagtcataattggcaggaacaagaggtaggagatcaagtggagaaatgccatgtttgggcaaagaggtggccacagggaagggggctggctttctcgtgtgggtcagagaatagtt

SEQ ID NO: 505092 - DNA, 546 bp, Homo sapiens
ctgaaatgaaataaagatttgacgaagggtaaaatattacccccatgattctaacaagaagtaatacaktgtgggaattttgccaatgggctgacactcacctctgaatcccttgagcctgtccatcagtccaatgatgggccctgcactgaactctggattcacaggctcagacacttgcagcagcagggactcatacctgcaaggagaaagatagagttaccatatcaacagccaaaaaaatacataagaatcaccacctttatttaaaagacatttcatgagaatccctttaacccacacatttgctaattccaaaattatcattttctttttcaaattcattcttattcacagttcctcattttcaagcacgatggaaaagtctatctgactgagaatttattcggatctttcttcgtattgctccaaattagtaaggatcattagtcttaagactgggagaatattcaaaaatgaaattctggattccagacctcaccagaaattcctgaaattactgtctggaaaagtggggttattttt

SEQ ID NO: 505093 - DNA, 546 bp, Homo sapiens
ctgaaatgaaataaagatttgacgaagggtaaaatattacccccatgattctaacaagaagtaatacagtgtgggaattttgccaatgggctgacactcacctctgaatcccttgagcctgtccatcagtccaatgatgggccctgcactgaactctggattcacaggctcagacacttgcagcagcagggactcatacctgcaaggagaaagatagagttaccatatcaacagccaaaaaaatacataagaatcaccacctttatttaaaagacatttcatgagaatccctttaacccacacatttgctaattccaaaattatcattttctttttcaaattcattcttattcacagttcctcattttcaagcacgatggaaaagtctatctgactgagaattyattcggatctttcttcgtattgctccaaattagtaaggatcattagtcttaagactgggagaatattcaaaaatgaaattctggattccagacctcaccagaaattcctgaaattactgtctggaaaagtggggttattttt

SEQ ID NO: 505094 - DNA, 631 bp, Homo sapiens
cctctactagcaaatctgcttccacatggcaaaaatgagaagtgctgggccagtacccaggcacacagctgcagaagctacctggacctgcctcatgggccaaagggaagggatgccaacaggcaaggcacgcctaaagtgagtccagagagaccagggggagtctgggatctcatcagggatgacccttctttcagttggctctggtgggttttcaaaatccagtctttccactggggccataccaaagctccggggaaggtcaggcttcccagtcccaccagaacccccccgtgaaattgtcattttctctcaagttgcatacactggccaggtaaaggcagcttctactcaccaggcaagtggccagctcaccttcatatttgccaaagcaatctgggtcctgccccatacttgttggcttggcaggcttttcaaaatgcaggtatctctggagctgttttgtggacaccaggagcattacttgacaagccctgtgctggccccaaggtaccctgtgcacctgggtaaggatggaacacattgggaacagggacccaacacgcccactccggaacagygtgggacctggggaaatcgccagttgtttgctgtcctgccattgctgttc

SEQ ID NO: 505095 - DNA, 627 bp, Homo sapiens
tgtttatagttacaggagttgagtgttgaagcccataatgattaaactaaacacacttagattaaacttaaccaatttttaattgtctttagaaaggtacatctgttacttgggtgccagagagtgagwctaagtatccctgtataagttccactcaaggggtcatggaggaaaagaaagagagagagagagagagggagatgggtttgtatgggtttctggaacaatcagctaatagaagtaactgtgaagttatcctaattgttcccctctaccccaatattaagcttgcccaaataacttataattgagaacattgcttgttttaaactaaaatgatgcttgtctcatttttccacttgtgttgtagtataaacccagcttgcctgtatttaccacatctaggtctgtactgggcttaagttaacaggtagattgaacagagctgaagcagacaagaactagccacgggcccttccccctccatgtggtcaaaacataatattctcacttaaatttttctgttttaaatttccagaaacatggattcagacacactgcaaaccttccagagggagctctgttgctttatctgcaggaactacttaatggacgcagtcaccattg

SEQ ID NO: 505096 - DNA, 279 bp, Homo sapiens
ttctgttattaacacagccttgggtggttccttagaggtgtatcaataaacctaccttgttaacccagaaaaacaacaaagaatactagggaaagtaggacagaattctcatgattaagtacttgtgtttttctttgcaggacttggaaaacatactggaatggtgagttacactaatgaactttgattgctgagaaagtcattcccttattgataaagwcaatgtacccttgaaagtcaatgtaccattgaaaaaggtggggattaagttcattaacc

SEQ ID NO: 505097 - DNA, 592 bp, Homo sapiens
gaatatagttcaacaaaacactgcataatctattgyactctctataaatatgaacaacatctacatatactcacaaccagtcacttgcttaactaaaaaaaagtgatctcatggaattaaaaagtaaaacagaggatactagtggctaaggaatggtaaaaggcagagggtatagggaaaggtacaaaattaaatataattaaatataatgaatactaaaagagaaaataaatacaatttaaaatacaaaattataggtagatgggaggtataagttgtaatgttctatagcattgcaagatgattataattaatagtaatatatactttcaaatagctagaatgaggatattgcaggttccctaaaaaaaaaaaagaaatgataaatgtttgagataatgtgctaaatactctgatctgattgctatgcatcatatgtatcaaaacatcactatctaccctacaaatatgtaaaattatgtgtctattaaagataaaattttaaagtactgattccttgatatcctctgtacagtgatagtttgtttttctaatattcttttaatgggtaatcaaacacaaaaaatggttt

SEQ ID NO: 505098 - DNA, 446 bp, Homo sapiens
gggatccatcagtttctccatctggtcacctctccagttcagcatggtctaagctagcctcactttcccacgtactacgtatgttctgtgccccctccccaattctccccctttctgtagccactattccacttagcagcatcactgtcccctgtcacatcagcaggaaacaaggagccattcagctctttcatcctcagcccccactttcaaccatcaccaargccttatttccatccttaaaatgcctctccactctcactgcctttgtcctatttgagtctcatcgttccgtggcctggttatttcagcactttcccaagtggcctcctagccttcatgctctcttcgtaatacatcctttacattgtctacaacagttctaaagacaaattccatcttgtcatgccttccagtacctccaattgcttatctgataaagtcta

SEQ ID NO: 505099 - DNA, 602 bp, Homo sapiens
catggatggacataacatgcctcaagtgggaagacacatgggcatcccaaggaggctaatgattgctgacctttcaaaccaatattactaaatgtctgttcaaagtttatttagaacagtggtcctcaaactttggcatgcatcggaatcacctacttttgcaattaaaagtaattacaaaaaccgcaatttcctttgtggagaatcacttgaacccgtgaggtggaggttgtagtgagctgagatcttgccactgcaccccagcctgggtgacagagcgggaccctgtcccaaaataaatacataaataaataaaaagagatgaagctccccaaatgatccccatggagccaaggttaggaaccaagattctgagggtgagcgctctggagaaggggrctgggggtgggggttggggaggggaggaaggaggcagtggcagtgctcctccctgctctcctttctgcaggaatgagtccccaggtcgaagccacccacctgcctcaccatgtgggtttaggaccatctttgtctctgaaagcagctctagaagatgggttcctgcccccagtgcagaagctcatggagactgtgacatgaca

SEQ ID NO: 505100 - DNA, 562 bp, Homo sapiens
taaaaataaacttttgcctgggaagaaaagaaaaagcaagcagctcacatttccagtgrcgacttctcgataagaatctgtgttccatgggagggctgagagacacaggatgggttgcctgagcagggaatggcacctcctccctggcagcctttagtagcaggctaaattctcaccagctccggggtgacttaaggatagctccgcctaaaggcaagcaactgaacaaagttaacaaaagggagatcctatggaccaagtgatggaatctccagctgagaattattttttttattatactttaagttttagggtacatgtgcacaacatgcaggttagttacacatatatacatgtgccatgttggtgtgctgtgcccattaactcgttatttaacattaggtatatctcctaatgctatccctccctcctccccccaccccacaacaggccctggtgtgtgatgttccccttcctgtgtccacatgttctcattgttcaattcccacctataagcgagaacatgcggtgtttggttttttgtctttgcgatagtttgctg

SEQ ID NO: 505101 - DNA, 638 bp, Homo sapiens
caaaaagtttttaatagagtcattatattctaattttctctcacacatgctatatgtaattgtgtgcatttaaaactttggaggaaaacagttttaaggtaggtttatggttctttttattaaagataatgccgtactcctaaaaatgaaaaacctgtccatttttctttcaaagtaatttacccaaagcctcccaatttgggtaggtacaaaagtttcacaatttagaacttttaaaaagtcgtttatttggcgtggatgggccaggactgcaggtataatttcttgccactagatgtctctgagttttaaagcagcagactcgtgggtttttgtctatttatacatacagatcacctacctccctgttaacagagtttcataatcctcttatgtaacgctgsgttgtcagctacagttaatcatcagttgggagatgggcaggcagggaccccaaggacttcatgtcctcgagacagggttggacgtgttgagagaaggttgagaccaggtgtgaccaagcagaaccccgtgactctgaaatgcatccacgcggaggccagggaatgatggaaaacaaagagctcgctgctgcagcacgtgccggctggatgcggagaccacggcatccactcctt

SEQ ID NO: 505102 - DNA, 620 bp, Homo sapiens
ggagctgttgctattcggccatcttygatgcctgacatttttaaggctaggctggcaaacaatccatgaagaccgcctccagagaagagactcatattacgtaactataatagcttgggtttatggagaatatttcttagcacttaacaagttaactcactttatcctcttcgtggtccatgtctgtgaaacacacagcaattcctgcctgtttttcagtaggtggagaccaaatgtgctttttatttatttatttatttcattattattatttttgatggagtctcgctctgtcgcccagtgcaatggtgtgatcttggctcactgcaacctccgtttcctgggcttaagtgattctcctgcctcagccttccaagtacctgagaccacaggcatgcaagaccacacctggctaatttttatatttttagtagagatggggttttgccatgttggccaggctcatctcgaactcctgaccacagattatctgcccaccttggcctcccaaagtgctgggattacagttgtgatccaccatgcctggctccaaatacatttttgcctaaataaaaagtaaaacctaggtgttctgatttccagttgaagatggtttccgt

SEQ ID NO: 505103 - DNA, 611 bp, Homo sapiens
ctgcgcacagggagcttgctagcctctagcagcacagcagtcagcacccttcgctaaaatcgggggagtctgatagacctcggtgtgtacgttcaatgcagacccgacctcacactctgaactggctcctctgggccagttctgggaaagcgccaataccgaagcctcttgtgtcacgggccaaagggcccctggagatgaaaggaaacgtgataattaacggtttccgtccctggtggtcactaaggcggcttataatgcttatgactgcctccacctggggaacttgagggagacaaaagcatggagaattgcttcagggctccacatagctatatacatatatatgaattcttttatgtatataaaaatatatacatatgtatacattttatatacatgaaagaattagctatagactcaatagccttgtcccaccgcgttttggaagacgcaagcagtgccaagctgatttgcgtttcatttttctttttcccccggtggggtccactttctggccgccttcttgggaaagggctttacttcaaaaagaaaggaggtgagagcgatacgaggcatsaatctgtataggtggctcaagatgcagatac

SEQ ID NO: 505104 - DNA, 520 bp, Homo sapiens
aaattaaaaaccaccaccaccaccaccaactctttgtcctccacaccccaacattagagacctttgtattctgtacatattgttcaaggcttcacatgaaaaactttaaaactctcaggaagttttcaggcaaagaacattttaaaccttactctgctttcctgccatcttaactgggaaagtgaatagaggagagaaagagttcatgaaggagaaaaataagggaagaagggattgtggcagctcccagcagcagccatccagagtagcatcttgatttcataagccccatttcagcataaattatctcatttttagcttgtcaatttggataatcttggccccggaatggattcagggggtcttaaatgatctagtttggctcttcatggagtcygaatttgcagataattgccagagctcttttggctgtgtaaacttgttatcaattgcctttttaaaagtcagcactaaaataatcattcccgtgagcaaagcccattacaaaccttaaattcag

SEQ ID NO: 505105 - DNA, 526 bp, Homo sapiens
ctttccctttaaaaaaaaaaagaatagctaaattaatgaaagctgaatgtaatttattatctaatcctttaawtgtttttagattttaaattatatgcctacgctctatagaaagggagataaattattatggtttatgttaatttatgacaagtcctttcgatgtttcccattttctaggtaaaaatatgctgttaaattgttttcagccaaacactgatgcactttacattttctattaagaaaaataaataattcacacttttgcaagggaaggtatgcactttttctggcattcttgaaattatactattactagcagcaagtgccagcagacttcatgggtggtatttcttactgaaaagcaagacatgaattaatatttttattacagtcaactcacttgtcttcataaataaaatattattaatgtttttccattttgattttaatgctagcaagaagaatatacaaattgttagaaaagggaaataaaatacctggataaatagtttttcaaagactg

SEQ ID NO: 505106 - DNA, 527 bp, Homo sapiens
ccaatccacaaatagtttgtttaatgttcctgctcaaattagaacaaccctgattttttcttctgtgatgttatcatgctaaaggatatgcagcatatcttcgtggtgaaatgatactaggctgaagcaaaaccagaattcactgacagactagaaatttaattttatttcttgccctttaccaaaagtgatagcwataaaatttagaagttcccttactgaataagatttccttttagttattgttttgcacataatccagaaaagattgttggctgcaattcttgcagtgttactaaaatatttctttaacatcccaagctaatattatgtgtatgaatagaagactaagacagaagctgaattttcctattgtgcttcatcacaggttatacagggattcaaaatttggcaggttttagtaaatactgcatacgctgaaagagtttagagttttggttgccccacacacaatttccccacagcctcacatttaattaaatttccttattcaagtttgtgcttgt

SEQ ID NO: 505107 - DNA, 542 bp, Homo sapiens
caaccaccaccatctactttgcacctaaaaaatctgaggtctggccgggtgcgctggcacatgcctgtaatcccagcactttgggaggccgatgcaggcagatcacctgaggtcaggagtttgagaccagcctggccaacatgccgaaaccacgtctccactaaaaggacaaaaattagctgggcgtggtggtaggtgcctgtaatcccatctactcagaaggccgaggcaggagaattgcttgaaccctggaggcagaggtcgcagtgagcagagattgcgccactgcactccagcctgggcgacaagagtgagaaaccrtctaaaaaaaaaaaaagttgtggtcccctgaaatttgagaatatcagtgactgtgatagaatgactatagatttgtgctgaaatactaatgatgattctaagacttacttgaaaaaactttgagataaatattttcaaaaacattatggaattggtctcattcattccaaaacatctgataagtgtctagagtgggccaagtatgaggttaagttctggca

SEQ ID NO: 505108 - DNA, 632 bp, Homo sapiens
caagaacttccaatagaaaatgaactgaaattgtaatcaggagtgacttaatttgtaaagtgatgtattaataacagctctcatatcaactttacaacttgtaatcatccaaatgagatagtatatttcaaggtgagtcatgaactgtcaagtcctttaacatatgaaatgttgcgagtgaactcccctgacagaaaagtccacgctcctccacactgagggctattcagtcayttaattgtaccaaccacctgttgtgctgttgccctagcatgttttgtgctgctatatatataataatgaatagattatacatattattatatattaatatataatagaatagaaatttgtttggcacatagttctggagtgtgggaagtccaagatcgaggggctacatcaaaacatgacagaaggcatcacatatgccacagaagaaggacaggaaagaaccaaactcgcttctgtaacaccccccatccccgccccagatatagaactcactcctgagactccattcatcagggcagaaactaatcacctctcaaagatctcacctctcagaactgttgcattggagattaagtttccaacacatgaaccttgggggacacattcaaactatagca

SEQ ID NO: 505109 - DNA, 632 bp, Homo sapiens
caagaacttccaatagaaaatgaactgaaattgtaatcaggagtgacttaatttgtaaagtgatgtattaataacagctctcatatcaactttacaacttgtaatcatccaaatgagatagtatatttcaaggtgagtcatgaactgtcaagtcctttaacatatgaaatgttgcgagtgaactcccctgacagaaaagtccacgctcctccacactgagggctattcagtcacttaattgtaccaaccacctgttgtgctgttgccctagcatgttttgtgctgctatatatataataatgaatagattatayatattattatatattaatatataatagaatagaaatttgtttggcacatagttctggagtgtgggaagtccaagatcgaggggctacatcaaaacatgacagaaggcatcacatatgccacagaagaaggacaggaaagaaccaaactcgcttctgtaacaccccccatccccgccccagatatagaactcactcctgagactccattcatcagggcagaaactaatcacctctcaaagatctcacctctcagaactgttgcattggagattaagtttccaacacatgaaccttgggggacacattcaaactatagca

SEQ ID NO: 505110 - DNA, 583 bp, Homo sapiens
atcttgggaaatagcaatatgactgtctataacggcaaatgctatctgataccatctctaggggatagttcttgttgaaattttgtgggagggttttctaaacagcaggccaagatgtcaagaatggttacttggttactgctgatgcatgccaaagtcaatgcaaaatatgtaaagaggaaaataaaatcctatttgagagaagaaggaaaggttcagaagacagttcagaacaggcagtgtccatagagggtgttaagatggaattgatttaaaaaagtctgatagtggggctgaaagctcaaagctgtgaacacagtcattggtgcccagatcttttcatagatgttttcatgatggaagttctcaggatctgaatgtgatgatggagggaaaggaaaacaaagctcagaagacctcacatgttcggagcwttatcatttcaacgtaggttaattttccgatggagaacattaaggaattctcctcacagtcaccaaagaggaatagtgcctctacctagggagcactgggcccaggaatgggctccataaggacaaaagaagacgtatggaggacaggc

SEQ ID NO: 505111 - DNA, 583 bp, Homo sapiens
atcttgggaaatagcaatatgactgtctataacggcaaatgctatctgataccatctctaggggatagttcttgttgaaattttgtgggagggttttctaaacagcaggccaagatgtcaagaatggttacttggttactgctgatgcatgccaaagtcaatgcaaaatatgtaaagaggaaaataaaatcctatttgagagaagaaggaaaggttcagaagacagttcagaacaggcagtgtccatagagggtgttaagatggaattgatttaaaaaagtctgatagtggggctgaaagctcaaagctgtgaacacagtcattggtgcccagatcttttcatagatgttttcatgatggaagttctcaggatctgaatgtgatgatggagggaaaggaaaacaaagctcagaagacctcacatgttcggagcattatcatttcaacgtaggttaattttccgatggagaacattaaggaattctcctcacagtcaccaaagaggaatagtgyctctacctagggagcactgggcccaggaatgggctccataaggacaaaagaagacgtatggaggacaggc

SEQ ID NO: 505112 - DNA, 592 bp, Homo sapiens
ctgaaagctacctttatagtcaggttttgccagggacttacaactaagtgaaaggggacaatggaattgagaaygtttatacaggagtgatttcactgagagactgtggaatctaagtcaggtaaggagagagatgcaaacctgagggagctgagcaatactttggatgggttaggatcagtggtttgcaggtcccagtaaggtaaaagaattattggagttgcaatgtcagaggaatcaagatgatcagagaaattgagattacaaagggtagcaattattaatactggaaaggtcaagggtttgcccttggggacgtgggtagaagtggtcacagaactaagataccaacatcccaagtgggctttagtctcagcagaagtaagatttcaaaagtctttgagggagatgaggaagcaaaaaaataaagcagatttacaaactaatcctagggactagctttgggtatagttaccggcacatggaaccaagaagaagcaaaaaagtcagaagtctattaagtttctgaggtaattgtaatgctagaaaaaatcatgaggtagccttaaaaagcctttcactgttaaaataa

SEQ ID NO: 505113 - DNA, 604 bp, Homo sapiens
agggagactcccacttccatggatctcagcaaagcaaagggctacattggctttatccaggaaggtagacagcaactctgcatagccaaaaagcctgccctataaccctgcatagacagggagattctcgcctctgcagatctcagaaaagttaagtggctctacaccagcctmacccagaaaggcaagcagtggctctgagcagttaaaaaatcgacccaacaatcctgcccaggtagaaagattctcacctctgtattttttggagaaatgtaacagctagtcctgcttgatctgaaatgtcaaacagccacttatctaagccaaaagctcaccctacagctccacccagacagcgggacaatccccaattacacatttctaaggagcatagcctcaggtctcacctgcccagataagtgtctccatctaactttagggcccaacctgcagccatgcccaactgcagattccaaatagtggaaatgcccaagcagggggtatatcttgtggccagcctgaccagaagccatcacaatacccagtagctccacttgatatcaaagcaatggcagtggcccagccagctagagatcgcataaca

SEQ ID NO: 505114 - DNA, 604 bp, Homo sapiens
agggagactcccacttccatggatctcagcaaagcaaagggctacattggctttatccaggaaggtagacagcaactctgcatagccaaaaagcctgccctataaccctgcatagacagggagattctcgcctctgcagatctcagaaaagttaagtggctctacaccagcctaacccagaaaggcaagcagtggctctgagcagttaaaaaatcgacccaacaatcctgcccaggtagaaagattctcacctctgtattttttggagaaatgtaacagctagtcctgcttgatctgaaatgtcaaacagccacttatctaagccaaaagctcaccctacagctccacccagacagcgggacaatccccaattacacatttctaaggagcatagcctcaggtctcacctgcccagataagtgtctccatctaactttagggcccaacctgcagccatgcccaactgcagattccaaatagtggaaatgcccaagcagggggtatatcttgtggccagcctgaccagaagccatcacaatacccagtagctccacytgatatcaaagcaatggcagtggcccagccagctagagatcgcataaca

SEQ ID NO: 505115 - DNA, 547 bp, Homo sapiens
tgtgggcttcctccttctcaaatgtgccatcacagcattcctgttaaaagcatttttttagatgcatttcttaataccctcgaacaatttaccaaaacttcatttgagcttttcctgccaaggaraccaaaagtgccatagtctttcatattctatcaaatttgtttccaatactgcacttaatgagtgcctctgaatgatgaatgatcacttgctttgctaaaacactgatgttcttctccagagcttcttcaaaattttaatatgatgatgctctgtctggttcttttctgaggcttcatcagcaacttgattgcaatctccaggattgtaatgttttgggtaaaatccttcccttcttattaaataatactgtacttttcagggaagaaatatcactaatggcacaagtttcaagtattcaaacacatgtagtattctcaatgctcaaaactccttgcgtgaactatgtgcattccgttaatcacagacgagcatgtattttatgcactcatttatgcattaaatccgttcatcatacaatatt

SEQ ID NO: 505116 - DNA, 624 bp, Homo sapiens
tggggtaactttataactagcttaattctacatatttctagaactcactgaataacctttgttggtaaatgacataaatataactttgrtaacttttcacccaaaatcttgtatagatgaaaaaactcacataaatcatagattttagatttgagagggaatatatagttatatagaccagtcattctcaaaatgggatcccaaccagcagcatcagcatcaccggggaacttgttagagatgcaaattcttgggtttgctccagactcactgaatcaaaaattctgggggtgggactcagagacgtgggtttctacaagctctccaagtgattctgatgtacactgtattttgaatattactgatttagattggcattactgacattttgaaccagatgattctctgctgtgagagagtgtcctgtgtattgtaggatgttgagcagcatccctagcctctacccactagatgcccgtggcacccgctcctcagtcatgacaataaaaaatatctccagacattgccagatgaaccctggggtgggatggaaggtgcaaaattgctcccttcccaaaattgcaaaattgataaccactgttccagaccaacttccaaccctga

SEQ ID NO: 505117 - DNA, 624 bp, Homo sapiens
tggggtaactttataactagcttaattctacatatttctagaactcactgaataacctttgttggtaaatgacataaatataactttggtaacttttcacccaaaatcttgtrtagatgaaaaaactcacataaatcatagattttagatttgagagggaatatatagttatatagaccagtcattctcaaaatgggatcccaaccagcagcatcagcatcaccggggaacttgttagagatgcaaattcttgggtttgctccagactcactgaatcaaaaattctgggggtgggactcagagacgtgggtttctacaagctctccaagtgattctgatgtacactgtattttgaatattactgatttagattggcattactgacattttgaaccagatgattctctgctgtgagagagtgtcctgtgtattgtaggatgttgagcagcatccctagcctctacccactagatgcccgtggcacccgctcctcagtcatgacaataaaaaatatctccagacattgccagatgaaccctggggtgggatggaaggtgcaaaattgctcccttcccaaaattgcaaaattgataaccactgttccagaccaacttccaaccctga

SEQ ID NO: 505118 - DNA, 639 bp, Homo sapiens
aatgaactttaataggaggaaagaccataggaagagtaaaataatcctgcgaatgaatatttgaagtttgaaaaggaaattgcttagtgctaaggatctgaaatgatttatatggtcacaacaaaagtgactacagctaggtgaaatatgatgtcaaaaaagaaactagtgtaattgtgacctaatcctaccagaaatgaattagttctgtcctcttgtcttgacttacatgctatggttttgagaaaagtgtgagtcaatgagcaaaaattccttgccagggaaaagatgtacccccamataagggtaaggtagtatcagtatcctttaagtgaggggaacatgtgagtgcattacaaattgttggcaatgtttttcagaactaagacaaaatcctgcaggcacttaacaaacatggtatatagggaaattttatttggttttctggggggctttgagagggtttttggttggtttttttgtttgtttgtttgtttttgtttgttgttgttgttgttgttgttgttgttgttgttttgagagagagtcttactctgtcacccagactagagtgcagtggtgcgatcactactcactgttgcctcaacctcctgggctctagtgatactcccacctcag

SEQ ID NO: 505119 - DNA, 505 bp, Homo sapiens
gctggggttctggctcagtctgcgaggaaagcatcccagcttccacaagatgggctgaaaagctggcttaccctagagctgtctaggagtgggcctagattcctagctcagctctcaagctgactcagacctgggggctctgctcagtaatgagatggtttgtagctagaagagaactgcctggaccaccctgggctctagaacaagggtccacaaagtatgggccaaagctgacctgctgcctgttttataaatttgtagtaaaccacagccaagtctatttatttacatatagtctatggcttttcatgctacaatggcagaattgagtaattatgacagacactgtatgggctgcaaagccagaaatatttattcactggccctttacarcaacaataaaaattgccagcccctgatccagaggagctggaatgaatggtcactctccctagatgaactgcactgtacctagaactaatccccacagcaagcgaagaccatt

SEQ ID NO: 505120 - DNA, 592 bp, Homo sapiens
atatgatgaggtgatttattgaacttggaactccctgaagacaaatttaattcttattactcacacctatcctcccaccagataattcttcaagatacacacatcaggaataatctgcaaagcaataatcaacttgggattayttctggcaattgtaaatgtatcacagttggagaattaaccacaacattttttttaatgaattgttatctttattgggaaagagaatactgcctatggctttgcctttttaaaactctcaaattctgggatgtgatgagaaatccaatatttcagaaaaggtgtaacaacgctagtggtggatttgcatttgttttctatctctgccccctcgtgcacacacatttccacatgcgggctctgggaaaccaaaggcaacccttctctttctgaactccatcagtaatgactccagtaacaataactgtcgggggctggaatagtaaacattttgtaaaagcaaatggcttccaaatgtgcactttctccgtgagcatgtcccttgtgagcctgactcagaaagccagagcaggtaaaagcaccaagcccaaagtctgatgacaggatcaag

SEQ ID NO: 505121 - DNA, 546 bp, Homo sapiens
ttcatgagccccggtgccaaatgcccggcttctaagagatacatgaaaaccctgattcctcttttcatggggaagacgtctctgtccacccagtggacagcacaaacagctcctagcaccagaatggcagcgcaagggtaagagcgtgcccagtggggaggcgggaatgtatatacgtgcttccagacaggatgtacaagacaaagaatttgaatgactttttgaaacagtcatacggtcgcctgtgccaagccaattcccactcaggagacagcacttactcagtgtgctggaacaagcatccccctgtgtgaggaagtgactgctgccagcaagggcagctcacttggcagagaggagaggctggaatgaagactaaaggcattttcagggtgtgggctcccatcagtgacttctagagaggaaccctgaacccagtctggggtctggagtgggggccaaagggacagaggggaggcaagaaggggctccctgggagacttgatrgatgacagagaaccacagacacagaaaaggcaaagccct

SEQ ID NO: 505122 - DNA, 534 bp, Homo sapiens
cagtacatacaaggcaggtactcagtagatgcttgctacttctatcctctcttgtatatcgcctctatagttaaccactagattttctttgtgaaattaatacttctttaatacaaaaatatttatataaagtagaataaaaagcaaactactaacttttgtaagttaaacactgcaaaatactctatattgaataaagaatcagataactaagcatttctaagatatttgaaaacataaacgtcagcctcatgggccaatcagcctattatatatgtgcaggcatttattttagagaaactcacaatgggataattacctattcactttaacagtcttggctgtagctaccactgaatcaatggaagttaatgtagcagatagaatttttttcttttagttagctttcttctaaaacagtgaaagataatgagtaatagaagataaaagcacaaacacattgaaatatataygaagaaaaatactgtatcctctcccactaaatatgcagtaaatgatgcaaaacaaaaaata

SEQ ID NO: 505123 - DNA, 613 bp, Homo sapiens
ctttctcagagtgacaaaattgcctaatgatgcattgctcagaatgtattctcaccattagcaatttgtgtttctaaaattaacatgaatccttctaggttattattatgacaaatgttgtccactgaattctaatagacaatttaaaacagcattttaagaagctattcattctttctagtttctaaaaaattatacttagaaattgttgaaaattttagaatttttatattattagataattatccttattgttatcaacaaaatattttcacataataaactaatttaagatatttaatcattaaacaagcttcacactttaaaagtaaccccartgtataatgaaatgtgattttagtatagtcttacattaatttatgacagtgtgttatttttaatttttgtttctttattttaaatgaaattggctataattttattttcttttgttttttttttttttttaggtgagctcaggggactttattgatggtaaccgacaaggtggggctccttaggcccctccctcttcagggggtctgcatggaaattgtgaggaagggagattctcattgtggtgggggactgagtgcagcagggagctccccgg

SEQ ID NO: 505124 - DNA, 613 bp, Homo sapiens
ctttctcagagtgacaaaattgcctaatgatgcattgctcagaatgtattctcaccattagcaatttgtgtttctaaaattaacatgaatccttctaggttattattatgacaaatgttgtccactgaattctaatagacaatttaaaacagcattttaagaagctattcattctttctagtttctaaaaaattatacttagaaattgttgaaaattttagaatttttatattattagataattatccttattgttatcaacaaaatattttcacataataaactaatttaagatatttaatcattaaacaagcttcacactttaaaagtaaccccaatgtataatgaaatgtgattttagtatagtcttacattaatttatgacagtgtgttatttttaatttttgtttctttattttaaatgaaattggctataattttattttcttttgttttttttttttttttaggtgagctcaggggactttattgatggtaaccgacaaggtggggctccytaggcccctccctcttcagggggtctgcatggaaattgtgaggaagggagattctcattgtggtgggggactgagtgcagcagggagctccccgg

SEQ ID NO: 505125 - DNA, 613 bp, Homo sapiens
ctttctcagagtgacaaaattgcctaatgatgcattgctcagaatgtattctcaccattagcaatttgtgtttctaaaattaacatgaatccttctaggttattattatgacaaatgttgtccactgaattctaatagacaatttaaaacagcattttaagaagctattcattctttctagtttctaaaaaattatacttagaaattgttgaaaattttagaatttttatattattagataattatccttattgttatcaacaaaatattttcacataataaactaatttaagatatttaatcattaaacaagcttcacactttaaaagtaaccccaatgtataatgaaatgtgattttagtatagtcttacattaatttatgacagtgtgttatttttaatttttgtttctttattttaaatgaaattggctataattttattttcttttgttttttttttttttttaggtgagctcaggggactttattgatggtaaccgacaaggtggggctccttargcccctccctcttcagggggtctgcatggaaattgtgaggaagggagattctcattgtggtgggggactgagtgcagcagggagctccccgg

SEQ ID NO: 505126 - DNA, 638 bp, Homo sapiens
agtgattgccgcaattaaaagatgatatataatttgccacaaattttcagttttaaaaatattacctgattagtatattacgaaaaactaatgaaagatgtttgcatgtatttagatgcatctcttctgttttaacatttttttcttgtgaaaaaacattgttaagaaatagcaaaacatgcaaaatgcttatacaatagacaaaatattttcacacaaatttttataatatttaaaatatttcaattattaaatagttctgagtaatatgattctcagtcataatgyattttaagagttgactatagatagtgtgaggcctccaataagtaaaatttgcaagacacttatttgttggcaattgtattttgaatgtactaatagtttctgtgatttgacccattaatatatacacaagttaaaggctactcttcaagcaataaaatatcagtccaaaagggaagaacacatgaaaagtagtggtttataatatggaatttccagataatagaaacagttaaagaaatctctaccaatctcaaattttaaaaatctgaagtgtgctgcttccctaaaggagggtgattggatgatatcattagattaatccgttcactaaaaacttttgtagggcagaa

SEQ ID NO: 505127 - DNA, 402 bp, Homo sapiens
ttttatatattaacaaaacagtaattttgttatttagtcagtaaaggttcatgacttcagttcacattgtggattttacacgttatgaayataaaatggcccatgaaatttttttccttctatgctttttatataaaataaatacaccatatttgtttgttttgtttttatattgttattttctggcaaatctttttctataattctattatagttcctgaaacaaagcctaaaattttagtggctttaaacattaaaattttattttaattttgtatgaaaaggtaaaatttagtttgcctaattaatgggaagctcttctcacaccagtgattcaggaactcgggatttcttcatcttgttgcctcatggtcttcaccatatggctaccatggttctgct

SEQ ID NO: 505128 - DNA, 337 bp, Homo sapiens
ggagaaggctgatgtgagaatatgcagagagctcagtatgtgtgagcccactcattggcaggccagcatgagatataaaatatgcagtgactgcactcagctctacaggagacaactcaagggagtgtaggtagccaagtayggcggttgggtgcccagaagtcatcgggaacctaaagggaatgtgtgcagaggaagtcaagagtctgtgtgcaaacagggagacatgaggtttggagcgcatggtatataggtcaggaaagccacggcaaggtcaggctgggatggagagtttgcttaaggattggcccctttgagctcatgcctggggcagtac

SEQ ID NO: 505129 - DNA, 528 bp, Homo sapiens
tgtgattgagggattggcatctatactattaacagcaagcagaaaggtgtraataagaataatcaaaatttcagttctcaaaattatttcaggagcataaacttgattttgaaaataaactaggtttccttttggtttatatcaagaagagagttgcttaatttgtacagataaaggtgatcgtgtatgggcttgttttaatctttgaatgggatgttgactcacatagacagataggattttcacagcttatttagaaaggaaaatgtggtttgtcgatgagtgaggagtacattcaacattgttgtccactgatttcctcctgggaatcctttgttaaaagcactatattccatatatttgaatacctttatcaaaaccccacaccatccaggatttattttaaatatagaattaagcctaacaggtataatatatttattcaacatgctgaagtaaatcttgcagaaaaagcatttttacagccattgcctgcagtcttttaatttgtcagcctgagatccatca

SEQ ID NO: 505130 - DNA, 587 bp, Homo sapiens
ggctgtaaatacagatgaagctttgctcacccactgctcacctacctgcggtgcagcctggttcctaacagaccatagactggtccatggccctgggggttgaggacccctgttctatagctaaaatccaatgatttaaatataaatacatatttgtctattcgatgctactagtattttcctaggtgaccatttatttttatcatctatctcagttaagatttttagataatcacaattgatttaactcacaggatttatcaagatcttaaaaggtatatgtagggctctttgctttatttgagaaataaataatcactgcctcacaactatggctccatgtgtgttatttaataaaatatttaatcttattggaaatccttttatatttttttctccacaaaggacaaagagctgaaaataaatacraaacagaattctttgtgggaattataaataaaataaaggctaatatttgctaaaagaatttgaaatgtatatgccaaaatatttgctattatataaaaatataagtattattatatatttcttttttgtcccaaaagatggtactaagtattatctta

SEQ ID NO: 505131 - DNA, 419 bp, Homo sapiens
ctagtaactaacaattttgaaaatatccagaaatgtcttaaatttttttttgtaagttatattatttgcataggtatagcccctacagtgttgttcaaattctgaactttttagcttccytttatttttcttactatttaacaatattagattggttatgttccaggaacaaatttcagtccatgggtaagtattcaatgtgaacttattcactgattataatagttgttgattgttcaataatatgagggatagacgagagctccatccatcatattataagagtatagactgtctttgactaaatgacatattaaaagcctaatatatgtcccataaaaatattaatataaggcattttgcaatttctttatttagttatttcaaattatattgtagaacatgaataaacagagaaa

SEQ ID NO: 505132 - DNA, 640 bp, Homo sapiens
aaattaaatcactctaaaccaacgaaaatgaaaatgaaaatatccttccttagtaaaataactgttaaaaatccttttactgtggtgagttgcctggaatactggaaactttccctacccccacctcacaattctaatttcatgtttttctgtgtcaaatgcagccgtcaggaccagttctaggggataattgtttttgttaggctttgaattctctggcaataaatgcatgtccttaaactttaatgatttggggcccactaaaaatcatgaagtgttatacaaattatcagagattttgtatcattatacaatacaaaatacaaaataatttgtatcattatacaaattattataaaagatatacaaatgtatataatatatgcaaatatgtatataatatgtacaaatgtaygtattatacatatatgtgctgtatataatacatacaaataaaatttgtataaaatattatataaataaaagtatacaatataaacaaatattttataatatatacatatataaaatacaaattatttcctagacagatataatctacactagctttttcctattagtttcctctgtaccttctgaaaatttgtactctaaattttctttctaaaaatttgtactt

SEQ ID NO: 505133 - DNA, 564 bp, Homo sapiens
gggcccagagtccacactgcttcatccagacccccacctaccatagtacgacacayacttgtgcacacacgtacacacagacccatgcctgcacatgtgggcaaacacacctgcattccatcacacacatggccagacctatgtgtgtgcaaatgcactgacacaacactcacccaccgaccccacacgtactgtgctgcttcctctcctgcctgtcttctcaggaaccggttttctttttctttttatttttaagagatgagttctctctatgttgcccaagctggtcttgaacttctgagctcaattgatcctcctgcctcagcctcccaaagtgctaggattacaggcataagccaccatgtctggccataggaactggtttttttctgaagccaatgactgaggccaggctggactgggcatcagagtgaggatgggggtagggtggccactgacagggtgatggaaagcaggaaagtcacaaataagcaaacagccccgcctggacacagtttcggctgggcgtttcctgaatgtccagggacatgtttattttttgat

SEQ ID NO: 505134 - DNA, 609 bp, Homo sapiens
ccacactgcttcatccagacccccacctaccatagtacgacacacacttgtgcacacacgtacacacagacccatgcctgcacatgtgggcaaacacacctgcattccatcacacacatggccagacctatgtgtgtgcaaatgcactgacacaacactcacccaccgaccccacacgtactgtgctgcttcctctcctgcctgtcttctcaggaaccggttttctttttctttttatttttaagagatgagttctctctatgttgcccaagctggtcttgaacttctgagctcaattgatcctcctgcctcagcctcccaaagtgctmggattacaggcataagccaccatgtctggccataggaactggtttttttctgaagccaatgactgaggccaggctggactgggcatcagagtgaggatgggggtagggtggccactgacagggtgatggaaagcaggaaagtcacaaataagcaaacagccccgcctggacacagtttcggctgggcgtttcctgaatgtccagggacatgtttattttttgatgactgtccagagctgacctcaagtctctcccttcccgagtggccatcatgatggag

SEQ ID NO: 505135 - DNA, 376 bp, Homo sapiens
atcagactacagagccttcgcagaagtattgacctgtaacagatcaaccaaaaagggggaaagatcagaagaaaacaaaccaaaaaaccccaggcatcaaatatttacttcaaggaagagcaaacagaaaaatcactagactctttgaagaggacagaaatcttaaagaccatcaaaagcatsgttgtccaacagaattctctgcaatgacggaaatgttccatatactgtccaagaagctatttatatactatgtggatcttacggacttgaaatgtggccagtatgactgaggaactgagttttaaattttatttcattttagttaatttaaattttgccataatgaacaatacagacctaaattagattctaa

SEQ ID NO: 505136 - DNA, 376 bp, Homo sapiens
atcagactacagagccttcgcagaagtattgacctgtaacagatcaaccaaaaagggggaaagatcagaagaaaacaaaccaaaaaaccccaggcatcaaatatttacttcaaggaagagcaaacagaaaaatcactagactctttgaagaggacagaaatcttaaagaccatcaaaagcatcgttgtccaacagaattctctgcaatgacrgaaatgttccatatactgtccaagaagctatttatatactatgtggatcttacggacttgaaatgtggccagtatgactgaggaactgagttttaaattttatttcattttagttaatttaaattttgccataatgaacaatacagacctaaattagattctaa

SEQ ID NO: 505137 - DNA, 376 bp, Homo sapiens
atcagactacagagccttcgcagaagtattgacctgtaacagatcaaccaaaaagggggaaagatcagaagaaaacaaaccaaaaaaccccaggcatcaaatatttacttcaaggaagagcaaacagaaaaatcactagactctttgaagaggacagaaatcttaaagaccatcaaaagcatcgttgtccaacagaattctctgcaatgacggaaatgttccatatactgtccaagaagctatttatatactatgtggatcttmcggacttgaaatgtggccagtatgactgaggaactgagttttaaattttatttcattttagttaatttaaattttgccataatgaacaatacagacctaaattagattctaa

SEQ ID NO: 505138 - DNA, 606 bp, Homo sapiens
ctattgtatgtatttcacaagaaatcagtctgtatcagttgcttttcagagccaacagttggaaaaataggacagttgtttctaagaagagggagactccagacttcacacatttttcactccataaatgtagcgcttatttgtaagttagaatgattcgttaaccatggagttcttgtgttcagaaaggagccttactttttatgcacacacacacacacacacacacatacacacatgtgtctgtgtctgtatttttgggtgtgtattagtcctaaaagaaacaaaagttttaccaatttattatgtttagttaccaataactttaatctattggctatttgaattactggtcttcactgtcacaaagatttacctcaaaatttaaaaaacagacaaacagtctcaatataaaatggcacatagtatattaatggctgtttgatagaacctgccttcgttttataccacttctaaaaatacrtttggagttagctgtattgcgtaggaggctgtgggatgggactactaactccagttttaccatcaagaaatgatctttgatcactgtacatctatgtttattatcagttaaaaataatgaca

SEQ ID NO: 505139 - DNA, 601 bp, Homo sapiens
ccccaaaatgtgggaagttatgtggagtttagttgggatgatattgtcatatgacctcagaactacactcagctcccttaagcatagagaatgatgctctgcctgcatgtttttttctatttgctaaaacaccacgatggcaaatgttcaaagtgtggtttatttccaatcatggagtcctacctgcctatgcctactaggaaatgctttcttcttattcttttttttctccttttcctttgaaagaaatactacaacttggggtaacctcatatcagaaagtcaactactgctttcaaataccttttattggatatgtaatagaaactacagaggtataaaagatatgagaagaactataaataataattcaccattgccctcccctttcaaatgtatgcagtcatgtcccaaatcaatgagtgtttctgagcagtctgattagtcatttaagaatattttacttcacaaacsttagggaatttggtcctctgacacttatttgacagtttcttcatatgaaagtaacaaaagaagtactgtttccaaactggaaagcctcttactctgctcaggctagagttcccctaacttaagcaga

SEQ ID NO: 505140 - DNA, 636 bp, Homo sapiens
tgtgtacataagttattgtttaaaagcagcactaaactcttggccagagtgcttttccaatatttaacaatatatactttaataagacttctgaaacacctatgtattaaatgtttcttttaatttagtgtctttgtgtgagtctctttttcartagaaatagaatagaaagaagccatgggaaactcctagtcaaaaactccttggatatttcattgcctgttgttggcttaatattgttcatttcagtttgcagatgttatgcaggttccaaaaatactgcacctgaaaattgcaatattaaatattgtaatgtctccctccactctgaattagctaaaattgccataattgccatctaaattgtggaatgaccctagcaaggaaaagttaagcttgatggagcaactgtgacggaagtcttttttggccaggctcatttttgcagtggttagactgaaaacacttatgacaggacatgctgatgaggcaaagaaaaatggggctacaaagaaaaaggaggaacagaaaatgaatggggaatttatgtgaaaagcaaggaacaatagagctggaagtttcctaaatttagagctgtatgaatatgctccctatactgaggtatgagagagagat

SEQ ID NO: 505141 - DNA, 636 bp, Homo sapiens
tgtgtacataagttattgtttaaaagcagcactaaactcttggccagagtgcttttccaatatttaacaatatatactttaataagacttctgaaacacctatgtattaaatgtttcttttaatttagtgtctttgtgtgagtctctttttcagtagaaatagaatagaaagaagccatgggaaactcctagtcaaaaactccttggatatttcattgcctgttgttggcttaatattgttcatttcagtttgcagatgttatgcaggttccaaaaatactgcacctgaaaattgcaatattaaatattgtaatgtctccctccactctsaattagctaaaattgccataattgccatctaaattgtggaatgaccctagcaaggaaaagttaagcttgatggagcaactgtgacggaagtcttttttggccaggctcatttttgcagtggttagactgaaaacacttatgacaggacatgctgatgaggcaaagaaaaatggggctacaaagaaaaaggaggaacagaaaatgaatggggaatttatgtgaaaagcaaggaacaatagagctggaagtttcctaaatttagagctgtatgaatatgctccctatactgaggtatgagagagagat

SEQ ID NO: 505142 - DNA, 569 bp, Homo sapiens
tagtcccagctactctggaggctgaggtgggaggatcacctgagcctgggaaggctgaggctgcagtgagcagtggttgtaccactcccctctagcctgggtgacagggtgagaccctgcctcaaaaaaaaaaaaaaaaaaaaaaagactcaaagggatgtttggtgccaagacatgaagaatgcttgattcacctggcaatgtctgggataaaggacagaatcaccaggtgggtccccagatgacaaatagttctgagtagacagtgggggtcccccttgaagsctcaattagaggaagcaggttgttgcagtgatggaccaggaggggcaaggagtatgtgcatgatccacatcaacccatgtgagcgctcgctccctggagtgtggctggaggcccaggcccagcacagttgtggcacagacaggcagaggctggggcaagagaataccatgtttagtaaagctgcttgcacatgcctgcagtttagcctaccttggtgaccacatggctccaacatgcagtccaggccaggatggatggcctgggtggatgtgggatccaagcca

SEQ ID NO: 505143 - DNA, 569 bp, Homo sapiens
tagtcccagctactctggaggctgaggtgggaggatcacctgagcctgggaaggctgaggctgcagtgagcagtggttgtaccactcccctctagcctgggtgacagggtgagaccctgcctcaaaaaaaaaaaaaaaaaaaaaaagactcaaagggatgtttggtgccaagacatgaagaatgcttgattcacctggcaatgtctgggataaaggacagaatcaccaggtgggtccccagatgacaaatagttctgagtagacagtgggggtcccccttgaaggctcaattagaggaagcaggttgttgcagtgatggaccaggaggggcaaggagtatgtgcatgatccacatcaacccatgtgagcgctcgctccctggagtgtggctggaggcccaggcccagcacagttgtggcacagacaggcagaggctggggcaagagaataccatgtttagtaaagctgcttgcacatgcctgcagtttagcctaccttggtgaccacatggctccaacatgcagtccaggccaggatggayggcctgggtggatgtgggatccaagcca

SEQ ID NO: 505144 - DNA, 625 bp, Homo sapiens
ctccctctgtgtgcacagcatttgggacrtgagtctgttgtggctgtttttggaaaatacagtctgacacaagatattttaaacccacagaatattcgtccttcctctgttgttcaactgctgttataacttgttttcacttttattttataatatttaagttttgaagtagccaaaggaacacattttataataatgtgtcattttagactagtgaataatttttaaaaatctgtatttctgttaccttttattccaggaggtagagaagtattttctggcatgtcaagaattaactgccattgatttaaatggcataatgaaaaagcagctcactacaacactgaaaataaattattttaaactttaaacattctaactttatacttttctatttagagaagaaccaaagatgatacctggaaagcagatgacctcagaaaacatctctgggtaattattgtaaagatttggattgggatctgtgcaggactcgtgtggttttcttggacctgctttacctggtacacaacactgtataactggttacgtgtgcctcatttcagaagtactttgaactcagaggtgaaggtgtacggctaacaatccctctggaacgttggtt

SEQ ID NO: 505145 - DNA, 413 bp, Homo sapiens
ctcccactgctcgtggggctctgccatggctcaggggcctccgcactgctttrgggcagggagtgctcacttcaggggccgcagcggtgggtggggagaggggctttgggattgagagagagtcctgagagttttagaacgagggtccttgtttgtatggggcccaggcggtttgtgtcttagcgactttaaaacacagcttcagtatctctcttttaacacatgtagtattttatttatttatttttagttaattaattttactcttttttagagacagggtcttaccgttttgcctaggccggagtgcagtggcgaaatcatagcccactgcagccttgaccttctgggcctgagctgtcctcccacctcattctcttgagtagctaggactacaggcatgaaccaccagg

SEQ ID NO: 505146 - DNA, 626 bp, Homo sapiens
ttttacgtagctgaagattctctgtaactgtatgttttttcttagaattcttatgagaaatttacatccaggcactatygtagatccagattttggggagtatgggaagaatgaataaattaactataattaagtatgttcgcaaagtaatgagttcttactcctgaattatatatggttatgttttagtttgaattgcatgctgttaatttacacagcagtagttaaattatgtattgtatattgtctgtagtaagtataagtattttaccagcctacaaaattgtcttcctcaagcaaattttcattaacaggattgtgaaatattcaataattaagcattctagatgactaagtaacataatgttcccattgaatttttctggtttaattaactttatattttaaaaattatgatttaaacataaactttaaaattattctgtctataaattaatgttaaaacaaaaagggaatatgatattgagatagaataaaaattataaaatataattgagtaggaaatactttgtgtaatattcaatgttcttaaaaaggatttattgcaattttaattataactggaaaggtttattgtttatgcacctggtacatgaagtatggaa

SEQ ID NO: 505147 - DNA, 626 bp, Homo sapiens
ttttacgtagctgaagattctctgtaactgtatgttttttcttagaattcttatgagaaatttacatccaggcactattgtagatccagattttggggagtatgggaagaatgaataaattaactataattaagtatgttcgcaaagtaatgasttcttactcctgaattatatatggttatgttttagtttgaattgcatgctgttaatttacacagcagtagttaaattatgtattgtatattgtctgtagtaagtataagtattttaccagcctacaaaattgtcttcctcaagcaaattttcattaacaggattgtgaaatattcaataattaagcattctagatgactaagtaacataatgttcccattgaatttttctggtttaattaactttatattttaaaaattatgatttaaacataaactttaaaattattctgtctataaattaatgttaaaacaaaaagggaatatgatattgagatagaataaaaattataaaatataattgagtaggaaatactttgtgtaatattcaatgttcttaaaaaggatttattgcaattttaattataactggaaaggtttattgtttatgcacctggtacatgaagtatggaa

SEQ ID NO: 505148 - DNA, 626 bp, Homo sapiens
ttttacgtagctgaagattctctgtaactgtatgttttttcttagaattcttatgagaaatttacatccaggcactattgtagatccagattttggggagtatgggaagaatgaataaattaactataattaagtatgttcgcaaagtaatgagttcttactcctgaattatatatggttatgttttagtttgaattgcatgctgttaatttacacagcagtagttaaattatgtattgtatattgtctgtagtaagtataagtattttaccagcctacaaaattgtcttcctcaagcaaattttcattaacaggattgtgaaatattcaataattaagcattctagatgactaagtaacataatgttcccattgaatttttctggtttaattaactttatattttaaaaattatgatttaaacataaactttaaaattattctgtctataaattaatgttaaaacaaaaagggaatatgatattgaratagaataaaaattataaaatataattgagtaggaaatactttgtgtaatattcaatgttcttaaaaaggatttattgcaattttaattataactggaaaggtttattgtttatgcacctggtacatgaagtatggaa

SEQ ID NO: 505149 - DNA, 551 bp, Homo sapiens
tgccagcacgagtagcaaaagcaggcagaagaagctggaatgagcagacttactgagttcttctagtcttcctctttctcctgtgctggatacttcctacccctccatcatcagactccaaattctttggcttttggactcctgtacttacactactggtttgcctgtggctcttgggcctttggccacagactgaatgctgcactgttggcttccctacttcttaggttttggaattcaaactgatccactactggcttccttgctcctcaacttgcagatggcctatcatgggactttaccttgcaaatcacttctccttaataaactccctttcatatatacatatgtcctatttgttctgtccctctagagaaccccacctaatacaaacagttactataactattttttttttcctggagaaaacaactacttttggtattaaaatatgagggtgaaaaaatcctcagagcctctataaaaaagaaattgtacaatgcagtaaattatattctcaacygcatcctttcaataaataaaactccatg

SEQ ID NO: 505150 - DNA, 510 bp, Homo sapiens
gcatatgtgtgcagctcctgaaaatttcttcccattgttcgtaaccaaattacatagcagaatttgcaacattaagaggcaatgttctccactaagataagtcctgttaaaatttcaccttgctaagaaaatgacaaaataggttgcaattttaagcctatcaatgctaccttcttccattgcataaattgcttactttattttccagaatttaaagtatttaaagatgagtgtaatgtgtactttgttctctctttagtttaaatgggtgwaattattttattccaaacaagtaggcctaaaactgaaattcttaatttagagttctaagtcagaggtctttgaaactggagtacatctttattgttatcatctccaatggaaatttattatttattttaactagagtatacacatttgaattagctagctatttttgcatagcaattatgctataatttggcatctgaaacaataaacatttattatctttggtgtcttttagtcatg

SEQ ID NO: 505151 - DNA, 634 bp, Homo sapiens
ctgcagttgaggctattacctggttgagtttgcagttatccactgacatcattcaagttccatctgtttgtttgtttgtttgtttgttttttgagccagatggataaattaaatggagatatgatggaaccatagatcctttaggtctttaagagttgtactaatttttgccatttcccctgagactcaatgggcttttatttactttgtaggctaaggactggtacatttttaacatctacatgtatttattttgttctaaaagcatgaggttttgaattagaggtcaggcttattattacagaaacaacagcactgattccctgtgccctaatcttcctggggtgatacaatgaggatggatataacctgcacatctgtaggagagagatcttgaaattatatgtatcagagcttatataggaactcctttatagttccccatctcctcccacactgctcttgagctaggaagagagaacttatttttaaagtgtgaacaaattctgttttggaagagaaggggaaagtcactaatttgtacagccctttggggtgtaaataaatgactaaagatttaattatgtttaaaatgtmagagcatgaccataggtataacacacttagatgtgaa

SEQ ID NO: 505152 - DNA, 495 bp, Homo sapiens
caagtctgcacacgtaactgtgtcataatgcctctctatagatatttcaacatctcttttcctaactcatctaaaaatttcactgtggaaaagaaggagagtagacctcattttccaattatgtttgataaattagcagatactatagctgccatgcggaaacttattttcctgtaatattgatggagagtatcatgcaggatcttaagtaaattttcaagagactaaaatctgtatctccgctctaatatgccaggaccaacaccttaccattgattaaattattattttacatttattatttaagaaaataaacagataatcacccattgccctgttttttataagggtcttgccaatcatttttgcttgatttcctctcactattctttccagctaagttttttgctttatrattttctaggttattactgcattttcctttttgaagcagaagtagaggttcttttgaaccttcttaaacctgtccaatct

SEQ ID NO: 505153 - DNA, 625 bp, Homo sapiens
tatatatacacacacacacacatataggtatagcattcttgaagtggctaaaggattcccattacatgtacatcttttataattgtctaatggatatatatatatatatatatatggcattcttggagtggctaaggattgtctgatgtggcaggtaaaatgtaaacatggaattcattgggtagcaacacagaagataatttyctttctcaaatagatattaaagtcctttgagagaaggggtcaagtcttctgaaatactgttctcctattgtgttaaagtaacactcatcataattgaggctggctaaatgacacttatcatttccctaattcagcattaaaaagattaatcatactaatgacactattttctagatgatttctccaatgtggattttggctgtttccattttaaagattttattaaaatgttaaaatgttaaattatggtctttcccacctctaagtgagtttggataattgatgatgtttttaattcatagtagtagtgcattctggttttctaattgtattggcttatgaaacaatgagtacacatttacaaccttggggtacagaaagtggcactgtatgtactttatgtaagtgtaagaacagagaa

SEQ ID NO: 505154 - DNA, 654 bp, Homo sapiens
tgtttttgtacacacttaagttggaaaactggtcagaaagttgtccttacgattctgacataaacaatgcaatgtttcctggacccagccaacaacgtcaacatccctgttaaaatagtcaggttctktcttctgaagaaattagacttcattgtaagccagataatgggaaaaaaatagtaaaactatgatttaaaaaatcagtataggaatcaattgatgtcactgccactcagtttttattgcataatttaaaacgagtatatcttaactacattgttttaaactgcataccacagctgcatggcattctctggttccaaacagataaaaatgagcaaaataaaactaggtaagatgaagaggaatcttagggattttaaggaaagaatccagccccatacagaagcagaggaagtagtaagcctaagggtcaaatgctaacaacaagaataacaacagtagcagctgtaattattaagtactaattttaagcttggttctttatatatattttcctcgtttgtctcattaacctagaaagagcgtcattgtacaaattaggaagcaaggatacagaaatatatcttacccaagttacagagactaaaaagttgttagttgtgtgtttgatttcaagtcttacgatctttc

SEQ ID NO: 505155 - DNA, 654 bp, Homo sapiens
tgtttttgtacacacttaagttggaaaactggtcagaaagttgtccttacgattctgacataaacaatgcaatgtttcctggacccagccaacaacgtcaacatccctgttaaaatagtcaggttctttcttctgaagaaattagacttcattgtaagccagataatgggaaaaaaatagtaaaactatgatttaaaaaatcagtataggaatcaattgatgtcactgccactcagtttttattgcataatttaaaacgagtatatcttaactacattgttttaaactgcataccacagctgcatggcattctctggttccaaacagataaaaatgagcaaaataaaactaggtaagatgaagaggaatcttagggattttaaggaaagaatccagccccatayagaagcagaggaagtagtaagcctaagggtcaaatgctaacaacaagaataacaacagtagcagctgtaattattaagtactaattttaagcttggttctttatatatattttcctcgtttgtctcattaacctagaaagagcgtcattgtacaaattaggaagcaaggatacagaaatatatcttacccaagttacagagactaaaaagttgttagttgtgtgtttgatttcaagtcttacgatctttc

SEQ ID NO: 505156 - DNA, 654 bp, Homo sapiens
tgtttttgtacacacttaagttggaaaactggtcagaaagttgtccttacgattctgacataaacaatgcaatgtttcctggacccagccaacaacgtcaacatccctgttaaaatagtcaggttctttcttctgaagaaattagacttcattgtaagccagataatgggaaaaaaatagtaaaactatgatttaaaaaatcagtataggaatcaattgatgtcactgccactcagtttttattgcataatttaaaacgagtatatcttaactacattgttttaaactgcataccacagctgcatggcattctctggttccaaacagataaaaatgagcaaaataaaactaggtaagatgaagaggaatcttagggattttaaggaaagaatccagccccatacagaagcagaggaagtagtaagcctaagggtcaaatgctaacaacaagaataacaacagtagcagctgtaattattaagtactaattttaagcttggttctttatatatattttcctcrtttgtctcattaacctagaaagagcgtcattgtacaaattaggaagcaaggatacagaaatatatcttacccaagttacagagactaaaaagttgttagttgtgtgtttgatttcaagtcttacgatctttc

SEQ ID NO: 505157 - DNA, 624 bp, Homo sapiens
aggcatggtggttcaatcctgtaatctcagcactttggcagggcaagacaggtggatcacttgaggtcaggagttcaagaccagcctggacaagatggcaaaagcccatctctacaaagaatacaaaaattagtcaggtgtggtggtgcatgcctgtaatcccagctactcaggaggtgggaggtcagaggtgggaggatggtttgagccctggagtttgaggctgcagtgagctgtgattgtgccaccgcactccaacctgggtgacagagcaggaccctttctcctcaccgtcccccaccccagcctgccaaccaaaaaaaaaaatcatagatagacatctagatycatcttctcatacagggaggccccagatcccgtccaccactgccaaccagggatcacacccaaaggccaaacaccttattattctaaagcttctaaatcacgatggctgctttttgtggcttctccatacagctgcacattatcaagggagccagctaaccaggccatggggcttcagacttgggagccgaggactttatgtttcagtggcagggaaggagagagtaattcttcctgagctggggcagcataaaatcctctcttctactccctgac

SEQ ID NO: 505158 - DNA, 297 bp, Homo sapiens
agtcttattagccctacctagcagcttcccaaagtcacaatagggtacaaaagtkacagactgacaatttacaaggacagtgttcacttctgaaggctcattcttgaaaggccaaaaaaaaaaaaaaaaagtgaagagcaagagtaatggtgttaaacagctacataaggatacagaaatatatcagggatgaccacattaatgctctcctgatcttcccaagaacccataagcttgtgatggagatgctctgaatgaagtcaactgtaccccatcactgaccctttgcccaggacc

SEQ ID NO: 505159 - DNA, 514 bp, Homo sapiens
acagctccctcatcccttgggacagaatgttccatccattatgtgcccattttttttgagttggagtcttgctcttgttgcccaggcaatctcggctcactgcaacctctgcctcccaggttcaagtgattctcctgcctcagcctccygagtagctgggattacaggcacccgccactacgcctggctaatttttgtatttttagtagagatggggtttcaccatgttggccatgctggtctcaaactgacctcaggtgatccgcctacctcggcctcctaaagtagcactaggactacaggcatgagccgccatggccatgtgccccgattcttacgtttccatttatggaagagactgtgcgccactgtgaatccctcccatctaccaccctgtggctcagagctgcctgagttcccctgcatccaaaccctcagcttactccaatgacagacctaggcatctccccttagcacactcccaccaacaagctctgaccaaggccagtactca

SEQ ID NO: 505160 - DNA, 514 bp, Homo sapiens
acagctccctcatcccttgggacagaatgttccatccattatgtgcccattttttttgagttggagtcttgctcttgttgcccaggcaatctcggctcactgcaacctctgcctcccaggttcaagtgattctcctgcctcagcctcccgagtagctgggattacaggcacccgccactacgcctggctaatttttgtatttttagtagagatggggtttcaccatgttggccatgctggtctcaaactgacctcaggtgatccgcctacctcggcctcctaaagtagcactaggaytacaggcatgagccgccatggccatgtgccccgattcttacgtttccatttatggaagagactgtgcgccactgtgaatccctcccatctaccaccctgtggctcagagctgcctgagttcccctgcatccaaaccctcagcttactccaatgacagacctaggcatctccccttagcacactcccaccaacaagctctgaccaaggccagtactca

SEQ ID NO: 505161 - DNA, 511 bp, Homo sapiens
ctgaattaaaacgctcttttttttagtcagtttaccaagcagtgtctcattggacttaaaatgtcagaggagaagttgacactttgacccagattctgamattaatttttaagccaggaggtatccttgcaggagcaaaatcgggaaggatggctgttcagctcttctctcctcattttgctgtctactggagagcaactggaagcctttctagatgaggggctccacctcattcgtgtttgttttgtttatttcctctcagctccttcccctcaagacctttgtgactgtccttcctgaaagcagccctctgtgcagccccatagtgtgtctgtacagcaatgttgaaatagaccacattccgcttttctgtcctcaaaaaagatgtagtttagctgggatggtagaacctgaacacagggagttgcaacccagcctaggcatgttcccaggtgagagagcacggtgggctttcagagcaccatttttcttagcattccagcgtctgcac

SEQ ID NO: 505162 - DNA, 511 bp, Homo sapiens
ctgaattaaaacgctcttttttttagtcagtttaccaagcagtgtctcattggacttaaaatgtcagaggagaagttgacactttgacccagattctgacattaatttttaagccaggaggtatccttgcaggagcaaaatcgggaaggatggctgttcagctcttctctcctcattttgctgtctactggagagcaactggaagcctttctagatgaggggctccacctcattcgtgtttgttttgtttatttcctctcagctccttcccctcaagacctttgtgactgtccttccygaaagcagccctctgtgcagccccatagtgtgtctgtacagcaatgttgaaatagaccacattccgcttttctgtcctcaaaaaagatgtagtttagctgggatggtagaacctgaacacagggagttgcaacccagcctaggcatgttcccaggtgagagagcacggtgggctttcagagcaccatttttcttagcattccagcgtctgcac

SEQ ID NO: 505163 - DNA, 612 bp, Homo sapiens
tttgcaggcaagatctgaactgtacccaattttctccaggagtgcaggaatgatgtgaaactgatggcatcctactctgaggagatgcctttgataatctcattagggaaataaaaatacttacaaagaagctcacaaaatgtgaatgggacattaccccccacacagtgcaaggcccttccaccttggctagatgctggaagcttatttggtaaactgagagcygctccatcctgctactgtcaagaaacagctattgaacttttaagcacccacaatgttaaaacaagcctaatcttttaggccttttggagacatgaaggcaaaaactgtgttcatcatttacaaattttacttatgtgcatttatgctgttactttgagactggtctaccttgatgggggctcccccgaacaaagcactatagaatctgtacaaattgcaatacaattgtgtctccagagagtccttcaatatagaaacttcatcaacctcctttcatacctcctgcagtttctggaccacccatcaagcccaacaagtatccatgggatcctacgccaagaaactagcctcctttaccccgtgctatataccaataaagcagccatc

SEQ ID NO: 505164 - DNA, 612 bp, Homo sapiens
tttgcaggcaagatctgaactgtacccaattttctccaggagtgcaggaatgatgtgaaactgatggcatcctactctgaggagatgcctttgataatctcattagggaaataaaaatacttacaaagaagctcacaaaatgtgaatgggacattaccccccacacagtgcaaggcccttccaccttggctagatgctggaagcttatttggtaaactgagagccgctccatcctgctactgtcaagaaacagctattgaacttttaagcacccacaatgttaaaacaagcctaatcttttaggccttttggagacawgaaggcaaaaactgtgttcatcatttacaaattttacttatgtgcatttatgctgttactttgagactggtctaccttgatgggggctcccccgaacaaagcactatagaatctgtacaaattgcaatacaattgtgtctccagagagtccttcaatatagaaacttcatcaacctcctttcatacctcctgcagtttctggaccacccatcaagcccaacaagtatccatgggatcctacgccaagaaactagcctcctttaccccgtgctatataccaataaagcagccatc

SEQ ID NO: 505165 - DNA, 366 bp, Homo sapiens
aagatgggtaggagcccatcctgtttcatcagaatgtctgtaacatggtctacagttcattttaatttttctgaaagataaaaggtctgtgcctaattttttttaacagaacgacattccagcaccatttyttgaaaagattgtcttgttttgtttttaaaaattggatttaaattggattgcctttgcccctttgtcaaagatcaggtgacttttttttttttttttttttttttttggtctgggtctatttctagaccctgtattctattccattggtctatgtgactgttcttttgccatgccacacattgtagctttatagtaagtcttaaactcagttatgtgagtcctcaaacttggttc

SEQ ID NO: 505166 - DNA, 366 bp, Homo sapiens
aagatgggtaggagcccatcctgtttcatcagaatgtctgtaacatggtctacagttcattttaatttttctgaaagataaaaggtctgtgcctaattttttttaacagaacgacattccagcaccattttttgaaaagattgtcttgttttgtttttaaaaattggatttaaattggattgcctttgcccctttgtcaaagatcaggkgacttttttttttttttttttttttttttggtctgggtctatttctagaccctgtattctattccattggtctatgtgactgttcttttgccatgccacacattgtagctttatagtaagtcttaaactcagttatgtgagtcctcaaacttggttc

SEQ ID NO: 505167 - DNA, 481 bp, Homo sapiens
tacttttctaggtttcttttgattaatgaggcatttgcttgataatgacagatgactaatgagaataaagccattaatttgatttataattaagaaattcactaggctgggcgtggtggctcactcctgtaatcctagcactttgggaggccaaggtaggtggatcacttgaggtcagcagttcaagactagcctggccaagatggtgaaaccctgtctctaataaaaatacaagaattagctggacatggtggtgcatgcctgtaatcccagctactcgagaggctgagagaggagaatcacttgaacccaggaggtggagttgcagtcagctkacatcgcacgaccacactccaggctgggtgacagagcaagactccatctcaaaaaaaaaaaaaaaagaaaaaagaagtacatttaaataagcccctgttccataccaatacgtaaattcaagactaaagaaattttaacatttaaa

SEQ ID NO: 505168 - DNA, 647 bp, Homo sapiens
tgctcaggaggctgaagcaggaggatgcttgagctcaggagttctaggctgcagtgagccatgatcatgccactgcaccccagcataggtaacagagtgagatgccacctcttaaaaaaattcatcatggaaaattattttatgttttccactccatcttccaaagtttaatgtattttaatcaagcagtaaaacaacaatgcaggtttgttttaaaaggtgaggaaatcaaatgagtaattttgtattctggggaacagtggaagaaaggagaggaagagagacattaggtaagagaggaggttaggagaaccctggaactagtgacaatttgtacagtaaagagaggaagcagccagacatccctaaagcaaattacaagccacaaagagaaacattaatatgcatgtatattagttaaaagcgaaggcactaggctgctgcaactcagtaacatgtttgccctttacattcctttgagttttaaaycacaggggttttagtgggtgatagggctcaggtctgtgtccctgctgaaatctcatgtggaaatgtaatccccaaggccggaggtggggctcggtgagaggttatttgatcccaggggcagtttctcgtgaatgatttagcaccatccacttggcact

SEQ ID NO: 505169 - DNA, 612 bp, Homo sapiens
tttggatttacactttttttacggtaactgaaagcaacaagagttttagtattgcttctgtggaaaccttgccactatgttttacttttttatgtttctttattttattctgtaccgcattaacccattttttcctttttattccatgtggctgttaggtaagactttgccaaaggaaagggacaattacatgccccttcttaactgagccttggaccttcactctgtattgccctcagcagaactctagacagcargccttctttatttatcattgctgttttaattccccaggcccttatgatggagtactgtctttctcagaatgttaataggaaccaagtgaaaatgattccagtgtcaaagcaattctggaaatatttgaaaagttataaaaggagtatttttaaattgcagatatcctaagcaaattttatattttaatatactaatgtaccatgagattttcctagtgggagacatggcaagcagggtttccatatatgatcatgggatcaagtatttattccatggataaaagaacagagacttactaatgaaaagccaggaaaatggatgtatctctctcatgtattcgtcccttcattcatt

SEQ ID NO: 505170 - DNA, 610 bp, Homo sapiens
attctgttgacttagttgaagaagttgtaggaaatggaaactcactggaattggatggccaatctttttgaacataaagtcataaaacttgctaaaatttgagtaaaccattgatatggtttggctctgtgtcccctcccaaaactcatcttgaattgtaatccccacatgttgaggaagggacctggtgagaggtgattggttgatgggggcaagttcccaccatgctgttctcatgatggtgagtgatttctcacaagatatgacgacttaaaagtgtttggcagttcacccctcactcttcttctctcttgctgccatgtaagaygtgccttgcttcccttccgccatgattataagttttctgaggcctctttagtcatgtggaactgtgagtcaattaaaccagctttctatataaactacccagtctcaagtagttctttatagcagtgtgagaatggattaatacaatcataatatgaaaggaataaatatcaatgaatttgataaacttgtgagctctaacaatattactaggtagctttctgtcagttagaaaaggtttcctagtactttatctgttagatttcagttattacctggtcaa

SEQ ID NO: 505171 - DNA, 610 bp, Homo sapiens
attctgttgacttagttgaagaagttgtaggaaatggaaactcactggaattggatggccaatctttttgaacataaagtcataaaacttgctaaaatttgagtaaaccattgatatggtttggctctgtgtcccctcccaaaactcatcttgaattgtaatccccacatgttgaggaagggacctggtgagaggtgattggttgatgggggcaagttcccaccatgctgttctcatgatggtgagtgatttctcacaagatatgacgacttaaaagtgtttggcagttcacccctcactcttcttctctcttgctgccatgtaagacgtgccttgcttcccttccgccatgattataagttttctgaggcctctttagtcatgtggaactgtgagtcaattaaaccagctttctatataaactacccagtctcaagtagttctttatagcagtgtgagaatggattaatacaatcataatatgaaaggaataaatatcaatgaatttgataaacttgygagctctaacaatattactaggtagctttctgtcagttagaaaaggtttcctagtactttatctgttagatttcagttattacctggtcaa

SEQ ID NO: 505172 - DNA, 647 bp, Homo sapiens
tatacatctggtaacatacaccagatcataccccgggccataaaacaagcattaaccaattttttaaaaatttaaagcatacagagtatgtgctatgagtatagggagataaaactaaagatcagtaaccaaaacataacaggaacatatccaaactaaacactacacttctaaataatctataggtcagggaagaattctaaagggtaacacaagagaaatctttgcgataatgaaataattctgtatattgattgtggtggcaattttacaaacctacacatgtaataaaatcacwtagacctacctgcacacattgcacagatgctaaactcctagtttagatcttgtactttaattaggtaagatagaaacattggaaaaattaggataaattgtgctcagatacctgtgtactatctttgtaacttctgtgaatctatgcatatttcaaaataaatattaagaaaaatagaatagtgtcctcactttcatttttaagagttgtaacataaaactaaggatgactcttgaaaagaagggacagaaaaatggaaagtgggaagaaaaggataaaaaattatggatctatctcagaaataaacatcccatttagtaggaattatggaaacatagggcatgaaaaa

SEQ ID NO: 505173 - DNA, 623 bp, Homo sapiens
aaatgccagaaatttctgcctaaaataacttctttttctctatcagctatttgtttaatccagttgtataaaaagcagaaaaatattcaagaaacctagattcagtcagcatctctgtcctgcttcattgcagagccttaagcaggattcttcatatattcttggctttagttttttatttgttttcactggaaaacagagatattacttgaagggtacaaccaagaatgtttgacacaaaaataagatggtttattgcattcgttgaggcctctggttaaaatttataccgtttttaaaaaacactatcattaattctgttttacaatgtcactctatatgagtactttacaaattcttaaatccaaacagaatgactattccttttacatacattttatattatatgactacatttctttactaaaacactcattcaaaagcaaatatatcctcttgcatataaaaattatatcttgaagatttctaattctcatttgcttaatgatatcattgtgcctgtaaaattcaccagaagttaaatttggggcccctgtgctttggygaaagaaaagaccaaagattctcacagacaatgtcagtcataccctggaattataccc

SEQ ID NO: 505174 - DNA, 603 bp, Homo sapiens
ctgagcatggtgttgcacacctgtggtcccagatactcaggaggctaaggagttgggaggattgttgagcccagaaggcagaggttgcaataagctgagatctcatccctactaataatacaaaaaaattgctgagcatggtgttacacgcctgtggtcccagatactcaggaggctaaggagttgggaggattgttgagcccaggaggcagaggttgcaatgagctgagatcactccactgcactccagcctgggtgacagagtgagaccctgtttcaggcaaaggcaaaggcaaaaaggcaaagacttttgcctttgccaaagcaaaaagaaaaagaaaagaaaggcagaagagaagatactcagaaacgagtttccaagacacagatctgtgttgtacttctgatgcacatgcatttctcctcagtggatcagcttcaccaggaacttcatctgcagcatcctcaccattaaaaaaagaacagcccttatttactctatggcaggttggaatgatctgtgaacattagttgaaagaacatgaagagaaagtttgggaagaayatgaagaatattgaacacaaaacttgcagaacaataat

SEQ ID NO: 505175 - DNA, 603 bp, Homo sapiens
aataaggttttaaaataatgtgaagaatcgagaaaattagtgattgatgggagtggaaaattaaaaataaaaaaatttaaaagtcaggagtcaataccaggagaattaataatctacagtcacttcaggataaattagaatctatayttacttcattatgtaatatcattaataatagctacatttatgtataaacctagagagtcgtatgaatttggaaagaactgtcatggatggttaagcagagatggaacctgtagcaagctctctgtattgtgagtgaagcttgactcattgttgactgtattcattgtagaactctccaccttacaggtgtcgcatgctatttcttcacaagtaccatttgatcttcaccctttatttgaaaaaaaagaaaaattagcctatgcaatactaggaaaccattaaccttgcaatattgccagttctccccaaacattcttctcttgaaatatggtgcattttcccccttgatgcccagtgaattttaattttctataacatgcaagatgtataggaagaaaattcttctgtaacattgacagtatgggacacgttaaagccaagtggcctttatatttt

SEQ ID NO: 505176 - DNA, 340 bp, Homo sapiens
gccatttttctccttttatatatcagttggaaatataacaacatttggacaagtgaaaaaaatgtatgcacttttgagggaaataaatgtactgccccaattcattttggctgtaactttattttctcctattctatgcattaatagttgaggtattcaaaggtattacctaacatggtttttctctaaccagtttaaggtagcttgtctataactatttatagtccagtagtgtttggggttagggaaaaacttacattttaatgaacasttttcttagaaaatattactaatgttgtactcatagtactcatcgcatagctttagctgtctcaaatgg

SEQ ID NO: 505177 - DNA, 546 bp, Homo sapiens
attcccagcttcttagagcctgtcacactgcttggctcatggtccccacttscatcttcaaagctagaaatgaaggatgaagtacttctcatagtgagtctttttaacccacccttctgcctttcccttcctctcttgaggactcaagtcactagactggcccctctgcccccagataatccaggatgatcccccccatctctagatctataccgttaatcacactgcaaactctcctttgccatgtttaaggtaacatagtcacaggtttggtgggttaggggtagacgttgttgtgtgtgtgtgtgtgtgggcaggcttttattgaaagccctatagtttccccattgagttgttttagaacatttgtgaaaagtaaattttccataaaggcaggaatttgtttctggactcaattattttccattgatgtgcatgcgtctaagcttgtgccagcaccacgttgtcttgattactgtggctttaacaaaatttttgaaatcaagtagttctttgtttttaacagtattttgtttttaacaggtt

SEQ ID NO: 505178 - DNA, 546 bp, Homo sapiens
attcccagcttcttagagcctgtcacactgcttggctcatggtccccacttgcatcttcaaagctagaaatgaaggatgaagtacttctcatagtgagtctttttaacccacccttctgcctttcccttcctctcttgaggactcaagtcactagactggcccctctgcccccagataatccaggatgatcccccccatctctagatctataccgttaatcacactgcaaactctcctttgccatgtttaaggtaacatagtcacaggtttggtgggttaggggtagacgttgttgtgtgtgtgtgtgtgtgggcaggcttttattgaaagccctatagtttccccaytgagttgttttagaacatttgtgaaaagtaaattttccataaaggcaggaatttgtttctggactcaattattttccattgatgtgcatgcgtctaagcttgtgccagcaccacgttgtcttgattactgtggctttaacaaaatttttgaaatcaagtagttctttgtttttaacagtattttgtttttaacaggtt

SEQ ID NO: 505179 - DNA, 633 bp, Homo sapiens
gctgcagtgtgctatgatcacactgttgcactccagcctgggcaacagagtgagaccctgtctcttaaaaaagagagaaaaagaaaaaaagaaaagaaaattatgttgcaattacattttgcattcttttagtatatctcctttggataaatcctcagaagtgagattgctagggatttcatgcaggtgccatcatttacttaatcaaaccctatttgcaaacaatctaggagtttttccttcattttttatgatgatcaatgatgttgaaatggatgtaattttatgtaacagatttttcctccttttgggcyatttactgtttatgtgtgacccatgggtggaaattgtttttgctcttgatgcatttacaaatggctctctaaagggattgttcccccttcattattaccagtggtgtgtgaacatccattttactagaactagatattatttaaatacaaattaataaatataaaatatcaatcttttaaatttgaatctcttctttcactaaaaatattatcccattcacttaccatttacaatttctcctttgtggagtggtttatatttttgtcaatttatcccaaagggattttctgattatagactgctcatgttctcacccca

SEQ ID NO: 505180 - DNA, 625 bp, Homo sapiens
tgtctggattgattcgaaatgaaagaaaagctcgaacttccactgcagcaatcttgtacagcactttacttcggtagacctgacccaagcagcacagagcccggcatttgcaaaggggagtatactttcagacataatgggaaagaagagaattagcattttaagggttgtgtcttttttgctttatttattcatgctttattttcatctttttaaataaatcacattaataggctatatctgtgtagcagacagaaatgtaatttatttgagaaaggcaaaaataaattgccattggtttttaattttgattgttaataagatgatacagttaatactgatttaaaacgcctgcaaacaagcyctgcagaattcaaattatttatagataaaacgttaaatattctataacaagcttgtatcacagaaacatcagtaattttgggtctgccttgcagcttatgtcacagaaacctgtctttttttggtgtgtccttcagttattagatataaggtcaacagtctcatgtattatacttaatgcgatggttgtgtccaattcatctctttatcacctaatgataattcttattaatgtaagttatttggaatagatggagtcagg

SEQ ID NO: 505181 - DNA, 591 bp, Homo sapiens
gtgtgatatgctattcagagactgagtaggtcaccactgctttgagttccagaatctgagtctagagggtcgcacataagacttaatatttaacgtatgtaatattagttacatgtattttccacctcctaaatttctcccaagcccacccttctttcagttttcctacctgtacaataaatggcccttattaacccattcactcatactgagtccattataaaaacacaatagtccttaactctgaaatatatttcaaatctactcacttctctccgtctctactgccaacctccttgtgcaaaccatgtttgagaayttttgtaactcattttttgagaactattgtaactgctctttaactaattcctcatcatcccttctttccactcttggcttttataatctaacatgcggagctctcaaggtttgctgccatgttaaaaaaacagtagcagagaaaaccagaaaagaaagcggattctaaggttttggtctgagaactccgtgaatggcaatgccatttattaaaacagggagctctaaggaaggtgagtttgatgagggattgagaaacgtggaaatcatgtg

SEQ ID NO: 505182 - DNA, 591 bp, Homo sapiens
gtgtgatatgctattcagagactgagtaggtcaccactgctttgagttccagaatctgagtctagagggtcgcacataagacttaatatttaacgtatgtaatattagttacatgtattttccacctcctaaatttctcccaagcccacccttctttcagttttcctacctgtacaataaatggcccttattaacccattcactcatactgagtccattataaaaacacaatagtccttaactctgaaatatatttcaaatctactcacttctctccgtctctactgccaacctccttgtgcaaaccatgtttgagaacttttgtaactcattttttgagaactattgtaactgctctttaactaattcctcatcatcccttctttccactcttggcttttataatctaacatgyggagctctcaaggtttgctgccatgttaaaaaaacagtagcagagaaaaccagaaaagaaagcggattctaaggttttggtctgagaactccgtgaatggcaatgccatttattaaaacagggagctctaaggaaggtgagtttgatgagggattgagaaacgtggaaatcatgtg

SEQ ID NO: 505183 - DNA, 378 bp, Homo sapiens
ctgagtacaactcgagcttgatcaatgtcccattaaacagaagaatcgtgtagctgggacttgtttgaatatccaattcacaaaatcatgtggtattataaagtaattgttaagacactaagttttacggttctttgttttgcaataacagataactagaacatctggtcaactgtaagtcttggaaccctgacccctgccatcaggctagcggtgtagcttttgcttctctaggcagyaagtcggatatggcaacactgtcactgtcttgcactgcactagaatgcaacaggcattgaggaaactgttcctgactcttgctgctgtttttgtggtttttccaggtgcacattgcctgagcggtcctggagggtaaac

SEQ ID NO: 505184 - DNA, 388 bp, Homo sapiens
tttatgaagcaaattgtgaaagtgaacattttttattgagctcctttagtaggtattcacagccacccttccaggtacgtattcattttgcatatgagaaaactaaggcttggttagtttaaatgaacaacctttccaaccccacgcattctatccaagaccatacgttagtagtagcagaaccgagattccaaactagagctgttctaattastatgtttctactattttctatatacctattgcaaaaaaactatgctggatttgtcatataaaaatttaaagtataaaacaattttatgtactcaaaaagtttaaagtacactgtatacatagcagataagttataaaatgtgtaaaactataagagataatagagcttccatgg

SEQ ID NO: 505185 - DNA, 587 bp, Homo sapiens
attgactttttcctgggggcctctctcaaggatgaggttttgaagattatgccggtgcagaagcagtcccctgcckgccagggcaccaggttcaaggcgtttgttgctgtcggggactacaatggccacttctgtctggatgttaagtgctccaagggaggtggccaccgccatccgtggggccaccatcctggccaagctctccattgtccccgtgcgcagagcctactgggggaacaagatcagcaagccccacaccgtcccttgcaaggttacaggccgctgcagctatgtgctgctgcacctcatccctgcacccaggggcactggcatcgtctccacacctgtgtccaagaagctgcttatgatggctggtatcaatgactgctatacctcagcccgaggctgcactgccaccctgggcaacttcgccaaggccacctttgatgccatttctaagacctacagctacctggcccccgacctctggaaggagacctgtatttaccaagtctccctatcaggaattcactgaccacctcctcaagacccacaccagagtctccgtacagcggacccaggctcca

SEQ ID NO: 505186 - DNA, 524 bp, Homo sapiens
tttctaatgtgagtgagctaacatgattcgctctgtcagctgttattgtgcataaatgtcagagattcccaatcctgtttcatctgcaaagcttgatttctcactgattcccactgaaatttatctccctctaattcaacttaaatatcttaagatataatttaatgatactatttttaaaatctgtactttaaaacccaatagcataactaacagtattactatgctatataatttttggtcatgaatctacccatccatattcattcacctaataaaatagaaagagaccagtaatgggaaawgatcagtcataaataatatgtgcagatataaattagacaggcaaaatagtttcacccatgttggggaaaaattgaagttgtactcaagcagttattaagttaggtgttttggtaagcatattttgttttggaaaaatagtatttcattcttcaaatgcaataatgtcgttggaaaaacatttgaatttaattcctgagctgattggattctctgggcgc

SEQ ID NO: 505187 - DNA, 569 bp, Homo sapiens
ttaacaaagtcattaattagggttatggttactttaatcatcaactgtaattatttgtttgaactgagatcccattattagcagtcaacatttcaggtattaaaagaaaacacrcttgcatttgtcaatttggatcacagaattttgccaagtttagctctacactcacttactattttaataagaagtttgctaaagaaagatttttctttacaacagatatagagcacctcattagtgaatttgctcattaggctttggctttaatagataaaaacactgaagtaggaggacagactaatcagttttgctaaaggaatatggctgccttccattaaagaaaaacccttgggcttctaatgggatacattatttctggtgaataatctttggaaaaggaatttcaagatgactgctatgatttataatttcaaatcactgtaaccataatagaacttgaccattggattgattatcataatagctattacagttgtccatttcaaaataagcattaaatatatcaaaaattacatttgcatatattactagtttaattgtcctaaata

SEQ ID NO: 505188 - DNA, 569 bp, Homo sapiens
ttaacaaagtcattaattagggttatggttactttaatcatcaactgtaattatttgtttgaactgagatcccattattagcagtcaacatttcaggtattaaaagaaaacacacttgcatttgtcaatttggatcacagaattttgccaagtttagctctacactcacttactattttaataagaagtttgctaaagaaagatttttctttacaacagatatagagcrcctcattagtgaatttgctcattaggctttggctttaatagataaaaacactgaagtaggaggacagactaatcagttttgctaaaggaatatggctgccttccattaaagaaaaacccttgggcttctaatgggatacattatttctggtgaataatctttggaaaaggaatttcaagatgactgctatgatttataatttcaaatcactgtaaccataatagaacttgaccattggattgattatcataatagctattacagttgtccatttcaaaataagcattaaatatatcaaaaattacatttgcatatattactagtttaattgtcctaaata

SEQ ID NO: 505189 - DNA, 576 bp, Homo sapiens
aacctcagtatgctgtgtggaattatactgtatgattccatttataagacacatccacaataggtaacttcataaaaacagaaagcagattggtggttgccagacagtaaggataacaggaaatgaggagcactgattaatgtgtttgtggtttcctttaggggtgatgaaatgttttggaagtagatagagggagtgattacgcagcatcatgaatggactaaatgtccctgaattgttcactttgaaatggttagttttatgttttgtgaatttcacctcaattaaaagaaataaagtagagtgaaggttgaaggaataaaaagtggaagaggaggtcagagtgatactatgggagaaggattctatcagctggtcctggctttgaagatgtagggaggtcagaaccaagcaatgagggcagccttgagaagtggraaaaggcaagcaacaaaaccttccttgaagtcttcagaaaacaacatggtcctgcaatcaccttgattctggcctagtgagagcatgtattactgaactgcaaggtaatacatttgtattttttcctaagctaaaaaa

SEQ ID NO: 505190 - DNA, 575 bp, Homo sapiens
aatggggacagtgaggctctgacaagcaaatcatggtagaactgagattgaacccttttctgtctgaagccaaagtttgctacattctctctaccacaacccacaccctctcatatgaaagcaatgcatgcatagtgctgcatacagcagggacttaatgataagagcaactgaaatagtcagtgatacctgcaggcagggatttttaggtttttgaaatgaacttgaaaactaccagcatatttgatccttcctataacttagagaagactgaacaagtatyaatactcacactagagagaggaaggaggtatttcagagttatggaagtgagcactcagtggtagattcacaactggaacccaagcctctgaattgactctaatctatgctctttccattatgttgcaataatgattcattacagatatgtgagaatatttaatgagaaataatagctaacaggcactgaacatacactaaatgtactgcaaaaatcttttttttttttttttttgagacagggccttgctctgtctcctaggctggagtgcactggtgcaaatatggctcac

SEQ ID NO: 505191 - DNA, 586 bp, Homo sapiens
tcactctacaaagaaaataaaccaatattcatgacacagagcagcatttcagarttgagcaacaggatctaaaatgttcttatctattccactaacaaattgttatcgaggtcctaactgtgtatgatcttgtcctagaagctgttggctatttgaggatttaacaaattcacatttcagctttcagcgtcacccttttattggaatactttctttcctttgtgctagttttgctctctggcaggcttttctcatgacgtggcatcccagggctctaactttccttctcctagcctggaaaactcacagaaaaagaaggcgtcttgactgatggttccagtaaaagtcacgaggttgagttttactggattgatctgcatcatatacccgtaactggaccaatcacagtggccagagggattggacacactgattggccaggcctgtgtcatgcacctagccttgaaggcagcatgtgttgggacagccccgtgtaaaagttattataatggggtaggcattattctttgaaggaaagtaggatgttgtcaccagaaaaggaggaaatagtgatgggcaggcaaca

SEQ ID NO: 505192 - DNA, 535 bp, Homo sapiens
taactagtcagtttcctcagctttaaaatgcacataaagctttgtgtatggtaagatattgatacctatcatgattgttattatccttgaatttgaaaagcagagcggcagagctggtactctgatgtaaaggttatcaagaaggtctttaaattctgctgccgttcttttgtataatagagaaaataggcactatggaacttggccatggacatgaagggcttcctggaagggatgatatttgatctktgccttaaatgatgagtagggttttggtaggtgaaaataattagcattttattctccaggctgtttagaatcttagtagcataagcagtgaaagcaaataggtttccctactaatttatttacgataattcattggcagagtgaagcaattaattaatgctgtttgtcatatgggccagaggaaaacattttgacatctctgtcttgcttattatcctctacaagtcttttctctcctccttaatttttggtcctgaaaagaatgtttccattaaagccagaatat

SEQ ID NO: 505193 - DNA, 527 bp, Homo sapiens
ggccttcatgcctggtttgttttcagttaggccctggaatttcttaataagcatatagttaggtaaccttgcatggggtaagggggaacatggtgggaaagagaagggaggggaatttcatagtaggtttcaaggctatattttaagatgaagaaaaacaagttttctaccttttgctttgaggttacatcttgagactgggaaggaaggaggaaaaaaaacgtttaaaatgcattttgaagctaacctactcaattacaatactagatattggatgagaaaagactgtactccaaaactgtgtcttagtgtacagggaggacacattcaagaaactaacctagaaatgattaacctattgaaacgggaaaagttcccttgtccacctcacaaggcatgtgatgtggtgtggctcacttcttcagtgccctgctgttcaaacctgtatgggaacatacagatgggcaggctgtggggctccgaccccayggcagtgtctaaggggtgaatgtttacagctcctgaag

SEQ ID NO: 505194 - DNA, 470 bp, Homo sapiens
atagatttaaaaaacaattgtttgaaaaattaaagaaattaaatgtgaaaaaaattgtgaaaggaaaaagagatttaccaaagatgccaaactgatgtggtaaaagctctaaatagaaattttataaatgaagaataaatttgttgaaattatacttgattgatcacctaaacagcagactaaaaactgataaaaggatactagtaaactggaaagtatatttaagaaaattgtcttaagaaaaatatggtataaaagttcaaattgtgaaggttagactaagaatatgtagcttagatctagtaagctttcgagacttagaactataaaaaatgaaaaatgtagtatttgctggaaaatgactgagaaatttccagaattgataaaatgaattaataaatatagaaggcacaatatatcaaaagtgaaatataragaaaattgcaaatagataattatagtaaagcttt

SEQ ID NO: 505195 - DNA, 539 bp, Homo sapiens
catggaaatgattacaatcacacaagtgtattttttattgcaagatgagttcagatatttattttttaaaattaaagcaaactcttgcaaaatatatttagaagaacattgtgtgcctttctttcaatccattcaaagaaattgaacgtgttcccaaatggaagctttcatgtttacaggaaaatgttaaaaataaagagataatggtgatgatgattatgatgatgacaataatgatttcttataatttcataacattgtaaagtttgcaacaggctaatggtttacaataaccctgggggaaaaaggattaattttaatgtccccattttacaaatgagaaaacagagaagttattttaaactctctgtttaaaactgtaaagtttttccaaccggaaggggcattatgggtcatctgttgccagtactctcgttctgcaaataagggatcttaggtaggtgactttcccrggatcaattttccactaagtggcaagcctctcatgactgctgtgtagacagtaggagacatagcag

SEQ ID NO: 505196 - DNA, 564 bp, Homo sapiens
aagcaaaagatcgtgttctcatagcgtagggaaaaggtttgtagagcagtatttttaggcatgttcacaaagtatatatgctggcaaggaatagccaaagaaaatgaaaacactatttcagaaagatatctgtactcccatgttcatttcagcattattcacagtagccaagataaagaaacaaccgaagtgtctgtcaacagatgaatagattaagaaactatgatatatgtatatacacacacacatatgtatctcacactatatatatttatatctatatatagagagagatatatgtacacacacacaatggaatattattcagccttaagaaaaaaacaamatcctgctacttaggacagcacggatgaaaccgtacaacattatactaagtgaaataagccagacacagaaagacaaatgctgtatcatctcacttaaatgtgaaatctaaaatataaaattcataagaatggcaagtgaaatggtggttaccaggggcctgaggtggcagaaatggggagatggtagtcaaagggtacaagctttccatcatgagat

SEQ ID NO: 505197 - DNA, 648 bp, Homo sapiens
caagcaaaagatcgtgttctcatagcgtagggaaaaggtttgtagagcagtatttttaggcatgttcacaaagtatatatgctggcaaggaatagccaaagaaaatgaaaacactatttcagaaagatatctgtactcccatgttcatttcagcattattcacagtagccaagataaagaaacaaccgaagtgtctgtcaacagatgaatagattaagaaactatgatatatgtatatacacacacacatatgtatctcacactatatatatttatatctatatatagagagagatatatgtacacacacacaatggaatattattcagccttaagaaaaaaacaaaatcctgctacttaggacagcacrgatgaaaccgtacaacattatactaagtgaaataagccagacacagaaagacaaatgctgtatcatctcacttaaatgtgaaatctaaaatataaaattcataagaatggcaagtgaaatggtggttaccaggggcctgaggtggcagaaatggggagatggtagtcaaagggtacaagctttccatcatgagatgaatgtgttctggacagcaatatacggcgcagtggccatagttagtaaggatgcattgtatacttgaaatgtgctaggagaat

SEQ ID NO: 505198 - DNA, 648 bp, Homo sapiens
caagcaaaagatcgtgttctcatagcgtagggaaaaggtttgtagagcagtatttttaggcatgttcacaaagtatatatgctggcaaggaatagccaaagaaaatgaaaacactatttcagaaagatatctgtactcccatgttcatttcagcattattcacagtagccaagataaagaaacaaccgaagtgtctgtcaacagatgaatagattaagaaactatgatatatgtatatacacacacacatatgtatctcacactatatatatttatatctatatatagagagagatatatgtacacacacacaatggaatattattcagccttaagaaaaaaacaaaatcctgctacttaggacagcacggatgaaacygtacaacattatactaagtgaaataagccagacacagaaagacaaatgctgtatcatctcacttaaatgtgaaatctaaaatataaaattcataagaatggcaagtgaaatggtggttaccaggggcctgaggtggcagaaatggggagatggtagtcaaagggtacaagctttccatcatgagatgaatgtgttctggacagcaatatacggcgcagtggccatagttagtaaggatgcattgtatacttgaaatgtgctaggagaat

SEQ ID NO: 505199 - DNA, 624 bp, Homo sapiens
ttaatattagctggatattccacctggtcttggaacccaggtgtgggttcctcttcctattaggccctacctcttcattctctagcttgcatctcaagtgtagctggaagagaaacatgggtagagcttcagagctgtaatatacttgggtatgttataytaaagcaagctaaatcggaactcaagagaaaacctgtagtgaaagccaggaagatggaaaagggggatggtggtgataggaaataaagtcactgaagggaacttctaccctccctattcagagaaatagaaattaagagagaagtatatgtagttagagtggtattcatcttgtttttagttgcagaactcttttactcttctgcaaatgaaatatttcagagaacctcaaaatgtgaaacattaaaaaatttctctgcaacatgctgaaaacccaagttatacctgctcagacacttctcacatctttccccaaaacttggaagcacccgagatgcttcctggtctctaaggcattaaggaagccattgacaaatagctgggaaaccactaagtcagacaggtgtgggttccagtctcagctttgcatttactttttctaggaacttgagaaacttaactacc

SEQ ID NO: 505200 - DNA, 470 bp, Homo sapiens
gctggaacagtgatctgtttgtttgtttatttatttatttattatctttctggagacagggcctcactctgctgcccaggctggagtgcagtggtatgatcatggctcactgcagctttgaactcctggggctcaagagattctcccagctcagcctcctgagtggctggaactacaggtcctcaccaccacacctggctaattttttgtgtgttttgtagaaacactttgttgcccaggctggtctcaaactcctgggctcgagtaatcctcctgcctcagcctcccaaagtgctgggattacaggaataagccaccacacccagcctagaacagtgacctcatacctgcctaccatgatcccctccttcaatctgtcccaaccaccaccgccagctccaatcacacgtgtctctgctcaaaagcyctccatgcttccgccgttcctaccaaatgaagctcgagctcct

SEQ ID NO: 505201 - DNA, 644 bp, Homo sapiens
tcatgtagcttatggtaaagtgacaaacgcacaatgmagtcattgcagcccaaggtgtctagtgtctcttagtgccaggcatgaggagctgattgggaatggtcatagtcagcattttccatgactgatgaccacattgagatccaagtggagaccaacttttcctttctctgttccaggcttttaggctccttatcaacacaagaatggacatcaagttacttacatattgggccaaaatattgagtgcagatgaaaataaatgctgactttgaagatttcccatccagcccgcagaaattcccctggcctgccacacttgggtaacttgagttctggaattccagacgtggttaaccccaatccacaaatttgctggagttatgaagctgagtgagagtactgcttttctattatgcattcccaatatgttctgttctgagctgacaccacagaatttacttctcccacaagtttaacccactgcatggagtgatcatggctcactgttttttggtaaataccaaaatacagataacagtttttcacagtacaaattttatatctgacttggctggaaacttccccagtcactccgtctagttgcctcattttgttgggccttggtttctttcagtttccta

SEQ ID NO: 505202 - DNA, 644 bp, Homo sapiens
tcatgtagcttatggtaaagtgacaaacgcacaatgcagtcattgcagcccaaggtgtctagtgtctcttagtgccaggcatgaggagctgattgggaatggtcatagtcagcattttccatgactgatgaccacattgagatccaagtggagacmaacttttcctttctctgttccaggcttttaggctccttatcaacacaagaatggacatcaagttacttacatattgggccaaaatattgagtgcagatgaaaataaatgctgactttgaagatttcccatccagcccgcagaaattcccctggcctgccacacttgggtaacttgagttctggaattccagacgtggttaaccccaatccacaaatttgctggagttatgaagctgagtgagagtactgcttttctattatgcattcccaatatgttctgttctgagctgacaccacagaatttacttctcccacaagtttaacccactgcatggagtgatcatggctcactgttttttggtaaataccaaaatacagataacagtttttcacagtacaaattttatatctgacttggctggaaacttccccagtcactccgtctagttgcctcattttgttgggccttggtttctttcagtttccta

SEQ ID NO: 505203 - DNA, 364 bp, Homo sapiens
agctggcacccacttcttattggcatcatcataaaccatcacagcagctcttgcctgacagatactctgttcactgtaaaaaataaaataaaatattcaaacttrcaatatttaaaatatgctaagtgttccacatagccacacaaacctaggagtcagtcaacgatcagtgctgttattgggtgctggaaacaataatggacaagacagaggcttcctgtctttatgtgtacagtctaatggtgaagacaaaccaaaaaaaataaagtataattaaaagaccaaaaggagagcaggatccacgaagaacacttagataagcaacacaagaaatggtttcttctaaatttgagtatctaattca

SEQ ID NO: 505204 - DNA, 364 bp, Homo sapiens
agctggcacccacttcttattggcatcatcataaaccatcacagcagctcttgcctgacagatactctgttcactgtaaaaaataaaataaaatattcaaacttgcaatatttaaaatatgctaagtgttccacatagccacacaaacctaggagtcagtcaacratcagtgctgttattgggtgctggaaacaataatggacaagacagaggcttcctgtctttatgtgtacagtctaatggtgaagacaaaccaaaaaaaataaagtataattaaaagaccaaaaggagagcaggatccacgaagaacacttagataagcaacacaagaaatggtttcttctaaatttgagtatctaattca

SEQ ID NO: 505205 - DNA, 471 bp, Homo sapiens
cttggctcactgcaacctctgcctcctgggttcaagcaactctcctgcctcagcctcccgagtagctgggactacaggcaagcaccaccacgcccagctaatttgtatatttttagtagagacggggtttcaccatgttggccagaatggtctcgatctcttgacctcgtgatctgcccgcctcggcctcccaaagtgctgggattacaggcgtgagccacagcgcccggcctcctgtactttcttaataaactttttttcactttactctgtggactcaccctgaattcttccttgtgtgagatccaagaaccctctcttggggtctggatcgggacccctttctgataacacaaccgtgaagttatttgtyaactgagaagaaacaagcaaatggggagagttgaagaatcaagggaatgaaggaaaaattaccatggtggtcttatgggaaaaaaaatggggtgggac

SEQ ID NO: 505206 - DNA, 366 bp, Homo sapiens
catcttctatgtgacaagcacaattccaggtactcccccatagttcctcttttcagggaattgttgctgacatgtgatgtctcccccaggcacccagctttaaaatttctctcttttgtactctgtccctttatttctcagaccagctgacacttagggaaaatagaaaagaacctacgtgaaatatcgggggtgaatttcgactgatagggaatgacctctccagccacccagtmactcaggtcaaacattttggagccatctctgactcttttcttccatttccactctatggtaaaaccatcattaaatcctgccagctttgcattcaaagtatgtgctaacattaaccagttttcccatttc

SEQ ID NO: 505207 - DNA, 622 bp, Homo sapiens
gctgcttgggaagctgacgaatgaggattgcttgaacctagaagttcaagagtagcctggtcaacaaagggcaatcctgtctcaaaacaacaacaacaaaatgtatattattaactagtttattcatacatagggattaatacgatcaatattagctataggaaacgttgggtaaagtgacctcaggggttggtacttggaaaagatgtgttgtattaaaaaaaatctgaaacaatgtaaatgttagaaaaaggctcatcattttagggactcctaagtgttttgaaagttgttaagggttaagagataaaaggcaaagagatagatgaagctttctscagagtcagctttctctagagtcaatcatgaatgcactcatggaaatagggttgtgattctaaaatagttctgggaactaaaatggcatatactctgccatgatttccaattaagtcaagtaagtcatgggatttatactgcttatccaaagaaagaggaatatccattttccatattccattgaaagtctgtttttctcttttatttccaaggttggttgatattaggtggccagtctgttcaaaacactgaaaggcattgtaattcctcaggtttttcaacc

SEQ ID NO: 505208 - DNA, 622 bp, Homo sapiens
gctgcttgggaagctgacgaatgaggattgcttgaacctagaagttcaagagtagcctggtcaacaaagggcaatcctgtctcaaaacaacaacaacaaaatgtatattattaactagtttattcatacatagggattaatacgatcaatattagctataggaaacgttgggtaaagtgacctcaggggttggtacttggaaaagatgtgttgtattaaaaaaaatctgaaacaatgtaaatgttagaaaaaggctcatcattttagggactcctaagtgttttgaaagttgttaagggttaagagataaaaggcaaagagatagatgaagctttctccagagtcagctttctctagagtcaatcatgaatgcactcatggaaatagggttgtgattctaaaatagttctgggaactaaaatggcatatactctgccatgatttccaattaagtcaagtaagtcatgggatttatamtgcttatccaaagaaagaggaatatccattttccatattccattgaaagtctgtttttctcttttatttccaaggttggttgatattaggtggccagtctgttcaaaacactgaaaggcattgtaattcctcaggtttttcaacc

SEQ ID NO: 505209 - DNA, 645 bp, Homo sapiens
atcaatgaaaatggaaatgcatgctcacctaaagcaagtatatttccataggttattaatattaatgagaattctaacatggagactaatgctacactaaaaataaatgaaactaagtagtaagattttttttgactgagaaacgaatgcagcagagatgctctgtgtttattgctgcaatcagaccctgtgctttaacattaggaaatcartgtaaacacctactttctcaattaacattaaggtaaagtggaagctttgagatacctatgaattccaatattgatatcagttatgaagggtgctttactgatataaggggtagaagaagaaacacatggtaacaatgaggaaaaataccagttgatatacattaaatgcattttcacttaagatgagaaacaactcaaaaaaaacagtaagatttatcgctgaggggattttctatttactgtcctatagatgatcaaaatgaagccacttttactaaaataatcacagtatcaggaaaatattacgtgctaattcaactaaatttcagattgctatcaaatttctctaaccaattacattatcagtgctgcacaattggaattctattgtttagctcatgactttattttaataatataatccattttttgt

SEQ ID NO: 505210 - DNA, 565 bp, Homo sapiens
ttcttcaacttctaaatttatcactggcatgaccctactaaatgtgaccatcttctatgaccacaaagagcatcagtgagttgactctgcctttgtatacttacctatagattttttactatatttgaatatatatgtggatgagctttatgtgcccactttaacacttttttcttcatctgtacaccagcctcatgyttccaaattgtagtttactttttgtaattaaccccaccataactgtgagtcagtataaatatatatatatatattcatagcattaattaaattatattttaacattcatacctgctttatacatagaacaactagttaaaggttggggttaggttaaattgaataagctgccacttatatcctgtagattgaggagtatagaagggtattttcttacctccaaacaaccacattaatcccacagaaatggcacttagccagactgaaatggctgaaatgatagaagtagaattcggattacagataggaatgaagatgatcaacattcaggagagagtcagaatccaatcctagtgagagaaggttc

SEQ ID NO: 505211 - DNA, 601 bp, Homo sapiens
acctagacttggtccctgccctcatagagggatgggagaggtggacttgtctacagactatgacaatacagaaaggctattactatcacatagggctgtctctataccatggaataccatggagggagggagccccccactctgccagaaaagtcaggaaaggcttcatacggaggcactctttgggctgggtcttgaaggataggcacataggagtccactagatgtggggaggggaattgggaaagcagaggagaaggattcattgagagaggatgagattttcctgatgattgccctggggtgacagcagaagataaaaatggcaagtgatgagaatggaaagataatgtagggcacacaggagaagaccttgctcrtcatccaggagtctggccttccttctgaaagcagttgagagtaatggaggatttcgggcaggggaccttcatgatctgatttgtattatgggaagagttccctgtctgctgtgtggaggctgcatggaagatatcagttaggtggctgtggcagctgtccagactgcacagtctggcagggctcagccatgcacccactgcaactagagagagggggaaag

SEQ ID NO: 505212 - DNA, 657 bp, Homo sapiens
ctgtgatctgtgaaatcagtggagctgttaggctacagtttgtttgcaatactaatgaaaaccttttcctgaggcttctcttatttattgttagcgtcattatcatcatcatcatcctcatcatcatcgatgatatgatttggctctgtgtccccacccaaatctcatcttgaattataatccccacatgtcaagggagggaggagattggattgtgggggtgatttctcccatgctgttcttgacawagtgagagagttctcaggagatctgatggtttataggtgtttgaaagtcctccttcactcttctctttcctgctgacttgtgaagaaggtgtctgcttctccttctactatgattcagaactatgagtcaattaatccttcttcctttataaatgacccagtcttgggtatttctttacagcaatgtgaaaacagactaatacaatcaagcttcctaacaataacatttatgctagtattttttgtctatatagatctgcattcagttttatttgtctaaaggtaagagtcaagctaatcatgctttgtggcatacagaagaaaagcttggcattcttttggcttctcctccagggcaacaataaatatagcccaatccagaaaagcatattattatcatcattttatc

SEQ ID NO: 505213 - DNA, 625 bp, Homo sapiens
tctcctcacagtattgggactctctgaaatctctctctctctctctcttttattctgtttcaacttcccaggatacctaagcatcaaatactcaagaaatattttctacatttgttatttttaagggaagttctgtctaagatactggggaagtagttggaatttagaagtttcctgctagaggtagttggaaacaggaatccagagggatggccaaacaattagatgaatccaagacttagacatcaaaagatgtggtctaattgcagaagccatgcatctgaggcaagaatcaaggggagaaccagagatccagaaagaagtgaggaggatggtgtttaaataggagcaaattgattttaaagaaggatggctgggattctaagggcattcccttgagcactgaagggttgatgatctatgctgtttatctgggagagcataacagtcttctaaaagatcawggtagaaaggataccaattcaaaatgagtcctttatctatcttaggccctttatggtcctgcttttcattgcctagcctaatataaatttgactttagagcttaagccactgtagctatattaactgtctaaactttattatccaagaccaccacaaaata

SEQ ID NO: 505214 - DNA, 599 bp, Homo sapiens
ggaaggaagggaagggaaggaaaggaggaaaagaaggaaggaaggaaaaaaggaagaaggaagaaaggaaggaatgaagaagggaggaaggaagayaagtagagctgttttttgttatggttacattctggaaagaagtttctgttttccatgttgttgagattccttttttttcattactcttgtatggtcaacccctccttcaattctttgagaccccaaaagtttttctgataaatccccccttgaagcttaaacagagccagtttatattgcttcctaacaaaataattccaagtcagtgttttttaaacttgagaacatatgaatacctggagatctggttaagatgtggattctgattcaggaagtcttggaattggcatggggtctgaggctatgtatttttaacaagagctcaggtgattttgattttgatgctgcttcttcatggaccacattttgaggggtgagatctggcttgaataccataacccaactggatgatcactcaaagaatttgttctggagtgccattgcccttcggctcatggaggaaggagtgaattctctttacctaccatgcttctacactaaca

SEQ ID NO: 505215 - DNA, 461 bp, Homo sapiens
aatatttctgaaatgaatggctgtaagaggaaatgtttctgatagactgaagtagaaatagcagtgtggaaacctttgcacacaggccagggcctttgcacttgctgttccctctgtccagaattcctttcctatcccttagggccatcgtgtagaagggcaaattcctgtcttggggacttcacacttgctattcccttggcccagaattcctttcttatccyttatagccatatgacctgctttatcaccttaattggtcctcattaatggtcccctccccagatagtctttcctgagccctgcaattaaaatgtacacctttctctctatccccttattcttttttgctcagcacttttcacaatttggaacagtttatttgcctacttcttcccataagatgtcagttccatggatgcaagcattttgactacctagctcatttctggttcttggca

SEQ ID NO: 505216 - DNA, 461 bp, Homo sapiens
aatatttctgaaatgaatggctgtaagaggaaatgtttctgatagactgaagtagaaatagcagtgtggaaacctttgcacacaggccagggcctttgcacttgctgttccctctgtccagaattcctttcctatcccttagggccatcgtgtagaagggcaaattcctgtcttggggacttcacacttgctattcccttggcccagaattcctttcttatcctttatagccatatgacctgctttatcaccttaattggtcctcattaatggtcccctccccagatagtctttcctgagccctgcaattaaaatgtacacctttctctctatccccttattcttttttgctcagcacttttcacaatttggaacrgtttatttgcctacttcttcccataagatgtcagttccatggatgcaagcattttgactacctagctcatttctggttcttggca

SEQ ID NO: 505217 - DNA, 300 bp, Homo sapiens
cagatggacagtaactgtgcgcagaaatagcttcccacctccggggcctgcatctctctgcctgagggcttccccagcatgagggagtggctcaccgttcatgcagagcaggccagaagtgctagggatttaacttcaggaacaacttcaatccttaagaaaaggaaactggtggataaatatttcagtaggtaatagtgggtaatagtgaataggcttgatgggactattctgagatagagtttayataattctccagaattcttagagttctaggatttctagagttcctggcaggac

SEQ ID NO: 505218 - DNA, 611 bp, Homo sapiens
gggcaagatagttggtccttatcccaatctttttttttttttttttttgttggagtctcactccgttgcccaggctggagtgcagtggtgcgatcccagctcactgcaagctctgcctcctgggttcacaccattatcctgcctcagcctcccaagtagttgggactacaggcacctgccaccatgcctggctaattttttggtatttttagtaaagacagggtttcaacattttagccaggatggtctcgatctcctgacctcatgatccacctgccttggcctcccaaagtgctgggattacaggtgtgagccaccgtgcctggccggtccttaccccaatcttattataacattagacatccttcctccctggggaaaagtgaatatggagtggagagaggccatgagtgttccactaattgatgccccttcttgaagaaacctgaagcctgatgaagcaaggttcctccggcctcacaraaaatgttccccctcatatttcagttattttcctataactgatacataccagtgttagaggatatagaagtataccatagaagttaggagtgaagtgcatgattgctctccatgataaagcgagggag

SEQ ID NO: 505219 - DNA, 600 bp, Homo sapiens
tctctattctatgtgcaggtggaaggctgggcaggcagccctgttcttcactatggagtgggctacatagacttgcagatgccagatagcccaataaactcagctaatttctcacaagagggaaaatgccaaacagtgataagaaataactgaagaagtccactagccatgaaaaatagtgattcttggatatctaataaaccttgagacaggagagtaaggtaagatcactagacagagacaggggtgccttgccatatggatatcagggccaacttccagggcatcccttggcactcacagaatgccccagtgtgcacgtgatataaagatatattttctctggactcaaacccaacaggtggagctttgcacatctcttatcagagaggttgcaaattggcagactgtgggctgaagttggcctgccaatatgttttctttgaactcaacagtgtttttaaattttttgccaacttccacaaattggggatttcacatttaaaaaaaacaaaatttcccacttttcttgaaaaaatcagaaggtttggcaagtatgggccttttttcctgcrtggcaaaaattggctgtagctgagt

SEQ ID NO: 505220 - DNA, 650 bp, Homo sapiens
gctgctataacacacatgaaacaaacgctcacaagaagaaccaccgaattcagagctgggacgatgctgcaagggatagatggaattccacaagagggctgacggaggctgccccagttcatactggcaggtcatggaagggcacttctcatctggcaggaacttatcaagccatggtggcagggactttcccggaagagagaagggcaggtataaaggccctggggtgatcctgtagttaggcaaccccattttaccccttctacaactcagggtgtaggcataattatccttacttcacagacacatcaaccaagcttctcagaggtttaaaaaaacccaggccaggcgcagtggctcacgcctgtaatcccagcacttcgggaggccgaggcaggtggatcatctaaggttgggagttcaagaccagcctggccaacatggtgaaaccccgtctctactaaaaatacaaaaattagccgggcatggtggtgggcgcctatagtcccagctactcaggaggctgaggcaggagaatcacttgaccccaggaggcggaggttgtagtaagccgagatcgccccactcactccaccctgggtgacagagtgatactccrtctaaaaaaaaaaaacagaaaacaaaaagtc

SEQ ID NO: 505221 - DNA, 591 bp, Homo sapiens
acccagagaaataagtgaattgaaacttttctaaagtacttgtcactgtaaaagagttgctgagagcttgccctggcaaagctgagtttttggtactgaaaatggaacctgtgagtcactccaaggaagcccgaggaaacagggtatattcagctctctgctccaccggttccagaggtaaaatgtaccttcgtcaacggaagctgcagaaaaagcaggatactgatgggaaaaaattagccacaaaggaagttgtgagagttgttttctcaaaaacaaaactaagaaagtggtgggcgacttggcaagaaaaagtccttgggttggtaggaagagaaggaatgttcaggrattctggcaacttctcctgggaggctggcttcactgccccatggtggggtgtgcgtatccttaaagggaaccggtgaccccgctgcctgtcatcctaggaaagtcaaccctgggacgagtagaagtggagaagcaaggacatgggaagggatatggtttaggtgtgccccggcccaaatctcatcttgacttgtagctcccataattcccatgtgttgtgggaagaaccagtggggggat

SEQ ID NO: 505222 - DNA, 593 bp, Homo sapiens
ctgttctggcaaggtaaggactgaaaagatgaagacattagaggcatcaggaaaggctttgatcaatagtgaggatgaaaaaggtgattttgagaggaagtaaagagaaaactgtagtctacccttgagataaayctggatgagaagacaagagaggttgggtgacagttagaggaatataggaggtcaagggaggaggaggtggcggatgaattgctttgagaatgcaaaataagagatttcagtatgtttctagactgaaaggaaaaggcagtggaaaggttgaaaacgggagacctagggaatgacaaatggagggaactctcaggggaggaacatcttgtgcacttagactggagaggtggagaggatactctcacatgattcatagacaatttggcccacccgatttaatactctgcctgcatctcctattacagattctctcttcattttgtcagcaaacagctcactgtcctctggatctgctgcgtcctgcaggagcattgcgcttaaactatgggaagcggcacctccacccaacatcattttgctttccagaatgcagagagaggtacgtgtttcccactttc

SEQ ID NO: 505223 - DNA, 566 bp, Homo sapiens
ctgttcattcccttgaatgctgacacttaaataacatcacaactaagagagttgctttctcaggacagcmgttcagaaccataagacttcggaggtaaagaaagcagggagagcataacgctaagtttcttggaaatttttttattctccttgccaacatttcttttgacattttattacttaattatgtgacattaagaaataatttggttgcatattattttcaaaaagcagtaagaaagtagctattgagaaagaaggagggccataggtttttcaataaaacgttagaaacattataaaaaacgagactcccattacatggaaacacatgatcaaagatcagactaacacacattcaaacaggcttggttcgaaatagagttctccatttctttcagatgagccttttttcttaggctctttcagaagcacttcacaatgaacagaggtcttgccagctcatttcattagcggagaagcaaaggtatgatggcagaatcatgagaagatggaaataaggcctgaggatatggcttgatctctgagaccaattatctttgagt

SEQ ID NO: 505224 - DNA, 657 bp, Homo sapiens
tccatactttgttgaacctaagcataaaaatggacaatgtcctctttatctttgggtcttcactctgaagacttctgtgtaaatttgtatgccttttctcctattaatctgcctcttgtcagtgattttcagtgaaccttcagagggtaaaggggaagttttcccttggcctctgcatatctatagttttgtaaaggagaaacaaaaatgaattcacgggaaaactagagtcctagggaatagaggtgaaaaaaggatttacagttcttgtaaatccttccttttccacagcctatcattattttaattaattctttttcgagatggagtttcactcttgttgcccaggctggagtgcagtggcgcaatctcggctcaccgcaacctccgcctcctgggctcaagsgattctcctgcctcagccccccgagtagctgggattacaggcatgcgccaccacgcccagctaattttgtatttttagtagagagatggggtttctccatgttggtcaggctggtctcgaactcccgacctcaggtgatccgcctgcctcagcctcccaaagtgctgggattacaggcgtgagccactgcgcctggtccgtagccacttttaaatagcagaattaaataacctgcttttcaacattgacat

SEQ ID NO: 505225 - DNA, 657 bp, Homo sapiens
tccatactttgttgaacctaagcataaaaatggacaatgtcctctttatctttgggtcttcactctgaagacttctgtgtaaatttgtatgccttttctcctattaatctgcctcttgtcagtgattttcagtgaaccttcagagggtaaaggggaagttttcccttggcctctgcatatctatagttttgtaaaggagaaacaaaaatgaattcacgggaaaactagagtcctagggaatagaggtgaaaaaaggatttacagttcttgtaaatccttccttttccacagcctatcattattttaattaattctttttcgagatggagtttcactcttgttgcccaggctggagtgcagtggcgcaatctcggctcaccgcaacctccgcctcctgggctcaagcgattctcctgcctcagccccccgagtagctgggattacaggcatgcgccaccacgcccagctaattttgtatttttagtagagagatggggtttctccatgttggtcaggctggtcycgaactcccgacctcaggtgatccgcctgcctcagcctcccaaagtgctgggattacaggcgtgagccactgcgcctggtccgtagccacttttaaatagcagaattaaataacctgcttttcaacattgacat

SEQ ID NO: 505226 - DNA, 657 bp, Homo sapiens
tccatactttgttgaacctaagcataaaaatggacaatgtcctctttatctttgggtcttcactctgaagacttctgtgtaaatttgtatgccttttctcctattaatctgcctcttgtcagtgattttcagtgaaccttcagagggtaaaggggaagttttcccttggcctctgcatatctatagttttgtaaaggagaaacaaaaatgaattcacgggaaaactagagtcctagggaatagaggtgaaaaaaggatttacagttcttgtaaatccttccttttccacagcctatcattattttaattaattctttttcgagatggagtttcactcttgttgcccaggctggagtgcagtggcgcaatctcggctcaccgcaacctccgcctcctgggctcaagcgattctcctgcctcagccccccgagtagctgggattacaggcatgcgccaccacgcccagctaattttgtatttttagtagagagatggggtttctccatgttggtcaggctggtctcgaactcccgacctcaggtgatccgcctgcctcagcctcccaaagtgctgggattacaggygtgagccactgcgcctggtccgtagccacttttaaatagcagaattaaataacctgcttttcaacattgacat

SEQ ID NO: 505227 - DNA, 432 bp, Homo sapiens
agagtggagtggtgtgagtgggatggagaagctctgtattttattctgtgtctgggcagtggtttcacttttctcttgtttggkttctagatggcaggagggaagatgagctctgtgctgctcatcctatgggtttttgtattgctttcaggattttcagatactttggttaagtcagtgccctaagaaagactggaggtggtagatgcagctataagatgaaggaacctgaacaatccatgaacaggaggagtttgaggtaattatatttaaaacattaaataatgtttctgttctgcatgtcgattattgcccaattcaacataatttatctcctgatgatattttcactttcagtaaaatctaagttgtaagtagacttggaaatatactaaaagtaatagaatgagattgtctatattgcaaagtaga

SEQ ID NO: 505228 - DNA, 655 bp, Homo sapiens
ttcatcatttcctgcttgtttttctaaaagaatataagtatctcctgatggcagacagttctgtgtttattgcactaatgtggctagcaaaagcattttatcaatttgaaatttaatccaggattaggaggccgggtgaataaagggggatgaaggttaagtaacaggccccctgatgtgaatagtatgtttcactcaaaaagacttaggataattaggaaggtgattggatttttttccctaaggcaacagtttttgttaaactggagcttgtaataggcacattccttctwtttatttagcttccagtcttccagttcttcaaaccatcatttacttacacatggtgtttggtttctttttggttctggaagttgcacaccatccctctctgaatttttttcctctccgtcaaaccaaaagaaactaaatagcaaaaaagaaaccagggcttgccaaagacaacagttgttttggatgtgacacgagaacattggaaaagattttcatgagccgtataagaaaatagtgtagcgtgtgtcacagtcacacctgtgcatgcctgcttgctcagttgctttgtccatgcctgaaagaaaatgcctttggagttacagtaatgccttattctctgattgacgttagttataacccg

SEQ ID NO: 505229 - DNA, 640 bp, Homo sapiens
ctactaaaaatacaaaaaaattagccgggcgtgttggcaggcccctatagtcccagctacttgggaggctgaggcaggagaatggcgtgaaccrgggaggcggagcttgcagtgagccgaaatagtgccactgcactccagcctggacaacagagctagactccgtctcaaaaaaaaaaaaaaaaaaaaaaaagcctaatgggtattgcagcacccagggagccagagacagcagggtgtctctaggcccacaagggaaaggggagctggccactgctggcccagaaggagaggaccacatgtcagaagcttccaaatgcagcctgctgctgccacaagggagagaacaagggaagtaaacaaccaaccaaaaccccacccttgttctcctctttctctgcatctgtccactgttccccgttgcccaaacccaagagcaagcagacccgttgatgtcttttctctgtcagcctcctggtgtagaaagcaaggtttagaaaagagaagcgggggtctggaaacgctacactctcattttgtggttcctcttgcagctgatggggagaagggggtggcatttgacatggcttgggcttatgtcactgaaagtctgccttgaagctcatagaatggctcttac

SEQ ID NO: 505230 - DNA, 538 bp, Homo sapiens
gggttggatccctttgttctcgaggcaaggtattccatctactaaactaaaggcaggtatgtgtacctctgtaaagcctaagcagctactgagtcctgccatgctccctcctctctccttcttatatctcttttatcagtgtacagttagttccacctcaagtatatccatgtgctcaagtacatctgtgtgctcccttacctgctatgaactgacagctgcccaattcccaacagatttgctatacctcttttggactgtcacataagctctcttagccatcaaatacaaacacataatygccactatcaaaagtaagcatttgcagtgcaggccgggtgcagtggctcacacctgtaatcccagcactttgggaggccgaagtgggtggattgcctgaagtcaggagtttgaaaccagcctggccagcgtggtgaaaccccatctcaactgaaaaatacagaaattagccaggcgtgatagagcatgcttgtagtctcagctactcaggaggctgaggcagaagaattgcctgaga

SEQ ID NO: 505231 - DNA, 538 bp, Homo sapiens
gggttggatccctttgttctcgaggcaaggtattccatctactaaactaaaggcaggtatgtgtacctctgtaaagcctaagcagctactgagtcctgccatgctccctcctctctccttcttatatctcttttatcagtgtacagttagttccacctcaagtatatccatgtgctcaagtacatctgtgtgctcccttacctgctatgaactgacagctgcccaattcccaacagatttgctatacctcttttggactgtcacataagctctcttagccatcaaatacaaacacataatcgccactatcaaaagtaagcatttgcagtgcaggccgggtgcagtggctcacacctgtaatcccagcactttgggaggcckaagtgggtggattgcctgaagtcaggagtttgaaaccagcctggccagcgtggtgaaaccccatctcaactgaaaaatacagaaattagccaggcgtgatagagcatgcttgtagtctcagctactcaggaggctgaggcagaagaattgcctgaga

SEQ ID NO: 505232 - DNA, 538 bp, Homo sapiens
gggttggatccctttgttctcgaggcaaggtattccatctactaaactaaaggcaggtatgtgtacctctgtaaagcctaagcagctactgagtcctgccatgctccctcctctctccttcttatatctcttttatcagtgtacagttagttccacctcaagtatatccatgtgctcaagtacatctgtgtgctcccttacctgctatgaactgacagctgcccaattcccaacagatttgctatacctcttttggactgtcacataagctctcttagccatcaaatacaaacacataatcgccactatcaaaagtaagcatttgcagtgcaggccgggtgcagtggctcacacctgtaatcccagcactttgggaggccgaagtgggtggattgcctgaagtcaggagtttgaaaccagcctggccagcgtggtgaaaccccatctcaactgaaaaatacagaaattagccaggcgtgatagagcatgcytgtagtctcagctactcaggaggctgaggcagaagaattgcctgaga

SEQ ID NO: 505233 - DNA, 616 bp, Homo sapiens
ctgcagtttacagtttatcatcaaccaagtgctgctctggctgcctgtcttcccttctccagcttstaaagaaaaataaagggaaagaagaaaggaaggaaaagcagcagccccagcacattcactgtataacaatctgaacaacggaaaggaaaaaaaaatgccctcagtgaccatgaaactgacaaggctccccaaaatggcttccagctttcagtttgtcatgcagagctgtctccccttcactctcccaaccctctcccccgtttataatcatcgttcaaagtggtgaaaggcctaattgccccgagcagtgtggtcaatcttcctggagatttagctgcctgctttcatctggcagcctgggagggaactcagtatttccctccaggcaatctatatggtctagcagttcactgcggaaagtggtgccttatcgatttctgccatagcatccatggctgactcaaggatcagaggctctgacaatgactaacaagtttaaaccattagtcccatttgtaactactcagcgaaaggcttgtcagtcaccgcgtaccatatactgcagcttttagcagatttctaatcccattcattttgccacaatgacccc

SEQ ID NO: 505234 - DNA, 583 bp, Homo sapiens
gctgctagagaaaacctccttgcccaagatcaaaccctatcccagtggccacttgcaggagtatgaagtgctggtgccctcttagaacttgagggctcaggagaactctgaaaagctttccctgcttcagagctttctgtgagtcaatggaggtgtttactgtaactgcaccacagccaacatctccctcctttctccgccagtccttcctctatgcactccaattgcactcctctacaggtgttgatcctgatgatgattcctaataaattcctcgcttattaagctctatctcaaagtctacttcctggaactagataattagaagttctgatatgtcccctctccccacaaggcactgtcttacagacattttgggttactctcatctcactctggagaacaatggtctaagccagtgctgcctgacagaatgttctggaatgatagaaatgcccaaaatggcagccactagccaacacgtggttattgagcacttcaatgtgattagtttaaataaggaagtaaacttttaaaaatatttwattttaattttaatttaaatagccacatgtgacttgga

SEQ ID NO: 505235 - DNA, 449 bp, Homo sapiens
tagttttggtttgtatttttttaatcagtcatatttcaggatgcaaaaagaacatgaatgcaagtgtaacacaatatttctgaccctaatttaagtcttttgactctagtcaggtagccaggaacttatacagattaaaacaatctggttgtggaaacagtattattaaaagactagcagggtagattaaaatcaacatcttttatttgaatatcaagaaagttcttgtctctaagggatattcaacagtgggaagataaaactaagaaaattacaacatttatgcttgacaagcaactagttttctcaatgaaatataacttgcactaaatgcaaaatagatgagataagagaatttcatgatgtgttaagtctttgacttctttcattaatgagtgaaatcgcttgtgtcccattaytgctatgaaggctataaaaatcttagttat

SEQ ID NO: 505236 - DNA, 626 bp, Homo sapiens
tttgagcacactcatttcagggagtaaatttttaacatgtgttcaagggtgataagaattgtgcctattctctgactcctctatgtacataaattacaggatagtcaggtattgacatggagatcagggacagagcaaactcagtttcaccatgggctcatttacatgtcaatgccagaccagggctgtttgattactttgctcttgtctgagatcccagggcaagtaagaacaaacagacgtatttgtggatctagaatttctttctcttactcatatgtatatgcgtatgtgtatgtgtgtataagtggacagatgatatatcagaatatgagcattctagaactcttattttatagtgcattttgtgcagtagtgactgtaacgatggtttaacatttggatagcaatgtgaaataatgaacaaaacggtttatgaggcctcgggtggaatgtctccaatggtatttatcgattccaaaggaaaatatctaaaccatttcaactgtgttgatsctttttaggccatatcttcttctgtctctattggctctaccgaaccagatcaactcaaggtgcagcctcagttgggcactgtctccttgtggccatgttcctggggaaag

SEQ ID NO: 505237 - DNA, 610 bp, Homo sapiens
tagagattttattttggtcttaaatgtttttttttttttttctttcttcccctggtagatgcaaaaatggggtaygagggacctgggactagggaatgagtaaaaccaggagaagagggctctgttccaaggagaaagaaatccaatcaatggggtatagggtcaaagcagaagtagccattggggaactcccagaaaaaaggcatggtcaacagttaacaaggttttttggattttgtttttaatggtcaacagatattaagttcgggtgtgggaggggggttgtttctaattcttttactaaagagctttgttaactattacagttcctcagttttgtcaagcagaatgagggagtgacttgtgtccatgctagagatggggtagtgggaaaacacatctttccttcctgccagacacccttgaggaccctggaaaagaccacagcaattagagacaagcaagagtgaggcatcagtgaagcctggagcttacgtctggagggaaacccaacaaaatgtatctgtggaaggtgtaacccgcaggttcccaaaacctcagtattctcagcaaatcaagggaagagagcccaataaaagcagagaatttc

SEQ ID NO: 505238 - DNA, 394 bp, Homo sapiens
caaactccctgtccctggccctttccttgggccttcccttcccacttggcccatatcctgcctccctgcttcctcctcactgtgctttcacacaggactgtggggagggctatgcgtcagggctgcgtatacactgcagatgttcatcccaaacagaaccctaggaacagtcatgaacagatgctgtctatctgggtattggccaagtataatggctaagtttgtgtatcaacttgackgggctaagagatgcccagagagctggtaaaactgtatttctgggtgtgtctgtgagggtgtttccagaagagattcaccttcagattggtgaactgtgtaaagaagacccagcctcaccaaagcggatgggcatcaggcaatccattgagggcct

SEQ ID NO: 505239 - DNA, 582 bp, Homo sapiens
tatgtatgagaataatgttgaaaaggagttgaaatagaataaagttatttaagtgtaatagttctataccatactgaaattaagatcatataaatctgaaggggtttctgataagttaagaggtctatggcaggaacaggtgcaaccacmaagaaaatgactcaaaaatatggtggaaaaaaaaaacaattaatggaattaaaatcctatattagaaaacactcactgaatgtaaaagaagaaataaaggaagaatggaagaacaaaaaagtcatgagacaaacagaaaagaaaagtaagctgggagacataaattcaactatatcaataccagaattaaatataaatggattaaacaactcaagccaaaggcagaaatgtcagatgggattttaaaaaataaaacaagatctatatatatatacatatatatatatatatatatacatatatatttgtagtatataatacatacagttcagattcaaaaatacaaatagattaaaagcaaaagtatagaaatacttgtcaggcaaacagcaaccacaagaggattgcagcagctctactaatatcagacag

SEQ ID NO: 505240 - DNA, 536 bp, Homo sapiens
gctactctgggtgagtcgttttatttccctgaggccccattttctcatccgtaaagttgggagaataacacctgtattccagaaaagctcaaatgaaatgagttaggggatgtgtctggcccaaagtaggcaaaaatacacttttcctcccggtcatacytgtgaacagtgttacagggaggtcccaggtagtgcatacggatccgacctcaggaaacacatgatctgtttaatatgattagatacctgctctgagaatattcggaattacggatttgagatcaggaagttcaaaacagtctacattataaaatttttgcttctttccaaacttgcctacacagggacaagtaattatttaaagagatattgggattctgagtccagaagacacatttcttactccggggcttactggaagaggagctggttacctactagccactgagctttcaggtcatttgcctttggaagacggccccattggactgatttctcctcattgaatttcctggtgcatccagtccctgcacatc

SEQ ID NO: 505241 - DNA, 536 bp, Homo sapiens
gctactctgggtgagtcgttttatttccctgaggccccattttctcatccgtaaagttgggagaataacacctgtattccagaaaagctcaaatgaaatgagttaggggatgtgtctggcccaaagtaggcaaaaatacacttttcctcccggtcatacctgtgaacagtgttacagggaggtcccaggtagtgcatayggatccgacctcaggaaacacatgatctgtttaatatgattagatacctgctctgagaatattcggaattacggatttgagatcaggaagttcaaaacagtctacattataaaatttttgcttctttccaaacttgcctacacagggacaagtaattatttaaagagatattgggattctgagtccagaagacacatttcttactccggggcttactggaagaggagctggttacctactagccactgagctttcaggtcatttgcctttggaagacggccccattggactgatttctcctcattgaatttcctggtgcatccagtccctgcacatc

SEQ ID NO: 505242 - DNA, 639 bp, Homo sapiens
tgggaaaccaccttccaaggccttttcctggagtcgctgcctctgggccgtctgctcaggaaggagctgaaagtagctcactgtggtcatcagtgtgaactgaatggrccagggaccaggggatagtggtctttactcatggaggactgtgcttactgttggaccaaggagatgttctctcttgatagatcagaacatgagacagagttaggaatttggtagcaggaataagggggaaatgcacagagaacaactaaatcattttaataatgcagcaccacaaggctctgcaaaggttccgtgagataacagagtcctgatactgccttcgttcccaagcagcctttccagtaaccatgagcctgggccctactctcgtaaattgctgccatccattcctttcttccttgttttcatcttcacaactatcaatcaaaagagtagggcaaaggacagtggctgtttaggtctagtgcccatctctttttcctgtatggtctcaatttatcctatttccagtgacaatattatgaattttctctggggaatgactctcagtcttcatgtattttggaattgtctcatggagagcacaggaccaagaccaatcatcacatcttattcctgtgtccaccgaaa

SEQ ID NO: 505243 - DNA, 639 bp, Homo sapiens
tgggaaaccaccttccaaggccttttcctggagtcgctgcctctgggccgtctgctcaggaaggagctgaaagtagctcactgtggtcatcagtgtgaactgaatggaccagggaccaggggatagtggtctttactcatggaggactgtgcttactgttggaccaaggagatgttctctcttgatagrtcagaacatgagacagagttaggaatttggtagcaggaataagggggaaatgcacagagaacaactaaatcattttaataatgcagcaccacaaggctctgcaaaggttccgtgagataacagagtcctgatactgccttcgttcccaagcagcctttccagtaaccatgagcctgggccctactctcgtaaattgctgccatccattcctttcttccttgttttcatcttcacaactatcaatcaaaagagtagggcaaaggacagtggctgtttaggtctagtgcccatctctttttcctgtatggtctcaatttatcctatttccagtgacaatattatgaattttctctggggaatgactctcagtcttcatgtattttggaattgtctcatggagagcacaggaccaagaccaatcatcacatcttattcctgtgtccaccgaaa

SEQ ID NO: 505244 - DNA, 584 bp, Homo sapiens
ttacccctcaataggtttatataatcacctactgtggggtattgagagatggttgcaggcaaacagcatcacttgcagtcagcttggtccctatcctaatgaaatctcacagttgaaaaatgagctggctgtcactgaaacaggatccccattctccagcacaggctcacatttctgcagcctggctaggtcaaggctggcaacctgggagatctagggtacaatagtagagattagaatgactaggacaagtgaatgtactgaatgaatagaacagaggcatgaaaaagctcctgaatttcctactgtgttttgaataatccctttggtttaaaccgttgagaggcccagatcagaaataacaacagaratcgagaaaccaggtagatttacaaagaggaatcaatacatctaaggagccccagggaaatattccctaacattttttctgtcaccctttcttcccagtcttgatttccaaaggcacagctcctgtgaagcctaagaccccaaaaccctactctgtaagagaaaagggtgggatttgagatcctagagacctacaatatagcaccaatccatcc

SEQ ID NO: 505245 - DNA, 347 bp, Homo sapiens
gctgttgtcacgtctgaacgcagacctggaattgccagatctatcagtttttcaagagcagccggaaatccggattttcatgtaactctcacaatttttaactrttggcttagtgtttttcacaaacactgcaaagggcaaacaaaacacatctgtgggccagtactgtcccaggtctttcttcatatgactttcatttaaactttctccacctctgtttgtgcaagagagtctttgaaattgtcagaccgtgtgtgtctcagctttcgtttcatcccactagttctgctcgattgtttatcccatcaagatctttgggagccttgatgacctccccactttatcat

SEQ ID NO: 505246 - DNA, 457 bp, Homo sapiens
  misc_feature (1)...(457): n = A,T,C or G
ggtcactttgaggtctctgaagggaagggtgaacgtgcatcccaacagccctggcagccagcagcatgccatatatcttctcacccaacctgtgtgacagaggtcccctcctggggcacaagtcccatacntaaagcatcctgtcccagtcggacctcatcntgagccctgggaggggaggggtaccatgggcccccctgcagcagccaggattaccacccaggggactcggccttctgtggccctggccagacttagaatttggcccaagacaarcttactcggagcagcttctcagtacctggggcctgtgcattccaggcaagcccaagctggctcaaagagcaaccagccacctctgcaagggtgtgccaggagcaggtggagcagtcaccaacctcacccactcaaggaaacagggatggccagattcccacagtctgagtgaccacaacct

SEQ ID NO: 505247 - DNA, 457 bp, Homo sapiens
  misc_feature (1)...(457): n = A,T,C or G
ggtcactttgaggtctctgaagggaagggtgaacgtgcatcccaacagccctggcagccagcagcatgccatatatcttctcacccaacctgtgtgacagaggtcccctcctggggcacaagtcccatacntaaagcatcctgtcccagtcggacctcatcntgagccctgggaggggaggggtaccatgggcccccctgcagcagccaggattaccacccaggggactcggccttctgtggccctggccagacttagaatttggcccaagacaaacttactcggagcarcttctcagtacctggggcctgtgcattccaggcaagcccaagctggctcaaagagcaaccagccacctctgcaagggtgtgccaggagcaggtggagcagtcaccaacctcacccactcaaggaaacagggatggccagattcccacagtctgagtgaccacaacct

SEQ ID NO: 505248 - DNA, 457 bp, Homo sapiens
  misc_feature (1)...(457): n = A,T,C or G
ggtcactttgaggtctctgaagggaagggtgaacgtgcatcccaacagccctggcagccagcagcatgccatatatcttctcacccaacctgtgtgacagaggtcccctcctggggcacaagtcccatacntaaagcatcctgtcccagtcggacctcatcntgagccctgggaggggaggggtaccatgggcccccctgcagcagccaggattaccacccaggggactcggccttctgtggccctggccagacttagaatttggcccaagacaaacttactcggagcagcttctcagtacctggggcctgtgcatkccaggcaagcccaagctggctcaaagagcaaccagccacctctgcaagggtgtgccaggagcaggtggagcagtcaccaacctcacccactcaaggaaacagggatggccagattcccacagtctgagtgaccacaacct

SEQ ID NO: 505249 - DNA, 572 bp, Homo sapiens
ctgtatctttatactcacttttaagtaatttcttcttaaccattgtataacactaccacagtttgtatggagataaaataactcatggtgagaaatccagttctttaaaaaatcattttaccttcaatcacttttaggatgtctatggttttagagtaaggacgaaaatttataaacatttgttaaattatgcaactgtgtttgaagatgtttcaaaattacattttccttattttacaactagttttcatgtattcacaaacgagacacatgagaattattaatgcaaaagcacagcatatcaacaaagtttataatgtaaatagtttagttaggaaagaatgtaatgagtgaattatcaaagctattttattggttcctagatttaccacagaagaaaataaaacaggcttttaaaaatttctcagcactgagaccatttaaggtctattttgtatgccgtaagttctaaaaaatgttattgctggtaaaaataggatgcctatctaaaattgtctttttaaaggttctctcttattcttcttccyttcctatgtgtgcatagaatactg

SEQ ID NO: 505250 - DNA, 576 bp, Homo sapiens
taaaatataggcattgaactaaacagaaagagataatctatgtgttggtaagakatcttggcagtttattggaaactacttagatacccattattcttttcctctccatgttagaaaaaaaaggaaattacagttgaatacagcataagacattccaaaacaaaatcaagcaatgaggacacaactttctttgagttacaataattttcctcaaataatatgtgtgcatgaatattgaaatattcccttaagctaaaaaataatgtagatggatcagttggttacttgggaagagatgaatgtagataggaaataactcatttttcctatgtttgagcaaatatataaagaataaaagcaagtaatttcaagaaattattttccatttgaaagaaaatgtttgttattttaaacttggtaaatgcataaaaatcaagagaagaaataaatgatgcaataccttagcccaaatacatttactatcaaatattttgtgccatttcattacagttttaaatttaatgaggtgatttttacatagtgacaatcatactgaacatacaattgtgtttctac

SEQ ID NO: 505251 - DNA, 664 bp, Homo sapiens
gggccataaaatggctggaataacctgtatcaccactcttaatatgtcatttaatgtttggttttctcagagttttattcaaattgtgacattattctcatgactttatgaagaggagccaaagaactcatggatgaggagagtaattttacaaaagtctgaatggcactgctagtccctgagcttctttcttcasacatgctcagtgagagataattattactcacattgtgaggaaaatccctggttactattgccacataattctcagaaatctcacaaaacaatttgccttgaattttacctggatctatcggacaaagactatttgttatatggatgactacagtccttaactctcttgagttttctcttttgaagagggaaattatcatattatcaatatagggaactaacctgctctttgtggttatcaagccctagtacctctggtaagattatgacaatatggtggcaaatttaaatattcttgtggctaaacaatcactgtatagtgaattccacttcatgagaatgtaaattgtgcttggatgaacttcagaactggtactataaagaaattattagccacatctatattagctcaccaatcctgcttggtctatttcacttcctatatagtatttaaaatgttacataggta

SEQ ID NO: 505252 - DNA, 594 bp, Homo sapiens
gagttcccagcaagggggtcaccaggccaccagcaactggcatttgcaagtggctgccatcccacctggtagcatgaatgggtaagccctggtacatggctgcagccaatggttccattcattggaaaccatgtgtataggctragctgcttgaaccagacggttcctcaaatggggcaccaaatttctacctagctcaagtccggccacttactgctcagaagctgaccatatgagaagcaacgtgtcgtgaaaggaaagcagttttattaatcaaatgctagtagtcaaggattggccaggctcacgtctttaaaagatcattccagcttttggggcttaatgaaggggtttaagaaagaaaccttggggtgcgaaacatgggtggtgcaggagggtgcaggtctgtgtgtcttgttctgatggctatcttaggtaatcgcccatccagaggtctggttggtgtcatctcatttttgtccttgtagtggtggactaactcttcataactccacctaagcaggaggataatgcagctaggtctctatgcctggtttgtttcaagattagcccccagaacttttaagaagcaca

SEQ ID NO: 505253 - DNA, 594 bp, Homo sapiens
gagttcccagcaagggggtcaccaggccaccagcaactggcatttgcaagtggctgccatcccacctggtagcatgaatgggtaagccctggtacatggctgcagccaatggttccattcattggaaaccatgtgtataggctaagctgcttgaaccagacggttcctcaaatggggcaccaaatttctacctagctcaagtccggccrcttactgctcagaagctgaccatatgagaagcaacgtgtcgtgaaaggaaagcagttttattaatcaaatgctagtagtcaaggattggccaggctcacgtctttaaaagatcattccagcttttggggcttaatgaaggggtttaagaaagaaaccttggggtgcgaaacatgggtggtgcaggagggtgcaggtctgtgtgtcttgttctgatggctatcttaggtaatcgcccatccagaggtctggttggtgtcatctcatttttgtccttgtagtggtggactaactcttcataactccacctaagcaggaggataatgcagctaggtctctatgcctggtttgtttcaagattagcccccagaacttttaagaagcaca

SEQ ID NO: 505254 - DNA, 594 bp, Homo sapiens
gagttcccagcaagggggtcaccaggccaccagcaactggcatttgcaagtggctgccatcccacctggtagcatgaatgggtaagccctggtacatggctgcagccaatggttccattcattggaaaccatgtgtataggctaagctgcttgaaccagacggttcctcaaatggggcaccaaatttctacctagctcaagtccggccacttactgctcagaagctgaccatatgagaagcaaygtgtcgtgaaaggaaagcagttttattaatcaaatgctagtagtcaaggattggccaggctcacgtctttaaaagatcattccagcttttggggcttaatgaaggggtttaagaaagaaaccttggggtgcgaaacatgggtggtgcaggagggtgcaggtctgtgtgtcttgttctgatggctatcttaggtaatcgcccatccagaggtctggttggtgtcatctcatttttgtccttgtagtggtggactaactcttcataactccacctaagcaggaggataatgcagctaggtctctatgcctggtttgtttcaagattagcccccagaacttttaagaagcaca

SEQ ID NO: 505255 - DNA, 594 bp, Homo sapiens
gagttcccagcaagggggtcaccaggccaccagcaactggcatttgcaagtggctgccatcccacctggtagcatgaatgggtaagccctggtacatggctgcagccaatggttccattcattggaaaccatgtgtataggctaagctgcttgaaccagacggttcctcaaatggggcaccaaatttctacctagctcaagtccggccacttactgctcagaagctgaccatatgagaagcaacgtgtcgtgaaaggaaagcagttttattaatcaaatgctagtagtcraggattggccaggctcacgtctttaaaagatcattccagcttttggggcttaatgaaggggtttaagaaagaaaccttggggtgcgaaacatgggtggtgcaggagggtgcaggtctgtgtgtcttgttctgatggctatcttaggtaatcgcccatccagaggtctggttggtgtcatctcatttttgtccttgtagtggtggactaactcttcataactccacctaagcaggaggataatgcagctaggtctctatgcctggtttgtttcaagattagcccccagaacttttaagaagcaca

SEQ ID NO: 505256 - DNA, 664 bp, Homo sapiens
attcctgctgggttgcttttgaagaaggatggactctcctaccattgttgctgtagtcccatttatgggctatcccatgaatttgtaagatacatgttttatgtgataacaatgctatttaaagtaaaagtaatttcattcctcttcttctttgttccatttttatggattcttttaattttaatctaatcacattgaaactttctcgaactacagctaatttacttctgaaaatttacttaatgattaaagtgaaagtgatccaggaaggggaataaggacaacagaaagtagtgaaccctttctcattccatcacttatcatggcataagcctcagagaccagagagaatgagactgtycttcacatctttgagaggctgcttttctctgaggacattcagggcccttttccaatgaactatttttttttttacgggaagactttacccatttttttcatccaaaatatttcactcactgtcgaggatttacctatggattttatgtatatgcaattcgtcagtttgaatccacacttcattgcatgcttctcacagattattcctgggtgccttgatgaagactaggttatggcagcattccacctctctttgggaagtgtgtgaacgatattctcaagttgtgtcacattttccttcagt

SEQ ID NO: 505257 - DNA, 550 bp, Homo sapiens
aagataaaacacataaatataacaaaattcattatgtcagaactttcctcataacctttgcatggatcccacttgcctgcagaacattctacataattttcaatcatagatttcacmttcctcataatttggccctagcctaacttgttaatagtatctcaatagtaacttagagcagatttattttattgctctaaacacatgtaacagtaatatatccttatgccatttaccagtgttccagatagagcatgttagccaattaaacttatgaacaagttttaaagagaaattaagcaattttatgttaagctctaagcatgttacgtgaaccaaaaaaaaaaaaataaaaatacatatgtatacatataagtgtatgtatgtaaataagtatgtgtgtgtgtgtgtgtgtgtgtgtgtgtgtatacacacacagggtggggtaagggaaagagatgaaattttacaatttgggtccaatatatggatacctgtttgtttataggcttataatttattgacttatctaaacagagaagaatatccacat

SEQ ID NO: 505258 - DNA, 592 bp, Homo sapiens
gccctccttctcagaaatttgagtctcagtgcattggggcctctcctatatttctaagttttaataattccaactatttccctttgttccttcagtcttagcttargtaactattttctgtactttctgaagtagctacctctatgttatcttacagggtttttttttaaccttttcaataacctggttaactgtatacatctagttagcaagtgtttatatttaaatacctcttcagataactggtgtggtatctgtttcttggacaatataccaaataatacattaaataatttgctttagatgtacaatagacaataaatagcaaaaccaccatggcaagagcaatcagaatgttctttgtattctatagtaagaatgctcaacctctattttttgcacatattacattatgcgtaatgtatatactttttcacactttccattctgcttccaatgccttgagctgaggtgctgtgtgcatgccacacaggccatagctggtactcaactggctgttataccatgtgaccagcaggggcaaatactttccctactgccacttgagatataaatgagcttaccttcccta

SEQ ID NO: 505259 - DNA, 609 bp, Homo sapiens
aagtccttcctttttgacctggtttcttcagtccatagacttacacaccaccctggggtccctttgatcacttttggccaatgaccatatagtcttgaatgttaattttattgcttctagttggcatttttaagaacaagtgctttgtgctctgtggttttcattgaacggagacatggattggaagctagcatattctcactctcatttgaagcccaaaatgaaagttggtctcccaggtgtcatagtaataggcaacacaaaatgtaaataaacatatttcaatggaattttgataggcatatgtaagaaagatggctgcactttagtcaggaggaggctgaggcggccttccagtgcagaatgactcagcgggtttgcagcacaggcgcacaaccccacacattatgtaaccacgtcacgtgaggcacattaggtaaccactcacatgaacttgtgcttggctcggagccactattgtctgtaaaaggtataactatcctgctgacaatatacatayggctggcccccatagagagaataaagccatgtcacaactgcctaagattcctcaagtgtttttccagctacccaccacctacccaccca

SEQ ID NO: 505260 - DNA, 274 bp, Homo sapiens
gtgtctgtctgattctctttttctctttttgtttcaagaggaactcaaaaatgctccctggcatttccatgccaaagccatttcccatcatagcaattaagctcctttgatggtagaatatgcccccatgtgaaactcacataaaatmttttcggccattagcccttcttcaggctgagatgtagcactgccagtatgaaatataaaattgcttatttaaaaaccaataaggaaaaaatgtccctgatagaagtaaaagcctggcatccctaga

SEQ ID NO: 505261 - DNA, 506 bp, Homo sapiens
gagggagtcagactaaactgtctccaagatccttttataaaattggattcttcttcaacactaacttggactgttttcaatcatccttttcatgcttatttgacatacatagttgagattttctttaaacattagaactgtgcagttgcttattttccacattggattatatcctctgccacagtcgtcattttctgcattccaaaacatttctcttattctctgatgtgggtattgacaagcaatgatgccgatgcccaacatgtcagatttgtcaaggatgctccctccctctgccatgaatcaatggccagctcacctccttggaaagccacaggctctctcttagagagtcaggacaaattcaacattctccccaaatcccaagscaccagaggagaggagatgaaatctctgcaaactttacactttgctggtgaaaatctccaagtctgccctaggatactgactttggtgcatttagcagagctacatggagagaagac

SEQ ID NO: 505262 - DNA, 510 bp, Homo sapiens
ctgctgctgctggcagtggtggtggtggtggtggaatggggattaacccctgttgaaaaccatggtctaacagttatctcagttggtagttaaagaatgggcagaaggaggaacaattatttatataaggtcacactgctatgtcagaactgttttctagactctcctggaagacattacaaagaaacagataattatgtctaattatacttcatcttwtgaaagtaaatgttcaaaagattttggtaatcaggataaagaccttttttttttttttttttggaccaaactgttattttgatggcctctactgtggatatttattgcaagaggaaaaagtgttcactgttgcttcttggaacatagactgaaacactccacaggcatgcctttgtactttggagaaaattgggaaacagttgtttagatagtaagattctgttggtttgttgatttctagtaagacaattattttgagattgccttctcttttggaattttctttgacag

SEQ ID NO: 505263 - DNA, 510 bp, Homo sapiens
ctgctgctgctggcagtggtggtggtggtggtggaatggggattaacccctgttgaaaaccatggtctaacagttatctcagttggtagttaaagaatgggcagaaggaggaacaattatttatataaggtcacactgctatgtcagaactgttttctagactctcctggaagacattacaaagaaacagataattatgtctaattatacttcatcttttgaaagtaaatgttcaaaagattttggtaatcaggataaagaccttttttttttttttttttggaccaaactgttattttgatggcctctactgtggatatttattgcaagaggaaaaagtgttcactgttgcttcttggaacrtagactgaaacactccacaggcatgcctttgtactttggagaaaattgggaaacagttgtttagatagtaagattctgttggtttgttgatttctagtaagacaattattttgagattgccttctcttttggaattttctttgacag

SEQ ID NO: 505264 - DNA, 510 bp, Homo sapiens
ctgctgctgctggcagtggtggtggtggtggtggaatggggattaacccctgttgaaaaccatggtctaacagttatctcagttggtagttaaagaatgggcagaaggaggaacaattatttatataaggtcacactgctatgtcagaactgttttctagactctcctggaagacattacaaagaaacagataattatgtctaattatacttcatcttttgaaagtaaatgttcaaaagattttggtaatcaggataaagaccttttttttttttttttttggaccaaactgttattttgatggcctctactgtggatatttattgcaagaggaaaaagtgttcactgttgcttcttggaacatagactgaaacactccacaggcatgcctttgtactttggagaaaattgggaaacagttgtttrgatagtaagattctgttggtttgttgatttctagtaagacaattattttgagattgccttctcttttggaattttctttgacag

SEQ ID NO: 505265 - DNA, 609 bp, Homo sapiens
  misc_feature (1)...(609): n = A,T,C or G
nnnnnnnnnnnngacctggctgagtggtacatggcacacactcagtagtaaatcctctttacctagggtcacaataatgcctaagatacccagctatggcacccctgtccaaccatgctggcaacatgctggaaagcttgaatgcctctctcactatttctaggtcttcatcacttggctcagcttccttttgtactatacattttctctaactgattattttttcctctcttgagtcttttctgacatagattctgtttcctaagaatgcctttgagtcttgcttacttaaataaaaattcaacctgtttttaaagatacggttagattttaaccagatccatagaaattatttaataactgggagtctgaaacasaggcttattcaatcaatcctcaataaacacgtttgttagataaataaatgaatgactgaataaagaggaggaattctcaactcttccaaatgttacggtgtttgctcatacctatcttgtaacagataatgttactttataacttatttgttacttaagtgttgctttagttttcttaaaattgtgcacaggagattcctagtgtattagtcaagtttctctagggggacag

SEQ ID NO: 505266 - DNA, 611 bp, Homo sapiens
atatggatgatcgatattttcagaaataagtctttgagtagacaaaatacacaaggcagaatcaacaagacctagaaatagtgcaatggtataaaacatttattgcaatgaggagagtgacatttcacagatcaaaatttctgacatagtagacaaataagagatgggttatgcctgtggatcctgaatttgccataactaatgatggaactagaacgaaagatttagatagtttaccaaataaagacatcttcaataaattgggggagttagatggaagtaatggcattttgagtgacataggcttattacagatgcttcagagatctatacgttttttgaaagaaaaaggtagactatgttgtaaaagctataagtagagggatgaggatgaaggtttggtgggtgacataggtaggactcaggggacctgagagcaccagagggaaatgaaatagagtcagattagcaaagaggtagactaattgagattacaatcyccaactccatctccaaagcacacacccttattatgcagaactcatcaactctaatcagcagatttcagcagaggataacagcacgaattctcaacaataagcaggatcagt

SEQ ID NO: 505267 - DNA, 611 bp, Homo sapiens
atatggatgatcgatattttcagaaataagtctttgagtagacaaaatacacaaggcagaatcaacaagacctagaaatagtgcaatggtataaaacatttattgcaatgaggagagtgacatttcacagatcaaaatttctgacatagtagacaaataagagatgggttatgcctgtggatcctgaatttgccataactaatgatggaactagaacgaaagatttagatagtttaccaaataaagacatcttcaataaattgggggagttagatggaagtaatggcattttgagtgacataggcttattacagatgcttcagagatctatacgttttttgaaagaaaaaggtagactatgttgtaaaagctataagtagagggatgaggatgaaggtttggtgggtgacataggtaggactcaggggacctgagagcaccagagggaaatgaaatagagtcagattagcaaagaggtagactaattgagattacaatctccaactccatctccaaagcacacacccttattatgcagaactcatcaactctaatcagcagatttcagcagaggataacagcacraattctcaacaataagcaggatcagt

SEQ ID NO: 505268 - DNA, 550 bp, Homo sapiens
attcatggttgacattttaaaaatatttgataatgcatcaaaacagaatttcaacagtactactcaggatcagatttgttttcatgtgtagtcagtctttgtccattcaggctactataacaaaataccatatactgagtaacttatacacaacagaaatttatttcttatagttttagaggctgggaagcgtaagatcaacgcgccagcagatacagtgtctagtgagggcccatttcctcgtccataggtggtgccttctccttgcgacctctcatggtgaaggggcaaatgagttcctttggtcctgttataaaagagcackaaagctattcatcaggtcagagcctgtcaaaaagcctggcctcttaatactatcaccttgggggttaggggtttcaacatatgaattttgggagaacatcaggagagatcagataaacataataaaaatagttttttctaggtatctgtatacactctgttgactcaatcatgttttaataatgaaaaagtaacatctctattgtatatttatttctttctaaaa

SEQ ID NO: 505269 - DNA, 527 bp, Homo sapiens
agtttatgtagaatatccagctctggaatgaagaattgatgataatccaggagkttaaaaaagaaataactcaattttagaagatgaaaataaatagacacaaacaggcaggatacagaaatcaatctagatgttgtgcaaaccttagtgtcattgcaggtgttagtgaaatctacagtctgtagcaaagattaggaccagcagtgagccatggtgattgcatgggttagaagtagacaaggagaacaatattcctgtcagcatcacctttgaccatgcaatcacatctctacatagcctaaatgaataaaacaattttaacagggaaaggaagacatacaatgacatctattattgtgtacagtttctaaatgacatggtaataaaaatttatcccttgtttttttttttctaatgagctacttagatgaaattttcaatgacagcaaccaacaatgagtagaagaccattaaaatcagtaggattgtgcttcactgttcttaatacaaaacctgacaatgattaa

SEQ ID NO: 505270 - DNA, 561 bp, Homo sapiens
aaagaactgaaggaaaaaagagaaagcctagttgatctctctctctctttctcatctatrtagatagatggacatatttatgtgtgtgtgcatgcacacatatataatccatttatatgcacacatataattcatttatatgcattatatacatgatatacgtgtgtatacacacacacacagatataaacatctttcatgcataagggacagcaacaaataaaggccccacccaaggtagagacatgacggaatgttatatgaccagcctaaaactagtatgactggagtgctgtgagtcctgagagaacgaaagaagatgaggttagagaggaaatgcagatccaagtgcattggcttcttgccagctcttgcaacgtctttggcttttacaccaagagagacatttgcacagaagactaacacgatctcatttacttgggttgagagagattgaggtgcagcaagcacagaaacaagcagacctgcttgaaggctactcaattcagttagaacgaagacttcagaaaatgtcagcacaaactcaaactcacaagtcac

SEQ ID NO: 505271 - DNA, 568 bp, Homo sapiens
gattttcaattttttttcattcagttccacatttattatttgaaattcttctacgaggaaaagctgccccttctctctcatttatttttacttatgcttttatttatttagatcagtatagattcaaaaacatttattttattttatattatttattagaatctaataatatggttatttattgttttctgcaaatccttctagattcagccattggatgatttttttaggttggctctggtgcctttcaacatgtcttcatcattccttcagcaagcttccttaatttctggcatcacagaatgttccaagttcatcttatattttttgcgcctaagccctcaaatcaaacaagtttccatatatgcctggttgcttctgcttgagaaagaaccataattgtttcatatagtgcagtattaaaaattaaaaaaatacataactcttgcttcataatgtstaaatatgtcaaaatatgtacatgaaagtatttgtatttgaaataaatctaattatgtattgaatataaaaatctaaataacagcaagttattgttaacatgttaatt

SEQ ID NO: 505272 - DNA, 165 bp, Homo sapiens
ctacacaaggaagcagggatggccaggttctcacagcatgagtggccaccgcctgatggctgatcaagcagaggcctgaggaaaagcagatggcagttgggccctacctctagggtagaasaactgatgtactctgaccggtagtgagtgaggttggtggtgggt

SEQ ID NO: 505273 - DNA, 165 bp, Homo sapiens
ctacacaaggaagcagggatggccaggttctcacagcatgagtggccaccgcctgatggctgatcaagcagaggcctgaggaaaagcagatggcagttgggccctacctctagggtagaagaactgatgtacyctgaccggtagtgagtgaggttggtggtgggt

SEQ ID NO: 505274 - DNA, 315 bp, Homo sapiens
atggcgaggttccaacagcatgagtagctgccacctgatgcctgatggagcagaggcctgaggaaaagcaggtggcatatttaactctttcatcaatcttaagttaatttttgtataaagcagatggcactagtccatgcctcatggctcatatggcactgcgggccacagaagggcgagtacccagggtggtaatcttgcctgctttctgcacttgaacataaagtgctcctcaagatggcctgtggtctgcctattggccccaccttagggtagaagaactgatrtaccacttctggcacagagtgatattgg

SEQ ID NO: 505275 - DNA, 546 bp, Homo sapiens
tgcagaatggtttacccttagttcactatcatttattagataatgtatcttctctctctgattaaatatcctacctttattttatatcctaaattcttagaaacttgggtcttttggggggttttctgttatatgctgctattaatccatgtgatcatttttctgattytttacagctctacagaaaaaaagagaatcctttttattatccagtcatttttttccttaacatcaccaccttcagttactgtcaacattttgctatatttgtttcatatgggtccacactgcctaccatcccaccaccacttttcttgctgaggattttaaaattagggaggtggacagcatttcttacataaccacaatactactatcatagccaacaaaattaataatttctaaatgtcatttaaaattcagtctatattcagattttccagactgtttcaaaaatgcctttgtatactttgttcacattaaaacccaaataatagtttactaattctatttgcttatgcctgttaattcttgttttaatttaaa

SEQ ID NO: 505276 - DNA, 636 bp, Homo sapiens
ctgcaatgcaatttcaaggaatgttcagacaagccaatggggaatcttcaagccaaagccatcttttgaggggccccatatctcacagsagcggtctgcattggtagccccactatgtttgatcattggccatgagcagccctgtgggaatatgatggcgaaaagaacagtagttggggttgttaatcaattatgctctcacagcatggccaccacacctacattagttcattaaatcttcacaaaaatcctatgaggtcaggactattatcattctcgttttaaagtaaggaaactgagacctagagagattaagtgactttgttaccatcactcaggtagtaatgggatagagccagggtccatcctctgaactgtcatgtgactttcaaatcggcattggttgagtgtatgaataagtaagcatactatggtgttgctgtgagaaggtgaaaatctgagatgacaataattaatgccactctgtttttgttggactcagaaattgacaatcttttctgtagttctggaagattccatgtctcataggaatggcctgcattgcacacaagttctttttctatctgtgggccaaggaatagaactgatttttttttccagatgactactatttat

SEQ ID NO: 505277 - DNA, 633 bp, Homo sapiens
caatgcaatttcaaggaatgttcagacaagccaatggggaatcttcaagccaaagccatcttttgaggggccccatatctcacagcagcggtctgcattggtagccccactatgtttgatcattggccatgagcagccctgtgggaatatgatggcgaaaagaacagtagttggggttgttaatcaattatgctctcacagcatggccaccacacctacattagttcattaaatcttcacaaaaatcctatgaggtcaggactattatcattctcgttttaaagtaaggaaactgagacctagagagattaagtgactttgttaccatcactcaggtagtaatgggatagagccagggtccatcctctgaactgtcatgtgactttcaaatcggcattggttgagtgtatgaataagtaagcatactatggtgttgctgtgagaaggtgaaaatctgagatgacaataattaatgccactctgtttttgttggacycagaaattgacaatcttttctgtagttctggaagattccatgtctcataggaatggcctgcattgcacacaagttctttttctatctgtgggccaaggaatagaactgatttttttttccagatgactactatttat

SEQ ID NO: 505278 - DNA, 633 bp, Homo sapiens
caatgcaatttcaaggaatgttcagacaagccaatggggaatcttcaagccaaagccatcttttgaggggccccatatctcacagcagcggtctgcattggtagccccactatgtttgatcattggccatgagcagccctgtgggaatatgatggcgaaaagaacagtagttggggttgttaatcaattatgctctcacagcatggccaccacacctacattagttcattaaatcttcacaaaaatcctatgaggtcaggactattatcattctcgttttaaagtaaggaaactgagacctagagagattaagtgactttgttaccatcactcaggtagtaatgggatagagccagggtccatcctctgaactgtcatgtgactttcaaatcggcattggttgagtgtatgaataagtaagcatactatggtgttgctgtgagaaggtgaaaatctgagatgacaataattaatgccactctgtttttgttggactcagaaattgacaatcttttctgtagttctggaagattccatgtctcataggaatggcctgcattgcacacaagttctttytctatctgtgggccaaggaatagaactgatttttttttccagatgactactatttat

SEQ ID NO: 505279 - DNA, 508 bp, Homo sapiens
ttaaaaagtgaaaaatatactatttctataaacccatcaaataacaataactaagaggggaaaacaaacagtattaactggatatttattattgtgatgctatccgtaactacctgggatattatttttaatgactatatgtacatgttttaggtttatattaatatgtgtatcttatgtttacatgcatgattatatgtttgatataagtatgtgtatatatacacacacatacagaagacaatgtataattcaatgagttttgaatatattacctggcaacagtgggtgtctgttttgagatgtgacagaatttctcaaatttaggacctgggaaacttcagaagtcataattagagctaaaaatttttgcaagtcttagtgattctcwttattacaatagctaaaggctgggattacagaggtcgctggttttgagaagctaagtcagagaactttagtgcaggatccagatgacatagttaggcaataacaatgatgaaattag

SEQ ID NO: 505280 - DNA, 598 bp, Homo sapiens
tgcctatttttctaacatcattctactcatgctgccacaatctgaataattatgctcttcgcatatgtatcagctccaaaaagggttggtgtgtagatctagaagaagcaccacttcataatgtgtttgataaattatttaaagtatgtctaaatcaccacagtgttatggtattgatacaaagcttatttattttactctgtagtttgtagamtataacctaattacagaaacctaaaaatcttgaacaatcattgttctttatacaaggagatattgctgctcagtagatgctacataaacaagccaaataaggtgtctgaggagttctatcgttggctttctgtgtaatcccaggtgacttacttaacctatctctgttcctcatttgctgattagcaaagtgaagattaattaggctttcctaatttgaggttattttgatacggatgatgaccaaatactttttcaagatgaaggcagaaggtaatgctgtagttttttaattcccaatttcaccttaatttaaattaggtctagtttgtcatatgcaaagatgggcatgaatttcaaaagacttttaatgattgtgttgtgg

SEQ ID NO: 505281 - DNA, 598 bp, Homo sapiens
tgcctatttttctaacatcattctactcatgctgccacaatctgaataattatgctcttcgcatatgtatcagctccaaaaagggttggtgtgtagatctagaagaagcaccacttcataatgtgtttgataaattatttaaagtatgtctaaatcaccacagtgttatggtattgatacaaagcttatttattttactctgtagtttgtagaatataacctaattacagaaacctaaaaatcttgaacaatcattgttctttatacaaggagatattgctgctcagtagatgctacataaacaagccaaataagrtgtctgaggagttctatcgttggctttctgtgtaatcccaggtgacttacttaacctatctctgttcctcatttgctgattagcaaagtgaagattaattaggctttcctaatttgaggttattttgatacggatgatgaccaaatactttttcaagatgaaggcagaaggtaatgctgtagttttttaattcccaatttcaccttaatttaaattaggtctagtttgtcatatgcaaagatgggcatgaatttcaaaagacttttaatgattgtgttgtgg

SEQ ID NO: 505282 - DNA, 495 bp, Homo sapiens
tagcttatgggagctgattgcaagcgtctcttctcagctctactttctgtkaccaacaacatcaagttggtagcttgaaatcagctttggggaagtattcataccacagaattggcaaatgctactactcaaggcactttttcctttcactgagctcacatacattaggtaaaagtattttatattaaaaaattgttttgtcataaactcacgaagtgtttttctcttttaaaaattttccattgaaaaagcttaggctggatgtggtggctcatgcctgtaatcccagaactttaggaggccgaggagggcggatcacctgaggtggggagttcgagaccagcctgaccaacatggagaaacccccatctctactaaaaaaaaaaaaaaattagccggccgtgatggcgcatgtctgtaatcccagctactcgggattgcttgaacccgggaggcggaggttgctgtgagtcgagatcgtgccattgcactcca

SEQ ID NO: 505283 - DNA, 495 bp, Homo sapiens
tagcttatgggagctgattgcaagcgtctcttctcagctctactttctgtgaccaacaacatcaagttggtagcttgaaatcagctttggggaagtattcataccacagaattggcaaatgctactactcaargcactttttcctttcactgagctcacatacattaggtaaaagtattttatattaaaaaattgttttgtcataaactcacgaagtgtttttctcttttaaaaattttccattgaaaaagcttaggctggatgtggtggctcatgcctgtaatcccagaactttaggaggccgaggagggcggatcacctgaggtggggagttcgagaccagcctgaccaacatggagaaacccccatctctactaaaaaaaaaaaaaaattagccggccgtgatggcgcatgtctgtaatcccagctactcgggattgcttgaacccgggaggcggaggttgctgtgagtcgagatcgtgccattgcactcca

SEQ ID NO: 505284 - DNA, 614 bp, Homo sapiens
gtaagcacactgaggtactgggagggtggtgcacccagagagggcactgaagctttgactgtgtggctccccaccttatcctgggcatctcttccatttgggcattcttgagttgtgttctttacaataaacagtaaaagtaagtgaaatgttttcttgagttctgtgatttcgtctaacaaatcattgaacgtaaggaaggggtcgtgggagcctccagtttgtagccaagccagacagaaatcatgggtaacctggggacccattatttgcaactggcctctaaaatggggcacagtcttatgggactgaacccttaacctgtggcrgggggtctgccaccatcacagggttgttagcatcagaattaaattatagaacagccagttagtatctgcagggatgtaaaaaattccttggtttggaaaacccacacatttggtgtcagaagtgttgtgagtataggaaaaacagtttgttttctttttttaactattaattgaattcacttaatgaatatgatctatttacttgcctatttttttgtgaatttggattttttgtaaattatacttttctactacattatattatctaaaggtttacattcattg

SEQ ID NO: 505285 - DNA, 529 bp, Homo sapiens
attttttgtttgtttgtttgcttctggaaaaacactccaaaatcggtccctaattcaaagaaaaaggacaagatggaagcttcactgttagaatatttttctatgtatcctattaattgtgacatttgcattcactccgaggacaatgaaacaatggcatttgtataagcctgtttttaaattttgtttattactttttatttggaaatctcaaatacaaaatttgaaagagtggtataaagcactcacatattttttactccgtttcacctattagcgttstatctcttttgccatttgttctttttctctatctgtgcacatattactgtttttctgaatcattcaagagtaagttgcacacattgtagctctttccccctaaatatttcagtatgtgtgttaatctgttggaaacttccaacctatatttgctaatttttcctttcctaccaatatgcaatctacagggagacattaagccgtgcaaatatcctgctcttcagcaaattttcctcctttaggttta

SEQ ID NO: 505286 - DNA, 572 bp, Homo sapiens
ctgccataggaaatttcagccactggaagtgactcaataatggacccttgggccataggtaaagtccttgatgcattttgacagaccataagagacacagtttttgtaaaggctgtgaggacttgagtttctcataagtaggtggaggatataggagagacagagaggattttggtgtttttttatttgtggaaatttcaaagcaggtaaaaattattaatgttaatttaccttttgaaccgcaagattattagaaaacacagattacattactaatgagaatgagcaacttgattgtatagatgttttctcttatctaaatcttgcctattttctaattatctaactgtaagttgtgattcttcattttctgatacattacttctagcaaagtagaattcttaagctgaagctttttaaaatctttccttgacaaaattcttgtgaactttctaaagcctaacagcataatacaacatcaaatgtcgcatgcaaagtatgtcattcgaaargaagggactgtatgtaatcccttctaaaatgtattgctcagattcaactacagtcagaaa

SEQ ID NO: 505287 - DNA, 573 bp, Homo sapiens
cagaatccagaggataagaaatccatgatgtagcagcatgctgggacataaagcaggatgggaatgggtaaaaagtgggtctagaaggattaaatagaaaataatccacacaatcactacacctgaaaatcgtaaccatgtgaaacaacagggcaggcacaccaggacagatctttcagtccaatttgagctctagaatatggcattccaraagtgggatgctacaaatagtctcattgagagtcaacttgcacaatgtatcgtcctacccttacatcaatttctgaaacaacttctctttgcacttcccctatagttacatgcataataaattctgacaactcttatgaagtcatggaataactttcttcttatgtttcctatcaatgtcattagccctttatcttgtttgagtttccatcagcaatgttttcaagtcccaagatcattcatgtatccacaagcaatgatacgccagatttggacaaataatactgaatactatcttattttcactgccatgatcaaggcagtgtggattgctgccaagtccaagagaagtgaggtcagcag

SEQ ID NO: 505288 - DNA, 597 bp, Homo sapiens
atctcactcttccatcttctgctccagaatccagaggataagaaatccatgatgtagcagcatgctgggacataaagcaggatgggaatgggtaaaaagtgggtctagaaggattaaatagaaaataatccacacaatcactacacctgaaaatcgtaaccatgtgaaacaacagggcaggcacaccaggacagatctttcagtccaatttgagctctagaatatggcattccagaagtgggatgctacaaatagtctcattgagagtcaacttgcacaatgtatygtcctacccttacatcaatttctgaaacaacttctctttgcacttcccctatagttacatgcataataaattctgacaactcttatgaagtcatggaataactttcttcttatgtttcctatcaatgtcattagccctttatcttgtttgagtttccatcagcaatgttttcaagtcccaagatcattcatgtatccacaagcaatgatacgccagatttggacaaataatactgaatactatcttattttcactgccatgatcaaggcagtgtggattgctgccaagtccaagagaagtgaggtcagcag

SEQ ID NO: 505289 - DNA, 597 bp, Homo sapiens
atctcactcttccatcttctgctccagaatccagaggataagaaatccatgatgtagcagcatgctgggacataaagcaggatgggaatgggtaaaaagtgggtctagaaggattaaatagaaaataatccacacaatcactacacctgaaaatcgtaaccatgtgaaacaacagggcaggcacaccaggacagatctttcagtccaatttgagctctagaatatggcattccagaagtgggatgctacaaatagtctcattgagagtcaacttgcacaatgtatcgtcctacccttacatcaatttctgaaacaacttctctttgcacttcccctrtagttacatgcataataaattctgacaactcttatgaagtcatggaataactttcttcttatgtttcctatcaatgtcattagccctttatcttgtttgagtttccatcagcaatgttttcaagtcccaagatcattcatgtatccacaagcaatgatacgccagatttggacaaataatactgaatactatcttattttcactgccatgatcaaggcagtgtggattgctgccaagtccaagagaagtgaggtcagcag

SEQ ID NO: 505290 - DNA, 378 bp, Homo sapiens
tggcagcacagggctgggggtagggcaaggggcagggctgctggcaatgtcaacaccaggggccgggtgcatgcaggcgcagggctgatggccttcattcacagtccgtgccactggcaatggtggtatggggtagaaagggggtgcagagcygctccacacttgatagaccaaggcaagtatagattgaactatacaactaatggtagcagatcaataacaatttcatgcataaaactttgaaagcattattgtccacatcaattgtatagttgactatgtgtttctgggacaattggcatatcttatgtaacacatatgtatggaatcacttttctaagcagtgcatatattaggcaagtgagtcaactactctgc

SEQ ID NO: 505291 - DNA, 507 bp, Homo sapiens
taggtgtgacagagactgctagttgtctcccagtatcatttccccttttctttcccgatagtggaagctctgaatcttagctggcgtatgaccactcagaacaaaggctacatttcacagcctctcttgcagttaagcctggccatatgactgagttttagacagtgggatatgagtggaagtggtatgtgcaattttgaggagtgttttccaagcgaggggcatgctcttctctttcttctttcttgtagtaagaatgggacaccagggccagagcagaaagctggagggagcctggsacccctgggatatgtaaaacatctattcctgtcttggattggaccacgggacatttcacatgaaacaataaccactgtgtgactaagccactgtttatttgttgttgttgtatgaagctggacctaatgctaaattacatactaagtattttttttaaatctcttttattgatattttaaatgaagtatttttcccctttatatcttc

SEQ ID NO: 505292 - DNA, 507 bp, Homo sapiens
taggtgtgacagagactgctagttgtctcccagtatcatttccccttttctttcccgatagtggaagctctgaatcttagctggcgtatgaccactcagaacaaaggctacatttcacagcctctcttgcagttaagcctggccatatgactgagttttagacagtgggatatgagtggaagtggtatgtgcaattttgaggagtgttttccaagcgaggggcatgctcttctctttcttctttcttgtagtaagaatgggacaccagggccagagcagaaagctggagggagcctggcrcccctgggatatgtaaaacatctattcctgtcttggattggaccacgggacatttcacatgaaacaataaccactgtgtgactaagccactgtttatttgttgttgttgtatgaagctggacctaatgctaaattacatactaagtattttttttaaatctcttttattgatattttaaatgaagtatttttcccctttatatcttc

SEQ ID NO: 505293 - DNA, 559 bp, Homo sapiens
tactgtgttcttgggaatttccgcatagaggctttgagcccaagattgagctattcctgccctttaactttcttttccccctccagcatacaatccccaaaattctttcatttaaatgacatttgtgaatatctctgtgctaaaccctggaaatactaatgcgaataaggcactctctgcactcaagaagttcaccctatggtggaagagagygactttaaaggaataatgatgtcagcataataagcacaataaagtggtgaaataatttactatgcccaaaggcaggggcatcacagtgagaagggacgacttacttgttgattcataaatttaggtgaggacctgagcatggatagttccactctttctttttcttatttttcccttcaagcgaaaaaggagtaaaaaggaaaactctccaaaatgtcttagctggtggtctttgagcatggtgactagatgcacctctaagtgttttgtttccttgtacctggatccagcctgagtggaagtcctcttccattacctgattttcaacttcagtctcgcccctgaa

SEQ ID NO: 505294 - DNA, 549 bp, Homo sapiens
tcctgtgatttctactgttcacattttttattttcctgtgggtcctaatgaaagccttctctctttgtgcctttcaggttttataccactcatcagctctgtacttcttgtcttctccatttggttcaggaagctgagaytaagtcataagccaggctgtgatctatgtggtaacctgaagctctgaaaacttataatgaaatcctgctcttcagctgtatttctaagagtgaaagttatggggaaaaaaagaaattcaatgaaaaataatgggacaattgctaaattatgaatcacaatgtaataaccaatcatgatgcaaaattattactcacagtctggcctttagtgctgactggcaattccactatatctcatagtccatgtcttctaggtgacaatctggtacttcttgctctacctgcaaacctctaaaatcaccctcttaatctcaattgacaccctcttctgatcaactatagctgcatagcaaaccaccagagagtatgagatggagcttaaaacaaattacactctctagtaacaaat

SEQ ID NO: 505295 - DNA, 581 bp, Homo sapiens
ctctaagcacacttacagagtaggccttgaccttagccgcccatccttgcctgatgtgcatagtccagtcttagcaagagttctccttagtttagaaagaatccctgacctctgataccggatgactctccatatctgatcaggtttctcatctcccatctttgttttctgtgtctttggcctgcccttcagcaagaatccaattaagttggtttagcaagaattcctctatctttgatgcctcctcttagcaactttccaaccaccgaccttctcactctcctctttagctataartctccagctatctttgctacagtcaaagttgacccccatttctttccccgatagcagtagtcttgaataaacccttctttactgttttaattactgtctgaataaattttgtctttaacattgaccctatttatatttctagtgatgtgttgaaaaaggacctcaaaatgcctgcctggcaggatttcagaattgtcatttgcaaatgtgcaaatcccattttccgcattcttatttgttttttgttgttgtttgtttgttttgttttgagacagagtctcacc

SEQ ID NO: 505296 - DNA, 584 bp, Homo sapiens
atatgtcttcatatcagtaccaagttggagagttgtaattttcatcttacaactttcatgttaaaactatactaaacagtatgaaatctagaatccaatgtttatgcctaagagttttttccattttatacttttcttttgctttccattattatccacttagactgtatgcattatctctatcytgtgtgatacatttctgatttctataaggaaatgccaaatatattggcaaatgtcattatttaaacagtctttatgataaattcaactcaacaacctaatttctcatttgttagtatgaccaagattacaagtaacaaccttgcagtttgtccaaccatgtgaatgctttttaaaaattattgattagatgaggcaatgttttattgttttgataaacaacatagaaaaactgtaaaccataataaaccataaatttgtttataagttcaatgaacagctaagagaatatatgtataatgtagattacatatatttttgaaaatagtataccaattataatcaatttgattttccttaataataatgtaatataatagatatactgaaataaacatgca

SEQ ID NO: 505297 - DNA, 582 bp, Homo sapiens
ctgtaatcccaactactggggaggctgaggcacaagaatcacttggacctggagtgggaagtttggaaattgaactgaaatagtgccacttcactccarcctgggcaacagagtgagactctgtctcaatacaataaaataaaaccatcagatcttgtgagactcattcactatcaggagaacagcacaggaaagacctgcccccatgattcaatcatctcccactgggttgcttccacaacatgtgggaattatgggagctacaagatgagatttgggtggggacacagagccaaaccatatcacatagtcatggggctgtggaggcccagggtggctgccttcaacccccaccggggctgctagacaccctcctccaggatttgaactgatgcccagcacgatcgggggcaggacctgggtgcagcttcccccactcttgtgcacgtccttagatagtatgtgaagcaaggcgctagccacaggctccaagagttgagagtgctggggtgcctcatcaggaactgtggtgcccctgcagctcctttctaggaaggcagagaaggcactcatgtcagcacc

SEQ ID NO: 505298 - DNA, 582 bp, Homo sapiens
ctgtaatcccaactactggggaggctgaggcacaagaatcacttggacctggagtgggaagtttggaaattgaactgaaatagtgccacttcactccaacctgggcracagagtgagactctgtctcaatacaataaaataaaaccatcagatcttgtgagactcattcactatcaggagaacagcacaggaaagacctgcccccatgattcaatcatctcccactgggttgcttccacaacatgtgggaattatgggagctacaagatgagatttgggtggggacacagagccaaaccatatcacatagtcatggggctgtggaggcccagggtggctgccttcaacccccaccggggctgctagacaccctcctccaggatttgaactgatgcccagcacgatcgggggcaggacctgggtgcagcttcccccactcttgtgcacgtccttagatagtatgtgaagcaaggcgctagccacaggctccaagagttgagagtgctggggtgcctcatcaggaactgtggtgcccctgcagctcctttctaggaaggcagagaaggcactcatgtcagcacc

SEQ ID NO: 505299 - DNA, 584 bp, Homo sapiens
ctgtaatcccaactactggggaggctgaggcacaagaatcacttggacctggagtgggaagtttggaaattgaactgaaatagtgccacttcactccaacctgggcaacagagtgagactctgtctcaatacaataaaataaaaccatcagatcttgtgagactcattcactatcaggagaacagcacaggaaagacmtgcccccatgattcaatcatctcccactgggttgcttccacaacatgtgggaattatgggagctacaagatgagatttgggtggggacacagagccaaaccatatcacatagtcatggggctgtggaggcccagggtggctgccttcaacccccaccggggctgctagacaccctcctccaggatttgaactgatgcccagcacgatcgggggcaggacctgggtgcagcttcccccactcttgtgcacgtccttagatagtatgtgaagcaaggcgctagccacaggctccaagagttgagagtgctggggtgcctcatcaggaactgtggtgcccctgcagctcctttctaggaaggcagagaaggcactcatgtcagcacctt

SEQ ID NO: 505300 - DNA, 584 bp, Homo sapiens
ctgtaatcccaactactggggaggctgaggcacaagaatcacttggacctggagtgggaagtttggaaattgaactgaaatagtgccacttcactccaacctgggcaacagagtgagactctgtctcaatacaataaaataaaaccatcagatcttgtgagactcattcactatcaggagaacagcacaggaaagacctgcccccatgattcaatcatctcccactgggttgcttccacaacatgtgggaattatgggagctacaagatgagatttgggtggggacacagagccaaaccatatcacatagtcayggggctgtggaggcccagggtggctgccttcaacccccaccggggctgctagacaccctcctccaggatttgaactgatgcccagcacgatcgggggcaggacctgggtgcagcttcccccactcttgtgcacgtccttagatagtatgtgaagcaaggcgctagccacaggctccaagagttgagagtgctggggtgcctcatcaggaactgtggtgcccctgcagctcctttctaggaaggcagagaaggcactcatgtcagcacctt

SEQ ID NO: 505301 - DNA, 299 bp, Homo sapiens
tgcccctccccatcctgagacgctggatgcccacgttttctttttgccgccatttcggagtctgctggggaggagggcgaatgccgtggccccccttgtcaggcggccctgcttatctctgcaagttgtctctggatgtctcacaggagccttcacaactccaggccctggaggttggccgagcccttgaaacttccccagcagccctggggcctcattgctgggtttcagcctgccgcactgttccctggggctctggcrctgagaggcccctccctctgaggggctcagttgcttgg

SEQ ID NO: 505302 - DNA, 594 bp, Homo sapiens
tgtaacaatggctgctccatgagtatgggtcctagagggaagacagtgataattcagagtagaacctcctgcctctcaatgatgaacatgtgtataggtgaaaaataaaccttcattatgttaagtcactgagatgtcggggactgtttgttactgcagcaaacccagccagtcctgacaaatacaggctctcagaattgctatgtgccaggaactcttaagtacttaacagtgttaactcatttaattcttacaactttatgaagtagatgctactatcatccttcctcactgtatagatgagaaaactgaggaacagaraggttaagttgctcattgaagtgacagtaagtgatggtgctggtatttaaacccaggcagtctggcttcagagccatatcttaactacaatgctgtactgcctcttgagttttatgtagcaggtgcttccacgctaaatgactttaaactactgtgcttcagttatctaatttctgctttcaatatagttaacaattttgattctttattcgtgttggttgtcactttttgccattgtcatcatacctgctgctagcaataactccttctttt

SEQ ID NO: 505303 - DNA, 594 bp, Homo sapiens
tgtaacaatggctgctccatgagtatgggtcctagagggaagacagtgataattcagagtagaacctcctgcctctcaatgatgaacatgtgtataggtgaaaaataaaccttcattatgttaagtcactgagatgtcggggactgtttgttactgcagcaaacccagccagtcctgacaaatacaggctctcagaattgctatgtgccaggaactcttaagtacttaacagtgttaactcatttaattcttacaactttatgaagtagatgctactatcatccttcctcactgtatagatgagaaaactgaggaacagaaaggttaagttgctcattgaagtgacagtaagtgatggtgctggtatttaaacccaggcagtctggcttcagagccatatcttaactacaatgctgtactgcctcttgagttttatgtagcaggtgcttccacgctaaatgactttaaactactgtgcttcagttatctaatttctgctttcaatrtagttaacaattttgattctttattcgtgttggttgtcactttttgccattgtcatcatacctgctgctagcaataactccttctttt

SEQ ID NO: 505304 - DNA, 612 bp, Homo sapiens
ggcaaaaaatgagagagcttgtgtaggggaacgcctctttttaaaaccatcagatcttgtgagacttttcactatcatgagaacagcatggggaagacttgcccccaygattcaattccctcccaccaagtccctcccacaacacgtgagaattcaagatgagatttgggtggggacaaagccaaaccatatctatctatctatctatctatctatctatctatctatctatctatctataatctatctatctatctataatctatctatctatctctctatctatctataatctatctatctatctatctagttttagaagggatattgcagggcaaggataggagaaatatgtgtcctgtcagtggtggagaaattctacaggaggggaggatttgatagtttcaaaggttggcacctcattttgccaaaatcaacttagatgggtctgcatttgggtccgttttctttctaggatgttgatattaatatcaccctgtaggtacattccatacactccaaggccttttaatctttttagtattctatgcattcaaaggaaaagagagagggagaaaagagggaaagaaaaggtaagagatacagagggta

SEQ ID NO: 505305 - DNA, 607 bp, Homo sapiens
gtctcctggcactgggaatttagcagcctcctgttcattcgtaattttatttgctttggccaagacatcagaacagaggtgttagatgtggtccctgtttaaatgtacctcacatgggagactgattaggaaatcggagcaattcgtggttatgaatattcaaggtggaggaaaaaacaaacagggtttgtggggcatgtaactgaagacaaataaatactcaaccagagaatcaggaatggagcccagggatcatgattgccttagccataagctatctggaagatcagggtggaggacttgtctgccaygtaaaatgctgtgttcccagcacctagcacaatgctgtcacccagtgggtgctacgtaaagatttatcaaataaacaaaagaattggcccacaggttagaaacccctgccctgcaggtgtgtttgtttatcataaatgaggtttttaaaaagtttttaagtgctgtggtatgcagaattctaaatctgaaccccccaccccccaacccacaaattcccatcccctggatatttaatgagacatgagtctacacactgctgggaagggactttgctgatgggattaaagtggcaagt

SEQ ID NO: 505306 - DNA, 310 bp, Homo sapiens
ggaatggcaagatcaaaacttctcactttcaaatttatgaaaaatattgttttcagaacgagtgactttgggatcagaaagcaaccattctaattgatggttccacgactacacgggctcacagtcgcaagagcaaaagtaaatcatcacaaaggtgcttcttgataattctagagaatggagaattactgtaacatctttctgattttaggagaggtagcagttccctttttagcctaaacgctatttytttttaaagctcagccaagagactccattataattttcaaatgtgtgtaacttaaattct

SEQ ID NO: 505307 - DNA, 520 bp, Homo sapiens
acatttaatgtgattgtcttcttatatgtttttatcagagaaataaaactatcgccttcaagaaacacaagttaaatacaaagatgcaaacaggttaaaataaaagaatggaataatatataccatgcttacgctagtcaagagaaagctagagtagaaatactaatatcaggcaaagcatatttcagagttaaacacaacatttttccactatttgcagtcaaaagtatcgttaacactctctttactctgctcaaagttacagagttcttttgtataaacattagaacacttatcacagcctgcctataatggagaataattccatgttgtatactatacaacactcttactaaagtccattagacagaaatatgtagcatttragacatcttccaattataaaactctatgcaaacaaaaattaacaaagcagatctgagactattatattatcctgtgaaggagggtctgtctgtctgcacagttggtcctaggctggcttctgaggacttgaatt

SEQ ID NO: 505308 - DNA, 369 bp, Homo sapiens
cttttctattgagcacctcgacctacagattttccaatttcaagttcattcacatttcatctctggcttctacattttagttaaaaagcatttctctatttgctattgtccactaaggaaaatgcctatttaaaaatagatttcttttttaaagcatcttgattcacacatttcaaagcccttcagaaaacaggatttctcaaaagccatgtgattctaaaacatgctacagatttcagatggagaaagattcaagatattattctacatgaacttttcaatgaactgatcgcatctgtctaggaataaggagagttgtctyatgttacttcaaaaaagattccaaatgaaaaaaaaaatctgggcttg

SEQ ID NO: 505309 - DNA, 369 bp, Homo sapiens
cttttctattgagcacctcgacctacagattttccaatttcaagttcattcacatttcatctctggcttctacattttagttaaaaagcatttctctatttgctattgtccactaaggaaaatgcctatttaaaaatagatttcttttttaaagcatcttgattcacacatttcaaagcccttcagaaaacaggatttctcaaaagccatgtgattctaaaacatgctacagatttcagatggagaaagattcaagatattattctacatgaacttttcaatgaactgatcgcatctgtctaggaataaggagagttgtctcaygttacttcaaaaaagattccaaatgaaaaaaaaaatctgggcttg

SEQ ID NO: 505310 - DNA, 571 bp, Homo sapiens
gaaaacagtgttcctgagctctgagtgcacctcccagctgacaagttgcatttgtgaagtgtttcggcctctgctggcgttaagctcagctgaaggcagctgggagagaaagggatgtgacagcagccagctgcacagctccrgctgcgacctgctggcccagacacctgcagcatggtgaggtctagtaacagactagactttctcctcccttcctagtctcccccttcaccaaatgcacttgcaccctggaccaacacctgcaagtggcccagcttctcagacttaggctgctcagcctacacagtcccttcccccaacctctttccccttcagtgctttctgccgctggagaaggcaagaccatctgtccaggtgcctaaacctgaaactgaagagccatcctcaccttcggtctctcctcatcttctaggagctggatcactcctctggccatggacatccctgtccagaattgtgcctcctccaccctgtttgaaggtggcactctcctggcctccaggctctgccctgaccctctgtcttcccagaggcagtgatctttcctgaa

SEQ ID NO: 505311 - DNA, 428 bp, Homo sapiens
ctgcacagctccagctgcgacctgctggcccagacacctgcagcatggtgaggtctagtaacagactrgactttctcctcccttcctagtctcccccttcaccaaatgcacttgcaccctggaccaacacctgcaagtggcccagcttctcagacttaggctgctcagcctacacagtcccttcccccaacctctttccccttcagtgctttctgccgctggagaaggcaagaccatctgtccaggtgcctaaacctgaaactgaagagccatcctcaccttcggtctctcctcatcttctaggagctggatcactcctctggccatggacatccctgtccagaattgtgcctcctccaccctgtttgaaggtggcactctcctggcctccaggctctgccctgaccctctgtcttcccagaggcagt

SEQ ID NO: 505312 - DNA, 243 bp, Homo sapiens
cacagctccagctgcgacctgctggcccagacacctgcagcatggtgaggtctagtaacagactagactttctcctcccttcctagtctcccccttcaccaaatgcacttgcaccctggaccaacacctgcaagtggcccagcttctcagacttaggctgctcagcctacacagtcccttcccccaacctctttccccttcagtgctttctgccrctggagaaggcaagaccatctgtccagg

SEQ ID NO: 505313 - DNA, 386 bp, Homo sapiens
ctgcacagctccagctgcgacctgctggcccagacacctgcagcatggtgaggtctagtaacagactagactttctcctcccttcctagtctcccccttcaccaaatgcacttgcaccctggaccaacacctgcaagtggcccagcttctcagacttaggctgctcagcctacacagtcccttcccccaacctctttccccttcagtgctttctgccgctggagaaggcaagaccatctgtccaggtgmctaaacctgaaactgaagagccatcctcaccttcggtctctcctcatcttctaggagctggatcactcctctggccatggacatccctgtccagaattgtgcctcctccaccctgtttgaaggtggcactctcctgg

SEQ ID NO: 505314 - DNA, 428 bp, Homo sapiens
ctgcacagctccagctgcgacctgctggcccagacacctgcagcatggtgaggtctagtaacagactagactttctcctcccttcctagtctcccccttcaccaaatgcacttgcaccctggaccaacacctgcaagtggcccagcttctcagacttaggctgctcagcctacacagtcccttcccccaacctctttccccttcagtgctttctgccgctggagaaggcaagaccatctgtccaggtgcctaaacctgaaactgaagagccatcctcaccttcggtctctcctcatcttctaggagctggatcactcctctggccatggacatccctgtccagaattgtgcctcctccaccctgtttgaaggtggcaytctcctggcctccaggctctgccctgaccctctgtcttcccagaggcagt

SEQ ID NO: 505315 - DNA, 668 bp, Homo sapiens
tactggttctgtagtagattctctcctgggtatttccttagcatttggctagaacattggtgcaaaattgatgtggtataatattgtaaactttgggcaatagtgtaacctctcccaacaatccttttttctatccaacattaattcttatcattctatccatcttcataggaaattttttaagtaacaatgttttagtcttctctaaattacagcatatttttccctgccctcaagagtccccatcttataaatgtttgcctttcggttagtccagccaaattttatttttttgcctgccacctgcattctaatagtccttttgcctcttakgcacctactcttgaccattcatttctcctcttatctctacagtgttccaagataattatgcaaagtatattcagatcactccttcagcaggctactgcattctttcttcaaattgctcaaaatacatttctcccaaaaagtattttctttacttgttgagaataaccaggaattgattcatattaggcattttattcatctttactatgtaatcagcaatagaaatctgataggcatgatccctgacttcatcttctacgcaatattctatgtatatataccagcttgcctttagccttattactgagttttaattttgatactgtgatagttaa

SEQ ID NO: 505316 - DNA, 496 bp, Homo sapiens
cccctcacctctgtcaaatcatcttttggacacagtgtctctttcaaaatagggggcaagaggtcatacttctgtgttaagcattggtccctattaagtacacatatattgcaaattcattcaaaactgctttagagcatacatatggcaatctggcagatcaaggaagctttccagacttgtagtccatatgtaataagaggacataaaacaaaatgtaaaaytgaagttcaaataaactttgtagtggaagtagtactttctgttcacagctaccattctcatcatcagttatatcatcaaaagtccctgactgcatgacaccaagctggatgcttcatgtgactcaggactgatatcagcaatgccaggtggtagaaataacaggtagttcaccgagctgaccagaggcacacctttaggaaaattgcttgaactttataagcctcagttttcttatctataaaattatagggaaaagtccatgctacaaggt

SEQ ID NO: 505317 - DNA, 621 bp, Homo sapiens
acatgtgcatactaacccatgtatatgcttatattcataagtatttctatatgtaagcgtaggcatgtatattaagctaaacatgagattacactgattgctccaactctagtcaattttcaaaaagtctcactgygctaaaagagcttcactagactaaaaatgcctacgtgcatcaccttctctccccgagctcctggaggccagttatctttttactgtttacttttcagaatgttatataattagaatcatacagtatgactctctctactttttaagatgtagtaaataatgacccttaagctcatacttttctaaatatatttccaactacaattttctgaagtacatcttgtcatttatatgcattcagtgtgaagaaatttaaaaagtctaaagcacacttcactgttaagttctttttatttcaaatattgcattttaactttttttatttttatgaatacataataggtgtgtatgtttgtggagtatatgagataattgcatcagggtaaatggggtatccattacctcaagcatttatcatttctttgtgttacaagcaatccaattacactctttaacttattctaaaatgtactatttattttcatt

SEQ ID NO: 505318 - DNA, 621 bp, Homo sapiens
tctgaaaagcaacgaggacttattgcaaagtgaaagtgcaaattttaagctttgtttatttttttttttgcagtggccttttaagtgaattcttatgcctcaattaactttgatatttcctacaggaaatatctatgcaattctaagtttttattaggaagttatatccacttatcattgtttttcaacctcctttctgggctatgaattagctgtaaacatgctgaaaagaatcatctgttgatatgcttctgcmaaaaatatttgttttggctgttacaggaactctgtcaatagagtctatggaaatattggttactttgtgtcctggacaggtggccttttcactgctccctaattcacaccatttcggtagccttctgttagttcagtgttttcaaccttggctacacatcataattgtataaagggctttctaaaagtacggatgtttgactcccttacagattctagttcaattgatcctgagtggtgcccaggcagaggtacttcttcagagatccctaggtgatagtaacatgagctaggtttgagaatcatctgtagtagaacaatctttgcatcagttgagcttggtgtttaattctgcctcactactcc

SEQ ID NO: 505319 - DNA, 621 bp, Homo sapiens
tctgaaaagcaacgaggacttattgcaaagtgaaagtgcaaattttaagctttgtttatttttttttttgcagtggccttttaagtgaattcttatgcctcaattaactttgatatttcctacaggaaatatctatgcaattctaagtttttattaggaagttatatccacttatcattgtttttcaacctcctttctgggctatgaattagctgtaaacatgctgaaaagaatcatctgttgatatgcttctgccaaaaatatttgttttggctgttacaggaactctgtcaatagagtctatggaaatatyggttactttgtgtcctggacaggtggccttttcactgctccctaattcacaccatttcggtagccttctgttagttcagtgttttcaaccttggctacacatcataattgtataaagggctttctaaaagtacggatgtttgactcccttacagattctagttcaattgatcctgagtggtgcccaggcagaggtacttcttcagagatccctaggtgatagtaacatgagctaggtttgagaatcatctgtagtagaacaatctttgcatcagttgagcttggtgtttaattctgcctcactactcc

SEQ ID NO: 505320 - DNA, 621 bp, Homo sapiens
tctgaaaagcaacgaggacttattgcaaagtgaaagtgcaaattttaagctttgtttatttttttttttgcagtggccttttaagtgaattcttatgcctcaattaactttgatatttcctacaggaaatatctatgcaattctaagtttttattaggaagttatatccacttatcattgtttttcaacctcctttctgggctatgaattagctgtaaacatgctgaaaagaatcatctgttgatatgcttctgccaaaaatatttgttttggctgttacaggaactctgtcaatagagtctatggaaatattggttactttgtgtcctggacaggtggccttttcactgctccctaattcacaccatttcggtagccttctgttagttcagtgttttcaaccttggctayacatcataattgtataaagggctttctaaaagtacggatgtttgactcccttacagattctagttcaattgatcctgagtggtgcccaggcagaggtacttcttcagagatccctaggtgatagtaacatgagctaggtttgagaatcatctgtagtagaacaatctttgcatcagttgagcttggtgtttaattctgcctcactactcc

SEQ ID NO: 505321 - DNA, 615 bp, Homo sapiens
caattatgtgaaaaaacaaactttttaaaaagtaaattgaaggtggtttatgtccattcaaacgctttcttaaaacaaacaatgcttgagtgtcttaaagggcaaataaaaccctaagtcagaaattaatttttctttttccaggagagatggatttcataatcgcagatatttcttctttgctttctatgattttcttgctaagtcttagaagctgcagttttaagaaaagcatttgaaatgtgtttgtaacctgaatgtgagaaactggttgtattagtctgttctcatattgctaaaaataaatacctgagactgggtaatttaaaaacaaaagaagcttaactggctcacggttctgcaggctgtacaggaagcatggcagcacctgcttctggggaggcatcggaatccctacaatcatagacgaaggcaaagaaggagtggacacatcatatggccagagcagggggaagagagagtgaggggaggtaccagatatttgtaaatgaccaggtctcatgagaattcactcactatcatgaggacagtaccraggacatggtgctaaaccattcaggagaaacccactcccatgagccaatcacatcccac

SEQ ID NO: 505322 - DNA, 611 bp, Homo sapiens
gcttgcattaactcatggactataataatagaccatgtcaaaaacatgcccaggtagttgctattgtttccatctggatcccagaaccagagktgttgcagcagacccagacttaacctccctaacggtagccatcatcagaaagtgcagcactcaaagagcagagactcagacaagcccagacttcatcacccatatggcaatcaatctgaatacctgaaagcatcagaataaatgatgttataaatcatcagtttggggggtagtttgttgcaaagcaaaaatgtggcattagctgattgctatggcttctcttactgatttttaaaatctaattttatgtttttaagatatatccaggctggggtttttgtgtgtttttatttaaattcatttcttttcattactatatatttaatggtatctatgtgacaaagtttttctaacacatttcctctttggtggacttttttgtttcctttttaatttctttttaaattgaggacacaggtgcttgcatttagggcctactcagatactgcagcaaagatttctcctcttgatctctgtatcttaattacatctgttaacatcttggttaatattcactc

SEQ ID NO: 505323 - DNA, 654 bp, Homo sapiens
ttatgaaataggaaagcaaaaatatttgcccagatataacaagaagatatatggggacacagtgcccacagttctcgctcactgacaatcgccatagctgttttgattctagatgctgatgtaaatttacatctgtcatctggcctaattaaggtctgattggaggactcacacaggatgtgcctattgtgaagtccaaagggaatccacaaaccctactttggctcaaattttttttctagatagacctgccttattaatagaagatggactaactaccattacttttgcaaactcaatcagaaaatttgaaatattttccttaagaagaaaatgttactaagataagaaaagaggatattttaggaaaatattcagcttgggaagaattaagtggttttaatacctttaacatgaatacaaaactawttctattaaataaaaatgaaaaaaagatcataagacactcaacagaaattataagattagaaataaatgaggaacaatacattataatgttaataatgctatggaaaaatgaatgctatggaaaaatgaatccattgtctatacagacattcagaatgcagatgtaaactataaaatttaaaataaaaagagggaagatgacagatacagagaacagctaataaa

SEQ ID NO: 505324 - DNA, 554 bp, Homo sapiens
tttccccgtgaataaactcaaacgtggatggggaaataaatcatttgactatccacaatttttctttgtaaccgtcatcttgttgaaaaaggccattattttttgtgctaacggaagtgccttgctaggtaaaatgtatacactatctcaaatgtatagaaagattcatctttccagtgcatttacttctgttagctaataaattccggcagaagtgctacaaattacattacaggtataaataccagcatgtcagtggtgtgattattaagacacctgacttgagttcacccttcaatgaccttgacattatcttggtccctcttgcctgcatatactgcgccaaatgaaccaccagggatgggccattccttgataaacacatgtcccagagtttctatatttttttcccctayactacatgtttttaaaaatgtttttttaaagctgtcctcttttattttggaaaatatgtccatcagagctatagccagatctggtatcagctctccctgcctgcagccattccactgggcacatgcccattgctatac

SEQ ID NO: 505325 - DNA, 589 bp, Homo sapiens
cctgtacaatgtttaagtgattttccataagatgaagaggtaataaaatagaaggaagtctgtgactttattcactcacttatayatttaccagcctgctataaatattagacccaggtgctggaccagacatggagatgccaaggagaaggagtcatgggttaagatcactcgctttagcaggaatcatttccagtacaagtcccatttctgccacttaccagctatgctaccttgggcaagttcttaatctgttctatgactcagtttatccacttatcaggtgagaataatgatacactctttaggaggctgtcacccaagggttaactgagataatatgtattacttttagtatagtgatttgaccatatattagtcagggtttgcagagaaacagaaccaatagactatgtgtataaatatatatacagagagatttattttaaagaactagataatacaattgtgggagctggctagtccaacatctgcaggatagggtgggaggctggagacccaggaaagagctgatcttgcagcttgagtcgaaggcagtctggtgacagattccctcctcctctgggag

SEQ ID NO: 505326 - DNA, 600 bp, Homo sapiens
ctgtgcgtggcagccattccaaaaacagaataattcacaaggatttgtaaaagatttcaaaactcaaatacaaagaaaaaagagcagaggttgtgatattaacatcactcaagacagactgcagatgacaaggcattgaaaaaaaaacaaaaatgcccctttattagcttaaatggtgcaatttcacaacaaatatataaagctcttaatatctgtggacctccctctgtccttgatatgtaaaatggacaaaaaataaattgcagagtacctaaatagcataattaataaaggaagtctggtttatagatacagaaatacatacatgcatacattcatacacacaccctgaaaatttaaaaaaacgccttcagctcaagtgccaatgaaagtrgataaaaattggacatggttaggcctgtcagggctgtgagcccaagctaaaccatcatatcccctgtgacctgcatgaatacatccagatggcctgaagcaagtgaagaatcacaaaagaagtgaaaatggccggttcctgccttaactgatgacattccaccattgtgatttgtttccgccccacgttaactgagcaattaacct

SEQ ID NO: 505327 - DNA, 605 bp, Homo sapiens
gtaggctgtgcgtggcagccattccaaaaacagaataattcacaaggatttgtaaaagatttcaaaactcaaatacaaagaaaaaagagcagaggttgtgatattaacatcactcaagacagactgcagatgacaaggcattgaaaaaaaaacaaaaatgcccctttattagcttaaatggtgcaatttcacaacaaatatataaagctcttaatatctgtggacctccctctgtccttgatatgtaaaatggacaaaaaataaattgcagagtacctaaatagcataattaataaaggaagtctggtttatagatacagaaatacatacatgcatacattcatacacacaccctgaaaatttaaaaaaacgccttcagctcaagtgccaatgaaagtagataaaaattggacatggttaggcctgtcaggsctgtgagcccaagctaaaccatcatatcccctgtgacctgcatgaatacatccagatggcctgaagcaagtgaagaatcacaaaagaagtgaaaatggccggttcctgccttaactgatgacattccaccattgtgatttgtttccgccccacgttaactgagcaattaacct

SEQ ID NO: 505328 - DNA, 632 bp, Homo sapiens
ctaaactcagtggaaattaaagagagatggtattttgtgtttggatccatgacaaatctaaaaaaactaaaataaaagtagtatatagtcatgatacttctgtgagcagcaggtgatcatctttactactttgactgcatgcatgactgtcataggaataatgtttcatactaaggtgcagatactccacataaaaagagtgattttgaacctgaaacagccctcaagaagacagtttcccaagtgggatgccatagcacagtggagtttgtcaaacaagytaaccccctccgccctcaacaccagagccaagacctctcacctatcaccatggacgccctcctctcagtacaaatgctgccatttcctgacgatgccatgacgcagaagaaaagaagaaaacaaaaccataaagcactgctacagtataacttaagccaaggacattatggtgtcaattttatagaaaaatcgtttagcaaattgtcaaagttgtggacattccaaatatgcaattgattttcctattttccttgtagtaggtatgctgggaagaaaagtctccagaaaggaaatgcttgcttaaaagtgagcacctggtataccgttagtgggaccgtaaaatagcacag

SEQ ID NO: 505329 - DNA, 653 bp, Homo sapiens
taactttttggcaaaactccttggcaaggaaatacrttttcacaaaatacacaaagccatttctgcatagtgaccctctcattgcatgttgagtgtattgaaacatcaagtgaatcaaaatggattaaaatacactcttgattatcacaatttcttggaatgtggaacaatctagaattgaaaccttgcaaatttaggctaatggaagaaaagaactatgaacatgaataaatggacaaaataagtggaatattttaaaggaaatataattttgttaccataacaatatggagaaaatctgattatctcagcagtaaaatagctcctaggacaagattgatttttattggcttaaaacattattaagtttcttggtttgtgtgtatatggtgggaggatattccccaggtaatatgtttaaattacaatagaagagggaaccaataagttactgggggttggggggaggtcagtttattcttgactttaggatttgttttcattatagaggctttcattttaggggacagagtatgggaacaggtagacacatgagaaaagaaactttagagaaacagtccagggatttaactgagggggtttactaaagtttgctgtaggtatggccccacactctcctccctagtgatgca

SEQ ID NO: 505330 - DNA, 498 bp, Homo sapiens
tagttgggtttgctcagcgggagccccagcagcagaggaaagrgagtgaagtcagggtatttcttctctggttcctccctgaggtcacctcgggctggtatgtcactgttcctccctaggtggcttgctccaaccactgtttcttccgggtttcagtgacctctcctatccttcagcccaggcaggaatggcttcacggtcacaatcctagttcctgcactgggctatggtttccttatacctgccacatctttgattattttctttataaataaagcctccttgatttatcctaagagagcacaccatctgttatcccttggcgccctaaccaatacacagagtttcaatagtgtgcccagggtcctgcaactgtgaagcagtagggacagcagtgacttgagaccaggctcccggccctgatgctcgttcctgccccagccccttggcccacccaggaggatcctgcaccttaaaggacaacccacctgtgctcac

SEQ ID NO: 505331 - DNA, 564 bp, Homo sapiens
tgcaagttaagaaaagccttcaaagccctgggttcttgatttcccttttactttcagcattttgccttgaatgaacgacctcaaataacttagatattcaaaaattgatgaatggyacttagcaaggtacaactcaaataaagatgatgagaactaagtcagccaccagtggcctgaaaattcatggcagcagcatgcttcctgtggaggcatctcttcgtgacattttcaaagggttcttcccatccatccactttcccaaaatcctctgcaatttaaggaatatctcccacactggcctgtggtgttaaaccagcaaatcatgttgggtgagcaaaaagaactcaagaatagaagcttactctttaaatatccccctaaatccattcaattgagttggctgggaagcaaatactcacatagattaatgcatttaatcctccaacaactctgtaaggcaacgactattttacccccattccaagataaataaatggaagcacagagagttggaataatttgctcagcagtcacacagccaggaagtggccaagccagaatggg

SEQ ID NO: 505332 - DNA, 601 bp, Homo sapiens
tgctgctgttagcactgaggtcacctacagcagcaaagggagctgcaatcataggctccactccccctttgccatcttttgttaactgccttgtctagacttcacttttaaatactccagatatacagtgccatatgaagtgtgctgcaggtgtcctcactgagaattcagagcccatagtagaccctgaagttctattcaggagcccagacgtggggcagctactatgagcactcttgttattaaaaaagctctgttgaatatcaaaaatggtttgatatcagaaacaccagaaatgagctataattggtgacrttaaaagtattcaaaccatatggtttcttagtccatttcagcttctataacaacctaccttagactgggtaatttataaacaacagaaatttattgctcacagttctagaggctgggaagttcaagatcaagatgctggcagattcagtgtctggcgagggcctgtctggcataatcggtggcttgttgctgcagaaaaggtcaaatagctccctcaagcctcttttatgagagcatccatcccatccatgaaagctccaccctcaggacctcatcacctcccaat

SEQ ID NO: 505333 - DNA, 428 bp, Homo sapiens
ttgcttggtagctcaggtattcaataaataattgttgaatgaataatgaatatcaataagttttgcaaagtgctctagaaaaatgttaactgctgttattagaaacagtgatatagttcactccgaatccctaaaaaaccaactagatcaaaaagctgttctccagtgcagtgactatrtaaaatgccatatcaggagctagcacttagactggcttactacatgcctggccacgttctcaggaataaaatggttatctagtttaactacttgccttgttatcttgtgtaatcctcagagcaataatatgaggtctgttacttccttgtttacaaattctgcagttttgcaaaaaaaggtaaaaagcataaggaagtcaaataacttgctcaagttcacacaactaatagaacacagattaggattga

SEQ ID NO: 505334 - DNA, 428 bp, Homo sapiens
ttgcttggtagctcaggtattcaataaataattgttgaatgaataatgaatatcaataagttttgcaaagtgctctagaaaaatgttaactgctgttattagaaacagtgatatagttcactccgaatccctaaaaaaccaactagatcaaaaagctgttctccagtgcagtgactatatraaatgccatatcaggagctagcacttagactggcttactacatgcctggccacgttctcaggaataaaatggttatctagtttaactacttgccttgttatcttgtgtaatcctcagagcaataatatgaggtctgttacttccttgtttacaaattctgcagttttgcaaaaaaaggtaaaaagcataaggaagtcaaataacttgctcaagttcacacaactaatagaacacagattaggattga

SEQ ID NO: 505335 - DNA, 428 bp, Homo sapiens
ttgcttggtagctcaggtattcaataaataattgttgaatgaataatgaatatcaataagttttgcaaagtgctctagaaaaatgttaactgctgttattagaaacagtgatatagttcactccgaatccctaaaaaaccaactagatcaaaaagctgttctccagtgcagtgactatataaaatgccatatcaggagctagcacttagactggcttactacatgcctggccaygttctcaggaataaaatggttatctagtttaactacttgccttgttatcttgtgtaatcctcagagcaataatatgaggtctgttacttccttgtttacaaattctgcagttttgcaaaaaaaggtaaaaagcataaggaagtcaaataacttgctcaagttcacacaactaatagaacacagattaggattga

SEQ ID NO: 505336 - DNA, 428 bp, Homo sapiens
ttgcttggtagctcaggtattcaataaataattgttgaatgaataatgaatatcaataagttttgcaaagtgctctagaaaaatgttaactgctgttattagaaacagtgatatagttcactccgaatccctaaaaaaccaactagatcaaaaagctgttctccagtgcagtgactatataaaatgccatatcaggagctagcacttagactggcttactacatgcctggccacgttctcaggaataaaatggttatctagtttaactacttgccttgttatcttgtgtaatcctcagagcaataatatgaggtctgttacttccttgtttacaaattctgcarttttgcaaaaaaaggtaaaaagcataaggaagtcaaataacttgctcaagttcacacaactaatagaacacagattaggattga

SEQ ID NO: 505337 - DNA, 593 bp, Homo sapiens
aaaggcttcttgaacaattcaaggattagcataaaattatacataaaggagagtaagtacagcagaggcacttgctcaccacagtaggggcattgttaggaaacgcaaatggactcagtgaaagtgcgaaggcatcttaacattgtctgagggcccgcatgttttaacattgatgtatatattttccagttctttgttgcctcaacaagaggccagcttagtccactggagaaagaagtcagaagacttcagatggcacacatctggagaacatcccatggaaaattgtgaatggctaagtaatctctttcagtaccaagacaaggagtggtaatttatggtttaacagactacaaaacctgccattaattctaacatacaaactttaaaccaatgatttggaagagtaaaatacacaacaacaattaacagaaggaaaacagccatcctgaatgacacaagtttcacactttcaaagattgaaaagaaaagaaatcctttctctaaccgagtttatgttttcagccaccacacaagacagccttgccggccattacactgktgggatggtgctgatcctcacatttctggca

SEQ ID NO: 505338 - DNA, 510 bp, Homo sapiens
ctggaagggaatcagcacgcaggacccagggctgggtttccttcagtgtaactctataaggaatctcctataggattccatatggagagagtcgttcccaaaccatgaaatctacaatccatcccttttgtaaatccaaaggtgatgtcttaaagacttgcaagcattttcattgcactgaatattttaatcaggtaacaataaattagaataagtatttaattaagtcctttatgtcatggcatccacggctgtaaatgattcagtatatcccaacttgsatagataatgtagaaatagttctagcccactgggtaaaatcctggatttccagaaccagtagcactaattttaatttaaagtagcccatcttccatgatgggcttcaggcatgtgccagaatcactttgatccttttgctgatgctctgactcactctctgatttttcatatgtaagtggcagattaaatgggtttgaattaaatgggtacaggtggtgccacctgctc

SEQ ID NO: 505339 - DNA, 510 bp, Homo sapiens
ctggaagggaatcagcacgcaggacccagggctgggtttccttcagtgtaactctataaggaatctcctataggattccatatggagagagtcgttcccaaaccatgaaatctacaatccatcccttttgtaaatccaaaggtgatgtcttaaagacttgcaagcattttcattgcactgaatattttaatcaggtaacaataaattagaataagtatttaattaagtcctttatgtcatggcatccacggctgtaaatgattcagtatatcccaacttggatagataatgtagaaatagttctagcccactgggtaaaatcctggatttccagaaccagtagcactaattttaatttaaagtagcccatcttccatgatgggcttcaggcatgtgccagaatcactttgatcctttygctgatgctctgactcactctctgatttttcatatgtaagtggcagattaaatgggtttgaattaaatgggtacaggtggtgccacctgctc

SEQ ID NO: 505340 - DNA, 595 bp, Homo sapiens
ctgaggttcaacctgttactaaacagggagattccataccagattaggatagggtggtgatattgtgatgtctcatgtcgtaygtcaaagctaaggctgagatcacgaagaacgtagaggtgacataagatgttttgataaattatgccttgagaataggcaaaagaaatcacttcctagttaaaagctaaaatcagccatcgagcacacagagcagaatgtcagttctgtctttagggaatgaaggaaagtgtgaacaggctgcccaggcatagttgagggacagcacccatttcagggtcacacaggggaggagctgggcaaacatcccatcagagaaacatgctcctggaaacaggtgaatcccgagcctgcactgagggagcagcctgcctctgtaggccaggcagtccctagcaggagggagagctcctggccctcagtcccagcttgctttgctggagcagccaactttttctgtacctgccaatctcctctccaaactaacacaggggatctagacttcttcagggactaacaccaccctctacatctttccatcacgattgatctcaggggaggttctagagttcct

SEQ ID NO: 505341 - DNA, 574 bp, Homo sapiens
gttcaacctgttactaaacagggagattccataccagattaggatagggtggtgatattgtgatgtctcatgtcgtatgtcamagctaaggctgagatcacgaagaacgtagaggtgacataagatgttttgataaattatgccttgagaataggcaaaagaaatcacttcctagttaaaagctaaaatcagccatcgagcacacagagcagaatgtcagttctgtctttagggaatgaaggaaagtgtgaacaggctgcccaggcatagttgagggacagcacccatttcagggtcacacaggggaggagctgggcaaacatcccatcagagaaacatgctcctggaaacaggtgaatcccgagcctgcactgagggagcagcctgcctctgtaggccaggcagtccctagcaggagggagagctcctggccctcagtcccagcttgctttgctggagcagccaactttttctgtacctgccaatctcctctccaaactaacacaggggatctagacttcttcagggactaacaccaccctctacatctttccatcacgattgatctcagggg

SEQ ID NO: 505342 - DNA, 595 bp, Homo sapiens
ctgaggttcaacctgttactaaacagggagattccataccagattaggatagggtggtgatattgtgatgtctcatgtcgtatgtcaaagctaaggctgagatcacgaagaacgtagaggtgacataagatgttttgataaattatgccttgagaataggcaaaagaaatcacttcctagttaaaagctaaaatcagccatcgagcacacagagcagaatgtcagttctgtctttagggaatgaaggaaagtgtgaacaggctgcccaggcatagttgagggacagcacccatytcagggtcacacaggggaggagctgggcaaacatcccatcagagaaacatgctcctggaaacaggtgaatcccgagcctgcactgagggagcagcctgcctctgtaggccaggcagtccctagcaggagggagagctcctggccctcagtcccagcttgctttgctggagcagccaactttttctgtacctgccaatctcctctccaaactaacacaggggatctagacttcttcagggactaacaccaccctctacatctttccatcacgattgatctcaggggaggttctagagttcct

SEQ ID NO: 505343 - DNA, 574 bp, Homo sapiens
gttcaacctgttactaaacagggagattccataccagattaggatagggtggtgatattgtgatgtctcatgtcgtatgtcaaagctaaggctgagatcacgaagaacgtagaggtgacataagatgttttgataaattatgccttgagaataggcaaaagaaatcacttcctagttaaaagctaaaatcagccatcgagcacacagagcagaatgtcagttctgtctttagggaatgaaggaaagtgtgaacaggctgcccaggcatagttgagggacagcacccatttcagggtcacacaggggaggagctgggcaaacatcccatcagagaaacatgctcctggaarcaggtgaatcccgagcctgcactgagggagcagcctgcctctgtaggccaggcagtccctagcaggagggagagctcctggccctcagtcccagcttgctttgctggagcagccaactttttctgtacctgccaatctcctctccaaactaacacaggggatctagacttcttcagggactaacaccaccctctacatctttccatcacgattgatctcagggg

SEQ ID NO: 505344 - DNA, 559 bp, Homo sapiens
taagtatattctgtggattatgggcacctataacgttgtgactcaaaagctcaagcagacttcctgcttcttactctgtttttctatttccctgtctcccctgccctaactctctccagaygctatagatgaagaagaaatttctctgcatgtctctgtgccagcatcaggtgcacctaaggtgcaaactggggtgtagcagtaagctgaggagtggagcagtaagctaaggagtctgactccaagtgtctgtcattactactgccactgtgctaatcagaacctggagtgaggtcatgccaactccatcctcagcccattatctcccaatctcaacccaagctcaactcttgatgactggtgtaaaccttgttgctcacacaatttctctataccaaagtggtcaggggtgttgcttattcaagattggcagatatgtgaaccacgatctcattttccacctctccgctccatgtaccccatgctcccagcacacaatttttcattagtccttaaacaagcaatgctcttggcagctctttgctttgtacatgctgtg

SEQ ID NO: 505345 - DNA, 514 bp, Homo sapiens
ttgtgacttttacaatttattcataaataattctatctctaaattaatcccacgtgggttatagactaatgctaaagcaaatagtatcttagtttcctctggtatttcctattactttttgtggaaagttatggatttatgttttgacttttacgtagccattttatactcacttttagaccataagcttgtcaatgattattttgartttttgttattaaaagtattttatatattaatatagtaccagcacacgatgaaaactatctcttcttcctaattcttatactgcttattaatgtttcttgttgcaatgtcataaagaaaatttctctaacatgtaaaacctaatagagttagctacattaagttaaagaagatacaagaaagaagagacaggcgaccaaacaggaaagtatatttttatcctacataaaccaaaatggtggtttgtttaggaacaggggtccgcaaacttttgaaagggcaacacggtaaataatctaggcttgtg

SEQ ID NO: 505346 - DNA, 698 bp, Homo sapiens
attatgtaagtcctcaatgaccttactgtaaacactaaggaaaaatgaagatatggttcctgaaaatttagataaagacatgtgtaacccataagagattcttggaagaatataaatcaatttccataactactatacatgtatatgtctgttgattgagcatattttttaaacatgtttcttagtaaaataaggaagaaatactatataaaataaaagaaatattaaaaarctagcacacttttctaacagtcttgaaaattttcagaatattatgctcttaaaactgccccaatcatagtctatttaaatgtattctattcatggaaaacaaggtaaatagaataaaccaaggttttataaatggaaacaaatattgcattgtactgagctggtggagaatcttttttcaagcctctagcaataacatgtaggtgagctgatcaaaatttatggcagacacactccatgcatgaagtttattactcattaggggatgtgattacattccaactctcaaatcatcaggaaggtgaagttatgaatctttcagtaggtggatgatgttttgtttcctgaattcttattcctcttccagttacaatgtggcacaagagtcataaaagttgtctctttttaatatatttattgacttccagaacaaaacaaaccctgtgctcccaaattatcacaaacaa

SEQ ID NO: 505347 - DNA, 615 bp, Homo sapiens
attagagttcactttttgtgttgtccagttccagttccaagaaaaaagtgtggaaagaagtgcattgtagagacatcctcataagcaaaatctccttataaaaccctcagatcttgtgagaactcactatcacgagaacagcatggaggtaatggcctccatgattcaataacctcccaccgggtccctcccatgacacatggggattatagaaactacaattcaagatgatatttgggtggggacacagccaaatcatatcactggaatctgagggaggttcaaggggacatgctgtatgactgcccagaaggacaggytggaagctcaggagggatttctatgttacagtcttgaggagatgtctcctttcccgggaaatctcagtctctgctcacaaggccttctctactaattggatgaagccaaccaatattatggaaggcaatctactttactcaaagtctactgatataaactgttaatcacacctgaaaaatacctccacagcaatatctaggctgatattggactaaacaactgggcactgtagccttgcccggttgacataaaatttaactgtcacgtccaagaaaagatacttgagaatgccag

SEQ ID NO: 505348 - DNA, 617 bp, Homo sapiens
agtcctttagatattagttttgggtgggtactgcctttcttacttaattaaccttaaagcaaagaagatagtgcatacattctatttatatagagagcgttcaagtgtcatatttttagtgaattattctctgcttttactatgtaaaagagaattcaccatctatcttatcttttcaaattttcttcataaaaataatacttatgggcattatattacttttttttttcatttattttgtcgccaataacagagttcatgccacatgagggcaataaattggtttagttcaccgttatgctctattttctaaagaaatgtgtgacacattatttgcacttaatatattactttttgccattacttttaatggcataagctgtgattacttttgcaccaaactaatataaatgttagaattaagaaacaatatcattcagcttccaaagtttagaaggaaggaatcagaagcttaacattctccctcgcatgaatagtcctcagtcygaacagtagtttagataaagatgattcttatctcaagaactctgtaaggctttgtctgggcttatagggattatctagggcagtatcaggtaggtgtaattgttagatgg

SEQ ID NO: 505349 - DNA, 590 bp, Homo sapiens
gtggtagaagaagaaatagaagatagtgttgagtgctgttaacatcatagaaaagagaatagaatttcaagaaagaagagaagactgccagtatcaaataatatagataggaaacatagcctaaggagcataagctttgacagtcttttgcagttagaagttagaaaatattagaattcwtaagagcagtttgcattgagagatgaataaaataacagatttcactgggccggagaatattataaatgtatagtgatggaaatgatgattgttcactatgcaaaaagagtcatggtactcagctaagaaatgtttgtgctatagtgaaaaatattctagcaaaagattgaagtatttacttaaagaagatatacataaaaatcttatattttcatggtaaaatgactttattaataatagcaaaaagaaaactaaaatatttagaaataccaaagcatttgccaaatctgtttaaagagaattttatatagacaaaataaagatgtgaagaaatgaggaggcaagctgttttcctctataattttaaaaaatctctatacacttataaatttaatgtaatctgaataaaa

SEQ ID NO: 505350 - DNA, 496 bp, Homo sapiens
ttttggcaaattaaccaagtttttcatattcttaatcaaattttgaataaatgagataattctttaaatcatttttctacattttttattatagctaagcctaaattggtaactctgggagtacaatttaatgaagacattctgccctgcaatttaaatcttaatctcaaagggtgattctgtgrgctcagataaccactatctagatatcacgatgttttctatgacatttctagcttgatttgtaacaaccaatgagattgctttagtgctagtttctgaaagcaggacagttcaattcctatctgacagagccatatgatactttttcttcagcactcaaaatgctttattaacctttattaatgttcacaatctccaagtacttgctggagtggttgttttattattccctgagcaccaaggagtaaactgaaatactcacagtctgattccaccgatagaaggagtaaattcttcatggaagcaaaatgtt

SEQ ID NO: 505351 - DNA, 583 bp, Homo sapiens
ccaacagccagcctatctgtagaaatataagaccattctagacaaatcagccttccaccaaatgaccagagatgcatgagcaagttagtcaagagccacaaagcctggcccagactagaacatcttgaatgtttctctcactacaatcattttggcctttatcattaataggatgttgttgtggatgggcaacagatcacaccagcaagtccctctttctccatttttacaacaagttaaggctaaactccaaccatgatgcatgtctgttaggaagtaagtattagcattgagacactaatagatgacagatagatgacagrataagaaacaagaatgttttggggtgacaaagtgtggtaataattcaaaatcattattaatacaaaattgaattttaaaaatggaatatatgaacaatggaaagcaatatagcactgaaaatgagttaactaaaaccacatgttatcaatgggagaatctcaagaatataatggttagtgaaaatacaacttgggcggcagaatgaagtattttccttttaggtatctaaagttttgcaacagttggccatgtaattaga

SEQ ID NO: 505352 - DNA, 544 bp, Homo sapiens
acaattttatcaaaatgaaagcatcatattttgccatttatttaaataactttgtgagcatttagggacctcagagactatgtctgcaacattctctgatactgctctttctcatgaaacaggaacatgtacaggtrcagggtgagtttgcccacgtgatgacacctgaaatacccaagaaagagagtatctttctgactcctgttggttgggacaaggggatagcatgaggaaggtgagagaactggaggataaaccactgacagtttgaagggccacagagtgggctctttgcctcatatctcactacaacgttgacaatgtaatgacagtgtccctgactgcctggtggttccgcatgcagagtctgaccctcatgccacatgaatctcctgcccttacttctaacacagcatgcagcaaaagcagcagggagccatgggctcctgcctaggagagtatggtgagcaagctgggacactggagtttttgctgcatcctcagtggtcacgagcattgccatattgcctgtaggcagtcccag

SEQ ID NO: 505353 - DNA, 571 bp, Homo sapiens
tgcaggttcactctatttcagagtgtttcttaatttaacaatggaaaaaagggattcagtggggttaaatgatctttaaggtctcattcacttactgaacaaatatttagtgatcagtatcaggcaaaaactggacactgtgctaggtaccatatatacaacagacacagtatgagtagmtcatgccctcagggtattccaggtttaaaggggagatactggtgagcaaacagatggtcctgattcaatgagaccagtgccatgaagagagaggcatggagagcacacaggcatgcggaccaagctagcttggcacagtcagggggagcatcctgaaggataagacacaaagcaaacagtgaatgctggtgtcctgttccattgttttgctgattccactgcccagggctctcatagggatttctgtgccaggagctcactgcttcctgggagtggaagaacagccaggaatcccgggacaaagctgcactcaaccttcatgctcttttcagtgacattcattgaaagaaggaattttctgaaaatgttctccaccagtttctcctacttc

SEQ ID NO: 505354 - DNA, 476 bp, Homo sapiens
tctgctgggcctcttgaacatctgtactcctataatgtactgtccttaaatgagatctaagtttacagttggtatggagtccactcacaacaatgaaaagctctcacatggaaattgtgcttgtacaacattcaatgggctcccatcatgccgatgtcctcctgctacatggactgtcaggtgcagcctttttgagagtctcgttatgtgcgtaatgtctggctcagtgcaactatatcactttggaaagaacttttgaagtacgctgaactcaaaaggcaagaagggacatttgccttcaattgccttctctctcaaccagtgactagatgaaataacagaaaaatagatgaggcccttaactgtatagttctcttaataagttaagagcacagcttacaaatgttgacaaaggtagggagawaatcatttctttgagagaagaaaaaaaagcagatgaccatctcgcaaagcat

SEQ ID NO: 505355 - DNA, 596 bp, Homo sapiens
aaatttaaaatatgtttacatagtcaaaatagtataaaattataacacaaccattatggaaaacctgaagaatattgtattagtccattttcatgctgccaataaacatatatccgagactgggcaatttacaaataaaagaggtttaatggataactcacaattccacctgcctgaggaagcaccacaatcatggtggaaggcaaggagaagcaagtcacatcttatgtggatggtggcaggcaaagagagagagtttgttctgggaaactccacsttataaagccatcagattttgtgagacttacacactatcatgagaacagcatgggaaagacctgcccccatgattcagttacctcccactgtgtccctaccacaacaggtgagaattcaagatgagatttgggtggggacacagccctaccatatcattcagcccctggtccttcccaaatctcatgtcctcatctttcaaaaccaatcgtgccttcccaacagtcccccaaagtgttaactcatttcagcattaactcaaaatccacagtccaagataaagcaagtccctttcacttatgagcttgtaaaatcaaaag

SEQ ID NO: 505356 - DNA, 596 bp, Homo sapiens
aaatttaaaatatgtttacatagtcaaaatagtataaaattataacacaaccattatggaaaacctgaagaatattgtattagtccattttcatgctgccaataaacatatatccgagactgggcaatttacaaataaaagaggtttaatggataactcacaattccacctgcctgaggaagcaccacaatcatggtggaaggcaaggagaagcaagtcacatcttatgtggatggtggcaggcaaagagagagagtttgttctgggaaactccaccttataaagccatcagattttgtgagmcttacacactatcatgagaacagcatgggaaagacctgcccccatgattcagttacctcccactgtgtccctaccacaacaggtgagaattcaagatgagatttgggtggggacacagccctaccatatcattcagcccctggtccttcccaaatctcatgtcctcatctttcaaaaccaatcgtgccttcccaacagtcccccaaagtgttaactcatttcagcattaactcaaaatccacagtccaagataaagcaagtccctttcacttatgagcttgtaaaatcaaaag

SEQ ID NO: 505357 - DNA, 596 bp, Homo sapiens
aaatttaaaatatgtttacatagtcaaaatagtataaaattataacacaaccattatggaaaacctgaagaatattgtattagtccattttcatgctgccaataaacatatatccgagactgggcaatttacaaataaaagaggtttaatggataactcacaattccacctgcctgaggaagcaccacaatcatggtggaaggcaaggagaagcaagtcacatcttatgtggatggtggcaggcaaagagagagagtttgttctgggaaactccaccttataaagccatcagattttgtgagacttacacactatcatgagaacagcatgggaaagacctgcccccatgattcagttacctcccactgtgtccctaccacaacaggtgagaattcaagatgagatttgggtggggacacagccmtaccatatcattcagcccctggtccttcccaaatctcatgtcctcatctttcaaaaccaatcgtgccttcccaacagtcccccaaagtgttaactcatttcagcattaactcaaaatccacagtccaagataaagcaagtccctttcacttatgagcttgtaaaatcaaaag

SEQ ID NO: 505358 - DNA, 596 bp, Homo sapiens
aaatttaaaatatgtttacatagtcaaaatagtataaaattataacacaaccattatggaaaacctgaagaatattgtattagtccattttcatgctgccaataaacatatatccgagactgggcaatttacaaataaaagaggtttaatggataactcacaattccacctgcctgaggaagcaccacaatcatggtggaaggcaaggagaagcaagtcacatcttatgtggatggtggcaggcaaagagagagagtttgttctgggaaactccaccttataaagccatcagattttgtgagacttacacactatcatgagaacagcatgggaaagacctgcccccatgattcagttacctcccactgtgtccctaccacaacaggtgagaattcaagatgagatttgggtggggacacagccctaccatatcattcagcccctggtccttcccaaatctcatgtcctcatctttcaaaaccaatcrtgccttcccaacagtcccccaaagtgttaactcatttcagcattaactcaaaatccacagtccaagataaagcaagtccctttcacttatgagcttgtaaaatcaaaag

SEQ ID NO: 505359 - DNA, 629 bp, Homo sapiens
ctcatttttttatgttgattttgcatcctgcaactttactgaattaatttactagttccaacagttttttttggtggactctttagggttttctacatttaagatcatgttgtctgcagagacaatttcacttcttcctttctgactttaatgcctttatttcttcttcttggctaattgctagaacttgaatagaagtggtgaaaatgggcatccatcttgtttctgatcttagagaaaaagctttcaactttttaccattgagtatgatgttagctgtgggcctatcatatatgcctttaytgtgttatatggatattgatacctaatttgttgaaagtttttattacagaaagatgttgaattttgtcaaatgctttctctgcatccatggagatattcatatagtttttgtccttcattctgttaatgtgtatatcacatttattgattcatatatgttgaaccgtcgttgggaggatttaatctactgctatctttccatagctgaagtaggttgctatcattttttacttacatccgcatcctgagttgatcttccaatgaacaagcttagctttttccctcctttagcaatattggaactcccacataggcagagttgccag

SEQ ID NO: 505360 - DNA, 573 bp, Homo sapiens
tgtatttatttcatgttctcgttgtcttaggttttcggtggctgtagttgggggtaaggtgccgcagtgtctcttgttaaactggccttacaggaccccatacttcagggtgagggctgactgcaaggacactcaccatgcgaagttagaacgtgatgaaatcagacacgaactaaatatctgtagaggactagaatcaaaattagtgtgctgttgagcacttctcctaaactctctaagcctcagtttaattgtcactaaataaggataaggtacctacttcattgtgtcaccgaagaacacgcagagctgcactgcacgctttctacaacacactcagaaaaactcgtgctaccaccggggttgaaattttcttgaaggtggcaccttacacaataaggttagggaaaatcagaggcaacataaaaaaaatagtctctggtgttgttcatgctttctagataaacccacaatttaaatatggaggccacctcattccctrctaccaaatgcccatggtaacaaggggaaggtgaaaaaacagaaataagctactgtttcttctgatgtcac

SEQ ID NO: 505361 - DNA, 510 bp, Homo sapiens
ctgttggtctttgccttttaaagtagagcgtgtgtgtgtgtgcatgtgagttttgctataactcaatggtttcaaaactctttaatggcatgttacacgtagaatttttttttttttgagacagagtctctctcttgttgcccaggctggagtatggtggcacaatctcggctcactgcaacctccacctcccgggttcaagcaattctcctgcctcagctcccckctagtagctgggattacacccaggtgtgcaccaccatgcccggctaatttttgtatctttagtagagacagggtttctccatgttggccaggctggtctcgaactcctgacctcaggtgatccacctgcctcggactcccaaagtgctgggattacgggcatgagccaccagacccagccagaaattcttaatacgaattgtcaaatatggcaattatcaattatcatactatgaaataccaaacacaatagaaatgttggaacctgtttgaagccttccaggt

SEQ ID NO: 505362 - DNA, 510 bp, Homo sapiens
ctgttggtctttgccttttaaagtagagcgtgtgtgtgtgtgcatgtgagttttgctataactcaatggtttcaaaactctttaatggcatgttacacgtagaatttttttttttttgagacagagtctctctcttgttgcccaggctggagtatggtggcacaatctcggctcactgcaacctccacctcccgggttcaagcaattctcctgcctcagctcccctctagtagctgggattacacccaggtgtgcaccaccatgcccggctaatttttgtatytttagtagagacagggtttctccatgttggccaggctggtctcgaactcctgacctcaggtgatccacctgcctcggactcccaaagtgctgggattacgggcatgagccaccagacccagccagaaattcttaatacgaattgtcaaatatggcaattatcaattatcatactatgaaataccaaacacaatagaaatgttggaacctgtttgaagccttccaggt

SEQ ID NO: 505363 - DNA, 634 bp, Homo sapiens
caccaaattggctgcactggtggtgcagccaatccaccaaagtcagaagggactttggcagctcggtgaggtcttgaagaatcccagccgtcctctgagastccacttatcctaggacaggttccccacttactccttggatacattgttttcaagtaaagtccttagctgtgtcttttttaaattttattttctttgctcttgcatcattttttttctctttctttcctttattattttttatggggtcactgtccttgactcttttctatagaaaggttgaccttgacttgaggaatattgagattgaacttcaaagtatgtaggagatcttagagctacgtgcaaaaactcagaaaactgggctgttcctttagaaggaagctgagtgcatgttggttacatgagtggtcatagaattgaatgaaggagaaacacttactggtaagtgcaagtgtgggaaattgggtctgtgcaatttggggtcacctagtgcttgtaccacagtcctcaccggaagttttttgactactctcatcttcctgtagagaatttccacagtgaggatcgatttagaaaatggaaaaaagaagccaggcaatgtgctttgtgtaattccacagctaggcagcag

SEQ ID NO: 505364 - DNA, 634 bp, Homo sapiens
caccaaattggctgcactggtggtgcagccaatccaccaaagtcagaagggactttggcagctcggtgaggtcttgaagaatcccagccgtcctctgagagtccacttatcctaggacaggttccccacttactccttggatacattgttttcaagtaaagtccttagctgtgtcttttttaaattttattttctttgctcttgcatcattttttttctctttctttcctttattattttttatggggtcactgtccttgactcttttctatagaaaggttgaccttgacttgaggaatattgagattgaacttcaaagtatgtaggagatcttagagctacgtgcaaaaactcagaaaactgggctgttcctttagaaggaagctgagtgcatgttggttacatgagtggtcatagaattgaatgaargagaaacacttactggtaagtgcaagtgtgggaaattgggtctgtgcaatttggggtcacctagtgcttgtaccacagtcctcaccggaagttttttgactactctcatcttcctgtagagaatttccacagtgaggatcgatttagaaaatggaaaaaagaagccaggcaatgtgctttgtgtaattccacagctaggcagcag

SEQ ID NO: 505365 - DNA, 639 bp, Homo sapiens
ggggaggcatgaataatccaccccttgtttagcatatcatcaagaaataaccataaaaatgggcaaccagcagccctcgcgggctgctctgcctgtggtagctaatcttttattcttttactttcctaataaactgctttcactttatgaatttgcgtagaattctttcttgtgcaaaatccaagaaccctctcttggaggcacacaagcaccttagcctcatgaaaactggtctgttagagaccaccrtggaaggaggggaatggctgacccttcctttagagaccaccgtggaaggaggggaatggctgacccttccttgtttgcttgtttctccctgaacagacccgtgaagcccacatccaaaacaagcattttaaacaaatccagattctgttgggagaagaaaatgcttcctaacctcaaaagtgagttacccaagtgaggctggacatgaagtgtttgtcaaaacaatggactctgagacggaagagtagaagcagatggtcaaggcccggggtaaaaatgagggtgactgactgcaggtggagaggaaggtgggtgggtgggcagtggccatagatgaccctgaggcctgagcaagctccatcagggctcacacaggcaacacagaggcag

SEQ ID NO: 505366 - DNA, 615 bp, Homo sapiens
tggccaggctccaagaaaagcaactcttgctcagcttaaggcacaagagaactatgattcatacgtgtttacaaaaacrgcagtaaaggaagataagagtttacagcaggtgtcaagcacacacgtggctgtcaaccctggctgctactgtgttgtcactgacagaaacgggagctcagaaaaaaaggctgggtcatgtgtgcttagttgtattcccccctcctttctctgtgtgcgtgagtgtgtacactttaatttacttcgccaatctaccccaaagtgagaatgagtgatgcgcaggctggaagaaggtggagccaggctataatcagagcccagatttttctttttacttttttgtttaaatagatgaacaaaaggctttgggttttaatgaaaagcacaggaagtggtagcaaaggaataaggtcctttctggatgacatttgagagcctcctttctcctccctcccacccagttgcaaatgtgagcaaatgggcccctcggtggtctgtatcatccccaggggccttctgggctccattgttggtcacacaccaatgccagtggaaagacacaaagggcgaggccctccaacagctttaaacatttag

SEQ ID NO: 505367 - DNA, 603 bp, Homo sapiens
ataaaacagttattgccatattcagtgcaaaagtgtagtccttattctttcactatgattcgtgcctctttacatttggattttttgccatttctgagtctaagaaactggggtggtaataggatatgtttttccctgctcactggccctcacatttttgggggccattaggaaacccagagttatgtcaacccgatgggctcagaatccagctacttttttccattatrgaattctgtcccttcctgctgtcttccttcagccgaccctccactctattcagagtccacaaactctctatcttttatgtttttaaatgccaaagctctgttactcatctttttctcaagcaatttagttggattgtcactgatggaggcctccatctttgatatattacagcccttgtttatagaatgtcttgagatggggttgtgagggctcataatctttgtaagttcctttttttctttttatttcttttgttgtgattataaaaaaaaaacccttgtaacatgagatacatgctcttaacaattttaagtgaatagtgcagaattgttaactataagtataatactgtatagcagatctctaaacttt

SEQ ID NO: 505368 - DNA, 603 bp, Homo sapiens
ataaaacagttattgccatattcagtgcaaaagtgtagtccttattctttcactatgattcgtgcctctttacatttggattttttgccatttctgagtctaagaaactggggtggtaataggatatgtttttccctgctcactggccctcacatttttgggggccattaggaaacccagagttatgtcaacccgatgggctcagaatccagctacttttttccattatggaattctgtcccttcctgctgtcttccttcagccgaccctccactctattcagagtccacaaactctctatcttttatgtttttaaatgccaaagctctgttactcatctttttctcaagcaatttagttggattgtcactgatggaggcctccatctttgatatattacagcccttgtttatagaatgtcttgagatggggttgtgagggctcataatctttgtaagttcctttttttctttttatttcttttgttgtgattataaaaaaaaaacccttgtaacatgagatacatgctcttaacaattttaagtgaatagtgcagaattgttaactataagyataatactgtatagcagatctctaaacttt

SEQ ID NO: 505369 - DNA, 632 bp, Homo sapiens
tgaattcgttcttgtgcaaaatctaagaaccctctcttggggtctggattggaatcccttcccagtaacactttaccttgctaaaattctgaaaattcatacctatgcttctgatttttttaaaaaggagatttgataaaagtataaagtagaaaaataatagctgctgagtagaaaccaaaagaagaaaaagttaaaaaakaaagaaaacagtgctaactatgctagaaacaaatgtcagcaaaaccaagatggaaaaagaaaaaaaaatttactaaatttagattaaaaattgctgaatttatttcacaattacatcaatttgcaatttgctggatgtgaattgtaaatactggcaagccacatttttttagaaattaaaaattatctgatatagcatttccttcctgataaatgaggtctcctaattctctgaggctattgttagcttacatttacctttcaccactacattaaaaacaactctttgaaaaaagaaaaagaaccacttgtacaaagactgaattatactgtcattaggcttcagttcaaggagaacatgttatgttaaatgaatgtagagtggtaaatgccactgctaacataaatgtaataattactataataaaaaa

SEQ ID NO: 505370 - DNA, 442 bp, Homo sapiens
cttataactttaaatccaaggaaatcataaaaaatatcagccaagattatattttctaatcatctatgattcatttttctacaacataaaggttgtagataaagctgatagatttgattaatgaacatgttgtgttctattttgctgtattacgcagatatcaatccttgtmtttaagaaagatagaagggctaatgcccttgtctcacagctattaacaattttgcaaatattatgtcaatgtttgaatagtccaccaatttgacaaaagtttactcaagacatctccatggactggaaattattctgagtctctgataatagaaaagtctaaaggacaagttatccaaaggtagattcaagatctaggagcattcaatagccagtccttaggaactaggcatccagtaccctaaataaagaaaaaagatacaaaacattg

SEQ ID NO: 505371 - DNA, 537 bp, Homo sapiens
tttcattaagttgaacacttaaaaacttgtaccggaagtttacttctgtttaaaaggaatgagtatggggagttttatgccctattttggactcagtccaaatctcagtctcaatgattagtgtctgtcttgtctgtaaagacaagacatattttactaaaaacaaacaaacaaacaaaaaacaaaaccacaatgtgaaatcttaatgatattaaaatatttaagaaaagagactctcacttgaaatacactgtgaatcttgcctactattgcctttaaaaaaacattagcacttaaataaatatattcattaattaagaaaaatgttcacaataaaaatacattctacccattcacctgataacaaacatacacatattctactatagtttgaagcaaatcagagtttaaacatttttcttmcaggtacctctgaaatgtattagttttatagcaacatggtccccttttagtaaaaataaaccaaaataggtaaatttatataaattatatttacaaaatattagtatattctca

SEQ ID NO: 505372 - DNA, 537 bp, Homo sapiens
tttcattaagttgaacacttaaaaacttgtaccggaagtttacttctgtttaaaaggaatgagtatggggagttttatgccctattttggactcagtccaaatctcagtctcaatgattagtgtctgtcttgtctgtaaagacaagacatattttactaaaaacaaacaaacaaacaaaaaacaaaaccacaatgtgaaatcttaatgatattaaaatatttaagaaaagagactctcacttgaaatacactgtgaatcttgcctactattgcctttaaaaaaacattagcacttaaataaatatattcattaattaagaaaaatgttcacaataaaaatacattctacccattcacctgataacaaacatacacatattctactatagtttgaagcaaatcagagtttaaacatttttcttccaggtacctctgaaatgtattagttttatagcaacatggtccccttttagtaaaamtaaaccaaaataggtaaatttatataaattatatttacaaaatattagtatattctca

SEQ ID NO: 505373 - DNA, 632 bp, Homo sapiens
gaactttaatagcaaggggtaaaaaaagatgttagaatatccttgtgagatatacctgaaagaaagttctcattgcctcttataattctttgcaattcaggccgatgaaagtaaaaccttcagtctatttaagtagacattgttaaatcaacattgttgtacccttagctcaaarcaaaatgtttgagtcagtccacagaatactagagtgttgctatatttttggttttaaccttaattgttcaagaaagaggcacgttaaatatgtaagcatccctgccttctgtaaataaatattggttgaggatatttggttcatgtaaattaacaaaagctgaaatgaagattagacacatgtaaaactgattgaatagtgagtgtcctttataatgtcctagctgtcacacagatgacacattttataagtgaaatggcttatatctttcttctcgtgtgtctatataggttatttctggcacttttgtttggttctgaattaccttatgttcttgacctccccccaaatttgaatgtttaattgacttaggaaggatataaacttagtgaaagttctagacagatactagtaaaagtaatgtaccgatagtaaagcattaattagtcaaagatag

SEQ ID NO: 505374 - DNA, 623 bp, Homo sapiens
gacactattttaaaaatgttttacttctgagtgaaatgttgcattttattttactggaagattcttatgtagtttaagtacattttacggtattgtcaaagagcatgagcaaaatatttaggaaagatgagaccatatttcttttatttatgacattgccacaaaaaatcaggtagatgaatttgtattaagtttttgtaccaatttcatatctaaaatttcaaagaattttattgcaacaaactctttcttaccattaactcaaaaaaattctgttttaaattgacttcattccataagtctctacactactaatttggccagaagttattttcaatcctaattgggaacaacaaagatccacatgatatcctttcaatttatgatgttgaagaaagttgaattgtaataatttgagtgtgcagtcaaagcaattttcaatactatgtatcactrtagaaacaagggagaatgtcttggttaactatttaagtggcttgagtatggcaattaaaatttcatctaagctcattttgatgaatcttgaaggtgacatttatttcttatgctctgaacatcgtaagttctgttgatttttatgggaagttttcaaggtcattttc

SEQ ID NO: 505375 - DNA, 496 bp, Homo sapiens
aatgaaagagctgtgatatgatccatattttttgtttattgacaactaatgcaaaattccaaacaataatgaagcaactacagattggggaaaatagtaaatcagaaagagcaattgagagagcctttttagaaaaaagttttctcctttggaattatgttacattttgagtaattattatgatattcaaccattaatttatacatttgtttttaatttaacatatattttgagtactaaatatatcaggcactattataggtgcttgtgytaattaacaaccagttttctagaatgtgtaaagtgccatagaaaatacctcttgggttctatgctcactacctggatgatgggttcagtcatacccaaacctcagcatcatgcagtatactctgtaacaaacactcacatatatcctcaaatctaaaagttgaaattaaaaaaaaaaataaaaagcaaataattatattaagtatattaactaaaacaaaactga

SEQ ID NO: 505376 - DNA, 496 bp, Homo sapiens
aatgaaagagctgtgatatgatccatattttttgtttattgacaactaatgcaaaattccaaacaataatgaagcaactacagattggggaaaatagtaaatcagaaagagcaattgagagagcctttttagaaaaaagttttctcctttggaattatgttacattttgagtaattattatgatattcaaccattaatttatacatttgtttttaatttaacatatattttgagtactaaatatatcaggcactattataggtgcttgtgttaattaacaaccagttttctagaatgtgtaaagtgccatagaaaatacctcttgggttctatgctcactacctggatgatgggttcagtcatacccaaacctcagcatcatgcagtatactctgtaacaaacactcacatatatcctcaaatctaaaagttgaaattwaaaaaaaaaataaaaagcaaataattatattaagtatattaactaaaacaaaactga

SEQ ID NO: 505377 - DNA, 613 bp, Homo sapiens
tgcaaactacagtgcaaacagccttagtgacaaaaacacaaccagaaatgcttaaaacttctgctaaatgttatgttccagttccatcttacacattttaatgtcttttgatttggagtgacctatgggtttcaaccatgggccagcgaggaaacaaaagatcatttccactctgccctgtataattaaatacctagatgaagttttctctggttctgctttcagagccaaacaacgcttgtttgcattccatcatcatatatcaacacccacgggccaggggaatttacctttgctgttctatcgctagacccttawatcagggcatcctgaccgcatttaagcatatcagagaggcctctggttacgaagcctgcaatatttatttttccttaaatcacaaaaatatcctatttacagtccactatttggaaagggataacatggatacagacactccatagataatccctgcatctcgtctacagattcaaacatctgtttttcttcaaacctttgtctcggagatgctgagtagtcacgaaagggagtggtttggattcccctctgctcgcttctcctgctgagatctggagggtgagaccccagtgag

SEQ ID NO: 505378 - DNA, 613 bp, Homo sapiens
ctgaaaactctttgaaagctgaagaagagatacacaagtgttaggtagtaatggaaaaataataagctttgaaatctagtacaaaccagtttaaattctgcccttggcccttaccagccttgtggaagtcactgactctttgattctcagtatttataactagaattgggaagaataatatttactttcaaaaaataaaatcttgctgctggataatgctactttggtttttgacggaagtttatcttacctataaatctataggttgcctctaggacttggacattgttttatattaatatcattttcatatatttcaccatgcctaacaccagccaacacacaatatttgcaacacaaacaaggaaaaatagtgaagattagtgattattattccttatgcttttagtcctcrtctactccgattcaattaggtttctgaatataaaggtaacaaatttattggagtctaagaataaaaattgaagggagattctcttgtagtccatgacgatttaattatgaaactatagggaatgaaattgtgtttatcatgacacgatttcattgcattcaatgtgggtagagaatggatgacagggagggttagaca

SEQ ID NO: 505379 - DNA, 516 bp, Homo sapiens
tctacaaaatggagacaggagcccttcttagtattcctggatttaagctgtgacaatttcatgatgatggtgatgatgatgatcattacaaagactatggaaacaggtgacaggtattcattgctccccatgtgctggttactgtactgagtgcttcatgtggcttgccgtggtccagcctcacatgatggagcagggaggytcggtgagagggctcacacatctgggcagcggcagagcctgtcctcagactcaggtcagttctaatcactcccctccacaaccttccctcccctcagccttgggagtcttgcactggaatccacgcagctcaactccacatgcacacaggggctgcccccaacatggaggggactggttcctgggctcatcagagaataagtggtgagaaatccactttgtcactctggggatctgacaggggatgcctgtcatgataacatcaattaactgacaaactagaagggatcttagcaagcaatcctccatttccct

SEQ ID NO: 505380 - DNA, 516 bp, Homo sapiens
tctacaaaatggagacaggagcccttcttagtattcctggatttaagctgtgacaatttcatgatgatggtgatgatgatgatcattacaaagactatggaaacaggtgacaggtattcattgctccccatgtgctggttactgtactgagtgcttcatgtggcttgccgtggtccagcctcacatgatggagcagggaggctcggtgagagggctcacacatctgggcagcggcagagcctgtcctcagactcaggtcagttctaatcactcccctccacaaccttccctcccctcagccttgggagtcttgcactggaatccacgcagctcaactccacatgcacacaggggctgccyccaacatggaggggactggttcctgggctcatcagagaataagtggtgagaaatccactttgtcactctggggatctgacaggggatgcctgtcatgataacatcaattaactgacaaactagaagggatcttagcaagcaatcctccatttccct

SEQ ID NO: 505381 - DNA, 509 bp, Homo sapiens
ctggtgtcacagcccacactacctggcacttgtttggattaaaaccattactgaagtgacataatttgattgatttttcctccagagttttaagcatacctagaaagacacaacataaaatatattttcttttatatctagtccatgggctctctaagagttgtttaggagagtccctggactacaggttaagaatccatggcctcaatcagaggtaamgactagcactgaggacgatattccctgacacctcggatgcccagttatctattcattgggaaaaagttgatgagttcctgagggtgttgaccacactgcaatttaaggacaaaaaaaattacacttcagactacggggtggcaaactataacctttgggtcaaatctagtcctctacctatttttgtaagtgaagttttatgggaacacagacatgcctatttgtttgtgtattttccatggctgctttcatgctacaatgacagagtcaagcaacagagatggccgtgg

SEQ ID NO: 505382 - DNA, 601 bp, Homo sapiens
gaataaagtatgaactttgataacaatgtgtcaatattggttattagttatgacagatgtaccatgctaatgtaagctactaccaataggaaaagctgggtgtgggatatatggaaagttctaaataccactaaataccttaaggcagaaggatccttgattggtataaatatctactataaaggcttttgctgtttaaaaaagcaaaacaaaataaaaaattaccaactactaaaattaaaatacaagtataatgaaaaattgaaataataaaaaattgctagtggcagttcaacataaatagcatggggaatgtggtgtattctgaaagattaattcatcagataattctataacgtgttccatgatacaggtttttttttcagtttggtgtttacaatcatccagaaagcttgtgttcctccagccccaatgggttactgaggcagtccaaagaaagggtrtgacaaaaatgagtgaaagttgaaaggactaatatcctgggaaggggtcaagggttcattcatagaataaatactctgcctctcctaaaacccaggagaaaaatcagatcagtccactctttaggtcagcaaaagtg

SEQ ID NO: 505383 - DNA, 524 bp, Homo sapiens
ctacttgctgtgagtgcagactagcacaaccaccaacacrgacccacaggtagaccatcctgttcagatcctggctctgtcacttaccgtgtgacttaggacaaagcccttaccttttctcaataaaaagaatagtaatacctatttctcaggcttgtgctgaatgattaatcaaacagtgcctggcactgtgcacctggcactgtgcctggagcatagtgggtgcttagtaaacatcggttcccttccctctccccctcccacactgcgctgctgaaggagctgggggagggaatgtgagaaagcctccgcagcaggatttcactagcaaatgtctaaaaacaacaaccttcttctcttccctggagcaccttcctatccccagtgtgactgtaaagccagattaaaaagcgcccatggtcattggaactcgccccagtcaaataatccacgttaccagtccggtccatgtcagcccggctcctgctgctccccactgtggggagccaggtgctcctgggaat

SEQ ID NO: 505384 - DNA, 656 bp, Homo sapiens
ggacccagaggatctgtaagtaaatagtcttataccgagcagtaggtttcttggcaggaaggaagttgcctggtgactaagccagagcctatgtttgtccagacatggtctggacacctgaggaaggaggarggcaggaaccaggcatggagagacgtaagattgtaaggggaggccaggatttggggtgaggatttacctggactgactctgccattcccggtcatgccatcttggcccaggccagtcttttcatctctctgagcttctgtctcatttgcagaatgaggatagtaatcattcacacctcacagggtctcccttaggattacacaggagaaagcgatgtaaaaaaattacaccaacagtaaagcactccaccaagagagatctcatgactgacatttcttcacaaagtatatttcaaagaaagctaaacaaactcccccaaactttccactctcagggctatttttattttgtgattttccaagcctcaaaatgaaattgaaatgtaaaaaaaccatcagcggctgctttttatatggtagtttataagagtcaggatgaaatagaaatcatgatagcacaaggcccctattttatattctcagagggaggctgagagctgggagtgctgatgactttggggaggg

SEQ ID NO: 505385 - DNA, 656 bp, Homo sapiens
ggacccagaggatctgtaagtaaatagtcttataccgagcagtaggtttcttggcaggaaggaagttgcctggtgactaagccagagcctatgtttgtccagacatggtctggacacctgaggaaggaggagggcaggaaccaggcatggagagacgtaagattgtaaggggaggccaggatttggggtgaggatttacctggactgactctgccattcccggtcatgccatcttggcccaggccagtcttttcatctctctgagcttctgtctcatttgcagaatgaggatagtaatcattcacacctcacagggtctcccttaggattacacaggagaaagcgatgtaaaaaaattacaccaacagtaaagcactccaccaagagagatctcatgactgacatttcttcacaaagyatatttcaaagaaagctaaacaaactcccccaaactttccactctcagggctatttttattttgtgattttccaagcctcaaaatgaaattgaaatgtaaaaaaaccatcagcggctgctttttatatggtagtttataagagtcaggatgaaatagaaatcatgatagcacaaggcccctattttatattctcagagggaggctgagagctgggagtgctgatgactttggggaggg

SEQ ID NO: 505386 - DNA, 656 bp, Homo sapiens
ggacccagaggatctgtaagtaaatagtcttataccgagcagtaggtttcttggcaggaaggaagttgcctggtgactaagccagagcctatgtttgtccagacatggtctggacacctgaggaaggaggagggcaggaaccaggcatggagagacgtaagattgtaaggggaggccaggatttggggtgaggatttacctggactgactctgccattcccggtcatgccatcttggcccaggccagtcttttcatctctctgagcttctgtctcatttgcagaatgaggatagtaatcattcacacctcacagggtctcccttaggattacacaggagaaagcgatgtaaaaaaattacaccaacagtaaagcactccaccaagagagatctcatgactgacatttcttcacaaagtatatttcaaagaaagctaaacaaactcccccaaactttccactctcagggctatttttattttgtgattttccaagcctcaaaatgaaattgaaatgtaaaaaaaccatcagcggctgctttttatatggtagtttataagagtcaggatgaaatagaaatcatgatagcacaaggcccctattttatattctcagagggaggctgagagctgggagygctgatgactttggggaggg

SEQ ID NO: 505387 - DNA, 531 bp, Homo sapiens
cattagtgaagccaagaaagaaaaagtcccaagcaagctgatttaagtattttatgtaacaaagattgtttagtgactaagtgtccggctctaaaaaagagtcctgcctattcyctctttctcacttctctcggcaggtccccttcctgaagggtagccccatcttctatcgcacactatccgctcttcaagacataattggttttaggtgcaggcacctcttctttcccaatccaaaatgttctctctctcgctgagctcagcatgttttctaattctgttctttgtatgtctatgtgtttcttctgtcttatctcccccaaaagattgtatgctcctggatggaaaggacaataggttatccatactggcattcagtgctgattcaaaatcagaaagtgtaaacaaggggagaacaattgttcaaagcccaccataattcattttatatttatttatttatttatttttgagacagggtcttgccatcgccaaggctggagtgcagtggtgcaatcacagctcactgaa

SEQ ID NO: 505388 - DNA, 517 bp, Homo sapiens
cttcctcctgactgcagggcagggcggagctgccagcccagtgtttctggcccactcagggcctttcttttcttacaaagactgctgtgttggatctgtttttctaagtcagatagttatttgatttccacctcagaactcagtgccagcattcagtgttgccagcctcaccgccaccggccatggtgcgagaaggaattcgggttcctggaacatggtcagagaatgcactccttgattcaggtgggtggaggtcaggagtggcttcccacaccggcggcctaacacttgcctgacttgaaggggttctggtgtcaggagaagctcaggctgtgctcggccgcgtcacctctgtaagtcgccacagactgtaatgaagaccaacccagaacatgcttctaatttgtctgttccctctgggtctagtaagccragccagggcaaacagagaggaccatcatccatgtggggtcatgcctggatgtgaggtcattcctggatgtgtggttataccagg

SEQ ID NO: 505389 - DNA, 367 bp, Homo sapiens
ttttttggttctacatgaattttaggattgctttttctaattttgtgaaaaataacattgatattttgataggaattgcattgaatctgtggattcctttaggtagtagggtcatttttaacaacattgattcttctgatcaatgagcatgggatatttttccgtttgtttgtgtcatctgcaatttttttcatcagtgttttgtagttttcattgtagagatctttcacctccttggttagacatatwcctaggaataaaatatcttttagtctcctcttcatcagggaaattttagtgccatttagtccttcataatccccaactgtacaccaggttactcgtgcctttcttcccacctgtctct

SEQ ID NO: 505390 - DNA, 528 bp, Homo sapiens
gctgtcaaaggcaaatgctttccttgaggtgcatttcatataattctctctacatgcactattttctaattcttcctaattaatgttataatacacattttgaaccctcagtattttgagtaaacctttcttatagaatctttttcactttatcttgcattatagttrtttgcctacttgtgtcatgttctaataaaacataaagctcttagaagactaactcttgaagcacctaacagtgttttgcatatcacagatatgcactaagaagctgatttgttcagtattgaaagatgggcagcagtcagaaaaatggagagaacagaaaagatctaggtgggaaaatggctaaagatgtgatcaagcattgtgaaaacagagaaatgagagtgcaaatagaatatagtgaaaagatagggtagctagaacaaaggatttctgaatgaaaatgttgggagataaatgttgggagggtaaattggagccatattgtaagaagttaatttgggctcaagcccagatcactta

SEQ ID NO: 505391 - DNA, 529 bp, Homo sapiens
agctgttaagaaaagaaatcaagataaacagactgttaggaaatgtaggtgggaccaggcgtggtggctcatgcctgtaatcccagcactttgggaggctgaggcgggaggatcacctgaggtcaggagtttgagaccagcctgaccaacatggtgaaaccccatctctactaaaaatacaaaaattagcccagcgtggtggcaggcacctgtaatcccagctacttgggaagctgaggcaggagaatcacttgaacccaggaggcagatgttgcagtgagctgacatcacgccattgcactccagcctgcaaggggacaagagtgagacatcgtctcaaaaaaagaattaaaaaaaaaaaaaaagaaaagaaaagaaartgtgggtggaacctagagaagatatctgtccaggagagacagccatacttggaactagaaaatgggtaagacataatcatgagctatatgggccatttcaggcagaaggaatgttgttcaaacacctctagtgagagaggaaacatggc

SEQ ID NO: 505392 - DNA, 648 bp, Homo sapiens
gtcatttcgggacacgagtgtgtgtttccaagaaaaacgagaggaaggaaccaggctgaggggctcgccgggttcccccaggcactcccagcagcagacaccggtattccgcggcgggcggcggcgtggtcaaaaaaaggcgccgctgcccctttaagaggcaaagcaccttttccaagataccatcttgcaccaggagttcacttaagctctccacctaccttgctatatctctcctccctgactgggtacsgcctgccggcggggcgagcgagccttttcattggtcttgccctcagggccccctctctcttactggttctcaggcctgccactcggcactgtctcccgcccacctcagccttcgggctaggttgagtgagggctcttgggttagttcctgttaggccccggccgggggagtaggttgaagtctcctaagatgcccggtgggctggggcaccgggagctgtgaagggaacgtgagggggcggcgtagtggagacccacggcaggcctgaagaagagcggcggccgagcccgccttccctgcaccatgctcatagaggatgtggatgccctcaagtcctggctggccaagttactggagccgatgtgagtgagccgggctgggccggggccggcgaa

SEQ ID NO: 505393 - DNA, 651 bp, Homo sapiens
caattaaacacaacgtttacctaatttcttaatctgaatttcagcaatttcagaatttaagacatctcagacacagatagggattttcacaggacattttcatatttgaaatgttatattcttctttgggttcataaatctttcctttaaaactcttttcttaaagaatcagtgttagtgtgtgccaagaaaatacaagggccagtttattgtttcatcgtcgacaagtaagactatccctctgcttcaaatgatgacattttcactatccttaatattctacaatttttcccaggggtctattacttcccactgactgataaatgtctgtcaagttaccatttgatagtaaggcacacaaactcatttaacttaaacaaactgtaaaatgcatcagaagaataccagagacatagccaaacctctcaaagagtagaatcagttgagaaccaaattcgtttcttcacctctctatttctctctgtaaatctagttatccttctctctctttcaatagtggctatttctctgattcttcattaacacagcagagactgactatataagtttcctgtttcctgctttttatcatctggtaattgaagtcctaacaaaaactcaatcaattrtaagttcaaatttaaaagtcct

SEQ ID NO: 505394 - DNA, 500 bp, Homo sapiens
ctggtttataggcagaggcagaattatarcaggcagtcttctaactaccaccactgtatcatttctgctattcagcttgcttcttccaaaggtctttatactttctctttcattagtcatttttgagcctctactctatgccaagtactacttgaggtgttggggacagacaggtgagtaagacatggtcccaacccatacagaagctcacaatttagtgagggagttacgtagatggatgcttgctgtttattaatcattgtaattcatgttttgagaacacagaggagggaatgtttagctctttctctacctttggattgatttcttgtcctcaacaaatacagtcactgggacttcaaataccaactccctgaccttagcaggtgtggttactggtttcttacacaccatttctgctggacttctgtgtttgcctgccatctcacccatcctgttttccaccctactgactcatgcagcagttgctgcttaagtgc

SEQ ID NO: 505395 - DNA, 432 bp, Homo sapiens
agctgttataaacggttaaatggaaaaatcaaaatttcagaaatttgtatggagtaaaggaatattgagataaattacaaacgaggagacaatttttcttcacagtgtggagaaatatcaatcaaaattttaacttgcaagatagagtttgtatacctatcaattacctgcaattttttttaattcaaattttattttagatacagggggtgcatgtgcaggtatgtcatatgggcatattgcactgaggtagtgagcatagttcccaataggtagtttaccaatccatgtcgccctccttccctaagccctctagcagcccatagtgtcygttgttcccatgtttatgtccatgtgtgctcagtctttacttcccacgtataagtgagaacatgcagtatttgattttcttttctcttgttaatctgctta

SEQ ID NO: 505396 - DNA, 432 bp, Homo sapiens
agctgttataaacggttaaatggaaaaatcaaaatttcagaaatttgtatggagtaaaggaatattgagataaattacaaacgaggagacaatttttcttcacagtgtggagaaatatcaatcaaaattttaacttgcaagatagagtttgtatacctatcaattacctgcaattttttttaattcaaattttattttagatacagggggtgcatgtgcaggtatgtcatatgggcatattgcactgaggtagtgagcatagttcccaataggtagtttaccaatccatgtcgccctccttccctaagccctctagcagcccatagtgtccgttgttcccatgtttatgtccatgtgtgctcagtctttacttcccacgtmtaagtgagaacatgcagtatttgattttcttttctcttgttaatctgctta

SEQ ID NO: 505397 - DNA, 495 bp, Homo sapiens
accaaataccacatgttcttgcctataaatggaagctaaacactgggtatacatggacatcgagatgggaacagtagacactggggactagaaggagggaaggaaaggcacaaggattgaaaaacaatcgcytgggtaccatgctcactacctgggtgacaggatcattcataccccaaacctcagcatcacacaatatacccataaaacaaatctacacatgtaccccctgaatctaaaatgaaagttgaaaataaataataaataaaaaagctctcttaaaaagtcagtctccacagacatcacaatcatgccatcctctgctgggaaattatgcctcctttcacaggaactaggtcgtgagtgcattcacccctaatataaactaggttcatcaatgataaaaatatcatttgaggtagattttatcaatcaatgggtagttgtggaggagaggcattgttttgctttgttttgttttgtttaatacaaaaa

SEQ ID NO: 505398 - DNA, 576 bp, Homo sapiens
gtcatcttttccatgaagccctctctaktcaagtggggataactgaccaactgatctttttctggggaccctgagtactttgtacttaatacaatcatagccaagcaataccaaacatttatataagtgctatcttccttaccagactgcctgctgtgtaaatgtgggggttgagtctggccactcctggcatctaacaaagaaggtactcaaaagatgattacggaaacaatggatgaaaagttaaaaaaaattccataataatcatggcagttcagaaaaacaggcaagttgcataagcagttgaggttaatactcttgggtgttagaaatattttataatctcatgttctatcaggagtcatgtccaatttttgtgaacagattttttaaaaggtagaaaattaaggataaggaagctaactcacagcttgtaagtaccggaaagacaagatagggctacttaatgcaccacaagcattactgtcttcaaagtctccttcttcaagcagaaactgctggcctttaaaatgttctttttcataggcaacccacctagaaatacaggggacaccc

SEQ ID NO: 505399 - DNA, 585 bp, Homo sapiens
cattcttgggcccaacctgattcagtagttctagtgcaaagctcaggaatctgcataaaactttcagagaattctgatatgttagctcagttgaggaacctctactcttgtctcccatagtccagttaccctgttttgttgtcatatttagccttgtagggtgtgcgcttcacctgacagtaagctggtgaaggctgtgttgcagaggatgagcctggagaacactggcttttcagttggctgatgtttaaattccamctttggtgcttgctaggaggtgggactagggcatcttggctgtttcattttcctcatctttaaatggggagaataatattttctataattaccactttactactaaatcaaggctaccagttactaaatttttgtaatggttctaggataagatagtaagggtctgaaagagaaggaaagaacagagccattagatgaaagaatggaaaggttatgctgtcctctcctcacttttattgaatgctgactgtcgtaggtcttatgagtagcggtaacactatattatctcatttattctttatatcagccctgagacaggttctatgc

SEQ ID NO: 505400 - DNA, 584 bp, Homo sapiens
tcagggaaaagcatatactaaccatggtgggaatctcttttggagaggaatgcattaagtgaaaccatcttgctggcatctctttctgtgctggttggtttcttgtggttcagaaatacagtgagtaagtcagtcaacaagactgtacaagagttttctaagttccaggtctgtgctaggacccagagatcggtgagaacaaaatggaagggacatctttgtgcccattcagtgagccggtgcatgttgattgtccactatggggcaggctctctgccaacaccttgagattctagactagtactgaacaagtctagtggcacgtctatccctccatcagtccatccatccacccagctactcaacaagcatgtcaygaacttctgccagcataagacatgttggcaggactctgtgggatttattggtaacccagccatgactcttgcttccaacttgcctaccttctagagagatagataagccaagagcattaaatatccaaggtctgaggtggacagggaaatgtactaccagcaaagtacagatgggggtggggtgggtgctcagagcagaattagaag

SEQ ID NO: 505401 - DNA, 578 bp, Homo sapiens
aactctatatttatggtatgatgtcttgagagacatccaagaagacaagattcgtcttttcagtagatggaaccaacgttactttacagtggtagtcaatatttccaagtcctgaattcttgattgataatattatctttcctatctcttttttcttcagctctatagtaaaacctcatcccaatgcagaaatttaaacaatgtatctatacttccattctctgtaataaatagtttgatggtaccaaacacttgatcaaatgctatgagtcatataaaagtaaattaaatatgatcctacagagtcaagaaacttagactctgtagaagaagatgcacatgagagtgataaagtataggtaaaatatagatgaagtataggyaaaagctgtaggagaaaagaggacttggcagattaattcaaccagagttaggtaataattcagggaagctacatagagatggaagcacagagaatcagaatacctgagtccttgtcttatttttgcatctaatttaagcacatcatttgatccctgtcagcctcacctcctcatctgtaaaactaaaggatggca

SEQ ID NO: 505402 - DNA, 541 bp, Homo sapiens
ctgctaatgagcagagcttgagtcccaggagaccaggttctaattttggctctgccagtatggaggatgcgatcctcactcgctccatttaacttcaataggtctttgtttctgcctcyctaaaatcagggagttagctgaggttacctcagataccttttacatctctcaagttttttttgttttgttttgttttttgtttttttgttttgttttgttttgtttttgctggaaagctaactgctctagaaaaaacctttgacttgactcagaggacacggtgagatgagttacataaactctataaggctccatctcctcacctgttgaatggacctaatattctctacctgaaaggattaaataaagtcatgtatgtgaaattaagtagcagggggaaggaagcagattcgatgtcccaatgtgaatggaatccaaataacgtgatttcatgactagtttaaaggaatcttcttcactattatcctaacatcacaagcaaagctgcccaccctcagaatccggaagcattctctaccaa

SEQ ID NO: 505403 - DNA, 424 bp, Homo sapiens
tgtttggcatgatgagaaacagcaagaaggcccagacagtcctcaccttatgatggttccacttatgattttttgactttacaatggtgtgaaagcaatacatatttagcatgctcctcaatttctgatagggttatatacagataaactctcataagttgaaaatattataaattgaaagtgtatttttggcttacagtgtactcaacttatgatgggttttccggatgtaactccacagtaagttaaggagcatctgtactgtgtttaatatagcatgtaagctgcacagaaggtaagacacttcctratgatgacaaagtttttgagaaagaatgtttaagaataaggtattaggataacctagctccctgtctgactttggtttttgttgctgtaacagaatccacagactgggtaatta

SEQ ID NO: 505404 - DNA, 424 bp, Homo sapiens
tgtttggcatgatgagaaacagcaagaaggcccagacagtcctcaccttatgatggttccacttatgattttttgactttacaatggtgtgaaagcaatacatatttagcatgctcctcaatttctgatagggttatatacagataaactctcataagttgaaaatattataaattgaaagtgtatttttggcttacagtgtactcaacttatgatgggttttccggatgtaactccacagtaagttaaggagcatctgtactgtgtttaatatagcatgtaagctgcacagaaggtaagacacttcctaatgatgacaaagtttttgagaaagaatgtttaagaataaggtattaggataacstagctccctgtctgactttggtttttgttgctgtaacagaatccacagactgggtaatta

SEQ ID NO: 505405 - DNA, 619 bp, Homo sapiens
tgcagtgactgacgccatcgcggctcaccgcaacctccgcctcctgggttcaaacgattcttctgcctcagcctcccgagtagctgggaccacaggcgtgtgccaccacatccggccaatttttgtagtttttagtagagacgggtttcaccatgttgggccaggctggtcttgaactcctgacctcgtgatcccggccttgtttattcttttcttgctgaatctgatcaccttctgtggtgtgtttctagttctgtgacaaacctgaagcacagcagagaggttaaagagggacasagtgatgcaaaggccaagaaactgtgccatgaggcatccatgccactgtgcaatgcgaatgcagcacttccctgcaaatacacatctttttctttctgctgaggcacatgttccaatgctgacactagccagaatggggaagaattccaggaattccaggggagacctgacacaccatcctttctctccctctcagcgaaggaaagtgagatgcaaatttatggcaataaccttaagtccacttcattatatacagaaatcattcaaactttcaacagtgtaggttacctgttgtcgctcctcctggttgatctcatgatag

SEQ ID NO: 505406 - DNA, 503 bp, Homo sapiens
tgggggttatgaaatgcttctgtattgcatttccgaacactggtgaggagtgcttggacctgtgccctttgctgtccaggctgcaattttctcgttgagtatcacgtgaatatttatgaacagtccattgtgccaggcaccatgcccagatgtataaggctcaggctgccttcaggagtttcccatacagtgtgggagtcagacgagactctgagaggaggaggcatccaatcaggtctctaaacaggaggaactacctggtgaagaggtgggggaaaggcattccagtcagaagccactgcacttgcaaaggcctggagttgcagttgggatttctctggatgattcactgcagttgacatgcatgatgtgccagtggagtgtgaagagctcctggaggggcggctggagccaggtgcccaggggcctgtgttacagaccagtaaggagcttgagtttgaggctgggagtggtggctcaygcctgtaatcccagcactctgg

SEQ ID NO: 505407 - DNA, 655 bp, Homo sapiens
  misc_feature (1)...(655): n = A,T,C or G
ggggaaagcacttttggagtggaagaggaagcgagagagagagtgggcatttgcctatgaattatatatcttgtatttaagaagcccccatgtacctcccccctcactctcactccgaatagaatgttggccaccatccaagctggagcctggagagagataaaggaagcacagaactccttncggccttctcagcctttgacaaggagaacttggtaatcaagtctaacccaagcttcccaggcttttggcagatacaattagtacattccttctttccatgttggaaatttacctaagatattaaatattcaccccctccttctatctcagacttgatgaaacataaaagtgctgctctgaggaattaccttgtccctagttcccttactgcatgattatattggataaaacttctcctaagggctccaaaaggccccccaggtggaatcataactctttgacccttgagggtcatgtgaaacctcaaggtgtggaacctcaaggctgccctcttgctgataggaaactctgaggcctccatgctgyactggaattgccggcctttgttatggactgagcatttcttctttgcttgccctgattatcttcttgtaccacctccaaggaggaaacatttaggcttaggcaagga

SEQ ID NO: 505408 - DNA, 668 bp, Homo sapiens
tgattagcttaagtgaaagccattctcagagaagaaaagaaacttcagaaactccgaatggaaagggcaagtcaggactctttctgcctgtttctataactttgtcaatagtttcttcatggtctgatcacttttgctctctaaactctagttcttatcttgttactgtaaagcttccgtttcctcgtctatraaaggagacataagaggacataatagcaaataccttccacaaacaagataatgcttttggaggatcagcatggtaatgattaatagcaatttttattgtgttgttgttaggtcctaactacagcaatcaaaccaaaccaccatccctgtttgttccactccagccacagcatccttctttctaaccccaccctgaccccacgacaaagcagccactcctgtcttagagcatcagctccatcacccacagcaaaagaacagaacatcagagtgtacatgatgtcttctgagtggcatcacatagaggccctaagtaatctggaaatgctcaagttgtgattttttctggtgtaatcgttatgtcttgcaggaagacagaagccatagatatagctagtcctgttctgtcactaagttctgcctagaatattctcctccccacccaggtcttcatctggcggaatgcttctcaacat

SEQ ID NO: 505409 - DNA, 300 bp, Homo sapiens
tgatggggttgtttgttttatacatcactatgccaaggacaagaagcagcyttcagtgttgtttaaatatcacatgtaagatgggccaaaattccagttccatacctgtttgagcagagtacaaaaagaaataggaacaatttagaggacattacagtgagataactattggcttagtatatggaagatctttctaagacagagccattcaaaaaaaaggaatgagtcacttgctttaggaggcagtcagctttccatatggaaaggaagactcaaaaatcagggaacagttagataaag

SEQ ID NO: 505410 - DNA, 498 bp, Homo sapiens
tttcccttttttaagaaagaattttgaatagtttctgaatactgttactttaaaggttcactaatttaataaaatcaatctgttagcaaaaacaagacttctgtatatatactctgaattctaatgtttgcwgttttctaaacacatcatactctctagccttctctcaaatgtcacttccttcaaaaactcctctaactcttcataaataacatccatgttcctataacacactatatatctttttatatataagtattagacatttattgttcatagttctgaaggttggcaagtccaagattaaggcactggcaggtttcatgcgtggtgaaggctgctttccacttctaacatggcatctcttactgtgtcctcacatgacggaaggggcaaacagctcccttgtacttcttttataagggagctaattctcttcataagggctctgccctcatgactaaatcacctccaaaagcctcacctcttaatattatc

SEQ ID NO: 505411 - DNA, 498 bp, Homo sapiens
tttcccttttttaagaaagaattttgaatagtttctgaatactgttactttaaaggttcactaatttaataaaatcaatctgttagcaaaaacaagacttctgtatatatactctgaattctaatgtttgctgttttctaaacacatcatactctctagccttctctcaaatgtcacttccttcaaaaactcctctaactcttcataaataacatccatgttcctataacacactatatatctttttatatataagtattagacatttattgttcatagttctgaaggttggcaagtccaagattaaggcactggcaggtttcatgcstggtgaaggctgctttccacttctaacatggcatctcttactgtgtcctcacatgacggaaggggcaaacagctcccttgtacttcttttataagggagctaattctcttcataagggctctgccctcatgactaaatcacctccaaaagcctcacctcttaatattatc

SEQ ID NO: 505412 - DNA, 586 bp, Homo sapiens
ctgctatagctaacccagtccctccataataacattaatacattcatgagggtggatccctcatgacctaatcagctctaaaagtctccagttctcaacaatgttacaatggcaattaaatttcaatgtgagttttgaaggggacattcaaaccatagaaacaactctcaaataaagtctgcattagaaaacatccaggattgtgaatttgctctttgraaggcctttcggaggcaattccattcttctttaccaatgatttctcaagcttcaattcactccaggtttgtgtacttcatcaagcttcctttcctgcatggttcatgactctaaattatttacttgcatcacctccatataaatgtttattttctttgtaaagggagagaatggaggcatagtataattaaccttcccatgatgttgtagatactgagaatgaatttttattagagggtagggtgggaggcaagagaaaaagcaagtgcctgcttcatcccctgagtgccacctgcatttaagggcacagacagtgcctacccgagagcatcttgcccacagatcagcccacacacagtgccactga

SEQ ID NO: 505413 - DNA, 535 bp, Homo sapiens
gactgcataggtgcattagataacttttttagaagacagaattttctataccttgattgtggcagttatgtgattgtatacattcaatagtcatcatcaaagtgtacacttaaaaggataaatcttatatgtgcattatacctcaatgcttcatatgaaaaataaaagaacaaaaagcttgctgggaagccactgtgaaactcataggagtacttgcattgggtcatatttgcatccaaaaataatggcttctattattcattttgtctcaaagacttaggcataagaagatactgttttactttggactcygataaatacaggaataaaggttgaaaacataaagttaacttctagtctaggcatcatcaatttaaatacctccaccggccaggacaataacccaaatgggtgaactaagctaagaaaaggaagagtccaggtgtgatggtacatggcaattgacttaaccccagtgacaatgaagagttgttaaaaccttgacaatgtggaaagtgtatatgctcagggcatg

SEQ ID NO: 505414 - DNA, 665 bp, Homo sapiens
tcctaccagcagtgtataataagtgttcccatttcaccacracctcatcaacatctgttgtttttttactttataataatagccgttctgactggtgttagatgatatctcattgtggttttgatttgaatttctctactgattagtgatgatgagaattttttcatatatttgttggccacatgtatgtcttcttttgagaagtgcccattttttaatggaattatttgttttctgttcatcaaactgtttacgttctttatagattctggatattagacctttgttggagtcacagtttgtattttctcccattctctaggttatctgcttactctgtcgacagtttctttgaccatgcagaagctctttagtataattaggtcccacttgtcaatttttgtttttgtttcaattgctttttgggacctagtgaaaattctttaccaaggccaatgtccaaaatggcatttcctaggttatcttcaggattttttaatgaagatgttactgagtccaatacattgactctcattcaaatacagtattgtttttaggttgtgtggacttgatctaaacagagttgctggaacaaaagtcatttactcttgcctttctgcttctcacacttggtctaaagcatttcataaaggtatgtaaggtat

SEQ ID NO: 505415 - DNA, 665 bp, Homo sapiens
tcctaccagcagtgtataataagtgttcccatttcaccacaacctcatcaacatctgttgtttttttactttataataatagccgttctgactggtgttagatgatatctcattgtggttttgatttgaatttctctactgattagtgatgatgagaattttttcatatatttgttggccacatgtatgtcttcttttgagaagtgcccattttttaatggaattatttgttttctgttcatcaaactgtttacgttctttatagattctggatattagacctttgttggagtcacagtttgtattttctcccattctctaggttatctgcttactctgtcgayagtttctttgaccatgcagaagctctttagtataattaggtcccacttgtcaatttttgtttttgtttcaattgctttttgggacctagtgaaaattctttaccaaggccaatgtccaaaatggcatttcctaggttatcttcaggattttttaatgaagatgttactgagtccaatacattgactctcattcaaatacagtattgtttttaggttgtgtggacttgatctaaacagagttgctggaacaaaagtcatttactcttgcctttctgcttctcacacttggtctaaagcatttcataaaggtatgtaaggtat

SEQ ID NO: 505416 - DNA, 537 bp, Homo sapiens
gattcaccaaagaatacagtttccacatcttgatgatttcataccccctaccttgaccagtcaatgaccccaactttccagccccttgccctccatggtccccttaaaaactccagcccagaattcttgggggagatggatttgacggtctcctcccatctcctcactgggtgccctgaaatcattgaactctgtctgctgcaaaccctgctgtttcagtgtaatggatttgttrctacacaaggggcatccaaacctgttggccctataacaccagaatagaacatcaagtgagtagaacatctagaaataaaaatataatcattaaaattttaaataaaattaatgaatgggccagaaatgcacatatgaagaaggtggcaatataacatgtaaacctgatattagatctgattatactgccatattactctaaacataatccagagggaaagagaatgaaaattatgaaagatgcaactttacaaggatctcagaaaaggagacattatacccattataataatagaaacaaga

SEQ ID NO: 505417 - DNA, 582 bp, Homo sapiens
gttttagctgctgctaggaaaccctaatctccaggttcaacaaataccacctcttggttcttcctggtcaaggttgttgtgggtaagcagcatctatcggtgccagtggtgaggggttaaaagaatttaccaagayaattgtaggtaaagaaagtcagatttattagacaaagtaggaaaatacgttgccaaggagcaatgggcagaatcagcagaagaggagctgactgccaggaaacaaagacttgctggagattttataggacggctcttgggttgattgataatgccacggcagcagggagctaacttgcattcttctgttcaccaaggagatgtttgatgataaaatgaagcatttgaggataaacagaaagtttgtgagttatgaacattatctgtgcaggagggctatacatcctgggccataaagaaaggcagacctgtagcttatttgctttatctctttgctttcccctggttctgccagcctgactcttttcctttaattaggactccacagagatagcaataccttcctgcgggggctgatctctctcctctttggcagctcagctaact

SEQ ID NO: 505418 - DNA, 582 bp, Homo sapiens
gttttagctgctgctaggaaaccctaatctccaggttcaacaaataccacctcttggttcttcctggtcaaggttgttgtgggtaagcagcatctatcggtgccagtggtgaggggttaaaagaatttaccaagataattgtaggtaaagaaagtcagatttattagacaaagtaggaaaatacgttgccaaggagcaatgggcagaatcagcagaagaggagctgactgccaggaaacaaagacttgctggagattttataggacggctcttgggttgattgataatgccacggcagcagggagctaacttgcattcttctgttcaccaaggagatgtttgatgataaaatgaagcatttgaggataaacagaaagtttgtgagttatgwacattatctgtgcaggagggctatacatcctgggccataaagaaaggcagacctgtagcttatttgctttatctctttgctttcccctggttctgccagcctgactcttttcctttaattaggactccacagagatagcaataccttcctgcgggggctgatctctctcctctttggcagctcagctaact

SEQ ID NO: 505419 - DNA, 588 bp, Homo sapiens
ctctcacagctagaataaagttgccaggagaagatggaagaagacttgctgagtcttctggccttcatctttctcccttgctggatgcttcctgtccccaaaacatcagactccaagttctttggcttttggacccttggacctacacctgtggttttttcaggggctcttgagccttcagccacagactgaagggctgcactgtyggcttccctacttttgaggttttgtgactcagactgatccaccactggcttccttgttcaacttgcagacagcctattgtgaactttaccttgtgatcatgtgagttagttccctttaatgaactcactctcatatacgtatattctattagttctctccttgtagagaatcctaatacagcctctcatcctatgtccaagtcaatttgacctgcccaaagcttgtttggaggccacgtaaaattctagcttctctaaccatttttccaagtcaccccgttttcttccccctctggtcacaatcttgtgattgtttcagccaccctcacccactaatccttcagctatccatctccagggtttgataatgtatttaatttta

SEQ ID NO: 505420 - DNA, 618 bp, Homo sapiens
aacagctggagagaatatacccaccaggagagcaattccagaggaaggaagtcaaggcggcccaaggtagacccagaaaaaagagcagcaattgcttttgatgatttgcatttcacatacttaaaacagaggctggctgtctgagagatcaatccagagatagagaacatcatttttaaaggaaacagcacaattaaaccaagaacttgcactagaaatggttctggcccgaaagargtctgttctaagcaccttggtacaggaatgggccaggcagggtgctgactacaacacagaaggaagcagcctgtggtgggtagccaggtcagcagagctcaccctgcagggaatcttatcagccttttataatcctgtcattgtccattcctgttaaatgcaagatctgccagagatgcctgcagaatgacagagaagggctgtgactctgccgtgaagaaatgtgcttcctaccaacattggagtagttcttggtgcctaagagatcccagctaatgcagacagaccaggatgaccacagcaagccagcaaaggagcttccctctgagcaagaacagaggaagggaactgggcaaggaagacaggcaaggctgctgtagg

SEQ ID NO: 505421 - DNA, 654 bp, Homo sapiens
ataatagtaaaatccctgtggattatgtctcagtgctactgagtctcactacgaatatgctaaaatcactgctgaagatctaaggtctgttacttaytgtaggtgctgcataaccaattacccccgaatgcaatgccttcacataaacacaatctcacagatttcatgagtcaggaatttgagagcggcataactaggtggttctttcactgagttggactcagaatgtgggcaggagctacaatcatctgaaggtttgccagggctgaggacccattccaacatggggtactcacatggctgttgacaatgggcaacatgcagtttcccactttgtgggactctccatcagctgctgaagcaccttcacaatatggcagcggacttctttcagaggaagcaatccgtgagagaacaaggagaagacacagtgccttttgtcacttggtctctgcgatcacatgccatcctttccacttgattctatacactgtgattcacttctaagtccaacccacatctaaggggaagggaatcaggctctgtcccttaaagggaggagaactgaagatttgtagactttactttgaaaccaccaggatgaggtatttgtgctttgggggcagggtggaggggagaaggagagtgttaaaa

SEQ ID NO: 505422 - DNA, 554 bp, Homo sapiens
tgtgcattttatattccaaagcaaaaggagaaaagggatcatgctaatataaaagctgtgtttacaaattcccaggggcatcataagtcctctaaagcaacggttctcaacaaggagcaatttcaccccacagggaacatttggcaatgtctggagacgtttttggctgtcacacctgaaagggggtggggatgctagtggcacctactgggtagagaggccagggatgctgctgaacaccctacgatgcacaggccagccccgcacaacaaagaatcatccagccccaaacggcaacagtgctgaggactgagaaagcctaaaatgtaggaagcaggaagaagactagaacaaagtcacgagtcctagttcgttctctgataggctcctcggtccagacataccaccggaccttcctgggtctctggttcattgtcactaaacagagaggttggcctgtttcggaggttttgcaacccctagactgagttcaaccattaattattyagggcttaaagtacggctgctctccaggctggcagccgctgcctctc

SEQ ID NO: 505423 - DNA, 620 bp, Homo sapiens
ggacaagagctgccccaggagcacctccccgactgtttgtaggggatgatacgtgcgcatgtgcatgtgtgccaggcacatcacccgtgtgtttcatgtcagtgaaacatgtccgtcattctctaaggcctcatgtattcttacttgatagaaaactcctgggtgaaatgacaggcttttggaactgctttttcgtcagtgggtgctgctacagagatttggaagccctttaggtatgcgaggtggatgtatttctgtctgttttgacatcatcatcaccacttcaraagttgtcatgttgaaactttgtgctggcatttagcacctgctctgcttaattatagcttgaaacacaaatactgtgacatcttccctggagctggaagggtgctgagaggacagtgctggcatcactcacactgagagggaaatctttcgggttggatttcagggaagagctgtgctggccattggaatgaggacagtcaccactttctctgtgtaatggacaatatcccagcagcctctgaattaagtcacagagacgtgaaattggagggttttttttagaagatcatctggatcacccaggccttcgagcagctcattgtcttcctaag

SEQ ID NO: 505424 - DNA, 568 bp, Homo sapiens
tactctaaatactagctgtttatcagatatgttatttgcaggcattttatcacactctgtagcttgctttttaatatttttaatgggatctttcatagagcaaatgttttcaaatttgagtaagtctaacttatcagttttccctttactggatcatgctttcattgtcaagtctaggaatgctttgtctactcctagattctgaagattttctccaacttttttctgatggtttcatagttttatttttatttacttattctttgagacagggtcttgctctgccacccagatgggtaggcagattttccccactttatcctttttttgttttagctattctagttcttttctgtaaaaactgtagattaatcttgtctatatttacaaaaccttttasgattttgataggaattgcatcaaacctgtatatcaatttgaggccctttacacttttcaaaccccttatagtttgatcacattttctcatttaatttacttcaattcaatgagagtgtcagcaggaccagtcgcagacaaaacctctcggacaccggttttaggaagg

SEQ ID NO: 505425 - DNA, 592 bp, Homo sapiens
gcctgtagtttccttgagaagaagtaagaagaatggtggtggtggtaagggggtgaggtggtaatagtaatgaccaagatgatcctgagaatggcaacaatttattgagcacttacctgtgtcaggcattggattatgtctttcacattactgcccttgatctttataacagccccatgatatatctttatccctaatttacaaaagaggtatttaaaggctagagaagttaagtaacttagagctggtcttaaaccaggtctgtttcattcaagaygggggccatagcttgctggtgtttgttttttgacaactggcacagaactggagagaagtgactttcgtttctgtgaaatgggaagcttggcccaagaagaggttgtccttcctaataactatcccaacagtagaatgggctgccctgatggagtaggcatcctgcttccagggattcttgaactgggtgggctattgggctacccagtggttttaaatctacgttttacagagttgcttcagaggggacccttaactggggtaaagaatagacccggaaggcaggctctgggctctcctctgcttttagcagagt

SEQ ID NO: 505426 - DNA, 629 bp, Homo sapiens
tcaagatgtgtaaaaatgaactggtctctccacaaccaactatctttcctagttctaatatcagtgttgtcaacaccaggttttttttttttttttatgttccatttgaaaccttgtcttcagtcacttggtatgactctgatactcagtcagctaatctactgacttctttcatcttgttccttgtgtgtgtccctgtctctgttctcactgcttccctcaratcctttccagctcattcttggatcagtccatcagcctcccggggaagctctcctaccccaggatcccctgttccaatctatcctgcacgtggaccccaggtgaatgttcctttcatcccacccattgctttcatcccaccactggctgctcgtatctaacataaatcccttgccaaatttctgaggggcttcatggtatgacttgcctataccaaccaatccagcagctctttcccttttctcaacatggtctccctgctcttaatattaaggggggtctcttaacattcctcaaatgcataaagctcatttaatttgggttcacacttttcctcctcagcctgggcaacataatctttttcctttagcctaaataaatcacacacctcttatttgcaacaaaac

SEQ ID NO: 505427 - DNA, 629 bp, Homo sapiens
tcaagatgtgtaaaaatgaactggtctctccacaaccaactatctttcctagttctaatatcagtgttgtcaacaccaggttttttttttttttttatgttccatttgaaaccttgtcttcagtcacttggtatgactctgatactcagtcagctaatctactgacttctttcatcttgttccttgtgtgtgtccctgtctctgttctcactgcttccctcaaatcctttccagctcattcttggatcagtccatcagcctcccggggaagctctcctaccccaggatcccctgttccaatctatcctgcacgtggaccccaggtgaatgttcctttcatcccacccattgctttcatcccaccactggctgctcgtatctaacataaatcccttgccaratttctgaggggcttcatggtatgacttgcctataccaaccaatccagcagctctttcccttttctcaacatggtctccctgctcttaatattaaggggggtctcttaacattcctcaaatgcataaagctcatttaatttgggttcacacttttcctcctcagcctgggcaacataatctttttcctttagcctaaataaatcacacacctcttatttgcaacaaaac

SEQ ID NO: 505428 - DNA, 629 bp, Homo sapiens
tcaagatgtgtaaaaatgaactggtctctccacaaccaactatctttcctagttctaatatcagtgttgtcaacaccaggttttttttttttttttatgttccatttgaaaccttgtcttcagtcacttggtatgactctgatactcagtcagctaatctactgacttctttcatcttgttccttgtgtgtgtccctgtctctgttctcactgcttccctcaaatcctttccagctcattcttggatcagtccatcagcctcccggggaagctctcctaccccaggatcccctgttccaatctatcctgcacgtggaccccaggtgaatgttcctttcatcccacccattgctttcatcccaccactggctgctcgtatctaacataaatcccttgccaaatttctgaggkgcttcatggtatgacttgcctataccaaccaatccagcagctctttcccttttctcaacatggtctccctgctcttaatattaaggggggtctcttaacattcctcaaatgcataaagctcatttaatttgggttcacacttttcctcctcagcctgggcaacataatctttttcctttagcctaaataaatcacacacctcttatttgcaacaaaac

SEQ ID NO: 505429 - DNA, 629 bp, Homo sapiens
tcaagatgtgtaaaaatgaactggtctctccacaaccaactatctttcctagttctaatatcagtgttgtcaacaccaggttttttttttttttttatgttccatttgaaaccttgtcttcagtcacttggtatgactctgatactcagtcagctaatctactgacttctttcatcttgttccttgtgtgtgtccctgtctctgttctcactgcttccctcaaatcctttccagctcattcttggatcagtccatcagcctcccggggaagctctcctaccccaggatcccctgttccaatctatcctgcacgtggaccccaggtgaatgttcctttcatcccacccattgctttcatcccaccactggctgctcgtatctaacataaatcccttgccaaatttctgaggggcttcatggtatgacttgcctataccaaccaatccagcagctctttcccttttctcaacatggtctccctgctcttaatattaaggkgggtctcttaacattcctcaaatgcataaagctcatttaatttgggttcacacttttcctcctcagcctgggcaacataatctttttcctttagcctaaataaatcacacacctcttatttgcaacaaaac

SEQ ID NO: 505430 - DNA, 683 bp, Homo sapiens
agctgtgccattccacagaacatcctgatcactttgctaactttcctgctaatagaaggacarttctactcagtgaaatgtttgcattcactacatgtggttctactaaaaaggatcaatttagatcactgaacgaatttttcctctgaaaaattttatactttttatatgatagggatcaaggaggtctaggcaagtcgtgggacctcagagaggcttagttttcccacttgaatatgaacagaatggaagaagtgttgttctttcaggtggtttttgacttgagtgtcctgtgactctgagaatagaaaatgatctcttagtgacctgaatgagagattgcatttccagaaggttcaaagtaccagccagtgattctcttggacaacaggaagttgtggcttcccttggtgctggtggaactctcgacactcgtcattcagcaccagggcaaaaagaatgattggctagacagcgtcaaaacagtagtttttctagactttaattccagccctctttaggactgttctttgctatgtcagtctctgaggatacagatggattttgagcaatcctaattgtcataaagacctatcatggtttactgatgtatgaatttactcattgttctaatatgtgtatacacacattcaaatatatattagcttgtaacactgggatta

SEQ ID NO: 505431 - DNA, 627 bp, Homo sapiens
gcgatgagtactgaataaaccatctacacaaagtagcttctcagcagacactcaatatatctatggtgagtgttgaatgctgagcttgtacacctctacagcccccaacaggtccaacagatctttaggtgtgcttttcatactgaaattctccctttccatacatatgttttgttcaagaccacttaattcactggcataataaagagcttaatccttacccttacagaagaaagttctcccctttttatcctgatgccaactggtaattatgtatacactcataactgagtaccaccaaattagcaaataactgaatttaggtaaacttrgactgacaaacattgccgaatatcatgcatagattcagggccgctgtcttgtcatcctagggaccttcccaatgacaaatgagaaatcccctcaaagctcagcaacattcaggaagtagccatgcagacccaatgtctgtgcaaattagtaacagctttaggtaccagcatgtctttacgtaaatgattttaaaaaccattacctctttcacactggggtccagtaaatccgtaagtgcatgcacatcgatttggggccacacaccttcctccattgagacagccactttcacaa

SEQ ID NO: 505432 - DNA, 543 bp, Homo sapiens
gtgtatatgtgccacattttcttaatccagtctatcattgttggacatttaggttggttccaagtctttgctattgtgaatagtgccgcaataaacatacatgtgcatgtgtctggtatttcatgtttatgttatttttcaacattttaaaatttctctcattcttagtaaatttttcttattcttaaattcttaaaatttttctcattcttagtaaatatttgcattttcaaaaatcactttaattttaatttgtatagatacttcaaatttgggattaaatacacattgctccattaactaaatctttttctaygtatactattctgtaacactattgtgttattttccccttattttttatattttgctatcaaaatagcactgaattgagcattctcctttataactaattacttagctattaattattttcttcattttaatacctagagttcatctattaagggatctgtgaaactgcaatcctgacaggttgtactgctttgctattttggggctacaaaattggacattttatta

SEQ ID NO: 505433 - DNA, 521 bp, Homo sapiens
atttatattacctttattagaaggaaaaaagtcattgtcaaacacatagtaaatgaagaaagaaaaaagagaaaaaaatgcatctgcaatcccccctccagtgttaatattttgatatacatcattccagtcttctgtctctctccttctctctttctctctctctgtctctctctgtctctgtctctcgtgtgtgtgtgtgtgtgtgtgtacgttgaaacttagccataatatgtaccgtttrctgaatgcctactctgtgccaggcactttgcaaggcactttactaacatattcttatttcagctttcttccagcccaatcaagtatcattacccccttgacagatgaggaaacaggctctgtaagattgaatgccttgtctagagttgctcatcagtccatgagagttgagagttgatttggaatttttcgaggtaaagccaatgcccacctcaccagcgttactattttgatatgcattattcctgtcttaacacctatacctgctccctccctac

SEQ ID NO: 505434 - DNA, 605 bp, Homo sapiens
caaagtgccctctctccccagcatctagaataatgcttggcacttagatgtttattgaacatatgaatcatcctgccccccttttcagaactgctggaagaatcagtgaagaaaaatgagaagtgaggagggagaggcagaggaagaggagacagaaattaactatatgttattgagggtctactatatgggcagagtgaaaggagagttttcacctctattatcttgctaagcccttacagcaagcacatgagccggattttacaatccctgtacaattaatgagagatctgaagctcagagaagttaagtatattgtgtaaggtcacacagctaggcagtggctaagctarggtttgaattcagctctgtctgcctttatgcttgtctcacatttagatagctcaaaactgcaatcttttatatattttatttaataattattctggaagtctgtctttttttgttgttgctgtttttatctttgtttacagctggtttttaaatatccatcttaacataagctagctggtcagaatcacatcttctaaagctggaccagtggagggaagatgcttcacacattagaaatggcaatggtcttg

SEQ ID NO: 505435 - DNA, 510 bp, Homo sapiens
aaaaaaaaaaaaaagaagaaaaactccctccaaagatttggacttgraaagtgtggaatgggtgtcatgcatctgtgtgtttaataaggagttcagttgatactaatgcaggtgcacgtggttcttagatcataccttgaaaaacactcccctggtggttggatggacggtgaagccggcttgaggctggaggcctgtcatttgcaatgggaagtatgcaggacagacaagagaacatggatctatttgttatttttggtggctctgtagctttcttggcctgatggattgcaatttgggggcccaatttgtccaaatgggcacctttcccagggtcctgggtgggctcaagcacaaaggtaggtggccctgaaaggaaccccatctgtgttcttcctagggacttctcattcaaggactttaaccactgggggttttgtagtttgttgtttgtttttgcaatttttgattctagaaataaaattgagctttcaaaatcaaccaaccaac

SEQ ID NO: 505436 - DNA, 531 bp, Homo sapiens
tgacagctggaatccacatttgaccatctccaaccttgatggtatgggtaacctgcaagaaaagctggcatcctttgcaattactgcacatgcacccagaatctggagatgctgaagaagatccaaaaagagctgttgcagctacaggcctggctgatgctacaggcctggctgattccccaggccaaaaaggagagccaggagatcagcaacaacacatytgagctgcaacagcgcctggctcacacagagctgcagagtgtgacagtggccgctgcttcacctctgccttccaaatctcacacaaatgtctcctgtggccaactctaacttggaaccatgcagagaactgaattctgggaaatgtagttctagcttaactagtggccacagcacacaggcatcacagggctggagtatgtgttaggggatgagtgcagcaaatgaaagaggtggtcataataagctctctgttctttctccttggactagggacaggaagagcaaagacagccatggatgagccagagt

SEQ ID NO: 505437 - DNA, 667 bp, Homo sapiens
ttgctcatgatgttccctttgtatcctcatttccaaatcctttttattctttaatttttttggtatatagtctatatgctatattttttcactttttataaaggaatatattaatgtatttttaacttttttagagttttattgtctaattcccagtcccagtgccacttcttcaatgaagtcatctgttagatcctgactaattcctgtattttcagaatttgcatggtgtgttatttgttcatttcttgtgatgctaatacatttttactttgtgttatatttttctctcaaattgttattttaaaggataacatctgccttttaaaaattggaacaaattgtactatgagcatctgtcaaccctttatttaatctatcagttgttaacattttgccatgttttagaagtctctctctactcacatgtatatgtgtatgctgatatagatatatagtttacagtatctatctctaaatctttgagtcattttaaagtaagttgcaaatattttcatacttcacccctaagtacttcactacatatctcccaagaaaagaacatttttctcctatagaatctcaatgccatgatcrtactcaagaaatgtaacatggttacagtagcatcttatgtgtggtccatatttatatatacccagttgtc

SEQ ID NO: 505438 - DNA, 619 bp, Homo sapiens
gcttatacaactgaaagtgctttctgaatattaaagtgcttaatatttgaagatccctgaagccacagtgtctgcagggtaagtattagggagaagggcattcccgcctgctctattccctgcttcctgctggaaatccagataattgggaaagggctttgaggggagagaaaggaagaaatgaaacgggaagcggagagctgtggtgagccttgctaggagaagaacccctgatcgaggaccctagaaactgtttggtgttggatccagcgcatgctgcccgccctgtgctgccctcaagcttcctgcccttcgctccygctcccgagcactggctttgatgagaggtagcagagccgatctctgggacccagaaaccccacctgcctgccttggtttctcttgattgcttttgtcacagcaccacctgctggtaagcttaaactttgggtggaaatgggcttcactctttatccttccttcactttcccagaagaaacaaagtgtttaagtttcttatcactgtattttcgtaaacacatgatagcaaactcctataccactgtcaagtatagccgagaagctgtgtttccgctttgtaagacagtagaagtgatga

SEQ ID NO: 505439 - DNA, 516 bp, Homo sapiens
gatattgtggcaatgtcaaatcattatatgttactaaaatattagtcttaacttctgtacacatctcattgyggaaaagtagcaaatagttaacttgccaccacaggttggaggcccacacatgagcagctcagagatagagcctcatcctcaaatgactcacataccagtgggctgaaaccaaatatgagggcttgagtaccttgaactagagaaccgcaggctctgagcaaaattgtgcttgcttgggaggctgcacaatggaagcaaatggctcaggtagaagacaacagtcacagtgagaagaaaaaggaagggataaaagacagaaactcatgtaaaagaagagctgacagaatcagccaagagttgtgtgtctggaaaaccaatgaggtggtgttgctatcagcaaaaaaagaaatccatgagaaagaattggttgagtaagaaagacactgaactctgttttacatgtatttggttaaatgtgtgaatagggaaaaccaagaagttatc

SEQ ID NO: 505440 - DNA, 487 bp, Homo sapiens
ttactaacttactttttatccttaacacatcaactctgctcttattttacaggctactactttttaaattatgtatattacttcttatacatttttactataattcataagctacttattatccatatttaatatttcttataagtgtcccacaccttgttttccttctccttacagaatttaatatcctcaaacaatacaacaaactaagatcattgtcagtggcctctctccagccacaatgggcagcaccaaggacgcccatccaaagggtcacatttcaaggaaatcacrtatcaatccaagaatgagaattcagagaaatgaacatatatatcaatgtaaaatgtacagatttaaatgtattttttgtaccttaatttttgtgatgaaatattaattgggtggtttttaggcattttataaaaatcatgtctaagacaaaaacaaaaagattaaagttaaatctaatcccagagaaataata

SEQ ID NO: 505441 - DNA, 487 bp, Homo sapiens
ttactaacttactttttatccttaacacatcaactctgctcttattttacaggctactactttttaaattatgtatattacttcttatacatttttactataattcataagctacttattatccatatttaatatttcttataagtgtcccacaccttgttttccttctccttacagaatttaatatcctcaaacaatacaacaaactaagatcattgtcagtggcctctctccagccacaatgggcagcaccaaggacgcccatccaaagggtcacatttcaaggaaatcacgtatcaatccaagaatgagaaytcagagaaatgaacatatatatcaatgtaaaatgtacagatttaaatgtattttttgtaccttaatttttgtgatgaaatattaattgggtggtttttaggcattttataaaaatcatgtctaagacaaaaacaaaaagattaaagttaaatctaatcccagagaaataata

SEQ ID NO: 505442 - DNA, 557 bp, Homo sapiens
aatgtgctgtacagtcatttacttcccagttcctggtcttagctccttcacctaacaggtagcatttggagaacttaaactttctgagctttaccctttactcatcttaaaaatatacctttaaattcctacctcaaaatgttgtagagatctaatttagayaatatgcaaagtaccttgttttgatcacaatgaatacttattgtgtacttttcattagctaaataaaatttttatataaagatgcaaaaggttaaaggggaaagccagatctatactcttccttcccgttgaggttcttagaatagaaaaatgacagaaattgtaattggtccccagaaaattacttttatatgattagtgtggtggtggaagtcagcatacccttgggtaagttcacgagatatgcaatgtatattttgctgataaaggagaatattcagttcagatttatcatattcttttatttaattaatatttctattgtgcctactaggtactaggtactttgctaggatttggagataaaataatgggaaaaagaaaaggcaagttcc

SEQ ID NO: 505443 - DNA, 517 bp, Homo sapiens
ctagttttcaaaatactctgccyacatgatttttagatatgacttagccttaattgctgactcagattttcaccttttaaaaagcaattgtgctttttcatatacactatcaaacaagattataagatattttaaggtaagaaagtaaaagggcatccactaatgatcatcagaatcacctggaagggccaataagccacacattaccaggccccttccccaaaatttctaattctgtagatctgtggtacagcctccaattttttgcttctaataagaccccaagtgacactaatgctgctagtctggagaccacactttgagaatcactgcattaaattaacaattttattggttgagttttcaccacagtgtgcatatctgttgactaacaatgaatagctttgttgtcgccaaacactgtaatgtttccaaatatccatatgtagtcacaggcccagagaaacaaaccacatctatattaagactgttttgttgttgtttgacccccccaccc

SEQ ID NO: 505444 - DNA, 551 bp, Homo sapiens
tttgttggccaggctggtctcgaactcccaacctcaggtgagttggccttggcctcccaaagttttgggattacaggcgtgagccactgcgcttagccctactttaattatattctatcacaagtaagtaagaatattataagaacaaaaaaatacagagttcacaaggggtggctttcataccacatctgtaagtcccctgaaagtgaagccacatrtggtgtatgttgaaaaacccatcttctgaatgtagtgtcctttattaaatgagatatccattagaattttgagctcaactctcttccctgttgaaagcaagggatggagaaagggacagaagacttctccgtggtgttggcagccaccctgggcctgagaaaggtaatttactgattcttgctcctggaccacagaggtctcttctctttctcttccattcttggaagcactcacagaaagtagatacctcagaaatgctacagtgaaaagaaccgtagaagatgctagtccaggggcaagttcaaagtctgcattaaatagtaacaccacgg

SEQ ID NO: 505445 - DNA, 551 bp, Homo sapiens
tttgttggccaggctggtctcgaactcccaacctcaggtgagttggccttggcctcccaaagttttgggattacaggcgtgagccactgcgcttagccctactttaattatattctatcacaagtaagtaagaatattataagaacaaaaaaatacagagttcacaaggggtggctttcataccacatctgtaagtcccctgaaagtgaagccacatatggtgtatgttgaaaaacccatcttctgaatgtagtgtcctttattaaatgagatatccattagaattttgagctcaactctsttccctgttgaaagcaagggatggagaaagggacagaagacttctccgtggtgttggcagccaccctgggcctgagaaaggtaatttactgattcttgctcctggaccacagaggtctcttctctttctcttccattcttggaagcactcacagaaagtagatacctcagaaatgctacagtgaaaagaaccgtagaagatgctagtccaggggcaagttcaaagtctgcattaaatagtaacaccacgg

SEQ ID NO: 505446 - DNA, 507 bp, Homo sapiens
ctaatatacacattagtctgatatactagagattagtaataaaygcaatatatttatttcatatatattttttcatatatatagcatataaatatatgaaataaatgcaatatattagtcagtgctggcttcacattgccaattctgttgtaagcccctaaacaaagccacacacatctttatgatgccacaatcaagactactagaaagatagagccacttatgcaccccttctgtgatccacttgccatggcttctccagggaactagctgcctgatcataaaagggtattttttagctcagctataatgatcaatactaaatccacttgcaacttaaacaaaggatttctaggccttaatacaaagcactcccatgcattcacagatctccaataccaaatgaaatggcaatagttctggttcaccaccattccttggctcaatgcagtccttctagggtgaataaatgaaatgggttataagctgaacctcagtgtaatatta

SEQ ID NO: 505447 - DNA, 682 bp, Homo sapiens
aatggtgccttgctgctgcatcttccagaggggtgagctgtaccttcacatggcagaagggacaaagcgggaggaggatgaacactgtgttcccatggcggaagagcagaaaagggcctaagctagttccttccagccctttttatcacataatcacttcctagaaggccccacttcttaataccaccagaagagaaattaagtgttaacacatgcattttggagaggacacattcaaaccataagattctgacactggccccccaaattcatgtccttctcacatacaaaatgcattcattccatcccagtagtctccaaaatgttaattcattccatcttccacacaaaagtgtaaagtccgtgttctcacctaactgtcatcaagtcagagataggttagactcaaaggtgtgtttctttcttaggcaaattgctctttagctgttaacctgtgaaatcaarcaagttatatgctcccaaaatacaaatagctaggcagaaacaggacccacacttccaatctaaaagggagaaataagccagaagaaagggctaatgggtaccgagtaagtccccaactcaacaaggcaaacaacattaactcttaaagcttgacaataatctttgactccatgtcgaacctctggacacactggggtccccaccagttcaacttaaa

SEQ ID NO: 505448 - DNA, 496 bp, Homo sapiens
caaagcattggaaagtttctgtgtagaaagctaactacatgatttttagcccccaatataccataggtgtgatttatgggcctgtccatttaggttccttgaattattgatgaatctttggttaggatagagagacacaaagcaatatacatctggatagaaaaggaaaagttctcagcagctgaatattatcattgttagcaatattgcagctcttttaggaccctgagccaggctggtgtttaccttttctattctagtgcrtcctttgcccaggggaactcatgtttgactggacgcttgagattctttgggatgcttgcaattccacttggaaggggatgtatgcttttgaccagaagcatccagctcatttgtgcggtattttctttttccagctatcagctgtatgtctaagggggaaatgaagcagaaaaacaataagaagtgcatacttctcgtcaagaccaccagtggcctccatgttaaattcaat

SEQ ID NO: 505449 - DNA, 496 bp, Homo sapiens
caaagcattggaaagtttctgtgtagaaagctaactacatgatttttagcccccaatataccataggtgtgatttatgggcctgtccatttaggttccttgaattattgatgaatctttggttaggatagagagacacaaagcaatatacatctggatagaaaaggaaaagttctcagcagctgaatattatcattgttagcaatattgcagctcttttaggaccctgagccaggctggtgtttaccttttctattctagtgcatcctttgcccaggggaactcatgtttgactrgacgcttgagattctttgggatgcttgcaattccacttggaaggggatgtatgcttttgaccagaagcatccagctcatttgtgcggtattttctttttccagctatcagctgtatgtctaagggggaaatgaagcagaaaaacaataagaagtgcatacttctcgtcaagaccaccagtggcctccatgttaaattcaat

SEQ ID NO: 505450 - DNA, 585 bp, Homo sapiens
ccgtgctgaacagtgctcattcccacagtggggtcattgcattattgctctccccccatgggatggctcttccaagagtttatttgatcccaaacccaagggggtggatgaagcccctgcttaccttgtcgatgaaggaggygaacttattgttgagggtcttgatctgctcgcgctcctcggcccgcacccgctggatggtggggtcgatttgcaggtgaagaggagtcaggagactctggttgacagtgacctcttggatgcctccagggggacacacggggaagctggggccactgaagcctcctccaactccacccccatagccaaatccactgttgactccaaacccgttgctggccctgccaccaaagccacttcggcagctgctgccacacccattgatggagacccgcttggcaccccccaggttgtagaggctgcggcttccaaagctggccccagcactgctgatccttcccaggcccccactccctgctgcagagcgggccacagagacagagctgaagcgggagcggccagctgccggggtgatggccgaggtggtgctgaagcccctgcggc

SEQ ID NO: 505451 - DNA, 585 bp, Homo sapiens
ccgtgctgaacagtgctcattcccacagtggggtcattgcattattgctctccccccatgggatggctcttccaagagtttatttgatcccaaacccaagggggtggatgaagcccctgcttaccttgtcgatgaaggaggcgaacttattgttgagggtcttgatctgctcgcgctcctcggcccgcacccgctggatggtggggtcgatttgcaggtgaagaggagtcaggagactctggttgacagtgacctcttggatgcctccagggggacacacggggaagctggggccactgaagcctcctccaactccaccyccatagccaaatccactgttgactccaaacccgttgctggccctgccaccaaagccacttcggcagctgctgccacacccattgatggagacccgcttggcaccccccaggttgtagaggctgcggcttccaaagctggccccagcactgctgatccttcccaggcccccactccctgctgcagagcgggccacagagacagagctgaagcgggagcggccagctgccggggtgatggccgaggtggtgctgaagcccctgcggc

SEQ ID NO: 505452 - DNA, 584 bp, Homo sapiens
aaagcaactacattttgtaatctgagaaactttctcaatcacctcctatgaaaaatccattttagccaaactgyaggaataatttgaatatgctattgtttcatttagttgccaattgtgttaattatataacatcaattatcaatatttgattctacttaatgagtagcagtgtatgcaagtatttttcagtactgtcaatctctgttttgtaagtgaacagcaaatggaaatctcctgccattcttatttttcaaaaaatgtgcagtgttttttctggggaggtgtggagggtgatgagaccgaaatgcagacttccactgttgtttcagtgccgtgcttggtgagtgttactagagcaactgagagtgaacaggattaaacaccagtttatttgctcaagaacacgctgaagaataatcttgtagtgacataaagaggattaatatcaacaggaattataaatatgagttaatatatagctctgacttacattaattttactttgtttcaataattaacacaaatttcttatttactaaattctttatactaaatttactatgacgtatccactcatcttg

SEQ ID NO: 505453 - DNA, 504 bp, Homo sapiens
gttatttattattactaaatctttaatgactattgaattatttgaatctttattaaaggttaaattacttgaatctttgttagatccaatgtggtaaccctggaagtcagatttccctcatttctccaggatttatttatttattttttctttttgtttttgtatattgtttttgtgagttttgattgttgtgggctgtctctgtaccaaggatcagcctaaggtgcaaacttgatgtcttctcaggtcttttctgagtcgaaaacttttcctgggcatacacagccattttctaattttcctcatataagcagttgcttttgaatgtcttagtctttatttttatcttcccaaaaggggaaragataaaaatgaagagaagaaagaatgcaggccttttaaatctcctggaattcacttcagttggaagagaagaggctttcaataatgggtataaattcaagacaatgtctgtccacatatttttttgcatctctgtgacca

SEQ ID NO: 505454 - DNA, 557 bp, Homo sapiens
ctgctatgggactaggggtgggggwtggatagattatactgtgcaaaactttgtaattaaccaaaattaattataaattaccaaccaagtcttcccctggatgtggcaagacttcaatagactctagaactccaaaatagttatattagacagattttaacactgtcattgtttgtttagataaggagcaagattcctggtgcttcctatgccttcatcttcccagagatccctcttatgtcaatgacattttgaaaatgtttttctgttaagttctttttaattttgagctttttgagaaacttgatttatttcaggaatttataggagttctttttctcttttaagtgtaacaaaagactgggatcaaacaggatgatttctatcacttagtgacatgagcaaacttgacttttacattttttcctgagagcattgaataaagtccgatattttgtatggctgtgacctaaaccaagtttccatgagcaatcatgtgataaagaataactcaatgaatttcttttttcatttttaatgctgtactattttataaa

SEQ ID NO: 505455 - DNA, 669 bp, Homo sapiens
aaataatctgcatagggggtgtaagaatgcaaaaacatttccgacacaaagaacaaggccttggcagagttttctgtgaaaagagattgtgaataagcctccacgaatgtgaaaatcacccaaaaggttgccctaagaagaggaggagcaatactaacattttgttgggtgactactgtgccaagtactatcttaccacgaataatcctcacaaaaactcttgaagcatgttacaattttatgggggataaaaatgaggctcaaagggcttaagcaacttctatagagccacaaatctccattctttccagtacagtagcagatgcagcacaaccagtgtctagtgtccaagaaagggaaatgaaaagaactaaggtagtaaagcctggccaactgagtgtagmgtgtctacctggatttgcaaaagaaagacaggagactaaaatctcatattgggcacctacatttttatgtttaccggcattcagtccccttcctgttcattccccttcctgacggcactccaatttcctgttggagaatcacccaagccattttgtttaatctcgttggggttgtaaatataaaaggctgcccctttcttttctgtatgggagtttaagggatgcctggaggctatttctaccagatcttttctaaaatctccct

SEQ ID NO: 505456 - DNA, 533 bp, Homo sapiens
tggtataagcgactccctactcagactccagggttctaagtgcttccaaggcctatgcaagaaacaaagacacttaactcatggctcttatttccaaaccaatgacccacaactgagaaccggaggggaaaacaatctgtgccattgtggagcgtgggggtgagggtttgtgatggcttcagtctgctctagcaagaaaagtctcagagttatttgataatctgattgtggaaggagaagatagaaaaaagcaaaaaataaaataataaaaaaggtcacaattggcactcttaattggcaatccagaaagatttagagagccagattacgtttagagaggtaaattatctcatttgaacagagtttggagattgtaaaagtggctgatcatccaatatacttgtgactcttttttttttttttcaagtaaaactgtgagctaatagggcaaataaccatgcagaggcttcttgtccactcmctatgctgagggaatgacagttgctctctttccaattctgggtaaacaatgc

SEQ ID NO: 505457 - DNA, 423 bp, Homo sapiens
ttaaaactaaaagcctcttaaagcagcaagatgtataattatattgtggtcttagtgctgtatccacttccacaaatgagttaagtgaaacaggaatgactccagactgaatatgataagtgagaaagatataattgkctttttagatgacaccagcatttttcacagaaaaaaatattgaaatatttgtcaaagataaacaatgttagtttaaattcagtgtttggcccaaaattgttttctttaaagttatgcgtagagtgtgacatttccctgataaagtggaatcatgatattagaaatgcccttaaaggcttttactacacatatataaacatcacttagaatgtattattaaactttgaactcttaacaggttccaaacaaaacaaaaatggcaaagcattagattcatttctatat

SEQ ID NO: 505458 - DNA, 423 bp, Homo sapiens
ttaaaactaaaagcctcttaaagcagcaagatgtataattatattgtggtcttagtgctgtatccacttccacaaatgagttaagtgaaacaggaatgactccagactgaatatgataagtgagaaagatataattgtctttttagatgacaccagcatttttcacagaaaaaaatattgaaatatttgtcaaagataaacaatgttagtttaaattcagtgtttggcccaaaattgttttctttaaagttatgcgtagagtgtgacatttccctgataaagtggaatcatgatattagaaatgcccttaaaggcttttactacacatatataaacatcacttaraatgtattattaaactttgaactcttaacaggttccaaacaaaacaaaaatggcaaagcattagattcatttctatat

SEQ ID NO: 505459 - DNA, 521 bp, Homo sapiens
aattttgaatgagactttgaaaggcatcataaggcaggatagaccacaggtttgatgcatttgttttaaatmttagctgattggctgtttacagttcctaaagtaatgaataagtttatatagacctgctgtgctaacaatgcctactcctttatatttcattagtaagattagtgatagagttaagaggaaattggaaagagaggtatgtctgaatctctggcaaatcacaattacatgactcagccaagtccataatcctctgacaaagccccatcaacactgaaaatcagttgaggtaatacatgtttagtgctcctgaagccttcttctctcaactcatcaaagtcattctccgtccagctttgtttggttgctggtgaggagctgtgttcctttggagggggagaggcgctctgatttttagaaatttcagcttttctgctctgttttttcccgatctttgtggttttatctatctttggtctttgatgattgtgacatacagatggggttttggt

SEQ ID NO: 505460 - DNA, 648 bp, Homo sapiens
atgtatgttaaaactttatagtctttatagtctatctttaattatgaattataaatatgtaattataaatttccagagggtaactgaaagtcaaatgggtcctgtgtagtcattaaatttatgacatgattagcaagcattttaatgcagaaaatgtgtttaatgcgttttaaaactggtgcctagattccacaaataagagaacatacaaagtttgtctttctgtgtctggcttatttcacttaacataatgacctccagttcaatccatgaaacatagacaactataaatgaaattgtctaagttctaaattctcaatgttgagaataagtcttttagaaaaccttttacaaggtagagataaaagttaaggtagtctctgtctccttgtaataataaaaattgctctattgcttcctaatatttatattaataactaagatattttcataaagatracaattagataggagtcagacctggaggcaacatgtgaacatgctctgcattatcctaaaaaaaaagttttatgcatgtttagcaacaactactgtaatttatagtatatgatttcaaaaaagcttttgcaatttttcctctgtatgatctctgttgagtaattatttacttacattaaaatggtcagg

SEQ ID NO: 505461 - DNA, 546 bp, Homo sapiens
  misc_feature (1)...(546): n = A,T,C or G
atacattggaaatagtactgacctcatggaatggtagtgaggattaactgagcaaataagaaaagcatctgaccaactattggtgcaatttcttcattccctttcagccctgagagcagggcccacttatgagactggctgtttagtttcctaagagaagagcagagggaaaagagatggtgatgatacagcctaaatttcttggcacagtcttcatctctctaaatatgtttgtacctttgacacaatgtgtctttatttcttatttagaaaacactatcactcttagatggatgacctggcagttacatgtgagaaagaagatgctcatcactctctgccctcacccttcttcattaatcacctctcatctaattctaacacacactttacttcaatgccatttactctgtaaagtatacattggaatcgcatgtattccctgaccctacgctgctctncaactaggctgggtgctcctcccatgtgctctatagatcatagtaattctccatcttaayatttctcatgccacattgcaatnnn

SEQ ID NO: 505462 - DNA, 532 bp, Homo sapiens
tttgagttgggtctgggcacctaagctattgtaaagcatgacataactataaaataatgtttttttctaggggaaaaaattactgtgatataatttgtgtctggtcattcttcccttctccgctggtggaatcctgggcccacttacatcatctctcatcccagtgagttgattctatgccaacacagacttcagcccaaatccagccctacccccaatgaagtttatcatttcctgccctggctgcacctccctcaaaaagcagatgtggcaagtaacaacaayaatattgataatgtttcacattgttattcaagtcctaatctgaaataaatactccaaagatgcaaatctggatgggttcttgcccaagacttggaaggacagattcatatcaagtgatcttgttctgcttgacatatgatttaaagtatctccctgtgcaaactaatttagaaataaagaaaatgggcttagtaaaaattttgtcaggacacattatataagattttatagatttatgtacaaaatc

SEQ ID NO: 505463 - DNA, 570 bp, Homo sapiens
ctgattgatcctcagtcctctctccatctatagcaacatgctgagcttattcttgaattttaattcctcttcaaatgaaactgcaaaataaaactctaattttgttttaagtgcataaagtgaaagaaaattttatctcttggtgtttgttaacttgttatgaacatcttcataatgtaaaaacattgcaatataccaamcacattatcttcgaaaataaaagagtaaccttaactttttccttcacttaaaaatggaaataacaaataatgataaaaaattggagaagaatctaacagtgttctgagacctcccagccttcctttcttcaagtgtgtaaatcattaagtattcaaatgattaatgcagtcatgatcaagcttaccagaataaatcatttatatgtccacccttggctatgcagcttcattagtgctcttaggaaaattaagatgtcttcacattccagcctaacaaagtgttctagtctctcctaccactttacgtatgagcttgccagggctttttctattaattagatttgttttctcccctccacctccaattttg

SEQ ID NO: 505464 - DNA, 639 bp, Homo sapiens
tggagataacactccccaattcattttatgaggccagcattaccctaatactaccaaagccatacaaaagcattctaagaaaggaaaatcacagaaaaacatttcttgtgaacatacatttaaaaatcctcaaaaaaattacacgtagaatctggcaatataaaaaggagataatacaaaacaaccgagtaaggctcatcacagaaatgatgaaatttattatatgaacagattaaataaggaaaacaatatgagtttcttaatataagcaggaaaaagttttccacatattcaaaatctataattgattttttttaactcagcaaactaaaaccaaatggaaaccttctcaacataatttagagaggctacaaatacctatagtttttccactaaaattaggcaaaagacaaggatgcatgctttctccactcctattcaaattcacactagagcacaagaaaaaatagaaactataaattttggtaagaaacagataaaactgtcatatttkcagacagtatgtttgtctactcagaaaatcccaaatatgctacataaaacataccaaaactaataaatgagtttagcaagttttcatggtcaaattaaatgtacaaaaatcaattatgtttctgt

SEQ ID NO: 505465 - DNA, 620 bp, Homo sapiens
ccaatcttaggtgttcttaggaacaactgtaaagggcacaactgtaaagaccctatctccaaataaagtcacattctaagtactggggattagaagttcaacatgtgaactttctatcctaatatgaaggccacacagccaataagtgttagaggtagtattgaaacccaagtctgtctgattccagagccaccatttgtaaccatttcactcatttgactctcctggtgaatgaaataagtgaatacacatacaagtggatcagagaagttgccagaaaagatacttcaagcactgtgtttatgtcaaaagggacaacaggaaacccttctccatgtgcctgcaaagcaaaggagagatattctttagctctggcattctaatgggcctgatcaatgataagagagtacatgtgtagacatgactgtccctggcctacagctgccattaaaagtaccccagccaataagtaaaacttttctgtcttgctcagaaagaacaatgaatgttcaggacctcaaattagaaagtttctactttgtcaacaactttctgggactttccstcattgaatcagaagggatgcctggccattttatctggccctgaggtaatgctaa

SEQ ID NO: 505466 - DNA, 676 bp, Homo sapiens
tgcagtctcaaccttctgggctcaagtgaccctcccacctcagcctccccagtaactgggactacaggtgcatgccaccacacatggctgattattattattattttttctgtagagatgggatctccctttgttactcaggctggtcttaaactcctgggctcaattgrtcctcttggctccatctcccaaaacactgggatgacaggcatgagacatatttttgaaatttaaaatacaaaggaatagaccttcagattcatttatttatgtgcttaaaattgatagaaaatagcaagtcatttcagtctattcattaattaaatatcagttgctatttcatatctatgtgcaaaagaatcttgtctatttcacatgttccataggaaaattatcttcctttaaactatgacctctgagcaccaaattcagtctactgcctgtttggtaaataaaggtttattggaacacaaccacatccatttactttaggctgcattacaacagcaaagctgagtagatcttacagctctaaagcctaaaatatttaatctctggctctttacagaacatttgcctactcctgcattaaaacatttttccattctaacttcaaataactacaattggtcttttctgtcattcctgataggaaagcctgtttgagcttttggca

SEQ ID NO: 505467 - DNA, 676 bp, Homo sapiens
tgcagtctcaaccttctgggctcaagtgaccctcccacctcagcctccccagtaactgggactacaggtgcatgccaccacacatggctgattattattattattttttctgtagagatgggatctccctttgttactcaggctggtcttaaactcctgggctcaattggtcctcttggctccatctcccaaaacactgggatgacaggcatgagacatatttttgaaatttaaaatacaaaggaatagaccttcagattcatttatttatgtgcttaaaattgatagaaaatagcaagtcatttcagtctattcattaattaaatatcagttgctatttcatatctatgtgcaaaagaatcttgtctatttcacatgttccataggaaaattatcttcctttaaactatgacctctgagcaccaaattcagtctactgcctgtttggtaaataaaggtttattggaacacaaccacatccatttactttaggctgcattacaacagcaaagctgagtagatcttacagctctaaagcctaaaatatttaatctctggctctttacagaacatttgcctactcctgcattaaaacatttttccattctaacttcaaataactacaattggtcttttctgtcrttcctgataggaaagcctgtttgagcttttggca

SEQ ID NO: 505468 - DNA, 598 bp, Homo sapiens
tgccactggtcgtgtgagagagctcaggagtggattctgcccagtcaagacttgagatgagaccacagcccaagacctggcatgactgcaacctcataagagaccttgaggcagaggctctcaattaagctgcactcagatagcttccaaatagaaattgtgagataataaatatctcttattttaagacactatgctatgatgtaattcattacacaacaattgataastaatacaaaggtccatccaaggggcatgtttctgaagccatcttgatttatctagggagacattattgcgtagtgctgaagaaaatggcatttcatgtctgatatgagtttaaagccaagtaccaacaccctaattgttgtgtggcattaaaagttgactctgtgagtcttcatcttttacttcataaacagagatattagttcttacttcattgtgttgttgtaagcattgaactaggcaatatctgcaaaatcacttacttgggtagctatcatcatgcttttcttaattaagtggtagctattatttgttatcctcacctcccagtctttataagacatccagggctctttcacagctcttgatc

SEQ ID NO: 505469 - DNA, 642 bp, Homo sapiens
tacaaggaagaaatggctttcatctctgctatccccaaatccatatgttctattatcatttagggtagaaataaaatgattccaacagaaatgcatgtgtgatgacttggtagctccccaattgggatgggaattttgccaaacttcatatactcagttgctgtcagagtggcagtaccacctcaatacagcgctgtctacctcttacacctcattcttaagagatatttttctcctctactgctgaatggtgtaaaaattttgtgtttgttacacttaggaaagaagagtgaaamccagagctgccttactaatgccattacagtagattacaaggtgagagtgtttatgtagctttttgtaacacacaactcactcataacactatgtgaagattgcaaaaggaaaacattaatggcaggaaatgctggagtaaaaatattctctatgctttgggtcacattatggaaagacatattttataaggacagtattacactgggtgtttgctgttgcttgcaaagtagtgtgagtttgtttagaagttaactcttaccatgccccagaaaaaaaggtggtggaaatgaagtagaccctactactactactactactactactaataataataataataatcag

SEQ ID NO: 505470 - DNA, 507 bp, Homo sapiens
atgggaattttgccaaacttcatatactcagttgctgtcagagtggcagtaccacctcaatacagcgctgtctacctcttacacctcattcttaagagatatttttctcctctactgctgaatggtgtaaaaattttgtgtttgttacacttaggaaagaagagtgaaaaccagagctgccttactaatgccattacagtagattacaaggtgagagtgtttatgtagctttttgtaacacacaactcactcataacactatgtgaagattgcaaaaggaaaacattaatggcaggaaatgctggagtaaaaatattctctatgctttgggtcacattatggaaagacatattttataaggacagtattacactgggtgtttgctgttgcttgcaaagtagtgtgagtttgtttagaagttaactcttacyatgccccagaaaaaaaggtggtggaaatgaagtagaccctactactactactactactactactaataataataat

SEQ ID NO: 505471 - DNA, 525 bp, Homo sapiens
ctcctgggctcaagagatcctcctgcctcagcctcctgagtagctggtgctatagcaggtgccactgcaccaagcattgagagagaactcttaggagagaaatgttctttcttagagaactctaagttataaaactttacaatacagtaaacacactgaatctttgcaaagacctttgctcaaagaacctcagtttattttgtcattgacctgcaaatttcaagaacttttaagattctttttactgtatgaaatgcttgaatgtgttactatactttttgtaggtgagtttatatttattttttggaactaaggaagatatttggccttataagaaagctaaggtgatataagtgctagttgggaaataatgcaatatgaatggcytgcttgatgtcaaacctagtaagcagtcaaatcttgtcaatcttcacttaaaatacaattatttacttctagattagctgagaaacaagaatttagaattctgaggaattttttttttagtgaacggaagtcttaaga

SEQ ID NO: 505472 - DNA, 592 bp, Homo sapiens
ctggcgcctgttctccctacgtcgggagcaggcatcgcagcccctgagcggagaggcggtatcccgtgtcaggttctccatcagcggctgcgtggggctctcagggcagccaggccgacacttggctcaccactgctggggggtgccacagtgratttcacactcaagggctgggtctccggtgattttaaggtgatggaaaaggcaagtgtcttttcccacttcctctcaaaaaccacccagcctgaacctgagatgtgttcataaacacaccagaaggcaaactccagtccgctgaggaacagcagccctcaggaaccttctccaatcttattcaaatcctggccccaacctctcaggtctgccttggcccacaagctggcttccctgagggagaggctgaagctggggataagtaggatccacgagccagggggacccaggcaagccttgaggctggggctggggaagcgaggaggagaccaggtatcaggagaccctgcaagtcctgggagcagagactttggactcagtgtgaccctgatcagacaccctggttggatgggggtggcctcttctaaccagtgaggta

SEQ ID NO: 505473 - DNA, 592 bp, Homo sapiens
ctggcgcctgttctccctacgtcgggagcaggcatcgcagcccctgagcggagaggcggtatcccgtgtcaggttctccatcagcggctgcgtggggctctcagggcagccaggccgacacttggctcaccactgctggggggtgccacagtggatttcacactcaagggctgggtcyccggtgattttaaggtgatggaaaaggcaagtgtcttttcccacttcctctcaaaaaccacccagcctgaacctgagatgtgttcataaacacaccagaaggcaaactccagtccgctgaggaacagcagccctcaggaaccttctccaatcttattcaaatcctggccccaacctctcaggtctgccttggcccacaagctggcttccctgagggagaggctgaagctggggataagtaggatccacgagccagggggacccaggcaagccttgaggctggggctggggaagcgaggaggagaccaggtatcaggagaccctgcaagtcctgggagcagagactttggactcagtgtgaccctgatcagacaccctggttggatgggggtggcctcttctaaccagtgaggta

SEQ ID NO: 505474 - DNA, 592 bp, Homo sapiens
ctggcgcctgttctccctacgtcgggagcaggcatcgcagcccctgagcggagaggcggtatcccgtgtcaggttctccatcagcggctgcgtggggctctcagggcagccaggccgacacttggctcaccactgctggggggtgccacagtggatttcacactcaagggctgggtctccggtgattttaaggtgatggaaaaggcaagtgtcttttcccacttcctctcaaaaaccacccagcctgaacctgagatgtgttcataaacacaccagaaggcaaactccagtccgctgaggaacagcagccctcaggaaccttctccaatcttattcaaatcctggccccaacctctcaggtctgccttggcccacaagctggcttccctgagggagaggctgaagctggggataagtaggatccacgmgccagggggacccaggcaagccttgaggctggggctggggaagcgaggaggagaccaggtatcaggagaccctgcaagtcctgggagcagagactttggactcagtgtgaccctgatcagacaccctggttggatgggggtggcctcttctaaccagtgaggta

SEQ ID NO: 505475 - DNA, 677 bp, Homo sapiens
tccctgcgtcttcaaacttcagatggaatagtctttccaccatgacctcgcagggcaacctcgggactaggtgttgtaagagcaatgacttggagtcaggctggcctgcatttgcctagccctgaatgtactgctttttaggcatatgatttgggcaggttctttaacctcactgaacctcattctcctcatctgtaaaatgggacacatgtaacatctagctcacagggctactatgcggatcaaatactatatgcataccagtgtgcttatcacagaacttggcccctggttagggctggacaaatgttgaggctttcagggtatgttcacagcatgggctctggatagaggagtctcctttcccctcagtagttcagcatgccttagggcacaaaacccccccaggggacattttactgtatctaaaagctacaaagagataaaaacttgggacagactgggcgtgcttggggcctgaacactgagtctaggacaggggtggaggggtgtcagcccatctttcccctcctccmatactgccatctgcactgggtctcccaacacagagaggaccctccatcctcacctggaaagccatggagttggcgacagccagaaatatcctcagaggcagcttggcccggtaggacctgtggctccacaagcgatgggca

SEQ ID NO: 505476 - DNA, 602 bp, Homo sapiens
atgatcaacatgcacatgttcctcaaactaagcaaaagatttaaagtaccaggaatactaatgccatccatatccaggatccctaaaaatgattrcatttgggatattttcagggaaaaaaaatctgcactaaaaagatgttttaacaacacgtcataatactactccaaagactcagaagtatttcctgtctttaaaataatatttcttgccttttacttcaaagtagagttaatagtagaactcaaatggcaaactaacaaaggagttaagaccatttaaaagatattgttactatcttctagccccatcttggtcagaccatttggaaatctctaaaatgattttattgaaagcaaatttaaaaagcccaagtaaacaagcagaaaaacttttatgtttaattaaatctggaaagtgatgaactacaaataaagaaattaacaaaggcctaaaataaagcaaaaacactaagaagaatctttaatttaaaaactctgcaatctttcaaaagatgttgaagaaatccagaaatggagaggtcactaaatatccaagaacactcacccaaccattggtaggagacctcttggagacccaga

SEQ ID NO: 505477 - DNA, 398 bp, Homo sapiens
ggccgttcccgaaacgccgagcacctcgcaaggcgattagtagcatgggaaacctagccaagccgttttcccaaggacaagttctcagtcacagtattcctcaggccttggtctttgctttgtgacatatggaacgttctcacaattgaactcaagtagatggcaacatttatcacgtccacagaggtttaaaaaaaactgcatataccgatcaaccttgggatggctcataacaaatcatcaggttggcaaacatttggctccgcagacattccctgtttccctgtcttcagccacrtgagctcgcagtcatgacctgggcgctttagagccacagtgaatgctttcagtttccccagccatcctgaagagcagaggctgcgcacacgcaagaggga

SEQ ID NO: 505478 - DNA, 551 bp, Homo sapiens
cagtgtgggagaggactctccaaggcatgaatatcagaaagtgtggttccctggaggtcatctttgtagggtagctatatgtaattaaacttgaaaatagtattcttcattttttttttttttgagactgagtcttgatgtgttgccaggctggagtgcagtggtgcaatctcagttcactgcaacctccgcctccagggttcaagtgattctcctgcctcagccttccgagtagctgggactacaggtgtgcaccaccatgcccagctaatttttgtatttttagtacagacrgggtttcaccatgttggccaggatgatgtcaatctcttgacctcatgatctgcctgtcttggcctcccaaactgctgggattacaggagtgagccactgaacctggcctcctcattctttgaatccatcaccaaatatttcagagcttgtatctcagctaagccttttagtaaagttgctttgattagtttaagtattccctgaacagtctcctcatctctgtctagtccatgggcaactcaagtgaattcctgatg

SEQ ID NO: 505479 - DNA, 585 bp, Homo sapiens
ggattcagtgtgggagaggactctccaaggcatgaatatcagaaagtgtggttccctggaggtcatctttgtagggtagctatatgtaattaaacttgaaaatagtattcttcattttttttttttttgagactgagtcttgatgtgttgccaggctggagtgcagtggtgcaatctcagttcactgcaacctccgcctccagggttcaagtgattctcctgcctcagccttccgagtagctgggactacaggtgtgcaccaccatgcccagctaatttttgtatttttagtacagacggggtttcaccatgttggccaggatgatgtcaatctcttgacctcatgatctgcctgycttggcctcccaaactgctgggattacaggagtgagccactgaacctggcctcctcattctttgaatccatcaccaaatatttcagagcttgtatctcagctaagccttttagtaaagttgctttgattagtttaagtattccctgaacagtctcctcatctctgtctagtccatgggcaactcaagtgaattcctgatggtataattgcaaacagatctttaacttgg

SEQ ID NO: 505480 - DNA, 488 bp, Homo sapiens
tgggcttctccctggactacagaagctccagcccctcatcatgctgtggactcgctttgatgattgtacttyaaaggcctcagggcagtagcactcctaaccagagcttggcctcagtgcacattttaaatggtggtttcctgggggtgcagagcaaacaaatcacttaagtacattcagggcttctggacaaccaaaattaaccgattcagatgaagttatttcttctttataggaagaagaaaatcacaaaggaaatcttcaaaggtaagtaagattgatgaaaataatagattactagaataaaaatgtcttggtcttaaaattttgttttgtcaatgcagtctattttaccactctcttcaaaatgacttaaaattatgccacttctgaagaagtggctgctttattattcatttcataaacatggtatttttgattattaacaaagaagttagacgtgctgtgtcacatgtgtatgagtttta

SEQ ID NO: 505481 - DNA, 488 bp, Homo sapiens
tgggcttctccctggactacagaagctccagcccctcatcatgctgtggactcgctttgatgattgtacttcaaaggcctcagggcagtagcactcctaaccagagcttggcctcagtgcacattttaaatggtggtttcctgggggtgcagagcaaacaaatcacttaagtacattcagggcttctggacaaccaaaattaaccgattcagatgaagttatttcttctttataggaagaagaaaatcacaaaggaaatcttcaaaggtaagtaagattgatgaaaataatagattactagaataaaaatgtcttggtcttaaaatkttgttttgtcaatgcagtctattttaccactctcttcaaaatgacttaaaattatgccacttctgaagaagtggctgctttattattcatttcataaacatggtatttttgattattaacaaagaagttagacgtgctgtgtcacatgtgtatgagtttta

SEQ ID NO: 505482 - DNA, 602 bp, Homo sapiens
ctctcttcgttccacctgcaagcgcctacacatgctccagatgtatcccgggttttctcatcatggttttgtttgctttggccactgctgaggttaatgcctctgctttctctgtctttatcatctctgttccaccatatccatccatgccccagaggcactgagttcccacccaggtaggtgccactgatttaactctgagacagttcctctgtgggcaaaagtgggagttagatgagctatgtccacagaaatgtggaaaggaccagggtgttggcatgtgtycggcacttacagtccccagcgaacagtgttctgaaactcatcattaattcagcaactccttgaattgagaagagggaaattcatacttgctggaaagctcatgaccttgggacaaatcaacccatccctaccattgcccttcctttccggcactggatatagccagcttgtggttattcaaagcaccactggacagtttgtagattatttctaacaacaaaaagataacaagatggaatgcctaacgatgtcacttttagcctgctgttttaccccgtggtgctgaccacatggacgggtgccttgcccccaaggtg

SEQ ID NO: 505483 - DNA, 594 bp, Homo sapiens
agctgggaccaccagggggacccagataaatttttttactttttgtagagatggtatcttcctatgttgcccaggctggtatcaaacttctggcctcaagcgatcttcccatctaagcctcccaaagcactaggattacaggcatgagtcactgtggctggttgcattttaaggtcttaatcctcctggacaaccaaaagaagagagctctacccatttgtttgtcygtatctttgagtctagttcaatctcttttagaactgccagagccaaaagttgcttttgttgttgctttatcatctgggctgcctgtgtcatctttagcactgcaggaagatgcacaatgatatagtagtggtatgatggacaaggtcattgacttagagattgggtgttttagtgaaaagaacattatattggaagccaagaaatgtgggtcatagctttgcatctgtcactaattggcagttagacaattcagcctctcttatataacttatggatgaagcaaattgaactaggtggtctctaagttccttctaaatctaacaagtttgttactgtgcaagatgacttcctcagaaacagaagaca

SEQ ID NO: 505484 - DNA, 618 bp, Homo sapiens
agcacaatgggcctggtgggtacttccacttggtcactcactacttctgacctgagggttgcaggaggtctacttcagaccctacctccaataacaaacttaaaaaaaaaaagtggtgggtaagtgattcacacctataatcccaacactttgggaggctgaagtgagacgatcacttgagtccaagagttggagagcagcctgggcaactagtgaggcctgtcgccacaaaaaattaaaaaacaccaactagccaggcatgacagcgtaggcctgtgctcccagctattcgtgaggctgaggcaggaggactgcttgagccaaggaggtccaggctgcggtgagccttgattgctccgctgcattctaccttgggcatcagagagaaactctgactcaaaaagagaaaagaaagacattaaacaaattaaattctgcaaagtttatatgagcaaaggccaattcataaatctcgcagcactcagaaccttcatgcaatgtagacaggccttctttattratagaaagaggacgttacatacagaacagctcgattggttacagctcagaatttgccttacatggtcaatgctctgatcagttggcaacctctgattg

SEQ ID NO: 505485 - DNA, 544 bp, Homo sapiens
tgagagaaaactaggacgacccaggaaggcaggagggatccaagactcctcagatttgggacttggtgattaagaagtacagggtggccatgggataaggaagctgacagagtgtggggcagggtgggggcagggcagaggcagaacaggacccacgaggatgttcaaatagggccatgacatgatctgaactgggcttctggaaggacggtctggcagaattcataatcttaccatttacatacatcacatgtactgccctgggcccctaacaggtgcttgctctttgggagaacctaaggctggagcctaaacagccgggaacagctagtggtgccctgcatcccctggccaccctgtgccagcctctgagagaaggggtagtaagaagtgggcatgtgtagggcaggtctgcccaagaccgcaagatcgttcgttatagagagaattgttgtcctattcatctcagaacccccagtgcccaagacagggcctgacactttgtagatgctgaaaatatayttgcatgaatgaacaaatggtg

SEQ ID NO: 505486 - DNA, 619 bp, Homo sapiens
tgcgccatctcaactcactgcaacgtccacctcccgggttcgagcgattctgtctcagcctccggagtagctgggactacaggcatgtgccaccatgcccggctaatttttgtatttttagcagagacggggggtttcaccatattggctattggctctgctggtctcgaactcctgacctcaggtgatccgcccacctaggcctcccaaagtactgggattacaggcgtgagccactgtgcccgaccttctctatattatttttatttatttttaattaacaaagcatagaaacagattcaggacattcctccgaagacgttccagactcgagtcctaggacatggttggggcgggggtcatttgatcgagtggcctgtgtccttatctggaatacgggacgacgctgtaactctaactcaccctgcgaactcacagcttttgaggtaaacaagtgagaaagaagagacaataaagtgatctttctttaccatctaccaaggaccaggtggtttacacgtcagttcattttcaggaacacagcagcgctctgaaaactacagagcttcctgggcgtagggggctgtrgtcgcttgaaaagaaccagcctgggggtccg

SEQ ID NO: 505487 - DNA, 624 bp, Homo sapiens
acaaaaaactacaaaaattaaccaagtgtggtggcgtgcgcctgtagtcccaattacctgggtggctgaggtgggaggatcacctgagcccaggaagttgaggctgcagtgagccgagctcacaccactgtactccagcctgggctacagagcaagatcctctctcaaaaaacaaacaaaaccaacctaaaggtaggtgttgtaaygatcatcattttacaagggaggaaactgaggcatacagcagtgagcatcctccccggtcactcaaacagctggcatgctccttggcccttctgggcaccccacctgttctggaaagcccacgtcctccaagtactctgagacattatgaggtgtccactttgggggctgggtggccaagctgggctggcagcaccttgttcttctgaggggcggacactgaccccacccctacgtgtgtggcagatgagctttgagaaaggccagggcgtgctcattgggaattggactggggactacgaaggtggcacagccccatacaagtggacaggcagtgccccgatcctgcagcagtactacaacacgaagcaggctgtgtgctttggccagtgctgggtgtttgctgggatcctgactaca

SEQ ID NO: 505488 - DNA, 624 bp, Homo sapiens
acaaaaaactacaaaaattaaccaagtgtggtggcgtgcgcctgtagtcccaattacctgggtggctgaggtgggaggatcacctgagcccaggaagttgaggctgcagtgagccgagctcacaccactgtactccagcctgggctacagagcaagatcctctctcaaaaaacaaacaaaaccaacctaaaggtaggtgttgtaatgatcatcattttacaagggaggaaactgaggcatasagcagtgagcatcctccccggtcactcaaacagctggcatgctccttggcccttctgggcaccccacctgttctggaaagcccacgtcctccaagtactctgagacattatgaggtgtccactttgggggctgggtggccaagctgggctggcagcaccttgttcttctgaggggcggacactgaccccacccctacgtgtgtggcagatgagctttgagaaaggccagggcgtgctcattgggaattggactggggactacgaaggtggcacagccccatacaagtggacaggcagtgccccgatcctgcagcagtactacaacacgaagcaggctgtgtgctttggccagtgctgggtgtttgctgggatcctgactaca

SEQ ID NO: 505489 - DNA, 497 bp, Homo sapiens
cctacgtgtgtggcagatgagctttgagaaaggccagggcgtgctcattgggaattggactggggactaygaaggtggcacagccccatacaagtggacaggcagtgccccgatcctgcagcagtactacaacacgaagcaggctgtgtgctttggccagtgctgggtgtttgctgggatcctgactacaggtaagtggcagatccaggggctgaggggagaggtcccaagggagggactcccagcccccacagttgccaaccaccccaccctggatcatttcagtgctgagagcgttgggcatcccagcacgcagtgtgacaggcttcgattcagctcacgacacagaaaggaacctcacggtggacacctatgtgaatgagaatggcgagaaaatcaccagtatgacccacgactctgtctggtagggttcctccttctcaacctgccctgtctccttctcccaggaattttcttttttctttttagaaacaggg

SEQ ID NO: 505490 - DNA, 497 bp, Homo sapiens
cctacgtgtgtggcagatgagctttgagaaaggccagggcgtgctcattgggaattggactggggactacgaaggtggcacagccccatacaagtggacaggcagtgccccgatcctgcagcagtactacaacacgaagcaggctgtgtgctttggccagtgctgggtgtttgctgggatcctgactacaggtaagtggcagatccaggggctgaggggagaggtcccaagggagggactcccagcccccacagttgccaaccaccccaccctggatcatttcagtgctgagagcgttgggcatcccagcacgcagtgtgacaggcttcgattcagctcacgacacagaaaggaacctcacggtggacacctatgtgaatgagaatggcragaaaatcaccagtatgacccacgactctgtctggtagggttcctccttctcaacctgccctgtctccttctcccaggaattttcttttttctttttagaaacaggg

SEQ ID NO: 505491 - DNA, 519 bp, Homo sapiens
tgctgaaatactgaaatagttcatttgggttggtgaatagatcctgccaaaattccctgaatggcctttgctgttctgttaccttaaacccacctatctccaacattttcttgattcamctattctcctaaactgtgttagtaaggacaggggtttccatcgccatgcagtgcggtgttcagagcctggtctgggtggttaataccagtatcttaccacttattaaataagtcgaaaatatccttctcaaaaagtcggtctcctcaatgcttccttttgattccaagttcccagaagactggttgtacttaatattcactccccatagagttcccagtgttttcctggcttgacaatcagatagtgaaactaacatccctctttggcattttaaaattgcttcagattctctacactctccctaggtgatctcatttaaatggcatctttatgttaatgactctcaaatttatatcttcagcccaaacatctctgagttctagactcacacatccatct

SEQ ID NO: 505492 - DNA, 621 bp, Homo sapiens
ctgctttgctgtaaaagacacgtatgggaggctgtgggcttggcctgctggtgagctgggaccacagcccctgccgggtccattccccactcagaagtggtggagaaaggacggtggactggcagggaggacaattgagatcccctagatgtttagcacattgttcgatctgactgtggaaattaataaatatgctcactggaatgaaaagaaacatctcctacccagccaagctctgtgtgaggcaatgaagggaaagtaaaagtgctgctcagagaaattctagtctccactggaagacccagagcagcatagaagcagtgcctttctgaagtgctgggaccaaatcgattggccatctgggcacctgccctatcccaccattgaacctgtgccctaggtcctgggaggacctcctccctcagcctgggaaggaatgggagggcagatgagggacagcctagaccagtggtcagttccccctgcttttccttcatttccctcaaatccaccagatcctcatctgccrttttcctgggcctcagtactcccaccagcaaagtgttagtgccagacctcacgctctagggcatagaggagacatgggtaggtaaagggaga

SEQ ID NO: 505493 - DNA, 642 bp, Homo sapiens
aggacggcatgccttgctctgattcagcgacctctctttcctcccccgacttagaggttcctggtctgcggagaaacttgcccagatgcaaagccacagagcagagacagcagaatcagaagctttaaaaggtgtaagcggccggacgcggtggctcacgcctgtaattccagcactttgggaggccgaggtgggcggatcaccagaggtcaggagttagagaacagcctggacagcatggcaaaaccctgtctctaataaaaatacaaaaaattagctgggcatggtggcaggcacctgtaatcccagcttctcgggaggctgaggcacgagaatcgcttgraccagggcatcagaggttggcagtgagctgatatcgcgccactgctctccagcctgggtgacagagcgagactccaaaaagaaaaaaacaaatagatgtaagcactgagaaggcagagagagcatccctgtgcaatagaggaagacatgtaggtatagatactaaagatagaaaagacctctggtatcagttccctccctcagggtccagagcaggggaaatattcaaggaactgctgcctctgatgtctcattggcagaccacagtcaaaaccacacatttttcaccagctcccaggg

SEQ ID NO: 505494 - DNA, 641 bp, Homo sapiens
gtggtctagcattttgcaactagtgttcattacaggcaggctctgctaaccctgaccccaagctctttaatacatactcccctaccccaggagagagaggccatcattgagggaagaaagaaatggaaaaatgacaaagttgcaattatgggtcatgtcatgattgggattaattggcccaggtgaagttattacttgttcatgcaaaattttaatttctactttggccacggatgtgacccaaggataacctactgaagcaagatttattataaaaacaaacaaacaaaacacagcacagggaggactataaccgcaaaacagcagagaggcatgggggccccattcctcttctctctaagggagtgaacaaagaatggcaagaaggcmagcagcttcaggcctcctgagtcaccctcaaaggcaattttgctcaccatttcataaaatctccagccataaattgtgtcttttttgccagctcctggctggtcgcaagtgatgcagacatttgtgtgagatacacaaagccattttagctgctcaaaagctatcagcacttgcatgctaggtttgagcaacacagatcctgcggtactcagggcatcaaaggggattacccagaaaccgataacagattt

SEQ ID NO: 505495 - DNA, 558 bp, Homo sapiens
aatgtctgtaaagaaaactttatttcaaacttagagtcatagaacttgccctcttggatatagtctcgtagtacctttactggctatttttattgtgtgctttagtatatgagatgttcagtggtgccaagtgcagtggctcatgcctataatcccaacactttgggaggctgaggcaggcagatcataaggtcaggagatcaagaccatcctggccaacatggtgaaaccccatctctactaaaaatacaaaaattagctgggcttggtagtgtgtgcctgtaatcccagctactcaggaggctgaggcaggagaatcacttgaacccacgaggcagaggttgcagtgagccaagatcatgctactgcactccarcctgggtgacagagcaaggaaaaaaaaaaaaaaagaagatgtttagcggtagatgttacccccatatccttatttgctattttactgggtgacttatctgttacattttttctacaccacgtctgctgctcttcataaaatctaatgttaattccatttggctctatctctccttttcatga

SEQ ID NO: 505496 - DNA, 625 bp, Homo sapiens
aacatggatggagctggaggccatcacccttagcaaactaatgcaggaacagacagccaaataccacatgctctcacttataagtgggagctaagtgatgagaacacatggacacaaagaagggaaccacagacactgggacctatcaggagatagagggtgagaggagaaagaggagcagaagaaaataactattgggtactaggctttgtcacctaggtracaaaataatctgtccaacaaacccccatgacacgagtttacctattaacaaacctgcacatgtaccccttaacccaaaacaaaagttaacaaaaagactatcctttctggatagttaaataaaacatatctataaagtacacatacattaactttttcttctgttttgggtccctgaaaaatcctggggcagtaatattttgacccagcatggtataatataaaaatcacatatgaatttataccccagttccatcatttacaaatcatataattttggaaaaattgtttaactctgctaaggcttaattctctcgtttattaaatggacatgatttatagaattcacaactttggcaagaatcaaatgagataaaatataaaaattacctggcaggctgtg

SEQ ID NO: 505497 - DNA, 578 bp, Homo sapiens
tgcacctgtaatcccagctactcgggaggctgaggctggagaatcacttgaaccctggagatggaggttgcagtgagctgagattgcaccactgcaatttagcttgggctacaaagtgagattctgtgtcaaaaaaaaaagaaatcagtcagttaaagtttttgattcgtctcccagcgccaaaaccctggcagaatggctgtgcctgctgaggttgagcccrtgttatgcacattgtaacatgtggataaaagctccaaggttagtttgcgctgggccaggtacctccacgtgatggttgagttgaactttcagcatagattttttctgccttcctgggaataacgctatagtttcagggtgggggctgagctaagtattggagtggagtgaggcaggaggacaaagtgcagcagcacacaggctacaggttgggaacagtaatctctcattggctcactccatcaatcagcccttcagacagaaatggctcacacagcacaaggagatttttctttggaagattctcagaagtatgcagtcggaggccttttctgttaggagatttggcttatgca

SEQ ID NO: 505498 - DNA, 573 bp, Homo sapiens
tacggggaaccgttaagttaatcctggtttaggcattctgattatgtagaagagcaggaatttgggtgtttggcttttaattttttggaatttttaggcaaattcgcattataatttgaaatttgctaaaatgattgacagatattaaatggttaacatttctgaaatgatccaatttttctaataattagaacagtgttctaattgttcatgtattaatttcatttaatcctcccagtggcctttaaagttccattattatcccaatcttatatctgagtctgcttagaagattgggtagatcctttattatcccaatgtcacttataaggaaacagaggtgcagaaaaataacttgtctaaggttataggaagaaaaaggacagaaccaggattcatattcagacaatctggctcccgagacacagcayatgtacccttctacacaatacggcaaatcatgtttactcagaaatagtcccacgttctggcttatattttaatatattattagtaaggggaggcatcaagtgagaatttggaagcttaatctgcaagtctcccttttgagtt

SEQ ID NO: 505499 - DNA, 489 bp, Homo sapiens
agatttattcccaacacttgaaagaggtgttgggtatcagagtaaatccttgcatatatacttttaaagtaccacaacctattttcctgtatttctgacttttgagtctgtctttgcattgttcaatacttgggatacttgggaatatcagtaaatagatcaataaaatagtaaaccactagtctgcttaatcaatacatttatggagttcaattttaaagactcatcaccaacaacttcataaggaaagaatcacaaaactcactggtgtgttggccatatggctccactttatttaaaagtaytggcagaataaatgatggttgtcgtggaggtaatgatattattgatctctttatttcacattcagtagtctcttgagtcatggtaccaccccaagttatacttagaagaacagaaagaagtttcttctacttatcattgattcaagtgcttgaaatcagctctatggtatatcaacccccagca

SEQ ID NO: 505500 - DNA, 322 bp, Homo sapiens
agtagccagcttgatgacttctggccctaacttccttgccagttatcatgctgcctacaactgtattgtggatggttgagcaggccaaattgctcccagatttctatatttcatataacaaaacaytttcttaactttttactaagatttcaaaccaaacaaaagcagaaaggttagtataataagcccccatatagccatcatatagcttcaactattatgaatatttttgccacaattgtttcacttatttccttcctttcttccttccttccttccttccttccttccttccttccttccttccttccttccttccttc

SEQ ID NO: 505501 - DNA, 545 bp, Homo sapiens
gaaaaaacaaaccacaagcgtgcgcgtgcgcacacacacactatacatactccaaagtactttgyattaaattgctagaaagatgtgatagagaaaaaaatcttaaaagtagtcagagtaaaaaagtaattaaaaaaaacacgtcacgtacacaggaacaaagatgactgctgacattataaacaatgcaagccaggagacaatgaaacagcgtcttttatttttaattttatattttttgggggtgagaagtgaggttttctggtttaaatagttacaacttttagatttagagggtacatctgcaggtttgttacctgggtatattgcgtgatgctgaatttcggggtacaattgatcctgtcatcatgtactaagcatagtacccaatggtgagtttttcaacccttgcccctctccttccctctctcccctagtagtattatgtccatgagcacccattgtttaactcctacttttaagtaagaacatttgatatttgtttttttgttcctgtggtaattcacttaggataatgaccttca

SEQ ID NO: 505502 - DNA, 545 bp, Homo sapiens
gaaaaaacaaaccacaagcgtgcgcgtgcgcacacacacactatacatactccaaagtactttgcattaaattgctagaaagatgtgatagagaaaaaaatcttaaaagtagtcagagtaaaaaagtaattaaaaaaaacaygtcacgtacacaggaacaaagatgactgctgacattataaacaatgcaagccaggagacaatgaaacagcgtcttttatttttaattttatattttttgggggtgagaagtgaggttttctggtttaaatagttacaacttttagatttagagggtacatctgcaggtttgttacctgggtatattgcgtgatgctgaatttcggggtacaattgatcctgtcatcatgtactaagcatagtacccaatggtgagtttttcaacccttgcccctctccttccctctctcccctagtagtattatgtccatgagcacccattgtttaactcctacttttaagtaagaacatttgatatttgtttttttgttcctgtggtaattcacttaggataatgaccttca

SEQ ID NO: 505503 - DNA, 545 bp, Homo sapiens
gaaaaaacaaaccacaagcgtgcgcgtgcgcacacacacactatacatactccaaagtactttgcattaaattgctagaaagatgtgatagagaaaaaaatcttaaaagtagtcagagtaaaaaagtaattaaaaaaaacacgtcacgtacacaggaacaaagatgactgctgacattataaacaatgcaagccaggagacaatgaaacagcgtcttttatttttaattttatattttttgggggtgagaagtgaggttttctggtttwaatagttacaacttttagatttagagggtacatctgcaggtttgttacctgggtatattgcgtgatgctgaatttcggggtacaattgatcctgtcatcatgtactaagcatagtacccaatggtgagtttttcaacccttgcccctctccttccctctctcccctagtagtattatgtccatgagcacccattgtttaactcctacttttaagtaagaacatttgatatttgtttttttgttcctgtggtaattcacttaggataatgaccttca

SEQ ID NO: 505504 - DNA, 545 bp, Homo sapiens
gaaaaaacaaaccacaagcgtgcgcgtgcgcacacacacactatacatactccaaagtactttgcattaaattgctagaaagatgtgatagagaaaaaaatcttaaaagtagtcagagtaaaaaagtaattaaaaaaaacacgtcacgtacacaggaacaaagatgactgctgacattataaacaatgcaagccaggagacaatgaaacagcgtcttttatttttaattttatattttttgggggtgagaagtgaggttttctggtttaaatagttacaacttttagatttagagggtacatctgcaggtttgttacctgggtatattgcgtgatgctgaatttcggggtacaattgatcctgtcatcatgtactaagcatagtacccaatggtgagtttttcaacccttgcccctctccttccctctctcccctagtagtattatgtccatgagcacccattgtttaactcctacttttaagtaagaacatttgrtatttgtttttttgttcctgtggtaattcacttaggataatgaccttca

SEQ ID NO: 505505 - DNA, 513 bp, Homo sapiens
actattgcaatagtctgtagtcacctgcctctgccataagcagggtagtttctatcttcttcccayatttaatttgttatgagtgcctcccattgccaacaaggaatcccaactgagcacaaaatctggcaaatgcagtttgcaggtttccagccacagtggcttagggaagagtataaaagaccaagtatgggtctgtggctatagctacattaaagctatggctttaatgactctatttttgaaaagcctgacacataggaaactctcaaaaaataactgtggtttctgttatttttatttaataagcagtggcatgaaaagtcaacctatatctgggctaaccatacaggaacagactgtaaagatgactgtgccctttacccaatagtgctacccatccacacagttctcctttttccatttcaggaatggataaaacaatgattgtattgatttcctgctcactgtggtattaattgcttgtggtccccaaacacaatgtaagttagt

SEQ ID NO: 505506 - DNA, 577 bp, Homo sapiens
tctaattacttctccagttaaggtccagccacttccactacatttgacttattagttaatcaaactcctttacaaatctttttctaaagaagcttttcattttgagataattgtgagttcacatgcagttgtaagaaataatatggagagatcctgtataccctttactcagttcgcctccctgcccatggtaactgctaggggctgaattgaactgaattgtgtctgttgccccacattcgtgtgttgaaatcccagtacctcagaatgtgactctatttgaagcctgaggctttaaagaggtaattaagttaaaattaggtcacaagggtgagtcctaatcctataggactgatacagaatgaagacatgtgaagacaccagaagacaggcagctacaagccaaggagagaggcctcagaagaaaccaaccttacctacaccttcatctcagacttccacactccagaacrgtgagatataaatttctgttgtttgagccaccatctatgatactttgctaagacagtcctagcactaacatagtgacctcttacaaagctatagtaggatagca

SEQ ID NO: 505507 - DNA, 543 bp, Homo sapiens
atgttttccgccttacttctttcaaacgtttttctcagataacaagtttttaatgaggcctctaatgatcacagagtaaaatttcaacttgtcttttacctcccaaatattcttgatactccttactctgatctgttagtttccctaacacttattatttaccatactgtataattcatttacttatcatttgaattgtttattgtttgtctctgctgctaaaaagtaaactgcatgcgggcagggatttttgaatgcttaatttactgatatgaatcccaaatgtctagcataggagaggaaggaatttaatctgccttgttgtaccaatgttttagaagttggggagcatctctatatatttgttagattaatatgcttgacttmttgactagattgtgatctccttggggcttgagtctctgcattgtttcttcttgtagcctcctggcctaccatggttgcacacataatgtgcttagtaagcccttgctaagtgaatacttgtggcactgaattgagcccatttgttcatgacaaata

SEQ ID NO: 505508 - DNA, 449 bp, Homo sapiens
ctttgcaatctcttagtagattgcttatgatgtgcctcatattctggtttgatgcttatttaataataaaaggattttatttatttactacatttgtggaaaggatttctgggctagaacttttttttaaattatatttttccaacatgaaatatatatatgtataaacatgtggtatatacataaatataatagcatagaaacattttaaagtcttagttgaaagataatcttaagaagggcttgaggagatatcayctttcttatttcaaattttgtaaagggactacctgtgtcttgattcacctgacaacaacatttctgaaaagtgaaagataattcaaaacaacttaaacaccaattaattttcccataaaaaaatgaaaaatttagagatttgtttcactagactaaaacaatcctaacattattttttgttatactgtatt

SEQ ID NO: 505509 - DNA, 511 bp, Homo sapiens
  misc_feature (1)...(511): n = A,T,C or G
tgtcagtatgtgatgcgtgaaaagacctgggcactgctggctctggaacttggtctcgctggtacagattgttgccaaccttggaaactgaaataggccatttcgcacatggcacatcatccctctgtaggaggaatggggtttataaatgttagttggctactattccctcctccagatagactggtgaagcattttttgcattttggttttgaaagcactcttnatgtttagagctgtagtttaattctatctttagmtatagctgtaaattaaaaaaattactggtagtaaaaatgacagcaaagtcataagcaagatgctaaaaaggattgaaacaagatcatacttgacttcatttatatcattctattttttatttgtgcatattttgttattggcatgcaatcataaacaaagagtccaaattttggcttgtctgaggttttagaacatttaatatttcattattctgaaaggaaatgcatagaaatgactgttaaattctgta

SEQ ID NO: 505510 - DNA, 591 bp, Homo sapiens
accaaatgagtctgccagttttctacttccccaagtaagttcatgcaaaaagtcatccatgttttcaccatcatctagaaaagatattttaacaccaaagaagtagaaaggacataattttaagatacaggctgggcgcggtggctcacgcctgtaatcccaggactttgggaakccgaggcaggtggatcatgaggtcaggagattgagaccatcctggccaacatggtaaaaccccatctctactaaaaatacaaaaattagctgggcatggtggcgcacgcctgtaatcccagctactcgggaggctgagacaggagaatcgcttgaacccaggagatggaggtaagccaagatcgtgccactgcacttcagcctgggcgatagagcaagactccatctcaaaaaaaaaaaaaaaagatacaaacacaaaaccttaaaatttaacaattttaacttggtgagcccctcaccactcttcccgtatagttgtcatttcaccagggacaggtgaacactgcatctgagatccacagtggtgtgtggcaggtttgtggaccttctggggtggggaaggaccagccccatgtg

SEQ ID NO: 505511 - DNA, 591 bp, Homo sapiens
accaaatgagtctgccagttttctacttccccaagtaagttcatgcaaaaagtcatccatgttttcaccatcatctagaaaagatattttaacaccaaagaagtagaaaggacataattttaagatacaggctgggcgcggtggctcacgcctgtaatcccaggactttgggaatccgaggcaggtggatcatgaggtcaggagattgagaccatcctggccaacatggtaaaaccccatctctactaaaaatacaaaaattagctgggcatggtggcgcacgcctgtaatcccagctactcgggaggctgagacaggagaatcgcttgaacccaggagatggaggtaagccaagatcgtgccactgcacttcagcctgggcgatagagcaagactccatctcaaaaaaaaaaaaaaaagatacaracacaaaaccttaaaatttaacaattttaacttggtgagcccctcaccactcttcccgtatagttgtcatttcaccagggacaggtgaacactgcatctgagatccacagtggtgtgtggcaggtttgtggaccttctggggtggggaaggaccagccccatgtg

SEQ ID NO: 505512 - DNA, 638 bp, Homo sapiens
cctaaagcaacattggaattgcagcttaaggctcatttcctttaggaagcaacaggggagggtgaagggcacttcttaggcatcaatggaagagaaaagataggtttgggtttttataacatttttagcaccaaaaagtaacatagtatagaaaaaataaaatgcggtaaagtctgataaatgtcaggtttgaatcctggatataccacattcattgcttaattatgggcttgttacttacttcaatgctttgtgactstttttcctttacctgtaagctggaactgatacctttcacctgaggattagctgtgatgactgaagagctagcaaatgcatggagaggcctaatacagataggtacacagtaaatagatgcttataaggagtcttggctaggagaatgacttctggagaagctgctgtaaagagacccaaatggaagtcagaatcttcccagtgctacaagagaaggaaccatttctcgcaatgattttgcatctcaggatcattacgtgaaatgtaataatcttacattatacttcacaatactgccatgccatgtattcccgctttatttcaaatgagagattctggtcactgacttcaaatatttgagcaattcttctattgttaca

SEQ ID NO: 505513 - DNA, 550 bp, Homo sapiens
attttctttatccagtctatcattgatgggcatttgggttggttccaagtctttgctattgtaaatagtgctgcaataaacatatgtgtgcacgtgtttttacagtacaatgatttatattcctttaggtatatatccagtagtgggattgctgggtccaatggtatttctggttctagatccttaagaaatcaccacacctggcacttttaaacatgcatattctcaggcctcatcacagaccaatttaatcagaaactctgggggtgctgccccttgtatggtatttttaaatctcactggcgattctaacatgagccagtattgagaactcctggtctgtagttgctgcatgttcctccttggctttcctcgctatgtttagatttcaacagaggtgggtgtgcattacagggcagcgcagcaaccacgctgggaaacagcaaactgcagaccctagtctgatcagtcagaaccagctagaatacgcagtggcaacaaacaaccctccgaaatytcagtggcttcaaacaagtccagctggcttcaa

SEQ ID NO: 505514 - DNA, 597 bp, Homo sapiens
tcaatacacataagctgactcactgactcaattagacaagagctggctttgtgagtccgcagactaaaccatgcaacsatcagccccatccattcctgctaaaacaacccaataaaatctgctattttgtaagctaaataatatatctacagatactgctacagtatgaatatatttccatttactaacaggaactaggggactaggaacaaagtgagaaatggtaatatcactgtcccaaactgaagatttcatgccaaattaataagctggggtgggatgcggggaggataacttaaactgaaaagtttgagattggaaaacttcataatttgtaacaatcatatcatagtcaaaaatgtttctgatgaaagttattgatgatttatccaaacaagcaggctcctctatgagactgataaaaccagtatcaatttgaatgctatttttctaggtatttctataacctttctttttatagcctcataataatgctgtctttaacataggctgagtggctctaattgtgtattttagaaataggatccagaggtctattcaaagaagttcaatgccaagactaaagaatgaagccat

SEQ ID NO: 505515 - DNA, 604 bp, Homo sapiens
aacgggagaagctggcgccagggaccaacctcgagaattacctccctgccacggtggcctccagtaggccagcaggcacccagcctatcgcccaaggtcaccctgggcttccttcagcccggcaccccacagcaggtcccccaaggtcccttccacggagcgatggatacccctactccctagaggctgaccctgccactgaccaggtcccagtcctcagtwatgcacttccggctgtgcggaagaaacttaacaccctcctcctgcagggcactgtccacccctggctggacccatgcaagcccttggagcccaggactctgctctcccagccacacttgcaagcggctctgggatggcgaacggggcctctccatggaaacctccaagccagaagaagggaggcctgggaggccactacatcttggataaaactgtgtccctcccaggacctgaaggggcggggactgatgaccagcgccaggacctggttcccagggtgggctgaccctgaccctgaccctgaccctggacagagaggccagagcccacgcgcagagcagagccctccacttgtcctcagggcagctcccatctccccatt

SEQ ID NO: 505516 - DNA, 624 bp, Homo sapiens
ccaatttcatgtgtagtattagaaatctaggtttctttttctctgcacagcagacgagtttttctaatgccacttactaaatataccatcattctcccactaatttgtgttgatattttatcttatattaagtccctaatatattatatgatgatacatcagtttcctatgattctctttctgggacctctctcctgcctctctggtctacttgtctgttcttgcactgatcccaccsttttttaaaaacactgattttgttttgtagcatgtcttaatatcgagtagggcgaggagcttatttcttgcaccgccacagccgcatttttctcaccacttacatcaccatgcaggaaatacactgatctcctccacccttaatgggaacaatttacagacatctgtcccctcctggttctggatccagcctccatgttaaaaagacatcttcatccaggaaaagaaagtcaaggctgcccaggaaaatctgcacaatgtcttagctcatctttcagtttccagaagcttcatttcccataccatcctctctatatcggcatatagaaaaccaactacggtagcccggacacccaagattgtattctgcctgttccaagcccagat

SEQ ID NO: 505517 - DNA, 569 bp, Homo sapiens
acatttcgaagatgactgaggaacaacaggcacaaagcagattgttaaattgcagtattaagggtgacaatgctaataacattaagtagaaaaatgttactgtaggtacacaagtacactattttgagtgaaatatgaacctttctttcaagtaagagtctgctctgttgcccaggctggagtgcagtggcgcgatcttggctaaaggcattctcccacttccttcataagtagctgggactacaggcccgcaccaccacgcttggctcactttactatttttttgtagaaatggggttttgccatgttgctcaggctggtcttgaactcctagggtcaagcgacccacccacctcggcctcccaaagtgctgggataacaggcatgagccaccgcgyccggccatgaaacttactttaaaaacacttaagcacaaggtttttgaatatggcaagatggtgcaaatgttaacttttcccatttgttggtagattttaatattgccaaaggacgacgtgccaacgatgaatgcatgaaaaaatactttcacttgtgacatgaacaaactc

SEQ ID NO: 505518 - DNA, 569 bp, Homo sapiens
acatttcgaagatgactgaggaacaacaggcacaaagcagattgttaaattgcagtattaagggtgacaatgctaataacattaagtagaaaaatgttactgtaggtacacaagtacactattttgagtgaaatatgaacctttctttcaagtaagagtctgctctgttgcccaggctggagtgcagtggcgcgatcttggctaaaggcattctcccacttccttcataagtagctgggactacaggcccgcaccaccacgcttggctcactttactatttttttgtagaaatggggttttgccatgttgctcaggctggtcttgaactcctagggtcaagcgacccacccacctcggcctcccaaagtgctgggataacaggcatgagccaccgcgcycggccatgaaacttactttaaaaacacttaagcacaaggtttttgaatatggcaagatggtgcaaatgttaacttttcccatttgttggtagattttaatattgccaaaggacgacgtgccaacgatgaatgcatgaaaaaatactttcacttgtgacatgaacaaactc

SEQ ID NO: 505519 - DNA, 588 bp, Homo sapiens
aaaagacatttcgaagatgactgaggaacaacaggcacaaagcagattgttaaattgcagtattaagggtgacaatgctaataacattaagtagaaaaatgttactgtaggtacacaagtacactattttgagtgaaatatgaacctttctttcaagtaagagtctgctctgttgcccaggctggagtgcagtggcgcgatcttggctaaaggcattctcccacttccttcataagtagctgggactacaggcccgcaccaccacgcttggctcactttactatttttttgtagaaatggggttttgccatgttgctcaggctggtcttgaactcctagggtcaagcgacccacccacctcggcctcccaaagtgctgggataacaggcatgagccaccgcgcccggccatgaaacttactttmaaaacacttaagcacaaggtttttgaatatggcaagatggtgcaaatgttaacttttcccatttgttggtagattttaatattgccaaaggacgacgtgccaacgatgaatgcatgaaaaaatactttcacttgtgacatgaacaaactcaacgattttctagg

SEQ ID NO: 505520 - DNA, 322 bp, Homo sapiens
gtgccagcccaagtcggaacttggatcacatcagatcctctcgaggtgagaagaggcttcatcaagggtgcacctgtaggggagrgggtgatgctggctccaagcctgactctgctctcgagaggtaggggctgcagcctagactcccggtcctgagcagtgagggcctggaagtctgcaatttggggccttttagggaaaaacgaactacagagtcagaagtttgggttccacagggaagggcaagatcggagcctagattcctgggtctctagggatctgaagaacaggaattttgggtctgagggaggaggggctgggg

SEQ ID NO: 505521 - DNA, 466 bp, Homo sapiens
tgattttggtctggaccgtcattggctgggttcctcttggtgaccctggtgaatttcacggcttttccggagaaggttgctcaaggggggcccaggtcattcacatgacttcataattccatcaagtcacaaagtcagccacttccttccatcacgtccccatgatagaatgttgcatttctctgattcttaaggcaaagatcatagggtctttctaaagcccagatccgaccaygtccttccttttctccaggccctcgggatcaggtccaagttcttctgcctggcgctcagtggcatcatcttccgctgacctacatttccagccatatcattcatttctcccacctcaaacgccagcctccaccatccaggacgattcacaggtgtcctcacacccccaggattgtctacatgttgttccttctgtgagaatgccacccacccgaacttctccaaagggtga

SEQ ID NO: 505522 - DNA, 414 bp, Homo sapiens
ctgccacctgctgtagttggattactcattctctcacgtaggttcccacagcaggtgtctccctcaacccaacctggacggggggccacctggattgacattcgtcrtctcttccactggaccgtgagctccttgagggcaggtacgggactgactcatccctgtgtcccaagcaaccacacaggaccttgcccagaagaagccttaggcaagactgaccaaatgactaaatgactttatcacacccactcccattttacagataagaaaactgaggctcagaacgggaagttcattgctcatcatcaaacatccaggaaatggtggagcctgaatgggaactcagcttccaacatggcgtggatgtggcccatcccttggtggcctggctgggtctatcttatgacagtacga

SEQ ID NO: 505523 - DNA, 414 bp, Homo sapiens
ctgccacctgctgtagttggattactcattctctcacgtaggttcccacagcaggtgtctccctcaacccaacctggacggggggccacctggattgacattcgtcgtctcttscactggaccgtgagctccttgagggcaggtacgggactgactcatccctgtgtcccaagcaaccacacaggaccttgcccagaagaagccttaggcaagactgaccaaatgactaaatgactttatcacacccactcccattttacagataagaaaactgaggctcagaacgggaagttcattgctcatcatcaaacatccaggaaatggtggagcctgaatgggaactcagcttccaacatggcgtggatgtggcccatcccttggtggcctggctgggtctatcttatgacagtacga

SEQ ID NO: 505524 - DNA, 644 bp, Homo sapiens
ttttttttttttgatggagtctctttgttgtctaagctggagtggagtggtatgtggtatgatcttggctcactgcaacctctgcctcccaggttcaagcgattctcctgcctcagcctccctagtagctgggattaaaggtacacgccatcacacctggctaatttttgtrtttttagtagagatggggtttcaccatgttggccaggctggtcttgaactcctgacctcaggtgatctgcccgccttggcctcccaaagtgctgggattacaggcgtgacatcgcttccagcctcagttattattcagggaacttttttctccctgttttaaaaagttgcatattgaattatctaagagtgaaatgacatgtcagttgcaagttcctttatgaatcttcagaaaataagaaaaaatgttggggcagaagcttgataaatctagaatctaggtgatggatataagggggtttactattttctctacttttaaatatttttgaccacttttattgtataaaagggatattggggagatgagaggcttatctagctcactgtctaatctagtcgttgataaaccaatcacaggcaggatagaaccaggcctctgcacccctgtcctctacccaacacctgctggc

SEQ ID NO: 505525 - DNA, 640 bp, Homo sapiens
atccactcaactccttgccttaagcagygatgattagagatcaacatccaggctttccctagccccactacactctctcttccttgttaactggcctctcttttcttctctttccacatgcccgatttatttctaatattgcttgattgttttcccgttgtttccccatattttttgcaaagctctttgaaggaaatgttaaatatattagtgttatttgaatcaattaaatatgacatcccatgagaacccagttggatttgggtggtagcagagtacaagataacagctctggaatcacacagcgtgggtgaaaacctagctttgtcaaccttgagcaattaccagctgtgtgaccttgaacaaattacttaacctctctaagccagtttctaaactgaaaaacaagaatgttaataataggcattaaggcaatctatgtaaaacagttcagtgcctagcacataaaaactttatcttccatttttaactggcaggacaacaataaatattaactatattaattaatcatattaattccgaagttgagggaaagcaaatgctctgtctgtaccacattctaacaagtactcaattccatgaagaaatcagtctaagagactggtagaaataaaggaac

SEQ ID NO: 505526 - DNA, 591 bp, Homo sapiens
ctcaagtgatctacccgccttggcctcccaaagtgctgggattacaggagtgaaccactgtgcctgacctctctgggctagtttattttcaaatagagtctctctaccaaatcacagggtgcttgtgaggtagataaggtaatatcgatcccagagggtggaaattttaaaaatggttaagtggtatagaaatgcaactttctacagcagcatggccaattccctgctttgctggaatcagaataaatgcttcctttctttcccyaatgaacgcaggagccagccatcaaagtgggtgtagggcctatgatgtagtgggaaagaacatgtcgtctaggggcacatgggctgagctctcatcctgtctctgtcacctagtaactatgtgaccttgggatattacctaaccctactgtcttttttggtcaaagttggataataatacatattttacagggcttgtcaagaagtagaggaaataatatatgctaatttcttgacatatcaaactcttaataaatggttgttgctattttattttcaagacatacattaggaaacagacatctttcaatgtatgaatttcagcaa

SEQ ID NO: 505527 - DNA, 643 bp, Homo sapiens
gttgcatggtagggcaagtagggcgttctgttcccctttcatactctcagtgcttagcactctacatggcacttcttaggcactcagtaacagcttactaagtgtgcagacatctgagagtagcttctaacagacagttggatactttgttcaaaacaaaaacaagaattatgtgacgttatcaattcatagaggacactctgagacaggaggccaggaaacaagtcctggctcctccctaccgattccttgcatggccctggataagtcactaagactcatgccctctggtttgtttatctttccgaaaatggttgtggaggaactgactgctgaggtcttctcttcagaaatgctgcatcatccacatgcaaaatatgggtctggtgcttaggagacaaagggtgtggctcgagaggtggattttgratttgttctacagggaatacagtataatcaaagtcaagataaggatccagtttttaaaatggtctcgatcctctgcacagcatttgatgctgttggactggtagctgttctctttatctgaggcactgtagagccctgtacctcaaaccttttctactgctgcttgtctgtttctttcacccagaacccttcaccccacagatgtagatgttca

SEQ ID NO: 505528 - DNA, 469 bp, Homo sapiens
ataggcccaaagcctttctgactttytgcactctagtcatcctcacttccactacatttcactttccatggccacatcctggaccatgtccttcattgtagacactaatatgccaatgccatccatctcttatggctccaaattctcatgctcaaggatgccaggtcactggtcttgcttttgttccccctaacctcattaggatcctcaccctgcaggactctttcttcttccttagccaacctcttggccacacagccctaaccttttagtgcaggctccaggtccattgcttcagccatgcttgccagcactctcaagacccaagccctgttgccttatacctcaacctgggaccagggtagtaacccacattctataggcctttacctggattgccgggcactgctgggagagggaaagaatgccagaactacatgcattggcatcactcagatttttggtggcc

SEQ ID NO: 505529 - DNA, 642 bp, Homo sapiens
cctctggccaatcctattactatcactcctcatgggtgttgattaagagcactcctcagtgaaccttcttcatacaaattttgtctcatagtctatttctggcaaccacagcctaaggcaggcatctagaataggtgccaattaaatgtctgatattacagttatttatcagaagtacctatattaacaatagattgttctaaaaagtcagttaagtaatagagaaagtgtaaaggctttgcattttatccaaatacttactacatttattgttacacatagatatcattacgtaatgcttcatcaattaatctctggccatattacctgagagatataaccatgtagcataaagtcagcsctgccccaaatgctgttggcttacaataagtaggaccagtaattttattggtcttttttcttgtgttatgcaatgcataataaggaaatgtgtggtcgtcagtgcctgaatgccactttcagtaatagaaacgccttctggggaaataagactggtgccaggacaagaatatggaagcaagcttgaaattatttcacttctatttcagaatggtttttaaaaaaagaaaaaaaaaggcaggagcaagaccattttgagggctgccaccacactgaggcatt

SEQ ID NO: 505530 - DNA, 423 bp, Homo sapiens
cacactttctcgtttaaacaattaaagctaaagttattcatctgaggtttgaaccatatacatgatttctgtctagatccatgccataaattagtgccaaaagagccacagaaactatgaaaccatagacatagttcaaagtaaactctttcccttttccgaaaacttgatatcttttctgcaagcttaagctcatcttcttagctcccccttggactttgccttatttttacccaattcattccattattgttattgttgttttcttctctctcactttytcactgtctctctctcaatttctcactgtctctctctctctgccccttctctatctccctcctctctacctgatatggttttgctctatgttcccacccaaatctcaccgtgaattgtaataatcctcacatgtcaggaatg

SEQ ID NO: 505531 - DNA, 495 bp, Homo sapiens
gtgtgagctgggaaggagtggtctggtcttggcgctcccctggactagatgtgtggccttggctgttttagtggccccacagctcaatttcctaatcagcaaatgaggatagaatatcatctttcactcccaggagctgtgacagtgaattaaggcaaaagcagagtctttggggtcccttagtaagaaagaagagctgagcgagttgaaggttcagccacacaagctgggtagctgaagcatttacatcattatatgctcaaacaacaatttctgagasttgatttcaagtaaatatttttcgagaacctagactcacccactagaatgtttttgagctgtagaacaccaaggaatttggctgtaaagcttttattttggcctttgcttagctttgagcacagggattatatgtagaccctgctgtttttattttcatggttagagtttagagtctaggcgtctgaacaagtcatctcttccctggggtatacc

SEQ ID NO: 505532 - DNA, 625 bp, Homo sapiens
tctcaactgctggttaaaaacagaagtgagagaagcagagaggacgaagaggrgatggagagaaagagagagattgagggagggaaagagagaggagacaaacaaaaagagaaggaggaataaggagacaggagacgagaagatgaaaaggggtagagtggggaggaaggagagggagaacgaggagaaaaggccttaacctgaaaaaactaggaaaaagaagtatatgccacttcagaaagaaatgcagttctattactctcagatacctgaactattgcgaattaggttaaataattactttcatgaactagagttactaatagcaaatttagggacagctctaaaatgatttgtaattagctttttatttgcttatatctaatagagaactttgaacatgtctgaaagcaggtttagtcaagtttgtaaaatccatttgtttgggaatttttttggtttttcttccatagatgaacttagataaacttcagctaaaccactttccaattatcacaaattccaactaataaaatccaaatgattgaggtctggctgtgttcttcattctcaaaacaaactcagttcccccctgtggttttgtattaaatgaagctgaaacaca

SEQ ID NO: 505533 - DNA, 625 bp, Homo sapiens
cagtaggttaagaacactctttatgtagcatataaaaaaaagacatttttgtgaacattgaggactaaagtaaaacaccaaatatttcacagtaaaaactaaaaactgtctgtctgtgaaaatgctttgtgaagagtggatttatctcacagagttaaaccttttttttgattcaacaggatgaaaacaccttttttgtagaatctatgaagggacattttggagcctattgtggactatactgaaaaacctaatatcccrgcataaaaactagaaagaagctatctttgcaaatggtttgctatgtgtggattcatcttacagagataaacctttttgtatcagttaaaccttttttttattccctgcaagttggagtcctcccacctgaccacggggccatgttgtggacagcttgtgcaatgaagggaatgcaagaatggagttggaagcacttcctgtgtcatctgtctgcacctttttttgcagatgaaggtgtaggaccccatccacacctcagcagactgtatgttcacccatatctgaccttattgctgctcacactcctagttctggaatgaaatcccaagatgttggaggagtgctcccttcataacgtgaagca

SEQ ID NO: 505534 - DNA, 590 bp, Homo sapiens
tgtttacccaattgtgctttgtgatgcagatgttaatggatggggtctctggtgaaataagttcagcaaacccaggttcaacacctgttttctcaataggacttcttagagcttctcctgtgcatgatgcatcctccagtgcgagaagattctgtatcatttcccaatgccattcactttgtgaaccttgtttggtggaattcctgttactgtttcactgcagtccacagtcactacttgagaaactcaaatctaactgatctggamgtctttacaatattccgttctaaagcatgggttgctataagcaaaatcttttgtgaaaaacactgttctaggctccagtttaaataagttctgtgttatggaaaatgggttatgtgaggactttggaatttccttctgtaaaatatcactcaccattcattataattacgtactatgctctaggcattgttctagatgctgggaatatagttgtcaatcaaattctctgctctcttggaacatttatgtgagctgggggagagataagccaataaagagatctgtactatactgcactgcattgcactgtgctgtactgacca

SEQ ID NO: 505535 - DNA, 590 bp, Homo sapiens
tgtttacccaattgtgctttgtgatgcagatgttaatggatggggtctctggtgaaataagttcagcaaacccaggttcaacacctgttttctcaataggacttcttagagcttctcctgtgcatgatgcatcctccagtgcgagaagattctgtatcatttcccaatgccattcactttgtgaaccttgtttggtggaattcctgttactgtttcactgcagtccacagtcactacttgagaaactcaaatctaactgatctggacgtctttacaatattcygttctaaagcatgggttgctataagcaaaatcttttgtgaaaaacactgttctaggctccagtttaaataagttctgtgttatggaaaatgggttatgtgaggactttggaatttccttctgtaaaatatcactcaccattcattataattacgtactatgctctaggcattgttctagatgctgggaatatagttgtcaatcaaattctctgctctcttggaacatttatgtgagctgggggagagataagccaataaagagatctgtactatactgcactgcattgcactgtgctgtactgacca

SEQ ID NO: 505536 - DNA, 590 bp, Homo sapiens
tgtttacccaattgtgctttgtgatgcagatgttaatggatggggtctctggtgaaataagttcagcaaacccaggttcaacacctgttttctcaataggacttcttagagcttctcctgtgcatgatgcatcctccagtgcgagaagattctgtatcatttcccaatgccattcactttgtgaaccttgtttggtggaattcctgttactgtttcactgcagtccacagtcactacttgagaaactcaaatctaactgatctggacgtctttacaatattccgttctaaagcatgggttgctataagcaaaatcttttgtgaaaaacactgttctaggctccagtttaaataagttctgtgttatggaaaatgggttatgtgaggactttggaatttccttctgtaaaatatcactcaccattcattataattaygtactatgctctaggcattgttctagatgctgggaatatagttgtcaatcaaattctctgctctcttggaacatttatgtgagctgggggagagataagccaataaagagatctgtactatactgcactgcattgcactgtgctgtactgacca

SEQ ID NO: 505537 - DNA, 592 bp, Homo sapiens
agaccttgctcacatggaggggctgggacatgggaacatggggagcaacatggccaggcttctcctccgtggaacccctccacctcctcaatactctgccccagctctgcgccgccctccatttggaggggctggatcgtgagtgggagcgtgagtgagcatgagggyccctgcaccccaggctctgcctccccatgtggaacgaggcccagcagcccccagccacgcggctactactgcattcaatcagtgcccctccatctaacaaatactccctcatataatcagtactcctccatccaatcaatattccttcatcaacacctttctatacaaccaatagtcctccatctaatcaatgctcctccatccaaccaatactctgcaatttaaccactgtccctccatccattcaatgtccctccatccatcccatggtcccccagccctaccccatgagcagcatggaggcagacccacatctgtcttgtgcgccatcatctccctgatgctcttcaggaaagggaggtgtctcacaattgcattgaatggaggaaggcacatctttccagtgatccccactctagggctg

SEQ ID NO: 505538 - DNA, 466 bp, Homo sapiens
tgctataagtgacaaaaatctggtcctggatccaaggcaagattttaacttgcactgagttgttaaatttctttaatctcccataatctggaacaattccttggatttttgttgtctttgatgtccttgatatttgtgggatgttcctctatttacatatttgtatgatgtttctttatgattaaattcaagttaaacatttttggcagggttaccagaggaaatatttcatccttctctgagcataatgataggaagcacatgatttctatttgtcccattactgatgargttaacttgttttgctgagttcaggtagtgtgtaacttctgctctttgatattactatctttccatttctaattaataagtaacttgggcaagtactatcttgaagttatgaccaagacccatgatttattttaacattgtgacgaagtatcaacataaatttctgggaggatta

SEQ ID NO: 505539 - DNA, 445 bp, Homo sapiens
tcagaatcaggaacacctaatcaaggcatgcttcagctttcttacctttttaagtcaatcacaattaggttgggatatattaacatgcaagtaagagaaataagggaacctgaccagaggagcctttaggcaaaggaaatgaagtaagagtaattagcaacacataccattaaaatgtccttagcatttatctttaggtttgcttgaattcagtgtcttcactcctttcaacataagctgacaaataatgcaattttctttacattcctactgacaaaatttgataaatagtcagkgtactcactattgtaaatgtcacacagaattacaaaagtgtcttctaaaacatttcattagcaagataaatttaatcagaaataacatgtatttactttgagcccctgttccatgagtctgagcaccatagagtttgggtggattgtcg

SEQ ID NO: 505540 - DNA, 498 bp, Homo sapiens
ataaacaattgatgtcattatttcatttcaaacatactaaaattgaattagtgaagtaagatatttcatattaaatgtatagtatgcaatacattgctaccaggcgaagaatccgtcaaaaatatataaaaaaaggaacagtcaactgagcacattctatgggcatatgggaatttatgccccccgactatgggaataaataccaaataactatgtttcaaatatatatgtacataaagtgataactgataaacttttctttttattcttttttaccaaaatgaaatctttaaaatggtataaatgatcagttgtctatagcatcacatttaaaaataatacattttawtatcaagaaattatgaaatctatataatgccttaatcaaaaagcgattattactaccaaaccccaaattttaaatgtatgtgtttttattttgtaaataaactttagagatattaaaaaatgaattaactttgattaagatatttctag

SEQ ID NO: 505541 - DNA, 572 bp, Homo sapiens
catgttcatgggtctgtgaactgattggggttctgttgacctagactgagcatggctgtaggttttagactatgggttgcttcagagttggcttagctgggcttggctccaggttgtgagttcagttagatttgtttcatttgtatcatgcagaggcccaggctacaggagtaacaactgcatagggcatggtcttctcttggaagatccccaaagtgcaatggcagcaaaaccatgtgcacaagcacatctcaagacctctgctcatttactctgctgacggcccactcacaaagcaagcatgatggctggtaccaaagttaaggggttgagaagctcayttaatgccccatgagccatggtagggtgtttaattttaatacacagtagcaaagaattgaggcaattatttcattcaaccacattacacttatgatacaattttgtctctactttggtctataattgggtaaaagaagataccagacatctcagatcatctctctttattcagcctaaacaatttcttcatcattcaaacccagctcacctaataccttctctgtgaagca

SEQ ID NO: 505542 - DNA, 447 bp, Homo sapiens
tagatttgtttcatttgtatcatgcagaggcccaggctacaggagtaacaactgcatagggcatggtcttctcttggaagatccccaaagtgcaatggcagcaaaaccatgtgcacaagcacatctcaagacctctgctcatttactctgctgacggcccactcacaaagcaagcatgatggctggtaccaaagttaaggggttgagaagctcatttaatgccccatgagccatggtagggtgtttaattttaatacacagtagcaaagaattgaggcaattatttcattcaaccacattacacttatgatacaattttgtctctactttggtctataattgggtaaaagaagataccagacatctcagatcatctctctttattcagcstaaacaatttcttcatcattcaaacccagctcacctaataccttctctgtgaagcag

SEQ ID NO: 505543 - DNA, 298 bp, Homo sapiens
gggatccaagcacatggaagcaccaccattttgtgactctgctacctcaacatgtrgctttcaggctcagtgtgacagggaaaatagaacatggaggactgaaagccagtttgctgaaactaatcttgtggccctaacctagctgcaaagaaagttagaaaatgaaaaaaaaaatacataaaatattttataagcattagtgtgtctgcctcaaaaaagattgtagattttggttaaagtgcttaaaatatagactctatttgaatatctagaaattgcttgattctctagtttacct

SEQ ID NO: 505544 - DNA, 581 bp, Homo sapiens
ctttaggaaaaaagaatctggggctgagagcttataactgaggcccatttcgggtttgtgggatactaatgtgcatagatgtagaggagaatatagcttcattgttgattgaatgttttcaagtcaccccttatgtttattagcactgacaacaaaggcttaaccccttagtgtccccactgccatcacactcacccggtctcgtacaagcacctctcaactggcctccctgcctattttcttggctcccttcatcagtctcttttccacattaaagccaaagaatgtgaactggtttgtgccgtgtcccagcttaaaactttcaatggctttccaatgcccttaaaatgaagaccaacaaccctaatcccctcctcctcctgaatacctcctccttctcaatgcctccctggastctctggcccctccctgcccatcttacatctgtcacccccagccctcattgccacagccacactgactcctccttatttcttcaggcacttggggtcttcacacgtattgttccttctctctaaaataaattacagctctccattcacctatccatctttcatgca

SEQ ID NO: 505545 - DNA, 557 bp, Homo sapiens
tgtgctgagctcctggatggccaaatttgatgcatctaccgtggagaagaggacccgcggacaggcaggcccggatgacagccagcgcacgtccgagctgattctgagcaaggagcaactctatgagatgttccagaacattcttgggatcaagaagttcgaacatcagctcctttacaatgcctgccaggtaaggtgtttctcgcctgggccyagagctgtgggtaagcagagctgcattccaacttctatgagatacttcttgatttttttaaaaaaaggattaaaacttatattttattactctactggtaaaaagttgaatacagtttaggctggagtatattcatgcttttcttctgatttaaaaaataaataaataaaacatttttatgagcccttaaaagtctcaggggccctaggcattgagctcattgtgtctaatgggtaagttggccctatgagtaaggcttgttttccatgtgtcaaaagtgctaaaaatcaattttttaaaaaatatggttctgcctttggtgtttgccagttgaagggcttgt

SEQ ID NO: 505546 - DNA, 557 bp, Homo sapiens
tgtgctgagctcctggatggccaaatttgatgcatctaccgtggagaagaggacccgcggacaggcaggcccggatgacagccagcgcacgtccgagctgattctgagcaaggagcaactctatgagatgttccagaacattcttgggatcaagaagttcgaacatcagctcctttacaatgcctgccaggtaaggtgtttctcgcctgggcccagagctgtgggtaagcagagctgcattccaacttctatgagatacttcttgatttttttaaaaaaaggattaaaacttatattttattactctactggtaaaaagttgaatacagtttaggctggagtatattcatgcttttcttctgatttaaaaaataaataaataaaacatttttatgagcccttaaaagtctcaggggccctaggcattgagctcattgtgtctaatgggtaagttggccctatgagtaaggcttgttttccaygtgtcaaaagtgctaaaaatcaattttttaaaaaatatggttctgcctttggtgtttgccagttgaagggcttgt

SEQ ID NO: 505547 - DNA, 566 bp, Homo sapiens
tcactaaaacctaatttgccaccataactgttttggttgcttttttgttttgttttgtttttgagacagggtctcactctatcacccaggctggaatgcagtggcatgatcatggctcaccacatccttgacctcctgggctccaatgatcctgcctcaacctctccagtagctgggactataggcatgagccactgtgactataggcatgagccaccagcctggcccccaaacctgtttttggccatgctctgagcccatattatttctgcaacttcaagttagtatataagcttctgaacctcttttagggggttgggtctttattctgaacgctcccacgtatacacgttaaataaatttgtatgtcttttcttcgattaatctgccttttgtcagttatcaggaaacttcagggggcccaggccttgacccctacatataaaagtgtaggtctgatgcccagtagtcaaagaggtgacctgggccrctaattaagttactctccctcagctacaaaccctgtatttggctgggtgacattggggccaggactctgcaaacca

SEQ ID NO: 505548 - DNA, 597 bp, Homo sapiens
gtcacttgcaaaaaaaaataaaaatgtcaaactgacttggcttgcttctcactccatcagttatggaatagggcttggggagggcaagtttatgtttcaagtggtaaatgactgtttgggaaggtgattgatccaaagcacattccaggtgacttagaagtatgaagaaacaaatagcatggttagcacgtgttgcaattacaactaaatgtataagcaagaaaggaaaaaatagaggtcagttatgataccaaattgctctatcttctaaagaattttaatcacatttttcatcacttcattaatttggttcaatttttcttgaaaacagtaactattattcttagaaatagacacagactatgtttgaaacctctcaaatgagctccttttgaattattcatgtgagaaaatctctgtagatatccagaaatagggtctctttctgtttccctcacttaaaaacaaatgactgcattttactaaaaagaaaaactaaactgaaaccatatttgaaaaataacaccccatttttcttcctacaaatcaaatttgctgaaggaaastggggaaaaatagaactgtaataaagcattt

SEQ ID NO: 505549 - DNA, 594 bp, Homo sapiens
ctgttgagaatgacagtttcttttgttgaagaggctacccattttagagtctgtgactattgctatggagacaactgcaaaatcagagaaaagctgggtattgggcctgtaaaatcaacaatgctccacagatttctcaccaactaaacctgttcttacaaattagttttgcctattttgaacttaatataaatgaaattgtaaaatatctaccctcttgtgtctgccttctcttgattgacttcacatctatgagatttatttatattgttgcaggtaacagtagtttgttctccttcactgctgtgcagtattctggtttgtagtttgaagcttctagtttgaagctactatgaataaagttgttctgaaatactcctatacatgctcttcagtgtatgctagcactcaattctctttcttttgggtagaagcacaggaatggaattctggagatagatatctagatatctataaatagatactcagctttagtaaatagtgccaagaagttttccaaggtgtttttactaataagcacagctaccagcaatstaagacagtctaggtgcttcctgttttcacttccaaaat

SEQ ID NO: 505550 - DNA, 316 bp, Homo sapiens
atgtgtgtgacaatgagagaataaagtcaaggagatgctgaggtttcaggccgcgatgcctggaagagccaaagccatttataacaatagataattctgcttgaggacagcttggggtagggtgggccaatgtgttcacttcatctgtatggtttcactgattcctcataccagcccaaagaggaagrcgctgtgcttatccccatttttcagaaaaggaaattaggcttatagacatgaagccactctttcaatctcagaatttccaaatggctgactcaacttggctcttagccactgtgcattatgtctcacc

SEQ ID NO: 505551 - DNA, 643 bp, Homo sapiens
agaaattcttggtttcatagttttgtattatgagcatctgggtggtactttcatttttaaaagagctacactgattttttaaaaattgaaaatcatcttcatggacagtgggagacaggaccagatgtgtgctttagatcaatctgcggcagcggaagatagagaggagggagggagacaagttgagccactatcacagcagtccaggggagacatgtcaaggtgctgaagtaaggaagaaataggtaatgaagagaaagacacaaacgtatggagagctgccagacagaggaggacaggagagcatttggcaaatgattagatgtgtgtgacaatgagagaataaagtcaaggagatgctgaggtttcaggccgcgatgcctggaagagccaaagccatttataacaatagataattctgcttgaggacagcttggggtagggtgggccaatgtgttcacttcatctgtatggtttcactgattcctcataccagcccaaagaggaagacgctgtgcttatccccatttttcagaaaaggaaattaggcttatagacatgaagcyactctttcaatctcagaatttccaaatggctgactcaacttggctcttagccactgtgcattatgtctcacctggac

SEQ ID NO: 505552 - DNA, 574 bp, Homo sapiens
agctgctcccttcagaaggagcatgtgctctccagtttgtcatagtccctgctaatccctgttgcatctctgaatctaatgctgaatagtacttgccctttattttagtatttgcactattacttatcttattgtgaagcaaaaagtgaatttatgagcctgtgctctttaaagtgctgaaccaaaagccagactatttttaaagaaaataagagcctggccgcgcgtggtggctcacgcctgtaatcccagcacttcaggaggctgaggcgggcgtagtgcctgaggtcaggagttcgagaccagtctagacagagtgataaaactctgtctctactaaaaatacaaaaaaaaaaaattagctgggcatggtggcgtgcacctgtaatcccagctactcaggaggcygacgcaggagaattgcttgaaccagggaggtggaggttgcagtgagccgagatcacgccattgcaccactccagcctgggtgacagagcgagactccatctcaaaaaaaaaaaaaaaaaagagccaattccttggtagaaatgaaaaactgatcttatttgcttaa

SEQ ID NO: 505553 - DNA, 348 bp, Homo sapiens
agaaaaatgagaacaagtccttttgccatagctgccaaaaaaaaatcagacccaaattcaagccccgattttatgtttctcagactgagaaaacacaaaagccattgctcagatggtttggaaaacatttgcaaggtcagctcatttcatgatgtttgattccagtactggcacttggattacttgtgcatctttgagatgtcactgaataattatcaccacacttttaggatttattgagaatcaggctaggacgtatttcctcayctcacaaaagaaagctaggagaaaagcactatagacatctccattttacaagtaagaaaatagagtctgcaggagagtcag

SEQ ID NO: 505554 - DNA, 617 bp, Homo sapiens
aaggacgagataaaatttatttaaacccagccctgatccagaaaggctggctcttcactctcaggtcaatgcagaatataagtcgctttttccagatgacacagtggccaacagaactgctactggactggtcttactttttccactagaacagtggttcacagaggtagtttctcatgatctattataaagcataactttttacaaaaagtttaacttttyacaaaaatttaactttttcaagttaaaagtttttaacttttaaaacagcaaagttttggctgacttgttaatatacatattttatataaattagaaccaatgaaaagatacctgaaaataacatgtcttgcatacactccattcattcattcatgtaatcagccctgagtgtctggcacatataaggcagttagctatgccctgggaaaacttcgatgaataagatagcaagaaaagacaccgcatgtaacaaatttaatcatcatcaagcagttaaacaaacactgtgctgtggaatcacatagcaggaagacctgcccctaacctaggggctgggaaggacttcataaattagtgctgcctgcattgatacctgatggatggcatgatagagc

SEQ ID NO: 505555 - DNA, 617 bp, Homo sapiens
aaggacgagataaaatttatttaaacccagccctgatccagaaaggctggctcttcactctcaggtcaatgcagaatataagtcgctttttccagatgacacagtggccaacagaactgctactggactggtcttactttttccactagaacagtggttcacagaggtagtttctcatgatctattataaagcataactttttacaaaaagtttaactttttacaaaaatttaactttttyaagttaaaagtttttaacttttaaaacagcaaagttttggctgacttgttaatatacatattttatataaattagaaccaatgaaaagatacctgaaaataacatgtcttgcatacactccattcattcattcatgtaatcagccctgagtgtctggcacatataaggcagttagctatgccctgggaaaacttcgatgaataagatagcaagaaaagacaccgcatgtaacaaatttaatcatcatcaagcagttaaacaaacactgtgctgtggaatcacatagcaggaagacctgcccctaacctaggggctgggaaggacttcataaattagtgctgcctgcattgatacctgatggatggcatgatagagc

SEQ ID NO: 505556 - DNA, 626 bp, Homo sapiens
gctgcagacagtcaaggaccggtttcaggctttcctcaatggggaaacccagatcatggctgacgaagccttcatgaacgctgtgcagagttactatgaggtgagaatcactgttcagaagaatgccaagaccactcaagccctatgcctggggagtctgagctgcagggcaatggggacagtcgttttggtttactacagtatcatccttcctaaggcaaatgggttggtgattcgttacaatgttaagaaataacagtattttgttttagggaaaactaaatgtaagctactatttaacaacggaattttataccaggcaatatactgagtgtttttcatacaacatataacagtcttatgaattaggtctgattgtatttccattttactgatgaagaggctgaggctcagataggttaaattaattactcaaggtcacacagctatgaaaaatcacaacctgtgactttgagtcaggagcatttttctcaccacttacaccattttaaaaggatgttagcacctcccaaggatggtggcttcatgaacttccttattctttttttwaaaatgctgctttcttttctggagctggaaccactgtccaaaatgcagtgctgttc

SEQ ID NO: 505557 - DNA, 628 bp, Homo sapiens
attgctgaacagatgtcaaacccatttgctacttcacaaatcattgtaaaggataattagattccattgctcctccaacaaggtgacacaaagaaagatgatactagtttccaaagagggggctttttcataaccaaataactgagaattgctacttgagaggtcactatcagattaaggatcataatatcaaggctgagtctagaagataatttgggacatctccatggcctggccagaacaaaaaggaatagtgggaaaaagaaaatatgtatatatataaataaaactatctgcatctgctgagtattttttatcatacatataaagaaaataaaagcagctctccactttcttacaaaacatgtacctgaaaatgtacctgaaagtggaatatctgaaaggctaaatagaaacgtaattttataagaaaatagatgatggaaatggaggcttttttgcragattgcctagcagtgtgacaaaatacttatttactccttttaatggtcctttctagctccttgttttctagcaactcccagcatagagagaagaaactttgcaagagcgaggggccacacccaggtaaacatctacatgctcccaaagagatagtcattctgac

SEQ ID NO: 505558 - DNA, 455 bp, Homo sapiens
tatttatcacatgcttttcttgtgtcaggatatgtgccttagaaatgtatctcacwgaatcctctcaacagccctttgagggaggtatttttccatttcacagaatctagcactctcttcaacagtttccttgcaaaattgaaagtggagagagcaacggttataaatgtgattagtttactgttgctttttcttttctttctaaatgtttataactctaattctgtttctttactttgagatcagttcaaactcttattataaaaatttataggctttgtgttcatttctattccctttataatgacaggtctttgaactcacattgtatacacttcttattttgctctaaaccaattggaagaaagaccaatagacaattatctgcaccaaaatgttatacagataaattgtatactcccaaaaggcactggtgacatgctattctgtcaaca

SEQ ID NO: 505559 - DNA, 455 bp, Homo sapiens
tatttatcacatgcttttcttgtgtcaggatatgtgccttagaaatgtatctcactgaatcctctcaacagccctttgagggaggtatttttccatttcacagaatctagcactctcttcaacagtttccttgcaaaattgaaagtggagagagcaacggttataaatgtgattagtttactgttgctttttcttttctttctaaatgtttataactctaattctgtttctttactttgagatcagttcaaactcttattataaaaatttataggctttgtgttcatttctattccctttataatgacaggtctttgaactcacattgtatacacttcttattttgctctaaaccaattggaagaaagaccaatagacaattmtctgcaccaaaatgttatacagataaattgtatactcccaaaaggcactggtgacatgctattctgtcaaca

SEQ ID NO: 505560 - DNA, 632 bp, Homo sapiens
ttgtatacacttcttattttgctctaaaccaattggaagaaagaccaatagacaattatctgcaccaaaatgttatacagataaattgtatactcccaaaaggcactggtgacatgctatyctgtcaacaaagacagaagttactggagttagagacagaaaagaaatatattggttatgtgccaaaggatttatttacaatataatggtttgtaggtttcactgaaatacaaaaaaaaaaaaaaaaaggcatgaaaaatttgctttcttgtttacttctatagtaggttgttaagtgacaaaatacctcccagtggcacaacggctggcttcctatgcatagtgaagagcctatacacctaactgcaactccatgaatcactgagtcatgtgattttgagctaaattgcagcctttatccaccacaaaaaagtaaataaaaaatcagaaagtgtactcttcaaaatatgcaacctatatttgtacaggatagcaagaacatttagattctgggttatagtaacacataaaattgaatttgctccctgatcccaagcaagtaacctagattcataaaattctaaagttgtattaaacttgaatgtgctacgaagcttcattgtgtcatttaa

SEQ ID NO: 505561 - DNA, 465 bp, Homo sapiens
aacgtttcagaattacacttcctttttttctccttccttccagaatttaagaaagaagtgattatgctgttgaaatcgtgaagattttacaggtaacacttcctttccttcctttgttttgataacagatggagatatttacaattttaataaaatctagaatggggaggcaggcaagtcaatgccaatcttcccattctatttggtgataacttttttgtagtgtgaagagtgtgtggtatttttactagtatgggctaaaaaatatttgcaaatccattatataaactttttatttattagggaatcagatagaggaaggctattctcaccattactttgtgcagaagaaaacagggactgacctaaaacttctcagtcccaaaatgsagcagcattctttaggttctcttcctggggccctgcactcgtgatgccattcaggtataattttcatgctcattt

SEQ ID NO: 505562 - DNA, 609 bp, Homo sapiens
caatatcagggcatccttggacactaagctcattgtggaatccaagtccagaactcctgtgatagcagagccttctccacctgctcccatcaggaactggctttgaatgtggtgatgtgaggccttacacacaggtccctcgcatggagctggctggtgaaggctgcaggtgamggcggctggccccggtgtgactgcattgccgtccagcacatctgagggtcctgctcctcaggcttagaaatcttggcatcgccttgactttgtgatcagtttagattctgagctcagccacgtggcgctgacctgcagcatctatgtctatgcagaacttggcagggacagaatttccgtgaaagtcagcatagcacagggtgattaaaagtgtgggtgctagaatctaactgctaagttcaaatctcggctctagcccttactagctgtgtagccaaggacaagttactcaacctttctgcactcacatctctcatctgtacgacagggtaatgacggtgcctcccgcaggatttttgtgggcgttgaaggagttactatgtgtaaaatccttagacaagtacctggctcatggtgactgctcagttagtggca

SEQ ID NO: 505563 - DNA, 525 bp, Homo sapiens
tataatattgttgtatttgagaaagagaaggctgcttgaaaaaagggcctgtaataaacacaagacaggcatgactctaagatatttgaaactgttttttttttttttgagacagagttttgctctgtcacccaggctggagtgccatctcggctcgcagcaacctctgcctcctgagttcaagcaattctcctgcctcagcctcccaattagctgggattacatgtgtgtgacaccakgcccagctactttttgtatttttggtagagacaaggtttcaccatgttggccaggctggtctcaaactcctgacctcaggtgatctacctgctttggcctcccaaagtgctgggattagaaacgtgagccactgcgcctgggcaaaagtattttttaaattaaaatttgaaaaattaaaaaaatacagatgagatctatgttgcccaggctggtcttgaactcctgagctcaagtggtcatcctgcctcagcctaccaaagtgctaggatgacaggtatgagccac

SEQ ID NO: 505564 - DNA, 559 bp, Homo sapiens
atctccttggtagatctggatcttaggcaaatcaaggaacttygacttcatcttgtactttgggagagatcagaaagacctggaagcttcttcaattcagtgtgtccaaacaccatattgtggggtatcagtttctgagccctaacactgtcattcaacacatttaattgagcctctactatgtgccaggcactgtttcaggcactgggaatacaacaatggtgtgacctgacattctagtttggggagacacacaggccttccccctagttctttgcatagctagctcttgtcatttaggactcagcccaggtgttaactcctctgagtggtcttctctgaccatttggattaaattagccatccctctatcatcactcttacagtttaagttacctattgctatttaacaaaccaccccagaatttagtggtttaaaagttcactctgggatagggatggtggctcacacctgtaatcccagtactttgggaggctgaggtgggaggatcacttgaggccaggagtttgagaccaacctgggcaacatcgtgagacc

SEQ ID NO: 505565 - DNA, 461 bp, Homo sapiens
aaatacaaaaattagccaggcatgatgtgtgcacctgtagtcccagctacttgggaggctgaggtgggagggtcactggagccggggaggttgaggctgcagtgagctgtgttcatgtcactgcactacagtctgggtgacagagagagactctgtctcaaaaaataaaataaattgatttctactaattcccaagcaagtggtagaggctggattcaaatccatgtttcttcaacccacagttttccctataataccatagagattcccaagacatgaattactcagtggaaccatgtcttcctgyttcttattccccattccctctgccacttttaggtccttatcctaaaggaaaagttcagtgaaaacaaggcaactttcctgatacccagctataatgccaacatccaaggctttggagtcaggcagacctgaattcaaaaccttctctctcacca

SEQ ID NO: 505566 - DNA, 577 bp, Homo sapiens
gctagcattttttcagcaataaagttttttaaattaargtatatccattgtttttagacataatactattgcacagttaatagactacagtatagtgtaaacataagttttatgtgcactggaaaaccaaaaaattcatgtgaattgctttattgcaatatttgctttattgcagtagtctggaattgaactcacaatatctccgaggcatgtctgtacatgtatcatctcattgggtctcccaaaacccaaagagataggttctagttactatccccatttgatagatgaagaaactgaggtgcttacttttcttacatcccacagtaagtcacagtggaaactgaggtcaaatctcttgtcaccttgctccacctgccgatgccatgcccaggatttaaaggatgtgagctttgctctcattttaagctcacagaatagttaaagacaacatttcccaggaagattggagaactctctttagagacagtgccaagggatggctttgacccaccaaaatcttcaccagtatctcaccctcagagctactgtaaaataataataatagaaatattct

SEQ ID NO: 505567 - DNA, 577 bp, Homo sapiens
gctagcattttttcagcaataaagttttttaaattaaagtatatccattgtttttagacataatactattgcacagttaatagactacagtatagtgtaaacataagttttatgtgcactggaaaaccaaaaaattcatgtgaattgctttattgcaatatttgctttattgcagtagtctggaattgaactcacaatatctccgaggcatgtctgtacatgtatcatctcattgggtctcccaaaacccaaagagataggttctagttactatccccatttgatagatgaagaaactgaggtgcttacttttcttacatcccacagtaagtcacagtggaaactgaggtcaaatmtcttgtcaccttgctccacctgccgatgccatgcccaggatttaaaggatgtgagctttgctctcattttaagctcacagaatagttaaagacaacatttcccaggaagattggagaactctctttagagacagtgccaagggatggctttgacccaccaaaatcttcaccagtatctcaccctcagagctactgtaaaataataataatagaaatattct

SEQ ID NO: 505568 - DNA, 607 bp, Homo sapiens
gtctcagtgggcagtatcttatcaatctggagcgtttgaccctgttcactctcccctatcacaactccttccaccctaagcttttcatcacgccacatagtgaatcagtgatcgataaatgctaactactactgtcttctagtttcttttataaatatcaagaagaaagtactgatatagtgcttattctatgccaggcatggttcttagaactttacagtatttacttaatctttctaacaatgctttcagaagctaatactattatcatcccattttacagatgaarttactgaggcacacaaagttacacagctaagaaacagcagagccaggattcaaatctatgcagactggccccagagcctgtgttatattagtaatagctgcacaggcagaactctaatccaagttgggggcatgaaaccagacctgccagcctgtcctgtcggtcttaaatcaaacacgagctgcctcctctacacttcccagactctctgtccctgggcttcatgctctgcggcggccagtgccatgttcctcctaagccttcttcctcccaagctgctccaagcaagcaggactcacaccataaagtgtggggcca

SEQ ID NO: 505569 - DNA, 555 bp, Homo sapiens
gctggagtctgggggccccagctctggtccttgcttgctctgtgatgtggcaaacctcagtctccttggcctcaatttccctatccataaaaagatggggctgatgtccacccagatctcatcgctggtgaggagggagtgctgccaagaaacaaactgcartgagatggtcagattttcccctgggctgttgaccacagagcctcctaactccccctctgcctccagtctcatcccacctgctccatcctctgcagtctccacatcaggttttgctactcctttgctaccactcaccatggccccattcatccagactggcagtgacattccaaatatttaacaatcagagaaagacaccctggagcagatcccggaggctccctgctgtgacggggtgaacgctctagtgactggattatggggaggacgggtgggggaagcacaggggggacggcggctcttcaccagcaggaacatttcaatagatcacctaccagagcagccacactgttcggctcctccacccttctgctgtcggcaaccgaagccctg

SEQ ID NO: 505570 - DNA, 534 bp, Homo sapiens
tctgggggccccagctctggtccttgcttgctctgtgatgtggcaaacctcagtctccttggcctcaatttccctatccataaaaagatggggctgatgtccacccagatctcatcgctggtgaggagggagtgctgccaagaaacaaactgcaatgagatggtcagattttcccctgggctgttgaccacagagcctcctaactccccctctgcctccagtctcatcccacctgctccatcctctgcagtctccacatcaggttttgytactcctttgctaccactcaccatggccccattcatccagactggcagtgacattccaaatatttaacaatcagagaaagacaccctggagcagatcccggaggctccctgctgtgacggggtgaacgctctagtgactggattatggggaggacgggtgggggaagcacaggggggacggcggctcttcaccagcaggaacatttcaatagatcacctaccagagcagccacactgttcggctcctccacccttctgctgtcgg

SEQ ID NO: 505571 - DNA, 555 bp, Homo sapiens
gctggagtctgggggccccagctctggtccttgcttgctctgtgatgtggcaaacctcagtctccttggcctcaatttccctatccataaaaagatggggctgatgtccacccagatctcatcgctggtgaggagggagtgctgccaagaaacaaactgcaatgagatggtcagattttcccctgggctgttgaccacagagcctcctaactccccctctgcctccagtctcatcccacctgctccatcctctgcagtctccacatcaggttttgctactcctttgctaccactcaccatggccccattcatccagactggcagtgacattccaaatatttaacaatcagagaaagacaccctggagcagatcccggaggctccctgctgtgacggggtgaacgctctagtgactggattatggggaggacgggtgggggaagcacaggggggacggcggctcttcaccagcaggaacatttcaatagatcayctaccagagcagccacactgttcggctcctccacccttctgctgtcggcaaccgaagccctg

SEQ ID NO: 505572 - DNA, 497 bp, Homo sapiens
gttttttagttgcatttggtatattttaaaggcaaaaagagccacctatggttggtggctcctatattgaacagcacagattgaaatgattaacttctatatgaatactgtttataatttcagggccctgcatcgtgcttgttttggtagtcctattgacaagtgttatccaagtgatcaaatgattggtatggattcttcttgttttacgtgtaatgtggtgcatttgctaagccagatttggagttgcataccttcccattggatggaagtgctagttacacagagaagaaaacataggcagaagtttcaaggarcattttgataagtaaccttgcgagacccagtagccaagcagtgctgccttagatgaagctgctttaaggctcgtgagagaatgtgcaaaatcagggtagggaaagagccctccacccctttcaagccccacatcctccaggcagaaatggcaccctggggctgcagggtggccaccatca

SEQ ID NO: 505573 - DNA, 637 bp, Homo sapiens
aatagggctttggccaacacatcttatttaattgtttctagtgtcttaataaatattttaaaggcaaagaaaaaagatgataattaggtaaacattaaagatgatgatgatggaagaagtcaagccattcatcaggaggtgctaaaatcctgtcaacagtattttctgacttgaactggaaaaagattcatgctttaatttgtcttaggcgcattaatatacatatgtgagtgaatgtgtgactgtttgaaaagttaggggaggtacagaaaaaaagataacaaaaaatattttccccttcctggagcctagctcagatcatatccaaagcacaaccagtaccagtgattaatagactcataaaatagcatagacragaacagtcagtgtggaacacctggtctccccacccccacccagacttgctcagccagtacatgagttttctctgcggtccccccacccccacccagacttgctcagccattgcatgagtgttctctgcggtgtgtttcctgatgcagaggagtaagaggtcagcttacactgtcacatggcacggctactccaaggaccagtaggcacacgtaacactacacctcccagctatctcaccctgaagtcacaccctgagttc

SEQ ID NO: 505574 - DNA, 574 bp, Homo sapiens
ccaacatatgttttaatttgtttgcttgctcgtgctatgtttctgtctgtcaccagtgcttaattctggttttggcatattataggtgcttagtgaatgctaattgaaggaggcaacatagtatagatggataaacatgggattagaatcaagaggcataaatgtgagcgtcagatttattattttattcttgagtgatgtagaaaaagcactttgagtctttgattcttattttactcacctgtaaaattggaaaacacctaccttgccaaactcacaaggctatagtagggatcaaatgcaaatagtgcatgagaatgtactttgtaaaccataaatggctataaaatgtgcttattatgtaaataataaaaaagactctacattttattatatttaagaaaattcttacacttttgctctattggctcaagattagaagaaaagaaaaactaagagtattatttcagtaaatgtagactaaaatgatagaawtttttttgggcaagtaagattttagtcaatgaaagatttttgggaagatattttcaagactaatgtttgccactatcat

SEQ ID NO: 505575 - DNA, 550 bp, Homo sapiens
gcagaggtggcccgtcaccaaggaggatgggaagctgggattagaagatgaccagcaatcgtcgccacactgcatcagttctgatttatgttggtaaccccttttaacttgaacataattctagcacttggctattaaattcaattctgcaaacagttacggagaggctaccgcatgctcagcacagtgctaggtgctatggctgtctgcaaggctgtttgaaacacctagggctcatgtgctcagaaggacgggtaagtctgtgcttctgagtgctgggatgcagcctcttttccctacgagaggggyttaggtggtagagaaataaataagtcagcaaaagaatggctgtgctttaaattttttttttctttttagattttcaatttcttgtttcttaatgccttcaccttccatattgacttggacacccacctggtgtccacctaatcactgactttattgcctttgctcctcctttgtcctctcctcacccctcttgctagcaattgtaaggtcaatgacctcgttggcttggacagactcagga

SEQ ID NO: 505576 - DNA, 516 bp, Homo sapiens
ccaggacattctcactgatggactttccacgaaagctctgcaagttttcctttcagtttcactgtccgttggccggtactggttgcttgactaagccctgttggcgtgggttactgctcaccctgacaggtctttgtgaaacatgaaacaatacaaacattcttctcatttcccctccgttcttcctcttggagctgttcccagtcccggtggcccttctgaagcckagtgggaagctcagaaggaacctctggatttgtttaccggtgtcaggaatggaaactgctggggcacctgtgtactcttgctggtttcttaaactctgtctgaatcccacacacccttgcttttcggggagttgtggctggctgggacaggagcaaggagtctctcctttgagtcaaaggaggcacagtagccagaaggagggcttagatatgagaatgttacaggccaagaagctagacggaccatctggagagtgaccaaaatgaaaagcgcagcggcagttgtgca

SEQ ID NO: 505577 - DNA, 516 bp, Homo sapiens
ccaggacattctcactgatggactttccacgaaagctctgcaagttttcctttcagtttcactgtccgttggccggtactggttgcttgactaagccctgttggcgtgggttactgctcaccctgacaggtctttgtgaaacatgaaacaatacaaacattcttctcatttcccctccgttcttcctcttggagctgttcccagtcccggtggcccttctgaagccgagtgggaagctcagaaggaacctctggatttgtttaccggtgtcaggaatggaaactgctggggcacctgtgtactcttgctggtttcttaaactctgtctgaatcccacacacccttgcttttcggggagttgtggctggctgggacaggagsaaggagtctctcctttgagtcaaaggaggcacagtagccagaaggagggcttagatatgagaatgttacaggccaagaagctagacggaccatctggagagtgaccaaaatgaaaagcgcagcggcagttgtgca

SEQ ID NO: 505578 - DNA, 577 bp, Homo sapiens
cagcttgagagagggaaagacctaagtgtacatttggggcagaagtttctttggttctggtgttctgagcatgccttagtttcatgaacctctaagaatgtcttgatttggtgagatggagcagggacctctctaagggtctgctgagcacccccaaacatgaaaataaaggaaaatcttgagttccttcaagggaagttccaggcacctagctggccctgagaagtaaatgagcaacttcgtaagcaagaaggtaatagtagcttcaaacagtagccaagggccgggtgtggccaagactcgtgactgtaatcccagcactttgggaggccaagggaggtggctgtgtctctagaaaaaaatacaaaaaaacaacaacaaaaaaaattaggcaggtgtggtggtgcatgcctgtggccccagctacacgagaggctgaggtgggaggaaggctttaattttagcctaaagggcagaggttgcggtgagctgagatcacaccactgcactccagcctgggctacacagtgagaccctgcctcatttmcaaaaaaaaaaaaaaaaaaaaaagatgaaa

SEQ ID NO: 505579 - DNA, 634 bp, Homo sapiens
tgcagcccataatatgttgcagtcttaattagctctggggctctccaagtatttgacttacgacctaagtagctgggcaggctgataagaacagatgaagcaagctattttgcaggctagtaaactttcatcttagactaaacttcttggyttgggtgagggcagctaagggtggggaggacaagcaggtgtcggctatccaagcaggggtcctagtatgccccgtttcttccgtagtttgttgcttcataattcacttcactattatatatttcactatcattttcactattatattaggtgtaaatctaactttcttcccacagcatttccttggcctatctggaatgcctcgatgccaattcaaggcactttgccttggaaaaggatgtgcattatttcctcaactccctcctctttttctttttactcctattggtcccaattccagatttatttttgtgtcctttgctcctcaaatcatttcaagagctattgactctcttcatcataagagagtagaactgatttagtttctaataatagttgacatgttatgggcatttgtttgttgatggctgtttccattaatttggggttaaccctctaacacaggggatagtgcgatggccta

SEQ ID NO: 505580 - DNA, 315 bp, Homo sapiens
tctctgtcacctcccacacccctgcatgggccagctccaagattcctggtaagtcacacaggaagccctacttcccctcaccctggcacaacccctggggatttttttccattgtgtattcagaagcagttgttkattttggttgtttttttgagacgaagtctggctttccctcagactggaggacagtagccctatctcagatcactgcagcctctgcctccctggttcaaacaattgtcctgcctcaacctcctaagtatctaggattacaggtgcatgccactacgcctggctaatttttgtatttttagt

SEQ ID NO: 505581 - DNA, 315 bp, Homo sapiens
acttcagtgcctaacagtggctgggtaggcaatttaaacatattttaattgaacttgtatataatttataagattttaaagtagatatttagcagggatgaggrgattatatgtgaattaaatacatttttcagtcaagtgtttgcaatttgctagcactttccttctaaccttgcaatagttagttaaatttatagtaattcttttagattggatttcccttgaggctcgacctgatttcctgtcttttatcactgctttttgtaaccttcctgccaaatcataaaccttggctttcatggtttacattatttt

SEQ ID NO: 505582 - DNA, 575 bp, Homo sapiens
ctgcagagtagaaggcagccaattttccttatatacccatgccttactgggcactgtgcttggttctgggacttctgaaataaatacggcacagttcagtctctaccctgcattggagttttggggagctgggggtagggggttatagagagaccagtaaatgcatcattacaatacagggagttaagtgtaatagtgtgggaatgctgtgggaatactcagtcggggagtgagccgagtcatgagtgttaagtctgaattaagactaatcaagattgggagttaacctggcataaaagtgggttttcagacagggatacagcttgtaccaatgcaaggaaktatggagtatgcagtggcctagttgggaacagcaaggccgggtttgactgcagcagcctgtgtaagttgggggaacagcagtgaatgatcctagaaagcagcaggagttgtattattaagaagttggctgttagcatttagtattcttgtggttgttaagaagtgctggaagatattaagcggaaagtcacatgatcccatgtgcattttggagaagtcactggtgcagtgtg

SEQ ID NO: 505583 - DNA, 484 bp, Homo sapiens
aacacttataaagcctgaagcctactccaaaactttccaactcaagctctgtcctgtctccaaatccgtgtctccccatatgaagaagcatacactttgggccattctcagatattgcgatcagtcgtgaagtgtgactggaatcatttaccactattaatgcttaattatttgagagtattgaatcatgaatttgaaatagataactcggtgaggttgctgttgataattccacttttaccttcttgcacgatgcaattcttcttgaatcagcaagaatgcgatggaattagatttattgcacttacacctgtgcttagcactcatcatttccttggtcatttcatggtcatgtgacctgtgtgagtgtttcacaktcaaaatagcatgctgctcattagccttattgatggatccctcaactgctacaagttcaaatagaacttgtgctctcactcagaccttctcctctgcatgtggtcct

SEQ ID NO: 505584 - DNA, 484 bp, Homo sapiens
ttcctaggtagcaacctagtccatcacaaatgataacgttgccttatttaaaataggcatcattttattgtttcgtggtttattccattagctggaaattataggatgtgtttatattctatgtcagtgttcgatactatagaccataaactgttgctgtttgctgttaagtacctgacaagtctgatggggtgggcatttattacctgcctacgccaacagttagtcacttcattagctaactagacctccagtttcttcatctataaaggaaagtggaagaactaaatcaatttctatacagcattcaatttcaaaatagtttggaaaatataagtagagtttggaccttaaagcgatacttttstcatctttcagaggaaatcatttttatattcaaaattacagatgtattcagtgagagaaattggcctagaatgcacatctcatgaattcaatgttttgtaccttctaccagaatagt

SEQ ID NO: 505585 - DNA, 262 bp, Homo sapiens
atacagcagctgtaagtgtactcacacatagacaaccacagacagagacacatgcagtttgctatcaatttacaaaggtaagttactgtctcacaattataaggcataaacatgcaaatacattcctgcttatttgatcaacattgattakttctttcaatggaaaatggaattatttattgtaaagcaaaacgtaatttttgaaaatttgcaaatatataaaatgtacaaaaggcaaaatcttactatttaccattttttg

SEQ ID NO: 505586 - DNA, 624 bp, Homo sapiens
ctgcttttgttctttagaaagttaaattacgtgttttaggtacataggtaactttggaaataaattagaattacctgggaaaacaaagaataaagacagccttttgcataatgacctaatgttaacgaggtccactttttgatagaatttcttggtacaagtgaaattctgacatgtgggggtaaagtggtgtgaatggtcccttagcactcctatgctgtacttattttgtaacctgtcattacagtgaacttcaaattaatatgacagatggccctcgtaccttaaatcctgacagccctcgctgcagtaaacacaaccgcctctgcattctccgagttgtgrggaaggatggggaaaacaagggcaggcagttttatgcctgtcctctacctagagaagcacaatgtggattttttgaagtatgtgtaagatttatctagcttactaaaatgtaattaaatgctttggttattaatgtataacaaatagcaatactttcctagttttaccttttacctttaaatttgaaatagccatattggcattcagtctaaagcttgaatgttgactaacttaaaattcagatgttcagccacaagaaatttaataaaataatagcta

SEQ ID NO: 505587 - DNA, 638 bp, Homo sapiens
tgtctcagtagagcaggtcccctgtggatcttgattgaagaagtcatttctggtggcgcaactacaatctatccttccagtattccttaatggaagcctagaattttctgtgtgttttttgtttgtcttttatattttctcttttttaaatattctttttttcccttttttttttttttttgagacggaacctcgctctgttacccaggctggagtgcagtggcacaatctcagctcactgcaacctccatctcccaggttcaagcawttctcctgcctcagcacccccagtagctgggattacaggcacgtgccaccatgcccagctagtttttgtatttttagtagagacaggattttgccatgttggccaggccagtctcgaactcctgacctcagatgatccacccacctcagcttcccaaagtgttgggattacaggcatgagccactgcaccctgcctttttatacttgcattttaagttcaggggtacatgtgcaggtttgttacataggtaaacatgtgtcacgggggtttttgaacagattatttcattacccaggtttattctatgtatttattattattgttattattttagatggagtcttactctgttgcccaggctggagtgca

SEQ ID NO: 505588 - DNA, 638 bp, Homo sapiens
tgtctcagtagagcaggtcccctgtggatcttgattgaagaagtcatttctggtggcgcaactacaatctatccttccagtattccttaatggaagcctagaattttctgtgtgttttttgtttgtcttttatattttctcttttttaaatattctttttttcccttttttttttttttttgagacggaacctcgctctgttacccaggctggagtgcagtggcacaatctcagctcactgcaacctccatctcccaggttcaagcatttctcctgcctcagcacccccagtagctgggattacaggcacgtgccaccatgcccagctagtttttgtatttttagtagagacaggattttgccatgttggccaggccagtctcgaactcctgacctcagatgatccacccacctcagcttcccaaagtgttgggattacaggcatgagccactgcaccctgcctttttatacttgcattttaagttcaggggtacatgtgcaggtttgttacataggtaaacatgtgtcaygggggtttttgaacagattatttcattacccaggtttattctatgtatttattattattgttattattttagatggagtcttactctgttgcccaggctggagtgca

SEQ ID NO: 505589 - DNA, 587 bp, Homo sapiens
ccagctgctactatttaatttgattaacagtccattgccaaccaaataatcccctagtcagaggaacattttgaagccaagttacacaagttgaaattctatggcagatatacaaaatggaagggaaggaagtccctgaatatgaatatgaagaataggacaagcagaaatacatacatatgttatcatccaaaattgattgagaattgttcaaatccctccaacaccctggaggatcctagatattctcagaggaaccaatcctcaaatgaaaatttgagcacggttgtttactgagatactaagcagtggtagaaaagtttagccttctgaactagcctttctgaattaattttaatatcttatagtttggtttggaaacaaaccaaatcatggtttgattccagtgagatgaggtacctagaagagtcaaactgatagaaacagaaagtagatgagtggttatcagcggctgaggagaakaaaaaacggagagttgtttaacaggtacaaagttttagttagagaagatgaaagtggttaatgatggctaagatggtaatttagtaataataatggttaagatg

SEQ ID NO: 505590 - DNA, 409 bp, Homo sapiens
tggcctatttcaaggtcttcatgttttccccaaaacacatcaccttaggatatgttctttgtctggagtgggagacagggtygtgaaaggaaacttcagttccccaaaactatcattttggttaataagaactgctagtgttggaaccatatttaaaagaaaattggaatcaagttcctctaaggaagagtacttataatcttattaacctgagtattcatttattaagcaaatattacatttttggttatgcataaaatttggccacagagataatgaaatctttcaaatccatatgctttgccccagggaatacatttattacctgctgtgatgtcactgggtaattttcctggctggtagagattcgacttaagttttccatcactcagaaagaggaggatacccc

SEQ ID NO: 505591 - DNA, 659 bp, Homo sapiens
ggtcagaaaggaaagaaaaaaaaatccctccagtgtttgcaaccattgcaaccattayatggtagggccaggagctatgtttcttccataaaatcaggatgcatcgacataataggtagcttacctgtaaaacccacatactgcagcacccaacatttatgcaacttttgttttcttccacacagcacactgttaagactacaggtggagaagtcagcatgaagcagaagttgttctcaataatttacatttcatttttatttctcaccttccttgtcatggtcctccttctcctctcctccacctctttctttcataataaggggacatgcaactacatttgcaggttcatgataagtcccttgcctatgactgggtcaacaaataagatcaacctcatgtagactgcacaaggcaaagataaatacattagaaacaccaatacccagggtatctgatcatctgcctgtttttctttctaattcacaaatattcccttactatcatttaccaaaacattttctagtacatttttaaaagattgggtgttttatagttaaattaatttgattctccttgtcaatcaatcccctaccttctgcccccactccaccagtaccccatacactaaatgttcaagctcacataacacaggcaca

SEQ ID NO: 505592 - DNA, 659 bp, Homo sapiens
ggtcagaaaggaaagaaaaaaaaatccctccagtgtttgcaaccattgcaaccattacatggtagggccaggagctatgtttcttccataaaatcaggatgcatcgacataataggtagcttacctgtaaaacccacatactgcagcacccaacatttatgcaacttttgttttcttccacacagcacactgttaagactacaggtggagaagtcagcatgaagcagaagttgttctcaataatttacatttcatttttatttctcaccttccttgtcatggtcctccttctcctctcctccacctctttctttcataataaggggacatgcaactacatttgcaggttcatgataagtcccttgcctatgactgggtcaacaaataagatcaacctcatgtagactgcacaaggcaaagataaatacattagaaacaccaatacccagggtatctgatcatctgcctgtttttctttctaattcacaaatattcccttactrtcatttaccaaaacattttctagtacatttttaaaagattgggtgttttatagttaaattaatttgattctccttgtcaatcaatcccctaccttctgcccccactccaccagtaccccatacactaaatgttcaagctcacataacacaggcaca

SEQ ID NO: 505593 - DNA, 570 bp, Homo sapiens
agaaaaacatataaaaccattaatgcctaaagcaattgcatactcttaaaccaaggccacttgtcattttctgtcattcttactgtctccttgcttcacaggtacacgacaatgcaattctatgaattcattcaataaaactttatttgacccatcacgtttgaatcagtgtgccagattctgggatttaaaaaaaattcaacataaatatggcccctgtcctcatggtgtttccatttagtgaagacagacaatatttagcaagtamacaactaagttcataaaagcattacaggttgtaacacgcattctgatcaagagtaacagaaggctggagtcacttaaggtagttgataaagggctctctcagttctcaggtctagaaacaggaggcaaagggagatcttaatcagtaatcttgccaccctctacagtcttcaagtcctataacttgtccccataaactaggattactcttggaacacttaatttcaagaggcctagacattttcccagcactgtcccattcactgtcataagagagagctctgaggattgctgagaaactac

SEQ ID NO: 505594 - DNA, 570 bp, Homo sapiens
agaaaaacatataaaaccattaatgcctaaagcaattgcatactcttaaaccaaggccacttgtcattttctgtcattcttactgtctccttgcttcacaggtacacgacaatgcaattctatgaattcattcaataaaactttatttgacccatcacgtttgaatcagtgtgccagattctgggatttaaaaaaaattcaacataaatatggcccctgtcctcatggtgtttccatttagtgaagacagacaatatttagcaagtacacaactaagttcataaaagcattacaggttgtaacasgcattctgatcaagagtaacagaaggctggagtcacttaaggtagttgataaagggctctctcagttctcaggtctagaaacaggaggcaaagggagatcttaatcagtaatcttgccaccctctacagtcttcaagtcctataacttgtccccataaactaggattactcttggaacacttaatttcaagaggcctagacattttcccagcactgtcccattcactgtcataagagagagctctgaggattgctgagaaactac

SEQ ID NO: 505595 - DNA, 650 bp, Homo sapiens
acagtggtcaggagctgctcccatctttgtcagcatccttcacctcatgcctactgtgtatcagccagtgctaccaggcctgcacacacatcgctgactgttcaacacttcctgcaaagataggaggcatccttcttcccaatgtgcacatcaaacatccacatctctcagaagtctggtagcttgcctatggccacacagaaaagaactaaagctatttatcacaagaataattaggtaaataagtaaatacacaagaaacaacaagaagctttaaaggaagcagacacataaatggttgagggaaaccagagagacttatggaactcgatcacttgggacttaagcaatggagaggaattcataaagaggtctcatgggtgggtggcatcagggaaggattccagcttctatttgggtaaacatgtgcacaaagacccaggggcctacaagagaaagaacaacaaacctttcacggacataagggaaggctttatgtcrtaggtgatacctgaaccaagagtccaaagggcagagaacagtttccaagcagagaatccatggattatgctggggtgggggttggttggtagaagacaaaaaatgaacaatgagaactgagaaaagttgtggggtatgacagtcagaag

SEQ ID NO: 505596 - DNA, 578 bp, Homo sapiens
ggagtaccaggagttactttgtactataagaggaaacctttgtatgtgcaatggctggtgggttactggctatagtttcagaggtggctgacagtggttgcaataaatagttattactgaaaggggatatgcacttcttggcaccttagataagaaatggatgctttgaacacttgaaatatatgggagtgctcaccaccaatgtataagactcccatgggcgacgagctaatcatagtgggctgactggcattgggtcatgcaccaactttgtgggggatctctttttastgaggtatactgtgggaacattgcacggcctaatctcatgcatggtgttttcctctttgtggggacctagaatccagtgtaaaaataaaatctttaatttatgtggatctgggtattctaccttccagttgtgcctgctttttatatattaaatattaggccctagaaactgcaaatgcttggttgactgtattcattaatggactctgccttgagctcaggtatgcagttagaaaacagactaaattaaaagccatctatctaactagattgctctccaaaatatg

SEQ ID NO: 505597 - DNA, 666 bp, Homo sapiens
tttcccatcacattgatctcagcaacatacaaataaagagaataggttattctaaatatatgtgtatatatatatatataatgactgtataactcttctgacctgtgagcagtggcagcatctttggaatgctgtatagaaacaggacagcaccattttaaaagacacttctatcagtatttcttaggattttaagttcatttcactggcaagaaactgctcctttatacctataaaaatcaatgtcttctagcacagttttatttgtatatcagtatttcttatgttaagtagaagaacacagtraggaaaagagcatagcaaaccccttatattctggttaaaaataaaggctttgcagacaggccagtatgtacccactacttgctagttttgaatccagccaagttatttaaacagtttagggctcagttttctcatctgtaaaagggatattgtgcatattttatagtatgatttgaggattaaaagagaggatatgcagaaagcacttagcacagtacctggcacacggtaagcagccaaaaagcatttgacagttatttactgttgtttacactctgattgaccctgggtttaagaacaatcttgaccattgttataaattattgtaaaatattgctgcagtctcttcacaggtctaca

SEQ ID NO: 505598 - DNA, 606 bp, Homo sapiens
tttttcctgaattaaacacrtaattttattaaagtgcaatttggcataactattacatttttaaatattgtccttattattttttgcccactccaggaaatgacagcacttcactttatataaagtgaagttaatttttagatcactttgagtcacaaaaatgtagaatattttataatttttagttggggcaaagacttcattttaatgatttgaacagaaattaaactgccacctcaatgctattgacatttaaatcccatgtgagaaatactgcatgatccaacaaagaaaattagagcgctttttgtaaaaaattagaactctcagtcttaatgtttattgcctagcaaacagacttttcctaaatgtaatgaaatgtaatgtgttcctgctttgatgcattaacatttcccatcacactttcaatgatgtggtgattattgctttaaaattaagttaaactttggcgtgcctcaaagtcgaagttcaagagctatttagttgttgtataaaatttttctggaagtgaaagaaatatgaaaaaaggtgctgaggtgaagtgattaggaatatgccttgtgacacctcactaggcaaacagag

SEQ ID NO: 505599 - DNA, 605 bp, Homo sapiens
gtctctgtgggagggtaggagcctaactttagccagggcctggctccaagttgcaaagctgcctcctgtcataaagatgtatgtttttcttttatataaaatcaagtttctaatatagatggtcttcctaattacacagtgaatttaggatgaactatgtataataaatggtgccgtcagcattcttgcttgaggactagttattatttatcttgagaacatgaatgtaatcatttgttactgcctagctacataaaatggtgagatttctttctgtctttgcaatctcttagtggattgcctgcaatatcatatctctgtttaatatttattcaataataaaactgttttcattttctgctgcatttgtggagaagttttctgggttgggagaataatttgtttttgtttttacttatatttctctaacaatatttggtcaaaaaatggttctctcaaaaagaaggaattgttcttgtgtattakcaggcattaggcaatttgctgccactggaaaatttggattttattgagagagaaggaaggaggggttgttacacagttaggagctaagatcttgtgcaaaagatggtggagaagagcag

SEQ ID NO: 505600 - DNA, 607 bp, Homo sapiens
atcttattctctctctctctctctctctctctgtatatatacatatatatatatttttttttttttttttttgagatggagtctcactctgtcacccaagatggagtgcagtggcgtgatctcagctcactgcaacctctgcctcctgggttcaagcgatcctcctgcctcagcctcctgagtaactgggattacaggcatgcgccaccatgcccggcttaatttttgtgtttttagtagagacggggtttcaccatgttggccaggctggtctcgaactcctgacctcagatgatccgcctgcctcrgcctcccaaagtgctgggattacatgcatgagccactgcacctggccttattgtcatattaaagttctggttctcccacttactagctgcatgacgatgtgcaaatagattgccctctgccgtcggtgctctcactaaacaattggagtttttgtgagtatcagatgaatgaatctatgcaaaatgtttaggaaagtgccagaaacatggcagacactagtaataaaaatagagttgtcaaaatttttcttattgttttaatacaaatagtggcaatagtagcaggagtggtattaaga

SEQ ID NO: 505601 - DNA, 607 bp, Homo sapiens
atcttattctctctctctctctctctctctctgtatatatacatatatatatatttttttttttttttttttgagatggagtctcactctgtcacccaagatggagtgcagtggcgtgatctcagctcactgcaacctctgcctcctgggttcaagcgatcctcctgcctcagcctcctgagtaactgggattacaggcatgcgccaccatgcccggcttaatttttgtgtttttagtagagacggggtttcaccatgttggccaggctggtctcgaactcctgacctcagatgatccgcctgcctcagcctcccaaagtgctrggattacatgcatgagccactgcacctggccttattgtcatattaaagttctggttctcccacttactagctgcatgacgatgtgcaaatagattgccctctgccgtcggtgctctcactaaacaattggagtttttgtgagtatcagatgaatgaatctatgcaaaatgtttaggaaagtgccagaaacatggcagacactagtaataaaaatagagttgtcaaaatttttcttattgttttaatacaaatagtggcaatagtagcaggagtggtattaaga

SEQ ID NO: 505602 - DNA, 627 bp, Homo sapiens
gtttggaatcaggcttgaagaaatattttccctgaacttcacttatttgagccaatttaatctgttttaaatttaatccagtttaaaaaaataattttaaatcataactgcctagaaaaatacacatagcgaccattgaatttattgtgagtcatcatctctggaggaaaacaaattgggaagatgctcagtgaagttacaactagttcttattttgacagcttgtaagaaccgagtggatcaagaagatggagagggagctgatgaggaaakagctggagtatatagccttggaatgcctagagaacattatgattgcaattcctcatttctgcagaggtatagaatcagaaagagagcctcacttacattgaccatcaggaggcaaaacttgaatgaaacataactgttattctgcttttaattgttaataaagagacatcttaacagatgcataataatgtccagtgggctagttccactgaagaggaaccagacttgttctatatgcctcaaataggaccattgggatcaatgagttttagccacagaaaagagacttcagctccagatgaggaagaatttttaaacaagttttctgaagagtaaatggactgttttgagaag

SEQ ID NO: 505603 - DNA, 666 bp, Homo sapiens
tgggtgtggtggcaagtgcttatagtcccagctactagagaggctaatctagtctccagaattgcttgagcctgggaggttgaggctgtggtgagcattgattgcaccattgcactctagcccggggaacagagcaagatcctgtctcaacaaataatttttttaaaagattcaatttatacattcaattctctttatactttttcatcaaaaacctaatatgattagtgtatttccattttggggggyggaatttggaggtgattattgtcctatcaggaaactggaaatcaagtccatcactctctaaattataaatttagtagtttggcatttttcattccaaagaagagaaaaaaaaacccatctacagcagtgtttctcatgtctctattccccaaggttctggaaaaccatgtaagataaagcacagttgcaggatcaggtggagggctgtggagtagcctggagtggagtagtctagggggtttggtgattttacttgaagaaatgaaatgcagcagtgggaagaaatttgttttgttagttatcccaaaagctagaaccaggattaagagataaaagttacagagagatttcaattcaacttcagaaaaaacaaacaaacaaaaaaacgtttcagcccctagtgctgtctaaccacca

SEQ ID NO: 505604 - DNA, 625 bp, Homo sapiens
gctgcctccagcactcagtacagtaacactagcctaggagcagtcggctccaccacggagcctaggtgtgtggtaggctatgccatctaggtttgtataactacactctgtggtgttcacacacaaccacaccgcctaatgaagcatttctcagaatgtgtcctggtgtcaagcagcacatgactgtgtttcatcttccaactccttgttctgaaaaggaggaacaagaaataaaatggattgaatgcataccagtttcccaagctattttgcactcaccccgaagatggggcctgaccgagtacaatgaacaacatcgcacagcctgagtgtgactccagcccggccacctagtacaataggcacgtttctaaacttaggaatgaggatgatgatacccatttggggagtatctaaacaagaaaataggggtactaaaatttcattttatagaacgatcactttttgcttccttttcagagcaagggattgaaatatgagagaaacaggtaggattgatgtaatcagaaatggtttaagagagtgtcaaaaacataagggatcggcagmttcacagctccctgtccgcgctggcatcctctgccagatcttctactacgcttag

SEQ ID NO: 505605 - DNA, 574 bp, Homo sapiens
ctcttaacgtccagatttttcaatttccatgttccctgtaaacatcctctcttcatcccgcccatcctctcccacccacacccctgctgccgtgaattgtgtaccctcctgtctgagggttcccctatacctgggctcygttcccacccttgcttctctcctcaaggacccactgcatggatttccagctccactccctctggctcttttccaacagtgttgaagaatactaagtcgatgcaaagctacaatattaaagtatgaatacttaaggacttctcctccatcgcttttaaaagacaagagcctttgttccaatgtcatcacctagaaaggtctgtaactgtgttgagtagcaatgaggctggagagctggagaggctggaaatcactaaatttacagcggaaaaggcagacttctcccctagaaaattagaatagatcctaaaggcatatccaggagacagaagaatcaataactcattctaactgggtttagaagagagtgtggggtggttgagaagaaaaggagagctatttggagtgggggacagaagaagggcttgtaaaatat

SEQ ID NO: 505606 - DNA, 517 bp, Homo sapiens
gaatatttcatttccaactcccctgttaatgttacaactacaaattaatttcatttccttgttggtaatatgttacattgcttgataaggttttaaaagattattagaaaaaggtgccagaacagtgcaaaatatcatcacatccctaaagaagaaaggctagagatctctggcatagtagtaacttgccagccttcaaaattactgaaaaacaactgaaatttttagtctatgaacttcaaatcctttgaccaatcccttgatatagatatccrcaaccttcatttgcttttgtttatctaacaaatgatataaagatgtgatgtgctgatgagatgaaatggaatgtgtgtgtgcatttgaatgtgtgtgaaaaggaagacacctgttttcctaggatgtgtcaaagatgtacgattcttaatgacttctatctgggatttacttgtattcaaatgtttaagtttttcatccttccaaatatctaagccatactaaattaatggaagaaagtggt

SEQ ID NO: 505607 - DNA, 396 bp, Homo sapiens
ttttgttatttgtagctaaaagcatcataactgctacataccccagctctccaagtttggccagaagtccaataccagtcatttttccaaatcctctatctttggatcacagaagaatcctggggcttatgaggccaccactgctgtgactccttccyaggcccttgagatttattcaagagtctccagctccactgacaactttgtaccctctgtaccaagtttggccaaagggatgatcactgaggttcttaaggcctcggtctaaaaagtaacccaaatagtaattcccatgtgtggcaggcaaaattttgactcccaagatctttaccccctggtgttactcctgtgtatgttacattatatggcaaaagggtctttgcagataaaattaag

SEQ ID NO: 505608 - DNA, 396 bp, Homo sapiens
ttttgttatttgtagctaaaagcatcataactgctacataccccagctctccaagtttggccagaagtccaataccagtcatttttccaaatcctctatctttggatcacagaagaatcctggggcttatgaggccaccactgctgtgactccttcccaggcccttgagatttattcaagagtctccagctccactgacaactttgtaccctctgtaccaagtttggccaaagggatgatcactgaggttcttaaggcctcrgtctaaaaagtaacccaaatagtaattcccatgtgtggcaggcaaaattttgactcccaagatctttaccccctggtgttactcctgtgtatgttacattatatggcaaaagggtctttgcagataaaattaag

SEQ ID NO: 505609 - DNA, 537 bp, Homo sapiens
tggttcagaggccaaatgcctatttttatgtgactctttcactatctgtatcataagagctgcatgttctttgtagtttaaaacaaaataatggtcttaccagaagtcccacaattaaatcttgttgcaggcagcttttcttgctgcccctccataagaagtgaaacggttctcagacgtggattttaaactgtttgaagaaatgactgaagctgacctctactgggagccatctcagttcccaacctgcagcatgcacagctgcctctctctctccttctgcccacctcggcttgcctccccatccctaagtctcccttgtattaattagtcatttcttgctgccctaacaaagtrccacagactggtggcttaaaccaggggtcccccaacccccagggccacaaaccggtaccagtccctgcatggcctgttaggaactgagtcacacaatgagctgcacgcaagtacgctaagcttcatctgtatttgcagccactccccactgcatgaattaccagctgagctctgccacct

SEQ ID NO: 505610 - DNA, 627 bp, Homo sapiens
tctgatttaatcattccaaaatgtatacatatattaaaacatcatgttagactgggcaacatggcaaaaccccatctccacaaaaaaatgcaaaaaatcagctaggcatggtggcacgagcctgtggtccccactactcaggaggctgaggtgggaggatcacttgagcccaggagrcagaggttgtagtgagccaggattacaccactgcactccagcctaggcaacagagtgagaccctgtcacacacacacacacaacacacacacaaatatatatatatacacatatatatacatatatctacgtgcgtatatatatattacactataaatatacacagtttgtcatttgtcaatttaaaaatgaaaaagacaagctccagagaaagggcagttgcagcagcatgtttaaggatgagtgggacttctattgcctagaatgggaagggtgttccaggcagagggaacaacacgtgacaggcttgtatgtgcaatgaggagcccaggaatgggccatgatcagcagggctgcagagacggtgcacaaaggcagagagtggtgaagatggaggtgttggagtgggtgcgtgtcggggcatcagcagaaaacaaatttccactcagg

SEQ ID NO: 505611 - DNA, 496 bp, Homo sapiens
ctggttgttcctcacctgggagcagggttccacatgtgggccctgcccagggccatgcagtcttgcacagacggggcctgccagaggaggcaggstcattgtccccttgtaataggcgaggggacccagggtacctcagctcacccgtgacagaacctgccatccacctgtattctggacaggatctacttccatgggccgaggcacgcggactctcgcttagggcctagctgtcatgggcactcagtgtctcgctgctgccctgacccagagcatccctggccccacacagagccaaacaagtgacaggaggctgcccctcacgccaagctcccttcccagcatgctgcccagaccactgtgcacaaccactcccgcctcacccctgagcctacttgtgcccacctgagagagtgtggggggatgacagaggctgggcctggcacacacaggctgctcgggtgctccctaggctcgctgtctgctggctccacgt

SEQ ID NO: 505612 - DNA, 482 bp, Homo sapiens
gtgtccccattggtgaaccagaccagaggcaagggcaaggggaccgtggcagcagagcacacagggcatggagagggatggctgtggtcgtggaggaggaaacagaatgttcagtatagtaagtgaattgctggcagcctgggaggctgagttgtgctctgccctgggtccctggggctayagcacctgtgagagagacttgctctctgaacccctggcctgaggctggcaggaaccaccaggcagagggcaccccactgatgagggacggaggtggtataggcctgaggctgtactaagtgctggcagcatggtttttgtgactgggtctgtgagaaccaagcccatgagggaagctggcccagccaggccctgggagcgtctggaatgtcagacagagacagagaaaccaagacggtgcctacctgcaacccagaatcctcaacaacctcacacccaggcagccccaggtcatgctgtct

SEQ ID NO: 505613 - DNA, 482 bp, Homo sapiens
gtgtccccattggtgaaccagaccagaggcaagggcaaggggaccgtggcagcagagcacacagggcatggagagggatggctgtggtcgtggaggaggaaacagaatgttcagtatagtaagtgaattgctggcagcctgggaggctgagttgtgctctgccctgggtccctggggctacagcacctrtgagagagacttgctctctgaacccctggcctgaggctggcaggaaccaccaggcagagggcaccccactgatgagggacggaggtggtataggcctgaggctgtactaagtgctggcagcatggtttttgtgactgggtctgtgagaaccaagcccatgagggaagctggcccagccaggccctgggagcgtctggaatgtcagacagagacagagaaaccaagacggtgcctacctgcaacccagaatcctcaacaacctcacacccaggcagccccaggtcatgctgtct

SEQ ID NO: 505614 - DNA, 560 bp, Homo sapiens
ctgcatgactgagggctgacatgttaccgaatctcttctcccccctcagcatcacttcacttccatccctgaaggtagtgaccgtgtcctggagccacaatcttccagtcatcacaggggccccagttgcagtttcttctcctaaagacctctttggagacagagggcagcaacctgtctactgtctgcagggaatgcccctccatgagtcacccacccaccaaagcccarcaacccttgagactcacagaaagccagtccccagcctgcccgtggcccatccctatgtcctttttagaatgtcagcagatcttgccttctctctgccatcctattccccaaaaactgggagaggagccaaaaaaaaccctctcccagaatcactgcactcatgacagttcaagatcaagtaacaaacggaactatccgctgcacacctggaaggaggccggcactcattcagccgccagatgcctatccaggatgcactccctgtgaggcactgctcatccactccttggggctggggctctgtctggcaggggagctgccaggacagc

SEQ ID NO: 505615 - DNA, 560 bp, Homo sapiens
ctgcatgactgagggctgacatgttaccgaatctcttctcccccctcagcatcacttcacttccatccctgaaggtagtgaccgtgtcctggagccacaatcttccagtcatcacaggggccccagttgcagtttcttctcctaaagacctctttggagacagagggcagcaacctgtctactgtctgcagggaatgcccctccatgagtcacccacccaccaaagcccaacaacccttgagactcacagaaagccagtccccagcytgcccgtggcccatccctatgtcctttttagaatgtcagcagatcttgccttctctctgccatcctattccccaaaaactgggagaggagccaaaaaaaaccctctcccagaatcactgcactcatgacagttcaagatcaagtaacaaacggaactatccgctgcacacctggaaggaggccggcactcattcagccgccagatgcctatccaggatgcactccctgtgaggcactgctcatccactccttggggctggggctctgtctggcaggggagctgccaggacagc

SEQ ID NO: 505616 - DNA, 560 bp, Homo sapiens
ctgcatgactgagggctgacatgttaccgaatctcttctcccccctcagcatcacttcacttccatccctgaaggtagtgaccgtgtcctggagccacaatcttccagtcatcacaggggccccagttgcagtttcttctcctaaagacctctttggagacagagggcagcaacctgtctactgtctgcagggaatgcccctccatgagtcacccacccaccaaagcccaacaacccttgagactcacagaaagccagtccccagcctgcccgtrgcccatccctatgtcctttttagaatgtcagcagatcttgccttctctctgccatcctattccccaaaaactgggagaggagccaaaaaaaaccctctcccagaatcactgcactcatgacagttcaagatcaagtaacaaacggaactatccgctgcacacctggaaggaggccggcactcattcagccgccagatgcctatccaggatgcactccctgtgaggcactgctcatccactccttggggctggggctctgtctggcaggggagctgccaggacagc

SEQ ID NO: 505617 - DNA, 560 bp, Homo sapiens
ctgcatgactgagggctgacatgttaccgaatctcttctcccccctcagcatcacttcacttccatccctgaaggtagtgaccgtgtcctggagccacaatcttccagtcatcacaggggccccagttgcagtttcttctcctaaagacctctttggagacagagggcagcaacctgtctactgtctgcagggaatgcccctccatgagtcacccacccaccaaagcccaacaacccttgagactcacagaaagccagtccccagcctgcccgtggcccatccctatgtcctttttagaatgtcagcagatcttgccttctctctgccatcctattccccaaaaactgggagaggagccaaaaaaaaccctctcccagaatcactgcactcatgacagttcaagatcaagtaacaaacggaactatccgctgcacacctggaaggaggccrgcactcattcagccgccagatgcctatccaggatgcactccctgtgaggcactgctcatccactccttggggctggggctctgtctggcaggggagctgccaggacagc

SEQ ID NO: 505618 - DNA, 597 bp, Homo sapiens
agagagtggcatgggtcctgctgcagctggggcatgggatgaccaagggtgggccgcagaacagcaggggccacgygctgagtgggacagaaggagaggaccgccggtgaggctggggtgagggcagacacttcactctggaggagccaggaagcactggccagggcattgggtttggcagctgggagatgagaggagctcacacctgagggccaggaggtaacggagtcgggtgggcaggagccgcactgggtgtgtgtgagatgagggggccgtgctggcaggcaactggtccaagccagggccagctgggggcatacaaggtatattgggtgtgttgttttgtcttggatatcattgtgtcatttgttgtgggtcgtgctgggagtaagtgtagtgggggatgaatctaacccctggtgagcctgtgcggagtgtattgtttatgggattgtctggcattaagctgtggatccattgtaatgagtgtgtgtactgctgtgctgtgtctctttgttgggggtattaggtcgctttctgggcctgagttattgtgagccattcccagcgaggcggctgtgcccgacttggttgcaa

SEQ ID NO: 505619 - DNA, 269 bp, Homo sapiens
ctgcctttatcatataataaatatccacatggcccacttcccccctttctagccttaacattgctctgccttttctgccrtgccagccggcttcagctgtgccatccattcaggatgtttcagtccctggtagggcagatcctcccgcgttactctttctttaaaaactattcctggctgtctttgtgcgttagctcatccagatgaatttcagaataggcttatcatgttccattctttaaaggtccccatggaattgttctgaaggg

SEQ ID NO: 505620 - DNA, 269 bp, Homo sapiens
ctgcctttatcatataataaatatccacatggcccacttcccccctttctagccttaacattgctctgccttttctgccatgccagccggcttcagctgtgccatccattcaggatgtttcagtccctggtagggcagatcctcccgcgttactctttytttaaaaactattcctggctgtctttgtgcgttagctcatccagatgaatttcagaataggcttatcatgttccattctttaaaggtccccatggaattgttctgaaggg

SEQ ID NO: 505621 - DNA, 269 bp, Homo sapiens
ctgcctttatcatataataaatatccacatggcccacttcccccctttctagccttaacattgctctgccttttctgccatgccagccggcttcagctgtgccatccattcaggatgtttcagtccctggtagggcagatcctcccgcgttactctttctttaaaaactattcctggctgtctttgtgcrttagctcatccagatgaatttcagaataggcttatcatgttccattctttaaaggtccccatggaattgttctgaaggg

SEQ ID NO: 505622 - DNA, 606 bp, Homo sapiens
agctgggagcaaccccaatgacctgctgccaacactgcctgctagtgtgcccctgccacctccctctcttcctactacacctggggatgcatctgctaggagcacaggctactgctgcttcatgggctctgggccagctcttcctctctctgtctctcacctggatcattcccattggcaagtaaatatgtgctttcrtctttttttgtttgtttgtttgtttttgagatagggtcttgctctgttgcccaggctggactgcagtggcatgatcatggctcatcactgcagcctcaacctcccaggctcaaatgatcttcctgcctcagcctcccaagtagctgggactacaggcatgccccaccatgcctggttatttttgcatttttgtagagttgaggtctcactatgttgtccaagctggtctcggactcctgggctcaagggatcctcctgcctcggcctccaaatgtgttgggattacaggcatgagccaacatgcctggctgctttcatcttttaatgaaagtttccctcaagccacatattttcccatttttgttctgtaaatatctcttcacaatcggacttctcacaagagtgctc

SEQ ID NO: 505623 - DNA, 606 bp, Homo sapiens
agctgggagcaaccccaatgacctgctgccaacactgcctgctagtgtgcccctgccacctccctctcttcctactacacctggggatgcatctgctaggagcacaggctactgctgcttcatgggctctgggccagctcttcctctctctgtctctcacctggatcattcccattggcaagtaaatatgtgctttcgtctttttttgtttgtttgtttgtttttgagayagggtcttgctctgttgcccaggctggactgcagtggcatgatcatggctcatcactgcagcctcaacctcccaggctcaaatgatcttcctgcctcagcctcccaagtagctgggactacaggcatgccccaccatgcctggttatttttgcatttttgtagagttgaggtctcactatgttgtccaagctggtctcggactcctgggctcaagggatcctcctgcctcggcctccaaatgtgttgggattacaggcatgagccaacatgcctggctgctttcatcttttaatgaaagtttccctcaagccacatattttcccatttttgttctgtaaatatctcttcacaatcggacttctcacaagagtgctc

SEQ ID NO: 505624 - DNA, 606 bp, Homo sapiens
agctgggagcaaccccaatgacctgctgccaacactgcctgctagtgtgcccctgccacctccctctcttcctactacacctggggatgcatctgctaggagcacaggctactgctgcttcatgggctctgggccagctcttcctctctctgtctctcacctggatcattcccattggcaagtaaatatgtgctttcgtctttttttgtttgtttgtttgtttttgagatagggtcttgctctgttgcccaggctggactgcagtggcatgatcatggctcatcactgcagcctcaacctcccaggctcaaatgatcttcctgcctcagcctcccaagtagctgggactacaggcatgccccaccatgcctggttatttttgcatttttgtagagttgaggtctcactatgttgtccargctggtctcggactcctgggctcaagggatcctcctgcctcggcctccaaatgtgttgggattacaggcatgagccaacatgcctggctgctttcatcttttaatgaaagtttccctcaagccacatattttcccatttttgttctgtaaatatctcttcacaatcggacttctcacaagagtgctc

SEQ ID NO: 505625 - DNA, 565 bp, Homo sapiens
cagctgggagcaaccccaatgacctgctgccaacactgcctgctagtgtgcccctgccacctccctctcttcctactacacctggggatgcatctgctaggagcacaggctactgctgcttcatgggctctgggccagctcttcctctctctgtctctcacctggatcattcccattggcaagtaaatatgtgctttcgtctttttttgtttgtttgtttgtttttgagatagggtcttgctctgttgcccaggctggactgcagtggcatgatcatggctcatcactgcagcctcaacctcccaggctcaaatgatcttcctgcctcagcctcccaagtagctgggactacaggcatgccccaccatgcctggttatttttgcatttttgtagagttgaggtctcactatgttgtccaagctggtctcggactcctgggctcaagggatcctcctgcctcggcctccaaatgtgttgggattacaggcatgagccamcatgcctggctgctttcatcttttaatgaaagtttccctcaagccacatattttcccatttttgttc

SEQ ID NO: 505626 - DNA, 266 bp, Homo sapiens
gttagtgaccgaggccacgacactgcactgtaccctttaaatctccaacaggtccgctggaggaggggaggaggaggagaagagaaaggggtgggaggagagcacggggagaagaggagrgagaggtgggggtgcaaggagaaaaggaagaaaaattaaaaagaggaacatgcccagagggacacagccagcccatgagaaattaaaggcttgaggaaggaaaccagtgaaagaggggggacaaagctcccgaaccttgcctgggg

SEQ ID NO: 505627 - DNA, 151 bp, Homo sapiens
gtgacgagatagtgaggtcccagctttgctgcccacatccctcaccctccacccttgcttcccaggcacctgccaaaccgcatacccagcctgcygttgctccggagcttcttcacagacggggtgagttgcaggtctgtgtgtgtgcgca

SEQ ID NO: 505628 - DNA, 245 bp, Homo sapiens
tgctctggggcagggcttttggccttgggggtcctctatgcatgggacagtgtgcctcccccgctggaaggcttctgggcttggggtttggtgggtgacgagatagtgaggtcccagctttgctgcccacatccctcaccctccacccttgcttcccaggcacctgccaaaccgcatacccagcctgccgttgctccggagcttcttcacagacrgggtgagttgcaggtctgtgtgtgtgcgca

SEQ ID NO: 505629 - DNA, 245 bp, Homo sapiens
tgctctggggcagggcttttggccttgggggtcctctatgcatgggacagtgtgcctcccccgctggaaggcttctgggcttggggtttggtgggtgacgagatagtgaggtcccagctttgctgcccacatccctcaccctccacccttgcttcccaggcacctgccaaaccgcatacccagcctgccgttgctccggagcttcttcacagacggggtgrgttgcaggtctgtgtgtgtgcgca

SEQ ID NO: 505630 - DNA, 508 bp, Homo sapiens
gctcacatgtctctggttctttacttcttaaattacagctatgtcacctttygactttgatccttatctctacaactcagcatgttatttatgtgggtttcatctctctggccacattccataaagtgcattctggcagaaaagtgggacagtcatcggttcaccttgtttgattcccttctttcagtaaccacaatcctgacctcctggttatacagtgtcttaactgaattttatttgtatattcttgatttatttgtatttttatttttggagacaaggtctcaccctgtcacctaggctgcagcgcaacagcctccatttcccaggctcaagcaatcctcccacctcagcctcacaagtagtttcaggcatatgtcaccatgcccagctaattttttgtattatttgtaaagacaaggtgtcaccatgttgcccagactgatctcaaacttctgagctgaagcgatctgcctgccttggcctcccaaattgctgagattacaag

SEQ ID NO: 505631 - DNA, 508 bp, Homo sapiens
gctcacatgtctctggttctttacttcttaaattacagctatgtcacctttcgactttgatccttatctctacaactcagcatgttatttatgtgggtttcatctctctggccacattccataaagtgcattctggcagaaaagtgggacagtcatcggttcaccttgtttgattcccttctttcagtaaccacaatcctgacctcctggttatacagtgtcttaactgaattttatttgtatattcttgatttatttgtatttttatttttggaracaaggtctcaccctgtcacctaggctgcagcgcaacagcctccatttcccaggctcaagcaatcctcccacctcagcctcacaagtagtttcaggcatatgtcaccatgcccagctaattttttgtattatttgtaaagacaaggtgtcaccatgttgcccagactgatctcaaacttctgagctgaagcgatctgcctgccttggcctcccaaattgctgagattacaag

SEQ ID NO: 505632 - DNA, 508 bp, Homo sapiens
gctcacatgtctctggttctttacttcttaaattacagctatgtcacctttcgactttgatccttatctctacaactcagcatgttatttatgtgggtttcatctctctggccacattccataaagtgcattctggcagaaaagtgggacagtcatcggttcaccttgtttgattcccttctttcagtaaccacaatcctgacctcctggttatacagtgtcttaactgaattttatttgtatattcttgatttatttgtatttttatttttggagacaaggtctcaccctgtcacctaggctgcagcgcaayagcctccatttcccaggctcaagcaatcctcccacctcagcctcacaagtagtttcaggcatatgtcaccatgcccagctaattttttgtattatttgtaaagacaaggtgtcaccatgttgcccagactgatctcaaacttctgagctgaagcgatctgcctgccttggcctcccaaattgctgagattacaag

SEQ ID NO: 505633 - DNA, 508 bp, Homo sapiens
gctcacatgtctctggttctttacttcttaaattacagctatgtcacctttcgactttgatccttatctctacaactcagcatgttatttatgtgggtttcatctctctggccacattccataaagtgcattctggcagaaaagtgggacagtcatcggttcaccttgtttgattcccttctttcagtaaccacaatcctgacctcctggttatacagtgtcttaactgaattttatttgtatattcttgatttatttgtatttttatttttggagacaaggtctcaccctgtcacctaggctgcagcgcaacagcctccatttcccaggctcaagcaatcctcccacctcagcctcacaagtagtttcaggcatatgtcaccatgcccagctaattttttgtattatttgtaaagacaaggtrtcaccatgttgcccagactgatctcaaacttctgagctgaagcgatctgcctgccttggcctcccaaattgctgagattacaag

SEQ ID NO: 505634 - DNA, 619 bp, Homo sapiens
agcgcctactatgggctgggcactgagctgggtacgcaggaggaagggcacacagggttctgccttgggagggtcctgccggccacacctccaggcctgatggcttgtgccagcacacctgggcctggagccctcatctcacatagcccaggccactgacatctcagggctccctcccagaggtagcttccttctgcagagagccctgtgtccccccagagaccatgccttttcctggggcccctgggaaccctggctggacgggagccccacaagctttctctgtggccctgggggacccagagtgtgaccaggtccctttttctgtgctttgaggaggtacccagggtcttccaggcccgctgcccgacgtgccccttctacagggcagaaatgtgccgagacatgcggtaggtcctccagaagagacctggcccctgctacctcgcgtctcttccctctctggcctccagctcaaagctttcatgcaccacagcccgctgcaaccctggcaatgtccratttcttgttttctctccaccccctaaactggggccagatctatgtcctccatcacctcctcaagctctactctatgatatctgtcccctccaccaga

SEQ ID NO: 505635 - DNA, 557 bp, Homo sapiens
tgggcgacagagcgagactccgtctcaaataaataaataaacccacaaagacaacttaccttcatgcatctttcagtttggaacgggaaytagtcagaaattcaaagacaagtctgaattacaatcaataggagggctgcaattttaaaagcaatgctacattattttctgccaagagaggtgaaaccaccagcacctgacagccgataactggatccttttgccctgaagcagagttggagaaggcagaagtcctcagcagagctcttttcctgaatcttctgtgtagagacagagaccaaagccctgattcttaaatgaaagagagggtttgaaattactggagtcaaaggaacacaatagagtgaggctggcacccagcactgagtctcagagggaacactgggtagtcagtggcggtcactctgaatcctgtggatctgtgccagatacgttaacttacagaaagaaactgaggcaaattaatacaagtagagaatttatctggggctagtttggaaactgcaacttgggagcatagattcaagttgccctga

SEQ ID NO: 505636 - DNA, 595 bp, Homo sapiens
gaggttgcagtgagccaagatcaagccactgtactccagcttgggctacagagcaagatcctgtctcaaaaaaacaaaaacaaaaaaacacccataaaattaatgcaataaccatatagatggagctcctgggaaaagctgtttcatttgctggaaaagggaaggatggaagaataatctaaacaaaaacatagagaaatgaaagtacaggccaggcgcgttgcctcatgcctgtaatcccagcactttggaaggctgaggtgggtggatcacttgaggtcaggagttcgagaccagcctgaacatggtgaaaccttgtctctactaaaaatacaaaaactagccacgtgtggtggcacatgcctgtagtcccagctacttgggaggctgaggcaggagaatcacttgaacctgggaggcagaggttgcagtgagctgagatcatgccactgtactctagcttgggcaacagattgagaytctgtctcaaaaaacaaaacaacaacaaaaaagatttgtgatttaggcaaagaaatgtggccttattgtgggtgggagaagaagcacaagggaaaggagaaggaggcagatatac

SEQ ID NO: 505637 - DNA, 517 bp, Homo sapiens
agctggaatgacccactcctcagcaaacaaacgcagctcagatgggtcagagggaagggctgggtccaagaatgggaccccaccctgccccgtgctggccccgacccctgaaaccaaaacgcccagaagcttcttgtgtgaagcccacacgcactcacaygtgcacagccaggaagcaagtcaccctcctccctgtgctgatgccagggcttcgtcctggctctgaagcactcagggcctgcccctgggaaccccgtggttctctcctccaaatgcccccagctctgggtgccaaagtgaagaaggaaacacaagatctcctgggactcagaaagacaggctgggcaagagaatgagcaggcctgctcacacagctacagccctctgcagtttacaaagctttcccaggcatgaagtcatgggatgctccctgccaggttctgcactggcatctgaatgggcagcacctgtgtgggctcttattcctaatggcaaaaccgacgttcacagactggct

SEQ ID NO: 505638 - DNA, 517 bp, Homo sapiens
agctggaatgacccactcctcagcaaacaaacgcagctcagatgggtcagagggaagggctgggtccaagaatgggaccccaccctgccccgtgctggccccgacccctgaaaccaaaacgcccagaagcttcttgtgtgaagcccacacgcactcacatgtgcacagccaggargcaagtcaccctcctccctgtgctgatgccagggcttcgtcctggctctgaagcactcagggcctgcccctgggaaccccgtggttctctcctccaaatgcccccagctctgggtgccaaagtgaagaaggaaacacaagatctcctgggactcagaaagacaggctgggcaagagaatgagcaggcctgctcacacagctacagccctctgcagtttacaaagctttcccaggcatgaagtcatgggatgctccctgccaggttctgcactggcatctgaatgggcagcacctgtgtgggctcttattcctaatggcaaaaccgacgttcacagactggct

SEQ ID NO: 505639 - DNA, 517 bp, Homo sapiens
agctggaatgacccactcctcagcaaacaaacgcagctcagatgggtcagagggaagggctgggtccaagaatgggaccccaccctgccccgtgctggccccgacccctgaaaccaaaacgcccagaagcttcttgtgtgaagcccacacgcactcacatgtgcacagccaggaagcaagtcaccctcctccctgtgctgatgccagggcttcgtcctggctctgaagcactcagggcctgcccctgggaaccccgtggttctctcctccaaatgcccccagctctgggtgccaaagtgaagaaggaaacacaagatctcctgggactcagaaagacaggctgggcaagagaatgagcaggcctgctcacacagctacagccctctrcagtttacaaagctttcccaggcatgaagtcatgggatgctccctgccaggttctgcactggcatctgaatgggcagcacctgtgtgggctcttattcctaatggcaaaaccgacgttcacagactggct

SEQ ID NO: 505640 - DNA, 559 bp, Homo sapiens
tgactctctagggacacctatgcttagtgctcccctagttccttctgtccaggggcctggggctgactgagcaaggcagccttcccatcagtggagaaaagccccagtggaaggagcggttcctgacactttcgaaagccctcctggggattcccagtcccagtggccctgggagggcaaatgccagtgccaacacccaggctggaccagggactttcttccaagggaaggggagraccaggaagaagggttggagagctaaacttaaaaacagcgtgtgggccacccggggaatgaacctggaacaactttgataatttttaaaagcccttcgaataactccagtgtgcaccaggattgagacactccacccccaccccgagcccctgccaggtcctccaagctgagccaggctttgaacccagccccacttcccgtcctccccaccatgcctgacctcccatctccagcctgaccctggagctggctcttgcttgtgctattctcctgctctccacctctccagaattcttgcgttctttgaaatgtgcttgaagtg

SEQ ID NO: 505641 - DNA, 683 bp, Homo sapiens
tgaaattccatggtcaaaccttccagttcgaggactgtcctttctttcagggctcataacttctgtcatatttctaaatggcttatgcttgtcaacaatagtacttcctctgtaaacaatggaatttgaagtatgacatacaaaagatatatcactcttcaatacaagcttttgacttgggtgcagaagtggggtgtgttgtcagtgtacatcctgggtccctgagcagtcatttgcaaagagctcttctctcagatgacttcctctggaaacacctccatcattcatactggaagagccctggcttttgggggtgccccagctctgtagaaaccactcaggcactaagtccackgaaactctgacccattaaaataaagtcaaagaactcagtgggaagaggggagacagattcagctattaaacctctcccagtttacataaaattcttccttatgaatcaaaagtactcctggaagttcttttagtcactgattataaatgcatatcatattcagtgcctactataagtcaggttttgttctaggctttgggattcatcaatgagtaaaataattttctgctctcatagagtttagaatctggggcaggaatagaagcgaaaacaaactcataagtaagtaattctactttaggcagactacatgataaagaaaatgatt

SEQ ID NO: 505642 - DNA, 605 bp, Homo sapiens
tttgactcttatctaaaagcacctcactagtgactttaacaccagaaaatccacacttacactcgaattatttgtgaatgcccagaaagcacccttaaaataaagatggcgasattagcaaacagacacgttggggaggagaagcaagagaagaaagagagaaggtaagattatcttaaagtggggagacggtggtggggaatgggcactgacaactgcactttgctctccaatgagtgaaaagctgaccatattacttagggacttggggctttttagaagagaccacaactgtcgaatcactggtcagaatacgggaattgcgggagtgagggggtaaaagtctggggctcctttgagcgaaagaggaatgagatgatctccccttacctctcattttactgtattttactctcttacatacacactccccagtccatatacttatctagcttcatttaattcaaatctcccttacattcaccgttacctgaaagcgatatttccagaagacaatcaaggcacacagaatgccgctcgctaggagtaaaaagatgttgatgtttcctcttaggcctcttctcccttttcgggacggaccccct

SEQ ID NO: 505643 - DNA, 605 bp, Homo sapiens
tttgactcttatctaaaagcacctcactagtgactttaacaccagaaaatccacacttacactcgaattatttgtgaatgcccagaaagcacccttaaaataaagatggcgacattagcaaacagacacgttggggaggagaagcaagagaagaaagagagaaggtaagattatcttaaagtggggagacggtggtggggaatgggcactgacaactgcactttgctctccaatgagtgaaaagctgaccatattacttagggacttggggctttttagaagagaccacaactgtcgaatcactggtcagaatacrggaattgcgggagtgagggggtaaaagtctggggctcctttgagcgaaagaggaatgagatgatctccccttacctctcattttactgtattttactctcttacatacacactccccagtccatatacttatctagcttcatttaattcaaatctcccttacattcaccgttacctgaaagcgatatttccagaagacaatcaaggcacacagaatgccgctcgctaggagtaaaaagatgttgatgtttcctcttaggcctcttctcccttttcgggacggaccccct

SEQ ID NO: 505644 - DNA, 605 bp, Homo sapiens
ctttaatactttgcaaagtcatttgttccatttttcatataattctcaaagggtaccctgataaagacagtaagcactgttactgttttgttggtgaggaaatagaggcttaggcagttsgccagtgggcctagcatctaggaagactctagctgagtctaggaagactctaggaagatgctgccagaaggaaaaggggtggaattaatgaaactggaaggttgtggtgctggtttgaggagtaaagtatgggggccaaagttggctatatgctggatatgaagagggggttaattccttgcaggtcttcttgagatagaagtccaggccctgaggtggcaggcagcctgatagtgaacagaacccttgtgcccatacttttgccccccgagtttggcctgccctggcgccacaggcagtactggaagctgataagtcagggcacaaattaaaggtctaggaggcaagaccaactgataaacagggggcgtaatgcttcctggggataatcccatctcaaggaaaagcttttggctatttctgtgttagcagatgcgagcaagttgtggaggaaaatgattaacttaaaggccacaccccccaac

SEQ ID NO: 505645 - DNA, 605 bp, Homo sapiens
ctttaatactttgcaaagtcatttgttccatttttcatataattctcaaagggtaccctgataaagacagtaagcactgttactgttttgttggtgaggaaatagaggcttaggcagttcsccagtgggcctagcatctaggaagactctagctgagtctaggaagactctaggaagatgctgccagaaggaaaaggggtggaattaatgaaactggaaggttgtggtgctggtttgaggagtaaagtatgggggccaaagttggctatatgctggatatgaagagggggttaattccttgcaggtcttcttgagatagaagtccaggccctgaggtggcaggcagcctgatagtgaacagaacccttgtgcccatacttttgccccccgagtttggcctgccctggcgccacaggcagtactggaagctgataagtcagggcacaaattaaaggtctaggaggcaagaccaactgataaacagggggcgtaatgcttcctggggataatcccatctcaaggaaaagcttttggctatttctgtgttagcagatgcgagcaagttgtggaggaaaatgattaacttaaaggccacaccccccaac

SEQ ID NO: 505646 - DNA, 586 bp, Homo sapiens
cctcccctacgattcagtttccccaaaggggtggcaggataagcctccactgttgtggaaggtaattactgattcattaagcctcccctcacaccttgctcttgctccgggagctgccggaggccgtgcccttcattttgcagtgctgtagggcatcattggcaatatctgagatgaatttctgggcagctaaggagatgagccgaattctagagagaaaaaacttagatgagaaggagatggacaacatactgcacaagcacccaaaactaacctgccctgggtttactcacatgcgtgggtctgaggcctcaaagccagcacggttcaggtagtaaccagtcactgcatctgggatctgagaaatcaattaagagaactgtcagcagagcgggaggagggtgagggaaatggataggcctgattatcaggaagctcacagtttgggtgagcagagggcaaacacagaagagcgactaggggagcaaatggaagagaacgctgaaaagcacgatgtggctgaaagttttgwcagcaggctaggtggccttgttcgggcggaagcccaccgtaggcgtgtaatctt

SEQ ID NO: 505647 - DNA, 472 bp, Homo sapiens
gatcatagtctgacctccccaagcctcccagtctcatcacctgccccatttccccagccccctcacgttttgagtttcagccatactgaatttcctgtagttcaccaaagacactacctttttccatgcttctgaccctttgcacatactgctctgcctgcctgaaaggcccttcactcccttccctcctggcttatcccttcccttcctcatatctggtctcaaaycctgcctttaatgactccaccgggcaggcttgaactctgtgtttcgttgttgtcattgcctcttccctgtcttatctccccaaaccgcgctgggacctccttgatggcaagagtgcgtattactcatctttgtgactcagggtcccacacaggtgcttggctgtgaacaaaatgaatgaatacatgggtacctcacagcacatccctcaccctcgttcactcttcagaagactgacacctagtct

SEQ ID NO: 505648 - DNA, 472 bp, Homo sapiens
gatcatagtctgacctccccaagcctcccagtctcatcacctgccccatttccccagccccctcacgttttgagtttcagccatactgaatttcctgtagttcaccaaagacactacctttttccatgcttctgaccctttgcacatactgctctgcctgcctgaaaggcccttcactcccttccctcctggcttatcccttcccttcctcatatctggtctcaaaccctgcctttaatgactccaccgggcaggcttgaactctgtgtttcgttgttgtcattgcctcttccctgtcttatctccccaaaccgcgctgggacctccttgatggcaagagtgcrtattactcatctttgtgactcagggtcccacacaggtgcttggctgtgaacaaaatgaatgaatacatgggtacctcacagcacatccctcaccctcgttcactcttcagaagactgacacctagtct

SEQ ID NO: 505649 - DNA, 600 bp, Homo sapiens
tggtgctgtgctgggtactgtctcctgttcagagatgacagctccctgattagagccaccaggtgagcctctcagccagttgctcccatagtgccctgtagtttcccttcaggatcctcatgggtgggtgggkggggggctggctgctcagagggccatcaacacatttttgttgaatgaatgaatgaatgaacaaatgatcctttgtagtttattaaaccctttcaatccattgtctcctctgctctccagtatggctctgtaagggtacggagcagggagaaagagaaactgaggctcggcaaggtaagagacttgcctcctagtgctgcctcccctgtctgtgcctctcagggcccatgaattgcctggaatgttccccttgctgcagaaacatatcacaggtagatgctaaaagcaaggcaagcatcgcccgcccacaccacaccaggcctggtaccataggtcctctcctgggtcctcagttcttgctgaactgtaaggaaggcagcaaagtggagtgagaaagctgcttggtgactaactttgaagcagagcagaagcttcctttggcccagaccatcaaggagacagttgggt

SEQ ID NO: 505650 - DNA, 607 bp, Homo sapiens
ctggaaaggatctgcgttcatgctcatttgcatggttattggcaggattcagttccccaagagttgttgtactgaggcctccttcaggtcatagccaggtaagcctgtctgtgaagcatctcatgatattagagtgagcaaaaggggtgagagagtgccagcaagagagagagtactagcaagataggagtcgtggaagtgacatctcattacttctgttgtattctatttgcttacagaagcaagtcactaggtccagcccacactcagggggacaggattatacaagagcactaataccagaggtggtgacmattaggagctaggccaggagcttcctatgactattaaaatggcctggaaggtttcctgaaggtggaggaatttaacaggtacaatttgaaagaatgaaaaattgggcagaattagagaaaagtagaggggagtatggaagggaagcacataaatgaagatgcataggtagaaaagtaaattagcaggccaggcgtggtggctcactcttgtaatcccagtgttttggaagactgaggcaagaggcttgcttgagcccagtgttcaaggctacagtgagctataattgtgccac

SEQ ID NO: 505651 - DNA, 558 bp, Homo sapiens
gttatttttagaagcctgcttatccctcctgaatgccaacaattttggcttggcatccatttcaaatyaagcaaggtgcatatccaggacaaagcaatgtgcattatgtctgaagggatccacatcttcagtgaaactcagaatgtggccagaactagctaactacctgaactgaaagcaccccatgttcagattcagaccaactcaaaacacatgtaaggggtgcctattgtatgcagggtaaggtgtcaagtccctttttatttggattaagctcaaataagaaaggacctgaagcgaacgtgggatgtgtatgtgtgtacatgtacacgtttgcaaacacacaggtttatgtgggtattaatatcgagtggaaaatctggctttttatttgtctgtgtctttttttttttttttcagtctgattcgagtatatctgttttggcaagttgtgggcagctctcttttacttttgtcacccagaggcttccgtagacaaaaggaaaggagagaggtgtgttcaaagacccccatggcgaagagcccatcccccaagcc

SEQ ID NO: 505652 - DNA, 514 bp, Homo sapiens
tatatttaggtaaaatattttattttgaatgatcctcacaacttgaggaatttaaaagtgcattcrtagcattgttcatgggacaatgctgaaaatgacctaaatgcccagcaatgggttctgatcttatttctgcaaactaatgccacaaaacctaatttaaaaattgacatagggttatggaatggtgtctgtaatttattaagtgaaaaatgcttgctattaagtggcatattttgttacaaaattttaaaaacataaaaacatattccatgtacgtatatgttgtatataagcacagaaaaaaatctgacagaatctatatcaatatgaaacagtgatctttgttttcttcttaaatattcccaaatcatgtgactattttgctaatgtagataggattttatgatcagaaaaaccttcaactatattttaagtgtgttgatacagaggtaatatctttatgggggccattttatgttattaaatgtaggacgttatgtactggcattag

SEQ ID NO: 505653 - DNA, 514 bp, Homo sapiens
tatatttaggtaaaatattttattttgaatgatcctcacaacttgaggaatttaaaagtgcattcgtagcattgttcatgggacaatgctgaaaaygacctaaatgcccagcaatgggttctgatcttatttctgcaaactaatgccacaaaacctaatttaaaaattgacatagggttatggaatggtgtctgtaatttattaagtgaaaaatgcttgctattaagtggcatattttgttacaaaattttaaaaacataaaaacatattccatgtacgtatatgttgtatataagcacagaaaaaaatctgacagaatctatatcaatatgaaacagtgatctttgttttcttcttaaatattcccaaatcatgtgactattttgctaatgtagataggattttatgatcagaaaaaccttcaactatattttaagtgtgttgatacagaggtaatatctttatgggggccattttatgttattaaatgtaggacgttatgtactggcattag

SEQ ID NO: 505654 - DNA, 514 bp, Homo sapiens
tatatttaggtaaaatattttattttgaatgatcctcacaacttgaggaatttaaaagtgcattcgtagcattgttcatgggacaatgctgaaaatgacctaaatgcccagcaatgggttctgatcttatttctgcaaactaatgccacaaaacctaatttaaaaattgacatagggttatggaatggtgtctgtaatttattaagtgaaaaatgcttgctattaagtggcmtattttgttacaaaattttaaaaacataaaaacatattccatgtacgtatatgttgtatataagcacagaaaaaaatctgacagaatctatatcaatatgaaacagtgatctttgttttcttcttaaatattcccaaatcatgtgactattttgctaatgtagataggattttatgatcagaaaaaccttcaactatattttaagtgtgttgatacagaggtaatatctttatgggggccattttatgttattaaatgtaggacgttatgtactggcattag

SEQ ID NO: 505655 - DNA, 584 bp, Homo sapiens
ccatcattctgagcaaagtatcacaaggacagaaaaccaaacaccgcatgttctcacttatagatggaaattgaacaatgagaacactkggacccagggtggggaacatcacacactggggcctgtcatggggtggggggcagaggaagggatagcattaggagaaatacctaatgtaaatgacgagttaatgggtgcagcaaaccaacatggcacatgtatacctatgtaaaaaacccgcacgttgtccacatgtaccctagaacttaaaatataattacaaaaaaaaaaaaaaagactctggtttccagatagggccttctctggtttccaggtaggggctttctctaccacattcacccaagtagtgagtattatagtaataacacctgcttcaggagttcccctccccctccactaaacagcaattaattttcttaattttgttatttcaaaaaaaaaaagggggcagttttcgtttcccctctcttggtagacattttcctactatcattgaaaacactggattatgtgagtatttctttctgtctcagcccatctctaaatacaagtagatgaataat

SEQ ID NO: 505656 - DNA, 485 bp, Homo sapiens
tgtgacttattatgttaccatatttatttattttagagtctatatcacaacctgaagttatattttatattaatttgttacctttattatatataacacactcacacagaaagttcatgaagtcartgatttgatctcccttattcaccattaatatcccctgtacctagcagaaataaaatatatattggatgttcaataaatatttgttcagtgtataaatcagtgagaaggttgctagaatgataaatcattctatattcatagagggcagggatgattttggcaacagcttcttgatatttttcttaatatggtgtgtcttatttttaataagatgaaaaaaagacagtataattactttgagctgtaactgatagaaaaaaatcctttacagtgactattttatgtatagatactgaccaaagatgagatctgaattcataggctagattgattttagagtgagtcagttaagtcctggg

SEQ ID NO: 505657 - DNA, 625 bp, Homo sapiens
gctgaaacagtttacaaaatttctttcaaaatttctccagatggagtggaagaagcctatgaacttttaacatatttatttattcccaragaaatgcacagaattaaatgtaatgaccattttatttttaaaattaatattctctgaaaaaaccctacatatttgcccatgagaaattagtactaatttcagatctcctatatgaagtcctttttatttcagaatccttttgcctgctcttttggtaaatagacatccttaaatggattagggaaaaatttgtctttttgtatctgaaggaggcaaaaggaattaaaataggatttcaaaaggtagccaatttcaaaatcaggcaggctaattttgttataaatagagtaattaaaaggattagaaaaagtgcttccctttgttagactgacactcttacaataagatgtgaacacacataagggcaaggaagtgtgtcataagtaccattagtggccatgatatcagtctctttgttttggatatcctttttcttcatccccattttagtcttctgagtagaatctatccatcatttcaaattctctctttttttaatgtttcctaatcaatccaccagggattgttcttattg

SEQ ID NO: 505658 - DNA, 487 bp, Homo sapiens
tgcatagttgtgcttaatttttgcagtctaactagaatagttatgctacatacatacatctggctttgctctaaagcctatgttgggcatctctgaaacataaacagagtaaattttgcccttgatcactttggacgttactcctgtaaaawtcatatacaagtttatttgagtaaaacagatttaattaaacaaatgtttattaggcatctgcggtataccatatattgtgtaaagcactgcaatgaagtaaaacctaaccatctgtacaaatccacagttgtcggttcttctctttctttgacttcattttttactaatctgatgttttgcttgtttccccctacccattcccacatgtaaattttcttctagaatcctactaacttctggtgggagaggaaagagcctcatttgccaccaaaaccatatataatctaggtcaaaaggatttttatattgccttattaaatcatgcaaaattatc

SEQ ID NO: 505659 - DNA, 498 bp, Homo sapiens
  misc_feature (1)...(498): n = A,T,C or G
cactctgaaaagaaatgaaaaattatgaaaatgattttattttagatttaacaaaatgtagacttttttttttttttgagacagagtcttgctctgtcacacaggctggagtgcagtggcgtgacttcggctcactgcaagctccgcttcccgggttcacaccattctcctgtctctgcctcccragtaactgggacaacaggcactcgccaccatgcccggctaatttttttgtatttttagtagagacgaggtttcaccgtgttagccaggatggtctcgatctcctgaccttgtgatccgcccatcttggcctcccaaagtgctgggattacaggcatgagccaccatgcctggccaacagggtcactctttcataaacagttctgagggcttctctcagttctttcatcttcacgttctctctttgaagccaccttctgtcctcatcctggcctgagtttctcttcttcagtgctcacaggtctgannnnnnnn

SEQ ID NO: 505660 - DNA, 527 bp, Homo sapiens
cccccaggacacgggtggcccaactggtcccggggcaggttcccgaatttcccatcatccttttcccctggatttttctcagccttgggatttgcgggcaaagcctggggaatttgtaaagttgtattttagttctcaccttgtagagtttcattgcctatcamaaacgaatagaaatcatcataaaaaaaatcctctcctctaaacaaaaatcaaacgagaaaactcacatagcgtgtcctggacacctgagctgcctctgttaaagaaacccggttctacagaagcttaaggagggaggagcttaagggcctggcctgggagccacttcgttgcagccacaggccctgctgtgcagaagtggaggcctggatggggaagccggggagccaagtgctggggtttaaagagtccattccatgtgtgggcgggtgggttgggtggggtgaatggggcctgatgaatgtgccattaatgagcccagcaccatgtggaataattccctcattgtgtccccagcatctccc

SEQ ID NO: 505661 - DNA, 527 bp, Homo sapiens
cccccaggacacgggtggcccaactggtcccggggcaggttcccgaatttcccatcatccttttcccctggatttttctcagccttgggatttgcgggcaaagcctggggaatttgtaaagttgtattttagttctcaccttgtagagtttcattgcctatcacaaacgaatagaaatcatcataaaaaaaatcctctcctctaaacaaaaatcaaacgagaaaactcacatagcgtgtcctggacacctgagctgcctctgttaaagaaamccggttctacagaagcttaaggagggaggagcttaagggcctggcctgggagccacttcgttgcagccacaggccctgctgtgcagaagtggaggcctggatggggaagccggggagccaagtgctggggtttaaagagtccattccatgtgtgggcgggtgggttgggtggggtgaatggggcctgatgaatgtgccattaatgagcccagcaccatgtggaataattccctcattgtgtccccagcatctccc

SEQ ID NO: 505662 - DNA, 418 bp, Homo sapiens
aaacatttcttgggaaaatacgctggatctttctcagagaattctacacctaagagggctcacatgtcactaatcataccccagcactgtttgcttgcttttgcttttttttttttttttgaaatgattcaatttttaataccaactttgcatctactctattattttcctttttctactgacaaccaagaaggaaggcaaagcagatagaggggcagaaggagaaggaaaataakaaagaagttggcagatggaaatgaagactgagaaaagttgtaagatttctaacaacaccatgagagtgaatttgagtcatctttcaaaagctgaagttgaattatttgggtctttttcagcctaagatttaagtaaaatatttaacaggatgatgggaccagcacccatgaacttagaatag

SEQ ID NO: 505663 - DNA, 639 bp, Homo sapiens
ggtcctgcagttcactgatgacacttttgccagggttcaattctgctctctccctccattgtcctttgtaattcagaaatcgtgtttttcaactgagagcagtagtcctcattgcagagtgctctgccatttgaaaccttacaaaaaaattcaaaactgcaatgtaaactttcctttggatactacggtaagcctggttcttaggaggacgtttctgattacacagattattacttttcttttggtgactaaatcactatgcatctggggaggtgtttctttgttgattcctgtctgtggagagctgcattccttgcttacccgccactggatctgagatgggttcttgcacagattttgttccagatctttcaggataagggaatggtyggtttgcgctctcattttattttgccatgttgagggcagagcagggctaccattcccattggcggcagtgggctggcaggaggcttcccgctgtgcctgtggcttctggtttgctgctttttcatgtcaattctggtgccctggattatctctgccagcagctctctcagtaacagggatggccattctcagctcatgcctcaggcactgtgaccccatcctcatgtctgtcacttgcccactgagaca

SEQ ID NO: 505664 - DNA, 536 bp, Homo sapiens
aggaggtagtccaggtgcctagacgctggtgcccaaatctgaatccaacccagtgcaagccactcctccaatctctggctcattcgatgcttagagtgtcacagaggactgtggagtggagcaagtggggccctgactcctttacrcctgtcatcctggtgctcatgcgtctattgcatggtctgcaggcccatgaacttctctgtgatgccatcacattgttgacctaacttgacctattgaccatttaaacctctgctaagctgcacgtgttcatcaagctgctgtgcctttggtcttctgaacttaagtgtgggatgacatttacttcctcttcacccaccctgagcagaggtggcccatccctccataagaccagcacgttcactccaccgtgcagcgcatggaccagttatctatgtcatctcatttcgtcttcacaaaactgaggctaactaggtgagacgctatgctcccctttgcagagataagacaactaaaggtttagaagagtttaaaacatctctgggcatcca

SEQ ID NO: 505665 - DNA, 536 bp, Homo sapiens
aggaggtagtccaggtgcctagacgctggtgcccaaatctgaatccaacccagtgcaagccactcctccaatctctggctcattcgatgcttagagtgtcacagaggactgtggagtggagcaagtggggccctgactcctttacacctgtcatcctggtgctcatgcgtctattgcatggtctgcaggcccatgaacttctctgtgatgccatcacattgttgacctaacttgacctattgaccatttaaacctctgctaagctgcacgtgttcatcaagctgctgtgcctttggtcttctgaacttaagtgtgggatgacatttacttcctcttcacccaccctgagcagaggtggcccatccctccataagaccagcacgttcactccaccgtgcagcgcatggaccagttatctatgtcatctcatttcgtcttcacaaaactgargctaactaggtgagacgctatgctcccctttgcagagataagacaactaaaggtttagaagagtttaaaacatctctgggcatcca

SEQ ID NO: 505666 - DNA, 460 bp, Homo sapiens
ccaagtcggtgcagaccccctgggaagtggagaacctggactttgggttataacccagagtatacaaggagcatacrtgtgtccatgcctacaggggagtctccatctgctccctctggaaagaggatgattgaacaaatgattgaataaatcaataaagagaagagaagcaacatgccttcctttcagaagaattcctaaccatgtatgtagacgctcccggcttcaggaagtggagctgaatcctctcccctcttcagggtgggctggacttagtgactcacttcccaaagaatagaggaaaaaggaaaaaacagtaactctatcggggagggacctggcagacaccaccttaaccccgtgttcgaggtttactcatctgcacttggttatgtggatgtcggcgcccctgatgggttgtgaggaggcgagcacttcacctccctggtagcctccccca

SEQ ID NO: 505667 - DNA, 670 bp, Homo sapiens
taaggtatagggtccagcacctaccatgaaaacaggactttcattttaaggtgtcatcataggctgggcgcrgtggctcacacctgtaatccccccactttgggaggccaaggtgggtggatcatttgaggtcaggagttcaagaccagcttggacaacatggtgaaccccgtctctattaaaatacaaaaaaaaagaaaaaaaaatagccaggtgtggaggagcacaccagcaatcccagctactcaggagggtgaggcaggagaatctcttgaacccaggggttggaggttgaagtaagctgagatagcaccactgcactccagcttgggcaacagagactccgtctcaaaaaataaataaataaataaaaggtgtcatcataaaaatgcaaagaaaaataggcaaaatacacagtgctgtttctattcagccagtcttctgtggtttaaggaggctggaaatgtgcgtggatccttttttgtactaggtgtgagctgagggctgggggatgtctcagcctgaacagaacagctcattgcttgtctgcaggggcccgagcaagcctctcttggccctgaggactcctgagaaccccacgaaaggacggtgggggaccctggcagtgcgaggtgaggaaagccagcacgcaggcagtggatgcagaagc

SEQ ID NO: 505668 - DNA, 556 bp, Homo sapiens
ccagctgcccacttttaatctcttctaagtgaggagaaaaagcaggcttggagtagaggacattagtacaagccctggctgtggctgggcaccaccactcataataggaaagtagcagccagcatggtggctcacacctgtaatcccagaactttgggaggccgaggggcatggatcgcctgagatcaggagttcaaggccagcctggccaatatggtcaaatcctgtgtctactaaaatacaaaagattagctgggcgtggtggcgcatgcccgtaatcccagctactcgggaggctgaggcacgagaatcacttgaacccaggaggtggaggttgcagtgagcctagattgtgccgcggcactccagcctgcacagcagagtgagaccccgtctcamatacatacatacatacatacatacatacatacatacatgaaataaaaagattaaaaattttttaaatgaaagtagaagtgatcatttaaaattcctaatataaatattagttgccttaaaaaataagcctacctcagcctttctacctggtggtggt

SEQ ID NO: 505669 - DNA, 527 bp, Homo sapiens
acagttcatttattttcaaagttttatatctgtgtctttgccatcttcagtgtaatgtgttcccatctctggctatttcagccctttgcacacacaaacttggatttttagagaacacctaattgctcctcatgcttgttycaagttgatagtaatagctgtgcttcccgctgaggcgcacagggctcagtaatgagctccctccctccgtgctgtgcctggaggatcaactgcagttttaagtaggggctggctctgtggcatcaaatgctgttacataaagcagaactagggaaatggacgacaaggccaaagaggggatatacacatctgtgtgttgaggtacatgtatatgagtgcacgcacgcatatgcccgtgtgttttttacgagaagagagccaggattcagtgtggaataagacatgcaattcctgaaaataaatctttttcagctatagcaatggtcccttggatggtgatgatgcaaaagtgcgatccatcatcagcctggccaatttctagaaag

SEQ ID NO: 505670 - DNA, 645 bp, Homo sapiens
ctctgtagtggatgacaaataactccctggtaggaggctgaagggagaagtgcttcctagtctccagggacagcatctgaagtctggctgggtccacccgatgaggcatggcttagctccatctcattcccctctgaggccaagcggagacctcagctaccacaggggacttaggaacccatgcccttgatcctgcctcgaggctcatggccacagacactctattccactcagtcctcctcaggggggkgcggcttgtttctgccccctccccccaccaagtcccaccagcccctctccctctggccactaagccatctcaggagtgctccagctcgttaggaccaggctcctcggcttcggtaagcacacctatcagcatggtttggtcaggaaaacagaattactccaggtattccaagcacagaggcttacatggccatcaggaaggccagaggaacagatggctgggaagcccctaccagagaaagtaagctgcaggagctcacctgaaccccacggtgagtccctactgtcctggcccagagcccccaggctcagcacccccaccacagcaaagtgggcaattcacagagctctccaggaaactctcaggttcctctggtttgccattgccctctgcca

SEQ ID NO: 505671 - DNA, 438 bp, Homo sapiens
ccccagctcatctgataaagcaaaattgcaggtttcccgcctggatatcgctgggagccatccactgtgtccctgcctttcgggagggaaccagagctctgggaagtgtgggtacyctgcctttgccaggaaggttttgctcatttgggcaggtgaagccaaattgtcctgggttctacgtgaggcccgccttctgaaaatatttccgggcctgcccaggagcatgtttcccagcagtgaatctgggtttctggaataagccccataagagctacagaaaaagagctccagggatgcacctgccccaggcctgccagaccccttgcttccctcccaaccaactagttcaccagccctgggtgacccctccaatatcccttgggatcaaacgggatcctaccatggctagccctaagtctgggcccagcttccctttgg

SEQ ID NO: 505672 - DNA, 438 bp, Homo sapiens
ccccagctcatctgataaagcaaaattgcaggtttcccgcctggatatcgctgggagccatccactgtgtccctgcctttcgggagggaaccagagctctgggaagtgtgggtactctgcctttgccaggaaggttttgctcatttgggcaggtgaagccaaattgtcctgggttctacgtgaggcccrccttctgaaaatatttccgggcctgcccaggagcatgtttcccagcagtgaatctgggtttctggaataagccccataagagctacagaaaaagagctccagggatgcacctgccccaggcctgccagaccccttgcttccctcccaaccaactagttcaccagccctgggtgacccctccaatatcccttgggatcaaacgggatcctaccatggctagccctaagtctgggcccagcttccctttgg

SEQ ID NO: 505673 - DNA, 313 bp, Homo sapiens
agctgctcatggggccgtttcctggctcatcacgagagagtcaaatgcagacactctcargggctggggagtgacccagagcgacccacggcgcacgtctcatccaggctctggccagcttcacttaaagtgattttatgcaaccacctcctcctggcagatactgtaagagttgcctaaaccaaggagatccgaggagctaccacacaagaaccgtgacattgcctgtgttattagaactagtgtgtgcatgtatgtatgtttgtctctgtgtgtgcataaataagtgatatgtgcatacctgtgtgatgtg

SEQ ID NO: 505674 - DNA, 605 bp, Homo sapiens
actcagggaccgcagcaaataatcacgtggtgtcccgggtcggcacctggaggggtggtggccgctctttctgaatgtggctcccatacacatgtgggagggagcacgagggaggccattccctgctgggctccacagggccttccgggcattctttcatgcagatactttaggtgttaataaaagatgaccccaactgttcttgtcgggttcatgcamacctttccacattgtgaaacccgtgctcagtctccaggcttccttatccattctctgccacactcatctccagccccgcgccactccttccttcccttatccctctctgctctcggcctccagggtacccctctctcctgggccttctcctgaagctctgcttctctttctcacaatccagactgtccctgggtggtggccactcagcccctgtcctggaacctcgtccgttctccacctcggttcatgccttaggtgatttcacacggtgctatagctcgggataccattgtgtgctaacaactccctgtccagaatgccagctctgccccctcagtctccagaccgtgtgtgtccaaggcccctcagcatcatatacccaggag

SEQ ID NO: 505675 - DNA, 605 bp, Homo sapiens
actcagggaccgcagcaaataatcacgtggtgtcccgggtcggcacctggaggggtggtggccgctctttctgaatgtggctcccatacacatgtgggagggagcacgagggaggccattccctgctgggctccacagggccttccgggcattctttcatgcagatactttaggtgttaataaaagatgaccccaactgttcttgtcgggttcatgcaaacctttccacattgtgaaacccgtgctcagtctccaggcttccttatccattctctgccacactcatctccagccccgcgccactccttccttcccttatccctctctgctctcggcctccagggtacccctctctcctgggccttctcctgaagctctgcttctctttctcacaatccagactgtccctgggtggtggccactcagcccctgtcctggaacctcgtccgttctccacctcggttcatgccttaggtgatttcacayggtgctatagctcgggataccattgtgtgctaacaactccctgtccagaatgccagctctgccccctcagtctccagaccgtgtgtgtccaaggcccctcagcatcatatacccaggag

SEQ ID NO: 505676 - DNA, 572 bp, Homo sapiens
tgccatgtggtgaactgccctttggagggaaccatatgagaagggaccaaggaaggcacgtttccaaaagacagacagacactgaggccgcaggtaaaactcctgtggggaactgaattctgtgaggccccagttgaaactcctgtggggaactgaattctgtgaggccccagttgaaactcctgtggggaactgaattctgtgaggccccagttgaaactcctgtggggaactgaattctgcctatgaccgtgggaatgagcatcaaagcagatcctccctgcatggagtcttcagatgagaccacsgccccagcagacaccctgatgcaaccccaggaggaaacgagccacagccaccctgctaaaccacacccaaattcctgactcccctcagaagacacctgcaagataattcatactcattgttttaaactactaagtcttagggataatttattacacagggatatgtagctaatacacaaaaaactgggattttagagattttcaagagtaattgtaatggtacacattttttgcctaatctcacatgcgtcttggggtcaaacc

SEQ ID NO: 505677 - DNA, 504 bp, Homo sapiens
gtgtcacagacctccccctgcagatgcccgtgaatttgcacaaaacttgccgctgtttgagacggtgtgactgagcaatgttcttccatactaaatcttccctaaagctcttaaatttaaatctgtatagttggagaaggggtctgaatgaagcacgatatcagttctttatctggtcaactggatggatgctgagtaatgaacttgtgatatgttttattgtatataaagttatctgatataattgacctaaaaattcaaaatgatgaatgtaaaattcagatttattttaataatttatttgtaatagtttcatatttcttaattataatttctattttgtgttctgatgttaayagatatttgactattttagaaaaaagttttgcaatgtataaaataattatactttttgaaattttatatttatttcaatttttgataaatgttcaagtttttttgaatgccagtgaattttatttttaattctatgtaacattactg

SEQ ID NO: 505678 - DNA, 547 bp, Homo sapiens
gttttttggttcttccttgatgaggcctttgtgtccatgacttgcctcttgcactgagttattatgtgggcatccagaactacccaggtatgtagagggaaagggggagagaaataagaaggaatttttaaatggtgtattggaggattatatttatactgacaaatattaaaagagatgtgatcttatcttgaatcctcatagtaaatcagaatatatacagacatatacaaacaaacacatacatatttcatgcatattcatatgtaagttattacatcatgattattgttactactattatacctgtaattttggggcacaaatccagatattatggagtatgccaaaatgaaatagatgtatcctaaacacaaggagtttatggtgaattaggtgaaatagacatgtttacaaatgacttagtatttgtgytgaagctattgagtgaggctgtggaaaataccagtatttctacaaacggaaatagttgagaaggcattcttagtgggcagtataggattatcttaggcagaatgggaagttc

SEQ ID NO: 505679 - DNA, 513 bp, Homo sapiens
tccaaatgagtaaagtaaaactctatcaccttgtggcagtggaaatcaaaattcatttgcagaagatttgcggttgtttaattacaaggataacgaaatgatagagagtgacagctagtatcctagagtttgggaatccarttgcaaattcaaatccgtccagaatcattgctgtttgggcctacctgctagcgtatgtacactcccctaaaatatcattagagacaattctaagttttaagcctggctgggacttctaagacaatcataaagattctaagaatctccaaattggttggttcccactttatacacctgctccaaagagactgggccttaagaataatataatttgaaggtttaatttcatttctgtcttcattgccccctccaacacaccctgccccacctaatagaataaacctttatttgacaacaccagctgggcagaggctgtgagctaatcacaacttctgtatgggcataaaagatatgaaagttatattattgtaa

SEQ ID NO: 505680 - DNA, 513 bp, Homo sapiens
tccaaatgagtaaagtaaaactctatcaccttgtggcagtggaaatcaaaattcatttgcagaagatttgcggttgtttaattacaaggataacgaaatgatagagagtgacagctagtatcctagagtttgggaatccagttgcaaattcaaatccgtccagaatcattgctgtytgggcctacctgctagcgtatgtacactcccctaaaatatcattagagacaattctaagttttaagcctggctgggacttctaagacaatcataaagattctaagaatctccaaattggttggttcccactttatacacctgctccaaagagactgggccttaagaataatataatttgaaggtttaatttcatttctgtcttcattgccccctccaacacaccctgccccacctaatagaataaacctttatttgacaacaccagctgggcagaggctgtgagctaatcacaacttctgtatgggcataaaagatatgaaagttatattattgtaa

SEQ ID NO: 505681 - DNA, 513 bp, Homo sapiens
tccaaatgagtaaagtaaaactctatcaccttgtggcagtggaaatcaaaattcatttgcagaagatttgcggttgtttaattacaaggataacgaaatgatagagagtgacagctagtatcctagagtttgggaatccagttgcaaattcaaatccgtccagaatcattgctgtttgggcctacctgctagcgtatgtacactcccctaaaatatcattagagacaattctaagttttaagcctggctgggacttctaagacaatcataaagattctaagaatctccaaattggttggttyccactttatacacctgctccaaagagactgggccttaagaataatataatttgaaggtttaatttcatttctgtcttcattgccccctccaacacaccctgccccacctaatagaataaacctttatttgacaacaccagctgggcagaggctgtgagctaatcacaacttctgtatgggcataaaagatatgaaagttatattattgtaa

SEQ ID NO: 505682 - DNA, 513 bp, Homo sapiens
tccaaatgagtaaagtaaaactctatcaccttgtggcagtggaaatcaaaattcatttgcagaagatttgcggttgtttaattacaaggataacgaaatgatagagagtgacagctagtatcctagagtttgggaatccagttgcaaattcaaatccgtccagaatcattgctgtttgggcctacctgctagcgtatgtacactcccctaaaatatcattagagacaattctaagttttaagcctggctgggacttctaagacaatcataaagattctaagaatctccaaattggttggttcccactttatacacctgctccaaagagactgggccttaagaataatataatttgaaggtttaatttcatttctgtcttcattgccccctccaacacaccctgccccacctratagaataaacctttatttgacaacaccagctgggcagaggctgtgagctaatcacaacttctgtatgggcataaaagatatgaaagttatattattgtaa

SEQ ID NO: 505683 - DNA, 272 bp, Homo sapiens
aattttcagctgtttcattaccttaatttgggatgtctccaaattggttgatttaaaaatgtatgttaggtattcattttgctgacaacaattcactgaagtaactgaggatcatgttttctaatgtcttgtccaacacagtaatttaaattaggaaaacagaattaattggaagaaacaacttatgtttctctatytactccctgggactgcattcaaagagctaagatgtacacaatgtgaaactgccttttgaattagaagttatgaac

SEQ ID NO: 505684 - DNA, 607 bp, Homo sapiens
acttcatgggcatgccctactcaccctcattagactcttaacaattcttgctggcccttcactgccagtccatttggctccccaaaacatttcatcttccaaacatggccacatttgcctcccaccctctcagatgcctttctcatttgactaaggctctaatacttcctgctgtgcacgttgctgccacaaatactactgcatrttcctccccctctggggttctgattctctctaccagaccacagcccatacccgcaataggagcaaacggttatcatactaagcgttgtaatggtttatgaaattacttattcaagaagaaaatcaggaaggaagaagtcaggaagcatacatatatttatgacactaaagagatgcaaacattcaaagtctctacagcagattttcaagccatactttggatcacaaaatcaatttttggtgttaatattatctcttgttaatgaaatcaagtagtatataagagaacagaacataacaaaatagaaaattctatcaatgctattgattctattaataaaatattaatacgtgaaaattaataccatgtataaacatttggttactggttctaggagataga

SEQ ID NO: 505685 - DNA, 607 bp, Homo sapiens
acttcatgggcatgccctactcaccctcattagactcttaacaattcttgctggcccttcactgccagtccatttggctccccaaaacatttcatcttccaaacatggccacatttgcctcccaccctctcagatgcctttctcatttgactaaggctctaatacttcctgctgtgcacgttgctgccacaaatactactgcatgttcctccccctctggggttctgattctctctaccagaccacagcccataccygcaataggagcaaacggttatcatactaagcgttgtaatggtttatgaaattacttattcaagaagaaaatcaggaaggaagaagtcaggaagcatacatatatttatgacactaaagagatgcaaacattcaaagtctctacagcagattttcaagccatactttggatcacaaaatcaatttttggtgttaatattatctcttgttaatgaaatcaagtagtatataagagaacagaacataacaaaatagaaaattctatcaatgctattgattctattaataaaatattaatacgtgaaaattaataccatgtataaacatttggttactggttctaggagataga

SEQ ID NO: 505686 - DNA, 592 bp, Homo sapiens
agatagatgagaaagaaggaagaaggaaggaagataggcaaggtatccaagttcatagagtcaaatatatcttcatatcaccagattcaatatttcttgaataaactgatctcttgacctggattatatgtgtatttgacaaaataatcttccaatgttttaactgtttattttttacacttaagccttcaagctatataacatgtatttttgtgtatataatgaaatttgaaatcaatttcaatttcttctgtctgaataaacaccaarcagcatcatatatgaaggactttgctttttcctaactagttgtactgtcaactctcttttttgtgtgtgaaattttcttatgtgtgtggatccacacttcatattgtacgaacctaattgtctaatcctataccacttgaagcaagtctgttttttatgctcgttatacttttgtggcttcagtaacaggaggaatgctttccatatccattctatttagctgtttcttgattttgggctttataaagaccagactcactcctataggatccacctatgttaacatttcccttaggaagatacctgtgtgttaagacatccc

SEQ ID NO: 505687 - DNA, 592 bp, Homo sapiens
agatagatgagaaagaaggaagaaggaaggaagataggcaaggtatccaagttcatagagtcaaatatatcttcatatcaccagattcaatatttcttgaataaactgatctcttgacctggattatatgtgtatttgacaaaataatcttccaatgttttaactgtttattttttacacttaagccttcaagctatataacatgtatttttgtgtatataatgaaatttgaaatcaatttcaatttcttctgtctgaataaacaccaaacagcatcatatatgaaggactttgctttttcctaactagttgtactgtcaactctcttttttgtgtgtgaaattttcttatgtgtrtggatccacacttcatattgtacgaacctaattgtctaatcctataccacttgaagcaagtctgttttttatgctcgttatacttttgtggcttcagtaacaggaggaatgctttccatatccattctatttagctgtttcttgattttgggctttataaagaccagactcactcctataggatccacctatgttaacatttcccttaggaagatacctgtgtgttaagacatccc

SEQ ID NO: 505688 - DNA, 539 bp, Homo sapiens
ttctgtgtttctctctggtccctgtctgtaagccacaagaagctcattagctccaggaaaacaaatagattgctactgagtgtggacagcaaggaagctgygctaactccatcatctctgtggaataattcttgcttgttattagcagctatattaagatataattcatttaccctaaaatctaccaatttaaagtacacaatttaatgtttttagtatatattcacgtagttgttcaaccatcaccacagtcaattttagaatatttgtatcacaccataaaaaaagcctatactcctcatttactccagagtcaccagtcctaggcaactaccagtctgctttctgtgtctttaaatttgtctattctgacatgttgtttagatgtaatcatgcaatgtgtgatctattgtatctggttacttttgcttagtttaacgttttaatgcccatggtctagcatatattgatatttcattattttttatttctcaataatgtgcaattgtctgcatatactacactttatacattcatca

SEQ ID NO: 505689 - DNA, 539 bp, Homo sapiens
ttctgtgtttctctctggtccctgtctgtaagccacaagaagctcattagctccaggaaaacaaatagattgctactgagtgtggacagcaaggaagctgtgctaactccatcatctcygtggaataattcttgcttgttattagcagctatattaagatataattcatttaccctaaaatctaccaatttaaagtacacaatttaatgtttttagtatatattcacgtagttgttcaaccatcaccacagtcaattttagaatatttgtatcacaccataaaaaaagcctatactcctcatttactccagagtcaccagtcctaggcaactaccagtctgctttctgtgtctttaaatttgtctattctgacatgttgtttagatgtaatcatgcaatgtgtgatctattgtatctggttacttttgcttagtttaacgttttaatgcccatggtctagcatatattgatatttcattattttttatttctcaataatgtgcaattgtctgcatatactacactttatacattcatca

SEQ ID NO: 505690 - DNA, 539 bp, Homo sapiens
ttctgtgtttctctctggtccctgtctgtaagccacaagaagctcattagctccaggaaaacaaatagattgctactgagtgtggacagcaaggaagctgtgctaactccatcatctctgtggaataattcttgcttgttattagcagctatattaagatataattcatttaccctaaaatctaccaatttaaagtacacaatttaatgtttttagtatatattcacrtagttgttcaaccatcaccacagtcaattttagaatatttgtatcacaccataaaaaaagcctatactcctcatttactccagagtcaccagtcctaggcaactaccagtctgctttctgtgtctttaaatttgtctattctgacatgttgtttagatgtaatcatgcaatgtgtgatctattgtatctggttacttttgcttagtttaacgttttaatgcccatggtctagcatatattgatatttcattattttttatttctcaataatgtgcaattgtctgcatatactacactttatacattcatca

SEQ ID NO: 505691 - DNA, 539 bp, Homo sapiens
ttctgtgtttctctctggtccctgtctgtaagccacaagaagctcattagctccaggaaaacaaatagattgctactgagtgtggacagcaaggaagctgtgctaactccatcatctctgtggaataattcttgcttgttattagcagctatattaagatataattcatttaccctaaaatctaccaatttaaagtacacaatttaatgtttttagtatatattcacgtagttgttcaaccatcaccacagtcaattttagaatatttgtatcacaccataaaaaaagcctayactcctcatttactccagagtcaccagtcctaggcaactaccagtctgctttctgtgtctttaaatttgtctattctgacatgttgtttagatgtaatcatgcaatgtgtgatctattgtatctggttacttttgcttagtttaacgttttaatgcccatggtctagcatatattgatatttcattattttttatttctcaataatgtgcaattgtctgcatatactacactttatacattcatca

SEQ ID NO: 505692 - DNA, 572 bp, Homo sapiens
tcacactcaccattatattagtagagccagactagaatcaagctctcaactgtccttctggaaaaataaagttctagaaaaatagatcacttttctgaggacctgcaagcaagatgatcaccaaagcttgtcctggaagactgtgacatcaggagcatcatgaagtctacatttgttcattcttccccattcctcctcccatctacccattgatacttggaatttttgggatttgagaatataatgttatttcctgatgcacaagatttcagtgtctccctttgccgaaaaatactgtggcaagtcacgtaagacagtcaaaccctctctaattttataaatcccatgttccccaggttcctcaacattgggtgcttttgtccattgctagmggcccagtcctacccattcctcgagactcaactcaaatgtcgcctctcccatgaaggcttccttgatctccttccatattttatgggttctctctcaccttctgtgtctattttctcactctgttttgaaattttacaaagcctgatctgtgtttctcaaatggtattggcatgtttcgc

SEQ ID NO: 505693 - DNA, 550 bp, Homo sapiens
tgataaaatatttttgttttatttgggttcaagaacccaaccttaaaccctcacttttcttgccaaaatttgggtctaatgaggagcgaattttccagctcttaattgagcatgttaatgataagagccctgtctcccaggaagaaattgattacaccctctgctggcrgcagggacctgtcctcctttaccctttagattccagagggagaaagccagaagccaacccctctggaagggaaagaggtcccatgtctagataacccacacccactaacacgtgggaccctctagatcatcttcctccattcagtgcccccagtcccgcccctccgggtcccatttcaggtccctgccctgcttgcatcactcttctggcggaccccgatcccacccctccagttcccgtttccgtttcaggtctctcccctgtttgcgtccactcttctggttgcccccaatccccccatctggctcccatttccatttcaggtcccttccctgcttgcgtcactcttccagttgtccccgattctgctcctccgggttc

SEQ ID NO: 505694 - DNA, 673 bp, Homo sapiens
cgaaactttgagaaccatcgtagtttccaacgctgtgttttcctctattccagatagtgacatattcttgttagcagtctggaacctagagggaagaagacacatggagcaatgtcccagctagcctacagccaacacacaccatgagtgagaaataaaactttactgtcgtaagccactgagactttggggttgtttgctaccacaacataactggatgaaagttaacagataagaagagtgagagtaatatatgtggcaatttcaactgctaagagtgtaagaaagctctcctctaactacacccatgccaaccctggyattcattctattgtttttatatttaacatcttgataggcacacatgtattttgtattttatccagatagtctccatttccacaactattagagaagccaaacactttttcacatattttcattttaattttgggaatttattttcttttgtgacttatgtcaatttcctacttttatttcattacttgcctttgttagtagattacaagtgtatttcaaaaaaaaaattactaaggacattatctttatttcccatagacattgaaaatagtttttcctaatttgtttgtaatgataatttttgatacacagaagtttagacattccgtgtagccaaaaagtgcatgtactt

SEQ ID NO: 505695 - DNA, 497 bp, Homo sapiens
tgaggaaagaaacgtgaacattggagtcaggccaatagaaatggtccaaactggaacccagtgagaaacaagagtaaaaaaaggccaagggctctccctgaatgttagcttggaatctaaaaatgtatcatgattctatgaaatcatattgataactctgatattgtttccttgatattgtttcctggtttcttggacctgttaacatrgtgaaggttcctgtcagatcactgtctggtgcgtggtgctcctaacacatgatgagaggaattataagcttccaatatgacaatgacactggaaattccttaaaaacaaagcagaacccagcgtagtgattgcgtagaggaagagtttggtaactttacctctcatctttgctgtgaacgaagtcctcagtgaagaaaggctggtttttcacaaaatgtgtctttttatatcattccccttttaaatttgtatattcaaatggatctaccctacatggaggatatgct

SEQ ID NO: 505696 - DNA, 497 bp, Homo sapiens
tgaggaaagaaacgtgaacattggagtcaggccaatagaaatggtccaaactggaacccagtgagaaacaagagtaaaaaaaggccaagggctctccctgaatgttagcttggaatctaaaaatgtatcatgattctatgaaatcatattgataactctgatattgtttccttgatattgtttcctggtttcttggacctgttaacatagtgaaggttcctgtcagatcactgtctggtgcgtggtgctcctaacacatgatgagaggaattataagcttccaatatgacaatgacactggaaattccttaaaaacaaagcagaacccagcgtastgattgcgtagaggaagagtttggtaactttacctctcatctttgctgtgaacgaagtcctcagtgaagaaaggctggtttttcacaaaatgtgtctttttatatcattccccttttaaatttgtatattcaaatggatctaccctacatggaggatatgct

SEQ ID NO: 505697 - DNA, 572 bp, Homo sapiens
tgataagccaagaatgacagaattagactatttccaggctctaaagatataatccaggtagagtcagacaatgcttataaatggtgataatatcacaaaaaagagacataaccagacatttatgtatgttctgatcaaaacaaacaccgattttcaggaaatgcaggggacaaaggaagatgttaatgatacgatagggatgcaaacagcaaaatctagagtatattaaactctacatgacagatggctggtttttaaaggaaaggaagaaaaccaaacaacaacaacaaaaacaaaacacacagaaaatccaaggaaaaaagagaaatggaggaaatctacaaattaagagagatttaagagacatccacaaagttgatttttgtttcaaacaaactgtttwaaaaaacctagtaagacatttagaaaaatctgaacactgattgtatgtgtttatgctaaagaagttttgtgaattgttttgggtatgattgtgaaattccagatttgtcttcaaaagagtaatcatcttttacagatacatactgaaacaatacttacagatgaaatga

SEQ ID NO: 505698 - DNA, 654 bp, Homo sapiens
tttcttacaaccccattatagctccatgagataagagagttacttatatacccatttatagatgtggaaactaaagacatagaaagggtaatgataatggtctcaaggcctacagataggctatgctagaataggtcaaccaggtctccttgcctgagtacttaactatggactttcaacctctaagaatacaaacctagaaggacataacagtgatgttactaatggtgaagctgaaaactgttctttgaggttgcataattattaaaagagaccagcctgggcaatgtggcaagaccccatctctacaaaaaaattaaaaattagctgggcatggtgcatrgtgaagtaaagactaaatggaggagagccgaaatgcaagtgtaggtgagcgttgcttccagattgctatgaaggcagacctagaatccttgtcagtggaagatgacccttcagtgctttgcctaaatcctgcaagagtagtctaatctgtatatctggaatctaattcaccaggctccaaatactgactccttccctaggtggagctatcatttcagaaaacaatgctcaggacaatgggcttaattgttccagaattcataagagagaatcccctcactgtaaatcagtacattgagatctggtttataa

SEQ ID NO: 505699 - DNA, 477 bp, Homo sapiens
ccctctctccctcatgaggtggggcacctcttccttctgggctgtcacagctacagccttatcaayctacctaacaagggagtcctgcagaatggggacgagggcaatgccaaggacaagctcttctaactctattcctggattataatcaagcctctgaaattcatcctctagatgactgatggggccttgaggccatccagcccctatcttttccatctctatggataagtctagagtaaatctgattgtggctaaacaagagataatgttcttcatagatacaggggccagttattcatctttaaacatttactatggcccaatgtgccagtcctccatttttctcacaggtattgatggaaaaccccaaggaggctgttttacactgccactcccttgtaaaatggaaggctattcctttcctcattccttttagtcgtgccaagctgccttgttccattattaggccatgac

SEQ ID NO: 505700 - DNA, 477 bp, Homo sapiens
ccctctctccctcatgaggtggggcacctcttccttctgggctgtcacagctacagccttatcaatctacctaacaagggartcctgcagaatggggacgagggcaatgccaaggacaagctcttctaactctattcctggattataatcaagcctctgaaattcatcctctagatgactgatggggccttgaggccatccagcccctatcttttccatctctatggataagtctagagtaaatctgattgtggctaaacaagagataatgttcttcatagatacaggggccagttattcatctttaaacatttactatggcccaatgtgccagtcctccatttttctcacaggtattgatggaaaaccccaaggaggctgttttacactgccactcccttgtaaaatggaaggctattcctttcctcattccttttagtcgtgccaagctgccttgttccattattaggccatgac

SEQ ID NO: 505701 - DNA, 549 bp, Homo sapiens
ttattggcaactgacttaccagtacttgtaaggaagttaacatttctcattacaccttccgtgtaagcccctggctcgtaactgtccatttcacccgtgacgatgtgagcaactcttgctgcccggcctctgatagcacccgcagcacggtctaaattatcagcatcctggtctcttaaggctatgatacacttgttgacatcttccaagatatggctttctgtaagtaaatgaatcaaattagtttttgcgtgtgtctgtgtttaaaatcatacaaatctagcatattataattatgttaacttctgacttcagatagagtgcacattggaaatggaagactttgagaattataaaaaaattggagacatattttgcttacatccctttattctttaatagcaaaatccatgaaatataacatgttacatttttaagagaaatttgtattgactgcatattattttagattctagttccagtagattagattttagastgacatagaggtggaaattaaagacagtttctagattaaaatgaaaacaa

SEQ ID NO: 505702 - DNA, 552 bp, Homo sapiens
gtgggtgtactttacttacactatggacatatggttgcttggatcaaactaggcagtaaatttttttaatgctttcaagaaaatacaaaatgagtataaataagtaatcagtttatggtaatttaggaagaatagcaaattgacaagcctgtctttactccataatctacctaggttttcagaaaatgaggtttagacattaatatacaatcatgctatagaattattgatcaaagagagggataccttaaacacatccattctaatcaatggaaatgccaggtaggataagctgttctgaactttggagtgtagatttatcaaacaaargcggccttttggtcaacaccccggcgacttcaaagtatcttgtctattttacacagccaaattcagaaccagttctgaactcttttgcagcctatactttctctgcctactttattcagaatagacagaataatagctaccattctcactcatcttggcactgtgctaagcattttagatgcatgtctcataatcctcacggaagccctgtaaggcaggaac

SEQ ID NO: 505703 - DNA, 643 bp, Homo sapiens
taaaaataaaactaattcttttctataaggttattctcttctagacaaagttcaactggtcaaatactcttgttttttaaagttgctttgtaataattgtcctaagcttgttttatttatataatttagtgtatttagagtgtggatacttagatatttgggtttcaaagttcacgtgctcaaattatcatctaagctctaagatacaaaaaccaaaaacaaacaaacaaacagaaaaccttaacaaaatgtttataatttccttaagctgacctttaagaacatccctgaaatgcatcttttggacaatattttgtttgtaatgtttctggacattaggaaaagttaatataracgagggaaaataagtaaggaataaaactctacatgtctaaagaataatgccaagcaggagaaaggaagtttagcatttttaaactacctaagtatgttaggtaatgggttacttatgaaaattaagtatttgtacatttgtacatttttatagcagcccttcagaccaaaacatgttattgaatttatattccttcagattttagaaaactaattcatgtgtttctttttctactacgttcatcgttcaaaggcaaaagttatgattattcacactaaataggatttt

SEQ ID NO: 505704 - DNA, 632 bp, Homo sapiens
tattatattgcttgtcatggtaacaacgtgaaatacaagaatatgatactaaaatatttgctttaaggtagaaattttctcttacaatttttcctcctacaagaagggcgtagatgagtcagacactgatccaattctcactggcccagttaacttgtctaatgtaattgagaagatgaaatgaaggaattcatctatacattaactaataggcttccttaagtactaagaaatgtctactccaaaaggaaggatgtggctttcttaaaatacgaaccaaacatagaaatctcagaaggtcctttataagataacttatatagcaattaaatggcattatacactaaaattcatagtccttacagttttttgaaagcagtctcaatttagtttgtaactgtgattttctttattttctaagtccaatctcatttttttctttggttttcatttttaattgacacataataattctacatatttatgtcrtacaaaataatatttcaatacatatatacaaagcataatgatgaaatcagaataattatatttatgacctcaaaaatttatcatttctttgcgctaggaacatttaaaatcctttcttctagctatttgaaaatatacattga

SEQ ID NO: 505705 - DNA, 600 bp, Homo sapiens
taaataatcagatcaaaaagataaaaaagatcagccttgaccttggaacaaaactttggtagaataattatctttcaggtggagtcaagattgcagaccagcctgctcttcacagagtattctaatcttcagatagaaacactcactctcttccctctagtagttccatcatactttagtacctactcaggcctacttctagaaaaaccaaaggggcatttatttggtgaactttgcaacccagtaccaaataaagagtatgctagtcccaccctgatgttaggccctggtactagcaaacctaagcttctgtgccttggccccacgcytttatcatgcacaactgtttctgtggaatagagtctacctctgatcctcagtccttgagatgaggcaattctaaatactgattgccccccactcctgacctttccctctgcctttctgcatattaggtgtatattggttctctgtcactgggtttcccctgccttctagaataatcataaataatctttgtcaggaccctatcacagatcatcttcccatcttttgcctacttctcccattaccagacacaaggctccatctgccagagat

SEQ ID NO: 505706 - DNA, 581 bp, Homo sapiens
taactattaattttatagttggtacaagcaatagagcttgaaaaggtattttcttgtgtcttaataccactaatgtatgatttataaaggcatggaaatacaatctcaggagtcttaatatttccttagaagattaaacagccatgtaaatccattatccagaaggttagacataaatgtcagttcctgagtgtcccacaaaggaaagtgtggattcttaataacagagaggacacaaggtctttccttgagagatttatgtctgatcacaatttcccacgtttaaatatccacaatcaacaataggtacmactttgtttgccaaaaaagacttttaaaatatcaaatggggagatacagaaaagaatataggacaatattttctgtgcattaaatcttcacagataaattctactacttgatataatcagtccagtccttccttccttacagatatatcttttaagagaagaattagtaattattttattctcctaaatttattcttcttttttgtttgtttattggtgaaacaaaaggattattaaaacacttaaatatattagtatgtttaaaacaaa

SEQ ID NO: 505707 - DNA, 555 bp, Homo sapiens
gggtcttacagcctaagagatcagactgacagaataaaaaacacagaacatttttctccaggattgtgtatcagaactatctggggcaacttttgacagtgcccatccctggatcccaccctcagagattctgaggcagtaggtctggtgtgaaggccttggaacgtgattttttttttctttctttytttttttttttttttttttttttgagacggagtcttgctgtgtcacccaggctggagtgcagtggcgcgatcttggctcgctgcaagctccgcctcccgggttcacgccattcttctgcctcaacctcccaagtagctgggactacaggcgcccaccaccacgcctggctaattgttggtaattttagtagagacgcggtttcaccgtgttagccaggacggtctcgatgtcctgacgtcgtgatccgcccgcctcggtcttccaaagtgctgggattacaggcatgagccacggcgcccggccggaatctgttatttttaaaagaatacataaggagctcatgctccactgactaaggacccatgt

SEQ ID NO: 505708 - DNA, 555 bp, Homo sapiens
gggtcttacagcctaagagatcagactgacagaataaaaaacacagaacatttttctccaggattgtgtatcagaactatctggggcaacttttgacagtgcccatccctggatcccaccctcagagattctgaggcagtaggtctggtgtgaaggccttggaacgtgattttttttttctttctttttttttttttttttttttttttttgagacggagtcttgctgtgtcacccaggctggagtgcagtggcgcgatcttggctcgctgcaagctccgcctccygggttcacgccattcttctgcctcaacctcccaagtagctgggactacaggcgcccaccaccacgcctggctaattgttggtaattttagtagagacgcggtttcaccgtgttagccaggacggtctcgatgtcctgacgtcgtgatccgcccgcctcggtcttccaaagtgctgggattacaggcatgagccacggcgcccggccggaatctgttatttttaaaagaatacataaggagctcatgctccactgactaaggacccatgt

SEQ ID NO: 505709 - DNA, 555 bp, Homo sapiens
gggtcttacagcctaagagatcagactgacagaataaaaaacacagaacatttttctccaggattgtgtatcagaactatctggggcaacttttgacagtgcccatccctggatcccaccctcagagattctgaggcagtaggtctggtgtgaaggccttggaacgtgattttttttttctttctttttttttttttttttttttttttttgagacggagtcttgctgtgtcacccaggctggagtgcagtggcgcgatcttggctcgctgcaagctccgcctcccgggttcacgccattcttctgcctcaacctcccaagtagctgggactacaggcgcccaccaccacgcctggctaattgttggtaattttagtagagacgyggtttcaccgtgttagccaggacggtctcgatgtcctgacgtcgtgatccgcccgcctcggtcttccaaagtgctgggattacaggcatgagccacggcgcccggccggaatctgttatttttaaaagaatacataaggagctcatgctccactgactaaggacccatgt

SEQ ID NO: 505710 - DNA, 555 bp, Homo sapiens
ctcctggtggttgtatcaatgggtctgtgtgaattcagcaatgtcatgcgttcctgccagctccagtcccaatcattacttctgggtcaggacactaaccagggggtctgggtttcttcctttgtatccccgaagaatgtggagcctgccaaattgtcaaattatagcatttgatgtagagctaggtccaagtgactgtacaatctctgcaggagttcagaagctggcttctgcccctggtagaaacataaccagactctcaagagacagtaagccagacagtctggagatccagggagatgctcatgggttctctggcttctgggccatggggagaaagtcatcaccacccagaaaataagccttcaccctgacagcagcagcagaatgtacctgggcttgaggacctgacttgcatgccatctcagtgtccttaggacagaagttccaygggcaagttctttcagcagtaaaccaaggttttcagcctgtaccactcaaaacaaaccagaccatcaggaccagttaatgtgaaggcttaaatgttgcagattt

SEQ ID NO: 505711 - DNA, 495 bp, Homo sapiens
cttacctttagaattgccatgaagtgaacaccagtgaattcagattagttgagcactttgagcctctaacctttttttttttaatttttttatttttaagcaccctacacctataacttaactattcccaatttggaaaaaaattttatgagtgctgtgcactctttttttcttcttcttctacaaagccaagtgcacgacatcaaacctgtaatcttggccacattatcaccatgttctaaccaagcaagcttattagttcagacaattaagaaaatagaagttgaaaatacttagctattagggagaacggagtaacataaatccaaggtgttgggacaattagcattcgtagtaataaaagccaagtagaacactaaggaaatgaatattaygtttattatttagcatttaggtagtattggatatttataaaatacctggtaattgtttttggtcatttctttcagaataaatcggataaagggtatttgc

SEQ ID NO: 505712 - DNA, 495 bp, Homo sapiens
cttacctttagaattgccatgaagtgaacaccagtgaattcagattagttgagcactttgagcctctaacctttttttttttaatttttttatttttaagcaccctacacctataacttaactattcccaatttggaaaaaaattttatgagtgctgtgcactctttttttcttcttcttctacaaagccaagtgcacgacatcaaacctgtaatcttggccacattatcaccatgttctaaccaagcaagcttattagttcagacaattaagaaaatagaagttgaaaatacttagctattagggagaacggagtaacataaatccaaggtgttgggacaattagcattcgtagtaataaaagccaagtagaacactaaggaaatgaatattatgtttattatttagcatttaggtagtattgsatatttataaaatacctggtaattgtttttggtcatttctttcagaataaatcggataaagggtatttgc

SEQ ID NO: 505713 - DNA, 663 bp, Homo sapiens
gaatgttatatctgccatgaaattctgctttatgattgtattacgttatatacattatacatctctttctctcagtctctctctttctcacctagtctctctttctccctctcttcctttatatattctcatagaaactagggcacatctgagatccataaggaagtcttgcttgactccagtcagagaaaccattkgaaacatcacctgcctccaaccccaaccccatctgccttaaaaatataaaagtctttctttttaggtggaggttttgattcagggaaaacacaggcctcgcaaattaagagcagcccaagaattatgtgcaaaccctgatacacgagacacccaatccaaggcttgcactctgtcctctaaacagtgattgtgctttccaaggtggatatggagggtaattaagaatgaattttcatgacttgtgtctactgtgtgcccatacagtgccagaagccagagtaagaactttgcgggcctttcgcttttcatctaccctccttagtctttggttcttatccaggcacttaggagtttctcaatcagtattctttgaatgaatgaattcacaaatccccattttaaggctgtgggaagaaaggcctttagggatgaagtaacatgtccaaggtcaaatagttgtctttg

SEQ ID NO: 505714 - DNA, 663 bp, Homo sapiens
gaatgttatatctgccatgaaattctgctttatgattgtattacgttatatacattatacatctctttctctcagtctctctctttctcacctagtctctctttctccctctcttcctttatatattctcatagaaactagggcacatctgagatccataaggaagtcttgcttgactccagtcagagaaaccattggaaacatcacctgcctccaaccccaaccccatctgccttaaaaatataaaagtctttctttttaggtggaggttttgattcagggaaaacacaggcctcgcaaattaagagcagcccaagaattrtgtgcaaaccctgatacacgagacacccaatccaaggcttgcactctgtcctctaaacagtgattgtgctttccaaggtggatatggagggtaattaagaatgaattttcatgacttgtgtctactgtgtgcccatacagtgccagaagccagagtaagaactttgcgggcctttcgcttttcatctaccctccttagtctttggttcttatccaggcacttaggagtttctcaatcagtattctttgaatgaatgaattcacaaatccccattttaaggctgtgggaagaaaggcctttagggatgaagtaacatgtccaaggtcaaatagttgtctttg

SEQ ID NO: 505715 - DNA, 663 bp, Homo sapiens
gaatgttatatctgccatgaaattctgctttatgattgtattacgttatatacattatacatctctttctctcagtctctctctttctcacctagtctctctttctccctctcttcctttatatattctcatagaaactagggcacatctgagatccataaggaagtcttgcttgactccagtcagagaaaccattggaaacatcacctgcctccaaccccaaccccatctgccttaaaaatataaaagtctttctttttaggtggaggttttgattcagggaaaacacaggcctcgcaaattaagagcagcccaagaattatgtgcaaaccctgatacacgagacacccaatccaaggcttgcactctgtcctctaaacagtgattgtgctttccaaggtggatatggagggtaattaagaatgaattttcatgacttgtgtctactgtgtgcccayacagtgccagaagccagagtaagaactttgcgggcctttcgcttttcatctaccctccttagtctttggttcttatccaggcacttaggagtttctcaatcagtattctttgaatgaatgaattcacaaatccccattttaaggctgtgggaagaaaggcctttagggatgaagtaacatgtccaaggtcaaatagttgtctttg

SEQ ID NO: 505716 - DNA, 494 bp, Homo sapiens
cagggcagcaggacagagtgagtgcaagaaggggaaatgccagacgcttcgaaacccatcagatcatgtgagattccctcactatcacaagaacagcatggaggaaaccacccccatgatccacttacctccacctggtcccaggtgggacttacagggattacaattctaggtgggatttgggtggagacatagagccaaaccatatcagaagtgttgtttacatttcctyagctcttcaaaagctaatttccccaatttcaacttgactgtaaatgtgaaatcttcattcttcaactgtttgcatcacctttgagtgattcctcaacctaaccaaagagttctctagtaagaaaattaaacactcaaacctggctgcttattgttgtaatcaatagtagagccttgactttcataacacatcctcacttagaaatgcttcataatctcatgactttgtaaatgtgactgtgttttgtgtggacttgaaccac

SEQ ID NO: 505717 - DNA, 622 bp, Homo sapiens
ttcttcatcccctttctttcttacaaaaatggctttctgaagcagtaaaaccacagtctcaaatgaatgcaagctcacattcctcaatgggaaggtgattttccaaaagctcacctttttaaaggcaatttttaaaaggaaatcctcactttctccatacaaaaatcacccttgtcagaygggcttctgagataaagatgaagtgatcactgtgcccccaattatacaagatactgtatttttacaaaggagtttaccttggagaataaaattatttttttcctgatttaaaattgttcttgcaaaattgctatctccttttctcaaggtatgtatagtgcaccatgataacctcagcaaataaatgtagttccagcaggaaaggaggaaaaagcctgtgtggtataacactctctggctgacagatcagcccacattgcaaaacacgaggagagtaaaacaaatgacgaataaatgagaaagcaagcaggatagtgattgacccctactccacaaatggaggggcacttgcacccagggagagaatccaattgggcattatgatcgcaggtatgcttttatgggtattcttgagaaggcaaagaagaacttattccagtcc

SEQ ID NO: 505718 - DNA, 622 bp, Homo sapiens
ttcttcatcccctttctttcttacaaaaatggctttctgaagcagtaaaaccacagtctcaaatgaatgcaagctcacattcctcaatgggaaggtgattttccaaaagctcacctttttaaaggcaatttttaaaaggaaatcctcactttctccatacaaaaatcacccttgtcagatgggcttctgagataaagatgaagtgatcactgtgcccccaattatasaagatactgtatttttacaaaggagtttaccttggagaataaaattatttttttcctgatttaaaattgttcttgcaaaattgctatctccttttctcaaggtatgtatagtgcaccatgataacctcagcaaataaatgtagttccagcaggaaaggaggaaaaagcctgtgtggtataacactctctggctgacagatcagcccacattgcaaaacacgaggagagtaaaacaaatgacgaataaatgagaaagcaagcaggatagtgattgacccctactccacaaatggaggggcacttgcacccagggagagaatccaattgggcattatgatcgcaggtatgcttttatgggtattcttgagaaggcaaagaagaacttattccagtcc

SEQ ID NO: 505719 - DNA, 622 bp, Homo sapiens
ttcttcatcccctttctttcttacaaaaatggctttctgaagcagtaaaaccacagtctcaaatgaatgcaagctcacattcctcaatgggaaggtgattttccaaaagctcacctttttaaaggcaatttttaaaaggaaatcctcactttctccatacaaaaatcacccttgtcagatgggcttctgagataaagatgaagtgatcactgtgcccccaattatacaagatactgtatttttacaaaggagtttaccttggagaataaaattatttttttcctgatttaaaattgttcttgcaaaattgctatctccttttctcaaggtatgtatagtgcaccatgataacctcagcaaataaatgtagttccagcaggaaaggaggaaaaagcctgtgtggtataacactctctggctgacagatcagcccacattgcaaaacacgaggagagtaaaacaaatgacgaataaatgagaaagcaagcaggatagtgattgacccctactccacaaatgkaggggcacttgcacccagggagagaatccaattgggcattatgatcgcaggtatgcttttatgggtattcttgagaaggcaaagaagaacttattccagtcc

SEQ ID NO: 505720 - DNA, 519 bp, Homo sapiens
cagctggaggtgccttttggtcctccccataagggtactacccagagaccaatatagaccctggatagtgtttctactctctagttcactttkcaaagcattttctgtgttgtgtcaggtcaattccagacatatgttcagcagtgaggccaggatgtcacgtagagatttacagtacctattttttctaattcttacctctctgtgaatccatctatattcactggcatctgtgggctccttttcctggtcttttaactagaaaatttgggttttagtctcctttactgccacacttttcttgtacctaggttccagtaaggctgaaagcagtgatttagagagagagtgagagagagagagataacaaaaatcccctcactatcttcagaacacagagctttttattgttttcagtttctcttgtcagagagaaatattttatctcggataatttttaaaggcctgcaggtctgctgttgccactgctgctacaggacaatatgttcctgactggtg

SEQ ID NO: 505721 - DNA, 519 bp, Homo sapiens
cagctggaggtgccttttggtcctccccataagggtactacccagagaccaatatagaccctggatagtgtttctactctctagttcactttgcaaagcattttctgtgttgtgtcaggtcaattccagacatatgttcagcagtgaggccaggatgtcacgtagagatttacagtacctattttttctaattcttacctctctgtgaatccatctatattcactggcatctgygggctccttttcctggtcttttaactagaaaatttgggttttagtctcctttactgccacacttttcttgtacctaggttccagtaaggctgaaagcagtgatttagagagagagtgagagagagagagataacaaaaatcccctcactatcttcagaacacagagctttttattgttttcagtttctcttgtcagagagaaatattttatctcggataatttttaaaggcctgcaggtctgctgttgccactgctgctacaggacaatatgttcctgactggtg

SEQ ID NO: 505722 - DNA, 519 bp, Homo sapiens
cagctggaggtgccttttggtcctccccataagggtactacccagagaccaatatagaccctggatagtgtttctactctctagttcactttgcaaagcattttctgtgttgtgtcaggtcaattccagacatatgttcagcagtgaggccaggatgtcacgtagagatttacagtacctattttttctaattcttacctctctgtgaatccatctatattcactggcatctgtgggctccttttcctggtcttttaactagaaaatttgggttttagtctcctttactgccacacttttcttgtasctaggttccagtaaggctgaaagcagtgatttagagagagagtgagagagagagagataacaaaaatcccctcactatcttcagaacacagagctttttattgttttcagtttctcttgtcagagagaaatattttatctcggataatttttaaaggcctgcaggtctgctgttgccactgctgctacaggacaatatgttcctgactggtg

SEQ ID NO: 505723 - DNA, 569 bp, Homo sapiens
ttgatatacatctcaatatttgttgaacacctcctattgtcttagcactagacatcttaataatgtcaataaatagagaaaaaagtgcacctccaaccactgtcatcaagaagtgatatgtaagaataaaagataatggtaataataatatccatcattcttgagagacttcttttttttttttttggtagaatcttgctgtgtcccccaggttggagtgcaatggcgtgatctcggctcactgccacctccgcctccccagttcaagtgattctcctgcctcaacctcctgagtagctgggattacaggtgtccaccagcatccctggctaatttttgtattttttggtagagacagggtttcaccatgttgatgaggctggtctcgaactcctgacctcaggtgatccacctgcctcggcctcccaaaattctgggattacaggcataagccaccatgcccagcctattgggagacttctaagggtcatattccttatttctgtcatstttataagcaatcaggcaactggggacatgcatgtagcctagacaagtaacttgatgtt

SEQ ID NO: 505724 - DNA, 345 bp, Homo sapiens
aatatgttaaggagaaaatagggtgtttgtgacttttcttaarctgaaaatcattttgaagttgcgagcaactcctttaagaattaatttaacagtctgatcacaagcaaaggattgccactttgcaatcagctttctggagttttgagagatgacatttaaagagctggagatttctcagcactgcagcatttacaggtgcagccaacacattgttatctttgcttctgaaattcaggcagcacatggataattaaaatatatagaaaactcccagccatattttactcttaagagatgcagtagaatattatagttaggcgttcaattggatgtaagattaga

SEQ ID NO: 505725 - DNA, 585 bp, Homo sapiens
tttttaaaaaaaaaaaaattgaccatgagttgaagctgaattgagggtacatgagtgttcattacacattctctctattcttgtatgtttgctaatctccatagcaataagtttattctgaaactgagtcaatttaaagaaaaattgattaaataataatgtacttcaagggccagcatgcttttctgtaaagggccagatagtaaatgttttaggatttgtgagccatatggtcgccatagcaactgcttaactccgctgttgtaatacgaaagcacccatagaaagcacatctacagatgggtgcaattctgttctaataaaactttatttacaaagacaggtggcaggccatagtttatagatccstaaagtaggtgataccttgatatggcaaaatccaggaaggtgatacaggaaagactgaaagaagaacagcattcagttactgggaccctgagtctcctctctttagagaaattaataaattcttatgaattcagtcttactcagagacagctataggacacccttggtgccaggtagaaacacaaataaaaggaagacaggaacaagatgggagca

SEQ ID NO: 505726 - DNA, 585 bp, Homo sapiens
tttttaaaaaaaaaaaaattgaccatgagttgaagctgaattgagggtacatgagtgttcattacacattctctctattcttgtatgtttgctaatctccatagcaataagtttattctgaaactgagtcaatttaaagaaaaattgattaaataataatgtacttcaagggccagcatgcttttctgtaaagggccagatagtaaatgttttaggatttgtgagccatatggtcgccatagcaactgcttaactccgctgttgtaatacgaaagcacccatagaaagcacatctacagatgggtgcaattctgttctaataaaactttatttacaaagacaggtggcaggccatagtttatagatccctaaagtaggtgataccttgatatggcaaaatccaggaaggtgatacaggaaagactgaaakaagaacagcattcagttactgggaccctgagtctcctctctttagagaaattaataaattcttatgaattcagtcttactcagagacagctataggacacccttggtgccaggtagaaacacaaataaaaggaagacaggaacaagatgggagca

SEQ ID NO: 505727 - DNA, 582 bp, Homo sapiens
aataacagcgacagcatattttgtgagctcctactgtgtgcccggcacacagcaaggagcaccaagaactatctcatttactcctccccgcaaccttgtagcattgtccccatgttactgagcagggaagtgaagtgctsagaggcagagggatgcagccaagaaggaattccacatccacctatgtccagcttctgcccccagggtgaaaagaccagtgatcctgggggccaaggatctggcagccaattctaggcctccaactgacttgctgcacaacacagagtacatcacaaagcaaacctacccactcattctctctctcgtcccagtgtcagcttccttaaaggggagggaagggggtctgtgagcagaaggagggctctgtggtcaaatgtgaggttctagagtctcctttgtggggatctcagccccgactccacctctgcgtagatacagaacttagtgtcatcccttcacctgtcaaagcctcagtttcatggaggttacatgggaaaataacagctatcgggaattggaagaaacatcatctgttaagacagtgctgtaaacattcaataa

SEQ ID NO: 505728 - DNA, 582 bp, Homo sapiens
aataacagcgacagcatattttgtgagctcctactgtgtgcccggcacacagcaaggagcaccaagaactatctcatttactcctccccgcaaccttgtagcattgtccccatgttactgagcagggaagtgaagtgctcagaggcagagggatgsagccaagaaggaattccacatccacctatgtccagcttctgcccccagggtgaaaagaccagtgatcctgggggccaaggatctggcagccaattctaggcctccaactgacttgctgcacaacacagagtacatcacaaagcaaacctacccactcattctctctctcgtcccagtgtcagcttccttaaaggggagggaagggggtctgtgagcagaaggagggctctgtggtcaaatgtgaggttctagagtctcctttgtggggatctcagccccgactccacctctgcgtagatacagaacttagtgtcatcccttcacctgtcaaagcctcagtttcatggaggttacatgggaaaataacagctatcgggaattggaagaaacatcatctgttaagacagtgctgtaaacattcaataa

SEQ ID NO: 505729 - DNA, 582 bp, Homo sapiens
aataacagcgacagcatattttgtgagctcctactgtgtgcccggcacacagcaaggagcaccaagaactatctcatttactcctccccgcaaccttgtagcattgtccccatgttactgagcagggaagtgaagtgctcagaggcagagggatgcagccaagaaggaattccacatccacctatgtccagcttctgcccccagggtgmaaagaccagtgatcctgggggccaaggatctggcagccaattctaggcctccaactgacttgctgcacaacacagagtacatcacaaagcaaacctacccactcattctctctctcgtcccagtgtcagcttccttaaaggggagggaagggggtctgtgagcagaaggagggctctgtggtcaaatgtgaggttctagagtctcctttgtggggatctcagccccgactccacctctgcgtagatacagaacttagtgtcatcccttcacctgtcaaagcctcagtttcatggaggttacatgggaaaataacagctatcgggaattggaagaaacatcatctgttaagacagtgctgtaaacattcaataa

SEQ ID NO: 505730 - DNA, 582 bp, Homo sapiens
aataacagcgacagcatattttgtgagctcctactgtgtgcccggcacacagcaaggagcaccaagaactatctcatttactcctccccgcaaccttgtagcattgtccccatgttactgagcagggaagtgaagtgctcagaggcagagggatgcagccaagaaggaattccacatccacctatgtccagcttctgcccccagggtgaaaagaccagtgatcctgggggccaaggatctggcagccaattctaggcctccaactgacttgctgcacaacacagagtacatcacaaagcaaacctacccactcattctctctctcgtcccagtgtcagcttccttaaaggggagggaagggggtctgtgagcagaaggagggctctgtggtcaaatgtgaggttctagagtctcctttgtggrgatctcagccccgactccacctctgcgtagatacagaacttagtgtcatcccttcacctgtcaaagcctcagtttcatggaggttacatgggaaaataacagctatcgggaattggaagaaacatcatctgttaagacagtgctgtaaacattcaataa

SEQ ID NO: 505731 - DNA, 510 bp, Homo sapiens
acatcattgtcatttcaatgtgagcttcctatgggcagagatgtgcrtccgttttgtttgctgatatattctcagcacctaaaacagtgcctgactgtggcaggctgacagtgtgaatggccccaactctctgttccttcgtgtacccacactatgccttctgccctgtcactcatggctcctctcactaaagaggcaggtcttactgccccttccccttaaatctgggctggccttatgatgaggtttgtccaggagaaggcagcagaaaggaaaactcaccattctgagccaagacctccaaactttacaccttgctacttcctttctcactcttctgccaccatgatgagaaacacatgcccagacgagcctgtctgtcccaggacaaggatgagagacatggcgacagagccacactgccctggccattctagctgaacccatccacggtcagccaacagtagaccctcagacatacgagagggctagtcaagccagcaggattgc

SEQ ID NO: 505732 - DNA, 510 bp, Homo sapiens
acatcattgtcatttcaatgtgagcttcctatgggcagagatgtgcatccgttttgtttgctgatatattctcagcacctaaaacagtgcctgactgtggcaggctgacagtgtgaatggccccaactctctgttccttcgtgtacccacactatgccttctgccctgtcactcatggctcctctcactaaagaggcaggtcttactgccccttccccttaaatctgggctggccttatgatgaggtttgtccaggagaaggcagcagaaaggaaaactcaccattctgagccaagacctccaaactttacaccttgctacttcctttctcactcttctgccaccatsatgagaaacacatgcccagacgagcctgtctgtcccaggacaaggatgagagacatggcgacagagccacactgccctggccattctagctgaacccatccacggtcagccaacagtagaccctcagacatacgagagggctagtcaagccagcaggattgc

SEQ ID NO: 505733 - DNA, 654 bp, Homo sapiens
tcccacctcagcctcctgagcagccaggactagaggcatgcacaaccatgcccagctaattttatttatttatttatttttggtagaaatagggtcttgctgtgttgccctgtcttcaagacctgccttggtgttacctgaagcagcttgaacttctgtatgtttgtaaaaggagcccaaaagcactcacctgacacagaaccctaggccccatcagaggcctggaggcagggyggccttccctgggcagaaacagattaggccttaaaaacagacctggaattactacaccagcaaccttctcatcttaggatatatttccacaggattaatagctgggtgtgaggacatttactgtctaattagcacaggagtttctagtagtgagagaatcagtcaattgaccaatcaatctggtattcattgggcacattctgtgtactgctttctcacagggcttccttcctatagagatctaggattcttcggcatcttgcttcttttaaaccttgctgtggttcagttccttgttctcatccctggctgtacattagaatcacctgaggagttttgaacagcatgtcagagccctttccaagaccagttaagtcaaaatctccatggacatgggtccagacatcattcttttgatgt

SEQ ID NO: 505734 - DNA, 654 bp, Homo sapiens
tcccacctcagcctcctgagcagccaggactagaggcatgcacaaccatgcccagctaattttatttatttatttatttttggtagaaatagggtcttgctgtgttgccctgtcttcaagacctgccttggtgttacctgaagcagcttgaacttctgtatgtttgtaaaaggagcccaaaagcactcacctgacacagaaccctaggccccatcagaggcctggaggcagggcggccttccctgggcagaaacagattaggccttaaaaacagacctggaattactacaccagcaaccttctcatcttaggatatatttccrcaggattaatagctgggtgtgaggacatttactgtctaattagcacaggagtttctagtagtgagagaatcagtcaattgaccaatcaatctggtattcattgggcacattctgtgtactgctttctcacagggcttccttcctatagagatctaggattcttcggcatcttgcttcttttaaaccttgctgtggttcagttccttgttctcatccctggctgtacattagaatcacctgaggagttttgaacagcatgtcagagccctttccaagaccagttaagtcaaaatctccatggacatgggtccagacatcattcttttgatgt

SEQ ID NO: 505735 - DNA, 538 bp, Homo sapiens
gtgtgtgtaagaacagttgtcaaaatgtgggtgttctaccacatggcctcgcctggccgggacctggattggccccttgggtcaggaagtgtgagctgcagagagcacctgagcattggtgcggacgataggattgtgtcaacaaggaacctgcytgagcgtgccaaatgtggacagctcaaggcattgaagagaaatatttttttgcttatctagatggagaaactggaggggtgaggctttccctgacctcataatggttgataaacgtggggactgggggaaaaaaaagaaatgctgccgggaagtgtctcctttgaaccccaagtaactcatgactttccactttgaaagctttcatgttttctctatgaaatttagtgcttcagagcttgttctcctgggctctgttttcctggtattgtgacctaagagccttggcccacattacctagccatgttcatcaggcttgggagttgttgttgtttgttgattgctgaggatgtgtttccttgggcattcagttacattgtgtga

SEQ ID NO: 505736 - DNA, 468 bp, Homo sapiens
tgtggaggcagagcccaaaagcggtcctcatgtcctcaccacctacccatctgcaagttccccttagaggtctgagcatcgaggagactgaaggagcgagccacagccctgtcacacatcctgccagggggatatgggaactctcccatttcacttgtaccytgtacaaactaccttagtgaccagagacactcctgagatccttacaaaggcctggtacaaagtagataatctgaattggtccctttcctttccttgtcaaggggattctgaacatggccactgagaatagtttcagtcttgagcaagctccatggctctgttcctgccatcgtctcagtcttgtgtggggtgggaccctgagactgtcagccccctcagagtgcagagggtctgtctttgtagctttctggccaaagcccccaattcagatcaaggtgtgtaatttggattcactcaatgcatcat

SEQ ID NO: 505737 - DNA, 636 bp, Homo sapiens
tgtggaggcagagcccaaaagcggtcctcatgtcctcaccacctacccatctgcaagttccccttagaggtctgagcatcgaggagactgaaggagcgagccacagccctgtcacacatcctgccagggggatatgggaactctcccatttcacttgtaccctgtacaaactaccttagtgaccagagacmctcctgagatccttacaaaggcctggtacaaagtagataatctgaattggtccctttcctttccttgtcaaggggattctgaacatggccactgagaatagtttcagtcttgagcaagctccatggctctgttcctgccatcgtctcagtcttgtgtggggtgggaccctgagactgtcagccccctcagagtgcagagggtctgtctttgtagctttctggccaaagcccccaattcagatcaaggtgtgtaatttggattcactcaatgcatcatgagcatgcaaaggtgtcagaaaactagagcaggagttctcaaaggtccacgtacaagagagacacctggagaacttgttaaaatgtgcagtgtctgggaccaccccttagatatggaatccacaagccttgagctagatgtgtgaggcatgccaggtgggtcagaggg

SEQ ID NO: 505738 - DNA, 468 bp, Homo sapiens
tgtggaggcagagcccaaaagcggtcctcatgtcctcaccacctacccatctgcaagttccccttagaggtctgagcatcgaggagactgaaggagcgagccacagccctgtcacacatcctgccagggggatatgggaactctcccatttcacttgtaccctgtacaaactaccttagtgaccagagacactcctgagatccttacaaaggcctggtacaaagtagataatctgaattggtccctttcytttccttgtcaaggggattctgaacatggccactgagaatagtttcagtcttgagcaagctccatggctctgttcctgccatcgtctcagtcttgtgtggggtgggaccctgagactgtcagccccctcagagtgcagagggtctgtctttgtagctttctggccaaagcccccaattcagatcaaggtgtgtaatttggattcactcaatgcatcat

SEQ ID NO: 505739 - DNA, 636 bp, Homo sapiens
tgtggaggcagagcccaaaagcggtcctcatgtcctcaccacctacccatctgcaagttccccttagaggtctgagcatcgaggagactgaaggagcgagccacagccctgtcacacatcctgccagggggatatgggaactctcccatttcacttgtaccctgtacaaactaccttagtgaccagagacactcctgagatccttacaaaggcctggtacaaagtagataatctgaattggtccctttcctttccttgtcaaggggattctgaacatggccactgagaatagtttcagtcttgagcaagctccatggctctgttcctgccatcgtctcagtcttgtgtggggtgggaccctgagactgtcagccccctcagagtgcagagggtctgtctttgtagctttctggccaaagcccccaattcagatcaaggtgtgtaatttggattcactcaatgcatcatgagcatgcaaaggtgtcagaamactagagcaggagttctcaaaggtccacgtacaagagagacacctggagaacttgttaaaatgtgcagtgtctgggaccaccccttagatatggaatccacaagccttgagctagatgtgtgaggcatgccaggtgggtcagaggg

SEQ ID NO: 505740 - DNA, 570 bp, Homo sapiens
ctaatttttcttactcttttccaggtgcttctcagcttcaygggaaagggcctgctgtaccacggaaattgtgaccgcttcagaggcaaggcttgccacttgggtctgggtggaatcagaacgtgcaggtctcccaggatgtacactcactgcgccctttctgctgcttggtgttcttctggaggagcgtgagttctcagcggagcgcttctcggcacttctgatgtgcctcccatggagggagccgggcccttgctgctcaggaggtgcagactgccccgtgctctgggccttgcagctctgtcgctagacggttgttagaggggcagctctaggctggggcttgcgctgggccgtggtgggaggcacagtgtttacaggctctggtggcagagcagttggcacacctgtgggtgaatctgcctgatcccctggcatttggtcagagtacctcagagcaccccactgctcaggggctccttctggctgcagtaagctccctggatggtcacagtgccgccccatccccaggctgtgtgctcaaagcggacaaaactcaggccagagcca

SEQ ID NO: 505741 - DNA, 502 bp, Homo sapiens
gactgctccagctaagtgatcaggcacgttgagagtatacggtgtcctcagcacatacacctgtgggaaaacggaccgctcttggctcctgactcccagggtacagcgcccagtaactcatccttcattcagaggtttgctggccttcccggtttcccaaggagcaagacctctgtccgccctttggcccggcctctgctctgwctcctttttttacataagaaccaatccgtgtttcacattgggctaagtggattccttatccctttgttatatatattttttgcaacttggatttccagtttgtttacagagtagtcttaggtagtagcaaaagagccaaagaagagatttgtattgctgagctcaaagccaagcagaggccggcagtggaggctgagcagggactctccaggcttctctgcccataaacacccgggtcccaggccctccttcctttccctttggtgctccctcctccccacgtaccattgcgcgtgca

SEQ ID NO: 505742 - DNA, 502 bp, Homo sapiens
gactgctccagctaagtgatcaggcacgttgagagtatacggtgtcctcagcacatacacctgtgggaaaacggaccgctcttggctcctgactcccagggtacagcgcccagtaactcatccttcattcagaggtttgctggccttcccggtttcccaaggagcaagacctctgtccgccctttggcccggcctctgctctgtctcctttttttacataagaaccaatcygtgtttcacattgggctaagtggattccttatccctttgttatatatattttttgcaacttggatttccagtttgtttacagagtagtcttaggtagtagcaaaagagccaaagaagagatttgtattgctgagctcaaagccaagcagaggccggcagtggaggctgagcagggactctccaggcttctctgcccataaacacccgggtcccaggccctccttcctttccctttggtgctccctcctccccacgtaccattgcgcgtgca

SEQ ID NO: 505743 - DNA, 639 bp, Homo sapiens
ctgccgcctccgctcagtctcctcatccagttccttcctgatcttccacgcctcctccactccagagtccggcctattcctttgcagggtctcatgggtcacttctacttccggctgctgtgatggagaagacaagacaaggttaaagccaggctctggcagcacatgtagggcctgtccccacctggtcagagtggctgtcctgtggtccccaagggactccctcagtgccagttcatgttagttgtagagttctagggttactttcaaaaaggatcaaacaactagtttgggkttttttttaatcaggtaaaacatttttgagctgtggaagagtttaaaatgaaaccacggtctcccacctctggtccccgtcctagggcgtgtctgtcagccttgcagatgctatctgtgctcacacaagaatatctgtctgtagtatgtaccatgtgtttatctctcctgcacaaatggtattcctgctgctcactgcacttacagagctcattccagctcagcacagagagtgctgcttcaggatttaccagcagcattgtttccgctctctggacagaccgcagtttagcccattgctgatgaagagtgaactgcttccagtgtcttgctattaaaaaacaa

SEQ ID NO: 505744 - DNA, 615 bp, Homo sapiens
ctgcccctctcctgcatgaacttccaagggggtgcagatggagagtgtcagcgaccccgcgctccccacaggctgagtccaaatccccggggctatgaatggggcctgagaagccctgggggtgggactggtccatgcagactcccgcctttgcccttgtacctgtcagccagagccagggcctcagggtctgtgggggggatcacaaaacasacggccggagcaatcagcttgttcccagcgctgtccatgagctcccagctctccccgttgttcttctgcagggtgtagctgtagccccgcgagatcaggccctggcgggggcaggctggacagtcaggatcccggcagggcctgagggcctgggagcccggttgccatctcagcccccgactcttggacctggggagccccggctcatcacttggaccctccccgtagagtggggaggggcatgcaggagaagcacatgtgttgaggctgccggcccagcaacccacctccatttccctttggggaaccttccctcccaattcccagtccctgtggtctctccttctccattcccaagctccagatggacatgtgacttggacctggccaatgactggcatt

SEQ ID NO: 505745 - DNA, 475 bp, Homo sapiens
ataataacctctgtggttggcagcaccctcctttttattctgtttcggttcctcctcactccagagcttccacccacgaggcatagggaagcctggggaggtgggcctggcattgcttgtacacctactgtgttccaggcaccttacaaatgtgatctcgtgtaatcctcccaacattgtccccccaacccccattgcaagaaagattattattaaacscatttgcagcaggggggatcctcagggttagataggcgaataaccttcccaggctaccaggtctcccggctcaccacagacagggcaaggattaaaatcttggtcagactgactggggagtatttgctctttttaatgctatcccaggggtcaggagggtccgtgtgcatgctggaatgaaatcttcttctcgtcttccaggctccttaattatttcttagagtgatttctgtgctgccctcctggactgggtctc

SEQ ID NO: 505746 - DNA, 559 bp, Homo sapiens
cgcaggaatcaaccatgtgtgccccttggagagctatggagccccatgctaggaagccagcaggaatgtgggtggggcaggaacctgcaggraaggggacaggtcccaggagtgctgggaaaccggctaggctggtccagcttttcatctcggtaatgagccgcatcggggcagccagacgtggcacccctgggccatcagccccactgatggaggccgagacacagccctgtcctgcccatgcagacacagacagcagccacctgcctgagccaggaacacaaagatatcccccctccccacacacacaccggaaaagggaaagggcctgagtgacagccgagggtacacgcccagccctcccttttcttactcagagggtaacacggacacacgtgctgagggcagtggccgctggccctcgaaggggcctcagaagccatccagccccacctgctcattacccagatgagcaaaccaaggtcccggacgtgaagtcactacccaggatcacttgggagggcagcctgtgtaggagaaagacttcaggtctggagtc

SEQ ID NO: 505747 - DNA, 602 bp, Homo sapiens
gctgcctgacctctggtgaactcttccctttgcccattccttggacagccccttggttctcccactcactgctctttcctcctgggatgagctcatcggagctgggaacaaatgtgggcagaggggagtctggcatctgccaggaagggctccgaaggatgagcagagcattttccttcctccrttgatcgacttagatgccaggcttggcactaaaaggaggatgtgacactgaatagggccagatcctttccagaggttaagacagtcaaatacagagcagaaccctgaaccaccaggatgagctattggcatgcatcacagaaaacatacagggtgatgcgggagagttgaaagggtgcaggtggcaggatgcagagaggggaaatctgtgttttcaggtgctcatgggggtcctgtattagagttagagatagggttctcccagggcagacagagcccatgcatggcttcatgagcagacagagcctctggcaaagaaaaaggctctcctttccctggatgggtggagctccacgcagtgcaagggtcttggccagcagaagaaggctcagacatgcagcacctgcagcgaactgccc

SEQ ID NO: 505748 - DNA, 377 bp, Homo sapiens
gctggcccaagatcgtgtggtcaggtaagtgagaaagctgggtctttgggctatacacctaaccatgtcctaaatgcaggacatcctggagaatgaaaaggggaccaagtccaagtcctctgaggaacttaaatctagttggtagccaagcctgtacataattcacaataggacaaagtgggatgaaattgtgctgcaattgtcatgtgagtcaccagtcatggggcaataagraggcagaaagagtaaattgtaactcagggactgaagagttggaaatatcatattatggttttttggactgtctagagatggctgggccctagttaaaaaaaaaaatcaggctgtccagcaagggcagatgaagcataattttt

SEQ ID NO: 505749 - DNA, 508 bp, Homo sapiens
tgccagttctaccagccttttgatgaacttttctctttctcatagcaatgattattttcatagtcattatcattacctgaaattatagttttaaagtcttaatagaaatgtatcacccccattagaatgtaagctcttgaagagcgtggtttttgcctgccaggacctggcatacaggggtggctatccaccagatagtgtggactgtgcgtgttgtctcatttaatcttcacaacatctctgtratgaaagcaattaaaactatcagttacagtggttttattccatgtcaggtggtgttctaagtgtgttcatttaatcctcacagcaaccctattaatgtcctcattttatagatgagaaagctggagcacagagaacttgagaaactcacccaagatcacacagctactagtacgtggtcaagtcagagtttgcgtggagccagctaggatacaacatgcccttcacttcgacctgatcccgactctgggaacatcaggaactc

SEQ ID NO: 505750 - DNA, 123 bp, Homo sapiens
ttgattacgtttaacaggagagttccaccatattttkctgagcaggacacacttagatttttagagaattattggcgtggcctaatgctttaccagaggggttggcatggagagttctgtcac

SEQ ID NO: 505751 - DNA, 341 bp, Homo sapiens
gacacatgttgcctctgggcaaatgacagcccactgaggcttcagggggaggaatgaccatgcaagagcacgggcaaattcttcattacagactctcatctcaggaaagagagggagrgattgtgggatctgcagacatctaacatcaaaatgttagtggtggcaggtatcccgagctgctggcagcgaatctatacgggtctacagcaacttcaattcttccctcctcagatgaaagaatctgactgaggggcacaaggcagaaaaagaggccaaggcaagatttagagcaagagtgaacatttattaaaaagctttagagcaggaatgaaacgaaagta

SEQ ID NO: 505752 - DNA, 553 bp, Homo sapiens
acagacacagatgtatgcctggggtttgttcttgagagacccccctgcaaatccccttcacacgtggtgactctgcaaggggcacagggatttaggaacaactaggaaagggaagtccaagggatgccattgagaaaaggcagcatctggactctgccatcaagatggagaagaatggaactgcagcagagctgggcattttcctggtttgcatctgcagtcccccagcgtctagatgatgcctcacacacactgcaggtgctcagactcatacattgaatagaatgaacttgtgaaggcatgggtgggagggacgtggttttctcattcattccatcagtgcagttacagcacgagctgtgtgctggatcaccagatccgtgagactcaaagtcccccaggaaccccacttggtggttttcattcacgatggtgactgtgttcctcctcacgaattcacaaggagactaaamgccattggcggctgaagcaggagagtctgctcagaaactcaactcaaatttgcatccttaccaccaagaaagcattcatg

SEQ ID NO: 505753 - DNA, 631 bp, Homo sapiens
tcctccttggttcctggccccttctgtcttcaaagccagcaatgactggtctagtcttctccacaaggccacctctctcctgcctccttctttctcatgtaaatacccttgagatttcattgggcctgcttcggtagtccacaatcatctctcaatctcaacataatgaacttaatcacatctgccaagtcctttttgcattgtaaagtaacatattcacaggttctgggaattacataaatgaagacataaaatatttgatgtgaaaattttagaataaataactttttttttgagacagggtctcactctgttgcccagggtggagtgyggtagtgcagacacagctcactccagccttaactgccctggctcaagcaatcctcccacctcagcctccaaagtacctgagaccacaggtgtgcaccatcatgcctggctaatttttaaattttttgtacagactggtctcactgtgatgtccaggctggcctcgaactcctgggctcaagtgatctttccaccttggctctcccaaagtattggaattacaggcatgagcccctgtgctaggcctaaatgaataacttaatatattaaaagaatgccctgaaaatcagtgccaatgtaa

SEQ ID NO: 505754 - DNA, 631 bp, Homo sapiens
tcctccttggttcctggccccttctgtcttcaaagccagcaatgactggtctagtcttctccacaaggccacctctctcctgcctccttctttctcatgtaaatacccttgagatttcattgggcctgcttcggtagtccacaatcatctctcaatctcaacataatgaacttaatcacatctgccaagtcctttttgcattgtaaagtaacatattcacaggttctgggaattacataaatgaagacataaaatatttgatgtgaaaattttagaataaataactttttttttgagacagggtctcactctgttgcccagggtggagtgcggtagtgcagwcacagctcactccagccttaactgccctggctcaagcaatcctcccacctcagcctccaaagtacctgagaccacaggtgtgcaccatcatgcctggctaatttttaaattttttgtacagactggtctcactgtgatgtccaggctggcctcgaactcctgggctcaagtgatctttccaccttggctctcccaaagtattggaattacaggcatgagcccctgtgctaggcctaaatgaataacttaatatattaaaagaatgccctgaaaatcagtgccaatgtaa

SEQ ID NO: 505755 - DNA, 646 bp, Homo sapiens
tgcctggcctggcttccagggcatgaaagcacagttcagggttaaggagaataaacacagcaggtcacaaggcagttagtcatagtaacctggtgtgtgttctttgtgggaaaaacaagaagataacagcacaaaaagtccctcctcccggccagctaagctgggcctctcacgccactgggaatgcatgagtgaaggagcttgaggaagatgggaagcaggctgaagcacattagcagtcgctaatctacacctgtctgtkatgagcaccctctcaggtgtgtaatgacgcccccagcatccctgataccgctccttgatcaaggctctgaacctcaatctgcgtgaactagaggcagtaagtcctttctgtaactgttcatgcctgatactcaatacatgttaagctaaactacatttcttccaaagatatgtgaaaggaaaaaaataaaagacaaacgcaaagttatattgggcacaagagaatgaagtgtagcatggtgggaactttgtatcagggtcaaatttattattttcctaaaggaattgcaggataactctgtacaggagacatctctaggtaattgctggaagaatgctccacagggaagaagcctgatgtgaaggggaatggactcaatagcct

SEQ ID NO: 505756 - DNA, 596 bp, Homo sapiens
gcttctctaatctgtggattccattccctatagttttctctacaattaattttcaacttactctacatattggccatcaattgctcatactagctaaaatctatcattataaattaatccttttggattttgaaagctacttattttcaagagtactttactaaaatgaaagtttttcaggtagaggaaactctttaaaaaattatgccatctgtgaatgaggccataaggtatgataatggcttacaagaagggaaagccaaatatggcttgattcacacctctgcgtatggttctcttattatcacaaaacaaacaaacaaaatctaaatgataatatatttccacctgtgtatgcattgaatcctgctaaagttacgtaaaaatcgattaaacaaaagttctgtatctcgactccttacaaaggaacacagttaagaaagttataggaggagttaatggatcccaagaacaggactagaattaggctgtaacgtgctggaaaaacttagtgatttatttggggctgggaggcataagcaggcaggaacaacaytaaaaaaaatcggtgaaatttagttttccttttaggaaag

SEQ ID NO: 505757 - DNA, 618 bp, Homo sapiens
  misc_feature (1)...(618): n = A,T,C or G
tctgggtgaccttgcaaaagtcccttatcatctgccacttataactctgcagtggtgataatgtgcctcaccacctgcccttctccctcacctaggtatatgtcttggattaatgaggttttatctgtaacgtacttagagctgngagtttggaaggggaaagtattaagagggggaatgatggcattcatcatttagtttgcttgcaattagagagtgcttcaagggtgtaagaccatttgttgaatgtttggcacgtagagcccaatttaaagaaaaggcactcctgggtaatctgcatgagagaatgtggatttagagagcatgaatttatggattgcctgtgctgcagtaggctttaggccatggagttatttaagatggtatgtatttatttcagtttctaataagtgtgcaatgagcagattccatagttgacctccatatctccataagaaaacataggcttctctgctaaactgtgagtcttaacagtaaggaggacttataaatgtttctaagtgaaattatgaagttaaaarttgaaccaagaagcctcagagggaactggctgctacttgcatttcaatgaaaggcagaggaaattcattacagagg

SEQ ID NO: 505758 - DNA, 588 bp, Homo sapiens
catgttgcataggctgagcattggaattgaattttaaagaaatcaattagtgtgagtacattaaaataatctataatttttttgtgtcaatagtttatcatgagatttgcatggacaaagarttggtgtgtttgtcatctagtttgctgtttcttgctgccacatagaactattttctgagtcttgtgcaatttaaatgcatataatgcaaatgctgaatcaacgctagtgctgcctgcatgtgagagacatgtcttgcttatgttttgttttaggattttggtttaccttttatggtacttattggacaacaaatcctctgtctttctgtctatttaacagtgtgtgtgtgtatgtgtgtgtgtgtgtgtatgtgtgtgtgagctggtgcccggtaacaaatacactgatggggctccttgctctcatttcactacaggcggaaaacaacttctgtagagtggattctcctctcacttattatttctgtgcacagtgttagcatagataagaaacagttcctaccttctggaaatttagtttttacaactttatctcttatggaaatgaatgaacttgtttcatgag

SEQ ID NO: 505759 - DNA, 588 bp, Homo sapiens
catgttgcataggctgagcattggaattgaattttaaagaaatcaattagtgtgagtacattaaaataatctataatttttttgtgtcaatagtttatcatgagatttgcatggacaaagagttggtgtgtttgtcatctagtttgctgtttcttgctgccacatagaactattttctgagtcttgtgcaatttaaatgcatataatgcaaatgctgaatcaacgctagtgctgcctgcatgtgagagacatgtcttgcttatgttttgttttaggattttggtttaccttttatggtacttattggacaacaaatcctctgtctttctgtctatttaacastgtgtgtgtgtatgtgtgtgtgtgtgtgtatgtgtgtgtgagctggtgcccggtaacaaatacactgatggggctccttgctctcatttcactacaggcggaaaacaacttctgtagagtggattctcctctcacttattatttctgtgcacagtgttagcatagataagaaacagttcctaccttctggaaatttagtttttacaactttatctcttatggaaatgaatgaacttgtttcatgag

SEQ ID NO: 505760 - DNA, 638 bp, Homo sapiens
gctttcatagaatgggctaataaatggtcgtcatgttaaaccagtaaggttaagtggtttgttacacagcaaaagctaactgacacagtgcatttaactacttcaattctgatagcccatcacagaatattttagctaagaactacatctaatttatagtcctttatatttttttctgttggaagcatttcatagagacaaactagttgctatttaagtaaaataatgcaccattatgcatacrtttttgttacctatgtagacaatgagaaaatagaattgttttaaattcctagggacacttataagttctaggttgacatttatcaaattttcattattatgtctaagcacagtctttccctactacctcccaaataaagagttacctgctaggcgcacatctatcccacgaatttgtcagctcaaaggaacaaggccagcagttatgcttgattatacagaataaatagagtatgaaaattgaaattagacacacttactataaaatgtgatgattatttccattccaggaccaaattgaattaaaaaaaccttattgatctggattgaatttcaatttgctaagatttgaggaagccaacttctgcccagtaatgtttgaatagaaaggctta

SEQ ID NO: 505761 - DNA, 605 bp, Homo sapiens
tgaaattgttgagtgtagtctcttatgacatttactagctttcaacatctattttcatgtctcctgtattgttcataagactgttcgtggaaatctgtttttccccctctgataatactgcccaaaaatctgtctactttattagtctttaaaaagaacacattaaaawttctaatcagtatgatctattttttaaaatagattttattttatcctttaaaaatcttcaataactcccaggtcacatttcttttgcattattttgcttctcctttaagattcttgggtgagggtctgactcgtttattttcagtctactttttttgttatacagagttctatggctttgcatttccttttgtgcaccccatttggcttctgtccacatgttttattatgaaaggctctcctttttatcatttctgaattattttcacattacattttgattacttctttaacctagcattctatcaaaaggtatgcttaaatttccaaatagacagattatttattcttccttgtttttggattctgtgacagagaaaatgccacgagtttacccaaccctatttcaggtctcttcttttctgggcaggtggaag

SEQ ID NO: 505762 - DNA, 500 bp, Homo sapiens
gttgtattgtctgaggagtttggggagagtatttgagtcagtgtgtgtgtgtgtctgtgtgtatgtgtgttacacaagggtggagattagtggttgggagggctgtatctatgtgaggtatgggggtggtggggtgagttatgtgcatggattgtgaaaatacttaaagccagtctgaataaataaggtaatttcataacaggttttctaattactgacttaggttttgactccttgataattctgcctccatagctataatccaaggtccttcgtgaattggcctttcctctcattccatacgatctyctacactccccagattgctggaactaagagtatgtgctgtcagatccgactgtctgggttcaaatacatgctcatttgcaagctatgtggcactgtgcaacccagttaacttcaccaactctcagtttcctcataaataacatagaaataatatctacatcatgggactgtggattctattagataattgc

SEQ ID NO: 505763 - DNA, 500 bp, Homo sapiens
gttgtattgtctgaggagtttggggagagtatttgagtcagtgtgtgtgtgtgtctgtgtgtatgtgtgttacacaagggtggagattagtggttgggagggctgtatctatgtgaggtatgggggtggtggggtgagttatgtgcatggattgtgaaaatacttaaagccagtctgaataaataaggtaatttcataacaggttttctaattactgacttaggttttgactccttgataattctgcctccatagctataatccaaggtccttcgtgaattggcctttcctctcattccatacgatcttctacactccccagattgctggaactaagagtatgtgctgtcagatccgactgtctgggttcaaatacatgctcatttgcaagctatgtggyactgtgcaacccagttaacttcaccaactctcagtttcctcataaataacatagaaataatatctacatcatgggactgtggattctattagataattgc

SEQ ID NO: 505764 - DNA, 620 bp, Homo sapiens
tggggcctggtgctttcaactcactatgtatttgagttcagataagggtaattctaacagaaacagaccaggtattgtcatgcaatctagataaaatttaatatatatatattaaattcataatatcaagataaaatttgaagsctctcttatcaaagaataaatatgaactgtatcattagcctaaacttatttagaacccataaagctacaaagttcttaacatgctttgttcatggaaactacttactaaatcttccatatgtacttgaatctcatttcagtcatgtgtccaagctaaacacagaccattaaccctcttttaagctaaaatttattataaatacaaaagcatggggcttcatttaaatctatttccgattatgagatcctctgtagaaaaaagaacacatacctttatttttttctttagttatttatccctcccccttcctttaatatagatcattaattctatgaataccactccagttcagaccttccacttctactagatcagaggttcttaagctgagatctataatatggaggagagactggatttttcactagagatcagggcctggaaacaagacagtaacattgattacaagctgctg

SEQ ID NO: 505765 - DNA, 596 bp, Homo sapiens
ctttattctaatttacatcccagtgggatgacccatgaaccagtattcgagaaaagagccagaagaaaactgcagaaaaagcttcagaaacctcagctttgatacataagcacagagcaacagaactactgccaaaagtggggatggcaaatttgggggaggctttaacctctcagcacctcaatttcttccttggccacatggtagtcatgagaagcatctatagtggagccagcctgccttgttcaaattccaactcyatctctctctagctaaggtagagcgagggttttcttgggtaaagtattgaatgccttagcatctttgggcctcattttcttcatttgtaaaatgaagggtagtaatagcccctgcctcatagagtcattgttaagagttaatatgttcgtatttgcaaaatgccttagagtggttctggcacatagtaagcacggtctgagtgctatttctataatcattattattatgtagtatgtgcctaatgaatatgtacataaataaacatagtctataaccagaaggcatttttgcaatttctttatttaatttgcattaaacttaatagagtggagact

SEQ ID NO: 505766 - DNA, 604 bp, Homo sapiens
aacaacactgtgataaggtggggtgggccaagccatccttgtacccactttggtatgaagcccttgcccckccatagctgaacatcttagacatcctctttaaatgtctctggacatcagtttcctcatctgtaaaatggggataacaacacttggtttagggatgttcacgggatggaactcaaaaatgtgtgaaaggcattattacagttctggggacaacatatgtgcctaataagaaatggtcattactaatggggcattattacagttctggggacattgtatgtgcttaataggaagtggtcattactaacaggtaattttttaacataatttttgtagcaatttatctaatacactcacagaggaattcacccaaaatactgctttttctcccttcaaatttaaatgtttcataattttattataacacacattttatttcagagtaaatatcatcttctgccctaaggctgtttactagaaattaaaatatttttcaaaaataaatgttctgtatatattggcacagtaaactttatcatttgtgctagatttgccctagagtacaagtttacacagctaaaggagaaagcagtaa

SEQ ID NO: 505767 - DNA, 613 bp, Homo sapiens
tgcaacccaagactcccacacactttcatccacagcagcttctgttgtgctcctactggaagcacaggctgtggaaaaagagcaagagacaaatggtctgagagaaaaccatcaacaaaataaatggtggttccccctgggctgtgggtatctgggaggttctcatggaggataagcagatcatgcyggcttatcagcatgcttcccttggcaagagtttttactcagacatatgatgaggttaaatccacaaaatccacacagagctcttcaaaggaaggactgtgaacaggtgctggtctacaaattgactgttaccagttcataaagagataagtatggagataatgagtaaacatttagaaacttttatggctatttgacatgactacaacattcaagcacaggattagtggatttgtcttgctgaacatggtagagatgaaaaatactggtctgcaacagcttggaaatgaaaacaatgacaaacaaaacagcaaacttatccttcaaccacagctagttgcaatagcagtactgtagacagcatgaggtagaattggattttgatggtttattctcagcatgctttgagtgccagccattttcctgc

SEQ ID NO: 505768 - DNA, 591 bp, Homo sapiens
ctatgtgagttcatgtttaaatgatagaagtactgtattacctggtaatcaggcctctgattttttcagactttcccaaatattgaatccatcctctactttgtgtgtctatgaatactaacyatgtactgtgctgctagattttgtcggtacctttcagtagaaacaaagaagcctgtgaaactacagatgttttaatatccaattttaatagatatgttgccatcaagttttaggaagttttcaactcttttcagttcaccaccaatttacaaattaccatagctagtattttctgatcacttttccatctgctgcatactattctcagctcattacatatattaacacatgcaatcttcacaagaaccatatgaggtaggcattattatgatccctacttaagaaatgggaggggattcaaaatggctgattagatgcatctcttattcacctcctccactaagaagaaccaaaatagtgagtatatagttgtactttgaatagatcatccaagacagaacactgaaatttaatagaaaagtgacagtaaacacctaaagcaagaaaagggaaggaagtgaggcagcc

SEQ ID NO: 505769 - DNA, 497 bp, Homo sapiens
tccaatgactagtgcctgtagttctaataattgccttctcatatgtaggaagacagccaaaagatgctctaacactgagtaagrcctgccaagcgatggactagttatttttgctgtttttgggcctttgctccctctctctctgccctgtggaagggaatacccgggtcccatgctgagtacccagacatctgtggtggctgatgctgatctagcccttgctaagccagaagggaggaagagaggcagctgtgtgtgtttgtgtgtgtgtgtgtgtgtgtgtgtgtgtgtgtgtgtgtgtaggttcgcctttcaccctccccacttcctctgcagccctcccctgctctctgcggctggtggcttagtgcatgaactgattaggtaacaacagagcaccttccctccctgtttcctcccaatgcatttgggccacagcttttgaaggcgcccagccctgccactatcccgcctttatcacaggctgtatggggctt

SEQ ID NO: 505770 - DNA, 497 bp, Homo sapiens
tccaatgactagtgcctgtagttctaataattgccttctcatatgtaggaagacagccaaaagatgctctaacactgagtaaggcctgccaagcgatggactagttatttttgctgtttttgggyctttgctccctctctctctgccctgtggaagggaatacccgggtcccatgctgagtacccagacatctgtggtggctgatgctgatctagcccttgctaagccagaagggaggaagagaggcagctgtgtgtgtttgtgtgtgtgtgtgtgtgtgtgtgtgtgtgtgtgtgtgtgtaggttcgcctttcaccctccccacttcctctgcagccctcccctgctctctgcggctggtggcttagtgcatgaactgattaggtaacaacagagcaccttccctccctgtttcctcccaatgcatttgggccacagcttttgaaggcgcccagccctgccactatcccgcctttatcacaggctgtatggggctt

SEQ ID NO: 505771 - DNA, 573 bp, Homo sapiens
aagtggctggtgctctggctccaaaagagtgaggcctggggtcttgggtacccccgagggatgtgaggaagcagagcgatgtttctattgcagaagaagcttgaagctggaggccactattatgctgctgctagaataatgctagcagcaactagaaaacatgaaaatagtccctcatacctttatttttctttccaatctccttcaaataaaaaataaaacctaaatgaaagccagaatgcaagggcatatggaaaatgtaatgtatagaaaactagtcctggcctcacagagccaggtacagaaaggggtgcttgcagcagagagacaacagccagctcatcttattctttactgycttcatagctcagatttgttttcctggcagccttcacttagatgtctaccaggtgtctcaaatatcaaaatgttgcaaaaccaaagagatttttgtttttcacccccaaatatgcttttctcatgtcagtaaatggtgctataatccatccacctatttggtgcaaaatctagtcgtcatttttgacacctctcattctcttgcattccaaattt

SEQ ID NO: 505772 - DNA, 518 bp, Homo sapiens
tcccccatctccccttcagttttctttcctttccttttctattttccttcctttcttctctcccatttctttcttcttttttctytcccttttctctttactttcccttttttctttctttctttcctttcctttttcttttctttccttactttttttctttcatttcctatccttttctttgcctcttttcctttttattttttgccactctcttcctgcttctacaagcgaagtaacttagtatgtagtatcttaacattttaacaaaggccctttccattgcattgttgtctgagttgtctgagttgtctcaggtggctaatgataggaatgaccccatttcaagaagtaattcaacccttatatccgtgaattggccttctttctagaaaagaatataaacatcttaaatatttaatacgtatgattccatacaagagtcatgtaatgcatttctgggagtatgatttattcataacaggccagcctgtttaagactgggtgcctactgtaaa

SEQ ID NO: 505773 - DNA, 504 bp, Homo sapiens
tggggcgatcagaagattcattccgctgctggaggcctcctcaggccttcctggaaaggccaaacagatagcggtgataggaatctagaaaaatctcatgagagggactggcagacactaacttgttcaccaaaccccacaatgccagatctctccgctctctctgccagagagcagctctcttcttcaaggcgattttaggacaaatttgcagcagcttatacatgtacggatcttgttaactcaagataygtatgatgcaggcaggaatcagagagagacaggtcgggaagggtctccataaatctcatgccatgaaatcacacatttgtcactgagggaagccaaggaggtcttgctctgtcacccaggctaaagtgcagtggtgcaatcatggctcactgcagtctccaactcctgggctcaagtggtcctcctgcttcagcctccccagtagctgggactataggcatgcatcaccacacccagctacttttgtatttt

SEQ ID NO: 505774 - DNA, 615 bp, Homo sapiens
gcccataaagtcttatttatttatttatttattttgaagatggtcacagaagttatcctgagtagcaaatttgaaaatatgagtttttccatgaaatcccttttggctttacattgatcaaatggcctttattaaaacgaacaaattctaccaaatccatctgatcccctcacacatggtaagaatacatgagataatgtctgcagaactgctccaaaaagttaaaagtggtgcagccagatgaggggttaccattccccaacaaacctttcatcttcatctccctgtcttaataaacatgacacgtgcgattaggatcgggtcaggggattttaggcattcccttccttgtgcattttccagccttcaggctggaaascagagccctttagaggtgtgaaggacagcgcgtacgtttccgacttggacaagcctggctggggtcggctaggtatcacatactggctgtgcgaacctgggactactcacttagcctcggctttcttatctgtaagacaggtcatcagttcctccttgacctctccatgtgcctgtgaggtttcaaggttaccttgaatgcgccccagcccccaggggcacgatcagtgtcagccc

SEQ ID NO: 505775 - DNA, 469 bp, Homo sapiens
tgctcaggaggctgaggcaggagaattgcttgaacctgggaggtggagattgcagcgagctgagatcaygctattgcacttcagcctgggcgacagagcaagactctgtcccccaaaagaatcagataggaaagaaactgccctgggcttggagtccttgcgttctccaagggcttcacccacttgccgcggggtgggggacggggggtgagttctgcctggagctaaggagttagagggccccagttcaaactctctggcatcttctcgacatctctttaccaagatctgcctcatttggcctctacccatctctctgatgtcatctccccacccttgccccccattcactctgctccagccataacggatggcctcgttccaacctcagggctcttgcacttgctgtggccttttgtggaacctcctgtccccagatcttcgcatgactgagtccatcctgtttttc

SEQ ID NO: 505776 - DNA, 209 bp, Homo sapiens
acccctccccaccaacatggggctccaggtttcagtgacctgaaagggcaaagttgtaagggtcagtctgggagagaagccttatgggcccatgccagtccacagmtggggcatgagggtggagagatggcagccagtgcacacgcctgcacaatggttgccccagctcctcctccccagcttcctcactgggtctcaggccagcctgt

SEQ ID NO: 505777 - DNA, 429 bp, Homo sapiens
gctgctcctgctgcctccacgggttttctcacagatgtgccttgtcttccctctggtcttggctcaagtgatggctcctcagagaagccttccttgcccgcccctccaaagtgacccccccccgtcgccctgccatcccagggtttgatcatcttcatagctttcaccgcctctgaaattagctccctcgtcccactgctcatcggcaggtgtccggggcctgctgagcaccctgggcatctctgccacccgtctgggtccctggtaaggagcttgcaaaggaagagggggctgtgcgtttagctctgcagggggccccgaaccctcccaaaagaggctggggtatcccccttgacatccaggcacacgcccccaacactctgtgccrgggcggagatggcagattctgcctccatgccctgtggtctg

SEQ ID NO: 505778 - DNA, 576 bp, Homo sapiens
ctagaactttcttgtaacaaaaaaaaatcgattcaaataaaaagtgagctaaataagctctaaggaaggagtgcaatggtgtccagaagcaattgcacagttaaaacagtaaagagatggcatgaaattcatggatcacaaatgctaagggaagttttaaaggattggtgaggaagtgaaggtcagagaagacaggggctgcagagtcccggatgtcaggttgaccttaaaagatgcaacagttcattttattaattctttttttttctgcattgcacatctatcatgagtgaaacgccgtgctatgtgcaaggactaccagcagaccaaaagygaagccagtgaggcccaggaaccaccaatacccccggtactgagcaagaagggtgagcaagaagagttagggaagaggatttttgatgaagcttaacaccatggcagtgataagccgccaaaagcctatcaccttctaggaaaagggtaatattttatttacaagtatatttatttgctggtatttacatagcagttactttacatgaaacactaagaaattacaaacatacattcattaaa

SEQ ID NO: 505779 - DNA, 520 bp, Homo sapiens
gggcatgtctcctttgttgggtggtacacaaaatgaatgtgtttcagaataagggcatcacgctctgcttggagcttttgtaatgctttaaatcgctgttcctctcccagaacatcctgaataacacccatcttctccttgctgggcttagcatccagctccagttcataaaacaattctgaatattccaaaagcaactcctgaaattcttcctttgctttatctataatttgcttttggtgtttgccataaatatccatgtatacagattcctccagccactggtagaaatcctcattcataataaaactacgggcctcttcccaaggctttccgggagttatgaaaggagaagtctccaggttttctttaaacgcccttcgcatctcaactcttttcctttcgttcctcagcttctctaagtgggcctcgtatagctgctctgcagggacggtatccattaaatcaaagggaatccgttcgttttccatgttgwcaatgtgactggtggcatcccatg

SEQ ID NO: 505780 - DNA, 579 bp, Homo sapiens
cttagcctcccaaagtgctgggattacaggtgtgagccaccgcgcctgaccttttgccatctctttgcatcgawctttgcttttgtttctctctgtgtgtctccttgcctctctccctgtcactgtctctctctctcccctgcctcccccttggtctctttttttgctgtctctttctgatgaccttgttcccatctctgtgcgtgtgtggctctctccctgcccatctcttaccatctctgccttcctctcccaggtcttaaacgaatatttccacaatgtctgtgaactggacctggtgttcaacttctacaaggtaggctcctggtgaagaggaggctgaaggagccagaggagggggacgggggggacccgtggtgcactagccacccggagcctctgctgaggtctgtgtcccagctcgaggggcatcagagccccagcttccagggtccgggccagcatcctggggggcctcgtctcaccccagggtctcccctcacacaggtttacacggtcgtggacgagatgttcctggctggcgaaatccgagagaccagccagacgaaggtgctgaaa

SEQ ID NO: 505781 - DNA, 519 bp, Homo sapiens
acataggaaaagaacttgggcaaaggcaccactagccatagaggtttccagccagaaaaatgacactccaaagatcctgtaacaaaatcacaacaacgaaaacttttttcagtgtgatatagaaataatctccaaggatattatcaataatataaaataaccttacaaattacagctattttttatatttcaaataatttctattgttgaaagaagatactaataaatgtactttaagataagtaattagataaatatattaaaacttgacagcaaagttcatatayttacttaaaaacagtacatggccaatgcattatatgactataggtagtaagtaattataaatattaagtaagtaaattaaacctgatagcaaagttcatgtgtttacttaaaagcaatacatggccattgcattatatgactataaataggctatatgaaatatgttatttatgaatagtgtctgtatggttacatattacatatacttcatgtttttattcttgataaaat

SEQ ID NO: 505782 - DNA, 476 bp, Homo sapiens
cggatgtagaaacttaaacaaaaagacttgtttatttcctctttggggattcttttctcccactatgtgtatcagaggctaattgctgtggacacgcacgtgcacacacacacacacacatacctgcacacaccagcaccrgcagtctctgctcttgtactcacatttcatcctgaggatgcgggtgcctctagaacaagagcccacagtcaatgcggagtagagtttggtgaggagccagcaggccggtgggcccccgtcttgccatgagtggttctttaggctggttctcggcgggaatcagagtctgcgtgatttctgccatggcttcccagaacctagttgtcccgtctccaactgcagccttctacgtgcaacaagggaatgtgggcttctttgaaacaggcttcttagagcaggagtgtaggcagccaagtgtgaagggtgtcagccggggtggcacgccctgggggaag

SEQ ID NO: 505783 - DNA, 492 bp, Homo sapiens
tactcacttcacattgcttactttccmccggccacagcaagatcgatggtcaaccttcccaaccttaaatgggcagagaagtgcactcctcccgtagaggtggagtgaggagagaagattcactgaactataacaaaatctagtacaatcacaatctactttagtctattataaatattctcaggaaaattaaaagggagtaagattcttgtgacaagccacagaatactgattcctactgggattgcttttcttttgggcatctgtgtcattatttaaaaaaaaaaaaaaaagcaagcctggctttcaacatttgagaaggcccagaatttaaagctcagtagcagatattctctatggctggtgttgtgggggaggctcaacagtggtccgtgaatacacaagttcaagatatacaatccaaatggacaaataagagatgcattcagccaaatgattattccagtaagaaagaaaaaattgtcttcaatg

SEQ ID NO: 505784 - DNA, 492 bp, Homo sapiens
tactcacttcacattgcttactttcccccggccacagcaagatcgatggtcaaccttcccaaccttaaatgggcagagaagtgcactcctcccgtagaggtggagtgaggagagaagattcactgaactataacaaaatctagtacaatcacaatctactttagtctattataaatattctcaggaaaattaaaagggagtaagattcttgtgacaagccacagaatactgattcctactgggattgcttttcttttgggcatctstgtcattatttaaaaaaaaaaaaaaaagcaagcctggctttcaacatttgagaaggcccagaatttaaagctcagtagcagatattctctatggctggtgttgtgggggaggctcaacagtggtccgtgaatacacaagttcaagatatacaatccaaatggacaaataagagatgcattcagccaaatgattattccagtaagaaagaaaaaattgtcttcaatg

SEQ ID NO: 505785 - DNA, 468 bp, Homo sapiens
actgttcttatctaacttgtctctcccttgaacaaatcctattttctttggtcctatcatccaaagatgaagcgccctggttctttttttgaggttgaaacatcttcaatcatggactacccagaactgtcttgacattttttcactcttctgggcttcctttttccctctatgtctccatcattggcccctcaaggacatggaaggataactagagtctggagacctggctcagtgggggagccccttggaacatacctggattgggcttacctggatctgtacaatgtccttcttgggccgatagccataatactcctcttggcrtttcatgaacttccggaagtgctcctggatgaggaatgtggcgtagaacttccccactgtcacctcatcatctgcagaggagccaacaagagatgccctgaaggctagtgggaatctgacactggattcagagtgggagcc

SEQ ID NO: 505786 - DNA, 564 bp, Homo sapiens
agggctccttcctcagagactccagacttttcctcagccattcctctcacccacaccccacctcaggcatccccagtgctgatccttccacccctatacccaactcaccctaaggttcaccccacaggctggcacagcctaagggctttctgttgagcagtgggcagttcagaagaaagccctatgcatgggtgagcccctagctttgggaccagtcccctgctgggatccctcgtggtcagatcagccagcmcttgggtgacatcccaccatggctcagaaagaagaatgctcatctttctctcttttccactgtgtccctcccaggatgccacttgggcaactgttttttgattttggcctctgactctcggatcttctccaccctccttcgttgcagcaaccttcagctacagacccctggcaaggcagcctctggagggatcggcttctaaggtcttgaatgtggacctctctggctggaactgcctccctgctcctttcatccccttcataaggcaggtcctgctgctgtttctcattccacctccaaaccctcatccc

SEQ ID NO: 505787 - DNA, 564 bp, Homo sapiens
agggctccttcctcagagactccagacttttcctcagccattcctctcacccacaccccacctcaggcatccccagtgctgatccttccacccctatacccaactcaccctaaggttcaccccacaggctggcacagcctaagggctttctgttgagcagtgggcagttcagaagaaagccctatgcatgggtgagcccctagctttgggaccagtcccctgctgggatccctcgtggtcagatcagccagcccttgggtgacatmccaccatggctcagaaagaagaatgctcatctttctctcttttccactgtgtccctcccaggatgccacttgggcaactgttttttgattttggcctctgactctcggatcttctccaccctccttcgttgcagcaaccttcagctacagacccctggcaaggcagcctctggagggatcggcttctaaggtcttgaatgtggacctctctggctggaactgcctccctgctcctttcatccccttcataaggcaggtcctgctgctgtttctcattccacctccaaaccctcatccc

SEQ ID NO: 505788 - DNA, 576 bp, Homo sapiens
gctccttcctcagagactccagacttttcctcagccattcctctcacccacaccccacctcaggcatccccagtgctgatccttccacccctatacccaactcaccctaaggttcaccccacaggctggcacagcctaagggctttctgttgagcagtgggcagttcagaagaaagccctatgcatgggtgagcccctagctttgggaccagtcccctgctgggatccctcgtggtcagatcagccagcccttgggtgacatcccaccatggctcagaaagaagaatgctcatctttctctcttttccactgtgtccctcccaggatgccacttgggcaactgttttttgattttggcctctgactctcggatcttctccaccctccttcgttgcagcaaccttcagctacagacccytggcaaggcagcctctggagggatcggcttctaaggtcttgaatgtggacctctctggctggaactgcctccctgctcctttcatccccttcataaggcaggtcctgctgctgtttctcattccacctccaaaccctcatccccttggtccagattct

SEQ ID NO: 505789 - DNA, 591 bp, Homo sapiens
gcagctgtgggggtgtcgagtactccctcctgcctgtgggagctgcaccgtggagtctagcttgtcaccctccggaggcagagcccctcctccctgcctcctcttggtctagatggacagccatggcagcggaggctgcagagctgagcaggtgatactgggcagcgaccctgctgcgggcagcgtccacaccccacagctctttactgcatttatttaacaagcgacattgagccagcaatctctgctgaaaagtgctcagccctggagagagaactgtgaacaacgtggacacagctcctgctttgtggagcttggtgtctgactggggtaaaaataaacaagcagttacaacacagytacgatccctactgtaacggaggagagagggcggccacatttctgggccaggctacagagagtttgggggtgttcagggaaagccttttgcaggaagcaatagcaaagctgaggtttgaagggtgactagagctcagtcaggtagagggctcagaacatttccagagagaacagtacatgtgagctcagaggtgagagctccctctgggtggggcgagtaggagacttggg

SEQ ID NO: 505790 - DNA, 625 bp, Homo sapiens
tcctgtctagaacagaagctttgcctgagcctagcccctaagttatgattgctgagaagttctccccctcatcctgctgttttttatgacacttacgtaatcacagattatatttagtctacagcccaaggttggtgagatgggaacyacccagcacagcgggatctccttggaacctaaatccagtgatggaatcttattgtccacagtcttttgtggtatgtgctaccaccgaagatcctctcctaacctatcatgtgttcaatacgtctcagctcctagacttgctgaagccgacggaataaaagaacctctcaacactggggccaatactgacatgatgtgaggcttccccctgctggccaaagaagcctctgccatcgaggtcggcctcttacattaaggttcaggatggattggggcacaaaggcaagcaaaagacaccctacaaatttggggtaccctcttccaatccaacctggaacctgctgacattgtcctcccagtacctctacacccagggatggcagtggccgccactacctggaaaacacatggctgttgctatggttgctgttgccataggcgacattggcgttggcattgttggtattggcacgagcca

SEQ ID NO: 505791 - DNA, 620 bp, Homo sapiens
tgcctttgctcctcttcaaagtcatcctcattataaaaagctgtccttcgaccttgatttctagttctcatggggggttcaragcctttgagttcttcaaactcttcttcctcatctataggatcatctatcttttttcgggtacttctccttaacactttgacacttgcagggactaggagatctgcatctaatttttgggtcttcatcttccttttgggcttcctacctccacgattctttttctgtaacaaatcttcctttacattattagtttcagaaagaaaattgcatgttgaagaaggaagtacttcatctctgatgggatgcacattattttgctctaaatcttctggctttgcatactgtagctttttgggctttctaccccttttcttgtgtataatttcaccactattggtattaacttctactttaggtttccttccaggtcccctcttcacaagttttgatggctgtcctccatggccatttacttgaatggttcctggtacaagagcgttgttcttacaatctcctaaaagggaacaacagtacacttaatatatggagtttctttttttgtttgactctcaaacttgtcagtaaggccccattgg

SEQ ID NO: 505792 - DNA, 620 bp, Homo sapiens
tgcctttgctcctcttcaaagtcatcctcattataaaaagctgtccttcgaccttgatttctagttctcatggggggttcaaagcctttgagttcttcaaactcttcttcctcatctataggatcatctatcttttttcggktacttctccttaacactttgacacttgcagggactaggagatctgcatctaatttttgggtcttcatcttccttttgggcttcctacctccacgattctttttctgtaacaaatcttcctttacattattagtttcagaaagaaaattgcatgttgaagaaggaagtacttcatctctgatgggatgcacattattttgctctaaatcttctggctttgcatactgtagctttttgggctttctaccccttttcttgtgtataatttcaccactattggtattaacttctactttaggtttccttccaggtcccctcttcacaagttttgatggctgtcctccatggccatttacttgaatggttcctggtacaagagcgttgttcttacaatctcctaaaagggaacaacagtacacttaatatatggagtttctttttttgtttgactctcaaacttgtcagtaaggccccattgg

SEQ ID NO: 505793 - DNA, 615 bp, Homo sapiens
ccataaaagaaaattacaaatccaacttactggctatcatttttccagattgtgctgataaaaagcaggctttgttattcactaaatgttcttatgagcagggcctgctgtgttattcatgaggcctagcataaaatgaaagcacaggacctcttgtttaaaatgctgggaaaaaaacagtgctgttgaagtcctaaaatataaagctgtttcctttcttccatgatctctctcttgacttcttgtggtgtcttttatttgttacttgtgacaatctaagttttaaaaactctgtttttttattttttaaattaaaaaaatagattcaggggcccatgtgcaggtttattacatgggtatattttgtagtagtggggtttggacttctagtgtacccatcacctgaatagtgaacattgtagcaawaggtactgtttcactcctcactccgttcccactttcctccctcttggagtccccagtgtccattatttccctctgtagctccatgtgtacccattgtttatctcccacttataagggagaacatgcagtcttgggttttctgtttctgagttattccacttaggataatagcctccagctccatccatg

SEQ ID NO: 505794 - DNA, 642 bp, Homo sapiens
ctctttgctggagaagttctcttaaagtgatgcctgaatggtgtagcacacttcttctaaaatatgcaacatacaaaccaagacccaaaggatactacctcatggctatacccaattactgcatcagttggaaacttcttcagtgatatgtactcctttacatcaaatcctgatatggtctagtcatttacaaaaaataataataataataaggcaagttaacttatgcagcatgcycaatggtggagtaggtagagcacaatcacaataaaagctactcaattatcatataccactgggccatatagtgaaaactcccagatttctcacaactgtctctactagccaagctagaagacctcagttttgctatctgcttgtccattttcctcagaggcctctggttttcggggtggggaagggtgtctttcttttccattatcctccttagatacctctgaagtgggactacacagctttcacaacctacttcccactaatgtaggtttacagatttgcaaattgctttcaaggtcagaaaatgtcaagtttttgcaggcctgatgtatgggttgtttggcaataatattccctcaaaatcatacgaggcttctagtcttttagattccaagagttaagtac

SEQ ID NO: 505795 - DNA, 445 bp, Homo sapiens
attccctctatttctacttatgaacttgcctgacttctcctctctcttgtggggccttctacaaaaggagcagccaacagacattgatttttttttcaccatttcccctgaagttattggctcacttggcccataatctgcctgtccagttatcagaggcacattgtctacagctttgccacaccattaataaaaatgcctcccccttacattctgcaatgtctatatacttgaaaccatcaaacaaatgcagctatttaagttcccattatgtgcagtactccatttcatataccaaattgtatactagttaagatacaggtttagctgcatgaaaatagaaactcaagctaacatacatttagagagaagacagtttctctctcccatgacagcagcaggatggaggaagyggggataagcagtacagccccttcccttaagg

SEQ ID NO: 505796 - DNA, 612 bp, Homo sapiens
tcctcttacaggcctggagatttggacaattgccaaggctttctgagcttcagttttcaccctgtaagaaaaggaacacagggccaggcgccgtggctcatgcctttaatcccagcactttgggagrccaaggcgggcggatcacaaggtcaggagatcgagaccatcctggttaacacggtgaaaccccatctctgctaaaaatacaaaaaattagccgggcatggtggcacgcacctgtagtcccagctactcaggaggctgaggtaggagaatctcttgaacccaggaggcggaggtttcaatgagccgaaactgcaccactgcactatagcctgggcaacaaagcaagactccatctcaaaaaaaaaaaaagaaaaaagaaaaggaacacagtagccagcagtgtgggagtgttgcaagagggacttgctataatctccatacacagtaccagctcatagacactctcaataaattgttatgggtgtgatttttatcaacagcaaagttcctccttcctcccatgagtaccctctcttctccctcctctcctctattctctagtcacccctttgactccccaaaatgttgaacaggctagtgtcatag

SEQ ID NO: 505797 - DNA, 612 bp, Homo sapiens
tcctcttacaggcctggagatttggacaattgccaaggctttctgagcttcagttttcaccctgtaagaaaaggaacacagggccaggcgccgtggctcatgcctttaatcccagcactttgggaggccaaggcgggcggatcacaaggtcaggagatcgagaccatcctggttaacacggtgaaaccccatctctgctaaaaatacaaaaaattagccgggcatggtggcacgcacctgtagtcccagctactcaggaggctgaggtaggagaatctcttgaacccaggaggcggaggtttcaatgagccgaaactgcaccactgcactatagcctgggcaacaaagcaagactccatctcaaaaaaaaaaaaagaaaaaagaaaaggaacacagtagccagcagtgtgggagtgttgcaagagggacttgctataatctccatacacagtaccagctcatagacactctcaataaattgttatgggtgtgatttttatcaacagcaaagttcctccttcctcccatgagtaccctctcttctccctcctctcctytattctctagtcacccctttgactccccaaaatgttgaacaggctagtgtcatag

SEQ ID NO: 505798 - DNA, 496 bp, Homo sapiens
cttgaaatccttacattcttggttattctacctctttggctctcttttctgtttcctacagaattccttttcctctgttcactctttatattttgctcctcaatgttttgctagccttcttttctctccctacattctttccctcttttattttatctgtattgattgcttcacctatcattagaaactgatggttcacaaagctatacctttaactgagatctctgtgacctccaaatgcctacaaaacctctccacttgaatgtataacctgcaattaattgtcaccctcttcactgtagtgttcacaggtacctcaaatttgggctgcaataaaatyaattcatcatcttactacacacagctaaagaaagttcccaattcctcgtatttcttatcctcattcagtgttgaattcacagaaattatcatgattgatagtattatatagtgggaaaaacacttggcgtggagatagattagttatgttaagttg
